United States Patent Application Publication US 2014/0004565 A1 - sequence listing, part 69

SEQ ID NO: 1673939 - RNA, 19 nt, Artificial Sequence
  Description of Artificial Sequence: Synthetic oligonucleotide
ccagugcucgacagaccug

SEQ ID NO: 1673940 - RNA, 19 nt, Artificial Sequence
  Description of Artificial Sequence: Synthetic oligonucleotide
cccggaggccguacggccc

SEQ ID NO: 1673941 - RNA, 19 nt, Artificial Sequence
  Description of Artificial Sequence: Synthetic oligonucleotide
ggugucggcccguguucac

SEQ ID NO: 1673942 - RNA, 19 nt, Artificial Sequence
  Description of Artificial Sequence: Synthetic oligonucleotide
cgaagccuauugagguccc

SEQ ID NO: 1673943 - RNA, 19 nt, Artificial Sequence
  Description of Artificial Sequence: Synthetic oligonucleotide
cguacggcccggcuccccg

SEQ ID NO: 1673944 - RNA, 19 nt, Artificial Sequence
  Description of Artificial Sequence: Synthetic oligonucleotide
gaucggagccaaagcuggu

SEQ ID NO: 1673945 - RNA, 19 nt, Artificial Sequence
  Description of Artificial Sequence: Synthetic oligonucleotide
gagacaccgcgcgcuucca

SEQ ID NO: 1673946 - RNA, 19 nt, Artificial Sequence
  Description of Artificial Sequence: Synthetic oligonucleotide
gggcuugugcgagccacac

SEQ ID NO: 1673947 - RNA, 19 nt, Artificial Sequence
  Description of Artificial Sequence: Synthetic oligonucleotide
gcgcgcuuccaccaaccuc

SEQ ID NO: 1673948 - RNA, 19 nt, Artificial Sequence
  Description of Artificial Sequence: Synthetic oligonucleotide
cgugcaugugcgccgccag

SEQ ID NO: 1673949 - RNA, 19 nt, Artificial Sequence
  Description of Artificial Sequence: Synthetic oligonucleotide
gcaaucuggcuacccauuu

SEQ ID NO: 1673950 - RNA, 19 nt, Artificial Sequence
  Description of Artificial Sequence: Synthetic oligonucleotide
cuccccggucuucaggccu

SEQ ID NO: 1673951 - RNA, 19 nt, Artificial Sequence
  Description of Artificial Sequence: Synthetic oligonucleotide
gcgccgugagaugcgcgcg

SEQ ID NO: 1673952 - RNA, 19 nt, Artificial Sequence
  Description of Artificial Sequence: Synthetic oligonucleotide
uguggccgcgccgguguuu

SEQ ID NO: 1673953 - RNA, 19 nt, Artificial Sequence
  Description of Artificial Sequence: Synthetic oligonucleotide
cgucacgagcacagagcgc

SEQ ID NO: 1673954 - RNA, 19 nt, Artificial Sequence
  Description of Artificial Sequence: Synthetic oligonucleotide
gagcucagguccacgugau

SEQ ID NO: 1673955 - RNA, 19 nt, Artificial Sequence
  Description of Artificial Sequence: Synthetic oligonucleotide
cugguuccgccugcgaacu

SEQ ID NO: 1673956 - RNA, 19 nt, Artificial Sequence
  Description of Artificial Sequence: Synthetic oligonucleotide
ccgcuugaaguccgagcug

SEQ ID NO: 1673957 - RNA, 19 nt, Artificial Sequence
  Description of Artificial Sequence: Synthetic oligonucleotide
ccgcgcgcuuccaccaacc

SEQ ID NO: 1673958 - RNA, 19 nt, Artificial Sequence
  Description of Artificial Sequence: Synthetic oligonucleotide
cucgccgguguggccgcgc

SEQ ID NO: 1673959 - RNA, 19 nt, Artificial Sequence
  Description of Artificial Sequence: Synthetic oligonucleotide
gucggcccguguucaccca

SEQ ID NO: 1673960 - RNA, 19 nt, Artificial Sequence
  Description of Artificial Sequence: Synthetic oligonucleotide
ccgugagaugcgcgcgccg

SEQ ID NO: 1673961 - RNA, 19 nt, Artificial Sequence
  Description of Artificial Sequence: Synthetic oligonucleotide
ccgugcgccgugagaugcg

SEQ ID NO: 1673962 - RNA, 19 nt, Artificial Sequence
  Description of Artificial Sequence: Synthetic oligonucleotide
gccgugagaugcgcgcgcc

SEQ ID NO: 1673963 - RNA, 19 nt, Artificial Sequence
  Description of Artificial Sequence: Synthetic oligonucleotide
cuggugcgucacgagcaca

SEQ ID NO: 1673964 - RNA, 19 nt, Artificial Sequence
  Description of Artificial Sequence: Synthetic oligonucleotide
ccuuauguggaggcccaca

SEQ ID NO: 1673965 - RNA, 19 nt, Artificial Sequence
  Description of Artificial Sequence: Synthetic oligonucleotide
gugccgggucagcgccgcg

SEQ ID NO: 1673966 - RNA, 19 nt, Artificial Sequence
  Description of Artificial Sequence: Synthetic oligonucleotide
gcgaacgcggcgggaucgg

SEQ ID NO: 1673967 - RNA, 19 nt, Artificial Sequence
  Description of Artificial Sequence: Synthetic oligonucleotide
cccggcuccccggugugcg

SEQ ID NO: 1673968 - RNA, 19 nt, Artificial Sequence
  Description of Artificial Sequence: Synthetic oligonucleotide
cagggugucggcccguguu

SEQ ID NO: 1673969 - RNA, 19 nt, Artificial Sequence
  Description of Artificial Sequence: Synthetic oligonucleotide
gaugcgcgcgccggcugaa

SEQ ID NO: 1673970 - RNA, 19 nt, Artificial Sequence
  Description of Artificial Sequence: Synthetic oligonucleotide
ggccgcgccgguguuuggc

SEQ ID NO: 1673971 - RNA, 19 nt, Artificial Sequence
  Description of Artificial Sequence: Synthetic oligonucleotide
ggcacccaagauugggaau

SEQ ID NO: 1673972 - RNA, 19 nt, Artificial Sequence
  Description of Artificial Sequence: Synthetic oligonucleotide
gcgauagggcccacaggca

SEQ ID NO: 1673973 - RNA, 19 nt, Artificial Sequence
  Description of Artificial Sequence: Synthetic oligonucleotide
gggugucggcccguguuca

SEQ ID NO: 1673974 - RNA, 19 nt, Artificial Sequence
  Description of Artificial Sequence: Synthetic oligonucleotide
ugcgugcgccggugccgcu

SEQ ID NO: 1673975 - RNA, 19 nt, Artificial Sequence
  Description of Artificial Sequence: Synthetic oligonucleotide
ggugcgucacgagcacaga

SEQ ID NO: 1673976 - RNA, 19 nt, Artificial Sequence
  Description of Artificial Sequence: Synthetic oligonucleotide
cgggaucggagccaaagcu

SEQ ID NO: 1673977 - RNA, 19 nt, Artificial Sequence
  Description of Artificial Sequence: Synthetic oligonucleotide
cugcgaacucgaguagcgu

SEQ ID NO: 1673978 - RNA, 19 nt, Artificial Sequence
  Description of Artificial Sequence: Synthetic oligonucleotide
ccgagggcccggcgaacgc

SEQ ID NO: 1673979 - RNA, 19 nt, Artificial Sequence
  Description of Artificial Sequence: Synthetic oligonucleotide
gcccgugcgccgugagaug

SEQ ID NO: 1673980 - RNA, 19 nt, Artificial Sequence
  Description of Artificial Sequence: Synthetic oligonucleotide
ccuguguuuagggguugga

SEQ ID NO: 1673981 - RNA, 19 nt, Artificial Sequence
  Description of Artificial Sequence: Synthetic oligonucleotide
gugcgccgccaggugcgag

SEQ ID NO: 1673982 - RNA, 19 nt, Artificial Sequence
  Description of Artificial Sequence: Synthetic oligonucleotide
cagguccacgugaugccuu

SEQ ID NO: 1673983 - RNA, 19 nt, Artificial Sequence
  Description of Artificial Sequence: Synthetic oligonucleotide
ggcccggcuccccggugug

SEQ ID NO: 1673984 - RNA, 19 nt, Artificial Sequence
  Description of Artificial Sequence: Synthetic oligonucleotide
cggacccggaggccguacg

SEQ ID NO: 1673985 - RNA, 19 nt, Artificial Sequence
  Description of Artificial Sequence: Synthetic oligonucleotide
gcucgacagaccuguguuu

SEQ ID NO: 1673986 - RNA, 19 nt, Artificial Sequence
  Description of Artificial Sequence: Synthetic oligonucleotide
gcccggcgaacgcggcggg

SEQ ID NO: 1673987 - RNA, 19 nt, Artificial Sequence
  Description of Artificial Sequence: Synthetic oligonucleotide
cgccgugagaugcgcgcgc

SEQ ID NO: 1673988 - RNA, 19 nt, Artificial Sequence
  Description of Artificial Sequence: Synthetic oligonucleotide
cguguucacccaagcgaga

SEQ ID NO: 1673989 - RNA, 19 nt, Artificial Sequence
  Description of Artificial Sequence: Synthetic oligonucleotide
cgugcgccgugagaugcgc

SEQ ID NO: 1673990 - RNA, 19 nt, Artificial Sequence
  Description of Artificial Sequence: Synthetic oligonucleotide
ccgccaggugcgagccgcg

SEQ ID NO: 1673991 - RNA, 19 nt, Artificial Sequence
  Description of Artificial Sequence: Synthetic oligonucleotide
cgccugcgaacucgaguag

SEQ ID NO: 1673992 - RNA, 19 nt, Artificial Sequence
  Description of Artificial Sequence: Synthetic oligonucleotide
ggcuacccauuugguaucu

SEQ ID NO: 1673993 - RNA, 19 nt, Artificial Sequence
  Description of Artificial Sequence: Synthetic oligonucleotide
gcgggagacaccgcgcgcu

SEQ ID NO: 1673994 - RNA, 19 nt, Artificial Sequence
  Description of Artificial Sequence: Synthetic oligonucleotide
cggcccguguucacccaag

SEQ ID NO: 1673995 - RNA, 19 nt, Artificial Sequence
  Description of Artificial Sequence: Synthetic oligonucleotide
cgacagaacacaagcuuuu

SEQ ID NO: 1673996 - RNA, 19 nt, Artificial Sequence
  Description of Artificial Sequence: Synthetic oligonucleotide
gcccacaggcacccaagau

SEQ ID NO: 1673997 - RNA, 19 nt, Artificial Sequence
  Description of Artificial Sequence: Synthetic oligonucleotide
gcgcccgagggcccggcga

SEQ ID NO: 1673998 - RNA, 19 nt, Artificial Sequence
  Description of Artificial Sequence: Synthetic oligonucleotide
caccgcgcgcuuccaccaa

SEQ ID NO: 1673999 - RNA, 19 nt, Artificial Sequence
  Description of Artificial Sequence: Synthetic oligonucleotide
gcgcgccggcugaagcccg

SEQ ID NO: 1674000 - RNA, 19 nt, Artificial Sequence
  Description of Artificial Sequence: Synthetic oligonucleotide
gccgugcaugugcgccgcc

SEQ ID NO: 1674001 - RNA, 19 nt, Artificial Sequence
  Description of Artificial Sequence: Synthetic oligonucleotide
cggcgugcgcccacuggug

SEQ ID NO: 1674002 - RNA, 19 nt, Artificial Sequence
  Description of Artificial Sequence: Synthetic oligonucleotide
ccacaccucagaugccagu

SEQ ID NO: 1674003 - RNA, 19 nt, Artificial Sequence
  Description of Artificial Sequence: Synthetic oligonucleotide
ccucggcgugcgcccacug

SEQ ID NO: 1674004 - RNA, 19 nt, Artificial Sequence
  Description of Artificial Sequence: Synthetic oligonucleotide
gcgcccgugcgccgugaga

SEQ ID NO: 1674005 - RNA, 19 nt, Artificial Sequence
  Description of Artificial Sequence: Synthetic oligonucleotide
ccgugcaugugcgccgcca

SEQ ID NO: 1674006 - RNA, 19 nt, Artificial Sequence
  Description of Artificial Sequence: Synthetic oligonucleotide
ccgccucgaggagcgggag

SEQ ID NO: 1674007 - RNA, 19 nt, Artificial Sequence
  Description of Artificial Sequence: Synthetic oligonucleotide
cgcucgccgguguggccgc

SEQ ID NO: 1674008 - RNA, 19 nt, Artificial Sequence
  Description of Artificial Sequence: Synthetic oligonucleotide
gcggcgggaucggagccaa

SEQ ID NO: 1674009 - RNA, 19 nt, Artificial Sequence
  Description of Artificial Sequence: Synthetic oligonucleotide
ccccgccugcccugcagca

SEQ ID NO: 1674010 - RNA, 19 nt, Artificial Sequence
  Description of Artificial Sequence: Synthetic oligonucleotide
gcgccggcugaagcccgcc

SEQ ID NO: 1674011 - RNA, 19 nt, Artificial Sequence
  Description of Artificial Sequence: Synthetic oligonucleotide
cgcgccggcugaagcccgc

SEQ ID NO: 1674012 - RNA, 19 nt, Artificial Sequence
  Description of Artificial Sequence: Synthetic oligonucleotide
cgccaggugcgagccgcgg

SEQ ID NO: 1674013 - RNA, 19 nt, Artificial Sequence
  Description of Artificial Sequence: Synthetic oligonucleotide
ccguacggcccggcucccc

SEQ ID NO: 1674014 - RNA, 19 nt, Artificial Sequence
  Description of Artificial Sequence: Synthetic oligonucleotide
cccggucuucaggccuuac

SEQ ID NO: 1674015 - RNA, 19 nt, Artificial Sequence
  Description of Artificial Sequence: Synthetic oligonucleotide
gcccggcuccccggugugc

SEQ ID NO: 1674016 - RNA, 19 nt, Artificial Sequence
  Description of Artificial Sequence: Synthetic oligonucleotide
cggcgaacgcggcgggauc

SEQ ID NO: 1674017 - RNA, 19 nt, Artificial Sequence
  Description of Artificial Sequence: Synthetic oligonucleotide
ccggacccggaggccguac

SEQ ID NO: 1674018 - RNA, 19 nt, Artificial Sequence
  Description of Artificial Sequence: Synthetic oligonucleotide
gguccacgugaugccuuau

SEQ ID NO: 1674019 - RNA, 19 nt, Artificial Sequence
  Description of Artificial Sequence: Synthetic oligonucleotide
guguggccgcgccgguguu

SEQ ID NO: 1674020 - RNA, 19 nt, Artificial Sequence
  Description of Artificial Sequence: Synthetic oligonucleotide
cgcgcccgugcgccgugag

SEQ ID NO: 1674021 - RNA, 19 nt, Artificial Sequence
  Description of Artificial Sequence: Synthetic oligonucleotide
cgccucgaggagcgggaga

SEQ ID NO: 1674022 - RNA, 19 nt, Artificial Sequence
  Description of Artificial Sequence: Synthetic oligonucleotide
gccgguguuuggcgagguu

SEQ ID NO: 1674023 - RNA, 19 nt, Artificial Sequence
  Description of Artificial Sequence: Synthetic oligonucleotide
cgcuuccaccaaccucaca

SEQ ID NO: 1674024 - RNA, 19 nt, Artificial Sequence
  Description of Artificial Sequence: Synthetic oligonucleotide
gcgcccacuggugccgggu

SEQ ID NO: 1674025 - RNA, 19 nt, Artificial Sequence
  Description of Artificial Sequence: Synthetic oligonucleotide
cgcccgugcgccgugagau

SEQ ID NO: 1674026 - RNA, 19 nt, Artificial Sequence
  Description of Artificial Sequence: Synthetic oligonucleotide
cggaggccguacggcccgg

SEQ ID NO: 1674027 - RNA, 19 nt, Artificial Sequence
  Description of Artificial Sequence: Synthetic oligonucleotide
cgccgcgcucuggccaaag

SEQ ID NO: 1674028 - RNA, 19 nt, Artificial Sequence
  Description of Artificial Sequence: Synthetic oligonucleotide
ccggcgaacgcggcgggau

SEQ ID NO: 1674029 - RNA, 19 nt, Artificial Sequence
  Description of Artificial Sequence: Synthetic oligonucleotide
cgcgcgcuuccaccaaccu

SEQ ID NO: 1674030 - RNA, 19 nt, Artificial Sequence
  Description of Artificial Sequence: Synthetic oligonucleotide
cccggcgaacgcggcggga

SEQ ID NO: 1674031 - RNA, 19 nt, Artificial Sequence
  Description of Artificial Sequence: Synthetic oligonucleotide
cgcgcgcccgugcgccgug

SEQ ID NO: 1674032 - RNA, 19 nt, Artificial Sequence
  Description of Artificial Sequence: Synthetic oligonucleotide
cggggcgauagggcccaca

SEQ ID NO: 1674033 - RNA, 19 nt, Artificial Sequence
  Description of Artificial Sequence: Synthetic oligonucleotide
cgccgcacacgaacggcuu

SEQ ID NO: 1674034 - RNA, 19 nt, Artificial Sequence
  Description of Artificial Sequence: Synthetic oligonucleotide
gcgugcgccggugccgcuu

SEQ ID NO: 1674035 - RNA, 19 nt, Artificial Sequence
  Description of Artificial Sequence: Synthetic oligonucleotide
ccccggucuucaggccuua

SEQ ID NO: 1674036 - RNA, 19 nt, Artificial Sequence
  Description of Artificial Sequence: Synthetic oligonucleotide
cggcgggaucggagccaaa

SEQ ID NO: 1674037 - RNA, 19 nt, Artificial Sequence
  Description of Artificial Sequence: Synthetic oligonucleotide
cgccgguguggccgugcau

SEQ ID NO: 1674038 - RNA, 19 nt, Artificial Sequence
  Description of Artificial Sequence: Synthetic oligonucleotide
ccgcacgcguagggccgcu

SEQ ID NO: 1674039 - RNA, 19 nt, Artificial Sequence
  Description of Artificial Sequence: Synthetic oligonucleotide
aguacgguuuaucaaagcc

SEQ ID NO: 1674040 - RNA, 19 nt, Artificial Sequence
  Description of Artificial Sequence: Synthetic oligonucleotide
aguuuauaacuccaguggc

SEQ ID NO: 1674041 - RNA, 19 nt, Artificial Sequence
  Description of Artificial Sequence: Synthetic oligonucleotide
uccaccuuauaauaaaggg

SEQ ID NO: 1674042 - RNA, 19 nt, Artificial Sequence
  Description of Artificial Sequence: Synthetic oligonucleotide
uuuaucaaagccaccaucu

SEQ ID NO: 1674043 - RNA, 19 nt, Artificial Sequence
  Description of Artificial Sequence: Synthetic oligonucleotide
acuugguuggaacaggcgc

SEQ ID NO: 1674044 - RNA, 19 nt, Artificial Sequence
  Description of Artificial Sequence: Synthetic oligonucleotide
auauccacccgucuuaucg

SEQ ID NO: 1674045 - RNA, 19 nt, Artificial Sequence
  Description of Artificial Sequence: Synthetic oligonucleotide
uuaaacacacugugaaugg

SEQ ID NO: 1674046 - RNA, 19 nt, Artificial Sequence
  Description of Artificial Sequence: Synthetic oligonucleotide
aagagcguuaaccaaugag

SEQ ID NO: 1674047 - RNA, 19 nt, Artificial Sequence
  Description of Artificial Sequence: Synthetic oligonucleotide
ucucacucaacaaagacau

SEQ ID NO: 1674048 - RNA, 19 nt, Artificial Sequence
  Description of Artificial Sequence: Synthetic oligonucleotide
ugaacucccgcacauagcc

SEQ ID NO: 1674049 - RNA, 19 nt, Artificial Sequence
  Description of Artificial Sequence: Synthetic oligonucleotide
uguagaguuuugcaaaggc

SEQ ID NO: 1674050 - RNA, 19 nt, Artificial Sequence
  Description of Artificial Sequence: Synthetic oligonucleotide
auaugcaucagguggcagc

SEQ ID NO: 1674051 - RNA, 19 nt, Artificial Sequence
  Description of Artificial Sequence: Synthetic oligonucleotide
auuuggauguuccacacug

SEQ ID NO: 1674052 - RNA, 19 nt, Artificial Sequence
  Description of Artificial Sequence: Synthetic oligonucleotide
aaagugucuguauuguuga

SEQ ID NO: 1674053 - RNA, 19 nt, Artificial Sequence
  Description of Artificial Sequence: Synthetic oligonucleotide
caguuuauaacuccagugg

SEQ ID NO: 1674054 - RNA, 19 nt, Artificial Sequence
  Description of Artificial Sequence: Synthetic oligonucleotide
uauaauaaaggguggcaca

SEQ ID NO: 1674055 - RNA, 19 nt, Artificial Sequence
  Description of Artificial Sequence: Synthetic oligonucleotide
uaaccaaugaguccggaga

SEQ ID NO: 1674056 - RNA, 19 nt, Artificial Sequence
  Description of Artificial Sequence: Synthetic oligonucleotide
ucuaucuacgcuucgauau

SEQ ID NO: 1674057 - RNA, 19 nt, Artificial Sequence
  Description of Artificial Sequence: Synthetic oligonucleotide
ucugacccggauaacaucc

SEQ ID NO: 1674058 - RNA, 19 nt, Artificial Sequence
  Description of Artificial Sequence: Synthetic oligonucleotide
gauguuccacacuggaucg

SEQ ID NO: 1674059 - RNA, 19 nt, Artificial Sequence
  Description of Artificial Sequence: Synthetic oligonucleotide
aagacaugaggccaccaag

SEQ ID NO: 1674060 - RNA, 19 nt, Artificial Sequence
  Description of Artificial Sequence: Synthetic oligonucleotide
auuucuuaagcugugaggu

SEQ ID NO: 1674061 - RNA, 19 nt, Artificial Sequence
  Description of Artificial Sequence: Synthetic oligonucleotide
cuugcaauuuggauguucc

SEQ ID NO: 1674062 - RNA, 19 nt, Artificial Sequence
  Description of Artificial Sequence: Synthetic oligonucleotide
aauaaaggguggcacagau

SEQ ID NO: 1674063 - RNA, 19 nt, Artificial Sequence
  Description of Artificial Sequence: Synthetic oligonucleotide
uucgauauuucaccuuccg

SEQ ID NO: 1674064 - RNA, 19 nt, Artificial Sequence
  Description of Artificial Sequence: Synthetic oligonucleotide
aagggcuggucguauauuc

SEQ ID NO: 1674065 - RNA, 19 nt, Artificial Sequence
  Description of Artificial Sequence: Synthetic oligonucleotide
uacgcuucgauauuucacc

SEQ ID NO: 1674066 - RNA, 19 nt, Artificial Sequence
  Description of Artificial Sequence: Synthetic oligonucleotide
uugcugguuacguaguacg

SEQ ID NO: 1674067 - RNA, 19 nt, Artificial Sequence
  Description of Artificial Sequence: Synthetic oligonucleotide
agcguuaaccaaugagucc

SEQ ID NO: 1674068 - RNA, 19 nt, Artificial Sequence
  Description of Artificial Sequence: Synthetic oligonucleotide
uccccaauuucuaucuugg

SEQ ID NO: 1674069 - RNA, 19 nt, Artificial Sequence
  Description of Artificial Sequence: Synthetic oligonucleotide
gauguagaguuuugcaaag

SEQ ID NO: 1674070 - RNA, 19 nt, Artificial Sequence
  Description of Artificial Sequence: Synthetic oligonucleotide
uagaguuuugcaaaggcua

SEQ ID NO: 1674071 - RNA, 19 nt, Artificial Sequence
  Description of Artificial Sequence: Synthetic oligonucleotide
aacucccgcacauagccuc

SEQ ID NO: 1674072 - RNA, 19 nt, Artificial Sequence
  Description of Artificial Sequence: Synthetic oligonucleotide
auauaugccuggcacuugg

SEQ ID NO: 1674073 - RNA, 19 nt, Artificial Sequence
  Description of Artificial Sequence: Synthetic oligonucleotide
ucgauauuucaccuuccgg

SEQ ID NO: 1674074 - RNA, 19 nt, Artificial Sequence
  Description of Artificial Sequence: Synthetic oligonucleotide
agacuuagcauuguccagc

SEQ ID NO: 1674075 - RNA, 19 nt, Artificial Sequence
  Description of Artificial Sequence: Synthetic oligonucleotide
ucguauauucucuuguaga

SEQ ID NO: 1674076 - RNA, 19 nt, Artificial Sequence
  Description of Artificial Sequence: Synthetic oligonucleotide
ucucucacgcugaugacag

SEQ ID NO: 1674077 - RNA, 19 nt, Artificial Sequence
  Description of Artificial Sequence: Synthetic oligonucleotide
uuauaauaaaggguggcac

SEQ ID NO: 1674078 - RNA, 19 nt, Artificial Sequence
  Description of Artificial Sequence: Synthetic oligonucleotide
aagacuuagcauuguccag

SEQ ID NO: 1674079 - RNA, 19 nt, Artificial Sequence
  Description of Artificial Sequence: Synthetic oligonucleotide
auaguagugagcuccggug

SEQ ID NO: 1674080 - RNA, 19 nt, Artificial Sequence
  Description of Artificial Sequence: Synthetic oligonucleotide
cugugaauggcacuggaag

SEQ ID NO: 1674081 - RNA, 19 nt, Artificial Sequence
  Description of Artificial Sequence: Synthetic oligonucleotide
cauagcuguagaaaguuuc

SEQ ID NO: 1674082 - RNA, 19 nt, Artificial Sequence
  Description of Artificial Sequence: Synthetic oligonucleotide
uuaaccaaugaguccggag

SEQ ID NO: 1674083 - RNA, 19 nt, Artificial Sequence
  Description of Artificial Sequence: Synthetic oligonucleotide
auaauaaaggguggcacag

SEQ ID NO: 1674084 - RNA, 19 nt, Artificial Sequence
  Description of Artificial Sequence: Synthetic oligonucleotide
uuuauaacuccaguggcgu

SEQ ID NO: 1674085 - RNA, 19 nt, Artificial Sequence
  Description of Artificial Sequence: Synthetic oligonucleotide
uguaggugcgucuaucuac

SEQ ID NO: 1674086 - RNA, 19 nt, Artificial Sequence
  Description of Artificial Sequence: Synthetic oligonucleotide
uacguaguacgguuuauca

SEQ ID NO: 1674087 - RNA, 19 nt, Artificial Sequence
  Description of Artificial Sequence: Synthetic oligonucleotide
guuguaaauauauaugccu

SEQ ID NO: 1674088 - RNA, 19 nt, Artificial Sequence
  Description of Artificial Sequence: Synthetic oligonucleotide
uucuaucuugguuuucugc

SEQ ID NO: 1674089 - RNA, 19 nt, Artificial Sequence
  Description of Artificial Sequence: Synthetic oligonucleotide
ugaucuuguagaucuuuug

SEQ ID NO: 1674090 - RNA, 19 nt, Artificial Sequence
  Description of Artificial Sequence: Synthetic oligonucleotide
gauauuucaccuuccggga

SEQ ID NO: 1674091 - RNA, 19 nt, Artificial Sequence
  Description of Artificial Sequence: Synthetic oligonucleotide
uucuuaagcugugagguca

SEQ ID NO: 1674092 - RNA, 19 nt, Artificial Sequence
  Description of Artificial Sequence: Synthetic oligonucleotide
uuggauucacacugcauca

SEQ ID NO: 1674093 - RNA, 19 nt, Artificial Sequence
  Description of Artificial Sequence: Synthetic oligonucleotide
aaagagggacgggaucucc

SEQ ID NO: 1674094 - RNA, 19 nt, Artificial Sequence
  Description of Artificial Sequence: Synthetic oligonucleotide
ugugaauggcacuggaagu

SEQ ID NO: 1674095 - RNA, 19 nt, Artificial Sequence
  Description of Artificial Sequence: Synthetic oligonucleotide
uggaucguccaccuuauaa

SEQ ID NO: 1674096 - RNA, 19 nt, Artificial Sequence
  Description of Artificial Sequence: Synthetic oligonucleotide
gacaguucccaggauaucc

SEQ ID NO: 1674097 - RNA, 19 nt, Artificial Sequence
  Description of Artificial Sequence: Synthetic oligonucleotide
gucuguauuguugagugcc

SEQ ID NO: 1674098 - RNA, 19 nt, Artificial Sequence
  Description of Artificial Sequence: Synthetic oligonucleotide
uuagcucucuugcagugcu

SEQ ID NO: 1674099 - RNA, 19 nt, Artificial Sequence
  Description of Artificial Sequence: Synthetic oligonucleotide
uaguagugagcuccggugc

SEQ ID NO: 1674100 - RNA, 19 nt, Artificial Sequence
  Description of Artificial Sequence: Synthetic oligonucleotide
ccguuguaaauauauaugc

SEQ ID NO: 1674101 - RNA, 19 nt, Artificial Sequence
  Description of Artificial Sequence: Synthetic oligonucleotide
uauaacuccaguggcguca

SEQ ID NO: 1674102 - RNA, 19 nt, Artificial Sequence
  Description of Artificial Sequence: Synthetic oligonucleotide
ugcugguuacguaguacgg

SEQ ID NO: 1674103 - RNA, 19 nt, Artificial Sequence
  Description of Artificial Sequence: Synthetic oligonucleotide
uucaggcgcacacagcuca

SEQ ID NO: 1674104 - RNA, 19 nt, Artificial Sequence
  Description of Artificial Sequence: Synthetic oligonucleotide
agagcguuaaccaaugagu

SEQ ID NO: 1674105 - RNA, 19 nt, Artificial Sequence
  Description of Artificial Sequence: Synthetic oligonucleotide
ugaguccggagaguaaugg

SEQ ID NO: 1674106 - RNA, 19 nt, Artificial Sequence
  Description of Artificial Sequence: Synthetic oligonucleotide
aaugaguccggagaguaau

SEQ ID NO: 1674107 - RNA, 19 nt, Artificial Sequence
  Description of Artificial Sequence: Synthetic oligonucleotide
ugcaauuuggauguuccac

SEQ ID NO: 1674108 - RNA, 19 nt, Artificial Sequence
  Description of Artificial Sequence: Synthetic oligonucleotide
cgauauuucaccuuccggg

SEQ ID NO: 1674109 - RNA, 19 nt, Artificial Sequence
  Description of Artificial Sequence: Synthetic oligonucleotide
gucguauauucucuuguag

SEQ ID NO: 1674110 - RNA, 19 nt, Artificial Sequence
  Description of Artificial Sequence: Synthetic oligonucleotide
uuaagcugugaggucaugc

SEQ ID NO: 1674111 - RNA, 19 nt, Artificial Sequence
  Description of Artificial Sequence: Synthetic oligonucleotide
uggucguauauucucuugu

SEQ ID NO: 1674112 - RNA, 19 nt, Artificial Sequence
  Description of Artificial Sequence: Synthetic oligonucleotide
aguccggagaguaauggcg

SEQ ID NO: 1674113 - RNA, 19 nt, Artificial Sequence
  Description of Artificial Sequence: Synthetic oligonucleotide
aaggguggcacagauuucu

SEQ ID NO: 1674114 - RNA, 19 nt, Artificial Sequence
  Description of Artificial Sequence: Synthetic oligonucleotide
uaugcaucagguggcagcc

SEQ ID NO: 1674115 - RNA, 19 nt, Artificial Sequence
  Description of Artificial Sequence: Synthetic oligonucleotide
augcuuagcucucuugcag

SEQ ID NO: 1674116 - RNA, 19 nt, Artificial Sequence
  Description of Artificial Sequence: Synthetic oligonucleotide
uccgcuaacccugccaagg

SEQ ID NO: 1674117 - RNA, 19 nt, Artificial Sequence
  Description of Artificial Sequence: Synthetic oligonucleotide
guuuaucaaagccaccauc

SEQ ID NO: 1674118 - RNA, 19 nt, Artificial Sequence
  Description of Artificial Sequence: Synthetic oligonucleotide
ugcagcauccgcuaacccu

SEQ ID NO: 1674119 - RNA, 19 nt, Artificial Sequence
  Description of Artificial Sequence: Synthetic oligonucleotide
aggauccaaaccccaaaag

SEQ ID NO: 1674120 - RNA, 19 nt, Artificial Sequence
  Description of Artificial Sequence: Synthetic oligonucleotide
ucuacgcuucgauauuuca

SEQ ID NO: 1674121 - RNA, 19 nt, Artificial Sequence
  Description of Artificial Sequence: Synthetic oligonucleotide
acagccuuguucagggucc

SEQ ID NO: 1674122 - RNA, 19 nt, Artificial Sequence
  Description of Artificial Sequence: Synthetic oligonucleotide
gcaguuuauaacuccagug

SEQ ID NO: 1674123 - RNA, 19 nt, Artificial Sequence
  Description of Artificial Sequence: Synthetic oligonucleotide
caucaagaggcuguguugc

SEQ ID NO: 1674124 - RNA, 19 nt, Artificial Sequence
  Description of Artificial Sequence: Synthetic oligonucleotide
guagagcauucuuaaacac

SEQ ID NO: 1674125 - RNA, 19 nt, Artificial Sequence
  Description of Artificial Sequence: Synthetic oligonucleotide
uuuagggcuggguugcgga

SEQ ID NO: 1674126 - RNA, 19 nt, Artificial Sequence
  Description of Artificial Sequence: Synthetic oligonucleotide
cuacgcuucgauauuucac

SEQ ID NO: 1674127 - RNA, 19 nt, Artificial Sequence
  Description of Artificial Sequence: Synthetic oligonucleotide
guccuugcugguuacguag

SEQ ID NO: 1674128 - RNA, 19 nt, Artificial Sequence
  Description of Artificial Sequence: Synthetic oligonucleotide
gcguuaaccaaugaguccg

SEQ ID NO: 1674129 - RNA, 19 nt, Artificial Sequence
  Description of Artificial Sequence: Synthetic oligonucleotide
uuuuggugcaagucuuugu

SEQ ID NO: 1674130 - RNA, 19 nt, Artificial Sequence
  Description of Artificial Sequence: Synthetic oligonucleotide
guaggugcgucuaucuacg

SEQ ID NO: 1674131 - RNA, 19 nt, Artificial Sequence
  Description of Artificial Sequence: Synthetic oligonucleotide
uaaacacacugugaauggc

SEQ ID NO: 1674132 - RNA, 19 nt, Artificial Sequence
  Description of Artificial Sequence: Synthetic oligonucleotide
ucuuaucggaugcccguug

SEQ ID NO: 1674133 - RNA, 19 nt, Artificial Sequence
  Description of Artificial Sequence: Synthetic oligonucleotide
auuccacuugguuggaaca

SEQ ID NO: 1674134 - RNA, 19 nt, Artificial Sequence
  Description of Artificial Sequence: Synthetic oligonucleotide
ggcgcuguaagucacgagc

SEQ ID NO: 1674135 - RNA, 19 nt, Artificial Sequence
  Description of Artificial Sequence: Synthetic oligonucleotide
ucuguauuguugagugccu

SEQ ID NO: 1674136 - RNA, 19 nt, Artificial Sequence
  Description of Artificial Sequence: Synthetic oligonucleotide
aauaugcaucagguggcag

SEQ ID NO: 1674137 - RNA, 19 nt, Artificial Sequence
  Description of Artificial Sequence: Synthetic oligonucleotide
auuucucgcucuuuccuga

SEQ ID NO: 1674138 - RNA, 19 nt, Artificial Sequence
  Description of Artificial Sequence: Synthetic oligonucleotide
agaguuuugcaaaggcuag

SEQ ID NO: 1674139 - RNA, 19 nt, Artificial Sequence
  Description of Artificial Sequence: Synthetic oligonucleotide
ugagcuccggugcucacga

SEQ ID NO: 1674140 - RNA, 19 nt, Artificial Sequence
  Description of Artificial Sequence: Synthetic oligonucleotide
cacauaguagugagcuccg

SEQ ID NO: 1674141 - RNA, 19 nt, Artificial Sequence
  Description of Artificial Sequence: Synthetic oligonucleotide
aaagagcguuaaccaauga

SEQ ID NO: 1674142 - RNA, 19 nt, Artificial Sequence
  Description of Artificial Sequence: Synthetic oligonucleotide
caagcauccuugcaauuug

SEQ ID NO: 1674143 - RNA, 19 nt, Artificial Sequence
  Description of Artificial Sequence: Synthetic oligonucleotide
aacaggcgcuguaagucac

SEQ ID NO: 1674144 - RNA, 19 nt, Artificial Sequence
  Description of Artificial Sequence: Synthetic oligonucleotide
auaugccuggcacuuggug

SEQ ID NO: 1674145 - RNA, 19 nt, Artificial Sequence
  Description of Artificial Sequence: Synthetic oligonucleotide
uugcaaaggcuagaaacac

SEQ ID NO: 1674146 - RNA, 19 nt, Artificial Sequence
  Description of Artificial Sequence: Synthetic oligonucleotide
accuuauaauaaagggugg

SEQ ID NO: 1674147 - RNA, 19 nt, Artificial Sequence
  Description of Artificial Sequence: Synthetic oligonucleotide
gaaguggcgcuguucuuug

SEQ ID NO: 1674148 - RNA, 19 nt, Artificial Sequence
  Description of Artificial Sequence: Synthetic oligonucleotide
cuucgauauuucaccuucc

SEQ ID NO: 1674149 - RNA, 19 nt, Artificial Sequence
  Description of Artificial Sequence: Synthetic oligonucleotide
cugauguagaguuuugcaa

SEQ ID NO: 1674150 - RNA, 19 nt, Artificial Sequence
  Description of Artificial Sequence: Synthetic oligonucleotide
gagcguuaaccaaugaguc

SEQ ID NO: 1674151 - RNA, 19 nt, Artificial Sequence
  Description of Artificial Sequence: Synthetic oligonucleotide
ucguccaccuuauaauaaa

SEQ ID NO: 1674152 - RNA, 19 nt, Artificial Sequence
  Description of Artificial Sequence: Synthetic oligonucleotide
aaaccccaaaagagggacg

SEQ ID NO: 1674153 - RNA, 19 nt, Artificial Sequence
  Description of Artificial Sequence: Synthetic oligonucleotide
uaguacgguuuaucaaagc

SEQ ID NO: 1674154 - RNA, 19 nt, Artificial Sequence
  Description of Artificial Sequence: Synthetic oligonucleotide
guaguacgguuuaucaaag

SEQ ID NO: 1674155 - RNA, 19 nt, Artificial Sequence
  Description of Artificial Sequence: Synthetic oligonucleotide
aagcauccuugcaauuugg

SEQ ID NO: 1674156 - RNA, 19 nt, Artificial Sequence
  Description of Artificial Sequence: Synthetic oligonucleotide
auguagaguuuugcaaagg

SEQ ID NO: 1674157 - RNA, 19 nt, Artificial Sequence
  Description of Artificial Sequence: Synthetic oligonucleotide
ugucuguauuguugagugc

SEQ ID NO: 1674158 - RNA, 19 nt, Artificial Sequence
  Description of Artificial Sequence: Synthetic oligonucleotide
ugcuuagcucucuugcagu

SEQ ID NO: 1674159 - RNA, 19 nt, Artificial Sequence
  Description of Artificial Sequence: Synthetic oligonucleotide
aguagugagcuccggugcu

SEQ ID NO: 1674160 - RNA, 19 nt, Artificial Sequence
  Description of Artificial Sequence: Synthetic oligonucleotide
uucaccuuccgggaagagc

SEQ ID NO: 1674161 - RNA, 19 nt, Artificial Sequence
  Description of Artificial Sequence: Synthetic oligonucleotide
gauucacacugcaucaaga

SEQ ID NO: 1674162 - RNA, 19 nt, Artificial Sequence
  Description of Artificial Sequence: Synthetic oligonucleotide
ugcgucuaucuacgcuucg

SEQ ID NO: 1674163 - RNA, 19 nt, Artificial Sequence
  Description of Artificial Sequence: Synthetic oligonucleotide
gaucguccaccuuauaaua

SEQ ID NO: 1674164 - RNA, 19 nt, Artificial Sequence
  Description of Artificial Sequence: Synthetic oligonucleotide
ccuuggauuggauucacac

SEQ ID NO: 1674165 - RNA, 19 nt, Artificial Sequence
  Description of Artificial Sequence: Synthetic oligonucleotide
guacgguuuaucaaagcca

SEQ ID NO: 1674166 - RNA, 19 nt, Artificial Sequence
  Description of Artificial Sequence: Synthetic oligonucleotide
gaacaggcgcuguaaguca

SEQ ID NO: 1674167 - RNA, 19 nt, Artificial Sequence
  Description of Artificial Sequence: Synthetic oligonucleotide
uccauagcuguagaaaguu

SEQ ID NO: 1674168 - RNA, 19 nt, Artificial Sequence
  Description of Artificial Sequence: Synthetic oligonucleotide
uuccacacuggaucgucca

SEQ ID NO: 1674169 - RNA, 19 nt, Artificial Sequence
  Description of Artificial Sequence: Synthetic oligonucleotide
uuuguccuugcugguuacg

SEQ ID NO: 1674170 - RNA, 19 nt, Artificial Sequence
  Description of Artificial Sequence: Synthetic oligonucleotide
cccguuguaaauauauaug

SEQ ID NO: 1674171 - RNA, 19 nt, Artificial Sequence
  Description of Artificial Sequence: Synthetic oligonucleotide
uaucggaugcccguuguaa

SEQ ID NO: 1674172 - RNA, 19 nt, Artificial Sequence
  Description of Artificial Sequence: Synthetic oligonucleotide
uauauaugccuggcacuug

SEQ ID NO: 1674173 - RNA, 19 nt, Artificial Sequence
  Description of Artificial Sequence: Synthetic oligonucleotide
uaauaaaggguggcacaga

SEQ ID NO: 1674174 - RNA, 19 nt, Artificial Sequence
  Description of Artificial Sequence: Synthetic oligonucleotide
acguaguacgguuuaucaa

SEQ ID NO: 1674175 - RNA, 19 nt, Artificial Sequence
  Description of Artificial Sequence: Synthetic oligonucleotide
ggauucacacugcaucaag

SEQ ID NO: 1674176 - RNA, 19 nt, Artificial Sequence
  Description of Artificial Sequence: Synthetic oligonucleotide
ucuuaagcugugaggucau

SEQ ID NO: 1674177 - RNA, 19 nt, Artificial Sequence
  Description of Artificial Sequence: Synthetic oligonucleotide
auauuucaccuuccgggaa

SEQ ID NO: 1674178 - RNA, 19 nt, Artificial Sequence
  Description of Artificial Sequence: Synthetic oligonucleotide
caccaagauccaaaguguc

SEQ ID NO: 1674179 - RNA, 19 nt, Artificial Sequence
  Description of Artificial Sequence: Synthetic oligonucleotide
uuauaacuccaguggcguc

SEQ ID NO: 1674180 - RNA, 19 nt, Artificial Sequence
  Description of Artificial Sequence: Synthetic oligonucleotide
cuggucguauauucucuug

SEQ ID NO: 1674181 - RNA, 19 nt, Artificial Sequence
  Description of Artificial Sequence: Synthetic oligonucleotide
guaagucacgagccggcug

SEQ ID NO: 1674182 - RNA, 19 nt, Artificial Sequence
  Description of Artificial Sequence: Synthetic oligonucleotide
agacaugaggccaccaaga

SEQ ID NO: 1674183 - RNA, 19 nt, Artificial Sequence
  Description of Artificial Sequence: Synthetic oligonucleotide
uccggagaguaauggcgcc

SEQ ID NO: 1674184 - RNA, 19 nt, Artificial Sequence
  Description of Artificial Sequence: Synthetic oligonucleotide
uuccugaacucccgcacau

SEQ ID NO: 1674185 - RNA, 19 nt, Artificial Sequence
  Description of Artificial Sequence: Synthetic oligonucleotide
ucgcucuuuccugaacucc

SEQ ID NO: 1674186 - RNA, 19 nt, Artificial Sequence
  Description of Artificial Sequence: Synthetic oligonucleotide
cuuagcucucuugcagugc

SEQ ID NO: 1674187 - RNA, 19 nt, Artificial Sequence
  Description of Artificial Sequence: Synthetic oligonucleotide
ucggaugcccguuguaaau

SEQ ID NO: 1674188 - RNA, 19 nt, Artificial Sequence
  Description of Artificial Sequence: Synthetic oligonucleotide
ucucacgcugaugacaguu

SEQ ID NO: 1674189 - RNA, 19 nt, Artificial Sequence
  Description of Artificial Sequence: Synthetic oligonucleotide
ucccugauguagaguuuug

SEQ ID NO: 1674190 - RNA, 19 nt, Artificial Sequence
  Description of Artificial Sequence: Synthetic oligonucleotide
cuggugaagacuuagcauu

SEQ ID NO: 1674191 - RNA, 19 nt, Artificial Sequence
  Description of Artificial Sequence: Synthetic oligonucleotide
gcuguaagucacgagccgg

SEQ ID NO: 1674192 - RNA, 19 nt, Artificial Sequence
  Description of Artificial Sequence: Synthetic oligonucleotide
acgcuucgauauuucaccu

SEQ ID NO: 1674193 - RNA, 19 nt, Artificial Sequence
  Description of Artificial Sequence: Synthetic oligonucleotide
uuucucucacgcugaugac

SEQ ID NO: 1674194 - RNA, 19 nt, Artificial Sequence
  Description of Artificial Sequence: Synthetic oligonucleotide
aggugcgucuaucuacgcu

SEQ ID NO: 1674195 - RNA, 19 nt, Artificial Sequence
  Description of Artificial Sequence: Synthetic oligonucleotide
cacccgucuuaucggaugc

SEQ ID NO: 1674196 - RNA, 19 nt, Artificial Sequence
  Description of Artificial Sequence: Synthetic oligonucleotide
uugcagcauccgcuaaccc

SEQ ID NO: 1674197 - RNA, 19 nt, Artificial Sequence
  Description of Artificial Sequence: Synthetic oligonucleotide
agcauccgcuaacccugcc

SEQ ID NO: 1674198 - RNA, 19 nt, Artificial Sequence
  Description of Artificial Sequence: Synthetic oligonucleotide
cuuuguccuugcugguuac

SEQ ID NO: 1674199 - RNA, 19 nt, Artificial Sequence
  Description of Artificial Sequence: Synthetic oligonucleotide
uccacacuggaucguccac

SEQ ID NO: 1674200 - RNA, 19 nt, Artificial Sequence
  Description of Artificial Sequence: Synthetic oligonucleotide
uuccgggaagagcggacga

SEQ ID NO: 1674201 - RNA, 19 nt, Artificial Sequence
  Description of Artificial Sequence: Synthetic oligonucleotide
auagccucugacccggaua

SEQ ID NO: 1674202 - RNA, 19 nt, Artificial Sequence
  Description of Artificial Sequence: Synthetic oligonucleotide
acgguuuaucaaagccacc

SEQ ID NO: 1674203 - RNA, 19 nt, Artificial Sequence
  Description of Artificial Sequence: Synthetic oligonucleotide
ggguggcacagauuucucg

SEQ ID NO: 1674204 - RNA, 19 nt, Artificial Sequence
  Description of Artificial Sequence: Synthetic oligonucleotide
aguggcgcuguucuuugau

SEQ ID NO: 1674205 - RNA, 19 nt, Artificial Sequence
  Description of Artificial Sequence: Synthetic oligonucleotide
agcucucuugcagugcuug

SEQ ID NO: 1674206 - RNA, 19 nt, Artificial Sequence
  Description of Artificial Sequence: Synthetic oligonucleotide
gcaucaagaggcuguguug

SEQ ID NO: 1674207 - RNA, 19 nt, Artificial Sequence
  Description of Artificial Sequence: Synthetic oligonucleotide
aucggaugcccguuguaaa

SEQ ID NO: 1674208 - RNA, 19 nt, Artificial Sequence
  Description of Artificial Sequence: Synthetic oligonucleotide
ggaacaggcgcuguaaguc

SEQ ID NO: 1674209 - RNA, 19 nt, Artificial Sequence
  Description of Artificial Sequence: Synthetic oligonucleotide
uccggugcucacgauguca

SEQ ID NO: 1674210 - RNA, 19 nt, Artificial Sequence
  Description of Artificial Sequence: Synthetic oligonucleotide
uaucuacgcuucgauauuu

SEQ ID NO: 1674211 - RNA, 19 nt, Artificial Sequence
  Description of Artificial Sequence: Synthetic oligonucleotide
acauaguagugagcuccgg

SEQ ID NO: 1674212 - RNA, 19 nt, Artificial Sequence
  Description of Artificial Sequence: Synthetic oligonucleotide
uuaucggaugcccguugua

SEQ ID NO: 1674213 - RNA, 19 nt, Artificial Sequence
  Description of Artificial Sequence: Synthetic oligonucleotide
cugacccggauaacauccc

SEQ ID NO: 1674214 - RNA, 19 nt, Artificial Sequence
  Description of Artificial Sequence: Synthetic oligonucleotide
ugcccguuguaaauauaua

SEQ ID NO: 1674215 - RNA, 19 nt, Artificial Sequence
  Description of Artificial Sequence: Synthetic oligonucleotide
cuggguugcggaagggcug

SEQ ID NO: 1674216 - RNA, 19 nt, Artificial Sequence
  Description of Artificial Sequence: Synthetic oligonucleotide
ugguuacguaguacgguuu

SEQ ID NO: 1674217 - RNA, 19 nt, Artificial Sequence
  Description of Artificial Sequence: Synthetic oligonucleotide
guccggagaguaauggcgc

SEQ ID NO: 1674218 - RNA, 19 nt, Artificial Sequence
  Description of Artificial Sequence: Synthetic oligonucleotide
gaguaauggcgccccugug

SEQ ID NO: 1674219 - RNA, 19 nt, Artificial Sequence
  Description of Artificial Sequence: Synthetic oligonucleotide
aucuacgcuucgauauuuc

SEQ ID NO: 1674220 - RNA, 19 nt, Artificial Sequence
  Description of Artificial Sequence: Synthetic oligonucleotide
agugagcuccggugcucac

SEQ ID NO: 1674221 - RNA, 19 nt, Artificial Sequence
  Description of Artificial Sequence: Synthetic oligonucleotide
uguccuugcugguuacgua

SEQ ID NO: 1674222 - RNA, 19 nt, Artificial Sequence
  Description of Artificial Sequence: Synthetic oligonucleotide
cucgcucuuuccugaacuc

SEQ ID NO: 1674223 - RNA, 19 nt, Artificial Sequence
  Description of Artificial Sequence: Synthetic oligonucleotide
cugguagaagguuugcacu

SEQ ID NO: 1674224 - RNA, 19 nt, Artificial Sequence
  Description of Artificial Sequence: Synthetic oligonucleotide
guagaguuuugcaaaggcu

SEQ ID NO: 1674225 - RNA, 19 nt, Artificial Sequence
  Description of Artificial Sequence: Synthetic oligonucleotide
gauauccacccgucuuauc

SEQ ID NO: 1674226 - RNA, 19 nt, Artificial Sequence
  Description of Artificial Sequence: Synthetic oligonucleotide
gcagcauccgcuaacccug

SEQ ID NO: 1674227 - RNA, 19 nt, Artificial Sequence
  Description of Artificial Sequence: Synthetic oligonucleotide
agagcggacgaaaggaaaa

SEQ ID NO: 1674228 - RNA, 19 nt, Artificial Sequence
  Description of Artificial Sequence: Synthetic oligonucleotide
gguucaggcgcacacagcu

SEQ ID NO: 1674229 - RNA, 19 nt, Artificial Sequence
  Description of Artificial Sequence: Synthetic oligonucleotide
caaaagagggacgggaucu

SEQ ID NO: 1674230 - RNA, 19 nt, Artificial Sequence
  Description of Artificial Sequence: Synthetic oligonucleotide
aucuuuuggugcaagucuu

SEQ ID NO: 1674231 - RNA, 19 nt, Artificial Sequence
  Description of Artificial Sequence: Synthetic oligonucleotide
gaggccaccaagauccaaa

SEQ ID NO: 1674232 - RNA, 19 nt, Artificial Sequence
  Description of Artificial Sequence: Synthetic oligonucleotide
cacuggaucguccaccuua

SEQ ID NO: 1674233 - RNA, 19 nt, Artificial Sequence
  Description of Artificial Sequence: Synthetic oligonucleotide
uuucucgcucuuuccugaa

SEQ ID NO: 1674234 - RNA, 19 nt, Artificial Sequence
  Description of Artificial Sequence: Synthetic oligonucleotide
gacuuagcauuguccagcu

SEQ ID NO: 1674235 - RNA, 19 nt, Artificial Sequence
  Description of Artificial Sequence: Synthetic oligonucleotide
ccugauguagaguuuugca

SEQ ID NO: 1674236 - RNA, 19 nt, Artificial Sequence
  Description of Artificial Sequence: Synthetic oligonucleotide
uaggugcgucuaucuacgc

SEQ ID NO: 1674237 - RNA, 19 nt, Artificial Sequence
  Description of Artificial Sequence: Synthetic oligonucleotide
agggacugcaaggacucca

SEQ ID NO: 1674238 - RNA, 19 nt, Artificial Sequence
  Description of Artificial Sequence: Synthetic oligonucleotide
aaguggcgcuguucuuuga

SEQ ID NO: 1674239 - RNA, 19 nt, Artificial Sequence
  Description of Artificial Sequence: Synthetic oligonucleotide
ggauaacauccccaauuuc

SEQ ID NO: 1674240 - RNA, 19 nt, Artificial Sequence
  Description of Artificial Sequence: Synthetic oligonucleotide
gugagcuccggugcucacg

SEQ ID NO: 1674241 - RNA, 19 nt, Artificial Sequence
  Description of Artificial Sequence: Synthetic oligonucleotide
guauauucucuuguagagu

SEQ ID NO: 1674242 - RNA, 19 nt, Artificial Sequence
  Description of Artificial Sequence: Synthetic oligonucleotide
cguaguacgguuuaucaaa

SEQ ID NO: 1674243 - RNA, 19 nt, Artificial Sequence
  Description of Artificial Sequence: Synthetic oligonucleotide
acccgucuuaucggaugcc

SEQ ID NO: 1674244 - RNA, 19 nt, Artificial Sequence
  Description of Artificial Sequence: Synthetic oligonucleotide
agcccuucuccacaugguu

SEQ ID NO: 1674245 - RNA, 19 nt, Artificial Sequence
  Description of Artificial Sequence: Synthetic oligonucleotide
aucccugauguagaguuuu

SEQ ID NO: 1674246 - RNA, 19 nt, Artificial Sequence
  Description of Artificial Sequence: Synthetic oligonucleotide
gucuaucuacgcuucgaua

SEQ ID NO: 1674247 - RNA, 19 nt, Artificial Sequence
  Description of Artificial Sequence: Synthetic oligonucleotide
ggauuggauucacacugca

SEQ ID NO: 1674248 - RNA, 19 nt, Artificial Sequence
  Description of Artificial Sequence: Synthetic oligonucleotide
caggauccaaaccccaaaa

SEQ ID NO: 1674249 - RNA, 19 nt, Artificial Sequence
  Description of Artificial Sequence: Synthetic oligonucleotide
aucguccaccuuauaauaa

SEQ ID NO: 1674250 - RNA, 19 nt, Artificial Sequence
  Description of Artificial Sequence: Synthetic oligonucleotide
guuccacacuggaucgucc

SEQ ID NO: 1674251 - RNA, 19 nt, Artificial Sequence
  Description of Artificial Sequence: Synthetic oligonucleotide
gacccggauaacaucccca

SEQ ID NO: 1674252 - RNA, 19 nt, Artificial Sequence
  Description of Artificial Sequence: Synthetic oligonucleotide
cauaguagugagcuccggu

SEQ ID NO: 1674253 - RNA, 19 nt, Artificial Sequence
  Description of Artificial Sequence: Synthetic oligonucleotide
ccgcacauagccucugacc

SEQ ID NO: 1674254 - RNA, 19 nt, Artificial Sequence
  Description of Artificial Sequence: Synthetic oligonucleotide
agcauccuugcaauuugga

SEQ ID NO: 1674255 - RNA, 19 nt, Artificial Sequence
  Description of Artificial Sequence: Synthetic oligonucleotide
accaaugaguccggagagu

SEQ ID NO: 1674256 - RNA, 19 nt, Artificial Sequence
  Description of Artificial Sequence: Synthetic oligonucleotide
aggcgcuguaagucacgag

SEQ ID NO: 1674257 - RNA, 19 nt, Artificial Sequence
  Description of Artificial Sequence: Synthetic oligonucleotide
ggaucguccaccuuauaau

SEQ ID NO: 1674258 - RNA, 19 nt, Artificial Sequence
  Description of Artificial Sequence: Synthetic oligonucleotide
ccgucuuaucggaugcccg

SEQ ID NO: 1674259 - RNA, 19 nt, Artificial Sequence
  Description of Artificial Sequence: Synthetic oligonucleotide
cacugcaucaagaggcugu

SEQ ID NO: 1674260 - RNA, 19 nt, Artificial Sequence
  Description of Artificial Sequence: Synthetic oligonucleotide
augaguccggagaguaaug

SEQ ID NO: 1674261 - RNA, 19 nt, Artificial Sequence
  Description of Artificial Sequence: Synthetic oligonucleotide
caccuuccgggaagagcgg

SEQ ID NO: 1674262 - RNA, 19 nt, Artificial Sequence
  Description of Artificial Sequence: Synthetic oligonucleotide
ucccgcacauagccucuga

SEQ ID NO: 1674263 - RNA, 19 nt, Artificial Sequence
  Description of Artificial Sequence: Synthetic oligonucleotide
gguuacguaguacgguuua

SEQ ID NO: 1674264 - RNA, 19 nt, Artificial Sequence
  Description of Artificial Sequence: Synthetic oligonucleotide
cgcucuuuccugaacuccc

SEQ ID NO: 1674265 - RNA, 19 nt, Artificial Sequence
  Description of Artificial Sequence: Synthetic oligonucleotide
ccaccuuauaauaaagggu

SEQ ID NO: 1674266 - RNA, 19 nt, Artificial Sequence
  Description of Artificial Sequence: Synthetic oligonucleotide
gggcuggucguauauucuc

SEQ ID NO: 1674267 - RNA, 19 nt, Artificial Sequence
  Description of Artificial Sequence: Synthetic oligonucleotide
uggcacuuggugggacucc

SEQ ID NO: 1674268 - RNA, 19 nt, Artificial Sequence
  Description of Artificial Sequence: Synthetic oligonucleotide
aggguggcacagauuucuc

SEQ ID NO: 1674269 - RNA, 19 nt, Artificial Sequence
  Description of Artificial Sequence: Synthetic oligonucleotide
ggucuggugaagacuuagc

SEQ ID NO: 1674270 - RNA, 19 nt, Artificial Sequence
  Description of Artificial Sequence: Synthetic oligonucleotide
gcuaacccugccaaggcuc

SEQ ID NO: 1674271 - RNA, 19 nt, Artificial Sequence
  Description of Artificial Sequence: Synthetic oligonucleotide
gcccguuguaaauauauau

SEQ ID NO: 1674272 - RNA, 19 nt, Artificial Sequence
  Description of Artificial Sequence: Synthetic oligonucleotide
agggcuggucguauauucu

SEQ ID NO: 1674273 - RNA, 19 nt, Artificial Sequence
  Description of Artificial Sequence: Synthetic oligonucleotide
gcgcuguaagucacgagcc

SEQ ID NO: 1674274 - RNA, 19 nt, Artificial Sequence
  Description of Artificial Sequence: Synthetic oligonucleotide
cugguuacguaguacgguu

SEQ ID NO: 1674275 - RNA, 19 nt, Artificial Sequence
  Description of Artificial Sequence: Synthetic oligonucleotide
ggugcgucuaucuacgcuu

SEQ ID NO: 1674276 - RNA, 19 nt, Artificial Sequence
  Description of Artificial Sequence: Synthetic oligonucleotide
gguuuggucucuggcaguc

SEQ ID NO: 1674277 - RNA, 19 nt, Artificial Sequence
  Description of Artificial Sequence: Synthetic oligonucleotide
gcucacgaugucacucugg

SEQ ID NO: 1674278 - RNA, 19 nt, Artificial Sequence
  Description of Artificial Sequence: Synthetic oligonucleotide
cuuaucggaugcccguugu

SEQ ID NO: 1674279 - RNA, 19 nt, Artificial Sequence
  Description of Artificial Sequence: Synthetic oligonucleotide
uggaaguggcgcuguucuu

SEQ ID NO: 1674280 - RNA, 19 nt, Artificial Sequence
  Description of Artificial Sequence: Synthetic oligonucleotide
cccugauguagaguuuugc

SEQ ID NO: 1674281 - RNA, 19 nt, Artificial Sequence
  Description of Artificial Sequence: Synthetic oligonucleotide
cguuaaccaaugaguccgg

SEQ ID NO: 1674282 - RNA, 19 nt, Artificial Sequence
  Description of Artificial Sequence: Synthetic oligonucleotide
ccggugcucacgaugucac

SEQ ID NO: 1674283 - RNA, 19 nt, Artificial Sequence
  Description of Artificial Sequence: Synthetic oligonucleotide
ccacccgucuuaucggaug

SEQ ID NO: 1674284 - RNA, 19 nt, Artificial Sequence
  Description of Artificial Sequence: Synthetic oligonucleotide
cuguaggugcgucuaucua

SEQ ID NO: 1674285 - RNA, 19 nt, Artificial Sequence
  Description of Artificial Sequence: Synthetic oligonucleotide
accuuccgggaagagcgga

SEQ ID NO: 1674286 - RNA, 19 nt, Artificial Sequence
  Description of Artificial Sequence: Synthetic oligonucleotide
guagaagguuugcacuuuu

SEQ ID NO: 1674287 - RNA, 19 nt, Artificial Sequence
  Description of Artificial Sequence: Synthetic oligonucleotide
gcauccgcuaacccugcca

SEQ ID NO: 1674288 - RNA, 19 nt, Artificial Sequence
  Description of Artificial Sequence: Synthetic oligonucleotide
cgguuuaucaaagccacca

SEQ ID NO: 1674289 - RNA, 19 nt, Artificial Sequence
  Description of Artificial Sequence: Synthetic oligonucleotide
gacccuguaggugcgucua

SEQ ID NO: 1674290 - RNA, 19 nt, Artificial Sequence
  Description of Artificial Sequence: Synthetic oligonucleotide
ccugccaaggcucccaaaa

SEQ ID NO: 1674291 - RNA, 19 nt, Artificial Sequence
  Description of Artificial Sequence: Synthetic oligonucleotide
agccucugacccggauaac

SEQ ID NO: 1674292 - RNA, 19 nt, Artificial Sequence
  Description of Artificial Sequence: Synthetic oligonucleotide
gaugcccguuguaaauaua

SEQ ID NO: 1674293 - RNA, 19 nt, Artificial Sequence
  Description of Artificial Sequence: Synthetic oligonucleotide
cccgucuuaucggaugccc

SEQ ID NO: 1674294 - RNA, 19 nt, Artificial Sequence
  Description of Artificial Sequence: Synthetic oligonucleotide
cgcuguaagucacgagccg

SEQ ID NO: 1674295 - RNA, 19 nt, Artificial Sequence
  Description of Artificial Sequence: Synthetic oligonucleotide
gugcgucuaucuacgcuuc

SEQ ID NO: 1674296 - RNA, 19 nt, Artificial Sequence
  Description of Artificial Sequence: Synthetic oligonucleotide
ccuugcaauuuggauguuc

SEQ ID NO: 1674297 - RNA, 19 nt, Artificial Sequence
  Description of Artificial Sequence: Synthetic oligonucleotide
cuaucuacgcuucgauauu

SEQ ID NO: 1674298 - RNA, 19 nt, Artificial Sequence
  Description of Artificial Sequence: Synthetic oligonucleotide
ccgcuaacccugccaaggc

SEQ ID NO: 1674299 - RNA, 19 nt, Artificial Sequence
  Description of Artificial Sequence: Synthetic oligonucleotide
acucccgcacauagccucu

SEQ ID NO: 1674300 - RNA, 19 nt, Artificial Sequence
  Description of Artificial Sequence: Synthetic oligonucleotide
gguuggaacaggcgcugua

SEQ ID NO: 1674301 - RNA, 19 nt, Artificial Sequence
  Description of Artificial Sequence: Synthetic oligonucleotide
guuacguaguacgguuuau

SEQ ID NO: 1674302 - RNA, 19 nt, Artificial Sequence
  Description of Artificial Sequence: Synthetic oligonucleotide
uuggacccuguaggugcgu

SEQ ID NO: 1674303 - RNA, 19 nt, Artificial Sequence
  Description of Artificial Sequence: Synthetic oligonucleotide
ggaugcccguuguaaauau

SEQ ID NO: 1674304 - RNA, 19 nt, Artificial Sequence
  Description of Artificial Sequence: Synthetic oligonucleotide
ccaaugaguccggagagua

SEQ ID NO: 1674305 - RNA, 19 nt, Artificial Sequence
  Description of Artificial Sequence: Synthetic oligonucleotide
cccgcacauagccucugac

SEQ ID NO: 1674306 - RNA, 19 nt, Artificial Sequence
  Description of Artificial Sequence: Synthetic oligonucleotide
ccggagaguaauggcgccc

SEQ ID NO: 1674307 - RNA, 19 nt, Artificial Sequence
  Description of Artificial Sequence: Synthetic oligonucleotide
gcugguuacguaguacggu

SEQ ID NO: 1674308 - RNA, 19 nt, Artificial Sequence
  Description of Artificial Sequence: Synthetic oligonucleotide
cccaauuucuaucuugguu

SEQ ID NO: 1674309 - RNA, 19 nt, Artificial Sequence
  Description of Artificial Sequence: Synthetic oligonucleotide
cggagaguaauggcgcccc

SEQ ID NO: 1674310 - RNA, 19 nt, Artificial Sequence
  Description of Artificial Sequence: Synthetic oligonucleotide
ggccagggacugcaaggac

SEQ ID NO: 1674311 - RNA, 19 nt, Artificial Sequence
  Description of Artificial Sequence: Synthetic oligonucleotide
gcgucuaucuacgcuucga

SEQ ID NO: 1674312 - RNA, 19 nt, Artificial Sequence
  Description of Artificial Sequence: Synthetic oligonucleotide
acgagccggcuggccaggg

SEQ ID NO: 1674313 - RNA, 19 nt, Artificial Sequence
  Description of Artificial Sequence: Synthetic oligonucleotide
ccggauaacauccccaauu

SEQ ID NO: 1674314 - RNA, 19 nt, Artificial Sequence
  Description of Artificial Sequence: Synthetic oligonucleotide
auggcgccccuguggccgu

SEQ ID NO: 1674315 - RNA, 19 nt, Artificial Sequence
  Description of Artificial Sequence: Synthetic oligonucleotide
gcgcuguucuuugauucca

SEQ ID NO: 1674316 - RNA, 19 nt, Artificial Sequence
  Description of Artificial Sequence: Synthetic oligonucleotide
cuccggugcucacgauguc

SEQ ID NO: 1674317 - RNA, 19 nt, Artificial Sequence
  Description of Artificial Sequence: Synthetic oligonucleotide
ggaaguggcgcuguucuuu

SEQ ID NO: 1674318 - RNA, 19 nt, Artificial Sequence
  Description of Artificial Sequence: Synthetic oligonucleotide
cgcuguucuuugauuccac

SEQ ID NO: 1674319 - RNA, 19 nt, Artificial Sequence
  Description of Artificial Sequence: Synthetic oligonucleotide
gcuccggugcucacgaugu

SEQ ID NO: 1674320 - RNA, 19 nt, Artificial Sequence
  Description of Artificial Sequence: Synthetic oligonucleotide
ggcuggucguauauucucu

SEQ ID NO: 1674321 - RNA, 19 nt, Artificial Sequence
  Description of Artificial Sequence: Synthetic oligonucleotide
gcugggucuggugaagacu

SEQ ID NO: 1674322 - RNA, 19 nt, Artificial Sequence
  Description of Artificial Sequence: Synthetic oligonucleotide
cauagccucugacccggau

SEQ ID NO: 1674323 - RNA, 19 nt, Artificial Sequence
  Description of Artificial Sequence: Synthetic oligonucleotide
gcuggucguauauucucuu

SEQ ID NO: 1674324 - RNA, 19 nt, Artificial Sequence
  Description of Artificial Sequence: Synthetic oligonucleotide
gucuuaucggaugcccguu

SEQ ID NO: 1674325 - RNA, 19 nt, Artificial Sequence
  Description of Artificial Sequence: Synthetic oligonucleotide
ggauauccacccgucuuau

SEQ ID NO: 1674326 - RNA, 19 nt, Artificial Sequence
  Description of Artificial Sequence: Synthetic oligonucleotide
ggcacuuggugggacuccu

SEQ ID NO: 1674327 - RNA, 19 nt, Artificial Sequence
  Description of Artificial Sequence: Synthetic oligonucleotide
ggagaguaauggcgccccu

SEQ ID NO: 1674328 - RNA, 19 nt, Artificial Sequence
  Description of Artificial Sequence: Synthetic oligonucleotide
cccuuggauuggauucaca

SEQ ID NO: 1674329 - RNA, 19 nt, Artificial Sequence
  Description of Artificial Sequence: Synthetic oligonucleotide
cuggaucguccaccuuaua

SEQ ID NO: 1674330 - RNA, 19 nt, Artificial Sequence
  Description of Artificial Sequence: Synthetic oligonucleotide
cgucuuaucggaugcccgu

SEQ ID NO: 1674331 - RNA, 19 nt, Artificial Sequence
  Description of Artificial Sequence: Synthetic oligonucleotide
ccaaagugucuguauuguu

SEQ ID NO: 1674332 - RNA, 19 nt, Artificial Sequence
  Description of Artificial Sequence: Synthetic oligonucleotide
cggauaacauccccaauuu

SEQ ID NO: 1674333 - RNA, 19 nt, Artificial Sequence
  Description of Artificial Sequence: Synthetic oligonucleotide
cucucacgcugaugacagu

SEQ ID NO: 1674334 - RNA, 19 nt, Artificial Sequence
  Description of Artificial Sequence: Synthetic oligonucleotide
ccaggauauccacccgucu

SEQ ID NO: 1674335 - RNA, 19 nt, Artificial Sequence
  Description of Artificial Sequence: Synthetic oligonucleotide
cugcaucaagaggcugugu

SEQ ID NO: 1674336 - RNA, 19 nt, Artificial Sequence
  Description of Artificial Sequence: Synthetic oligonucleotide
uggcgccccuguggccgug

SEQ ID NO: 1674337 - RNA, 19 nt, Artificial Sequence
  Description of Artificial Sequence: Synthetic oligonucleotide
cgucuaucuacgcuucgau

SEQ ID NO: 1674338 - RNA, 19 nt, Artificial Sequence
  Description of Artificial Sequence: Synthetic oligonucleotide
gagcuccggugcucacgau

SEQ ID NO: 1674339 - RNA, 19 nt, Artificial Sequence
  Description of Artificial Sequence: Synthetic oligonucleotide
cggaugcccguuguaaaua

SEQ ID NO: 1674340 - RNA, 19 nt, Artificial Sequence
  Description of Artificial Sequence: Synthetic oligonucleotide
cacuggaaguggcgcuguu

SEQ ID NO: 1674341 - RNA, 19 nt, Artificial Sequence
  Description of Artificial Sequence: Synthetic oligonucleotide
cccggauaacauccccaau

SEQ ID NO: 1674342 - RNA, 19 nt, Artificial Sequence
  Description of Artificial Sequence: Synthetic oligonucleotide
gcggaagggcuggucguau

SEQ ID NO: 1674343 - RNA, 19 nt, Artificial Sequence
  Description of Artificial Sequence: Synthetic oligonucleotide
cgcuucgauauuucaccuu

SEQ ID NO: 1674344 - RNA, 19 nt, Artificial Sequence
  Description of Artificial Sequence: Synthetic oligonucleotide
gcgccccuguggccgugga

SEQ ID NO: 1674345 - RNA, 19 nt, Artificial Sequence
  Description of Artificial Sequence: Synthetic oligonucleotide
ccccuguggccguggauuu

SEQ ID NO: 1674346 - RNA, 19 nt, Artificial Sequence
  Description of Artificial Sequence: Synthetic oligonucleotide
cggugcucacgaugucacu

SEQ ID NO: 1674347 - RNA, 19 nt, Artificial Sequence
  Description of Artificial Sequence: Synthetic oligonucleotide
uguauuguaaguaagauug

SEQ ID NO: 1674348 - RNA, 19 nt, Artificial Sequence
  Description of Artificial Sequence: Synthetic oligonucleotide
aaacuuaguacccaagucc

SEQ ID NO: 1674349 - RNA, 19 nt, Artificial Sequence
  Description of Artificial Sequence: Synthetic oligonucleotide
uauaguuccagauagcccg

SEQ ID NO: 1674350 - RNA, 19 nt, Artificial Sequence
  Description of Artificial Sequence: Synthetic oligonucleotide
ugaauauaguuccagauag

SEQ ID NO: 1674351 - RNA, 19 nt, Artificial Sequence
  Description of Artificial Sequence: Synthetic oligonucleotide
aauauaguuccagauagcc

SEQ ID NO: 1674352 - RNA, 19 nt, Artificial Sequence
  Description of Artificial Sequence: Synthetic oligonucleotide
aaacuuuaaagcuacgguc

SEQ ID NO: 1674353 - RNA, 19 nt, Artificial Sequence
  Description of Artificial Sequence: Synthetic oligonucleotide
uugauauaaacuuuaaagc

SEQ ID NO: 1674354 - RNA, 19 nt, Artificial Sequence
  Description of Artificial Sequence: Synthetic oligonucleotide
auaccaauaauacugacag

SEQ ID NO: 1674355 - RNA, 19 nt, Artificial Sequence
  Description of Artificial Sequence: Synthetic oligonucleotide
aauaucauccaauaacuga

SEQ ID NO: 1674356 - RNA, 19 nt, Artificial Sequence
  Description of Artificial Sequence: Synthetic oligonucleotide
ugauauaaacuuuaaagcu

SEQ ID NO: 1674357 - RNA, 19 nt, Artificial Sequence
  Description of Artificial Sequence: Synthetic oligonucleotide
agcaaugugaaauuucucg

SEQ ID NO: 1674358 - RNA, 19 nt, Artificial Sequence
  Description of Artificial Sequence: Synthetic oligonucleotide
aacaugaaccuucucagag

SEQ ID NO: 1674359 - RNA, 19 nt, Artificial Sequence
  Description of Artificial Sequence: Synthetic oligonucleotide
acugacagacuucaaaagc

SEQ ID NO: 1674360 - RNA, 19 nt, Artificial Sequence
  Description of Artificial Sequence: Synthetic oligonucleotide
auucaggucauauagcggg

SEQ ID NO: 1674361 - RNA, 19 nt, Artificial Sequence
  Description of Artificial Sequence: Synthetic oligonucleotide
aaacuaucaugaaagaaac

SEQ ID NO: 1674362 - RNA, 19 nt, Artificial Sequence
  Description of Artificial Sequence: Synthetic oligonucleotide
aauguuuguaucucaaagu

SEQ ID NO: 1674363 - RNA, 19 nt, Artificial Sequence
  Description of Artificial Sequence: Synthetic oligonucleotide
aaauuucucgucaauugcc

SEQ ID NO: 1674364 - RNA, 19 nt, Artificial Sequence
  Description of Artificial Sequence: Synthetic oligonucleotide
uuguaaguaagauuguaag

SEQ ID NO: 1674365 - RNA, 19 nt, Artificial Sequence
  Description of Artificial Sequence: Synthetic oligonucleotide
uacaaauuugauaaccuca

SEQ ID NO: 1674366 - RNA, 19 nt, Artificial Sequence
  Description of Artificial Sequence: Synthetic oligonucleotide
ucaugaaagaaacugucug

SEQ ID NO: 1674367 - RNA, 19 nt, Artificial Sequence
  Description of Artificial Sequence: Synthetic oligonucleotide
aaaacuaucaugaaagaaa

SEQ ID NO: 1674368 - RNA, 19 nt, Artificial Sequence
  Description of Artificial Sequence: Synthetic oligonucleotide
cacguauaaacuuaguacc

SEQ ID NO: 1674369 - RNA, 19 nt, Artificial Sequence
  Description of Artificial Sequence: Synthetic oligonucleotide
ucaacagggcacaagacag

SEQ ID NO: 1674370 - RNA, 19 nt, Artificial Sequence
  Description of Artificial Sequence: Synthetic oligonucleotide
uauaagaagcagauuaaca

SEQ ID NO: 1674371 - RNA, 19 nt, Artificial Sequence
  Description of Artificial Sequence: Synthetic oligonucleotide
aauuugauaaccucacuaa

SEQ ID NO: 1674372 - RNA, 19 nt, Artificial Sequence
  Description of Artificial Sequence: Synthetic oligonucleotide
ucacguauaaacuuaguac

SEQ ID NO: 1674373 - RNA, 19 nt, Artificial Sequence
  Description of Artificial Sequence: Synthetic oligonucleotide
uuguagacuacacuugccg

SEQ ID NO: 1674374 - RNA, 19 nt, Artificial Sequence
  Description of Artificial Sequence: Synthetic oligonucleotide
aaugugaaauuucucguca

SEQ ID NO: 1674375 - RNA, 19 nt, Artificial Sequence
  Description of Artificial Sequence: Synthetic oligonucleotide
ucuuuuaguaaccuucuca

SEQ ID NO: 1674376 - RNA, 19 nt, Artificial Sequence
  Description of Artificial Sequence: Synthetic oligonucleotide
ugagguaucgacaucuuug

SEQ ID NO: 1674377 - RNA, 19 nt, Artificial Sequence
  Description of Artificial Sequence: Synthetic oligonucleotide
acugaaacaaguauacagc

SEQ ID NO: 1674378 - RNA, 19 nt, Artificial Sequence
  Description of Artificial Sequence: Synthetic oligonucleotide
aaauaccaauaauacugac

SEQ ID NO: 1674379 - RNA, 19 nt, Artificial Sequence
  Description of Artificial Sequence: Synthetic oligonucleotide
uguaagauugcucuuugga

SEQ ID NO: 1674380 - RNA, 19 nt, Artificial Sequence
  Description of Artificial Sequence: Synthetic oligonucleotide
aaacaaguauacagcaucc

SEQ ID NO: 1674381 - RNA, 19 nt, Artificial Sequence
  Description of Artificial Sequence: Synthetic oligonucleotide
auaagaagcagauuaacau

SEQ ID NO: 1674382 - RNA, 19 nt, Artificial Sequence
  Description of Artificial Sequence: Synthetic oligonucleotide
uguaaguaagauuguaagc

SEQ ID NO: 1674383 - RNA, 19 nt, Artificial Sequence
  Description of Artificial Sequence: Synthetic oligonucleotide
aagauuguaagcaauguga

SEQ ID NO: 1674384 - RNA, 19 nt, Artificial Sequence
  Description of Artificial Sequence: Synthetic oligonucleotide
auauaaacuuuaaagcuac

SEQ ID NO: 1674385 - RNA, 19 nt, Artificial Sequence
  Description of Artificial Sequence: Synthetic oligonucleotide
uuaucugugauaucagagc

SEQ ID NO: 1674386 - RNA, 19 nt, Artificial Sequence
  Description of Artificial Sequence: Synthetic oligonucleotide
uccagcuuuauucuguaag

SEQ ID NO: 1674387 - RNA, 19 nt, Artificial Sequence
  Description of Artificial Sequence: Synthetic oligonucleotide
uaagauugcucuuuggaga

SEQ ID NO: 1674388 - RNA, 19 nt, Artificial Sequence
  Description of Artificial Sequence: Synthetic oligonucleotide
uuauucuguaaggagaugc

SEQ ID NO: 1674389 - RNA, 19 nt, Artificial Sequence
  Description of Artificial Sequence: Synthetic oligonucleotide
uaucugugauaucagagca

SEQ ID NO: 1674390 - RNA, 19 nt, Artificial Sequence
  Description of Artificial Sequence: Synthetic oligonucleotide
ucuaccauugguccugggg

SEQ ID NO: 1674391 - RNA, 19 nt, Artificial Sequence
  Description of Artificial Sequence: Synthetic oligonucleotide
cacuaaaauauuuuccagc

SEQ ID NO: 1674392 - RNA, 19 nt, Artificial Sequence
  Description of Artificial Sequence: Synthetic oligonucleotide
caauguuuguaucucaaag

SEQ ID NO: 1674393 - RNA, 19 nt, Artificial Sequence
  Description of Artificial Sequence: Synthetic oligonucleotide
uuggagaauuacuaguugc

SEQ ID NO: 1674394 - RNA, 19 nt, Artificial Sequence
  Description of Artificial Sequence: Synthetic oligonucleotide
guaaguaagauuguaagca

SEQ ID NO: 1674395 - RNA, 19 nt, Artificial Sequence
  Description of Artificial Sequence: Synthetic oligonucleotide
caugcagugaauauaguuc

SEQ ID NO: 1674396 - RNA, 19 nt, Artificial Sequence
  Description of Artificial Sequence: Synthetic oligonucleotide
ucauauagcggguaauggc

SEQ ID NO: 1674397 - RNA, 19 nt, Artificial Sequence
  Description of Artificial Sequence: Synthetic oligonucleotide
uguacugucaaagagcaaa

SEQ ID NO: 1674398 - RNA, 19 nt, Artificial Sequence
  Description of Artificial Sequence: Synthetic oligonucleotide
uaucaugaaagaaacuguc

SEQ ID NO: 1674399 - RNA, 19 nt, Artificial Sequence
  Description of Artificial Sequence: Synthetic oligonucleotide
ugcgagaaaacucacccca

SEQ ID NO: 1674400 - RNA, 19 nt, Artificial Sequence
  Description of Artificial Sequence: Synthetic oligonucleotide
auaaacuuaguacccaagu

SEQ ID NO: 1674401 - RNA, 19 nt, Artificial Sequence
  Description of Artificial Sequence: Synthetic oligonucleotide
acaaauuugauaaccucac

SEQ ID NO: 1674402 - RNA, 19 nt, Artificial Sequence
  Description of Artificial Sequence: Synthetic oligonucleotide
aacgcugaagcugccaagc

SEQ ID NO: 1674403 - RNA, 19 nt, Artificial Sequence
  Description of Artificial Sequence: Synthetic oligonucleotide
aucucgacauucuuguaac

SEQ ID NO: 1674404 - RNA, 19 nt, Artificial Sequence
  Description of Artificial Sequence: Synthetic oligonucleotide
uuaguaaccuucucaggag

SEQ ID NO: 1674405 - RNA, 19 nt, Artificial Sequence
  Description of Artificial Sequence: Synthetic oligonucleotide
ucuaagaaugccacgguaa

SEQ ID NO: 1674406 - RNA, 19 nt, Artificial Sequence
  Description of Artificial Sequence: Synthetic oligonucleotide
aauucuaugccuguuuaga

SEQ ID NO: 1674407 - RNA, 19 nt, Artificial Sequence
  Description of Artificial Sequence: Synthetic oligonucleotide
aaaucuucuaagaaugcca

SEQ ID NO: 1674408 - RNA, 19 nt, Artificial Sequence
  Description of Artificial Sequence: Synthetic oligonucleotide
accucacuaaaauauuuuc

SEQ ID NO: 1674409 - RNA, 19 nt, Artificial Sequence
  Description of Artificial Sequence: Synthetic oligonucleotide
ugagcauugagguaucgac

SEQ ID NO: 1674410 - RNA, 19 nt, Artificial Sequence
  Description of Artificial Sequence: Synthetic oligonucleotide
gaaacugucuguuaccauc

SEQ ID NO: 1674411 - RNA, 19 nt, Artificial Sequence
  Description of Artificial Sequence: Synthetic oligonucleotide
uucaaaagcaauucacggu

SEQ ID NO: 1674412 - RNA, 19 nt, Artificial Sequence
  Description of Artificial Sequence: Synthetic oligonucleotide
cuaguugcuguacugaaac

SEQ ID NO: 1674413 - RNA, 19 nt, Artificial Sequence
  Description of Artificial Sequence: Synthetic oligonucleotide
acagcauaucaaaagauag

SEQ ID NO: 1674414 - RNA, 19 nt, Artificial Sequence
  Description of Artificial Sequence: Synthetic oligonucleotide
aagaaugccacgguaauau

SEQ ID NO: 1674415 - RNA, 19 nt, Artificial Sequence
  Description of Artificial Sequence: Synthetic oligonucleotide
aggagcucugcuugcaucc

SEQ ID NO: 1674416 - RNA, 19 nt, Artificial Sequence
  Description of Artificial Sequence: Synthetic oligonucleotide
agcuuuauucuguaaggag

SEQ ID NO: 1674417 - RNA, 19 nt, Artificial Sequence
  Description of Artificial Sequence: Synthetic oligonucleotide
auuacuaguugcuguacug

SEQ ID NO: 1674418 - RNA, 19 nt, Artificial Sequence
  Description of Artificial Sequence: Synthetic oligonucleotide
agugaauauaguuccagau

SEQ ID NO: 1674419 - RNA, 19 nt, Artificial Sequence
  Description of Artificial Sequence: Synthetic oligonucleotide
acaaguauacagcauccug

SEQ ID NO: 1674420 - RNA, 19 nt, Artificial Sequence
  Description of Artificial Sequence: Synthetic oligonucleotide
cuuguuaucugugauauca

SEQ ID NO: 1674421 - RNA, 19 nt, Artificial Sequence
  Description of Artificial Sequence: Synthetic oligonucleotide
uuagcauuuuguaaaucaa

SEQ ID NO: 1674422 - RNA, 19 nt, Artificial Sequence
  Description of Artificial Sequence: Synthetic oligonucleotide
ucgacauucuuguaacugc

SEQ ID NO: 1674423 - RNA, 19 nt, Artificial Sequence
  Description of Artificial Sequence: Synthetic oligonucleotide
guuaucugugauaucagag

SEQ ID NO: 1674424 - RNA, 19 nt, Artificial Sequence
  Description of Artificial Sequence: Synthetic oligonucleotide
ugccacgguaauaucaucc

SEQ ID NO: 1674425 - RNA, 19 nt, Artificial Sequence
  Description of Artificial Sequence: Synthetic oligonucleotide
agugguaucccacaguaaa

SEQ ID NO: 1674426 - RNA, 19 nt, Artificial Sequence
  Description of Artificial Sequence: Synthetic oligonucleotide
uuguaucucaaaguuagca

SEQ ID NO: 1674427 - RNA, 19 nt, Artificial Sequence
  Description of Artificial Sequence: Synthetic oligonucleotide
gguaucgacaucuuugugc

SEQ ID NO: 1674428 - RNA, 19 nt, Artificial Sequence
  Description of Artificial Sequence: Synthetic oligonucleotide
cuaccauugguccuggggc

SEQ ID NO: 1674429 - RNA, 19 nt, Artificial Sequence
  Description of Artificial Sequence: Synthetic oligonucleotide
auauaguuccagauagccc

SEQ ID NO: 1674430 - RNA, 19 nt, Artificial Sequence
  Description of Artificial Sequence: Synthetic oligonucleotide
uggagaauuacuaguugcu

SEQ ID NO: 1674431 - RNA, 19 nt, Artificial Sequence
  Description of Artificial Sequence: Synthetic oligonucleotide
aucguaucguaucccaaac

SEQ ID NO: 1674432 - RNA, 19 nt, Artificial Sequence
  Description of Artificial Sequence: Synthetic oligonucleotide
aguaaaacagcagacacua

SEQ ID NO: 1674433 - RNA, 19 nt, Artificial Sequence
  Description of Artificial Sequence: Synthetic oligonucleotide
aauucacgguuccagaaua

SEQ ID NO: 1674434 - RNA, 19 nt, Artificial Sequence
  Description of Artificial Sequence: Synthetic oligonucleotide
acguauaaacuuaguaccc

SEQ ID NO: 1674435 - RNA, 19 nt, Artificial Sequence
  Description of Artificial Sequence: Synthetic oligonucleotide
gacaucuuugugcauugcc

SEQ ID NO: 1674436 - RNA, 19 nt, Artificial Sequence
  Description of Artificial Sequence: Synthetic oligonucleotide
ugugaguaacaauucuaug

SEQ ID NO: 1674437 - RNA, 19 nt, Artificial Sequence
  Description of Artificial Sequence: Synthetic oligonucleotide
uuuaucuaccauugguccu

SEQ ID NO: 1674438 - RNA, 19 nt, Artificial Sequence
  Description of Artificial Sequence: Synthetic oligonucleotide
gauauaaacuuuaaagcua

SEQ ID NO: 1674439 - RNA, 19 nt, Artificial Sequence
  Description of Artificial Sequence: Synthetic oligonucleotide
gguaauggcucucagagca

SEQ ID NO: 1674440 - RNA, 19 nt, Artificial Sequence
  Description of Artificial Sequence: Synthetic oligonucleotide
ucugugauaucagagcaac

SEQ ID NO: 1674441 - RNA, 19 nt, Artificial Sequence
  Description of Artificial Sequence: Synthetic oligonucleotide
gaagcugccaagcauccac

SEQ ID NO: 1674442 - RNA, 19 nt, Artificial Sequence
  Description of Artificial Sequence: Synthetic oligonucleotide
acaacggauuucugaauuc

SEQ ID NO: 1674443 - RNA, 19 nt, Artificial Sequence
  Description of Artificial Sequence: Synthetic oligonucleotide
ucgucaauugccaucuccu

SEQ ID NO: 1674444 - RNA, 19 nt, Artificial Sequence
  Description of Artificial Sequence: Synthetic oligonucleotide
accgccuucaaagucaggg

SEQ ID NO: 1674445 - RNA, 19 nt, Artificial Sequence
  Description of Artificial Sequence: Synthetic oligonucleotide
uucaauguuuguaucucaa

SEQ ID NO: 1674446 - RNA, 19 nt, Artificial Sequence
  Description of Artificial Sequence: Synthetic oligonucleotide
gauaaccucacuaaaauau

SEQ ID NO: 1674447 - RNA, 19 nt, Artificial Sequence
  Description of Artificial Sequence: Synthetic oligonucleotide
aguauacagcauccuguac

SEQ ID NO: 1674448 - RNA, 19 nt, Artificial Sequence
  Description of Artificial Sequence: Synthetic oligonucleotide
ucuuugugcauugccauug

SEQ ID NO: 1674449 - RNA, 19 nt, Artificial Sequence
  Description of Artificial Sequence: Synthetic oligonucleotide
agaaaaucuugggaaacag

SEQ ID NO: 1674450 - RNA, 19 nt, Artificial Sequence
  Description of Artificial Sequence: Synthetic oligonucleotide
aauugccaucuccuccugg

SEQ ID NO: 1674451 - RNA, 19 nt, Artificial Sequence
  Description of Artificial Sequence: Synthetic oligonucleotide
uuaucuaccauugguccug

SEQ ID NO: 1674452 - RNA, 19 nt, Artificial Sequence
  Description of Artificial Sequence: Synthetic oligonucleotide
augcgagaaaacucacccc

SEQ ID NO: 1674453 - RNA, 19 nt, Artificial Sequence
  Description of Artificial Sequence: Synthetic oligonucleotide
caggaaucauggcacaacg

SEQ ID NO: 1674454 - RNA, 19 nt, Artificial Sequence
  Description of Artificial Sequence: Synthetic oligonucleotide
aaguauacagcauccugua

SEQ ID NO: 1674455 - RNA, 19 nt, Artificial Sequence
  Description of Artificial Sequence: Synthetic oligonucleotide
cagucuuacacacuccaag

SEQ ID NO: 1674456 - RNA, 19 nt, Artificial Sequence
  Description of Artificial Sequence: Synthetic oligonucleotide
agaaaacucaccccagcca

SEQ ID NO: 1674457 - RNA, 19 nt, Artificial Sequence
  Description of Artificial Sequence: Synthetic oligonucleotide
agucuuacacacuccaagu

SEQ ID NO: 1674458 - RNA, 19 nt, Artificial Sequence
  Description of Artificial Sequence: Synthetic oligonucleotide
ugaaacaaguauacagcau

SEQ ID NO: 1674459 - RNA, 19 nt, Artificial Sequence
  Description of Artificial Sequence: Synthetic oligonucleotide
guaucgacaucuuugugca

SEQ ID NO: 1674460 - RNA, 19 nt, Artificial Sequence
  Description of Artificial Sequence: Synthetic oligonucleotide
uccucacguauaaacuuag

SEQ ID NO: 1674461 - RNA, 19 nt, Artificial Sequence
  Description of Artificial Sequence: Synthetic oligonucleotide
uuguaagauugcucuuugg

SEQ ID NO: 1674462 - RNA, 19 nt, Artificial Sequence
  Description of Artificial Sequence: Synthetic oligonucleotide
uguagacuacacuugccgu

SEQ ID NO: 1674463 - RNA, 19 nt, Artificial Sequence
  Description of Artificial Sequence: Synthetic oligonucleotide
gauucaggucauauagcgg

SEQ ID NO: 1674464 - RNA, 19 nt, Artificial Sequence
  Description of Artificial Sequence: Synthetic oligonucleotide
aauuucucgucaauugcca

SEQ ID NO: 1674465 - RNA, 19 nt, Artificial Sequence
  Description of Artificial Sequence: Synthetic oligonucleotide
cauuguauuguaaguaaga

SEQ ID NO: 1674466 - RNA, 19 nt, Artificial Sequence
  Description of Artificial Sequence: Synthetic oligonucleotide
gaaaacucaccccagccaa

SEQ ID NO: 1674467 - RNA, 19 nt, Artificial Sequence
  Description of Artificial Sequence: Synthetic oligonucleotide
uguuuagaugcgagaaaac

SEQ ID NO: 1674468 - RNA, 19 nt, Artificial Sequence
  Description of Artificial Sequence: Synthetic oligonucleotide
aaguuagcauuuuguaaau

SEQ ID NO: 1674469 - RNA, 19 nt, Artificial Sequence
  Description of Artificial Sequence: Synthetic oligonucleotide
auaucauccaauaacugaa

SEQ ID NO: 1674470 - RNA, 19 nt, Artificial Sequence
  Description of Artificial Sequence: Synthetic oligonucleotide
uuguauuguaaguaagauu

SEQ ID NO: 1674471 - RNA, 19 nt, Artificial Sequence
  Description of Artificial Sequence: Synthetic oligonucleotide
uuuguaucucaaaguuagc

SEQ ID NO: 1674472 - RNA, 19 nt, Artificial Sequence
  Description of Artificial Sequence: Synthetic oligonucleotide
ucucagagugcuugaacug

SEQ ID NO: 1674473 - RNA, 19 nt, Artificial Sequence
  Description of Artificial Sequence: Synthetic oligonucleotide
agaauuacuaguugcugua

SEQ ID NO: 1674474 - RNA, 19 nt, Artificial Sequence
  Description of Artificial Sequence: Synthetic oligonucleotide
gucauauagcggguaaugg

SEQ ID NO: 1674475 - RNA, 19 nt, Artificial Sequence
  Description of Artificial Sequence: Synthetic oligonucleotide
uccaagucuuguuaucugu

SEQ ID NO: 1674476 - RNA, 19 nt, Artificial Sequence
  Description of Artificial Sequence: Synthetic oligonucleotide
cuuguagacuacacuugcc

SEQ ID NO: 1674477 - RNA, 19 nt, Artificial Sequence
  Description of Artificial Sequence: Synthetic oligonucleotide
aacagcauaucaaaagaua

SEQ ID NO: 1674478 - RNA, 19 nt, Artificial Sequence
  Description of Artificial Sequence: Synthetic oligonucleotide
aaacucaccccagccaaag

SEQ ID NO: 1674479 - RNA, 19 nt, Artificial Sequence
  Description of Artificial Sequence: Synthetic oligonucleotide
agcucuaacgcugaagcug

SEQ ID NO: 1674480 - RNA, 19 nt, Artificial Sequence
  Description of Artificial Sequence: Synthetic oligonucleotide
ugugaaauuucucgucaau

SEQ ID NO: 1674481 - RNA, 19 nt, Artificial Sequence
  Description of Artificial Sequence: Synthetic oligonucleotide
ccgagcuucuauaagaagc

SEQ ID NO: 1674482 - RNA, 19 nt, Artificial Sequence
  Description of Artificial Sequence: Synthetic oligonucleotide
ugauaaccucacuaaaaua

SEQ ID NO: 1674483 - RNA, 19 nt, Artificial Sequence
  Description of Artificial Sequence: Synthetic oligonucleotide
uaucagagcaacaggcuuu

SEQ ID NO: 1674484 - RNA, 19 nt, Artificial Sequence
  Description of Artificial Sequence: Synthetic oligonucleotide
cuugggaaacagcauauca

SEQ ID NO: 1674485 - RNA, 19 nt, Artificial Sequence
  Description of Artificial Sequence: Synthetic oligonucleotide
uuacuaguugcuguacuga

SEQ ID NO: 1674486 - RNA, 19 nt, Artificial Sequence
  Description of Artificial Sequence: Synthetic oligonucleotide
uauuguaaguaagauugua

SEQ ID NO: 1674487 - RNA, 19 nt, Artificial Sequence
  Description of Artificial Sequence: Synthetic oligonucleotide
ucacgguuccagaauacaa

SEQ ID NO: 1674488 - RNA, 19 nt, Artificial Sequence
  Description of Artificial Sequence: Synthetic oligonucleotide
uaguaaccuucucaggagu

SEQ ID NO: 1674489 - RNA, 19 nt, Artificial Sequence
  Description of Artificial Sequence: Synthetic oligonucleotide
cuuaguacccaagucccag

SEQ ID NO: 1674490 - RNA, 19 nt, Artificial Sequence
  Description of Artificial Sequence: Synthetic oligonucleotide
ccucacuaaaauauuuucc

SEQ ID NO: 1674491 - RNA, 19 nt, Artificial Sequence
  Description of Artificial Sequence: Synthetic oligonucleotide
caauucuaugccuguuuag

SEQ ID NO: 1674492 - RNA, 19 nt, Artificial Sequence
  Description of Artificial Sequence: Synthetic oligonucleotide
auuguaaguaagauuguaa

SEQ ID NO: 1674493 - RNA, 19 nt, Artificial Sequence
  Description of Artificial Sequence: Synthetic oligonucleotide
aaugccacgguaauaucau

SEQ ID NO: 1674494 - RNA, 19 nt, Artificial Sequence
  Description of Artificial Sequence: Synthetic oligonucleotide
cucgucaauugccaucucc

SEQ ID NO: 1674495 - RNA, 19 nt, Artificial Sequence
  Description of Artificial Sequence: Synthetic oligonucleotide
gagaauuacuaguugcugu

SEQ ID NO: 1674496 - RNA, 19 nt, Artificial Sequence
  Description of Artificial Sequence: Synthetic oligonucleotide
gucaacagggcacaagaca

SEQ ID NO: 1674497 - RNA, 19 nt, Artificial Sequence
  Description of Artificial Sequence: Synthetic oligonucleotide
acuuuaaagcuacggucca

SEQ ID NO: 1674498 - RNA, 19 nt, Artificial Sequence
  Description of Artificial Sequence: Synthetic oligonucleotide
guauacagcauccuguacu

SEQ ID NO: 1674499 - RNA, 19 nt, Artificial Sequence
  Description of Artificial Sequence: Synthetic oligonucleotide
auucuaugccuguuuagau

SEQ ID NO: 1674500 - RNA, 19 nt, Artificial Sequence
  Description of Artificial Sequence: Synthetic oligonucleotide
gucuguuaccaucaucaug

SEQ ID NO: 1674501 - RNA, 19 nt, Artificial Sequence
  Description of Artificial Sequence: Synthetic oligonucleotide
agucaucguaucguauccc

SEQ ID NO: 1674502 - RNA, 19 nt, Artificial Sequence
  Description of Artificial Sequence: Synthetic oligonucleotide
gaaugccacgguaauauca

SEQ ID NO: 1674503 - RNA, 19 nt, Artificial Sequence
  Description of Artificial Sequence: Synthetic oligonucleotide
uuucucgucaauugccauc

SEQ ID NO: 1674504 - RNA, 19 nt, Artificial Sequence
  Description of Artificial Sequence: Synthetic oligonucleotide
ucguaucguaucccaaaca

SEQ ID NO: 1674505 - RNA, 19 nt, Artificial Sequence
  Description of Artificial Sequence: Synthetic oligonucleotide
uuccagauagcccgucuga

SEQ ID NO: 1674506 - RNA, 19 nt, Artificial Sequence
  Description of Artificial Sequence: Synthetic oligonucleotide
acaauucuaugccuguuua

SEQ ID NO: 1674507 - RNA, 19 nt, Artificial Sequence
  Description of Artificial Sequence: Synthetic oligonucleotide
aguuuugauauaaacuuua

SEQ ID NO: 1674508 - RNA, 19 nt, Artificial Sequence
  Description of Artificial Sequence: Synthetic oligonucleotide
cauccgagcuucuauaaga

SEQ ID NO: 1674509 - RNA, 19 nt, Artificial Sequence
  Description of Artificial Sequence: Synthetic oligonucleotide
ucgacaucuuugugcauug

SEQ ID NO: 1674510 - RNA, 19 nt, Artificial Sequence
  Description of Artificial Sequence: Synthetic oligonucleotide
uuacacacuccaagucuug

SEQ ID NO: 1674511 - RNA, 19 nt, Artificial Sequence
  Description of Artificial Sequence: Synthetic oligonucleotide
aguugcuguacugaaacaa

SEQ ID NO: 1674512 - RNA, 19 nt, Artificial Sequence
  Description of Artificial Sequence: Synthetic oligonucleotide
ugguuaauuucaccauagu

SEQ ID NO: 1674513 - RNA, 19 nt, Artificial Sequence
  Description of Artificial Sequence: Synthetic oligonucleotide
aaguaagauuguaagcaau

SEQ ID NO: 1674514 - RNA, 19 nt, Artificial Sequence
  Description of Artificial Sequence: Synthetic oligonucleotide
ugccguucauuccaggauc

SEQ ID NO: 1674515 - RNA, 19 nt, Artificial Sequence
  Description of Artificial Sequence: Synthetic oligonucleotide
acaagcagugguaucccac

SEQ ID NO: 1674516 - RNA, 19 nt, Artificial Sequence
  Description of Artificial Sequence: Synthetic oligonucleotide
cacugcuagacaagcagug

SEQ ID NO: 1674517 - RNA, 19 nt, Artificial Sequence
  Description of Artificial Sequence: Synthetic oligonucleotide
uacuaguugcuguacugaa

SEQ ID NO: 1674518 - RNA, 19 nt, Artificial Sequence
  Description of Artificial Sequence: Synthetic oligonucleotide
acgguaauaucauccaaua

SEQ ID NO: 1674519 - RNA, 19 nt, Artificial Sequence
  Description of Artificial Sequence: Synthetic oligonucleotide
aguuagcauuuuguaaauc

SEQ ID NO: 1674520 - RNA, 19 nt, Artificial Sequence
  Description of Artificial Sequence: Synthetic oligonucleotide
uauagcggguaauggcucu

SEQ ID NO: 1674521 - RNA, 19 nt, Artificial Sequence
  Description of Artificial Sequence: Synthetic oligonucleotide
uuuauucuguaaggagaug

SEQ ID NO: 1674522 - RNA, 19 nt, Artificial Sequence
  Description of Artificial Sequence: Synthetic oligonucleotide
guauaaacuuaguacccaa

SEQ ID NO: 1674523 - RNA, 19 nt, Artificial Sequence
  Description of Artificial Sequence: Synthetic oligonucleotide
cauauagcggguaauggcu

SEQ ID NO: 1674524 - RNA, 19 nt, Artificial Sequence
  Description of Artificial Sequence: Synthetic oligonucleotide
uaacgcugaagcugccaag

SEQ ID NO: 1674525 - RNA, 19 nt, Artificial Sequence
  Description of Artificial Sequence: Synthetic oligonucleotide
ugcuagacaagcaguggua

SEQ ID NO: 1674526 - RNA, 19 nt, Artificial Sequence
  Description of Artificial Sequence: Synthetic oligonucleotide
uagaugcgagaaaacucac

SEQ ID NO: 1674527 - RNA, 19 nt, Artificial Sequence
  Description of Artificial Sequence: Synthetic oligonucleotide
gugcauugccauuguauug

SEQ ID NO: 1674528 - RNA, 19 nt, Artificial Sequence
  Description of Artificial Sequence: Synthetic oligonucleotide
caaguauacagcauccugu

SEQ ID NO: 1674529 - RNA, 19 nt, Artificial Sequence
  Description of Artificial Sequence: Synthetic oligonucleotide
auauagcggguaauggcuc

SEQ ID NO: 1674530 - RNA, 19 nt, Artificial Sequence
  Description of Artificial Sequence: Synthetic oligonucleotide
gaauuacuaguugcuguac

SEQ ID NO: 1674531 - RNA, 19 nt, Artificial Sequence
  Description of Artificial Sequence: Synthetic oligonucleotide
cuaucaugaaagaaacugu

SEQ ID NO: 1674532 - RNA, 19 nt, Artificial Sequence
  Description of Artificial Sequence: Synthetic oligonucleotide
agugcagacaacaguuuug

SEQ ID NO: 1674533 - RNA, 19 nt, Artificial Sequence
  Description of Artificial Sequence: Synthetic oligonucleotide
aagcuacgguccaagagcu

SEQ ID NO: 1674534 - RNA, 19 nt, Artificial Sequence
  Description of Artificial Sequence: Synthetic oligonucleotide
augaaagaaacugucuguu

SEQ ID NO: 1674535 - RNA, 19 nt, Artificial Sequence
  Description of Artificial Sequence: Synthetic oligonucleotide
cucacguauaaacuuagua

SEQ ID NO: 1674536 - RNA, 19 nt, Artificial Sequence
  Description of Artificial Sequence: Synthetic oligonucleotide
agauuguaagcaaugugaa

SEQ ID NO: 1674537 - RNA, 19 nt, Artificial Sequence
  Description of Artificial Sequence: Synthetic oligonucleotide
guuuagaugcgagaaaacu

SEQ ID NO: 1674538 - RNA, 19 nt, Artificial Sequence
  Description of Artificial Sequence: Synthetic oligonucleotide
ucaucguaucguaucccaa

SEQ ID NO: 1674539 - RNA, 19 nt, Artificial Sequence
  Description of Artificial Sequence: Synthetic oligonucleotide
augcaccgccuucaaaguc

SEQ ID NO: 1674540 - RNA, 19 nt, Artificial Sequence
  Description of Artificial Sequence: Synthetic oligonucleotide
uuaguacccaagucccagu

SEQ ID NO: 1674541 - RNA, 19 nt, Artificial Sequence
  Description of Artificial Sequence: Synthetic oligonucleotide
guuccagauagcccgucug

SEQ ID NO: 1674542 - RNA, 19 nt, Artificial Sequence
  Description of Artificial Sequence: Synthetic oligonucleotide
agcugguuaauuucaccau

SEQ ID NO: 1674543 - RNA, 19 nt, Artificial Sequence
  Description of Artificial Sequence: Synthetic oligonucleotide
uacugucaaagagcaaaca

SEQ ID NO: 1674544 - RNA, 19 nt, Artificial Sequence
  Description of Artificial Sequence: Synthetic oligonucleotide
uaccauugguccuggggcu

SEQ ID NO: 1674545 - RNA, 19 nt, Artificial Sequence
  Description of Artificial Sequence: Synthetic oligonucleotide
uaugccuguuuagaugcga

SEQ ID NO: 1674546 - RNA, 19 nt, Artificial Sequence
  Description of Artificial Sequence: Synthetic oligonucleotide
guaucguaucccaaacaug

SEQ ID NO: 1674547 - RNA, 19 nt, Artificial Sequence
  Description of Artificial Sequence: Synthetic oligonucleotide
aggaaucauggcacaacgg

SEQ ID NO: 1674548 - RNA, 19 nt, Artificial Sequence
  Description of Artificial Sequence: Synthetic oligonucleotide
gucaucguaucguauccca

SEQ ID NO: 1674549 - RNA, 19 nt, Artificial Sequence
  Description of Artificial Sequence: Synthetic oligonucleotide
uaguugcuguacugaaaca

SEQ ID NO: 1674550 - RNA, 19 nt, Artificial Sequence
  Description of Artificial Sequence: Synthetic oligonucleotide
guaaccuucucaggagugc

SEQ ID NO: 1674551 - RNA, 19 nt, Artificial Sequence
  Description of Artificial Sequence: Synthetic oligonucleotide
guuccagccccuuguagac

SEQ ID NO: 1674552 - RNA, 19 nt, Artificial Sequence
  Description of Artificial Sequence: Synthetic oligonucleotide
agcuucuauaagaagcaga

SEQ ID NO: 1674553 - RNA, 19 nt, Artificial Sequence
  Description of Artificial Sequence: Synthetic oligonucleotide
ucugagcauugagguaucg

SEQ ID NO: 1674554 - RNA, 19 nt, Artificial Sequence
  Description of Artificial Sequence: Synthetic oligonucleotide
caugaaagaaacugucugu

SEQ ID NO: 1674555 - RNA, 19 nt, Artificial Sequence
  Description of Artificial Sequence: Synthetic oligonucleotide
uagacuacacuugccguuc

SEQ ID NO: 1674556 - RNA, 19 nt, Artificial Sequence
  Description of Artificial Sequence: Synthetic oligonucleotide
cuaugccuguuuagaugcg

SEQ ID NO: 1674557 - RNA, 19 nt, Artificial Sequence
  Description of Artificial Sequence: Synthetic oligonucleotide
ccauuguauuguaaguaag

SEQ ID NO: 1674558 - RNA, 19 nt, Artificial Sequence
  Description of Artificial Sequence: Synthetic oligonucleotide
augugaaauuucucgucaa

SEQ ID NO: 1674559 - RNA, 19 nt, Artificial Sequence
  Description of Artificial Sequence: Synthetic oligonucleotide
cuguuuagaugcgagaaaa

SEQ ID NO: 1674560 - RNA, 19 nt, Artificial Sequence
  Description of Artificial Sequence: Synthetic oligonucleotide
gagguaucgacaucuuugu

SEQ ID NO: 1674561 - RNA, 19 nt, Artificial Sequence
  Description of Artificial Sequence: Synthetic oligonucleotide
uuuccagcuuuauucugua

SEQ ID NO: 1674562 - RNA, 19 nt, Artificial Sequence
  Description of Artificial Sequence: Synthetic oligonucleotide
ccuuguagacuacacuugc

SEQ ID NO: 1674563 - RNA, 19 nt, Artificial Sequence
  Description of Artificial Sequence: Synthetic oligonucleotide
caucucgacauucuuguaa

SEQ ID NO: 1674564 - RNA, 19 nt, Artificial Sequence
  Description of Artificial Sequence: Synthetic oligonucleotide
uugagguaucgacaucuuu

SEQ ID NO: 1674565 - RNA, 19 nt, Artificial Sequence
  Description of Artificial Sequence: Synthetic oligonucleotide
ugccuguuuagaugcgaga

SEQ ID NO: 1674566 - RNA, 19 nt, Artificial Sequence
  Description of Artificial Sequence: Synthetic oligonucleotide
auuucucgucaauugccau

SEQ ID NO: 1674567 - RNA, 19 nt, Artificial Sequence
  Description of Artificial Sequence: Synthetic oligonucleotide
guaucucaaaguuagcauu

SEQ ID NO: 1674568 - RNA, 19 nt, Artificial Sequence
  Description of Artificial Sequence: Synthetic oligonucleotide
gagcuucuauaagaagcag

SEQ ID NO: 1674569 - RNA, 19 nt, Artificial Sequence
  Description of Artificial Sequence: Synthetic oligonucleotide
ucauuguaagauugcucuu

SEQ ID NO: 1674570 - RNA, 19 nt, Artificial Sequence
  Description of Artificial Sequence: Synthetic oligonucleotide
uggucuuugcugagcugug

SEQ ID NO: 1674571 - RNA, 19 nt, Artificial Sequence
  Description of Artificial Sequence: Synthetic oligonucleotide
uaucuaccauugguccugg

SEQ ID NO: 1674572 - RNA, 19 nt, Artificial Sequence
  Description of Artificial Sequence: Synthetic oligonucleotide
acacuccaagucuuguuau

SEQ ID NO: 1674573 - RNA, 19 nt, Artificial Sequence
  Description of Artificial Sequence: Synthetic oligonucleotide
ggagaauuacuaguugcug

SEQ ID NO: 1674574 - RNA, 19 nt, Artificial Sequence
  Description of Artificial Sequence: Synthetic oligonucleotide
guaacaauucuaugccugu

SEQ ID NO: 1674575 - RNA, 19 nt, Artificial Sequence
  Description of Artificial Sequence: Synthetic oligonucleotide
cagugaauauaguuccaga

SEQ ID NO: 1674576 - RNA, 19 nt, Artificial Sequence
  Description of Artificial Sequence: Synthetic oligonucleotide
augccacgguaauaucauc

SEQ ID NO: 1674577 - RNA, 19 nt, Artificial Sequence
  Description of Artificial Sequence: Synthetic oligonucleotide
ugucuguuaccaucaucau

SEQ ID NO: 1674578 - RNA, 19 nt, Artificial Sequence
  Description of Artificial Sequence: Synthetic oligonucleotide
ggucauauagcggguaaug

SEQ ID NO: 1674579 - RNA, 19 nt, Artificial Sequence
  Description of Artificial Sequence: Synthetic oligonucleotide
agguaucgacaucuuugug

SEQ ID NO: 1674580 - RNA, 19 nt, Artificial Sequence
  Description of Artificial Sequence: Synthetic oligonucleotide
guacugucaaagagcaaac

SEQ ID NO: 1674581 - RNA, 19 nt, Artificial Sequence
  Description of Artificial Sequence: Synthetic oligonucleotide
caucguaucguaucccaaa

SEQ ID NO: 1674582 - RNA, 19 nt, Artificial Sequence
  Description of Artificial Sequence: Synthetic oligonucleotide
gaggucaacagggcacaag

SEQ ID NO: 1674583 - RNA, 19 nt, Artificial Sequence
  Description of Artificial Sequence: Synthetic oligonucleotide
ggcacaacggauuucugaa

SEQ ID NO: 1674584 - RNA, 19 nt, Artificial Sequence
  Description of Artificial Sequence: Synthetic oligonucleotide
gguuccagccccuuguaga

SEQ ID NO: 1674585 - RNA, 19 nt, Artificial Sequence
  Description of Artificial Sequence: Synthetic oligonucleotide
aaagcagcaccgagagcug

SEQ ID NO: 1674586 - RNA, 19 nt, Artificial Sequence
  Description of Artificial Sequence: Synthetic oligonucleotide
cuaacgcugaagcugccaa

SEQ ID NO: 1674587 - RNA, 19 nt, Artificial Sequence
  Description of Artificial Sequence: Synthetic oligonucleotide
ucccaaacaugcagugaau

SEQ ID NO: 1674588 - RNA, 19 nt, Artificial Sequence
  Description of Artificial Sequence: Synthetic oligonucleotide
agaauacaaaguacuuaau

SEQ ID NO: 1674589 - RNA, 19 nt, Artificial Sequence
  Description of Artificial Sequence: Synthetic oligonucleotide
cugugaguaacaauucuau

SEQ ID NO: 1674590 - RNA, 19 nt, Artificial Sequence
  Description of Artificial Sequence: Synthetic oligonucleotide
uacaggaaucauggcacaa

SEQ ID NO: 1674591 - RNA, 19 nt, Artificial Sequence
  Description of Artificial Sequence: Synthetic oligonucleotide
augccuguuuagaugcgag

SEQ ID NO: 1674592 - RNA, 19 nt, Artificial Sequence
  Description of Artificial Sequence: Synthetic oligonucleotide
aacggauuucugaauucuu

SEQ ID NO: 1674593 - RNA, 19 nt, Artificial Sequence
  Description of Artificial Sequence: Synthetic oligonucleotide
cacagcucuaacgcugaag

SEQ ID NO: 1674594 - RNA, 19 nt, Artificial Sequence
  Description of Artificial Sequence: Synthetic oligonucleotide
agagcauacaggagcucug

SEQ ID NO: 1674595 - RNA, 19 nt, Artificial Sequence
  Description of Artificial Sequence: Synthetic oligonucleotide
auagcggguaauggcucuc

SEQ ID NO: 1674596 - RNA, 19 nt, Artificial Sequence
  Description of Artificial Sequence: Synthetic oligonucleotide
cuggauuccucacguauaa

SEQ ID NO: 1674597 - RNA, 19 nt, Artificial Sequence
  Description of Artificial Sequence: Synthetic oligonucleotide
gcucuaacgcugaagcugc

SEQ ID NO: 1674598 - RNA, 19 nt, Artificial Sequence
  Description of Artificial Sequence: Synthetic oligonucleotide
gaugcaccgccuucaaagu

SEQ ID NO: 1674599 - RNA, 19 nt, Artificial Sequence
  Description of Artificial Sequence: Synthetic oligonucleotide
aaaacucaccccagccaaa

SEQ ID NO: 1674600 - RNA, 19 nt, Artificial Sequence
  Description of Artificial Sequence: Synthetic oligonucleotide
gcuuuggagaauuacuagu

SEQ ID NO: 1674601 - RNA, 19 nt, Artificial Sequence
  Description of Artificial Sequence: Synthetic oligonucleotide
gcaaugugaaauuucucgu

SEQ ID NO: 1674602 - RNA, 19 nt, Artificial Sequence
  Description of Artificial Sequence: Synthetic oligonucleotide
caggcuuuggagaauuacu

SEQ ID NO: 1674603 - RNA, 19 nt, Artificial Sequence
  Description of Artificial Sequence: Synthetic oligonucleotide
caguaaaacagcagacacu

SEQ ID NO: 1674604 - RNA, 19 nt, Artificial Sequence
  Description of Artificial Sequence: Synthetic oligonucleotide
gaaucauggcacaacggau

SEQ ID NO: 1674605 - RNA, 19 nt, Artificial Sequence
  Description of Artificial Sequence: Synthetic oligonucleotide
acggauuucugaauucuuu

SEQ ID NO: 1674606 - RNA, 19 nt, Artificial Sequence
  Description of Artificial Sequence: Synthetic oligonucleotide
cacgguaauaucauccaau

SEQ ID NO: 1674607 - RNA, 19 nt, Artificial Sequence
  Description of Artificial Sequence: Synthetic oligonucleotide
acuaguugcuguacugaaa

SEQ ID NO: 1674608 - RNA, 19 nt, Artificial Sequence
  Description of Artificial Sequence: Synthetic oligonucleotide
ucaggucauauagcgggua

SEQ ID NO: 1674609 - RNA, 19 nt, Artificial Sequence
  Description of Artificial Sequence: Synthetic oligonucleotide
aagcugucauacauucuuu

SEQ ID NO: 1674610 - RNA, 19 nt, Artificial Sequence
  Description of Artificial Sequence: Synthetic oligonucleotide
uuccagcuuuauucuguaa

SEQ ID NO: 1674611 - RNA, 19 nt, Artificial Sequence
  Description of Artificial Sequence: Synthetic oligonucleotide
cuguaaggagaugcaccgc

SEQ ID NO: 1674612 - RNA, 19 nt, Artificial Sequence
  Description of Artificial Sequence: Synthetic oligonucleotide
ccagauagcccgucugagc

SEQ ID NO: 1674613 - RNA, 19 nt, Artificial Sequence
  Description of Artificial Sequence: Synthetic oligonucleotide
aucuaccauugguccuggg

SEQ ID NO: 1674614 - RNA, 19 nt, Artificial Sequence
  Description of Artificial Sequence: Synthetic oligonucleotide
agacuacacuugccguuca

SEQ ID NO: 1674615 - RNA, 19 nt, Artificial Sequence
  Description of Artificial Sequence: Synthetic oligonucleotide
cauggcacaacggauuucu

SEQ ID NO: 1674616 - RNA, 19 nt, Artificial Sequence
  Description of Artificial Sequence: Synthetic oligonucleotide
cuaagaaugccacgguaau

SEQ ID NO: 1674617 - RNA, 19 nt, Artificial Sequence
  Description of Artificial Sequence: Synthetic oligonucleotide
cccuuguagacuacacuug

SEQ ID NO: 1674618 - RNA, 19 nt, Artificial Sequence
  Description of Artificial Sequence: Synthetic oligonucleotide
ggguaauggcucucagagc

SEQ ID NO: 1674619 - RNA, 19 nt, Artificial Sequence
  Description of Artificial Sequence: Synthetic oligonucleotide
agauagcccgucugagcau

SEQ ID NO: 1674620 - RNA, 19 nt, Artificial Sequence
  Description of Artificial Sequence: Synthetic oligonucleotide
acuacacuugccguucauu

SEQ ID NO: 1674621 - RNA, 19 nt, Artificial Sequence
  Description of Artificial Sequence: Synthetic oligonucleotide
guaaaacagcagacacuac

SEQ ID NO: 1674622 - RNA, 19 nt, Artificial Sequence
  Description of Artificial Sequence: Synthetic oligonucleotide
guagacuacacuugccguu

SEQ ID NO: 1674623 - RNA, 19 nt, Artificial Sequence
  Description of Artificial Sequence: Synthetic oligonucleotide
acuuaguacccaaguccca

SEQ ID NO: 1674624 - RNA, 19 nt, Artificial Sequence
  Description of Artificial Sequence: Synthetic oligonucleotide
cucuaacgcugaagcugcc

SEQ ID NO: 1674625 - RNA, 19 nt, Artificial Sequence
  Description of Artificial Sequence: Synthetic oligonucleotide
gccagaaaaucuugggaaa

SEQ ID NO: 1674626 - RNA, 19 nt, Artificial Sequence
  Description of Artificial Sequence: Synthetic oligonucleotide
gccacgguaauaucaucca

SEQ ID NO: 1674627 - RNA, 19 nt, Artificial Sequence
  Description of Artificial Sequence: Synthetic oligonucleotide
agaagcagauuaacaugaa

SEQ ID NO: 1674628 - RNA, 19 nt, Artificial Sequence
  Description of Artificial Sequence: Synthetic oligonucleotide
gagaggauucaggucauau

SEQ ID NO: 1674629 - RNA, 19 nt, Artificial Sequence
  Description of Artificial Sequence: Synthetic oligonucleotide
cugcuagacaagcaguggu

SEQ ID NO: 1674630 - RNA, 19 nt, Artificial Sequence
  Description of Artificial Sequence: Synthetic oligonucleotide
auaguuccagauagcccgu

SEQ ID NO: 1674631 - RNA, 19 nt, Artificial Sequence
  Description of Artificial Sequence: Synthetic oligonucleotide
aggucauauagcggguaau

SEQ ID NO: 1674632 - RNA, 19 nt, Artificial Sequence
  Description of Artificial Sequence: Synthetic oligonucleotide
caguuuugauauaaacuuu

SEQ ID NO: 1674633 - RNA, 19 nt, Artificial Sequence
  Description of Artificial Sequence: Synthetic oligonucleotide
cugagcauugagguaucga

SEQ ID NO: 1674634 - RNA, 19 nt, Artificial Sequence
  Description of Artificial Sequence: Synthetic oligonucleotide
uaucgacaucuuugugcau

SEQ ID NO: 1674635 - RNA, 19 nt, Artificial Sequence
  Description of Artificial Sequence: Synthetic oligonucleotide
cacaacggauuucugaauu

SEQ ID NO: 1674636 - RNA, 19 nt, Artificial Sequence
  Description of Artificial Sequence: Synthetic oligonucleotide
cgagcuucuauaagaagca

SEQ ID NO: 1674637 - RNA, 19 nt, Artificial Sequence
  Description of Artificial Sequence: Synthetic oligonucleotide
uggauuccucacguauaaa

SEQ ID NO: 1674638 - RNA, 19 nt, Artificial Sequence
  Description of Artificial Sequence: Synthetic oligonucleotide
caggucauauagcggguaa

SEQ ID NO: 1674639 - RNA, 19 nt, Artificial Sequence
  Description of Artificial Sequence: Synthetic oligonucleotide
cgagaaaacucaccccagc

SEQ ID NO: 1674640 - RNA, 19 nt, Artificial Sequence
  Description of Artificial Sequence: Synthetic oligonucleotide
gagaugcaccgccuucaaa

SEQ ID NO: 1674641 - RNA, 19 nt, Artificial Sequence
  Description of Artificial Sequence: Synthetic oligonucleotide
gcugugaguaacaauucua

SEQ ID NO: 1674642 - RNA, 19 nt, Artificial Sequence
  Description of Artificial Sequence: Synthetic oligonucleotide
cuuuaaagcuacgguccaa

SEQ ID NO: 1674643 - RNA, 19 nt, Artificial Sequence
  Description of Artificial Sequence: Synthetic oligonucleotide
ucucgucaauugccaucuc

SEQ ID NO: 1674644 - RNA, 19 nt, Artificial Sequence
  Description of Artificial Sequence: Synthetic oligonucleotide
caauucacgguuccagaau

SEQ ID NO: 1674645 - RNA, 19 nt, Artificial Sequence
  Description of Artificial Sequence: Synthetic oligonucleotide
caacggauuucugaauucu

SEQ ID NO: 1674646 - RNA, 19 nt, Artificial Sequence
  Description of Artificial Sequence: Synthetic oligonucleotide
ggucaacagggcacaagac

SEQ ID NO: 1674647 - RNA, 19 nt, Artificial Sequence
  Description of Artificial Sequence: Synthetic oligonucleotide
gcgagaaaacucaccccag

SEQ ID NO: 1674648 - RNA, 19 nt, Artificial Sequence
  Description of Artificial Sequence: Synthetic oligonucleotide
uagcccgucugagcauuga

SEQ ID NO: 1674649 - RNA, 19 nt, Artificial Sequence
  Description of Artificial Sequence: Synthetic oligonucleotide
ugcuugcauccgagcuucu

SEQ ID NO: 1674650 - RNA, 19 nt, Artificial Sequence
  Description of Artificial Sequence: Synthetic oligonucleotide
uacgguccaagagcugguu

SEQ ID NO: 1674651 - RNA, 19 nt, Artificial Sequence
  Description of Artificial Sequence: Synthetic oligonucleotide
guaaggagaugcaccgccu

SEQ ID NO: 1674652 - RNA, 19 nt, Artificial Sequence
  Description of Artificial Sequence: Synthetic oligonucleotide
cguauaaacuuaguaccca

SEQ ID NO: 1674653 - RNA, 19 nt, Artificial Sequence
  Description of Artificial Sequence: Synthetic oligonucleotide
gauagcccgucugagcauu

SEQ ID NO: 1674654 - RNA, 19 nt, Artificial Sequence
  Description of Artificial Sequence: Synthetic oligonucleotide
caccgccuucaaagucagg

SEQ ID NO: 1674655 - RNA, 19 nt, Artificial Sequence
  Description of Artificial Sequence: Synthetic oligonucleotide
gcggguaauggcucucaga

SEQ ID NO: 1674656 - RNA, 19 nt, Artificial Sequence
  Description of Artificial Sequence: Synthetic oligonucleotide
auagcccgucugagcauug

SEQ ID NO: 1674657 - RNA, 19 nt, Artificial Sequence
  Description of Artificial Sequence: Synthetic oligonucleotide
cuguacugucaaagagcaa

SEQ ID NO: 1674658 - RNA, 19 nt, Artificial Sequence
  Description of Artificial Sequence: Synthetic oligonucleotide
gacuacacuugccguucau

SEQ ID NO: 1674659 - RNA, 19 nt, Artificial Sequence
  Description of Artificial Sequence: Synthetic oligonucleotide
cguaucguaucccaaacau

SEQ ID NO: 1674660 - RNA, 19 nt, Artificial Sequence
  Description of Artificial Sequence: Synthetic oligonucleotide
cagcucuaacgcugaagcu

SEQ ID NO: 1674661 - RNA, 19 nt, Artificial Sequence
  Description of Artificial Sequence: Synthetic oligonucleotide
cuacgguccaagagcuggu

SEQ ID NO: 1674662 - RNA, 19 nt, Artificial Sequence
  Description of Artificial Sequence: Synthetic oligonucleotide
gcuggauuccucacguaua

SEQ ID NO: 1674663 - RNA, 19 nt, Artificial Sequence
  Description of Artificial Sequence: Synthetic oligonucleotide
gccguucauuccaggauca

SEQ ID NO: 1674664 - RNA, 19 nt, Artificial Sequence
  Description of Artificial Sequence: Synthetic oligonucleotide
cccaaacaugcagugaaua

SEQ ID NO: 1674665 - RNA, 19 nt, Artificial Sequence
  Description of Artificial Sequence: Synthetic oligonucleotide
gccccuuguagacuacacu

SEQ ID NO: 1674666 - RNA, 19 nt, Artificial Sequence
  Description of Artificial Sequence: Synthetic oligonucleotide
ccacgguaauaucauccaa

SEQ ID NO: 1674667 - RNA, 19 nt, Artificial Sequence
  Description of Artificial Sequence: Synthetic oligonucleotide
cgguaauaucauccaauaa

SEQ ID NO: 1674668 - RNA, 19 nt, Artificial Sequence
  Description of Artificial Sequence: Synthetic oligonucleotide
cgacauucuuguaacugcu

SEQ ID NO: 1674669 - RNA, 19 nt, Artificial Sequence
  Description of Artificial Sequence: Synthetic oligonucleotide
gcacaacggauuucugaau

SEQ ID NO: 1674670 - RNA, 19 nt, Artificial Sequence
  Description of Artificial Sequence: Synthetic oligonucleotide
cgacaucuuugugcauugc

SEQ ID NO: 1674671 - RNA, 19 nt, Artificial Sequence
  Description of Artificial Sequence: Synthetic oligonucleotide
gcuugcauccgagcuucua

SEQ ID NO: 1674672 - RNA, 19 nt, Artificial Sequence
  Description of Artificial Sequence: Synthetic oligonucleotide
ccucacguauaaacuuagu

SEQ ID NO: 1674673 - RNA, 19 nt, Artificial Sequence
  Description of Artificial Sequence: Synthetic oligonucleotide
ccguucauuccaggaucau

SEQ ID NO: 1674674 - RNA, 19 nt, Artificial Sequence
  Description of Artificial Sequence: Synthetic oligonucleotide
ggcuggguuccagccccuu

SEQ ID NO: 1674675 - RNA, 19 nt, Artificial Sequence
  Description of Artificial Sequence: Synthetic oligonucleotide
aaaagauuaucacacagga

SEQ ID NO: 1674676 - RNA, 19 nt, Artificial Sequence
  Description of Artificial Sequence: Synthetic oligonucleotide
aacgugaaaagauuaucac

SEQ ID NO: 1674677 - RNA, 19 nt, Artificial Sequence
  Description of Artificial Sequence: Synthetic oligonucleotide
gaugcuauaguccacgaag

SEQ ID NO: 1674678 - RNA, 19 nt, Artificial Sequence
  Description of Artificial Sequence: Synthetic oligonucleotide
ugugaaauuccacuuagcc

SEQ ID NO: 1674679 - RNA, 19 nt, Artificial Sequence
  Description of Artificial Sequence: Synthetic oligonucleotide
auaacuuuguaaaugcucc

SEQ ID NO: 1674680 - RNA, 19 nt, Artificial Sequence
  Description of Artificial Sequence: Synthetic oligonucleotide
aaaugcuuacgguggaagc

SEQ ID NO: 1674681 - RNA, 19 nt, Artificial Sequence
  Description of Artificial Sequence: Synthetic oligonucleotide
acagggacaaacuuagggc

SEQ ID NO: 1674682 - RNA, 19 nt, Artificial Sequence
  Description of Artificial Sequence: Synthetic oligonucleotide
acaaacuuagggcaguugg

SEQ ID NO: 1674683 - RNA, 19 nt, Artificial Sequence
  Description of Artificial Sequence: Synthetic oligonucleotide
ucauaggagaauuugugcc

SEQ ID NO: 1674684 - RNA, 19 nt, Artificial Sequence
  Description of Artificial Sequence: Synthetic oligonucleotide
aaacuuagggcaguuggcc

SEQ ID NO: 1674685 - RNA, 19 nt, Artificial Sequence
  Description of Artificial Sequence: Synthetic oligonucleotide
acugcucuaacccaacggc

SEQ ID NO: 1674686 - RNA, 19 nt, Artificial Sequence
  Description of Artificial Sequence: Synthetic oligonucleotide
uuccuaaauaucacaaaag

SEQ ID NO: 1674687 - RNA, 19 nt, Artificial Sequence
  Description of Artificial Sequence: Synthetic oligonucleotide
aaugcuuacgguggaagcg

SEQ ID NO: 1674688 - RNA, 19 nt, Artificial Sequence
  Description of Artificial Sequence: Synthetic oligonucleotide
uaccaaaugcuuacggugg

SEQ ID NO: 1674689 - RNA, 19 nt, Artificial Sequence
  Description of Artificial Sequence: Synthetic oligonucleotide
uuccuagucaaacacaggu

SEQ ID NO: 1674690 - RNA, 19 nt, Artificial Sequence
  Description of Artificial Sequence: Synthetic oligonucleotide
uauugcgguaugaagagga

SEQ ID NO: 1674691 - RNA, 19 nt, Artificial Sequence
  Description of Artificial Sequence: Synthetic oligonucleotide
aagggcagacggcagagcg

SEQ ID NO: 1674692 - RNA, 19 nt, Artificial Sequence
  Description of Artificial Sequence: Synthetic oligonucleotide
uauaaaacgugaaaagauu

SEQ ID NO: 1674693 - RNA, 19 nt, Artificial Sequence
  Description of Artificial Sequence: Synthetic oligonucleotide
uuccacuuagcccagugag

SEQ ID NO: 1674694 - RNA, 19 nt, Artificial Sequence
  Description of Artificial Sequence: Synthetic oligonucleotide
aaaugcaggauuccuaaau

SEQ ID NO: 1674695 - RNA, 19 nt, Artificial Sequence
  Description of Artificial Sequence: Synthetic oligonucleotide
aacguguggccgcagcugc

SEQ ID NO: 1674696 - RNA, 19 nt, Artificial Sequence
  Description of Artificial Sequence: Synthetic oligonucleotide
aaacgugaaaagauuauca

SEQ ID NO: 1674697 - RNA, 19 nt, Artificial Sequence
  Description of Artificial Sequence: Synthetic oligonucleotide
ugcgguaugaagaggaacu

SEQ ID NO: 1674698 - RNA, 19 nt, Artificial Sequence
  Description of Artificial Sequence: Synthetic oligonucleotide
cacaggauaagauagaaaa

SEQ ID NO: 1674699 - RNA, 19 nt, Artificial Sequence
  Description of Artificial Sequence: Synthetic oligonucleotide
agcuuagggcaccucaucc

SEQ ID NO: 1674700 - RNA, 19 nt, Artificial Sequence
  Description of Artificial Sequence: Synthetic oligonucleotide
cacagggacaaacuuaggg

SEQ ID NO: 1674701 - RNA, 19 nt, Artificial Sequence
  Description of Artificial Sequence: Synthetic oligonucleotide
gauggggcacaccacacgg

SEQ ID NO: 1674702 - RNA, 19 nt, Artificial Sequence
  Description of Artificial Sequence: Synthetic oligonucleotide
gugaaauuccacuuagccc

SEQ ID NO: 1674703 - RNA, 19 nt, Artificial Sequence
  Description of Artificial Sequence: Synthetic oligonucleotide
agggcaaccgcccuauccc

SEQ ID NO: 1674704 - RNA, 19 nt, Artificial Sequence
  Description of Artificial Sequence: Synthetic oligonucleotide
aucacacaggauaagauag

SEQ ID NO: 1674705 - RNA, 19 nt, Artificial Sequence
  Description of Artificial Sequence: Synthetic oligonucleotide
ucuuugcucuauaaaacgu

SEQ ID NO: 1674706 - RNA, 19 nt, Artificial Sequence
  Description of Artificial Sequence: Synthetic oligonucleotide
gacaucauggcugggaaag

SEQ ID NO: 1674707 - RNA, 19 nt, Artificial Sequence
  Description of Artificial Sequence: Synthetic oligonucleotide
guaccaaaugcuuacggug

SEQ ID NO: 1674708 - RNA, 19 nt, Artificial Sequence
  Description of Artificial Sequence: Synthetic oligonucleotide
uuauaacuuuguaaaugcu

SEQ ID NO: 1674709 - RNA, 19 nt, Artificial Sequence
  Description of Artificial Sequence: Synthetic oligonucleotide
aauuccacuuagcccagug

SEQ ID NO: 1674710 - RNA, 19 nt, Artificial Sequence
  Description of Artificial Sequence: Synthetic oligonucleotide
cuuugcucuauaaaacgug

SEQ ID NO: 1674711 - RNA, 19 nt, Artificial Sequence
  Description of Artificial Sequence: Synthetic oligonucleotide
aguaggggcaagcaaaggu

SEQ ID NO: 1674712 - RNA, 19 nt, Artificial Sequence
  Description of Artificial Sequence: Synthetic oligonucleotide
ugacucuccacacaaugcu

SEQ ID NO: 1674713 - RNA, 19 nt, Artificial Sequence
  Description of Artificial Sequence: Synthetic oligonucleotide
uuaucacacaggauaagau

SEQ ID NO: 1674714 - RNA, 19 nt, Artificial Sequence
  Description of Artificial Sequence: Synthetic oligonucleotide
acgaagguaucauaggaga

SEQ ID NO: 1674715 - RNA, 19 nt, Artificial Sequence
  Description of Artificial Sequence: Synthetic oligonucleotide
uccacgaagguaucauagg

SEQ ID NO: 1674716 - RNA, 19 nt, Artificial Sequence
  Description of Artificial Sequence: Synthetic oligonucleotide
acgugaaaagauuaucaca

SEQ ID NO: 1674717 - RNA, 19 nt, Artificial Sequence
  Description of Artificial Sequence: Synthetic oligonucleotide
ucuccuugugugaaauucc

SEQ ID NO: 1674718 - RNA, 19 nt, Artificial Sequence
  Description of Artificial Sequence: Synthetic oligonucleotide
auaguacaccuccaggcag

SEQ ID NO: 1674719 - RNA, 19 nt, Artificial Sequence
  Description of Artificial Sequence: Synthetic oligonucleotide
aguaccaaaugcuuacggu

SEQ ID NO: 1674720 - RNA, 19 nt, Artificial Sequence
  Description of Artificial Sequence: Synthetic oligonucleotide
cuuguaagaugagagcugc

SEQ ID NO: 1674721 - RNA, 19 nt, Artificial Sequence
  Description of Artificial Sequence: Synthetic oligonucleotide
uccacuuagcccagugagg

SEQ ID NO: 1674722 - RNA, 19 nt, Artificial Sequence
  Description of Artificial Sequence: Synthetic oligonucleotide
auuaucacacaggauaaga

SEQ ID NO: 1674723 - RNA, 19 nt, Artificial Sequence
  Description of Artificial Sequence: Synthetic oligonucleotide
ugugccgaggccaccaagc

SEQ ID NO: 1674724 - RNA, 19 nt, Artificial Sequence
  Description of Artificial Sequence: Synthetic oligonucleotide
agucaaacacagguauugc

SEQ ID NO: 1674725 - RNA, 19 nt, Artificial Sequence
  Description of Artificial Sequence: Synthetic oligonucleotide
cuuacgguggaagcgaagc

SEQ ID NO: 1674726 - RNA, 19 nt, Artificial Sequence
  Description of Artificial Sequence: Synthetic oligonucleotide
ugcaggauuccuaaauauc

SEQ ID NO: 1674727 - RNA, 19 nt, Artificial Sequence
  Description of Artificial Sequence: Synthetic oligonucleotide
gguauugcgguaugaagag

SEQ ID NO: 1674728 - RNA, 19 nt, Artificial Sequence
  Description of Artificial Sequence: Synthetic oligonucleotide
cauccuuccccacacgagg

SEQ ID NO: 1674729 - RNA, 19 nt, Artificial Sequence
  Description of Artificial Sequence: Synthetic oligonucleotide
cacgaagguaucauaggag

SEQ ID NO: 1674730 - RNA, 19 nt, Artificial Sequence
  Description of Artificial Sequence: Synthetic oligonucleotide
agcaaagguggaccgauug

SEQ ID NO: 1674731 - RNA, 19 nt, Artificial Sequence
  Description of Artificial Sequence: Synthetic oligonucleotide
aggauuccuaaauaucaca

SEQ ID NO: 1674732 - RNA, 19 nt, Artificial Sequence
  Description of Artificial Sequence: Synthetic oligonucleotide
accgauugggaauauugcu

SEQ ID NO: 1674733 - RNA, 19 nt, Artificial Sequence
  Description of Artificial Sequence: Synthetic oligonucleotide
ugaggcguguuccugugca

SEQ ID NO: 1674734 - RNA, 19 nt, Artificial Sequence
  Description of Artificial Sequence: Synthetic oligonucleotide
agcaccgaugacccagugc

SEQ ID NO: 1674735 - RNA, 19 nt, Artificial Sequence
  Description of Artificial Sequence: Synthetic oligonucleotide
uaacuuuguaaaugcucca

SEQ ID NO: 1674736 - RNA, 19 nt, Artificial Sequence
  Description of Artificial Sequence: Synthetic oligonucleotide
ugccuuguaagaugagagc

SEQ ID NO: 1674737 - RNA, 19 nt, Artificial Sequence
  Description of Artificial Sequence: Synthetic oligonucleotide
gacccaguggcccugcuug

SEQ ID NO: 1674738 - RNA, 19 nt, Artificial Sequence
  Description of Artificial Sequence: Synthetic oligonucleotide
uagccaguaucccagcccu

SEQ ID NO: 1674739 - RNA, 19 nt, Artificial Sequence
  Description of Artificial Sequence: Synthetic oligonucleotide
uccucaucgaugcuauagu

SEQ ID NO: 1674740 - RNA, 19 nt, Artificial Sequence
  Description of Artificial Sequence: Synthetic oligonucleotide
gguaucauaggagaauuug

SEQ ID NO: 1674741 - RNA, 19 nt, Artificial Sequence
  Description of Artificial Sequence: Synthetic oligonucleotide
auaaaacgugaaaagauua

SEQ ID NO: 1674742 - RNA, 19 nt, Artificial Sequence
  Description of Artificial Sequence: Synthetic oligonucleotide
cagguauugcgguaugaag

SEQ ID NO: 1674743 - RNA, 19 nt, Artificial Sequence
  Description of Artificial Sequence: Synthetic oligonucleotide
guaagaugagagcugcuuc

SEQ ID NO: 1674744 - RNA, 19 nt, Artificial Sequence
  Description of Artificial Sequence: Synthetic oligonucleotide
caggcaggaggaaaugugc

SEQ ID NO: 1674745 - RNA, 19 nt, Artificial Sequence
  Description of Artificial Sequence: Synthetic oligonucleotide
ucacacaggauaagauaga

SEQ ID NO: 1674746 - RNA, 19 nt, Artificial Sequence
  Description of Artificial Sequence: Synthetic oligonucleotide
cuugaggcgggauuguguc

SEQ ID NO: 1674747 - RNA, 19 nt, Artificial Sequence
  Description of Artificial Sequence: Synthetic oligonucleotide
cuucucuacaugaguggcc

SEQ ID NO: 1674748 - RNA, 19 nt, Artificial Sequence
  Description of Artificial Sequence: Synthetic oligonucleotide
aagguggaccgauugggaa

SEQ ID NO: 1674749 - RNA, 19 nt, Artificial Sequence
  Description of Artificial Sequence: Synthetic oligonucleotide
gauuaucacacaggauaag

SEQ ID NO: 1674750 - RNA, 19 nt, Artificial Sequence
  Description of Artificial Sequence: Synthetic oligonucleotide
ugcuauaguccacgaaggu

SEQ ID NO: 1674751 - RNA, 19 nt, Artificial Sequence
  Description of Artificial Sequence: Synthetic oligonucleotide
aacuuuguaaaugcuccau

SEQ ID NO: 1674752 - RNA, 19 nt, Artificial Sequence
  Description of Artificial Sequence: Synthetic oligonucleotide
cauugcugagcagaugggg

SEQ ID NO: 1674753 - RNA, 19 nt, Artificial Sequence
  Description of Artificial Sequence: Synthetic oligonucleotide
gagaauuugugccggugca

SEQ ID NO: 1674754 - RNA, 19 nt, Artificial Sequence
  Description of Artificial Sequence: Synthetic oligonucleotide
augcuauaguccacgaagg

SEQ ID NO: 1674755 - RNA, 19 nt, Artificial Sequence
  Description of Artificial Sequence: Synthetic oligonucleotide
uguaagaugagagcugcuu

SEQ ID NO: 1674756 - RNA, 19 nt, Artificial Sequence
  Description of Artificial Sequence: Synthetic oligonucleotide
cacgguuggggucacugcg

SEQ ID NO: 1674757 - RNA, 19 nt, Artificial Sequence
  Description of Artificial Sequence: Synthetic oligonucleotide
cuuccuagucaaacacagg

SEQ ID NO: 1674758 - RNA, 19 nt, Artificial Sequence
  Description of Artificial Sequence: Synthetic oligonucleotide
acacgguuggggucacugc

SEQ ID NO: 1674759 - RNA, 19 nt, Artificial Sequence
  Description of Artificial Sequence: Synthetic oligonucleotide
gaacugcgccuccaggccg

SEQ ID NO: 1674760 - RNA, 19 nt, Artificial Sequence
  Description of Artificial Sequence: Synthetic oligonucleotide
cugcucuaacccaacggcc

SEQ ID NO: 1674761 - RNA, 19 nt, Artificial Sequence
  Description of Artificial Sequence: Synthetic oligonucleotide
gaccgauugggaauauugc

SEQ ID NO: 1674762 - RNA, 19 nt, Artificial Sequence
  Description of Artificial Sequence: Synthetic oligonucleotide
uuacgguggaagcgaagcu

SEQ ID NO: 1674763 - RNA, 19 nt, Artificial Sequence
  Description of Artificial Sequence: Synthetic oligonucleotide
ggagaauuugugccggugc

SEQ ID NO: 1674764 - RNA, 19 nt, Artificial Sequence
  Description of Artificial Sequence: Synthetic oligonucleotide
aaacacagguauugcggua

SEQ ID NO: 1674765 - RNA, 19 nt, Artificial Sequence
  Description of Artificial Sequence: Synthetic oligonucleotide
agauuaucacacaggauaa

SEQ ID NO: 1674766 - RNA, 19 nt, Artificial Sequence
  Description of Artificial Sequence: Synthetic oligonucleotide
ugucuucggccccagacuu

SEQ ID NO: 1674767 - RNA, 19 nt, Artificial Sequence
  Description of Artificial Sequence: Synthetic oligonucleotide
ucuaacccaacggccagca

SEQ ID NO: 1674768 - RNA, 19 nt, Artificial Sequence
  Description of Artificial Sequence: Synthetic oligonucleotide
aacccaacggccagcaccu

SEQ ID NO: 1674769 - RNA, 19 nt, Artificial Sequence
  Description of Artificial Sequence: Synthetic oligonucleotide
ccucaguucucagagaggg

SEQ ID NO: 1674770 - RNA, 19 nt, Artificial Sequence
  Description of Artificial Sequence: Synthetic oligonucleotide
guggaagcgaagcugggga

SEQ ID NO: 1674771 - RNA, 19 nt, Artificial Sequence
  Description of Artificial Sequence: Synthetic oligonucleotide
cagauugcgggcuccgcag

SEQ ID NO: 1674772 - RNA, 19 nt, Artificial Sequence
  Description of Artificial Sequence: Synthetic oligonucleotide
agagcgggcacagagggga

SEQ ID NO: 1674773 - RNA, 19 nt, Artificial Sequence
  Description of Artificial Sequence: Synthetic oligonucleotide
ggcaagcaaagguggaccg

SEQ ID NO: 1674774 - RNA, 19 nt, Artificial Sequence
  Description of Artificial Sequence: Synthetic oligonucleotide
caucauggcugggaaaggc

SEQ ID NO: 1674775 - RNA, 19 nt, Artificial Sequence
  Description of Artificial Sequence: Synthetic oligonucleotide
agaauuugugccggugcag

SEQ ID NO: 1674776 - RNA, 19 nt, Artificial Sequence
  Description of Artificial Sequence: Synthetic oligonucleotide
cuguucuuccuagucaaac

SEQ ID NO: 1674777 - RNA, 19 nt, Artificial Sequence
  Description of Artificial Sequence: Synthetic oligonucleotide
agaacguguggccgcagcu

SEQ ID NO: 1674778 - RNA, 19 nt, Artificial Sequence
  Description of Artificial Sequence: Synthetic oligonucleotide
cgauugggaauauugcugg

SEQ ID NO: 1674779 - RNA, 19 nt, Artificial Sequence
  Description of Artificial Sequence: Synthetic oligonucleotide
acuuagcccagugaggcgu

SEQ ID NO: 1674780 - RNA, 19 nt, Artificial Sequence
  Description of Artificial Sequence: Synthetic oligonucleotide
cgauaguacaccuccaggc

SEQ ID NO: 1674781 - RNA, 19 nt, Artificial Sequence
  Description of Artificial Sequence: Synthetic oligonucleotide
aacugcgccuccaggccgc

SEQ ID NO: 1674782 - RNA, 19 nt, Artificial Sequence
  Description of Artificial Sequence: Synthetic oligonucleotide
uugcaaccccggcaggugc

SEQ ID NO: 1674783 - RNA, 19 nt, Artificial Sequence
  Description of Artificial Sequence: Synthetic oligonucleotide
acacgaggacaucauggcu

SEQ ID NO: 1674784 - RNA, 19 nt, Artificial Sequence
  Description of Artificial Sequence: Synthetic oligonucleotide
accgcccuaucccuugagg

SEQ ID NO: 1674785 - RNA, 19 nt, Artificial Sequence
  Description of Artificial Sequence: Synthetic oligonucleotide
ggaccgauugggaauauug

SEQ ID NO: 1674786 - RNA, 19 nt, Artificial Sequence
  Description of Artificial Sequence: Synthetic oligonucleotide
gaaauuccacuuagcccag

SEQ ID NO: 1674787 - RNA, 19 nt, Artificial Sequence
  Description of Artificial Sequence: Synthetic oligonucleotide
uaucccuugaggcgggauu

SEQ ID NO: 1674788 - RNA, 19 nt, Artificial Sequence
  Description of Artificial Sequence: Synthetic oligonucleotide
gaagcgaagcuggggacug

SEQ ID NO: 1674789 - RNA, 19 nt, Artificial Sequence
  Description of Artificial Sequence: Synthetic oligonucleotide
cucuacaugaguggccuug

SEQ ID NO: 1674790 - RNA, 19 nt, Artificial Sequence
  Description of Artificial Sequence: Synthetic oligonucleotide
uuguugcaaccccggcagg

SEQ ID NO: 1674791 - RNA, 19 nt, Artificial Sequence
  Description of Artificial Sequence: Synthetic oligonucleotide
agugaggcguguuccugug

SEQ ID NO: 1674792 - RNA, 19 nt, Artificial Sequence
  Description of Artificial Sequence: Synthetic oligonucleotide
gggaauauugcuggggaug

SEQ ID NO: 1674793 - RNA, 19 nt, Artificial Sequence
  Description of Artificial Sequence: Synthetic oligonucleotide
guauugcgguaugaagagg

SEQ ID NO: 1674794 - RNA, 19 nt, Artificial Sequence
  Description of Artificial Sequence: Synthetic oligonucleotide
gcuuuuguagcuggggucc

SEQ ID NO: 1674795 - RNA, 19 nt, Artificial Sequence
  Description of Artificial Sequence: Synthetic oligonucleotide
uggaagcgaagcuggggac

SEQ ID NO: 1674796 - RNA, 19 nt, Artificial Sequence
  Description of Artificial Sequence: Synthetic oligonucleotide
uguugcaaccccggcaggu

SEQ ID NO: 1674797 - RNA, 19 nt, Artificial Sequence
  Description of Artificial Sequence: Synthetic oligonucleotide
ccgauugggaauauugcug

SEQ ID NO: 1674798 - RNA, 19 nt, Artificial Sequence
  Description of Artificial Sequence: Synthetic oligonucleotide
gaugugggcaacacaggga

SEQ ID NO: 1674799 - RNA, 19 nt, Artificial Sequence
  Description of Artificial Sequence: Synthetic oligonucleotide
ugcaaccccggcaggugcc

SEQ ID NO: 1674800 - RNA, 19 nt, Artificial Sequence
  Description of Artificial Sequence: Synthetic oligonucleotide
ucgaugcuauaguccacga

SEQ ID NO: 1674801 - RNA, 19 nt, Artificial Sequence
  Description of Artificial Sequence: Synthetic oligonucleotide
uugcgguaugaagaggaac

SEQ ID NO: 1674802 - RNA, 19 nt, Artificial Sequence
  Description of Artificial Sequence: Synthetic oligonucleotide
ucuacaugaguggccuugu

SEQ ID NO: 1674803 - RNA, 19 nt, Artificial Sequence
  Description of Artificial Sequence: Synthetic oligonucleotide
ugggaauauugcuggggau

SEQ ID NO: 1674804 - RNA, 19 nt, Artificial Sequence
  Description of Artificial Sequence: Synthetic oligonucleotide
agguggaccgauugggaau

SEQ ID NO: 1674805 - RNA, 19 nt, Artificial Sequence
  Description of Artificial Sequence: Synthetic oligonucleotide
cacuuagcccagugaggcg

SEQ ID NO: 1674806 - RNA, 19 nt, Artificial Sequence
  Description of Artificial Sequence: Synthetic oligonucleotide
accugccucuugaagcacc

SEQ ID NO: 1674807 - RNA, 19 nt, Artificial Sequence
  Description of Artificial Sequence: Synthetic oligonucleotide
agccaacugcucuaaccca

SEQ ID NO: 1674808 - RNA, 19 nt, Artificial Sequence
  Description of Artificial Sequence: Synthetic oligonucleotide
aagccaguaccaaaugcuu

SEQ ID NO: 1674809 - RNA, 19 nt, Artificial Sequence
  Description of Artificial Sequence: Synthetic oligonucleotide
gaacguguggccgcagcug

SEQ ID NO: 1674810 - RNA, 19 nt, Artificial Sequence
  Description of Artificial Sequence: Synthetic oligonucleotide
uggcgcuuuuguagcuggg

SEQ ID NO: 1674811 - RNA, 19 nt, Artificial Sequence
  Description of Artificial Sequence: Synthetic oligonucleotide
aggcguguuccugugcagg

SEQ ID NO: 1674812 - RNA, 19 nt, Artificial Sequence
  Description of Artificial Sequence: Synthetic oligonucleotide
uggggcacaccacacgguu

SEQ ID NO: 1674813 - RNA, 19 nt, Artificial Sequence
  Description of Artificial Sequence: Synthetic oligonucleotide
aaccgcccuaucccuugag

SEQ ID NO: 1674814 - RNA, 19 nt, Artificial Sequence
  Description of Artificial Sequence: Synthetic oligonucleotide
ugucagggcaggagggcaa

SEQ ID NO: 1674815 - RNA, 19 nt, Artificial Sequence
  Description of Artificial Sequence: Synthetic oligonucleotide
aaggcggcuuccucaucga

SEQ ID NO: 1674816 - RNA, 19 nt, Artificial Sequence
  Description of Artificial Sequence: Synthetic oligonucleotide
augcuuacgguggaagcga

SEQ ID NO: 1674817 - RNA, 19 nt, Artificial Sequence
  Description of Artificial Sequence: Synthetic oligonucleotide
aggggauggcaccugcaga

SEQ ID NO: 1674818 - RNA, 19 nt, Artificial Sequence
  Description of Artificial Sequence: Synthetic oligonucleotide
caggugccuuguaagauga

SEQ ID NO: 1674819 - RNA, 19 nt, Artificial Sequence
  Description of Artificial Sequence: Synthetic oligonucleotide
ccuuguaagaugagagcug

SEQ ID NO: 1674820 - RNA, 19 nt, Artificial Sequence
  Description of Artificial Sequence: Synthetic oligonucleotide
aaccccggcaggugccuug

SEQ ID NO: 1674821 - RNA, 19 nt, Artificial Sequence
  Description of Artificial Sequence: Synthetic oligonucleotide
cagauggggcacaccacac

SEQ ID NO: 1674822 - RNA, 19 nt, Artificial Sequence
  Description of Artificial Sequence: Synthetic oligonucleotide
agcgaagcuggggacuggg

SEQ ID NO: 1674823 - RNA, 19 nt, Artificial Sequence
  Description of Artificial Sequence: Synthetic oligonucleotide
uccgcaguaggggcaagca

SEQ ID NO: 1674824 - RNA, 19 nt, Artificial Sequence
  Description of Artificial Sequence: Synthetic oligonucleotide
ccacuuagcccagugaggc

SEQ ID NO: 1674825 - RNA, 19 nt, Artificial Sequence
  Description of Artificial Sequence: Synthetic oligonucleotide
gaggcguguuccugugcag

SEQ ID NO: 1674826 - RNA, 19 nt, Artificial Sequence
  Description of Artificial Sequence: Synthetic oligonucleotide
aagcaccgaugacccagug

SEQ ID NO: 1674827 - RNA, 19 nt, Artificial Sequence
  Description of Artificial Sequence: Synthetic oligonucleotide
uccccacacgaggacauca

SEQ ID NO: 1674828 - RNA, 19 nt, Artificial Sequence
  Description of Artificial Sequence: Synthetic oligonucleotide
gugugaaauuccacuuagc

SEQ ID NO: 1674829 - RNA, 19 nt, Artificial Sequence
  Description of Artificial Sequence: Synthetic oligonucleotide
gccgauaguacaccuccag

SEQ ID NO: 1674830 - RNA, 19 nt, Artificial Sequence
  Description of Artificial Sequence: Synthetic oligonucleotide
ggaggaaaugugcacucuc

SEQ ID NO: 1674831 - RNA, 19 nt, Artificial Sequence
  Description of Artificial Sequence: Synthetic oligonucleotide
cacaaugcuucaccagcuc

SEQ ID NO: 1674832 - RNA, 19 nt, Artificial Sequence
  Description of Artificial Sequence: Synthetic oligonucleotide
uccccuaguccugcugggg

SEQ ID NO: 1674833 - RNA, 19 nt, Artificial Sequence
  Description of Artificial Sequence: Synthetic oligonucleotide
ccgauaguacaccuccagg

SEQ ID NO: 1674834 - RNA, 19 nt, Artificial Sequence
  Description of Artificial Sequence: Synthetic oligonucleotide
gcuucucuacaugaguggc

SEQ ID NO: 1674835 - RNA, 19 nt, Artificial Sequence
  Description of Artificial Sequence: Synthetic oligonucleotide
caucgaugcuauaguccac

SEQ ID NO: 1674836 - RNA, 19 nt, Artificial Sequence
  Description of Artificial Sequence: Synthetic oligonucleotide
gucacugcggugacucucc

SEQ ID NO: 1674837 - RNA, 19 nt, Artificial Sequence
  Description of Artificial Sequence: Synthetic oligonucleotide
ugcuuacgguggaagcgaa

SEQ ID NO: 1674838 - RNA, 19 nt, Artificial Sequence
  Description of Artificial Sequence: Synthetic oligonucleotide
gcaccgaugacccagugcu

SEQ ID NO: 1674839 - RNA, 19 nt, Artificial Sequence
  Description of Artificial Sequence: Synthetic oligonucleotide
cagggcaggagggcaaccg

SEQ ID NO: 1674840 - RNA, 19 nt, Artificial Sequence
  Description of Artificial Sequence: Synthetic oligonucleotide
cacacgguuggggucacug

SEQ ID NO: 1674841 - RNA, 19 nt, Artificial Sequence
  Description of Artificial Sequence: Synthetic oligonucleotide
cuuagcccagugaggcgug

SEQ ID NO: 1674842 - RNA, 19 nt, Artificial Sequence
  Description of Artificial Sequence: Synthetic oligonucleotide
auugcgggcuccgcaguag

SEQ ID NO: 1674843 - RNA, 19 nt, Artificial Sequence
  Description of Artificial Sequence: Synthetic oligonucleotide
aguccacgaagguaucaua

SEQ ID NO: 1674844 - RNA, 19 nt, Artificial Sequence
  Description of Artificial Sequence: Synthetic oligonucleotide
cacacaggauaagauagaa

SEQ ID NO: 1674845 - RNA, 19 nt, Artificial Sequence
  Description of Artificial Sequence: Synthetic oligonucleotide
aagcgaagcuggggacugg

SEQ ID NO: 1674846 - RNA, 19 nt, Artificial Sequence
  Description of Artificial Sequence: Synthetic oligonucleotide
cuccccgcagaacgugugg

SEQ ID NO: 1674847 - RNA, 19 nt, Artificial Sequence
  Description of Artificial Sequence: Synthetic oligonucleotide
agauugcgggcuccgcagu

SEQ ID NO: 1674848 - RNA, 19 nt, Artificial Sequence
  Description of Artificial Sequence: Synthetic oligonucleotide
guugcaaccccggcaggug

SEQ ID NO: 1674849 - RNA, 19 nt, Artificial Sequence
  Description of Artificial Sequence: Synthetic oligonucleotide
gacggcagagcgggcacag

SEQ ID NO: 1674850 - RNA, 19 nt, Artificial Sequence
  Description of Artificial Sequence: Synthetic oligonucleotide
uugaagcaccgaugaccca

SEQ ID NO: 1674851 - RNA, 19 nt, Artificial Sequence
  Description of Artificial Sequence: Synthetic oligonucleotide
aaauuccacuuagcccagu

SEQ ID NO: 1674852 - RNA, 19 nt, Artificial Sequence
  Description of Artificial Sequence: Synthetic oligonucleotide
ggcgggauugugucuucgg

SEQ ID NO: 1674853 - RNA, 19 nt, Artificial Sequence
  Description of Artificial Sequence: Synthetic oligonucleotide
auccagauugcgggcuccg

SEQ ID NO: 1674854 - RNA, 19 nt, Artificial Sequence
  Description of Artificial Sequence: Synthetic oligonucleotide
ggcgcuuuuguagcugggg

SEQ ID NO: 1674855 - RNA, 19 nt, Artificial Sequence
  Description of Artificial Sequence: Synthetic oligonucleotide
ugagcagauggggcacacc

SEQ ID NO: 1674856 - RNA, 19 nt, Artificial Sequence
  Description of Artificial Sequence: Synthetic oligonucleotide
gccaguaucccagcccugg

SEQ ID NO: 1674857 - RNA, 19 nt, Artificial Sequence
  Description of Artificial Sequence: Synthetic oligonucleotide
accggccgauaguacaccu

SEQ ID NO: 1674858 - RNA, 19 nt, Artificial Sequence
  Description of Artificial Sequence: Synthetic oligonucleotide
ccucaucgaugcuauaguc

SEQ ID NO: 1674859 - RNA, 19 nt, Artificial Sequence
  Description of Artificial Sequence: Synthetic oligonucleotide
ccgcccuaucccuugaggc

SEQ ID NO: 1674860 - RNA, 19 nt, Artificial Sequence
  Description of Artificial Sequence: Synthetic oligonucleotide
gcaguaggggcaagcaaag

SEQ ID NO: 1674861 - RNA, 19 nt, Artificial Sequence
  Description of Artificial Sequence: Synthetic oligonucleotide
ugcaagaaguuggcgcuuu

SEQ ID NO: 1674862 - RNA, 19 nt, Artificial Sequence
  Description of Artificial Sequence: Synthetic oligonucleotide
agcucuccuugugugaaau

SEQ ID NO: 1674863 - RNA, 19 nt, Artificial Sequence
  Description of Artificial Sequence: Synthetic oligonucleotide
cucuaacccaacggccagc

SEQ ID NO: 1674864 - RNA, 19 nt, Artificial Sequence
  Description of Artificial Sequence: Synthetic oligonucleotide
ccuccccuaguccugcugg

SEQ ID NO: 1674865 - RNA, 19 nt, Artificial Sequence
  Description of Artificial Sequence: Synthetic oligonucleotide
gcgggauugugucuucggc

SEQ ID NO: 1674866 - RNA, 19 nt, Artificial Sequence
  Description of Artificial Sequence: Synthetic oligonucleotide
gcugcaagaaguuggcgcu

SEQ ID NO: 1674867 - RNA, 19 nt, Artificial Sequence
  Description of Artificial Sequence: Synthetic oligonucleotide
uccagauugcgggcuccgc

SEQ ID NO: 1674868 - RNA, 19 nt, Artificial Sequence
  Description of Artificial Sequence: Synthetic oligonucleotide
ccacgaagguaucauagga

SEQ ID NO: 1674869 - RNA, 19 nt, Artificial Sequence
  Description of Artificial Sequence: Synthetic oligonucleotide
uaggcgccuccuccccuag

SEQ ID NO: 1674870 - RNA, 19 nt, Artificial Sequence
  Description of Artificial Sequence: Synthetic oligonucleotide
cugugccgaggccaccaag

SEQ ID NO: 1674871 - RNA, 19 nt, Artificial Sequence
  Description of Artificial Sequence: Synthetic oligonucleotide
auugcgguaugaagaggaa

SEQ ID NO: 1674872 - RNA, 19 nt, Artificial Sequence
  Description of Artificial Sequence: Synthetic oligonucleotide
gugaggcguguuccugugc

SEQ ID NO: 1674873 - RNA, 19 nt, Artificial Sequence
  Description of Artificial Sequence: Synthetic oligonucleotide
gauugcgggcuccgcagua

SEQ ID NO: 1674874 - RNA, 19 nt, Artificial Sequence
  Description of Artificial Sequence: Synthetic oligonucleotide
gccuuguaagaugagagcu

SEQ ID NO: 1674875 - RNA, 19 nt, Artificial Sequence
  Description of Artificial Sequence: Synthetic oligonucleotide
gcauugcugagcagauggg

SEQ ID NO: 1674876 - RNA, 19 nt, Artificial Sequence
  Description of Artificial Sequence: Synthetic oligonucleotide
gcuauaguccacgaaggua

SEQ ID NO: 1674877 - RNA, 19 nt, Artificial Sequence
  Description of Artificial Sequence: Synthetic oligonucleotide
uggccaccggccgauagua

SEQ ID NO: 1674878 - RNA, 19 nt, Artificial Sequence
  Description of Artificial Sequence: Synthetic oligonucleotide
uugugccggugcagcaggu

SEQ ID NO: 1674879 - RNA, 19 nt, Artificial Sequence
  Description of Artificial Sequence: Synthetic oligonucleotide
gcaaccgcccuaucccuug

SEQ ID NO: 1674880 - RNA, 19 nt, Artificial Sequence
  Description of Artificial Sequence: Synthetic oligonucleotide
ccuagucaaacacagguau

SEQ ID NO: 1674881 - RNA, 19 nt, Artificial Sequence
  Description of Artificial Sequence: Synthetic oligonucleotide
acguguggccgcagcugcc

SEQ ID NO: 1674882 - RNA, 19 nt, Artificial Sequence
  Description of Artificial Sequence: Synthetic oligonucleotide
cuaacccaacggccagcac

SEQ ID NO: 1674883 - RNA, 19 nt, Artificial Sequence
  Description of Artificial Sequence: Synthetic oligonucleotide
cggccgauaguacaccucc

SEQ ID NO: 1674884 - RNA, 19 nt, Artificial Sequence
  Description of Artificial Sequence: Synthetic oligonucleotide
cgcccuaucccuugaggcg

SEQ ID NO: 1674885 - RNA, 19 nt, Artificial Sequence
  Description of Artificial Sequence: Synthetic oligonucleotide
caccgaugacccagugcug

SEQ ID NO: 1674886 - RNA, 19 nt, Artificial Sequence
  Description of Artificial Sequence: Synthetic oligonucleotide
cuccgcaguaggggcaagc

SEQ ID NO: 1674887 - RNA, 19 nt, Artificial Sequence
  Description of Artificial Sequence: Synthetic oligonucleotide
aguacaccuccaggcagau

SEQ ID NO: 1674888 - RNA, 19 nt, Artificial Sequence
  Description of Artificial Sequence: Synthetic oligonucleotide
agguaucauaggagaauuu

SEQ ID NO: 1674889 - RNA, 19 nt, Artificial Sequence
  Description of Artificial Sequence: Synthetic oligonucleotide
ucucuacaugaguggccuu

SEQ ID NO: 1674890 - RNA, 19 nt, Artificial Sequence
  Description of Artificial Sequence: Synthetic oligonucleotide
gcgguaugaagaggaacug

SEQ ID NO: 1674891 - RNA, 19 nt, Artificial Sequence
  Description of Artificial Sequence: Synthetic oligonucleotide
aggagggcaaccgcccuau

SEQ ID NO: 1674892 - RNA, 19 nt, Artificial Sequence
  Description of Artificial Sequence: Synthetic oligonucleotide
gcggugacucuccacacaa

SEQ ID NO: 1674893 - RNA, 19 nt, Artificial Sequence
  Description of Artificial Sequence: Synthetic oligonucleotide
ugccgcugcugugccgagg

SEQ ID NO: 1674894 - RNA, 19 nt, Artificial Sequence
  Description of Artificial Sequence: Synthetic oligonucleotide
aagcaaagguggaccgauu

SEQ ID NO: 1674895 - RNA, 19 nt, Artificial Sequence
  Description of Artificial Sequence: Synthetic oligonucleotide
uuagcccagugaggcgugu

SEQ ID NO: 1674896 - RNA, 19 nt, Artificial Sequence
  Description of Artificial Sequence: Synthetic oligonucleotide
ugucgccgcucgcgggccc

SEQ ID NO: 1674897 - RNA, 19 nt, Artificial Sequence
  Description of Artificial Sequence: Synthetic oligonucleotide
caccggccgauaguacacc

SEQ ID NO: 1674898 - RNA, 19 nt, Artificial Sequence
  Description of Artificial Sequence: Synthetic oligonucleotide
cuuagggcaccucauccuu

SEQ ID NO: 1674899 - RNA, 19 nt, Artificial Sequence
  Description of Artificial Sequence: Synthetic oligonucleotide
cacagguauugcgguauga

SEQ ID NO: 1674900 - RNA, 19 nt, Artificial Sequence
  Description of Artificial Sequence: Synthetic oligonucleotide
acuccccgcagaacgugug

SEQ ID NO: 1674901 - RNA, 19 nt, Artificial Sequence
  Description of Artificial Sequence: Synthetic oligonucleotide
ccccuaguccugcuggggc

SEQ ID NO: 1674902 - RNA, 19 nt, Artificial Sequence
  Description of Artificial Sequence: Synthetic oligonucleotide
gccucaguucucagagagg

SEQ ID NO: 1674903 - RNA, 19 nt, Artificial Sequence
  Description of Artificial Sequence: Synthetic oligonucleotide
caagcaaagguggaccgau

SEQ ID NO: 1674904 - RNA, 19 nt, Artificial Sequence
  Description of Artificial Sequence: Synthetic oligonucleotide
gcgggcuccgcaguagggg

SEQ ID NO: 1674905 - RNA, 19 nt, Artificial Sequence
  Description of Artificial Sequence: Synthetic oligonucleotide
ggcgccuccuccccuaguc

SEQ ID NO: 1674906 - RNA, 19 nt, Artificial Sequence
  Description of Artificial Sequence: Synthetic oligonucleotide
cuucggccccagacuugag

SEQ ID NO: 1674907 - RNA, 19 nt, Artificial Sequence
  Description of Artificial Sequence: Synthetic oligonucleotide
cgguaugaagaggaacugc

SEQ ID NO: 1674908 - RNA, 19 nt, Artificial Sequence
  Description of Artificial Sequence: Synthetic oligonucleotide
uggaccgauugggaauauu

SEQ ID NO: 1674909 - RNA, 19 nt, Artificial Sequence
  Description of Artificial Sequence: Synthetic oligonucleotide
gccagcuagccaguauccc

SEQ ID NO: 1674910 - RNA, 19 nt, Artificial Sequence
  Description of Artificial Sequence: Synthetic oligonucleotide
auggggcacaccacacggu

SEQ ID NO: 1674911 - RNA, 19 nt, Artificial Sequence
  Description of Artificial Sequence: Synthetic oligonucleotide
ggcaacacagggacaaacu

SEQ ID NO: 1674912 - RNA, 19 nt, Artificial Sequence
  Description of Artificial Sequence: Synthetic oligonucleotide
guaugaagaggaacugcuu

SEQ ID NO: 1674913 - RNA, 19 nt, Artificial Sequence
  Description of Artificial Sequence: Synthetic oligonucleotide
aggugccuuguaagaugag

SEQ ID NO: 1674914 - RNA, 19 nt, Artificial Sequence
  Description of Artificial Sequence: Synthetic oligonucleotide
gcuuacgguggaagcgaag

SEQ ID NO: 1674915 - RNA, 19 nt, Artificial Sequence
  Description of Artificial Sequence: Synthetic oligonucleotide
gguggaccgauugggaaua

SEQ ID NO: 1674916 - RNA, 19 nt, Artificial Sequence
  Description of Artificial Sequence: Synthetic oligonucleotide
cagugaggcguguuccugu

SEQ ID NO: 1674917 - RNA, 19 nt, Artificial Sequence
  Description of Artificial Sequence: Synthetic oligonucleotide
cccacacgaggacaucaug

SEQ ID NO: 1674918 - RNA, 19 nt, Artificial Sequence
  Description of Artificial Sequence: Synthetic oligonucleotide
gggucgaagggcagacggc

SEQ ID NO: 1674919 - RNA, 19 nt, Artificial Sequence
  Description of Artificial Sequence: Synthetic oligonucleotide
cugauccagauugcgggcu

SEQ ID NO: 1674920 - RNA, 19 nt, Artificial Sequence
  Description of Artificial Sequence: Synthetic oligonucleotide
uuccccacacgaggacauc

SEQ ID NO: 1674921 - RNA, 19 nt, Artificial Sequence
  Description of Artificial Sequence: Synthetic oligonucleotide
guacaccuccaggcagaug

SEQ ID NO: 1674922 - RNA, 19 nt, Artificial Sequence
  Description of Artificial Sequence: Synthetic oligonucleotide
cccuaucccuugaggcggg

SEQ ID NO: 1674923 - RNA, 19 nt, Artificial Sequence
  Description of Artificial Sequence: Synthetic oligonucleotide
gcaaggggccagcuagcca

SEQ ID NO: 1674924 - RNA, 19 nt, Artificial Sequence
  Description of Artificial Sequence: Synthetic oligonucleotide
cuaggcgccuccuccccua

SEQ ID NO: 1674925 - RNA, 19 nt, Artificial Sequence
  Description of Artificial Sequence: Synthetic oligonucleotide
gcaagcaaagguggaccga

SEQ ID NO: 1674926 - RNA, 19 nt, Artificial Sequence
  Description of Artificial Sequence: Synthetic oligonucleotide
aggacccaguggcccugcu

SEQ ID NO: 1674927 - RNA, 19 nt, Artificial Sequence
  Description of Artificial Sequence: Synthetic oligonucleotide
ggggcacaccacacgguug

SEQ ID NO: 1674928 - RNA, 19 nt, Artificial Sequence
  Description of Artificial Sequence: Synthetic oligonucleotide
ggcuuccucaucgaugcua

SEQ ID NO: 1674929 - RNA, 19 nt, Artificial Sequence
  Description of Artificial Sequence: Synthetic oligonucleotide
agccaguaucccagcccug

SEQ ID NO: 1674930 - RNA, 19 nt, Artificial Sequence
  Description of Artificial Sequence: Synthetic oligonucleotide
ggaagcgaagcuggggacu

SEQ ID NO: 1674931 - RNA, 19 nt, Artificial Sequence
  Description of Artificial Sequence: Synthetic oligonucleotide
cgggcuccgcaguaggggc

SEQ ID NO: 1674932 - RNA, 19 nt, Artificial Sequence
  Description of Artificial Sequence: Synthetic oligonucleotide
cgcucgcgggcccagcugg

SEQ ID NO: 1674933 - RNA, 19 nt, Artificial Sequence
  Description of Artificial Sequence: Synthetic oligonucleotide
ccuaguccugcuggggcac

SEQ ID NO: 1674934 - RNA, 19 nt, Artificial Sequence
  Description of Artificial Sequence: Synthetic oligonucleotide
gaccuucaggcaggaggaa

SEQ ID NO: 1674935 - RNA, 19 nt, Artificial Sequence
  Description of Artificial Sequence: Synthetic oligonucleotide
cgcgggcccagcuggaggc

SEQ ID NO: 1674936 - RNA, 19 nt, Artificial Sequence
  Description of Artificial Sequence: Synthetic oligonucleotide
caaccgcccuaucccuuga

SEQ ID NO: 1674937 - RNA, 19 nt, Artificial Sequence
  Description of Artificial Sequence: Synthetic oligonucleotide
cgaugacccagugcugccg

SEQ ID NO: 1674938 - RNA, 19 nt, Artificial Sequence
  Description of Artificial Sequence: Synthetic oligonucleotide
ggcguguuccugugcaggu

SEQ ID NO: 1674939 - RNA, 19 nt, Artificial Sequence
  Description of Artificial Sequence: Synthetic oligonucleotide
ggccaccaagcuacggaac

SEQ ID NO: 1674940 - RNA, 19 nt, Artificial Sequence
  Description of Artificial Sequence: Synthetic oligonucleotide
gcguguuccugugcaggug

SEQ ID NO: 1674941 - RNA, 19 nt, Artificial Sequence
  Description of Artificial Sequence: Synthetic oligonucleotide
cugccgcugcugugccgag

SEQ ID NO: 1674942 - RNA, 19 nt, Artificial Sequence
  Description of Artificial Sequence: Synthetic oligonucleotide
gggcauugcugagcagaug

SEQ ID NO: 1674943 - RNA, 19 nt, Artificial Sequence
  Description of Artificial Sequence: Synthetic oligonucleotide
ccggccgauaguacaccuc

SEQ ID NO: 1674944 - RNA, 19 nt, Artificial Sequence
  Description of Artificial Sequence: Synthetic oligonucleotide
accccggcaggugccuugu

SEQ ID NO: 1674945 - RNA, 19 nt, Artificial Sequence
  Description of Artificial Sequence: Synthetic oligonucleotide
aggcgccuccuccccuagu

SEQ ID NO: 1674946 - RNA, 19 nt, Artificial Sequence
  Description of Artificial Sequence: Synthetic oligonucleotide
gcugccggccaggacccag

SEQ ID NO: 1674947 - RNA, 19 nt, Artificial Sequence
  Description of Artificial Sequence: Synthetic oligonucleotide
gggacaaacuuagggcagu

SEQ ID NO: 1674948 - RNA, 19 nt, Artificial Sequence
  Description of Artificial Sequence: Synthetic oligonucleotide
caggagggcaaccgcccua

SEQ ID NO: 1674949 - RNA, 19 nt, Artificial Sequence
  Description of Artificial Sequence: Synthetic oligonucleotide
ccgaggccaccaagcuacg

SEQ ID NO: 1674950 - RNA, 19 nt, Artificial Sequence
  Description of Artificial Sequence: Synthetic oligonucleotide
ggcaggugccuuguaagau

SEQ ID NO: 1674951 - RNA, 19 nt, Artificial Sequence
  Description of Artificial Sequence: Synthetic oligonucleotide
ccuuccccacacgaggaca

SEQ ID NO: 1674952 - RNA, 19 nt, Artificial Sequence
  Description of Artificial Sequence: Synthetic oligonucleotide
ggccgauaguacaccucca

SEQ ID NO: 1674953 - RNA, 19 nt, Artificial Sequence
  Description of Artificial Sequence: Synthetic oligonucleotide
cugccucuugaagcaccga

SEQ ID NO: 1674954 - RNA, 19 nt, Artificial Sequence
  Description of Artificial Sequence: Synthetic oligonucleotide
gggcaaccgcccuaucccu

SEQ ID NO: 1674955 - RNA, 19 nt, Artificial Sequence
  Description of Artificial Sequence: Synthetic oligonucleotide
acccaacggccagcaccug

SEQ ID NO: 1674956 - RNA, 19 nt, Artificial Sequence
  Description of Artificial Sequence: Synthetic oligonucleotide
cugccggccaggacccagu

SEQ ID NO: 1674957 - RNA, 19 nt, Artificial Sequence
  Description of Artificial Sequence: Synthetic oligonucleotide
caacggccagcaccugccu

SEQ ID NO: 1674958 - RNA, 19 nt, Artificial Sequence
  Description of Artificial Sequence: Synthetic oligonucleotide
ggagggcaaccgcccuauc

SEQ ID NO: 1674959 - RNA, 19 nt, Artificial Sequence
  Description of Artificial Sequence: Synthetic oligonucleotide
cuaucccuugaggcgggau

SEQ ID NO: 1674960 - RNA, 19 nt, Artificial Sequence
  Description of Artificial Sequence: Synthetic oligonucleotide
ccgcaguaggggcaagcaa

SEQ ID NO: 1674961 - RNA, 19 nt, Artificial Sequence
  Description of Artificial Sequence: Synthetic oligonucleotide
ggccaccggccgauaguac

SEQ ID NO: 1674962 - RNA, 19 nt, Artificial Sequence
  Description of Artificial Sequence: Synthetic oligonucleotide
ggacaaacuuagggcaguu

SEQ ID NO: 1674963 - RNA, 19 nt, Artificial Sequence
  Description of Artificial Sequence: Synthetic oligonucleotide
cugcaagaaguuggcgcuu

SEQ ID NO: 1674964 - RNA, 19 nt, Artificial Sequence
  Description of Artificial Sequence: Synthetic oligonucleotide
ggggccagcuagccaguau

SEQ ID NO: 1674965 - RNA, 19 nt, Artificial Sequence
  Description of Artificial Sequence: Synthetic oligonucleotide
cugcgccuccaggccgcug

SEQ ID NO: 1674966 - RNA, 19 nt, Artificial Sequence
  Description of Artificial Sequence: Synthetic oligonucleotide
gcuccgcaguaggggcaag

SEQ ID NO: 1674967 - RNA, 19 nt, Artificial Sequence
  Description of Artificial Sequence: Synthetic oligonucleotide
guggaccgauugggaauau

SEQ ID NO: 1674968 - RNA, 19 nt, Artificial Sequence
  Description of Artificial Sequence: Synthetic oligonucleotide
gcgaagcuggggacugggu

SEQ ID NO: 1674969 - RNA, 19 nt, Artificial Sequence
  Description of Artificial Sequence: Synthetic oligonucleotide
ggcaaccgcccuaucccuu

SEQ ID NO: 1674970 - RNA, 19 nt, Artificial Sequence
  Description of Artificial Sequence: Synthetic oligonucleotide
ccuaucccuugaggcggga

SEQ ID NO: 1674971 - RNA, 19 nt, Artificial Sequence
  Description of Artificial Sequence: Synthetic oligonucleotide
caaccccggcaggugccuu

SEQ ID NO: 1674972 - RNA, 19 nt, Artificial Sequence
  Description of Artificial Sequence: Synthetic oligonucleotide
ccccggcaggugccuugua

SEQ ID NO: 1674973 - RNA, 19 nt, Artificial Sequence
  Description of Artificial Sequence: Synthetic oligonucleotide
cggcuuccucaucgaugcu

SEQ ID NO: 1674974 - RNA, 19 nt, Artificial Sequence
  Description of Artificial Sequence: Synthetic oligonucleotide
aauucuaucguguaagggg

SEQ ID NO: 1674975 - RNA, 19 nt, Artificial Sequence
  Description of Artificial Sequence: Synthetic oligonucleotide
aagaacaucaaccgaaggg

SEQ ID NO: 1674976 - RNA, 19 nt, Artificial Sequence
  Description of Artificial Sequence: Synthetic oligonucleotide
guaaauauagaugucaggg

SEQ ID NO: 1674977 - RNA, 19 nt, Artificial Sequence
  Description of Artificial Sequence: Synthetic oligonucleotide
aauccugcggaucuugacc

SEQ ID NO: 1674978 - RNA, 19 nt, Artificial Sequence
  Description of Artificial Sequence: Synthetic oligonucleotide
agaaccauuaguuauuuug

SEQ ID NO: 1674979 - RNA, 19 nt, Artificial Sequence
  Description of Artificial Sequence: Synthetic oligonucleotide
aagaucuuaagcucaaaug

SEQ ID NO: 1674980 - RNA, 19 nt, Artificial Sequence
  Description of Artificial Sequence: Synthetic oligonucleotide
aaauauagaugucagggau

SEQ ID NO: 1674981 - RNA, 19 nt, Artificial Sequence
  Description of Artificial Sequence: Synthetic oligonucleotide
accauuaguuauuuugucc

SEQ ID NO: 1674982 - RNA, 19 nt, Artificial Sequence
  Description of Artificial Sequence: Synthetic oligonucleotide
auccauacacaauggaucc

SEQ ID NO: 1674983 - RNA, 19 nt, Artificial Sequence
  Description of Artificial Sequence: Synthetic oligonucleotide
caauuuuaaacauaaccug

SEQ ID NO: 1674984 - RNA, 19 nt, Artificial Sequence
  Description of Artificial Sequence: Synthetic oligonucleotide
gguaauacaagguuguucc

SEQ ID NO: 1674985 - RNA, 19 nt, Artificial Sequence
  Description of Artificial Sequence: Synthetic oligonucleotide
guugauuucaauucgagaa

SEQ ID NO: 1674986 - RNA, 19 nt, Artificial Sequence
  Description of Artificial Sequence: Synthetic oligonucleotide
cagaacuagacuuugguug

SEQ ID NO: 1674987 - RNA, 19 nt, Artificial Sequence
  Description of Artificial Sequence: Synthetic oligonucleotide
uuuaaugggugcuucauaa

SEQ ID NO: 1674988 - RNA, 19 nt, Artificial Sequence
  Description of Artificial Sequence: Synthetic oligonucleotide
agaacuagacuuugguugg

SEQ ID NO: 1674989 - RNA, 19 nt, Artificial Sequence
  Description of Artificial Sequence: Synthetic oligonucleotide
aauacaagguuguuccugu

SEQ ID NO: 1674990 - RNA, 19 nt, Artificial Sequence
  Description of Artificial Sequence: Synthetic oligonucleotide
aguccuuaauguuaugagg

SEQ ID NO: 1674991 - RNA, 19 nt, Artificial Sequence
  Description of Artificial Sequence: Synthetic oligonucleotide
uuaagaacaucaaccgaag

SEQ ID NO: 1674992 - RNA, 19 nt, Artificial Sequence
  Description of Artificial Sequence: Synthetic oligonucleotide
augacucuccaucaauucc

SEQ ID NO: 1674993 - RNA, 19 nt, Artificial Sequence
  Description of Artificial Sequence: Synthetic oligonucleotide
aaauucuaucguguaaggg

SEQ ID NO: 1674994 - RNA, 19 nt, Artificial Sequence
  Description of Artificial Sequence: Synthetic oligonucleotide
aaagcacuucgccuccucc

SEQ ID NO: 1674995 - RNA, 19 nt, Artificial Sequence
  Description of Artificial Sequence: Synthetic oligonucleotide
uacgccauuccucugauac

SEQ ID NO: 1674996 - RNA, 19 nt, Artificial Sequence
  Description of Artificial Sequence: Synthetic oligonucleotide
uucaaaaucucggaggccc

SEQ ID NO: 1674997 - RNA, 19 nt, Artificial Sequence
  Description of Artificial Sequence: Synthetic oligonucleotide
uucaauucgagaaccauua

SEQ ID NO: 1674998 - RNA, 19 nt, Artificial Sequence
  Description of Artificial Sequence: Synthetic oligonucleotide
aaugggugcuucauaaacg

SEQ ID NO: 1674999 - RNA, 19 nt, Artificial Sequence
  Description of Artificial Sequence: Synthetic oligonucleotide
uaaugggugcuucauaaac

SEQ ID NO: 1675000 - RNA, 19 nt, Artificial Sequence
  Description of Artificial Sequence: Synthetic oligonucleotide
uguugccuuaagaacauca

SEQ ID NO: 1675001 - RNA, 19 nt, Artificial Sequence
  Description of Artificial Sequence: Synthetic oligonucleotide
aauucgagaaccauuaguu

SEQ ID NO: 1675002 - RNA, 19 nt, Artificial Sequence
  Description of Artificial Sequence: Synthetic oligonucleotide
augggugcuucauaaacgg

SEQ ID NO: 1675003 - RNA, 19 nt, Artificial Sequence
  Description of Artificial Sequence: Synthetic oligonucleotide
ucauguuaugacagcauca

SEQ ID NO: 1675004 - RNA, 19 nt, Artificial Sequence
  Description of Artificial Sequence: Synthetic oligonucleotide
uugauuucaauucgagaac

SEQ ID NO: 1675005 - RNA, 19 nt, Artificial Sequence
  Description of Artificial Sequence: Synthetic oligonucleotide
gaauccacaauccgguuug

SEQ ID NO: 1675006 - RNA, 19 nt, Artificial Sequence
  Description of Artificial Sequence: Synthetic oligonucleotide
agaaaagcacuucgccucc

SEQ ID NO: 1675007 - RNA, 19 nt, Artificial Sequence
  Description of Artificial Sequence: Synthetic oligonucleotide
acacaauggauccucaugu

SEQ ID NO: 1675008 - RNA, 19 nt, Artificial Sequence
  Description of Artificial Sequence: Synthetic oligonucleotide
cuuaagaacaucaaccgaa

SEQ ID NO: 1675009 - RNA, 19 nt, Artificial Sequence
  Description of Artificial Sequence: Synthetic oligonucleotide
aggagauacgcgcacagag

SEQ ID NO: 1675010 - RNA, 19 nt, Artificial Sequence
  Description of Artificial Sequence: Synthetic oligonucleotide
cauccauacacaauggauc

SEQ ID NO: 1675011 - RNA, 19 nt, Artificial Sequence
  Description of Artificial Sequence: Synthetic oligonucleotide
ugauuucaauucgagaacc

SEQ ID NO: 1675012 - RNA, 19 nt, Artificial Sequence
  Description of Artificial Sequence: Synthetic oligonucleotide
accaacgcaggucaucagc

SEQ ID NO: 1675013 - RNA, 19 nt, Artificial Sequence
  Description of Artificial Sequence: Synthetic oligonucleotide
guugaguccacacauccgc

SEQ ID NO: 1675014 - RNA, 19 nt, Artificial Sequence
  Description of Artificial Sequence: Synthetic oligonucleotide
ucggagaacacuacaguca

SEQ ID NO: 1675015 - RNA, 19 nt, Artificial Sequence
  Description of Artificial Sequence: Synthetic oligonucleotide
ugguugaguccacacaucc

SEQ ID NO: 1675016 - RNA, 19 nt, Artificial Sequence
  Description of Artificial Sequence: Synthetic oligonucleotide
uucgagaaccauuaguuau

SEQ ID NO: 1675017 - RNA, 19 nt, Artificial Sequence
  Description of Artificial Sequence: Synthetic oligonucleotide
uauuuuguccaacagccuu

SEQ ID NO: 1675018 - RNA, 19 nt, Artificial Sequence
  Description of Artificial Sequence: Synthetic oligonucleotide
caucugaggagauacgcgc

SEQ ID NO: 1675019 - RNA, 19 nt, Artificial Sequence
  Description of Artificial Sequence: Synthetic oligonucleotide
gauacgcgcacagaguacg

SEQ ID NO: 1675020 - RNA, 19 nt, Artificial Sequence
  Description of Artificial Sequence: Synthetic oligonucleotide
augacagcaucacuugagg

SEQ ID NO: 1675021 - RNA, 19 nt, Artificial Sequence
  Description of Artificial Sequence: Synthetic oligonucleotide
agaacaucaaccgaagggu

SEQ ID NO: 1675022 - RNA, 19 nt, Artificial Sequence
  Description of Artificial Sequence: Synthetic oligonucleotide
acuacagucaugcuccaca

SEQ ID NO: 1675023 - RNA, 19 nt, Artificial Sequence
  Description of Artificial Sequence: Synthetic oligonucleotide
guccuuaauguuaugaggc

SEQ ID NO: 1675024 - RNA, 19 nt, Artificial Sequence
  Description of Artificial Sequence: Synthetic oligonucleotide
ugguugauuucaauucgag

SEQ ID NO: 1675025 - RNA, 19 nt, Artificial Sequence
  Description of Artificial Sequence: Synthetic oligonucleotide
auugguagucucugccacc

SEQ ID NO: 1675026 - RNA, 19 nt, Artificial Sequence
  Description of Artificial Sequence: Synthetic oligonucleotide
gauccucauguuaugacag

SEQ ID NO: 1675027 - RNA, 19 nt, Artificial Sequence
  Description of Artificial Sequence: Synthetic oligonucleotide
uuucaauagagggagugcu

SEQ ID NO: 1675028 - RNA, 19 nt, Artificial Sequence
  Description of Artificial Sequence: Synthetic oligonucleotide
auccugcggaucuugaccg

SEQ ID NO: 1675029 - RNA, 19 nt, Artificial Sequence
  Description of Artificial Sequence: Synthetic oligonucleotide
ggagaguggucccagaagg

SEQ ID NO: 1675030 - RNA, 19 nt, Artificial Sequence
  Description of Artificial Sequence: Synthetic oligonucleotide
uaauacaagguuguuccug

SEQ ID NO: 1675031 - RNA, 19 nt, Artificial Sequence
  Description of Artificial Sequence: Synthetic oligonucleotide
ucaaaaucucggaggcccg

SEQ ID NO: 1675032 - RNA, 19 nt, Artificial Sequence
  Description of Artificial Sequence: Synthetic oligonucleotide
ucauaaacggagccagaca

SEQ ID NO: 1675033 - RNA, 19 nt, Artificial Sequence
  Description of Artificial Sequence: Synthetic oligonucleotide
aaugcuucggagaacacua

SEQ ID NO: 1675034 - RNA, 19 nt, Artificial Sequence
  Description of Artificial Sequence: Synthetic oligonucleotide
uaugaggcuguccuguccu

SEQ ID NO: 1675035 - RNA, 19 nt, Artificial Sequence
  Description of Artificial Sequence: Synthetic oligonucleotide
cagggcaugagaaaagcac

SEQ ID NO: 1675036 - RNA, 19 nt, Artificial Sequence
  Description of Artificial Sequence: Synthetic oligonucleotide
ugaggagauacgcgcacag

SEQ ID NO: 1675037 - RNA, 19 nt, Artificial Sequence
  Description of Artificial Sequence: Synthetic oligonucleotide
uaagcucaaaugacucucc

SEQ ID NO: 1675038 - RNA, 19 nt, Artificial Sequence
  Description of Artificial Sequence: Synthetic oligonucleotide
uuccuuacagggcaugaga

SEQ ID NO: 1675039 - RNA, 19 nt, Artificial Sequence
  Description of Artificial Sequence: Synthetic oligonucleotide
aacuguuucaauagaggga

SEQ ID NO: 1675040 - RNA, 19 nt, Artificial Sequence
  Description of Artificial Sequence: Synthetic oligonucleotide
gguaauagccaaugcuucg

SEQ ID NO: 1675041 - RNA, 19 nt, Artificial Sequence
  Description of Artificial Sequence: Synthetic oligonucleotide
uucggagaacacuacaguc

SEQ ID NO: 1675042 - RNA, 19 nt, Artificial Sequence
  Description of Artificial Sequence: Synthetic oligonucleotide
uucaauagagggagugcug

SEQ ID NO: 1675043 - RNA, 19 nt, Artificial Sequence
  Description of Artificial Sequence: Synthetic oligonucleotide
ucaauucgagaaccauuag

SEQ ID NO: 1675044 - RNA, 19 nt, Artificial Sequence
  Description of Artificial Sequence: Synthetic oligonucleotide
guaauagccaaugcuucgg

SEQ ID NO: 1675045 - RNA, 19 nt, Artificial Sequence
  Description of Artificial Sequence: Synthetic oligonucleotide
gaagguaccauugguaguc

SEQ ID NO: 1675046 - RNA, 19 nt, Artificial Sequence
  Description of Artificial Sequence: Synthetic oligonucleotide
aauccgguuugccaucuga

SEQ ID NO: 1675047 - RNA, 19 nt, Artificial Sequence
  Description of Artificial Sequence: Synthetic oligonucleotide
agcagaacuagacuuuggu

SEQ ID NO: 1675048 - RNA, 19 nt, Artificial Sequence
  Description of Artificial Sequence: Synthetic oligonucleotide
uucauaaacggagccagac

SEQ ID NO: 1675049 - RNA, 19 nt, Artificial Sequence
  Description of Artificial Sequence: Synthetic oligonucleotide
ucguguaaggggagagugg

SEQ ID NO: 1675050 - RNA, 19 nt, Artificial Sequence
  Description of Artificial Sequence: Synthetic oligonucleotide
uccgguuugccaucugagg

SEQ ID NO: 1675051 - RNA, 19 nt, Artificial Sequence
  Description of Artificial Sequence: Synthetic oligonucleotide
ucaauagagggagugcugu

SEQ ID NO: 1675052 - RNA, 19 nt, Artificial Sequence
  Description of Artificial Sequence: Synthetic oligonucleotide
ucaaaugacucuccaucaa

SEQ ID NO: 1675053 - RNA, 19 nt, Artificial Sequence
  Description of Artificial Sequence: Synthetic oligonucleotide
ucgcaagaucuuaagcuca

SEQ ID NO: 1675054 - RNA, 19 nt, Artificial Sequence
  Description of Artificial Sequence: Synthetic oligonucleotide
cauaaacggagccagacaa

SEQ ID NO: 1675055 - RNA, 19 nt, Artificial Sequence
  Description of Artificial Sequence: Synthetic oligonucleotide
uccuuacagggcaugagaa

SEQ ID NO: 1675056 - RNA, 19 nt, Artificial Sequence
  Description of Artificial Sequence: Synthetic oligonucleotide
acuagacuuugguugguug

SEQ ID NO: 1675057 - RNA, 19 nt, Artificial Sequence
  Description of Artificial Sequence: Synthetic oligonucleotide
aaaaucucggaggcccggg

SEQ ID NO: 1675058 - RNA, 19 nt, Artificial Sequence
  Description of Artificial Sequence: Synthetic oligonucleotide
uaauagccaaugcuucgga

SEQ ID NO: 1675059 - RNA, 19 nt, Artificial Sequence
  Description of Artificial Sequence: Synthetic oligonucleotide
gaaguugcaccccgcguag

SEQ ID NO: 1675060 - RNA, 19 nt, Artificial Sequence
  Description of Artificial Sequence: Synthetic oligonucleotide
uccuuaauguuaugaggcu

SEQ ID NO: 1675061 - RNA, 19 nt, Artificial Sequence
  Description of Artificial Sequence: Synthetic oligonucleotide
agguaauagccaaugcuuc

SEQ ID NO: 1675062 - RNA, 19 nt, Artificial Sequence
  Description of Artificial Sequence: Synthetic oligonucleotide
aacaccaacgcaggucauc

SEQ ID NO: 1675063 - RNA, 19 nt, Artificial Sequence
  Description of Artificial Sequence: Synthetic oligonucleotide
gcuucaaaaucucggaggc

SEQ ID NO: 1675064 - RNA, 19 nt, Artificial Sequence
  Description of Artificial Sequence: Synthetic oligonucleotide
aacgcgacagggaccaccg

SEQ ID NO: 1675065 - RNA, 19 nt, Artificial Sequence
  Description of Artificial Sequence: Synthetic oligonucleotide
cucaggaagguaccauugg

SEQ ID NO: 1675066 - RNA, 19 nt, Artificial Sequence
  Description of Artificial Sequence: Synthetic oligonucleotide
ucugaggagauacgcgcac

SEQ ID NO: 1675067 - RNA, 19 nt, Artificial Sequence
  Description of Artificial Sequence: Synthetic oligonucleotide
ucauuggucacuccucgua

SEQ ID NO: 1675068 - RNA, 19 nt, Artificial Sequence
  Description of Artificial Sequence: Synthetic oligonucleotide
caaccgaagggucaacuug

SEQ ID NO: 1675069 - RNA, 19 nt, Artificial Sequence
  Description of Artificial Sequence: Synthetic oligonucleotide
auucuaucguguaagggga

SEQ ID NO: 1675070 - RNA, 19 nt, Artificial Sequence
  Description of Artificial Sequence: Synthetic oligonucleotide
cauuggucacuccucguag

SEQ ID NO: 1675071 - RNA, 19 nt, Artificial Sequence
  Description of Artificial Sequence: Synthetic oligonucleotide
gucgcaagaucuuaagcuc

SEQ ID NO: 1675072 - RNA, 19 nt, Artificial Sequence
  Description of Artificial Sequence: Synthetic oligonucleotide
ugaguccacacauccgccc

SEQ ID NO: 1675073 - RNA, 19 nt, Artificial Sequence
  Description of Artificial Sequence: Synthetic oligonucleotide
aucguguaaggggagagug

SEQ ID NO: 1675074 - RNA, 19 nt, Artificial Sequence
  Description of Artificial Sequence: Synthetic oligonucleotide
cauugguagucucugccac

SEQ ID NO: 1675075 - RNA, 19 nt, Artificial Sequence
  Description of Artificial Sequence: Synthetic oligonucleotide
uucuaucguguaaggggag

SEQ ID NO: 1675076 - RNA, 19 nt, Artificial Sequence
  Description of Artificial Sequence: Synthetic oligonucleotide
acagaguacgccauuccuc

SEQ ID NO: 1675077 - RNA, 19 nt, Artificial Sequence
  Description of Artificial Sequence: Synthetic oligonucleotide
gauuagaggccaguucagc

SEQ ID NO: 1675078 - RNA, 19 nt, Artificial Sequence
  Description of Artificial Sequence: Synthetic oligonucleotide
ugguaauacaagguuguuc

SEQ ID NO: 1675079 - RNA, 19 nt, Artificial Sequence
  Description of Artificial Sequence: Synthetic oligonucleotide
uccucauguuaugacagca

SEQ ID NO: 1675080 - RNA, 19 nt, Artificial Sequence
  Description of Artificial Sequence: Synthetic oligonucleotide
uaauguuaugaggcugucc

SEQ ID NO: 1675081 - RNA, 19 nt, Artificial Sequence
  Description of Artificial Sequence: Synthetic oligonucleotide
ucgagaaccauuaguuauu

SEQ ID NO: 1675082 - RNA, 19 nt, Artificial Sequence
  Description of Artificial Sequence: Synthetic oligonucleotide
uggauccucauguuaugac

SEQ ID NO: 1675083 - RNA, 19 nt, Artificial Sequence
  Description of Artificial Sequence: Synthetic oligonucleotide
acagccuuauaaagcuugc

SEQ ID NO: 1675084 - RNA, 19 nt, Artificial Sequence
  Description of Artificial Sequence: Synthetic oligonucleotide
gagauacgcgcacagagua

SEQ ID NO: 1675085 - RNA, 19 nt, Artificial Sequence
  Description of Artificial Sequence: Synthetic oligonucleotide
ggucauuggucacuccucg

SEQ ID NO: 1675086 - RNA, 19 nt, Artificial Sequence
  Description of Artificial Sequence: Synthetic oligonucleotide
acaauggauccucauguua

SEQ ID NO: 1675087 - RNA, 19 nt, Artificial Sequence
  Description of Artificial Sequence: Synthetic oligonucleotide
aggaccuuccuuacagggc

SEQ ID NO: 1675088 - RNA, 19 nt, Artificial Sequence
  Description of Artificial Sequence: Synthetic oligonucleotide
cugggaacgcgacagggac

SEQ ID NO: 1675089 - RNA, 19 nt, Artificial Sequence
  Description of Artificial Sequence: Synthetic oligonucleotide
cuagacuuugguugguuga

SEQ ID NO: 1675090 - RNA, 19 nt, Artificial Sequence
  Description of Artificial Sequence: Synthetic oligonucleotide
cuuaauguuaugaggcugu

SEQ ID NO: 1675091 - RNA, 19 nt, Artificial Sequence
  Description of Artificial Sequence: Synthetic oligonucleotide
ggcgcaagaaguugcaccc

SEQ ID NO: 1675092 - RNA, 19 nt, Artificial Sequence
  Description of Artificial Sequence: Synthetic oligonucleotide
uacaagguuguuccuguuu

SEQ ID NO: 1675093 - RNA, 19 nt, Artificial Sequence
  Description of Artificial Sequence: Synthetic oligonucleotide
gaugcuccuggcagaaucc

SEQ ID NO: 1675094 - RNA, 19 nt, Artificial Sequence
  Description of Artificial Sequence: Synthetic oligonucleotide
aaaucucggaggcccgggu

SEQ ID NO: 1675095 - RNA, 19 nt, Artificial Sequence
  Description of Artificial Sequence: Synthetic oligonucleotide
cuggacgggcuucaggacc

SEQ ID NO: 1675096 - RNA, 19 nt, Artificial Sequence
  Description of Artificial Sequence: Synthetic oligonucleotide
gcuucauaaacggagccag

SEQ ID NO: 1675097 - RNA, 19 nt, Artificial Sequence
  Description of Artificial Sequence: Synthetic oligonucleotide
agaaggacuuuggaaacgu

SEQ ID NO: 1675098 - RNA, 19 nt, Artificial Sequence
  Description of Artificial Sequence: Synthetic oligonucleotide
auucgagaaccauuaguua

SEQ ID NO: 1675099 - RNA, 19 nt, Artificial Sequence
  Description of Artificial Sequence: Synthetic oligonucleotide
gugcuguugccuuaagaac

SEQ ID NO: 1675100 - RNA, 19 nt, Artificial Sequence
  Description of Artificial Sequence: Synthetic oligonucleotide
gaauccugcggaucuugac

SEQ ID NO: 1675101 - RNA, 19 nt, Artificial Sequence
  Description of Artificial Sequence: Synthetic oligonucleotide
acuuggucauuggucacuc

SEQ ID NO: 1675102 - RNA, 19 nt, Artificial Sequence
  Description of Artificial Sequence: Synthetic oligonucleotide
ucuaucguguaaggggaga

SEQ ID NO: 1675103 - RNA, 19 nt, Artificial Sequence
  Description of Artificial Sequence: Synthetic oligonucleotide
uccucugauacgcuugauu

SEQ ID NO: 1675104 - RNA, 19 nt, Artificial Sequence
  Description of Artificial Sequence: Synthetic oligonucleotide
auuccucugauacgcuuga

SEQ ID NO: 1675105 - RNA, 19 nt, Artificial Sequence
  Description of Artificial Sequence: Synthetic oligonucleotide
aucuugaccgggcgcccgc

SEQ ID NO: 1675106 - RNA, 19 nt, Artificial Sequence
  Description of Artificial Sequence: Synthetic oligonucleotide
auguuaugacagcaucacu

SEQ ID NO: 1675107 - RNA, 19 nt, Artificial Sequence
  Description of Artificial Sequence: Synthetic oligonucleotide
cuaucguguaaggggagag

SEQ ID NO: 1675108 - RNA, 19 nt, Artificial Sequence
  Description of Artificial Sequence: Synthetic oligonucleotide
ccauuaguuauuuugucca

SEQ ID NO: 1675109 - RNA, 19 nt, Artificial Sequence
  Description of Artificial Sequence: Synthetic oligonucleotide
gggugcuucauaaacggag

SEQ ID NO: 1675110 - RNA, 19 nt, Artificial Sequence
  Description of Artificial Sequence: Synthetic oligonucleotide
aaacguccugcuguccaag

SEQ ID NO: 1675111 - RNA, 19 nt, Artificial Sequence
  Description of Artificial Sequence: Synthetic oligonucleotide
uuggaaacguccugcuguc

SEQ ID NO: 1675112 - RNA, 19 nt, Artificial Sequence
  Description of Artificial Sequence: Synthetic oligonucleotide
acgccauuccucugauacg

SEQ ID NO: 1675113 - RNA, 19 nt, Artificial Sequence
  Description of Artificial Sequence: Synthetic oligonucleotide
guagucucugccaccagug

SEQ ID NO: 1675114 - RNA, 19 nt, Artificial Sequence
  Description of Artificial Sequence: Synthetic oligonucleotide
ccuggcagaauccacaauc

SEQ ID NO: 1675115 - RNA, 19 nt, Artificial Sequence
  Description of Artificial Sequence: Synthetic oligonucleotide
gaguacgccauuccucuga

SEQ ID NO: 1675116 - RNA, 19 nt, Artificial Sequence
  Description of Artificial Sequence: Synthetic oligonucleotide
aaguugcaccccgcguagc

SEQ ID NO: 1675117 - RNA, 19 nt, Artificial Sequence
  Description of Artificial Sequence: Synthetic oligonucleotide
ucaaccgaagggucaacuu

SEQ ID NO: 1675118 - RNA, 19 nt, Artificial Sequence
  Description of Artificial Sequence: Synthetic oligonucleotide
gaacuuguugaggaugcuc

SEQ ID NO: 1675119 - RNA, 19 nt, Artificial Sequence
  Description of Artificial Sequence: Synthetic oligonucleotide
auguuaugaggcuguccug

SEQ ID NO: 1675120 - RNA, 19 nt, Artificial Sequence
  Description of Artificial Sequence: Synthetic oligonucleotide
guaccauugguagucucug

SEQ ID NO: 1675121 - RNA, 19 nt, Artificial Sequence
  Description of Artificial Sequence: Synthetic oligonucleotide
aguugcaccccgcguagcu

SEQ ID NO: 1675122 - RNA, 19 nt, Artificial Sequence
  Description of Artificial Sequence: Synthetic oligonucleotide
uuugguugguugaguccac

SEQ ID NO: 1675123 - RNA, 19 nt, Artificial Sequence
  Description of Artificial Sequence: Synthetic oligonucleotide
gucuugcugagauuagaga

SEQ ID NO: 1675124 - RNA, 19 nt, Artificial Sequence
  Description of Artificial Sequence: Synthetic oligonucleotide
agggcaugagaaaagcacu

SEQ ID NO: 1675125 - RNA, 19 nt, Artificial Sequence
  Description of Artificial Sequence: Synthetic oligonucleotide
gagggagugcgccuggguc

SEQ ID NO: 1675126 - RNA, 19 nt, Artificial Sequence
  Description of Artificial Sequence: Synthetic oligonucleotide
agguaccauugguagucuc

SEQ ID NO: 1675127 - RNA, 19 nt, Artificial Sequence
  Description of Artificial Sequence: Synthetic oligonucleotide
ugggaacgcgacagggacc

SEQ ID NO: 1675128 - RNA, 19 nt, Artificial Sequence
  Description of Artificial Sequence: Synthetic oligonucleotide
gaacaucaaccgaaggguc

SEQ ID NO: 1675129 - RNA, 19 nt, Artificial Sequence
  Description of Artificial Sequence: Synthetic oligonucleotide
ugggugcuucauaaacgga

SEQ ID NO: 1675130 - RNA, 19 nt, Artificial Sequence
  Description of Artificial Sequence: Synthetic oligonucleotide
ggauccucauguuaugaca

SEQ ID NO: 1675131 - RNA, 19 nt, Artificial Sequence
  Description of Artificial Sequence: Synthetic oligonucleotide
agauacgcgcacagaguac

SEQ ID NO: 1675132 - RNA, 19 nt, Artificial Sequence
  Description of Artificial Sequence: Synthetic oligonucleotide
acaccaacgcaggucauca

SEQ ID NO: 1675133 - RNA, 19 nt, Artificial Sequence
  Description of Artificial Sequence: Synthetic oligonucleotide
cuucaaaaucucggaggcc

SEQ ID NO: 1675134 - RNA, 19 nt, Artificial Sequence
  Description of Artificial Sequence: Synthetic oligonucleotide
uugcaccccgcguagcuga

SEQ ID NO: 1675135 - RNA, 19 nt, Artificial Sequence
  Description of Artificial Sequence: Synthetic oligonucleotide
ccaucugaggagauacgcg

SEQ ID NO: 1675136 - RNA, 19 nt, Artificial Sequence
  Description of Artificial Sequence: Synthetic oligonucleotide
auacacaauggauccucau

SEQ ID NO: 1675137 - RNA, 19 nt, Artificial Sequence
  Description of Artificial Sequence: Synthetic oligonucleotide
uuaauguuaugaggcuguc

SEQ ID NO: 1675138 - RNA, 19 nt, Artificial Sequence
  Description of Artificial Sequence: Synthetic oligonucleotide
ggucuugcugagauuagag

SEQ ID NO: 1675139 - RNA, 19 nt, Artificial Sequence
  Description of Artificial Sequence: Synthetic oligonucleotide
uggagacuucccagaguug

SEQ ID NO: 1675140 - RNA, 19 nt, Artificial Sequence
  Description of Artificial Sequence: Synthetic oligonucleotide
ggaccuuccuuacagggca

SEQ ID NO: 1675141 - RNA, 19 nt, Artificial Sequence
  Description of Artificial Sequence: Synthetic oligonucleotide
aggcauuccccgucgcaag

SEQ ID NO: 1675142 - RNA, 19 nt, Artificial Sequence
  Description of Artificial Sequence: Synthetic oligonucleotide
gaacgcgacagggaccacc

SEQ ID NO: 1675143 - RNA, 19 nt, Artificial Sequence
  Description of Artificial Sequence: Synthetic oligonucleotide
cuuccuuacagggcaugag

SEQ ID NO: 1675144 - RNA, 19 nt, Artificial Sequence
  Description of Artificial Sequence: Synthetic oligonucleotide
uaucguguaaggggagagu

SEQ ID NO: 1675145 - RNA, 19 nt, Artificial Sequence
  Description of Artificial Sequence: Synthetic oligonucleotide
caauucgagaaccauuagu

SEQ ID NO: 1675146 - RNA, 19 nt, Artificial Sequence
  Description of Artificial Sequence: Synthetic oligonucleotide
cuuucauguggucugugua

SEQ ID NO: 1675147 - RNA, 19 nt, Artificial Sequence
  Description of Artificial Sequence: Synthetic oligonucleotide
cagcacucaggaagguacc

SEQ ID NO: 1675148 - RNA, 19 nt, Artificial Sequence
  Description of Artificial Sequence: Synthetic oligonucleotide
acgcgcacagaguacgcca

SEQ ID NO: 1675149 - RNA, 19 nt, Artificial Sequence
  Description of Artificial Sequence: Synthetic oligonucleotide
cauuaguuauuuuguccaa

SEQ ID NO: 1675150 - RNA, 19 nt, Artificial Sequence
  Description of Artificial Sequence: Synthetic oligonucleotide
aucaaccgaagggucaacu

SEQ ID NO: 1675151 - RNA, 19 nt, Artificial Sequence
  Description of Artificial Sequence: Synthetic oligonucleotide
ggcugguaauacaagguug

SEQ ID NO: 1675152 - RNA, 19 nt, Artificial Sequence
  Description of Artificial Sequence: Synthetic oligonucleotide
cauacacaauggauccuca

SEQ ID NO: 1675153 - RNA, 19 nt, Artificial Sequence
  Description of Artificial Sequence: Synthetic oligonucleotide
uugaccgggcgcccgcuca

SEQ ID NO: 1675154 - RNA, 19 nt, Artificial Sequence
  Description of Artificial Sequence: Synthetic oligonucleotide
guuaugaggcuguccuguc

SEQ ID NO: 1675155 - RNA, 19 nt, Artificial Sequence
  Description of Artificial Sequence: Synthetic oligonucleotide
uccugcggaucuugaccgg

SEQ ID NO: 1675156 - RNA, 19 nt, Artificial Sequence
  Description of Artificial Sequence: Synthetic oligonucleotide
ugagggagugcgccugggu

SEQ ID NO: 1675157 - RNA, 19 nt, Artificial Sequence
  Description of Artificial Sequence: Synthetic oligonucleotide
aggccaguucagcacucag

SEQ ID NO: 1675158 - RNA, 19 nt, Artificial Sequence
  Description of Artificial Sequence: Synthetic oligonucleotide
cuuggucauuggucacucc

SEQ ID NO: 1675159 - RNA, 19 nt, Artificial Sequence
  Description of Artificial Sequence: Synthetic oligonucleotide
ugggucgccaugugcgcgc

SEQ ID NO: 1675160 - RNA, 19 nt, Artificial Sequence
  Description of Artificial Sequence: Synthetic oligonucleotide
ucccuggcccgaauccugc

SEQ ID NO: 1675161 - RNA, 19 nt, Artificial Sequence
  Description of Artificial Sequence: Synthetic oligonucleotide
gaaacguccugcuguccaa

SEQ ID NO: 1675162 - RNA, 19 nt, Artificial Sequence
  Description of Artificial Sequence: Synthetic oligonucleotide
auacgcgcacagaguacgc

SEQ ID NO: 1675163 - RNA, 19 nt, Artificial Sequence
  Description of Artificial Sequence: Synthetic oligonucleotide
ggaaacguccugcugucca

SEQ ID NO: 1675164 - RNA, 19 nt, Artificial Sequence
  Description of Artificial Sequence: Synthetic oligonucleotide
auccgguuugccaucugag

SEQ ID NO: 1675165 - RNA, 19 nt, Artificial Sequence
  Description of Artificial Sequence: Synthetic oligonucleotide
guugccuuaagaacaucaa

SEQ ID NO: 1675166 - RNA, 19 nt, Artificial Sequence
  Description of Artificial Sequence: Synthetic oligonucleotide
uacgcgcacagaguacgcc

SEQ ID NO: 1675167 - RNA, 19 nt, Artificial Sequence
  Description of Artificial Sequence: Synthetic oligonucleotide
caagaucuuaagcucaaau

SEQ ID NO: 1675168 - RNA, 19 nt, Artificial Sequence
  Description of Artificial Sequence: Synthetic oligonucleotide
agaguacgccauuccucug

SEQ ID NO: 1675169 - RNA, 19 nt, Artificial Sequence
  Description of Artificial Sequence: Synthetic oligonucleotide
ugguccuuggcugcuucug

SEQ ID NO: 1675170 - RNA, 19 nt, Artificial Sequence
  Description of Artificial Sequence: Synthetic oligonucleotide
cagaguacgccauuccucu

SEQ ID NO: 1675171 - RNA, 19 nt, Artificial Sequence
  Description of Artificial Sequence: Synthetic oligonucleotide
acaucaaccgaagggucaa

SEQ ID NO: 1675172 - RNA, 19 nt, Artificial Sequence
  Description of Artificial Sequence: Synthetic oligonucleotide
caccagugacaguccaaag

SEQ ID NO: 1675173 - RNA, 19 nt, Artificial Sequence
  Description of Artificial Sequence: Synthetic oligonucleotide
ugggagcugggaacgcgac

SEQ ID NO: 1675174 - RNA, 19 nt, Artificial Sequence
  Description of Artificial Sequence: Synthetic oligonucleotide
auuccccgucgcaagaucu

SEQ ID NO: 1675175 - RNA, 19 nt, Artificial Sequence
  Description of Artificial Sequence: Synthetic oligonucleotide
cacaauccgguuugccauc

SEQ ID NO: 1675176 - RNA, 19 nt, Artificial Sequence
  Description of Artificial Sequence: Synthetic oligonucleotide
cagcuuugcacagucccug

SEQ ID NO: 1675177 - RNA, 19 nt, Artificial Sequence
  Description of Artificial Sequence: Synthetic oligonucleotide
ggucuguguaaauauagau

SEQ ID NO: 1675178 - RNA, 19 nt, Artificial Sequence
  Description of Artificial Sequence: Synthetic oligonucleotide
gccaucugaggagauacgc

SEQ ID NO: 1675179 - RNA, 19 nt, Artificial Sequence
  Description of Artificial Sequence: Synthetic oligonucleotide
ccuuaauguuaugaggcug

SEQ ID NO: 1675180 - RNA, 19 nt, Artificial Sequence
  Description of Artificial Sequence: Synthetic oligonucleotide
gucaugagcagcagaacua

SEQ ID NO: 1675181 - RNA, 19 nt, Artificial Sequence
  Description of Artificial Sequence: Synthetic oligonucleotide
cuucauaaacggagccaga

SEQ ID NO: 1675182 - RNA, 19 nt, Artificial Sequence
  Description of Artificial Sequence: Synthetic oligonucleotide
ugaccgggcgcccgcucag

SEQ ID NO: 1675183 - RNA, 19 nt, Artificial Sequence
  Description of Artificial Sequence: Synthetic oligonucleotide
acggagccagacaaagcag

SEQ ID NO: 1675184 - RNA, 19 nt, Artificial Sequence
  Description of Artificial Sequence: Synthetic oligonucleotide
augcuucggagaacacuac

SEQ ID NO: 1675185 - RNA, 19 nt, Artificial Sequence
  Description of Artificial Sequence: Synthetic oligonucleotide
ggauuagaggccaguucag

SEQ ID NO: 1675186 - RNA, 19 nt, Artificial Sequence
  Description of Artificial Sequence: Synthetic oligonucleotide
acgcaggucaucagcaccu

SEQ ID NO: 1675187 - RNA, 19 nt, Artificial Sequence
  Description of Artificial Sequence: Synthetic oligonucleotide
gaaggacuuuggaaacguc

SEQ ID NO: 1675188 - RNA, 19 nt, Artificial Sequence
  Description of Artificial Sequence: Synthetic oligonucleotide
cagacaaagcagggccucc

SEQ ID NO: 1675189 - RNA, 19 nt, Artificial Sequence
  Description of Artificial Sequence: Synthetic oligonucleotide
acaauccgguuugccaucu

SEQ ID NO: 1675190 - RNA, 19 nt, Artificial Sequence
  Description of Artificial Sequence: Synthetic oligonucleotide
guaauacaagguuguuccu

SEQ ID NO: 1675191 - RNA, 19 nt, Artificial Sequence
  Description of Artificial Sequence: Synthetic oligonucleotide
ugaugccuuucaugugguc

SEQ ID NO: 1675192 - RNA, 19 nt, Artificial Sequence
  Description of Artificial Sequence: Synthetic oligonucleotide
uggaaacguccugcugucc

SEQ ID NO: 1675193 - RNA, 19 nt, Artificial Sequence
  Description of Artificial Sequence: Synthetic oligonucleotide
cauuccccgucgcaagauc

SEQ ID NO: 1675194 - RNA, 19 nt, Artificial Sequence
  Description of Artificial Sequence: Synthetic oligonucleotide
caaaugacucuccaucaau

SEQ ID NO: 1675195 - RNA, 19 nt, Artificial Sequence
  Description of Artificial Sequence: Synthetic oligonucleotide
uagcugagggagugcgccu

SEQ ID NO: 1675196 - RNA, 19 nt, Artificial Sequence
  Description of Artificial Sequence: Synthetic oligonucleotide
cugggucgccaugugcgcg

SEQ ID NO: 1675197 - RNA, 19 nt, Artificial Sequence
  Description of Artificial Sequence: Synthetic oligonucleotide
gcacagaguacgccauucc

SEQ ID NO: 1675198 - RNA, 19 nt, Artificial Sequence
  Description of Artificial Sequence: Synthetic oligonucleotide
auacaagguuguuccuguu

SEQ ID NO: 1675199 - RNA, 19 nt, Artificial Sequence
  Description of Artificial Sequence: Synthetic oligonucleotide
caagcgucaugagcagcag

SEQ ID NO: 1675200 - RNA, 19 nt, Artificial Sequence
  Description of Artificial Sequence: Synthetic oligonucleotide
ccauacacaauggauccuc

SEQ ID NO: 1675201 - RNA, 19 nt, Artificial Sequence
  Description of Artificial Sequence: Synthetic oligonucleotide
accgggcgcccgcucaggg

SEQ ID NO: 1675202 - RNA, 19 nt, Artificial Sequence
  Description of Artificial Sequence: Synthetic oligonucleotide
gaggcccggguugucgucc

SEQ ID NO: 1675203 - RNA, 19 nt, Artificial Sequence
  Description of Artificial Sequence: Synthetic oligonucleotide
ccuuaagaacaucaaccga

SEQ ID NO: 1675204 - RNA, 19 nt, Artificial Sequence
  Description of Artificial Sequence: Synthetic oligonucleotide
acgcgacagggaccaccgc

SEQ ID NO: 1675205 - RNA, 19 nt, Artificial Sequence
  Description of Artificial Sequence: Synthetic oligonucleotide
gcguagcugagggagugcg

SEQ ID NO: 1675206 - RNA, 19 nt, Artificial Sequence
  Description of Artificial Sequence: Synthetic oligonucleotide
uuuguccaacagccuuaua

SEQ ID NO: 1675207 - RNA, 19 nt, Artificial Sequence
  Description of Artificial Sequence: Synthetic oligonucleotide
cgcaagaaguugcaccccg

SEQ ID NO: 1675208 - RNA, 19 nt, Artificial Sequence
  Description of Artificial Sequence: Synthetic oligonucleotide
gguugucgucccuggcccg

SEQ ID NO: 1675209 - RNA, 19 nt, Artificial Sequence
  Description of Artificial Sequence: Synthetic oligonucleotide
gccuggagacuucccagag

SEQ ID NO: 1675210 - RNA, 19 nt, Artificial Sequence
  Description of Artificial Sequence: Synthetic oligonucleotide
uuccccgucgcaagaucuu

SEQ ID NO: 1675211 - RNA, 19 nt, Artificial Sequence
  Description of Artificial Sequence: Synthetic oligonucleotide
gcgacagggaccaccgcgg

SEQ ID NO: 1675212 - RNA, 19 nt, Artificial Sequence
  Description of Artificial Sequence: Synthetic oligonucleotide
ccgucgcaagaucuuaagc

SEQ ID NO: 1675213 - RNA, 19 nt, Artificial Sequence
  Description of Artificial Sequence: Synthetic oligonucleotide
cacagaguacgccauuccu

SEQ ID NO: 1675214 - RNA, 19 nt, Artificial Sequence
  Description of Artificial Sequence: Synthetic oligonucleotide
ccaacgcaggucaucagca

SEQ ID NO: 1675215 - RNA, 19 nt, Artificial Sequence
  Description of Artificial Sequence: Synthetic oligonucleotide
caccaacgcaggucaucag

SEQ ID NO: 1675216 - RNA, 19 nt, Artificial Sequence
  Description of Artificial Sequence: Synthetic oligonucleotide
cugggagcugggaacgcga

SEQ ID NO: 1675217 - RNA, 19 nt, Artificial Sequence
  Description of Artificial Sequence: Synthetic oligonucleotide
gggaacgcgacagggacca

SEQ ID NO: 1675218 - RNA, 19 nt, Artificial Sequence
  Description of Artificial Sequence: Synthetic oligonucleotide
uccgccccuguagauuucu

SEQ ID NO: 1675219 - RNA, 19 nt, Artificial Sequence
  Description of Artificial Sequence: Synthetic oligonucleotide
caucaauuccaaacuguuu

SEQ ID NO: 1675220 - RNA, 19 nt, Artificial Sequence
  Description of Artificial Sequence: Synthetic oligonucleotide
gcugguaauacaagguugu

SEQ ID NO: 1675221 - RNA, 19 nt, Artificial Sequence
  Description of Artificial Sequence: Synthetic oligonucleotide
ucucggaggcccggguugu

SEQ ID NO: 1675222 - RNA, 19 nt, Artificial Sequence
  Description of Artificial Sequence: Synthetic oligonucleotide
cuggcccgaauccugcgga

SEQ ID NO: 1675223 - RNA, 19 nt, Artificial Sequence
  Description of Artificial Sequence: Synthetic oligonucleotide
cacggcuugguuucaauuu

SEQ ID NO: 1675224 - RNA, 19 nt, Artificial Sequence
  Description of Artificial Sequence: Synthetic oligonucleotide
cgcgacagggaccaccgcg

SEQ ID NO: 1675225 - RNA, 19 nt, Artificial Sequence
  Description of Artificial Sequence: Synthetic oligonucleotide
acauccgccccuguagauu

SEQ ID NO: 1675226 - RNA, 19 nt, Artificial Sequence
  Description of Artificial Sequence: Synthetic oligonucleotide
gccaugugcgcgcggcgcg

SEQ ID NO: 1675227 - RNA, 19 nt, Artificial Sequence
  Description of Artificial Sequence: Synthetic oligonucleotide
cuggcgcaagaaguugcac

SEQ ID NO: 1675228 - RNA, 19 nt, Artificial Sequence
  Description of Artificial Sequence: Synthetic oligonucleotide
augugcgcgcggcgcgccg

SEQ ID NO: 1675229 - RNA, 19 nt, Artificial Sequence
  Description of Artificial Sequence: Synthetic oligonucleotide
cccgucgcaagaucuuaag

SEQ ID NO: 1675230 - RNA, 19 nt, Artificial Sequence
  Description of Artificial Sequence: Synthetic oligonucleotide
ggaagguaccauugguagu

SEQ ID NO: 1675231 - RNA, 19 nt, Artificial Sequence
  Description of Artificial Sequence: Synthetic oligonucleotide
gguaccauugguagucucu

SEQ ID NO: 1675232 - RNA, 19 nt, Artificial Sequence
  Description of Artificial Sequence: Synthetic oligonucleotide
cgucgcaagaucuuaagcu

SEQ ID NO: 1675233 - RNA, 19 nt, Artificial Sequence
  Description of Artificial Sequence: Synthetic oligonucleotide
agggagugcuguugccuua

SEQ ID NO: 1675234 - RNA, 19 nt, Artificial Sequence
  Description of Artificial Sequence: Synthetic oligonucleotide
ccucugauacgcuugauuu

SEQ ID NO: 1675235 - RNA, 19 nt, Artificial Sequence
  Description of Artificial Sequence: Synthetic oligonucleotide
ggucugugagcuggacggg

SEQ ID NO: 1675236 - RNA, 19 nt, Artificial Sequence
  Description of Artificial Sequence: Synthetic oligonucleotide
uccccgucgcaagaucuua

SEQ ID NO: 1675237 - RNA, 19 nt, Artificial Sequence
  Description of Artificial Sequence: Synthetic oligonucleotide
caauccgguuugccaucug

SEQ ID NO: 1675238 - RNA, 19 nt, Artificial Sequence
  Description of Artificial Sequence: Synthetic oligonucleotide
gcaagaaguugcaccccgc

SEQ ID NO: 1675239 - RNA, 19 nt, Artificial Sequence
  Description of Artificial Sequence: Synthetic oligonucleotide
caucaaccgaagggucaac

SEQ ID NO: 1675240 - RNA, 19 nt, Artificial Sequence
  Description of Artificial Sequence: Synthetic oligonucleotide
ucuugaccgggcgcccgcu

SEQ ID NO: 1675241 - RNA, 19 nt, Artificial Sequence
  Description of Artificial Sequence: Synthetic oligonucleotide
cugaggagauacgcgcaca

SEQ ID NO: 1675242 - RNA, 19 nt, Artificial Sequence
  Description of Artificial Sequence: Synthetic oligonucleotide
ggucaacuuggucauuggu

SEQ ID NO: 1675243 - RNA, 19 nt, Artificial Sequence
  Description of Artificial Sequence: Synthetic oligonucleotide
gaggccaguucagcacuca

SEQ ID NO: 1675244 - RNA, 19 nt, Artificial Sequence
  Description of Artificial Sequence: Synthetic oligonucleotide
cagugacaguccaaagccu

SEQ ID NO: 1675245 - RNA, 19 nt, Artificial Sequence
  Description of Artificial Sequence: Synthetic oligonucleotide
ggaggcauuccccgucgca

SEQ ID NO: 1675246 - RNA, 19 nt, Artificial Sequence
  Description of Artificial Sequence: Synthetic oligonucleotide
ggagugcuguugccuuaag

SEQ ID NO: 1675247 - RNA, 19 nt, Artificial Sequence
  Description of Artificial Sequence: Synthetic oligonucleotide
cucugauacgcuugauuuu

SEQ ID NO: 1675248 - RNA, 19 nt, Artificial Sequence
  Description of Artificial Sequence: Synthetic oligonucleotide
gucauuggucacuccucgu

SEQ ID NO: 1675249 - RNA, 19 nt, Artificial Sequence
  Description of Artificial Sequence: Synthetic oligonucleotide
agugcgccugggucgccau

SEQ ID NO: 1675250 - RNA, 19 nt, Artificial Sequence
  Description of Artificial Sequence: Synthetic oligonucleotide
guguaaggggagagugguc

SEQ ID NO: 1675251 - RNA, 19 nt, Artificial Sequence
  Description of Artificial Sequence: Synthetic oligonucleotide
ugucgucccuggcccgaau

SEQ ID NO: 1675252 - RNA, 19 nt, Artificial Sequence
  Description of Artificial Sequence: Synthetic oligonucleotide
ccccgcguagcugagggag

SEQ ID NO: 1675253 - RNA, 19 nt, Artificial Sequence
  Description of Artificial Sequence: Synthetic oligonucleotide
cggaucuugaccgggcgcc

SEQ ID NO: 1675254 - RNA, 19 nt, Artificial Sequence
  Description of Artificial Sequence: Synthetic oligonucleotide
caugugcgcgcggcgcgcc

SEQ ID NO: 1675255 - RNA, 19 nt, Artificial Sequence
  Description of Artificial Sequence: Synthetic oligonucleotide
ggcauuccccgucgcaaga

SEQ ID NO: 1675256 - RNA, 19 nt, Artificial Sequence
  Description of Artificial Sequence: Synthetic oligonucleotide
cuugaccgggcgcccgcuc

SEQ ID NO: 1675257 - RNA, 19 nt, Artificial Sequence
  Description of Artificial Sequence: Synthetic oligonucleotide
ccuuacagggcaugagaaa

SEQ ID NO: 1675258 - RNA, 19 nt, Artificial Sequence
  Description of Artificial Sequence: Synthetic oligonucleotide
agcaucacuugagggucuu

SEQ ID NO: 1675259 - RNA, 19 nt, Artificial Sequence
  Description of Artificial Sequence: Synthetic oligonucleotide
cauccgccccuguagauuu

SEQ ID NO: 1675260 - RNA, 19 nt, Artificial Sequence
  Description of Artificial Sequence: Synthetic oligonucleotide
cccggguugucgucccugg

SEQ ID NO: 1675261 - RNA, 19 nt, Artificial Sequence
  Description of Artificial Sequence: Synthetic oligonucleotide
gaaaagcacuucgccuccu

SEQ ID NO: 1675262 - RNA, 19 nt, Artificial Sequence
  Description of Artificial Sequence: Synthetic oligonucleotide
gaccgggcgcccgcucagg

SEQ ID NO: 1675263 - RNA, 19 nt, Artificial Sequence
  Description of Artificial Sequence: Synthetic oligonucleotide
ccaaugcuucggagaacac

SEQ ID NO: 1675264 - RNA, 19 nt, Artificial Sequence
  Description of Artificial Sequence: Synthetic oligonucleotide
cacaauggauccucauguu

SEQ ID NO: 1675265 - RNA, 19 nt, Artificial Sequence
  Description of Artificial Sequence: Synthetic oligonucleotide
ggagauacgcgcacagagu

SEQ ID NO: 1675266 - RNA, 19 nt, Artificial Sequence
  Description of Artificial Sequence: Synthetic oligonucleotide
cuguuucaauagagggagu

SEQ ID NO: 1675267 - RNA, 19 nt, Artificial Sequence
  Description of Artificial Sequence: Synthetic oligonucleotide
accccgcguagcugaggga

SEQ ID NO: 1675268 - RNA, 19 nt, Artificial Sequence
  Description of Artificial Sequence: Synthetic oligonucleotide
cacuccucguagaaugauu

SEQ ID NO: 1675269 - RNA, 19 nt, Artificial Sequence
  Description of Artificial Sequence: Synthetic oligonucleotide
gagacuucccagaguugau

SEQ ID NO: 1675270 - RNA, 19 nt, Artificial Sequence
  Description of Artificial Sequence: Synthetic oligonucleotide
accacacggcuugguuuca

SEQ ID NO: 1675271 - RNA, 19 nt, Artificial Sequence
  Description of Artificial Sequence: Synthetic oligonucleotide
caauagagggagugcuguu

SEQ ID NO: 1675272 - RNA, 19 nt, Artificial Sequence
  Description of Artificial Sequence: Synthetic oligonucleotide
ccgaauccugcggaucuug

SEQ ID NO: 1675273 - RNA, 19 nt, Artificial Sequence
  Description of Artificial Sequence: Synthetic oligonucleotide
gcuggcgcaagaaguugca

SEQ ID NO: 1675274 - RNA, 19 nt, Artificial Sequence
  Description of Artificial Sequence: Synthetic oligonucleotide
auccgccccuguagauuuc

SEQ ID NO: 1675275 - RNA, 19 nt, Artificial Sequence
  Description of Artificial Sequence: Synthetic oligonucleotide
gcccgaauccugcggaucu

SEQ ID NO: 1675276 - RNA, 19 nt, Artificial Sequence
  Description of Artificial Sequence: Synthetic oligonucleotide
gcgcaagaaguugcacccc

SEQ ID NO: 1675277 - RNA, 19 nt, Artificial Sequence
  Description of Artificial Sequence: Synthetic oligonucleotide
gcgucaugagcagcagaac

SEQ ID NO: 1675278 - RNA, 19 nt, Artificial Sequence
  Description of Artificial Sequence: Synthetic oligonucleotide
cagccuuauaaagcuugcu

SEQ ID NO: 1675279 - RNA, 19 nt, Artificial Sequence
  Description of Artificial Sequence: Synthetic oligonucleotide
cccacccuugaguucuuca

SEQ ID NO: 1675280 - RNA, 19 nt, Artificial Sequence
  Description of Artificial Sequence: Synthetic oligonucleotide
cccuggcccgaauccugcg

SEQ ID NO: 1675281 - RNA, 19 nt, Artificial Sequence
  Description of Artificial Sequence: Synthetic oligonucleotide
guacgccauuccucugaua

SEQ ID NO: 1675282 - RNA, 19 nt, Artificial Sequence
  Description of Artificial Sequence: Synthetic oligonucleotide
cuccucguagaaugauuuu

SEQ ID NO: 1675283 - RNA, 19 nt, Artificial Sequence
  Description of Artificial Sequence: Synthetic oligonucleotide
gugcgcgcggcgcgccgag

SEQ ID NO: 1675284 - RNA, 19 nt, Artificial Sequence
  Description of Artificial Sequence: Synthetic oligonucleotide
ggucgccaugugcgcgcgg

SEQ ID NO: 1675285 - RNA, 19 nt, Artificial Sequence
  Description of Artificial Sequence: Synthetic oligonucleotide
gcaagaucuuaagcucaaa

SEQ ID NO: 1675286 - RNA, 19 nt, Artificial Sequence
  Description of Artificial Sequence: Synthetic oligonucleotide
gggagugcuguugccuuaa

SEQ ID NO: 1675287 - RNA, 19 nt, Artificial Sequence
  Description of Artificial Sequence: Synthetic oligonucleotide
cacacggcuugguuucaau

SEQ ID NO: 1675288 - RNA, 19 nt, Artificial Sequence
  Description of Artificial Sequence: Synthetic oligonucleotide
ccucauguuaugacagcau

SEQ ID NO: 1675289 - RNA, 19 nt, Artificial Sequence
  Description of Artificial Sequence: Synthetic oligonucleotide
cacauccgccccuguagau

SEQ ID NO: 1675290 - RNA, 19 nt, Artificial Sequence
  Description of Artificial Sequence: Synthetic oligonucleotide
ggaggcccggguugucguc

SEQ ID NO: 1675291 - RNA, 19 nt, Artificial Sequence
  Description of Artificial Sequence: Synthetic oligonucleotide
cgcaagaucuuaagcucaa

SEQ ID NO: 1675292 - RNA, 19 nt, Artificial Sequence
  Description of Artificial Sequence: Synthetic oligonucleotide
ccgcguagcugagggagug

SEQ ID NO: 1675293 - RNA, 19 nt, Artificial Sequence
  Description of Artificial Sequence: Synthetic oligonucleotide
cugguaauacaagguuguu

SEQ ID NO: 1675294 - RNA, 19 nt, Artificial Sequence
  Description of Artificial Sequence: Synthetic oligonucleotide
ggcccgaauccugcggauc

SEQ ID NO: 1675295 - RNA, 19 nt, Artificial Sequence
  Description of Artificial Sequence: Synthetic oligonucleotide
ccggguugucgucccuggc

SEQ ID NO: 1675296 - RNA, 19 nt, Artificial Sequence
  Description of Artificial Sequence: Synthetic oligonucleotide
cgaauccugcggaucuuga

SEQ ID NO: 1675297 - RNA, 19 nt, Artificial Sequence
  Description of Artificial Sequence: Synthetic oligonucleotide
cgacagggaccaccgcggc

SEQ ID NO: 1675298 - RNA, 19 nt, Artificial Sequence
  Description of Artificial Sequence: Synthetic oligonucleotide
ccgcuggcgcaagaaguug

SEQ ID NO: 1675299 - RNA, 19 nt, Artificial Sequence
  Description of Artificial Sequence: Synthetic oligonucleotide
ccaugugcgcgcggcgcgc

SEQ ID NO: 1675300 - RNA, 19 nt, Artificial Sequence
  Description of Artificial Sequence: Synthetic oligonucleotide
gaccuuccuuacagggcau

SEQ ID NO: 1675301 - RNA, 19 nt, Artificial Sequence
  Description of Artificial Sequence: Synthetic oligonucleotide
cucggaggcccggguuguc

SEQ ID NO: 1675302 - RNA, 19 nt, Artificial Sequence
  Description of Artificial Sequence: Synthetic oligonucleotide
gcccggguugucgucccug

SEQ ID NO: 1675303 - RNA, 19 nt, Artificial Sequence
  Description of Artificial Sequence: Synthetic oligonucleotide
gcgcgccgagggcugggag

SEQ ID NO: 1675304 - RNA, 19 nt, Artificial Sequence
  Description of Artificial Sequence: Synthetic oligonucleotide
gggcgcccgcucagggugg

SEQ ID NO: 1675305 - RNA, 19 nt, Artificial Sequence
  Description of Artificial Sequence: Synthetic oligonucleotide
ccccgucgcaagaucuuaa

SEQ ID NO: 1675306 - RNA, 19 nt, Artificial Sequence
  Description of Artificial Sequence: Synthetic oligonucleotide
gcgccgagggcugggagcu

SEQ ID NO: 1675307 - RNA, 19 nt, Artificial Sequence
  Description of Artificial Sequence: Synthetic oligonucleotide
ccagccgcuggcgcaagaa

SEQ ID NO: 1675308 - RNA, 19 nt, Artificial Sequence
  Description of Artificial Sequence: Synthetic oligonucleotide
gcauuccccgucgcaagau

SEQ ID NO: 1675309 - RNA, 19 nt, Artificial Sequence
  Description of Artificial Sequence: Synthetic oligonucleotide
ggaacgcgacagggaccac

SEQ ID NO: 1675310 - RNA, 19 nt, Artificial Sequence
  Description of Artificial Sequence: Synthetic oligonucleotide
ggagugcgccugggucgcc

SEQ ID NO: 1675311 - RNA, 19 nt, Artificial Sequence
  Description of Artificial Sequence: Synthetic oligonucleotide
gccgcuggcgcaagaaguu

SEQ ID NO: 1675312 - RNA, 19 nt, Artificial Sequence
  Description of Artificial Sequence: Synthetic oligonucleotide
gcggcgcgccgagggcugg

SEQ ID NO: 1675313 - RNA, 19 nt, Artificial Sequence
  Description of Artificial Sequence: Synthetic oligonucleotide
ggcgcgccgagggcuggga

SEQ ID NO: 1675314 - RNA, 19 nt, Artificial Sequence
  Description of Artificial Sequence: Synthetic oligonucleotide
ccuggcccuggggauuaga

SEQ ID NO: 1675315 - RNA, 19 nt, Artificial Sequence
  Description of Artificial Sequence: Synthetic oligonucleotide
gcgcacagaguacgccauu

SEQ ID NO: 1675316 - RNA, 19 nt, Artificial Sequence
  Description of Artificial Sequence: Synthetic oligonucleotide
ccacacggcuugguuucaa

SEQ ID NO: 1675317 - RNA, 19 nt, Artificial Sequence
  Description of Artificial Sequence: Synthetic oligonucleotide
cgcccgcucaggguggaca

SEQ ID NO: 1675318 - RNA, 19 nt, Artificial Sequence
  Description of Artificial Sequence: Synthetic oligonucleotide
ggcgcccgcucagggugga

SEQ ID NO: 1675319 - RNA, 19 nt, Artificial Sequence
  Description of Artificial Sequence: Synthetic oligonucleotide
cgcgcacagaguacgccau

SEQ ID NO: 1675320 - RNA, 19 nt, Artificial Sequence
  Description of Artificial Sequence: Synthetic oligonucleotide
gcgcccgcucaggguggac

SEQ ID NO: 1675321 - RNA, 19 nt, Artificial Sequence
  Description of Artificial Sequence: Synthetic oligonucleotide
cggcgcgccgagggcuggg

SEQ ID NO: 1675322 - RNA, 19 nt, Artificial Sequence
  Description of Artificial Sequence: Synthetic oligonucleotide
cccgaauccugcggaucuu

SEQ ID NO: 1675323 - RNA, 19 nt, Artificial Sequence
  Description of Artificial Sequence: Synthetic oligonucleotide
  modified_base (10)..(10): a, c, u, g, unknown or other
aacauauuunuuuauugcc

SEQ ID NO: 1675324 - RNA, 19 nt, Artificial Sequence
  Description of Artificial Sequence: Synthetic oligonucleotide
aauacauuaaaauaggaug

SEQ ID NO: 1675325 - RNA, 19 nt, Artificial Sequence
  Description of Artificial Sequence: Synthetic oligonucleotide
aaggaaaucaauuuagccc

SEQ ID NO: 1675326 - RNA, 19 nt, Artificial Sequence
  Description of Artificial Sequence: Synthetic oligonucleotide
aagcuguacauuuauaucc

SEQ ID NO: 1675327 - RNA, 19 nt, Artificial Sequence
  Description of Artificial Sequence: Synthetic oligonucleotide
  modified_base (11)..(11): a, c, u, g, unknown or other
aaacauauuunuuuauugc

SEQ ID NO: 1675328 - RNA, 19 nt, Artificial Sequence
  Description of Artificial Sequence: Synthetic oligonucleotide
  modified_base (5)..(5): a, c, u, g, unknown or other
uuuanaaacaaacauauuu

SEQ ID NO: 1675329 - RNA, 19 nt, Artificial Sequence
  Description of Artificial Sequence: Synthetic oligonucleotide
uuagcuaaagaacucauag

SEQ ID NO: 1675330 - RNA, 19 nt, Artificial Sequence
  Description of Artificial Sequence: Synthetic oligonucleotide
ucacuuagcauaaagauca

SEQ ID NO: 1675331 - RNA, 19 nt, Artificial Sequence
  Description of Artificial Sequence: Synthetic oligonucleotide
auuaauguagcucagggug

SEQ ID NO: 1675332 - RNA, 19 nt, Artificial Sequence
  Description of Artificial Sequence: Synthetic oligonucleotide
aaaauaggauguuaauuuc

SEQ ID NO: 1675333 - RNA, 19 nt, Artificial Sequence
  Description of Artificial Sequence: Synthetic oligonucleotide
auugacagcaguuaaguuc

SEQ ID NO: 1675334 - RNA, 19 nt, Artificial Sequence
  Description of Artificial Sequence: Synthetic oligonucleotide
acaaugauaaacaagcuac

SEQ ID NO: 1675335 - RNA, 19 nt, Artificial Sequence
  Description of Artificial Sequence: Synthetic oligonucleotide
uaucuugacacgcuuagcg

SEQ ID NO: 1675336 - RNA, 19 nt, Artificial Sequence
  Description of Artificial Sequence: Synthetic oligonucleotide
  modified_base (4)..(4): a, c, u, g, unknown or other
  modified_base (19)..(19): a, c, u, g, unknown or other
uuanaaacaaacauauuun

SEQ ID NO: 1675337 - RNA, 19 nt, Artificial Sequence
  Description of Artificial Sequence: Synthetic oligonucleotide
agcaguuaaguucagaguc

SEQ ID NO: 1675338 - RNA, 19 nt, Artificial Sequence
  Description of Artificial Sequence: Synthetic oligonucleotide
aaagcuguacauuuauauc

SEQ ID NO: 1675339 - RNA, 19 nt, Artificial Sequence
  Description of Artificial Sequence: Synthetic oligonucleotide
  modified_base (4)..(4): a, c, u, g, unknown or other
uuunuuuauugccacacac

SEQ ID NO: 1675340 - RNA, 19 nt, Artificial Sequence
  Description of Artificial Sequence: Synthetic oligonucleotide
uauuauaaaucccagguua

SEQ ID NO: 1675341 - RNA, 19 nt, Artificial Sequence
  Description of Artificial Sequence: Synthetic oligonucleotide
  modified_base (2)..(2): a, c, u, g, unknown or other
unuuuauugccacacacac

SEQ ID NO: 1675342 - RNA, 19 nt, Artificial Sequence
  Description of Artificial Sequence: Synthetic oligonucleotide
aacucuauccuacaagcag

SEQ ID NO: 1675343 - RNA, 19 nt, Artificial Sequence
  Description of Artificial Sequence: Synthetic oligonucleotide
uaaacucuauccuacaagc

SEQ ID NO: 1675344 - RNA, 19 nt, Artificial Sequence
  Description of Artificial Sequence: Synthetic oligonucleotide
uuuaaguggaucuaauaca

SEQ ID NO: 1675345 - RNA, 19 nt, Artificial Sequence
  Description of Artificial Sequence: Synthetic oligonucleotide
uucuuauguauuuucacag

SEQ ID NO: 1675346 - RNA, 19 nt, Artificial Sequence
  Description of Artificial Sequence: Synthetic oligonucleotide
uagcguuugaggaagagag

SEQ ID NO: 1675347 - RNA, 19 nt, Artificial Sequence
  Description of Artificial Sequence: Synthetic oligonucleotide
uucuuuuagcuaaagaacu

SEQ ID NO: 1675348 - RNA, 19 nt, Artificial Sequence
  Description of Artificial Sequence: Synthetic oligonucleotide
aacaagcuacuuaaaaccc

SEQ ID NO: 1675349 - RNA, 19 nt, Artificial Sequence
  Description of Artificial Sequence: Synthetic oligonucleotide
agugaugagccucugcacc

SEQ ID NO: 1675350 - RNA, 19 nt, Artificial Sequence
  Description of Artificial Sequence: Synthetic oligonucleotide
uggagucucauuaauguag

SEQ ID NO: 1675351 - RNA, 19 nt, Artificial Sequence
  Description of Artificial Sequence: Synthetic oligonucleotide
uaccaagcaaccuuggagg

SEQ ID NO: 1675352 - RNA, 19 nt, Artificial Sequence
  Description of Artificial Sequence: Synthetic oligonucleotide
caugaugccacuaugcuug

SEQ ID NO: 1675353 - RNA, 19 nt, Artificial Sequence
  Description of Artificial Sequence: Synthetic oligonucleotide
uugacagcaguuaaguuca

SEQ ID NO: 1675354 - RNA, 19 nt, Artificial Sequence
  Description of Artificial Sequence: Synthetic oligonucleotide
uuugguuauuauaaauccc

SEQ ID NO: 1675355 - RNA, 19 nt, Artificial Sequence
  Description of Artificial Sequence: Synthetic oligonucleotide
aauuucuggacaaugauaa

SEQ ID NO: 1675356 - RNA, 19 nt, Artificial Sequence
  Description of Artificial Sequence: Synthetic oligonucleotide
uaaacuuccuguaacucug

SEQ ID NO: 1675357 - RNA, 19 nt, Artificial Sequence
  Description of Artificial Sequence: Synthetic oligonucleotide
  modified_base (3)..(3): a, c, u, g, unknown or other
  modified_base (18)..(18): a, c, u, g, unknown or other
uanaaacaaacauauuunu

SEQ ID NO: 1675358 - RNA, 19 nt, Artificial Sequence
  Description of Artificial Sequence: Synthetic oligonucleotide
  modified_base (12)..(12): a, c, u, g, unknown or other
caaacauauuunuuuauug

SEQ ID NO: 1675359 - RNA, 19 nt, Artificial Sequence
  Description of Artificial Sequence: Synthetic oligonucleotide
uguacauuuauauccauua

SEQ ID NO: 1675360 - RNA, 19 nt, Artificial Sequence
  Description of Artificial Sequence: Synthetic oligonucleotide
acuaugcuugacuuaacac

SEQ ID NO: 1675361 - RNA, 19 nt, Artificial Sequence
  Description of Artificial Sequence: Synthetic oligonucleotide
  modified_base (3)..(3): a, c, u, g, unknown or other
uunuuuauugccacacaca

SEQ ID NO: 1675362 - RNA, 19 nt, Artificial Sequence
  Description of Artificial Sequence: Synthetic oligonucleotide
auaaacucuauccuacaag

SEQ ID NO: 1675363 - RNA, 19 nt, Artificial Sequence
  Description of Artificial Sequence: Synthetic oligonucleotide
uuacuaaucucuuuucuga

SEQ ID NO: 1675364 - RNA, 19 nt, Artificial Sequence
  Description of Artificial Sequence: Synthetic oligonucleotide
gaucaguucaucuauaucu

SEQ ID NO: 1675365 - RNA, 19 nt, Artificial Sequence
  Description of Artificial Sequence: Synthetic oligonucleotide
  modified_base (14)..(14): a, c, u, g, unknown or other
aacaaacauauuunuuuau

SEQ ID NO: 1675366 - RNA, 19 nt, Artificial Sequence
  Description of Artificial Sequence: Synthetic oligonucleotide
agcuaaagaacucauagaa

SEQ ID NO: 1675367 - RNA, 19 nt, Artificial Sequence
  Description of Artificial Sequence: Synthetic oligonucleotide
uuaaguggaucuaauacau

SEQ ID NO: 1675368 - RNA, 19 nt, Artificial Sequence
  Description of Artificial Sequence: Synthetic oligonucleotide
uauaucuugggguccaaag

SEQ ID NO: 1675369 - RNA, 19 nt, Artificial Sequence
  Description of Artificial Sequence: Synthetic oligonucleotide
aaaucaauuuagcccuuuc

SEQ ID NO: 1675370 - RNA, 19 nt, Artificial Sequence
  Description of Artificial Sequence: Synthetic oligonucleotide
aaguaauggagucucauua

SEQ ID NO: 1675371 - RNA, 19 nt, Artificial Sequence
  Description of Artificial Sequence: Synthetic oligonucleotide
aaucaauuuagcccuuuca

SEQ ID NO: 1675372 - RNA, 19 nt, Artificial Sequence
  Description of Artificial Sequence: Synthetic oligonucleotide
auaaaucccagguuaaacu

SEQ ID NO: 1675373 - RNA, 19 nt, Artificial Sequence
  Description of Artificial Sequence: Synthetic oligonucleotide
aaacugacccaagaucucc

SEQ ID NO: 1675374 - RNA, 19 nt, Artificial Sequence
  Description of Artificial Sequence: Synthetic oligonucleotide
cagacuuccgacaugcucg

SEQ ID NO: 1675375 - RNA, 19 nt, Artificial Sequence
  Description of Artificial Sequence: Synthetic oligonucleotide
uccagauuuucuaucagca

SEQ ID NO: 1675376 - RNA, 19 nt, Artificial Sequence
  Description of Artificial Sequence: Synthetic oligonucleotide
aaguggaucuaauacauua

SEQ ID NO: 1675377 - RNA, 19 nt, Artificial Sequence
  Description of Artificial Sequence: Synthetic oligonucleotide
auugagagcgguuccaauc

SEQ ID NO: 1675378 - RNA, 19 nt, Artificial Sequence
  Description of Artificial Sequence: Synthetic oligonucleotide
uaaagaucaguucaucuau

SEQ ID NO: 1675379 - RNA, 19 nt, Artificial Sequence
  Description of Artificial Sequence: Synthetic oligonucleotide
auaucuugggguccaaagg

SEQ ID NO: 1675380 - RNA, 19 nt, Artificial Sequence
  Description of Artificial Sequence: Synthetic oligonucleotide
  modified_base (8)..(8): a, c, u, g, unknown or other
cauauuunuuuauugccac

SEQ ID NO: 1675381 - RNA, 19 nt, Artificial Sequence
  Description of Artificial Sequence: Synthetic oligonucleotide
acauuuauauccauuaucu

SEQ ID NO: 1675382 - RNA, 19 nt, Artificial Sequence
  Description of Artificial Sequence: Synthetic oligonucleotide
ugucacuuagcauaaagau

SEQ ID NO: 1675383 - RNA, 19 nt, Artificial Sequence
  Description of Artificial Sequence: Synthetic oligonucleotide
cucgcuuguauugagagcg

SEQ ID NO: 1675384 - RNA, 19 nt, Artificial Sequence
  Description of Artificial Sequence: Synthetic oligonucleotide
  modified_base (15)..(15): a, c, u, g, unknown or other
aaacaaacauauuunuuua

SEQ ID NO: 1675385 - RNA, 19 nt, Artificial Sequence
  Description of Artificial Sequence: Synthetic oligonucleotide
ucccagguuaaacugaccc

SEQ ID NO: 1675386 - RNA, 19 nt, Artificial Sequence
  Description of Artificial Sequence: Synthetic oligonucleotide
uccaagacagaauaaucug

SEQ ID NO: 1675387 - RNA, 19 nt, Artificial Sequence
  Description of Artificial Sequence: Synthetic oligonucleotide
aauaaacucuauccuacaa

SEQ ID NO: 1675388 - RNA, 19 nt, Artificial Sequence
  Description of Artificial Sequence: Synthetic oligonucleotide
cuauccuacaagcaggaag

SEQ ID NO: 1675389 - RNA, 19 nt, Artificial Sequence
  Description of Artificial Sequence: Synthetic oligonucleotide
caagcuacuuaaaaccccg

SEQ ID NO: 1675390 - RNA, 19 nt, Artificial Sequence
  Description of Artificial Sequence: Synthetic oligonucleotide
cuuacuaaucucuuuucug

SEQ ID NO: 1675391 - RNA, 19 nt, Artificial Sequence
  Description of Artificial Sequence: Synthetic oligonucleotide
uauugccacacacacacac

SEQ ID NO: 1675392 - RNA, 19 nt, Artificial Sequence
  Description of Artificial Sequence: Synthetic oligonucleotide
ucgggaagcaaacaucugc

SEQ ID NO: 1675393 - RNA, 19 nt, Artificial Sequence
  Description of Artificial Sequence: Synthetic oligonucleotide
uaauggagucucauuaaug

SEQ ID NO: 1675394 - RNA, 19 nt, Artificial Sequence
  Description of Artificial Sequence: Synthetic oligonucleotide
aauuuagcccuuucaguga

SEQ ID NO: 1675395 - RNA, 19 nt, Artificial Sequence
  Description of Artificial Sequence: Synthetic oligonucleotide
agcaucucaaaauuguacu

SEQ ID NO: 1675396 - RNA, 19 nt, Artificial Sequence
  Description of Artificial Sequence: Synthetic oligonucleotide
uuaaaauaggauguuaauu

SEQ ID NO: 1675397 - RNA, 19 nt, Artificial Sequence
  Description of Artificial Sequence: Synthetic oligonucleotide
ugguccacuaggaagaggu

SEQ ID NO: 1675398 - RNA, 19 nt, Artificial Sequence
  Description of Artificial Sequence: Synthetic oligonucleotide
auuuagcccuuucagugac

SEQ ID NO: 1675399 - RNA, 19 nt, Artificial Sequence
  Description of Artificial Sequence: Synthetic oligonucleotide
uuacuaguuggcaaggaaa

SEQ ID NO: 1675400 - RNA, 19 nt, Artificial Sequence
  Description of Artificial Sequence: Synthetic oligonucleotide
guuaaacugacccaagauc

SEQ ID NO: 1675401 - RNA, 19 nt, Artificial Sequence
  Description of Artificial Sequence: Synthetic oligonucleotide
cuuaaaaccccgucuuucc

SEQ ID NO: 1675402 - RNA, 19 nt, Artificial Sequence
  Description of Artificial Sequence: Synthetic oligonucleotide
caguucaucuauaucuugg

SEQ ID NO: 1675403 - RNA, 19 nt, Artificial Sequence
  Description of Artificial Sequence: Synthetic oligonucleotide
auaggauguuaauuucugg

SEQ ID NO: 1675404 - RNA, 19 nt, Artificial Sequence
  Description of Artificial Sequence: Synthetic oligonucleotide
ugggugaugagcuucuuca

SEQ ID NO: 1675405 - RNA, 19 nt, Artificial Sequence
  Description of Artificial Sequence: Synthetic oligonucleotide
gucucauuaauguagcuca

SEQ ID NO: 1675406 - RNA, 19 nt, Artificial Sequence
  Description of Artificial Sequence: Synthetic oligonucleotide
ucaucuauaucuugggguc

SEQ ID NO: 1675407 - RNA, 19 nt, Artificial Sequence
  Description of Artificial Sequence: Synthetic oligonucleotide
ugguuauuauaaaucccag

SEQ ID NO: 1675408 - RNA, 19 nt, Artificial Sequence
  Description of Artificial Sequence: Synthetic oligonucleotide
aaaaccccgucuuuccaag

SEQ ID NO: 1675409 - RNA, 19 nt, Artificial Sequence
  Description of Artificial Sequence: Synthetic oligonucleotide
aaaugacauccagauuugc

SEQ ID NO: 1675410 - RNA, 19 nt, Artificial Sequence
  Description of Artificial Sequence: Synthetic oligonucleotide
cacacacacacacacaaag

SEQ ID NO: 1675411 - RNA, 19 nt, Artificial Sequence
  Description of Artificial Sequence: Synthetic oligonucleotide
auaaagaucaguucaucua

SEQ ID NO: 1675412 - RNA, 19 nt, Artificial Sequence
  Description of Artificial Sequence: Synthetic oligonucleotide
uuuacuaguuggcaaggaa

SEQ ID NO: 1675413 - RNA, 19 nt, Artificial Sequence
  Description of Artificial Sequence: Synthetic oligonucleotide
auaaucugcaauaaacucu

SEQ ID NO: 1675414 - RNA, 19 nt, Artificial Sequence
  Description of Artificial Sequence: Synthetic oligonucleotide
uccagggcaaaucuuggcc

SEQ ID NO: 1675415 - RNA, 19 nt, Artificial Sequence
  Description of Artificial Sequence: Synthetic oligonucleotide
aaccccgucuuuccaagac

SEQ ID NO: 1675416 - RNA, 19 nt, Artificial Sequence
  Description of Artificial Sequence: Synthetic oligonucleotide
acaucgacuuacuaaucuc

SEQ ID NO: 1675417 - RNA, 19 nt, Artificial Sequence
  Description of Artificial Sequence: Synthetic oligonucleotide
uaucaguucugagaaauga

SEQ ID NO: 1675418 - RNA, 19 nt, Artificial Sequence
  Description of Artificial Sequence: Synthetic oligonucleotide
uuauuauaaaucccagguu

SEQ ID NO: 1675419 - RNA, 19 nt, Artificial Sequence
  Description of Artificial Sequence: Synthetic oligonucleotide
  modified_base (7)..(7): a, c, u, g, unknown or other
auauuunuuuauugccaca

SEQ ID NO: 1675420 - RNA, 19 nt, Artificial Sequence
  Description of Artificial Sequence: Synthetic oligonucleotide
uaauuucuggacaaugaua

SEQ ID NO: 1675421 - RNA, 19 nt, Artificial Sequence
  Description of Artificial Sequence: Synthetic oligonucleotide
uggaucuaauacauuaaaa

SEQ ID NO: 1675422 - RNA, 19 nt, Artificial Sequence
  Description of Artificial Sequence: Synthetic oligonucleotide
uugagagcgguuccaauca

SEQ ID NO: 1675423 - RNA, 19 nt, Artificial Sequence
  Description of Artificial Sequence: Synthetic oligonucleotide
ugucaauauuugaaggccu

SEQ ID NO: 1675424 - RNA, 19 nt, Artificial Sequence
  Description of Artificial Sequence: Synthetic oligonucleotide
gguuauuauaaaucccagg

SEQ ID NO: 1675425 - RNA, 19 nt, Artificial Sequence
  Description of Artificial Sequence: Synthetic oligonucleotide
agucucauuaauguagcuc

SEQ ID NO: 1675426 - RNA, 19 nt, Artificial Sequence
  Description of Artificial Sequence: Synthetic oligonucleotide
aucucgcuuguauugagag

SEQ ID NO: 1675427 - RNA, 19 nt, Artificial Sequence
  Description of Artificial Sequence: Synthetic oligonucleotide
ugcaauaaacucuauccua

SEQ ID NO: 1675428 - RNA, 19 nt, Artificial Sequence
  Description of Artificial Sequence: Synthetic oligonucleotide
aguugcacuacuuucuuau

SEQ ID NO: 1675429 - RNA, 19 nt, Artificial Sequence
  Description of Artificial Sequence: Synthetic oligonucleotide
aagaucaguucaucuauau

SEQ ID NO: 1675430 - RNA, 19 nt, Artificial Sequence
  Description of Artificial Sequence: Synthetic oligonucleotide
cuggacaaugauaaacaag

SEQ ID NO: 1675431 - RNA, 19 nt, Artificial Sequence
  Description of Artificial Sequence: Synthetic oligonucleotide
acaagcuacuuaaaacccc

SEQ ID NO: 1675432 - RNA, 19 nt, Artificial Sequence
  Description of Artificial Sequence: Synthetic oligonucleotide
ugcugguccacuaggaaga

SEQ ID NO: 1675433 - RNA, 19 nt, Artificial Sequence
  Description of Artificial Sequence: Synthetic oligonucleotide
acuacuuucuuauguauuu

SEQ ID NO: 1675434 - RNA, 19 nt, Artificial Sequence
  Description of Artificial Sequence: Synthetic oligonucleotide
ucuugggguccaaaggucc

SEQ ID NO: 1675435 - RNA, 19 nt, Artificial Sequence
  Description of Artificial Sequence: Synthetic oligonucleotide
auuuucuaucagcacagcu

SEQ ID NO: 1675436 - RNA, 19 nt, Artificial Sequence
  Description of Artificial Sequence: Synthetic oligonucleotide
acuuaaaaccccgucuuuc

SEQ ID NO: 1675437 - RNA, 19 nt, Artificial Sequence
  Description of Artificial Sequence: Synthetic oligonucleotide
ucaugguuggccuuccaug

SEQ ID NO: 1675438 - RNA, 19 nt, Artificial Sequence
  Description of Artificial Sequence: Synthetic oligonucleotide
uugcacuacuuucuuaugu

SEQ ID NO: 1675439 - RNA, 19 nt, Artificial Sequence
  Description of Artificial Sequence: Synthetic oligonucleotide
  modified_base (2)..(2): a, c, u, g, unknown or other
  modified_base (17)..(17): a, c, u, g, unknown or other
anaaacaaacauauuunuu

SEQ ID NO: 1675440 - RNA, 19 nt, Artificial Sequence
  Description of Artificial Sequence: Synthetic oligonucleotide
acuuacuaaucucuuuucu

SEQ ID NO: 1675441 - RNA, 19 nt, Artificial Sequence
  Description of Artificial Sequence: Synthetic oligonucleotide
uuccaaucaucacagacuu

SEQ ID NO: 1675442 - RNA, 19 nt, Artificial Sequence
  Description of Artificial Sequence: Synthetic oligonucleotide
uuuuagcuaaagaacucau

SEQ ID NO: 1675443 - RNA, 19 nt, Artificial Sequence
  Description of Artificial Sequence: Synthetic oligonucleotide
uacuaguuggcaaggaaau

SEQ ID NO: 1675444 - RNA, 19 nt, Artificial Sequence
  Description of Artificial Sequence: Synthetic oligonucleotide
agggcugucacuuagcaua

SEQ ID NO: 1675445 - RNA, 19 nt, Artificial Sequence
  Description of Artificial Sequence: Synthetic oligonucleotide
aaugacauccagauuugca

SEQ ID NO: 1675446 - RNA, 19 nt, Artificial Sequence
  Description of Artificial Sequence: Synthetic oligonucleotide
cacacacacacacacacac

SEQ ID NO: 1675447 - RNA, 19 nt, Artificial Sequence
  Description of Artificial Sequence: Synthetic oligonucleotide
agacagaauaaucugcaau

SEQ ID NO: 1675448 - RNA, 19 nt, Artificial Sequence
  Description of Artificial Sequence: Synthetic oligonucleotide
augauaaacaagcuacuua

SEQ ID NO: 1675449 - RNA, 19 nt, Artificial Sequence
  Description of Artificial Sequence: Synthetic oligonucleotide
agauuuucuaucagcacag

SEQ ID NO: 1675450 - RNA, 19 nt, Artificial Sequence
  Description of Artificial Sequence: Synthetic oligonucleotide
agcuacuuaaaaccccguc

SEQ ID NO: 1675451 - RNA, 19 nt, Artificial Sequence
  Description of Artificial Sequence: Synthetic oligonucleotide
  modified_base (9)..(9): a, c, u, g, unknown or other
acauauuunuuuauugcca

SEQ ID NO: 1675452 - RNA, 19 nt, Artificial Sequence
  Description of Artificial Sequence: Synthetic oligonucleotide
acacgcuuagcguuugagg

SEQ ID NO: 1675453 - RNA, 19 nt, Artificial Sequence
  Description of Artificial Sequence: Synthetic oligonucleotide
uguugugaguaccaagcaa

SEQ ID NO: 1675454 - RNA, 19 nt, Artificial Sequence
  Description of Artificial Sequence: Synthetic oligonucleotide
uugugaguaccaagcaacc

SEQ ID NO: 1675455 - RNA, 19 nt, Artificial Sequence
  Description of Artificial Sequence: Synthetic oligonucleotide
uguuucauucuuuuagcua

SEQ ID NO: 1675456 - RNA, 19 nt, Artificial Sequence
  Description of Artificial Sequence: Synthetic oligonucleotide
guugugaguaccaagcaac

SEQ ID NO: 1675457 - RNA, 19 nt, Artificial Sequence
  Description of Artificial Sequence: Synthetic oligonucleotide
ucuucuaucuugacacgcu

SEQ ID NO: 1675458 - RNA, 19 nt, Artificial Sequence
  Description of Artificial Sequence: Synthetic oligonucleotide
  modified_base (6)..(6): a, c, u, g, unknown or other
uuuuanaaacaaacauauu

SEQ ID NO: 1675459 - RNA, 19 nt, Artificial Sequence
  Description of Artificial Sequence: Synthetic oligonucleotide
uuaaaaccccgucuuucca

SEQ ID NO: 1675460 - RNA, 19 nt, Artificial Sequence
  Description of Artificial Sequence: Synthetic oligonucleotide
uugccacacacacacacac

SEQ ID NO: 1675461 - RNA, 19 nt, Artificial Sequence
  Description of Artificial Sequence: Synthetic oligonucleotide
ugcaaugugccucaugguu

SEQ ID NO: 1675462 - RNA, 19 nt, Artificial Sequence
  Description of Artificial Sequence: Synthetic oligonucleotide
aguaucaguucugagaaau

SEQ ID NO: 1675463 - RNA, 19 nt, Artificial Sequence
  Description of Artificial Sequence: Synthetic oligonucleotide
ugguuggccuuccaugggg

SEQ ID NO: 1675464 - RNA, 19 nt, Artificial Sequence
  Description of Artificial Sequence: Synthetic oligonucleotide
  modified_base (5)..(5): a, c, u, g, unknown or other
auuunuuuauugccacaca

SEQ ID NO: 1675465 - RNA, 19 nt, Artificial Sequence
  Description of Artificial Sequence: Synthetic oligonucleotide
ucggcaaacaucgacuuac

SEQ ID NO: 1675466 - RNA, 19 nt, Artificial Sequence
  Description of Artificial Sequence: Synthetic oligonucleotide
uagcuaaagaacucauaga

SEQ ID NO: 1675467 - RNA, 19 nt, Artificial Sequence
  Description of Artificial Sequence: Synthetic oligonucleotide
uauccauuaucuucuugcu

SEQ ID NO: 1675468 - RNA, 19 nt, Artificial Sequence
  Description of Artificial Sequence: Synthetic oligonucleotide
ucucauuaauguagcucag

SEQ ID NO: 1675469 - RNA, 19 nt, Artificial Sequence
  Description of Artificial Sequence: Synthetic oligonucleotide
caaugugccucaugguugg

SEQ ID NO: 1675470 - RNA, 19 nt, Artificial Sequence
  Description of Artificial Sequence: Synthetic oligonucleotide
acucuauccuacaagcagg

SEQ ID NO: 1675471 - RNA, 19 nt, Artificial Sequence
  Description of Artificial Sequence: Synthetic oligonucleotide
cuaauacauuaaaauagga

SEQ ID NO: 1675472 - RNA, 19 nt, Artificial Sequence
  Description of Artificial Sequence: Synthetic oligonucleotide
cuggccucaacuaagccuc

SEQ ID NO: 1675473 - RNA, 19 nt, Artificial Sequence
  Description of Artificial Sequence: Synthetic oligonucleotide
ugagguguugugaguacca

SEQ ID NO: 1675474 - RNA, 19 nt, Artificial Sequence
  Description of Artificial Sequence: Synthetic oligonucleotide
uucuucuaucuugacacgc

SEQ ID NO: 1675475 - RNA, 19 nt, Artificial Sequence
  Description of Artificial Sequence: Synthetic oligonucleotide
cuuguauugagagcgguuc

SEQ ID NO: 1675476 - RNA, 19 nt, Artificial Sequence
  Description of Artificial Sequence: Synthetic oligonucleotide
augagcuucuucaucucgc

SEQ ID NO: 1675477 - RNA, 19 nt, Artificial Sequence
  Description of Artificial Sequence: Synthetic oligonucleotide
acuaaucucuuuucugagu

SEQ ID NO: 1675478 - RNA, 19 nt, Artificial Sequence
  Description of Artificial Sequence: Synthetic oligonucleotide
aguaauggagucucauuaa

SEQ ID NO: 1675479 - RNA, 19 nt, Artificial Sequence
  Description of Artificial Sequence: Synthetic oligonucleotide
cagcaucucaaaauuguac

SEQ ID NO: 1675480 - RNA, 19 nt, Artificial Sequence
  Description of Artificial Sequence: Synthetic oligonucleotide
cacaaaguaauggagucuc

SEQ ID NO: 1675481 - RNA, 19 nt, Artificial Sequence
  Description of Artificial Sequence: Synthetic oligonucleotide
aggaaugucaauauuugaa

SEQ ID NO: 1675482 - RNA, 19 nt, Artificial Sequence
  Description of Artificial Sequence: Synthetic oligonucleotide
augagguguugugaguacc

SEQ ID NO: 1675483 - RNA, 19 nt, Artificial Sequence
  Description of Artificial Sequence: Synthetic oligonucleotide
agauuugcaaugugccuca

SEQ ID NO: 1675484 - RNA, 19 nt, Artificial Sequence
  Description of Artificial Sequence: Synthetic oligonucleotide
cauuccgcugcuuuuggug

SEQ ID NO: 1675485 - RNA, 19 nt, Artificial Sequence
  Description of Artificial Sequence: Synthetic oligonucleotide
aaacaucgacuuacuaauc

SEQ ID NO: 1675486 - RNA, 19 nt, Artificial Sequence
  Description of Artificial Sequence: Synthetic oligonucleotide
ggcuauaggcacaugaugc

SEQ ID NO: 1675487 - RNA, 19 nt, Artificial Sequence
  Description of Artificial Sequence: Synthetic oligonucleotide
gguuccaaucaucacagac

SEQ ID NO: 1675488 - RNA, 19 nt, Artificial Sequence
  Description of Artificial Sequence: Synthetic oligonucleotide
cacgcuuagcguuugagga

SEQ ID NO: 1675489 - RNA, 19 nt, Artificial Sequence
  Description of Artificial Sequence: Synthetic oligonucleotide
ugcacuacuuucuuaugua

SEQ ID NO: 1675490 - RNA, 19 nt, Artificial Sequence
  Description of Artificial Sequence: Synthetic oligonucleotide
uuggcccuaaacuuccugu

SEQ ID NO: 1675491 - RNA, 19 nt, Artificial Sequence
  Description of Artificial Sequence: Synthetic oligonucleotide
uguauugagagcgguucca

SEQ ID NO: 1675492 - RNA, 19 nt, Artificial Sequence
  Description of Artificial Sequence: Synthetic oligonucleotide
gacuuacuaaucucuuuuc

SEQ ID NO: 1675493 - RNA, 19 nt, Artificial Sequence
  Description of Artificial Sequence: Synthetic oligonucleotide
uuagcguuugaggaagaga

SEQ ID NO: 1675494 - RNA, 19 nt, Artificial Sequence
  Description of Artificial Sequence: Synthetic oligonucleotide
ggcaaggaaaucaauuuag

SEQ ID NO: 1675495 - RNA, 19 nt, Artificial Sequence
  Description of Artificial Sequence: Synthetic oligonucleotide
ucaucucgcuuguauugag

SEQ ID NO: 1675496 - RNA, 19 nt, Artificial Sequence
  Description of Artificial Sequence: Synthetic oligonucleotide
aacuccuggccucaacuaa

SEQ ID NO: 1675497 - RNA, 19 nt, Artificial Sequence
  Description of Artificial Sequence: Synthetic oligonucleotide
gaggaaugucaauauuuga

SEQ ID NO: 1675498 - RNA, 19 nt, Artificial Sequence
  Description of Artificial Sequence: Synthetic oligonucleotide
uaaaaccccgucuuuccaa

SEQ ID NO: 1675499 - RNA, 19 nt, Artificial Sequence
  Description of Artificial Sequence: Synthetic oligonucleotide
cucauuaauguagcucagg

SEQ ID NO: 1675500 - RNA, 19 nt, Artificial Sequence
  Description of Artificial Sequence: Synthetic oligonucleotide
caaucaucacagacuuccg

SEQ ID NO: 1675501 - RNA, 19 nt, Artificial Sequence
  Description of Artificial Sequence: Synthetic oligonucleotide
agagucuggggagugauga

SEQ ID NO: 1675502 - RNA, 19 nt, Artificial Sequence
  Description of Artificial Sequence: Synthetic oligonucleotide
aggaaguaucaguucugag

SEQ ID NO: 1675503 - RNA, 19 nt, Artificial Sequence
  Description of Artificial Sequence: Synthetic oligonucleotide
acacacaaaguaauggagu

SEQ ID NO: 1675504 - RNA, 19 nt, Artificial Sequence
  Description of Artificial Sequence: Synthetic oligonucleotide
aaacucuauccuacaagca

SEQ ID NO: 1675505 - RNA, 19 nt, Artificial Sequence
  Description of Artificial Sequence: Synthetic oligonucleotide
agguguugugaguaccaag

SEQ ID NO: 1675506 - RNA, 19 nt, Artificial Sequence
  Description of Artificial Sequence: Synthetic oligonucleotide
uuuuacuaguuggcaagga

SEQ ID NO: 1675507 - RNA, 19 nt, Artificial Sequence
  Description of Artificial Sequence: Synthetic oligonucleotide
uuauaaaucccagguuaaa

SEQ ID NO: 1675508 - RNA, 19 nt, Artificial Sequence
  Description of Artificial Sequence: Synthetic oligonucleotide
ugggcuauaggcacaugau

SEQ ID NO: 1675509 - RNA, 19 nt, Artificial Sequence
  Description of Artificial Sequence: Synthetic oligonucleotide
agacuuccgacaugcucgg

SEQ ID NO: 1675510 - RNA, 19 nt, Artificial Sequence
  Description of Artificial Sequence: Synthetic oligonucleotide
uuuuggugcuguaacuguu

SEQ ID NO: 1675511 - RNA, 19 nt, Artificial Sequence
  Description of Artificial Sequence: Synthetic oligonucleotide
ugcuuuuggugcuguaacu

SEQ ID NO: 1675512 - RNA, 19 nt, Artificial Sequence
  Description of Artificial Sequence: Synthetic oligonucleotide
acuaguuggcaaggaaauc

SEQ ID NO: 1675513 - RNA, 19 nt, Artificial Sequence
  Description of Artificial Sequence: Synthetic oligonucleotide
  modified_base (13)..(13): a, c, u, g, unknown or other
acaaacauauuunuuuauu

SEQ ID NO: 1675514 - RNA, 19 nt, Artificial Sequence
  Description of Artificial Sequence: Synthetic oligonucleotide
agccucugcaccuggagca

SEQ ID NO: 1675515 - RNA, 19 nt, Artificial Sequence
  Description of Artificial Sequence: Synthetic oligonucleotide
gucacuuagcauaaagauc

SEQ ID NO: 1675516 - RNA, 19 nt, Artificial Sequence
  Description of Artificial Sequence: Synthetic oligonucleotide
auuauaaaucccagguuaa

SEQ ID NO: 1675517 - RNA, 19 nt, Artificial Sequence
  Description of Artificial Sequence: Synthetic oligonucleotide
caucucggcaaacaucgac

SEQ ID NO: 1675518 - RNA, 19 nt, Artificial Sequence
  Description of Artificial Sequence: Synthetic oligonucleotide
uucaucucgcuuguauuga

SEQ ID NO: 1675519 - RNA, 19 nt, Artificial Sequence
  Description of Artificial Sequence: Synthetic oligonucleotide
augugccucaugguuggcc

SEQ ID NO: 1675520 - RNA, 19 nt, Artificial Sequence
  Description of Artificial Sequence: Synthetic oligonucleotide
ucgcuuguauugagagcgg

SEQ ID NO: 1675521 - RNA, 19 nt, Artificial Sequence
  Description of Artificial Sequence: Synthetic oligonucleotide
gcaauaaacucuauccuac

SEQ ID NO: 1675522 - RNA, 19 nt, Artificial Sequence
  Description of Artificial Sequence: Synthetic oligonucleotide
cuacaagcaggaaguauca

SEQ ID NO: 1675523 - RNA, 19 nt, Artificial Sequence
  Description of Artificial Sequence: Synthetic oligonucleotide
guggaucuaauacauuaaa

SEQ ID NO: 1675524 - RNA, 19 nt, Artificial Sequence
  Description of Artificial Sequence: Synthetic oligonucleotide
ugugaguaccaagcaaccu

SEQ ID NO: 1675525 - RNA, 19 nt, Artificial Sequence
  Description of Artificial Sequence: Synthetic oligonucleotide
agagcgguuccaaucauca

SEQ ID NO: 1675526 - RNA, 19 nt, Artificial Sequence
  Description of Artificial Sequence: Synthetic oligonucleotide
ucuaucagcacagcuucau

SEQ ID NO: 1675527 - RNA, 19 nt, Artificial Sequence
  Description of Artificial Sequence: Synthetic oligonucleotide
cacacacacacacacacaa

SEQ ID NO: 1675528 - RNA, 19 nt, Artificial Sequence
  Description of Artificial Sequence: Synthetic oligonucleotide
augacgccagggcugucac

SEQ ID NO: 1675529 - RNA, 19 nt, Artificial Sequence
  Description of Artificial Sequence: Synthetic oligonucleotide
gcuauaggcacaugaugcc

SEQ ID NO: 1675530 - RNA, 19 nt, Artificial Sequence
  Description of Artificial Sequence: Synthetic oligonucleotide
gucauuccgcugcuuuugg

SEQ ID NO: 1675531 - RNA, 19 nt, Artificial Sequence
  Description of Artificial Sequence: Synthetic oligonucleotide
gcguuugaggaagagagag

SEQ ID NO: 1675532 - RNA, 19 nt, Artificial Sequence
  Description of Artificial Sequence: Synthetic oligonucleotide
ugccugacucuugagggcc

SEQ ID NO: 1675533 - RNA, 19 nt, Artificial Sequence
  Description of Artificial Sequence: Synthetic oligonucleotide
gacacgcuuagcguuugag

SEQ ID NO: 1675534 - RNA, 19 nt, Artificial Sequence
  Description of Artificial Sequence: Synthetic oligonucleotide
cacacacacacacaaagua

SEQ ID NO: 1675535 - RNA, 19 nt, Artificial Sequence
  Description of Artificial Sequence: Synthetic oligonucleotide
aaugugccucaugguuggc

SEQ ID NO: 1675536 - RNA, 19 nt, Artificial Sequence
  Description of Artificial Sequence: Synthetic oligonucleotide
uacuuaaaaccccgucuuu

SEQ ID NO: 1675537 - RNA, 19 nt, Artificial Sequence
  Description of Artificial Sequence: Synthetic oligonucleotide
cuugcuucaaacacugagu

SEQ ID NO: 1675538 - RNA, 19 nt, Artificial Sequence
  Description of Artificial Sequence: Synthetic oligonucleotide
uuggaggaaugucaauauu

SEQ ID NO: 1675539 - RNA, 19 nt, Artificial Sequence
  Description of Artificial Sequence: Synthetic oligonucleotide
aaccugagccgaugaggug

SEQ ID NO: 1675540 - RNA, 19 nt, Artificial Sequence
  Description of Artificial Sequence: Synthetic oligonucleotide
caucucacccaugugggug

SEQ ID NO: 1675541 - RNA, 19 nt, Artificial Sequence
  Description of Artificial Sequence: Synthetic oligonucleotide
aggggugguccaucucacc

SEQ ID NO: 1675542 - RNA, 19 nt, Artificial Sequence
  Description of Artificial Sequence: Synthetic oligonucleotide
ucgacuuacuaaucucuuu

SEQ ID NO: 1675543 - RNA, 19 nt, Artificial Sequence
  Description of Artificial Sequence: Synthetic oligonucleotide
cucugcuuacugucauucc

SEQ ID NO: 1675544 - RNA, 19 nt, Artificial Sequence
  Description of Artificial Sequence: Synthetic oligonucleotide
gccacacacacacacacac

SEQ ID NO: 1675545 - RNA, 19 nt, Artificial Sequence
  Description of Artificial Sequence: Synthetic oligonucleotide
aaguugcacuacuuucuua

SEQ ID NO: 1675546 - RNA, 19 nt, Artificial Sequence
  Description of Artificial Sequence: Synthetic oligonucleotide
cagguuaaacugacccaag

SEQ ID NO: 1675547 - RNA, 19 nt, Artificial Sequence
  Description of Artificial Sequence: Synthetic oligonucleotide
caucuauaucuuggggucc

SEQ ID NO: 1675548 - RNA, 19 nt, Artificial Sequence
  Description of Artificial Sequence: Synthetic oligonucleotide
cugaguguaguugcuuaag

SEQ ID NO: 1675549 - RNA, 19 nt, Artificial Sequence
  Description of Artificial Sequence: Synthetic oligonucleotide
uaaguggaucuaauacauu

SEQ ID NO: 1675550 - RNA, 19 nt, Artificial Sequence
  Description of Artificial Sequence: Synthetic oligonucleotide
aucacagacuuccgacaug

SEQ ID NO: 1675551 - RNA, 19 nt, Artificial Sequence
  Description of Artificial Sequence: Synthetic oligonucleotide
agcuguacauuuauaucca

SEQ ID NO: 1675552 - RNA, 19 nt, Artificial Sequence
  Description of Artificial Sequence: Synthetic oligonucleotide
cugggcuauaggcacauga

SEQ ID NO: 1675553 - RNA, 19 nt, Artificial Sequence
  Description of Artificial Sequence: Synthetic oligonucleotide
ucucggcaaacaucgacuu

SEQ ID NO: 1675554 - RNA, 19 nt, Artificial Sequence
  Description of Artificial Sequence: Synthetic oligonucleotide
aucucggcaaacaucgacu

SEQ ID NO: 1675555 - RNA, 19 nt, Artificial Sequence
  Description of Artificial Sequence: Synthetic oligonucleotide
cacuaugcuugacuuaaca

SEQ ID NO: 1675556 - RNA, 19 nt, Artificial Sequence
  Description of Artificial Sequence: Synthetic oligonucleotide
cuuagcguuugaggaagag

SEQ ID NO: 1675557 - RNA, 19 nt, Artificial Sequence
  Description of Artificial Sequence: Synthetic oligonucleotide
uuauugccacacacacaca

SEQ ID NO: 1675558 - RNA, 19 nt, Artificial Sequence
  Description of Artificial Sequence: Synthetic oligonucleotide
aaaccccgucuuuccaaga

SEQ ID NO: 1675559 - RNA, 19 nt, Artificial Sequence
  Description of Artificial Sequence: Synthetic oligonucleotide
cuccagggcaaaucuuggc

SEQ ID NO: 1675560 - RNA, 19 nt, Artificial Sequence
  Description of Artificial Sequence: Synthetic oligonucleotide
gagucuggggagugaugag

SEQ ID NO: 1675561 - RNA, 19 nt, Artificial Sequence
  Description of Artificial Sequence: Synthetic oligonucleotide
aguggaucuaauacauuaa

SEQ ID NO: 1675562 - RNA, 19 nt, Artificial Sequence
  Description of Artificial Sequence: Synthetic oligonucleotide
acacacacacacaaaguaa

SEQ ID NO: 1675563 - RNA, 19 nt, Artificial Sequence
  Description of Artificial Sequence: Synthetic oligonucleotide
uuccgacaugcucgggaag

SEQ ID NO: 1675564 - RNA, 19 nt, Artificial Sequence
  Description of Artificial Sequence: Synthetic oligonucleotide
guuccaaucaucacagacu

SEQ ID NO: 1675565 - RNA, 19 nt, Artificial Sequence
  Description of Artificial Sequence: Synthetic oligonucleotide
guaucaguucugagaaaug

SEQ ID NO: 1675566 - RNA, 19 nt, Artificial Sequence
  Description of Artificial Sequence: Synthetic oligonucleotide
aacugacccaagaucucca

SEQ ID NO: 1675567 - RNA, 19 nt, Artificial Sequence
  Description of Artificial Sequence: Synthetic oligonucleotide
cucuauccuacaagcagga

SEQ ID NO: 1675568 - RNA, 19 nt, Artificial Sequence
  Description of Artificial Sequence: Synthetic oligonucleotide
ugccacacacacacacaca

SEQ ID NO: 1675569 - RNA, 19 nt, Artificial Sequence
  Description of Artificial Sequence: Synthetic oligonucleotide
ggagucucauuaauguagc

SEQ ID NO: 1675570 - RNA, 19 nt, Artificial Sequence
  Description of Artificial Sequence: Synthetic oligonucleotide
cacuuagcauaaagaucag

SEQ ID NO: 1675571 - RNA, 19 nt, Artificial Sequence
  Description of Artificial Sequence: Synthetic oligonucleotide
gcaaggaaaucaauuuagc

SEQ ID NO: 1675572 - RNA, 19 nt, Artificial Sequence
  Description of Artificial Sequence: Synthetic oligonucleotide
cuugacuuaacaccgguuu

SEQ ID NO: 1675573 - RNA, 19 nt, Artificial Sequence
  Description of Artificial Sequence: Synthetic oligonucleotide
cuaucuugacacgcuuagc

SEQ ID NO: 1675574 - RNA, 19 nt, Artificial Sequence
  Description of Artificial Sequence: Synthetic oligonucleotide
ggggugguccaucucaccc

SEQ ID NO: 1675575 - RNA, 19 nt, Artificial Sequence
  Description of Artificial Sequence: Synthetic oligonucleotide
uagcccuuucagugacugg

SEQ ID NO: 1675576 - RNA, 19 nt, Artificial Sequence
  Description of Artificial Sequence: Synthetic oligonucleotide
ugagccgaugagguguugu

SEQ ID NO: 1675577 - RNA, 19 nt, Artificial Sequence
  Description of Artificial Sequence: Synthetic oligonucleotide
gggcuauaggcacaugaug

SEQ ID NO: 1675578 - RNA, 19 nt, Artificial Sequence
  Description of Artificial Sequence: Synthetic oligonucleotide
cuuggcccuaaacuuccug

SEQ ID NO: 1675579 - RNA, 19 nt, Artificial Sequence
  Description of Artificial Sequence: Synthetic oligonucleotide
cuaaucucuuuucugaguu

SEQ ID NO: 1675580 - RNA, 19 nt, Artificial Sequence
  Description of Artificial Sequence: Synthetic oligonucleotide
uccuguaacucugcuuacu

SEQ ID NO: 1675581 - RNA, 19 nt, Artificial Sequence
  Description of Artificial Sequence: Synthetic oligonucleotide
uccuacaagcaggaaguau

SEQ ID NO: 1675582 - RNA, 19 nt, Artificial Sequence
  Description of Artificial Sequence: Synthetic oligonucleotide
ccagggcaaaucuuggccc

SEQ ID NO: 1675583 - RNA, 19 nt, Artificial Sequence
  Description of Artificial Sequence: Synthetic oligonucleotide
gaagagguccuccuucagu

SEQ ID NO: 1675584 - RNA, 19 nt, Artificial Sequence
  Description of Artificial Sequence: Synthetic oligonucleotide
guguugugaguaccaagca

SEQ ID NO: 1675585 - RNA, 19 nt, Artificial Sequence
  Description of Artificial Sequence: Synthetic oligonucleotide
ugacaaaaucaaagccauu

SEQ ID NO: 1675586 - RNA, 19 nt, Artificial Sequence
  Description of Artificial Sequence: Synthetic oligonucleotide
ucagagucuggggagugau

SEQ ID NO: 1675587 - RNA, 19 nt, Artificial Sequence
  Description of Artificial Sequence: Synthetic oligonucleotide
caucgacuuacuaaucucu

SEQ ID NO: 1675588 - RNA, 19 nt, Artificial Sequence
  Description of Artificial Sequence: Synthetic oligonucleotide
gcuacuuaaaaccccgucu

SEQ ID NO: 1675589 - RNA, 19 nt, Artificial Sequence
  Description of Artificial Sequence: Synthetic oligonucleotide
cauuaauguagcucagggu

SEQ ID NO: 1675590 - RNA, 19 nt, Artificial Sequence
  Description of Artificial Sequence: Synthetic oligonucleotide
acacacacacacacaaagu

SEQ ID NO: 1675591 - RNA, 19 nt, Artificial Sequence
  Description of Artificial Sequence: Synthetic oligonucleotide
uacaucaaccugagccgau

SEQ ID NO: 1675592 - RNA, 19 nt, Artificial Sequence
  Description of Artificial Sequence: Synthetic oligonucleotide
aggcacaugaugccacuau

SEQ ID NO: 1675593 - RNA, 19 nt, Artificial Sequence
  Description of Artificial Sequence: Synthetic oligonucleotide
uuccuguaacucugcuuac

SEQ ID NO: 1675594 - RNA, 19 nt, Artificial Sequence
  Description of Artificial Sequence: Synthetic oligonucleotide
acaucaaccugagccgaug

SEQ ID NO: 1675595 - RNA, 19 nt, Artificial Sequence
  Description of Artificial Sequence: Synthetic oligonucleotide
ugacucuugagggccggca

SEQ ID NO: 1675596 - RNA, 19 nt, Artificial Sequence
  Description of Artificial Sequence: Synthetic oligonucleotide
aucaguucaucuauaucuu

SEQ ID NO: 1675597 - RNA, 19 nt, Artificial Sequence
  Description of Artificial Sequence: Synthetic oligonucleotide
ugagagcgguuccaaucau

SEQ ID NO: 1675598 - RNA, 19 nt, Artificial Sequence
  Description of Artificial Sequence: Synthetic oligonucleotide
cuauaggcacaugaugcca

SEQ ID NO: 1675599 - RNA, 19 nt, Artificial Sequence
  Description of Artificial Sequence: Synthetic oligonucleotide
uggcccuaaacuuccugua

SEQ ID NO: 1675600 - RNA, 19 nt, Artificial Sequence
  Description of Artificial Sequence: Synthetic oligonucleotide
gcgguuccaaucaucacag

SEQ ID NO: 1675601 - RNA, 19 nt, Artificial Sequence
  Description of Artificial Sequence: Synthetic oligonucleotide
cacacacacacaaaguaau

SEQ ID NO: 1675602 - RNA, 19 nt, Artificial Sequence
  Description of Artificial Sequence: Synthetic oligonucleotide
gcacaugaugccacuaugc

SEQ ID NO: 1675603 - RNA, 19 nt, Artificial Sequence
  Description of Artificial Sequence: Synthetic oligonucleotide
acgcuuagcguuugaggaa

SEQ ID NO: 1675604 - RNA, 19 nt, Artificial Sequence
  Description of Artificial Sequence: Synthetic oligonucleotide
auugccacacacacacaca

SEQ ID NO: 1675605 - RNA, 19 nt, Artificial Sequence
  Description of Artificial Sequence: Synthetic oligonucleotide
ccagauuuucuaucagcac

SEQ ID NO: 1675606 - RNA, 19 nt, Artificial Sequence
  Description of Artificial Sequence: Synthetic oligonucleotide
cucgggaagcaaacaucug

SEQ ID NO: 1675607 - RNA, 19 nt, Artificial Sequence
  Description of Artificial Sequence: Synthetic oligonucleotide
accccgucuuuccaagaca

SEQ ID NO: 1675608 - RNA, 19 nt, Artificial Sequence
  Description of Artificial Sequence: Synthetic oligonucleotide
caaccugagccgaugaggu

SEQ ID NO: 1675609 - RNA, 19 nt, Artificial Sequence
  Description of Artificial Sequence: Synthetic oligonucleotide
cugacccaagaucuccauc

SEQ ID NO: 1675610 - RNA, 19 nt, Artificial Sequence
  Description of Artificial Sequence: Synthetic oligonucleotide
aagcuacuuaaaaccccgu

SEQ ID NO: 1675611 - RNA, 19 nt, Artificial Sequence
  Description of Artificial Sequence: Synthetic oligonucleotide
cuugggguccaaaggucca

SEQ ID NO: 1675612 - RNA, 19 nt, Artificial Sequence
  Description of Artificial Sequence: Synthetic oligonucleotide
uugacacgcuuagcguuug

SEQ ID NO: 1675613 - RNA, 19 nt, Artificial Sequence
  Description of Artificial Sequence: Synthetic oligonucleotide
gagggccggcacaugacgc

SEQ ID NO: 1675614 - RNA, 19 nt, Artificial Sequence
  Description of Artificial Sequence: Synthetic oligonucleotide
caaacuccuggccucaacu

SEQ ID NO: 1675615 - RNA, 19 nt, Artificial Sequence
  Description of Artificial Sequence: Synthetic oligonucleotide
cuuccgacaugcucgggaa

SEQ ID NO: 1675616 - RNA, 19 nt, Artificial Sequence
  Description of Artificial Sequence: Synthetic oligonucleotide
gguuaaacugacccaagau

SEQ ID NO: 1675617 - RNA, 19 nt, Artificial Sequence
  Description of Artificial Sequence: Synthetic oligonucleotide
caucucgcuuguauugaga

SEQ ID NO: 1675618 - RNA, 19 nt, Artificial Sequence
  Description of Artificial Sequence: Synthetic oligonucleotide
cacaugaugccacuaugcu

SEQ ID NO: 1675619 - RNA, 19 nt, Artificial Sequence
  Description of Artificial Sequence: Synthetic oligonucleotide
ucuauccuacaagcaggaa

SEQ ID NO: 1675620 - RNA, 19 nt, Artificial Sequence
  Description of Artificial Sequence: Synthetic oligonucleotide
caggggugguccaucucac

SEQ ID NO: 1675621 - RNA, 19 nt, Artificial Sequence
  Description of Artificial Sequence: Synthetic oligonucleotide
ccuuucagugacuggagca

SEQ ID NO: 1675622 - RNA, 19 nt, Artificial Sequence
  Description of Artificial Sequence: Synthetic oligonucleotide
ccccgucuuuccaagacag

SEQ ID NO: 1675623 - RNA, 19 nt, Artificial Sequence
  Description of Artificial Sequence: Synthetic oligonucleotide
cacugaguguaguugcuua

SEQ ID NO: 1675624 - RNA, 19 nt, Artificial Sequence
  Description of Artificial Sequence: Synthetic oligonucleotide
caggaaguaucaguucuga

SEQ ID NO: 1675625 - RNA, 19 nt, Artificial Sequence
  Description of Artificial Sequence: Synthetic oligonucleotide
ugacacgcuuagcguuuga

SEQ ID NO: 1675626 - RNA, 19 nt, Artificial Sequence
  Description of Artificial Sequence: Synthetic oligonucleotide
gagagcgguuccaaucauc

SEQ ID NO: 1675627 - RNA, 19 nt, Artificial Sequence
  Description of Artificial Sequence: Synthetic oligonucleotide
cuacaucaaccugagccga

SEQ ID NO: 1675628 - RNA, 19 nt, Artificial Sequence
  Description of Artificial Sequence: Synthetic oligonucleotide
uggccucaacuaagccucc

SEQ ID NO: 1675629 - RNA, 19 nt, Artificial Sequence
  Description of Artificial Sequence: Synthetic oligonucleotide
gguccaaagguccaguuuu

SEQ ID NO: 1675630 - RNA, 19 nt, Artificial Sequence
  Description of Artificial Sequence: Synthetic oligonucleotide
augaugccacuaugcuuga

SEQ ID NO: 1675631 - RNA, 19 nt, Artificial Sequence
  Description of Artificial Sequence: Synthetic oligonucleotide
aucgacuuacuaaucucuu

SEQ ID NO: 1675632 - RNA, 19 nt, Artificial Sequence
  Description of Artificial Sequence: Synthetic oligonucleotide
ccuaaacuuccuguaacuc

SEQ ID NO: 1675633 - RNA, 19 nt, Artificial Sequence
  Description of Artificial Sequence: Synthetic oligonucleotide
gccacuaugcuugacuuaa

SEQ ID NO: 1675634 - RNA, 19 nt, Artificial Sequence
  Description of Artificial Sequence: Synthetic oligonucleotide
agcaaacaucugccugacu

SEQ ID NO: 1675635 - RNA, 19 nt, Artificial Sequence
  Description of Artificial Sequence: Synthetic oligonucleotide
aaucugcaauaaacucuau

SEQ ID NO: 1675636 - RNA, 19 nt, Artificial Sequence
  Description of Artificial Sequence: Synthetic oligonucleotide
ucuauaucuugggguccaa

SEQ ID NO: 1675637 - RNA, 19 nt, Artificial Sequence
  Description of Artificial Sequence: Synthetic oligonucleotide
gccucaacuaagccucccc

SEQ ID NO: 1675638 - RNA, 19 nt, Artificial Sequence
  Description of Artificial Sequence: Synthetic oligonucleotide
acacacacacacacacaca

SEQ ID NO: 1675639 - RNA, 19 nt, Artificial Sequence
  Description of Artificial Sequence: Synthetic oligonucleotide
gcauaaagaucaguucauc

SEQ ID NO: 1675640 - RNA, 19 nt, Artificial Sequence
  Description of Artificial Sequence: Synthetic oligonucleotide
ggaguugguggaggcaaag

SEQ ID NO: 1675641 - RNA, 19 nt, Artificial Sequence
  Description of Artificial Sequence: Synthetic oligonucleotide
agcguuugaggaagagaga

SEQ ID NO: 1675642 - RNA, 19 nt, Artificial Sequence
  Description of Artificial Sequence: Synthetic oligonucleotide
ugccucaugguuggccuuc

SEQ ID NO: 1675643 - RNA, 19 nt, Artificial Sequence
  Description of Artificial Sequence: Synthetic oligonucleotide
gguggaggcaaagcuguac

SEQ ID NO: 1675644 - RNA, 19 nt, Artificial Sequence
  Description of Artificial Sequence: Synthetic oligonucleotide
gcaaccuuggaggaauguc

SEQ ID NO: 1675645 - RNA, 19 nt, Artificial Sequence
  Description of Artificial Sequence: Synthetic oligonucleotide
caugacgccagggcuguca

SEQ ID NO: 1675646 - RNA, 19 nt, Artificial Sequence
  Description of Artificial Sequence: Synthetic oligonucleotide
caucacagacuuccgacau

SEQ ID NO: 1675647 - RNA, 19 nt, Artificial Sequence
  Description of Artificial Sequence: Synthetic oligonucleotide
gcacaugacgccagggcug

SEQ ID NO: 1675648 - RNA, 19 nt, Artificial Sequence
  Description of Artificial Sequence: Synthetic oligonucleotide
ggcacaugacgccagggcu

SEQ ID NO: 1675649 - RNA, 19 nt, Artificial Sequence
  Description of Artificial Sequence: Synthetic oligonucleotide
caaaguaauggagucucau

SEQ ID NO: 1675650 - RNA, 19 nt, Artificial Sequence
  Description of Artificial Sequence: Synthetic oligonucleotide
caugcucgggaagcaaaca

SEQ ID NO: 1675651 - RNA, 19 nt, Artificial Sequence
  Description of Artificial Sequence: Synthetic oligonucleotide
cccuuucagugacuggagc

SEQ ID NO: 1675652 - RNA, 19 nt, Artificial Sequence
  Description of Artificial Sequence: Synthetic oligonucleotide
uaggcacaugaugccacua

SEQ ID NO: 1675653 - RNA, 19 nt, Artificial Sequence
  Description of Artificial Sequence: Synthetic oligonucleotide
gacuuccgacaugcucggg

SEQ ID NO: 1675654 - RNA, 19 nt, Artificial Sequence
  Description of Artificial Sequence: Synthetic oligonucleotide
cuugacacgcuuagcguuu

SEQ ID NO: 1675655 - RNA, 19 nt, Artificial Sequence
  Description of Artificial Sequence: Synthetic oligonucleotide
ccagguuaaacugacccaa

SEQ ID NO: 1675656 - RNA, 19 nt, Artificial Sequence
  Description of Artificial Sequence: Synthetic oligonucleotide
acacacacacacacacaaa

SEQ ID NO: 1675657 - RNA, 19 nt, Artificial Sequence
  Description of Artificial Sequence: Synthetic oligonucleotide
gucaauauuugaaggccuu

SEQ ID NO: 1675658 - RNA, 19 nt, Artificial Sequence
  Description of Artificial Sequence: Synthetic oligonucleotide
cuauaucuugggguccaaa

SEQ ID NO: 1675659 - RNA, 19 nt, Artificial Sequence
  Description of Artificial Sequence: Synthetic oligonucleotide
ggcccuaaacuuccuguaa

SEQ ID NO: 1675660 - RNA, 19 nt, Artificial Sequence
  Description of Artificial Sequence: Synthetic oligonucleotide
gcucgggaagcaaacaucu

SEQ ID NO: 1675661 - RNA, 19 nt, Artificial Sequence
  Description of Artificial Sequence: Synthetic oligonucleotide
ccuuggaggaaugucaaua

SEQ ID NO: 1675662 - RNA, 19 nt, Artificial Sequence
  Description of Artificial Sequence: Synthetic oligonucleotide
gugacuggagcauccucau

SEQ ID NO: 1675663 - RNA, 19 nt, Artificial Sequence
  Description of Artificial Sequence: Synthetic oligonucleotide
cauugacagcaguuaaguu

SEQ ID NO: 1675664 - RNA, 19 nt, Artificial Sequence
  Description of Artificial Sequence: Synthetic oligonucleotide
cgcuuagcguuugaggaag

SEQ ID NO: 1675665 - RNA, 19 nt, Artificial Sequence
  Description of Artificial Sequence: Synthetic oligonucleotide
caaguugcacuacuuucuu

SEQ ID NO: 1675666 - RNA, 19 nt, Artificial Sequence
  Description of Artificial Sequence: Synthetic oligonucleotide
ccgucuuuccaagacagaa

SEQ ID NO: 1675667 - RNA, 19 nt, Artificial Sequence
  Description of Artificial Sequence: Synthetic oligonucleotide
cauuaucuucuugcuucaa

SEQ ID NO: 1675668 - RNA, 19 nt, Artificial Sequence
  Description of Artificial Sequence: Synthetic oligonucleotide
auccuacaagcaggaagua

SEQ ID NO: 1675669 - RNA, 19 nt, Artificial Sequence
  Description of Artificial Sequence: Synthetic oligonucleotide
gcacuacuuucuuauguau

SEQ ID NO: 1675670 - RNA, 19 nt, Artificial Sequence
  Description of Artificial Sequence: Synthetic oligonucleotide
cucggcaaacaucgacuua

SEQ ID NO: 1675671 - RNA, 19 nt, Artificial Sequence
  Description of Artificial Sequence: Synthetic oligonucleotide
gcccuuucagugacuggag

SEQ ID NO: 1675672 - RNA, 19 nt, Artificial Sequence
  Description of Artificial Sequence: Synthetic oligonucleotide
cuguaacuguuucauucuu

SEQ ID NO: 1675673 - RNA, 19 nt, Artificial Sequence
  Description of Artificial Sequence: Synthetic oligonucleotide
gccggcacaugacgccagg

SEQ ID NO: 1675674 - RNA, 19 nt, Artificial Sequence
  Description of Artificial Sequence: Synthetic oligonucleotide
ccacuaugcuugacuuaac

SEQ ID NO: 1675675 - RNA, 19 nt, Artificial Sequence
  Description of Artificial Sequence: Synthetic oligonucleotide
ucucacccaugugggugau

SEQ ID NO: 1675676 - RNA, 19 nt, Artificial Sequence
  Description of Artificial Sequence: Synthetic oligonucleotide
gccugacucuugagggccg

SEQ ID NO: 1675677 - RNA, 19 nt, Artificial Sequence
  Description of Artificial Sequence: Synthetic oligonucleotide
ccacacacacacacacaca

SEQ ID NO: 1675678 - RNA, 19 nt, Artificial Sequence
  Description of Artificial Sequence: Synthetic oligonucleotide
acaugacgccagggcuguc

SEQ ID NO: 1675679 - RNA, 19 nt, Artificial Sequence
  Description of Artificial Sequence: Synthetic oligonucleotide
ggccucaacuaagccuccc

SEQ ID NO: 1675680 - RNA, 19 nt, Artificial Sequence
  Description of Artificial Sequence: Synthetic oligonucleotide
cacaugacgccagggcugu

SEQ ID NO: 1675681 - RNA, 19 nt, Artificial Sequence
  Description of Artificial Sequence: Synthetic oligonucleotide
cugagccgaugagguguug

SEQ ID NO: 1675682 - RNA, 19 nt, Artificial Sequence
  Description of Artificial Sequence: Synthetic oligonucleotide
acgccagggcugucacuua

SEQ ID NO: 1675683 - RNA, 19 nt, Artificial Sequence
  Description of Artificial Sequence: Synthetic oligonucleotide
ggguccaaagguccaguuu

SEQ ID NO: 1675684 - RNA, 19 nt, Artificial Sequence
  Description of Artificial Sequence: Synthetic oligonucleotide
cgacuuacuaaucucuuuu

SEQ ID NO: 1675685 - RNA, 19 nt, Artificial Sequence
  Description of Artificial Sequence: Synthetic oligonucleotide
cagggcugucacuuagcau

SEQ ID NO: 1675686 - RNA, 19 nt, Artificial Sequence
  Description of Artificial Sequence: Synthetic oligonucleotide
gggcugucacuuagcauaa

SEQ ID NO: 1675687 - RNA, 19 nt, Artificial Sequence
  Description of Artificial Sequence: Synthetic oligonucleotide
cacagacuuccgacaugcu

SEQ ID NO: 1675688 - RNA, 19 nt, Artificial Sequence
  Description of Artificial Sequence: Synthetic oligonucleotide
gcuuagcguuugaggaaga

SEQ ID NO: 1675689 - RNA, 19 nt, Artificial Sequence
  Description of Artificial Sequence: Synthetic oligonucleotide
ggccggcacaugacgccag

SEQ ID NO: 1675690 - RNA, 19 nt, Artificial Sequence
  Description of Artificial Sequence: Synthetic oligonucleotide
gcuuguauugagagcgguu

SEQ ID NO: 1675691 - RNA, 19 nt, Artificial Sequence
  Description of Artificial Sequence: Synthetic oligonucleotide
ccucaaacuccuggccuca

SEQ ID NO: 1675692 - RNA, 19 nt, Artificial Sequence
  Description of Artificial Sequence: Synthetic oligonucleotide
gggccggcacaugacgcca

SEQ ID NO: 1675693 - RNA, 19 nt, Artificial Sequence
  Description of Artificial Sequence: Synthetic oligonucleotide
cccgucuuuccaagacaga

SEQ ID NO: 1675694 - RNA, 19 nt, Artificial Sequence
  Description of Artificial Sequence: Synthetic oligonucleotide
ccaagcaaccuuggaggaa

SEQ ID NO: 1675695 - RNA, 19 nt, Artificial Sequence
  Description of Artificial Sequence: Synthetic oligonucleotide
cgucuuuccaagacagaau

SEQ ID NO: 1675696 - RNA, 19 nt, Artificial Sequence
  Description of Artificial Sequence: Synthetic oligonucleotide
gcuugacuuaacaccgguu

SEQ ID NO: 1675697 - RNA, 19 nt, Artificial Sequence
  Description of Artificial Sequence: Synthetic oligonucleotide
gggguccaaagguccaguu

SEQ ID NO: 1675698 - RNA, 19 nt, Artificial Sequence
  Description of Artificial Sequence: Synthetic oligonucleotide
ccgacaugcucgggaagca

SEQ ID NO: 1675699 - RNA, 19 nt, Artificial Sequence
  Description of Artificial Sequence: Synthetic oligonucleotide
ggcugucacuuagcauaaa

SEQ ID NO: 1675700 - RNA, 19 nt, Artificial Sequence
  Description of Artificial Sequence: Synthetic oligonucleotide
ccugagccgaugagguguu

SEQ ID NO: 1675701 - RNA, 19 nt, Artificial Sequence
  Description of Artificial Sequence: Synthetic oligonucleotide
cggcaaacaucgacuuacu

SEQ ID NO: 1675702 - RNA, 19 nt, Artificial Sequence
  Description of Artificial Sequence: Synthetic oligonucleotide
cgacaugcucgggaagcaa

SEQ ID NO: 1675703 - RNA, 19 nt, Artificial Sequence
  Description of Artificial Sequence: Synthetic oligonucleotide
cgcuuguauugagagcggu

SEQ ID NO: 1675704 - RNA, 19 nt, Artificial Sequence
  Description of Artificial Sequence: Synthetic oligonucleotide
  modified_base (1)..(1): a, c, u, g, unknown or other
  modified_base (16)..(16): a, c, u, g, unknown or other
naaacaaacauauuunuuu

SEQ ID NO: 1675705 - RNA, 19 nt, Artificial Sequence
  Description of Artificial Sequence: Synthetic oligonucleotide
auuagguuaacugaggcgg

SEQ ID NO: 1675706 - RNA, 19 nt, Artificial Sequence
  Description of Artificial Sequence: Synthetic oligonucleotide
ugugacuccauacaccacg

SEQ ID NO: 1675707 - RNA, 19 nt, Artificial Sequence
  Description of Artificial Sequence: Synthetic oligonucleotide
caucaccugacucagaucg

SEQ ID NO: 1675708 - RNA, 19 nt, Artificial Sequence
  Description of Artificial Sequence: Synthetic oligonucleotide
ugauagggcuguaugacgg

SEQ ID NO: 1675709 - RNA, 19 nt, Artificial Sequence
  Description of Artificial Sequence: Synthetic oligonucleotide
uuuaccuggaccuuggccu

SEQ ID NO: 1675710 - RNA, 19 nt, Artificial Sequence
  Description of Artificial Sequence: Synthetic oligonucleotide
aaguagguggauuuucauc

SEQ ID NO: 1675711 - RNA, 19 nt, Artificial Sequence
  Description of Artificial Sequence: Synthetic oligonucleotide
agagcagaagcgcuucucc

SEQ ID NO: 1675712 - RNA, 19 nt, Artificial Sequence
  Description of Artificial Sequence: Synthetic oligonucleotide
auuacggucugcuucacca

SEQ ID NO: 1675713 - RNA, 19 nt, Artificial Sequence
  Description of Artificial Sequence: Synthetic oligonucleotide
gaagguaccggucuuuggc

SEQ ID NO: 1675714 - RNA, 19 nt, Artificial Sequence
  Description of Artificial Sequence: Synthetic oligonucleotide
cauuagguuaacugaggcg

SEQ ID NO: 1675715 - RNA, 19 nt, Artificial Sequence
  Description of Artificial Sequence: Synthetic oligonucleotide
uuuuaccuggaccuuggcc

SEQ ID NO: 1675716 - RNA, 19 nt, Artificial Sequence
  Description of Artificial Sequence: Synthetic oligonucleotide
aaucacgcuuccugaggcc

SEQ ID NO: 1675717 - RNA, 19 nt, Artificial Sequence
  Description of Artificial Sequence: Synthetic oligonucleotide
uauguagacgcacgaacug

SEQ ID NO: 1675718 - RNA, 19 nt, Artificial Sequence
  Description of Artificial Sequence: Synthetic oligonucleotide
auacccaggggugugaccc

SEQ ID NO: 1675719 - RNA, 19 nt, Artificial Sequence
  Description of Artificial Sequence: Synthetic oligonucleotide
gaugaaguugggcggaaag

SEQ ID NO: 1675720 - RNA, 19 nt, Artificial Sequence
  Description of Artificial Sequence: Synthetic oligonucleotide
agcagucgugcacagagac

SEQ ID NO: 1675721 - RNA, 19 nt, Artificial Sequence
  Description of Artificial Sequence: Synthetic oligonucleotide
ugagugagagaugagguug

SEQ ID NO: 1675722 - RNA, 19 nt, Artificial Sequence
  Description of Artificial Sequence: Synthetic oligonucleotide
aagaaguagguggauuuuc

SEQ ID NO: 1675723 - RNA, 19 nt, Artificial Sequence
  Description of Artificial Sequence: Synthetic oligonucleotide
ucgugcacagagacgaagg

SEQ ID NO: 1675724 - RNA, 19 nt, Artificial Sequence
  Description of Artificial Sequence: Synthetic oligonucleotide
uggagaacaucuccuguag

SEQ ID NO: 1675725 - RNA, 19 nt, Artificial Sequence
  Description of Artificial Sequence: Synthetic oligonucleotide
uguaggcuuuugaagacga

SEQ ID NO: 1675726 - RNA, 19 nt, Artificial Sequence
  Description of Artificial Sequence: Synthetic oligonucleotide
cacaucuuggggcaggucc

SEQ ID NO: 1675727 - RNA, 19 nt, Artificial Sequence
  Description of Artificial Sequence: Synthetic oligonucleotide
uguaugacggggauaccca

SEQ ID NO: 1675728 - RNA, 19 nt, Artificial Sequence
  Description of Artificial Sequence: Synthetic oligonucleotide
uuagccaggucuucuaaga

SEQ ID NO: 1675729 - RNA, 19 nt, Artificial Sequence
  Description of Artificial Sequence: Synthetic oligonucleotide
gaaucacgcuuccugaggc

SEQ ID NO: 1675730 - RNA, 19 nt, Artificial Sequence
  Description of Artificial Sequence: Synthetic oligonucleotide
agcgugugacuccauacac

SEQ ID NO: 1675731 - RNA, 19 nt, Artificial Sequence
  Description of Artificial Sequence: Synthetic oligonucleotide
uucaucaccugacucagau

SEQ ID NO: 1675732 - RNA, 19 nt, Artificial Sequence
  Description of Artificial Sequence: Synthetic oligonucleotide
ugaagaaguagguggauuu

SEQ ID NO: 1675733 - RNA, 19 nt, Artificial Sequence
  Description of Artificial Sequence: Synthetic oligonucleotide
ugacucagaucgaagguac

SEQ ID NO: 1675734 - RNA, 19 nt, Artificial Sequence
  Description of Artificial Sequence: Synthetic oligonucleotide
uugaagacgaggcgcacga

SEQ ID NO: 1675735 - RNA, 19 nt, Artificial Sequence
  Description of Artificial Sequence: Synthetic oligonucleotide
uccaacagggcccuugcca

SEQ ID NO: 1675736 - RNA, 19 nt, Artificial Sequence
  Description of Artificial Sequence: Synthetic oligonucleotide
ugugaggcuucccaaacaa

SEQ ID NO: 1675737 - RNA, 19 nt, Artificial Sequence
  Description of Artificial Sequence: Synthetic oligonucleotide
uggugaaccggcagguggg

SEQ ID NO: 1675738 - RNA, 19 nt, Artificial Sequence
  Description of Artificial Sequence: Synthetic oligonucleotide
uguagacgcacgaacugcu

SEQ ID NO: 1675739 - RNA, 19 nt, Artificial Sequence
  Description of Artificial Sequence: Synthetic oligonucleotide
gguaaugaagcccuucagc

SEQ ID NO: 1675740 - RNA, 19 nt, Artificial Sequence
  Description of Artificial Sequence: Synthetic oligonucleotide
agaucgaagguaccggucu

SEQ ID NO: 1675741 - RNA, 19 nt, Artificial Sequence
  Description of Artificial Sequence: Synthetic oligonucleotide
auacaccacggucauuacg

SEQ ID NO: 1675742 - RNA, 19 nt, Artificial Sequence
  Description of Artificial Sequence: Synthetic oligonucleotide
aguccaacagggcccuugc

SEQ ID NO: 1675743 - RNA, 19 nt, Artificial Sequence
  Description of Artificial Sequence: Synthetic oligonucleotide
caucaugugggcagagucc

SEQ ID NO: 1675744 - RNA, 19 nt, Artificial Sequence
  Description of Artificial Sequence: Synthetic oligonucleotide
gugauagggcuguaugacg

SEQ ID NO: 1675745 - RNA, 19 nt, Artificial Sequence
  Description of Artificial Sequence: Synthetic oligonucleotide
uuagguuaacugaggcggc

SEQ ID NO: 1675746 - RNA, 19 nt, Artificial Sequence
  Description of Artificial Sequence: Synthetic oligonucleotide
gcugaguucgcgcagacgc

SEQ ID NO: 1675747 - RNA, 19 nt, Artificial Sequence
  Description of Artificial Sequence: Synthetic oligonucleotide
acucagaucgaagguaccg

SEQ ID NO: 1675748 - RNA, 19 nt, Artificial Sequence
  Description of Artificial Sequence: Synthetic oligonucleotide
ucuagggacagcacgggau

SEQ ID NO: 1675749 - RNA, 19 nt, Artificial Sequence
  Description of Artificial Sequence: Synthetic oligonucleotide
gaaucucaggcgcaugcgc

SEQ ID NO: 1675750 - RNA, 19 nt, Artificial Sequence
  Description of Artificial Sequence: Synthetic oligonucleotide
ucccuguacacaucuuggg

SEQ ID NO: 1675751 - RNA, 19 nt, Artificial Sequence
  Description of Artificial Sequence: Synthetic oligonucleotide
uaaugcugcaagccauugc

SEQ ID NO: 1675752 - RNA, 19 nt, Artificial Sequence
  Description of Artificial Sequence: Synthetic oligonucleotide
uccagucgaggccucgugg

SEQ ID NO: 1675753 - RNA, 19 nt, Artificial Sequence
  Description of Artificial Sequence: Synthetic oligonucleotide
agacgcacgaacugcucac

SEQ ID NO: 1675754 - RNA, 19 nt, Artificial Sequence
  Description of Artificial Sequence: Synthetic oligonucleotide
cuuggccucacggugauag

SEQ ID NO: 1675755 - RNA, 19 nt, Artificial Sequence
  Description of Artificial Sequence: Synthetic oligonucleotide
cauugcaggagccauccug

SEQ ID NO: 1675756 - RNA, 19 nt, Artificial Sequence
  Description of Artificial Sequence: Synthetic oligonucleotide
uugcggguaaugaagcccu

SEQ ID NO: 1675757 - RNA, 19 nt, Artificial Sequence
  Description of Artificial Sequence: Synthetic oligonucleotide
gacuccauacaccacgguc

SEQ ID NO: 1675758 - RNA, 19 nt, Artificial Sequence
  Description of Artificial Sequence: Synthetic oligonucleotide
uagguggauuuucaucacc

SEQ ID NO: 1675759 - RNA, 19 nt, Artificial Sequence
  Description of Artificial Sequence: Synthetic oligonucleotide
uagacgcacgaacugcuca

SEQ ID NO: 1675760 - RNA, 19 nt, Artificial Sequence
  Description of Artificial Sequence: Synthetic oligonucleotide
agcguaaugcugcaagcca

SEQ ID NO: 1675761 - RNA, 19 nt, Artificial Sequence
  Description of Artificial Sequence: Synthetic oligonucleotide
uuuacacuaugcacagguc

SEQ ID NO: 1675762 - RNA, 19 nt, Artificial Sequence
  Description of Artificial Sequence: Synthetic oligonucleotide
cuguaugacggggauaccc

SEQ ID NO: 1675763 - RNA, 19 nt, Artificial Sequence
  Description of Artificial Sequence: Synthetic oligonucleotide
gaagcccuucagcacgugg

SEQ ID NO: 1675764 - RNA, 19 nt, Artificial Sequence
  Description of Artificial Sequence: Synthetic oligonucleotide
ucagaucgaagguaccggu

SEQ ID NO: 1675765 - RNA, 19 nt, Artificial Sequence
  Description of Artificial Sequence: Synthetic oligonucleotide
caccuugcggguaaugaag

SEQ ID NO: 1675766 - RNA, 19 nt, Artificial Sequence
  Description of Artificial Sequence: Synthetic oligonucleotide
uacggucugcuucaccacc

SEQ ID NO: 1675767 - RNA, 19 nt, Artificial Sequence
  Description of Artificial Sequence: Synthetic oligonucleotide
uugucugccgaguccaaga

SEQ ID NO: 1675768 - RNA, 19 nt, Artificial Sequence
  Description of Artificial Sequence: Synthetic oligonucleotide
cuugcggguaaugaagccc

SEQ ID NO: 1675769 - RNA, 19 nt, Artificial Sequence
  Description of Artificial Sequence: Synthetic oligonucleotide
aucaccgggaugucagcgg

SEQ ID NO: 1675770 - RNA, 19 nt, Artificial Sequence
  Description of Artificial Sequence: Synthetic oligonucleotide
acggugauagggcuguaug

SEQ ID NO: 1675771 - RNA, 19 nt, Artificial Sequence
  Description of Artificial Sequence: Synthetic oligonucleotide
guggauuuucaucaccuga

SEQ ID NO: 1675772 - RNA, 19 nt, Artificial Sequence
  Description of Artificial Sequence: Synthetic oligonucleotide
ugcgcagcgaaucacgcuu

SEQ ID NO: 1675773 - RNA, 19 nt, Artificial Sequence
  Description of Artificial Sequence: Synthetic oligonucleotide
caccucauucaucaccggg

SEQ ID NO: 1675774 - RNA, 19 nt, Artificial Sequence
  Description of Artificial Sequence: Synthetic oligonucleotide
cucagaucgaagguaccgg

SEQ ID NO: 1675775 - RNA, 19 nt, Artificial Sequence
  Description of Artificial Sequence: Synthetic oligonucleotide
ugaaccggcaggugggaga

SEQ ID NO: 1675776 - RNA, 19 nt, Artificial Sequence
  Description of Artificial Sequence: Synthetic oligonucleotide
aggcgcacgagguagugug

SEQ ID NO: 1675777 - RNA, 19 nt, Artificial Sequence
  Description of Artificial Sequence: Synthetic oligonucleotide
ucaccgggaugucagcggc

SEQ ID NO: 1675778 - RNA, 19 nt, Artificial Sequence
  Description of Artificial Sequence: Synthetic oligonucleotide
agacauaggcagccgcauc

SEQ ID NO: 1675779 - RNA, 19 nt, Artificial Sequence
  Description of Artificial Sequence: Synthetic oligonucleotide
agcgaaucacgcuuccuga

SEQ ID NO: 1675780 - RNA, 19 nt, Artificial Sequence
  Description of Artificial Sequence: Synthetic oligonucleotide
gacgaggcgcacgagguag

SEQ ID NO: 1675781 - RNA, 19 nt, Artificial Sequence
  Description of Artificial Sequence: Synthetic oligonucleotide
aagacgaggcgcacgaggu

SEQ ID NO: 1675782 - RNA, 19 nt, Artificial Sequence
  Description of Artificial Sequence: Synthetic oligonucleotide
gcauuagguuaacugaggc

SEQ ID NO: 1675783 - RNA, 19 nt, Artificial Sequence
  Description of Artificial Sequence: Synthetic oligonucleotide
accacggucauuacggucu

SEQ ID NO: 1675784 - RNA, 19 nt, Artificial Sequence
  Description of Artificial Sequence: Synthetic oligonucleotide
caugcgcagcgaaucacgc

SEQ ID NO: 1675785 - RNA, 19 nt, Artificial Sequence
  Description of Artificial Sequence: Synthetic oligonucleotide
agucgaggccucguggccc

SEQ ID NO: 1675786 - RNA, 19 nt, Artificial Sequence
  Description of Artificial Sequence: Synthetic oligonucleotide
aggucuucuaagaugggcu

SEQ ID NO: 1675787 - RNA, 19 nt, Artificial Sequence
  Description of Artificial Sequence: Synthetic oligonucleotide
gcuuuugaagacgaggcgc

SEQ ID NO: 1675788 - RNA, 19 nt, Artificial Sequence
  Description of Artificial Sequence: Synthetic oligonucleotide
cuaugcacaggucuaggga

SEQ ID NO: 1675789 - RNA, 19 nt, Artificial Sequence
  Description of Artificial Sequence: Synthetic oligonucleotide
uggaccuuggccucacggu

SEQ ID NO: 1675790 - RNA, 19 nt, Artificial Sequence
  Description of Artificial Sequence: Synthetic oligonucleotide
guaugacggggauacccag

SEQ ID NO: 1675791 - RNA, 19 nt, Artificial Sequence
  Description of Artificial Sequence: Synthetic oligonucleotide
gagguuggcgcucucgguc

SEQ ID NO: 1675792 - RNA, 19 nt, Artificial Sequence
  Description of Artificial Sequence: Synthetic oligonucleotide
cagcgaaucacgcuuccug

SEQ ID NO: 1675793 - RNA, 19 nt, Artificial Sequence
  Description of Artificial Sequence: Synthetic oligonucleotide
ucuaucugcaggcgcccac

SEQ ID NO: 1675794 - RNA, 19 nt, Artificial Sequence
  Description of Artificial Sequence: Synthetic oligonucleotide
cacgaacugcucacgacac

SEQ ID NO: 1675795 - RNA, 19 nt, Artificial Sequence
  Description of Artificial Sequence: Synthetic oligonucleotide
ggcuuuugaagacgaggcg

SEQ ID NO: 1675796 - RNA, 19 nt, Artificial Sequence
  Description of Artificial Sequence: Synthetic oligonucleotide
agguuaacugaggcggcac

SEQ ID NO: 1675797 - RNA, 19 nt, Artificial Sequence
  Description of Artificial Sequence: Synthetic oligonucleotide
uagggcuguaugacgggga

SEQ ID NO: 1675798 - RNA, 19 nt, Artificial Sequence
  Description of Artificial Sequence: Synthetic oligonucleotide
ggagaacaucuccuguagg

SEQ ID NO: 1675799 - RNA, 19 nt, Artificial Sequence
  Description of Artificial Sequence: Synthetic oligonucleotide
gauacccaggggugugacc

SEQ ID NO: 1675800 - RNA, 19 nt, Artificial Sequence
  Description of Artificial Sequence: Synthetic oligonucleotide
caccauagcgugugacucc

SEQ ID NO: 1675801 - RNA, 19 nt, Artificial Sequence
  Description of Artificial Sequence: Synthetic oligonucleotide
agguggauuuucaucaccu

SEQ ID NO: 1675802 - RNA, 19 nt, Artificial Sequence
  Description of Artificial Sequence: Synthetic oligonucleotide
cugcucacgacacaccuca

SEQ ID NO: 1675803 - RNA, 19 nt, Artificial Sequence
  Description of Artificial Sequence: Synthetic oligonucleotide
gggcuggcuauguagacgc

SEQ ID NO: 1675804 - RNA, 19 nt, Artificial Sequence
  Description of Artificial Sequence: Synthetic oligonucleotide
uaagaugggcuggcuaugu

SEQ ID NO: 1675805 - RNA, 19 nt, Artificial Sequence
  Description of Artificial Sequence: Synthetic oligonucleotide
uagugugaggcuucccaaa

SEQ ID NO: 1675806 - RNA, 19 nt, Artificial Sequence
  Description of Artificial Sequence: Synthetic oligonucleotide
cagucgugcacagagacga

SEQ ID NO: 1675807 - RNA, 19 nt, Artificial Sequence
  Description of Artificial Sequence: Synthetic oligonucleotide
gugacuccauacaccacgg

SEQ ID NO: 1675808 - RNA, 19 nt, Artificial Sequence
  Description of Artificial Sequence: Synthetic oligonucleotide
cagcguaaugcugcaagcc

SEQ ID NO: 1675809 - RNA, 19 nt, Artificial Sequence
  Description of Artificial Sequence: Synthetic oligonucleotide
cacgugggccaccuggagg

SEQ ID NO: 1675810 - RNA, 19 nt, Artificial Sequence
  Description of Artificial Sequence: Synthetic oligonucleotide
ugacggggauacccagggg

SEQ ID NO: 1675811 - RNA, 19 nt, Artificial Sequence
  Description of Artificial Sequence: Synthetic oligonucleotide
ucacgcuuccugaggccag

SEQ ID NO: 1675812 - RNA, 19 nt, Artificial Sequence
  Description of Artificial Sequence: Synthetic oligonucleotide
gggucaacugaagaaguag

SEQ ID NO: 1675813 - RNA, 19 nt, Artificial Sequence
  Description of Artificial Sequence: Synthetic oligonucleotide
ugucugccgaguccaagau

SEQ ID NO: 1675814 - RNA, 19 nt, Artificial Sequence
  Description of Artificial Sequence: Synthetic oligonucleotide
ggcuguaugacggggauac

SEQ ID NO: 1675815 - RNA, 19 nt, Artificial Sequence
  Description of Artificial Sequence: Synthetic oligonucleotide
uuacggucugcuucaccac

SEQ ID NO: 1675816 - RNA, 19 nt, Artificial Sequence
  Description of Artificial Sequence: Synthetic oligonucleotide
acacuaugcacaggucuag

SEQ ID NO: 1675817 - RNA, 19 nt, Artificial Sequence
  Description of Artificial Sequence: Synthetic oligonucleotide
cacgggaugggucaacuga

SEQ ID NO: 1675818 - RNA, 19 nt, Artificial Sequence
  Description of Artificial Sequence: Synthetic oligonucleotide
ucgaagguaccggucuuug

SEQ ID NO: 1675819 - RNA, 19 nt, Artificial Sequence
  Description of Artificial Sequence: Synthetic oligonucleotide
gacggggauacccaggggu

SEQ ID NO: 1675820 - RNA, 19 nt, Artificial Sequence
  Description of Artificial Sequence: Synthetic oligonucleotide
ggcauuagguuaacugagg

SEQ ID NO: 1675821 - RNA, 19 nt, Artificial Sequence
  Description of Artificial Sequence: Synthetic oligonucleotide
aaguugggcggaaagccau

SEQ ID NO: 1675822 - RNA, 19 nt, Artificial Sequence
  Description of Artificial Sequence: Synthetic oligonucleotide
guaccggucuuuggcaagg

SEQ ID NO: 1675823 - RNA, 19 nt, Artificial Sequence
  Description of Artificial Sequence: Synthetic oligonucleotide
gggcauuagguuaacugag

SEQ ID NO: 1675824 - RNA, 19 nt, Artificial Sequence
  Description of Artificial Sequence: Synthetic oligonucleotide
ucgggccaccucuaugcag

SEQ ID NO: 1675825 - RNA, 19 nt, Artificial Sequence
  Description of Artificial Sequence: Synthetic oligonucleotide
aacagggcccuugccaggu

SEQ ID NO: 1675826 - RNA, 19 nt, Artificial Sequence
  Description of Artificial Sequence: Synthetic oligonucleotide
gaaguugggcggaaagcca

SEQ ID NO: 1675827 - RNA, 19 nt, Artificial Sequence
  Description of Artificial Sequence: Synthetic oligonucleotide
uagguuaacugaggcggca

SEQ ID NO: 1675828 - RNA, 19 nt, Artificial Sequence
  Description of Artificial Sequence: Synthetic oligonucleotide
cuuuuaccuggaccuuggc

SEQ ID NO: 1675829 - RNA, 19 nt, Artificial Sequence
  Description of Artificial Sequence: Synthetic oligonucleotide
gacgcacgaacugcucacg

SEQ ID NO: 1675830 - RNA, 19 nt, Artificial Sequence
  Description of Artificial Sequence: Synthetic oligonucleotide
accuuuuaccuggaccuug

SEQ ID NO: 1675831 - RNA, 19 nt, Artificial Sequence
  Description of Artificial Sequence: Synthetic oligonucleotide
gcucgggccaccucuaugc

SEQ ID NO: 1675832 - RNA, 19 nt, Artificial Sequence
  Description of Artificial Sequence: Synthetic oligonucleotide
ccuuuuaccuggaccuugg

SEQ ID NO: 1675833 - RNA, 19 nt, Artificial Sequence
  Description of Artificial Sequence: Synthetic oligonucleotide
cccuguacacaucuugggg

SEQ ID NO: 1675834 - RNA, 19 nt, Artificial Sequence
  Description of Artificial Sequence: Synthetic oligonucleotide
cugcaggcgcccaccauag

SEQ ID NO: 1675835 - RNA, 19 nt, Artificial Sequence
  Description of Artificial Sequence: Synthetic oligonucleotide
cagaucgaagguaccgguc

SEQ ID NO: 1675836 - RNA, 19 nt, Artificial Sequence
  Description of Artificial Sequence: Synthetic oligonucleotide
uugggcggaaagccauucu

SEQ ID NO: 1675837 - RNA, 19 nt, Artificial Sequence
  Description of Artificial Sequence: Synthetic oligonucleotide
ugcucgggccaccucuaug

SEQ ID NO: 1675838 - RNA, 19 nt, Artificial Sequence
  Description of Artificial Sequence: Synthetic oligonucleotide
ggguaaugaagcccuucag

SEQ ID NO: 1675839 - RNA, 19 nt, Artificial Sequence
  Description of Artificial Sequence: Synthetic oligonucleotide
agguuggcgcucucgguca

SEQ ID NO: 1675840 - RNA, 19 nt, Artificial Sequence
  Description of Artificial Sequence: Synthetic oligonucleotide
gguuaacugaggcggcacc

SEQ ID NO: 1675841 - RNA, 19 nt, Artificial Sequence
  Description of Artificial Sequence: Synthetic oligonucleotide
ugcugaguucgcgcagacg

SEQ ID NO: 1675842 - RNA, 19 nt, Artificial Sequence
  Description of Artificial Sequence: Synthetic oligonucleotide
gcggcguguguccagaagc

SEQ ID NO: 1675843 - RNA, 19 nt, Artificial Sequence
  Description of Artificial Sequence: Synthetic oligonucleotide
ggaccuuggccucacggug

SEQ ID NO: 1675844 - RNA, 19 nt, Artificial Sequence
  Description of Artificial Sequence: Synthetic oligonucleotide
cucuaugcagcaggccagg

SEQ ID NO: 1675845 - RNA, 19 nt, Artificial Sequence
  Description of Artificial Sequence: Synthetic oligonucleotide
gucgugcacagagacgaag

SEQ ID NO: 1675846 - RNA, 19 nt, Artificial Sequence
  Description of Artificial Sequence: Synthetic oligonucleotide
aagaugggcuggcuaugua

SEQ ID NO: 1675847 - RNA, 19 nt, Artificial Sequence
  Description of Artificial Sequence: Synthetic oligonucleotide
uuccggcccgucauggggu

SEQ ID NO: 1675848 - RNA, 19 nt, Artificial Sequence
  Description of Artificial Sequence: Synthetic oligonucleotide
ccaacagggcccuugccag

SEQ ID NO: 1675849 - RNA, 19 nt, Artificial Sequence
  Description of Artificial Sequence: Synthetic oligonucleotide
gaaccggcaggugggagac

SEQ ID NO: 1675850 - RNA, 19 nt, Artificial Sequence
  Description of Artificial Sequence: Synthetic oligonucleotide
aucacgcuuccugaggcca

SEQ ID NO: 1675851 - RNA, 19 nt, Artificial Sequence
  Description of Artificial Sequence: Synthetic oligonucleotide
ugggguugucugccgaguc

SEQ ID NO: 1675852 - RNA, 19 nt, Artificial Sequence
  Description of Artificial Sequence: Synthetic oligonucleotide
agguccgagggcauuaggu

SEQ ID NO: 1675853 - RNA, 19 nt, Artificial Sequence
  Description of Artificial Sequence: Synthetic oligonucleotide
gacucagaucgaagguacc

SEQ ID NO: 1675854 - RNA, 19 nt, Artificial Sequence
  Description of Artificial Sequence: Synthetic oligonucleotide
accauagcgugugacucca

SEQ ID NO: 1675855 - RNA, 19 nt, Artificial Sequence
  Description of Artificial Sequence: Synthetic oligonucleotide
ugccgaguccaagaucucu

SEQ ID NO: 1675856 - RNA, 19 nt, Artificial Sequence
  Description of Artificial Sequence: Synthetic oligonucleotide
cucggucagccagugcugg

SEQ ID NO: 1675857 - RNA, 19 nt, Artificial Sequence
  Description of Artificial Sequence: Synthetic oligonucleotide
cacaggucuagggacagca

SEQ ID NO: 1675858 - RNA, 19 nt, Artificial Sequence
  Description of Artificial Sequence: Synthetic oligonucleotide
guugucugccgaguccaag

SEQ ID NO: 1675859 - RNA, 19 nt, Artificial Sequence
  Description of Artificial Sequence: Synthetic oligonucleotide
acaggucuagggacagcac

SEQ ID NO: 1675860 - RNA, 19 nt, Artificial Sequence
  Description of Artificial Sequence: Synthetic oligonucleotide
gcagcguaaugcugcaagc

SEQ ID NO: 1675861 - RNA, 19 nt, Artificial Sequence
  Description of Artificial Sequence: Synthetic oligonucleotide
gcacgagguagugugaggc

SEQ ID NO: 1675862 - RNA, 19 nt, Artificial Sequence
  Description of Artificial Sequence: Synthetic oligonucleotide
gcacgaacugcucacgaca

SEQ ID NO: 1675863 - RNA, 19 nt, Artificial Sequence
  Description of Artificial Sequence: Synthetic oligonucleotide
auccagucgaggccucgug

SEQ ID NO: 1675864 - RNA, 19 nt, Artificial Sequence
  Description of Artificial Sequence: Synthetic oligonucleotide
acgacacaccucauucauc

SEQ ID NO: 1675865 - RNA, 19 nt, Artificial Sequence
  Description of Artificial Sequence: Synthetic oligonucleotide
uggggaccggacugcucgg

SEQ ID NO: 1675866 - RNA, 19 nt, Artificial Sequence
  Description of Artificial Sequence: Synthetic oligonucleotide
gguaccggucuuuggcaag

SEQ ID NO: 1675867 - RNA, 19 nt, Artificial Sequence
  Description of Artificial Sequence: Synthetic oligonucleotide
aguucgcgcagacgcuucu

SEQ ID NO: 1675868 - RNA, 19 nt, Artificial Sequence
  Description of Artificial Sequence: Synthetic oligonucleotide
guaggcuuuugaagacgag

SEQ ID NO: 1675869 - RNA, 19 nt, Artificial Sequence
  Description of Artificial Sequence: Synthetic oligonucleotide
gggagacauaggcagccgc

SEQ ID NO: 1675870 - RNA, 19 nt, Artificial Sequence
  Description of Artificial Sequence: Synthetic oligonucleotide
augcgcagcgaaucacgcu

SEQ ID NO: 1675871 - RNA, 19 nt, Artificial Sequence
  Description of Artificial Sequence: Synthetic oligonucleotide
cacuuccggcccgucaugg

SEQ ID NO: 1675872 - RNA, 19 nt, Artificial Sequence
  Description of Artificial Sequence: Synthetic oligonucleotide
cagucgaggccucguggcc

SEQ ID NO: 1675873 - RNA, 19 nt, Artificial Sequence
  Description of Artificial Sequence: Synthetic oligonucleotide
gcgaaucacgcuuccugag

SEQ ID NO: 1675874 - RNA, 19 nt, Artificial Sequence
  Description of Artificial Sequence: Synthetic oligonucleotide
uucagaguguugggcuucu

SEQ ID NO: 1675875 - RNA, 19 nt, Artificial Sequence
  Description of Artificial Sequence: Synthetic oligonucleotide
caccacggucauuacgguc

SEQ ID NO: 1675876 - RNA, 19 nt, Artificial Sequence
  Description of Artificial Sequence: Synthetic oligonucleotide
ugaguucgcgcagacgcuu

SEQ ID NO: 1675877 - RNA, 19 nt, Artificial Sequence
  Description of Artificial Sequence: Synthetic oligonucleotide
gcaugcgcagcgaaucacg

SEQ ID NO: 1675878 - RNA, 19 nt, Artificial Sequence
  Description of Artificial Sequence: Synthetic oligonucleotide
cggucuuuggcaaggacug

SEQ ID NO: 1675879 - RNA, 19 nt, Artificial Sequence
  Description of Artificial Sequence: Synthetic oligonucleotide
ccucuaugcagcaggccag

SEQ ID NO: 1675880 - RNA, 19 nt, Artificial Sequence
  Description of Artificial Sequence: Synthetic oligonucleotide
gggaugggucaacugaaga

SEQ ID NO: 1675881 - RNA, 19 nt, Artificial Sequence
  Description of Artificial Sequence: Synthetic oligonucleotide
cuugauccagucgaggccu

SEQ ID NO: 1675882 - RNA, 19 nt, Artificial Sequence
  Description of Artificial Sequence: Synthetic oligonucleotide
ccucccuguacacaucuug

SEQ ID NO: 1675883 - RNA, 19 nt, Artificial Sequence
  Description of Artificial Sequence: Synthetic oligonucleotide
caucuggggaccggacugc

SEQ ID NO: 1675884 - RNA, 19 nt, Artificial Sequence
  Description of Artificial Sequence: Synthetic oligonucleotide
guugcugaguucgcgcaga

SEQ ID NO: 1675885 - RNA, 19 nt, Artificial Sequence
  Description of Artificial Sequence: Synthetic oligonucleotide
cgaaucacgcuuccugagg

SEQ ID NO: 1675886 - RNA, 19 nt, Artificial Sequence
  Description of Artificial Sequence: Synthetic oligonucleotide
aagcagucgugcacagaga

SEQ ID NO: 1675887 - RNA, 19 nt, Artificial Sequence
  Description of Artificial Sequence: Synthetic oligonucleotide
ugcgaaucucaggcgcaug

SEQ ID NO: 1675888 - RNA, 19 nt, Artificial Sequence
  Description of Artificial Sequence: Synthetic oligonucleotide
caccgggaugucagcggcg

SEQ ID NO: 1675889 - RNA, 19 nt, Artificial Sequence
  Description of Artificial Sequence: Synthetic oligonucleotide
cugacucagaucgaaggua

SEQ ID NO: 1675890 - RNA, 19 nt, Artificial Sequence
  Description of Artificial Sequence: Synthetic oligonucleotide
acgagguagugugaggcuu

SEQ ID NO: 1675891 - RNA, 19 nt, Artificial Sequence
  Description of Artificial Sequence: Synthetic oligonucleotide
caggggugugacccacucc

SEQ ID NO: 1675892 - RNA, 19 nt, Artificial Sequence
  Description of Artificial Sequence: Synthetic oligonucleotide
cauagcgugugacuccaua

SEQ ID NO: 1675893 - RNA, 19 nt, Artificial Sequence
  Description of Artificial Sequence: Synthetic oligonucleotide
gaacuuagccaggucuucu

SEQ ID NO: 1675894 - RNA, 19 nt, Artificial Sequence
  Description of Artificial Sequence: Synthetic oligonucleotide
uugauccagucgaggccuc

SEQ ID NO: 1675895 - RNA, 19 nt, Artificial Sequence
  Description of Artificial Sequence: Synthetic oligonucleotide
gagacgaaggucaggcccu

SEQ ID NO: 1675896 - RNA, 19 nt, Artificial Sequence
  Description of Artificial Sequence: Synthetic oligonucleotide
guuugguggccagggcaag

SEQ ID NO: 1675897 - RNA, 19 nt, Artificial Sequence
  Description of Artificial Sequence: Synthetic oligonucleotide
gaccuuggccucacgguga

SEQ ID NO: 1675898 - RNA, 19 nt, Artificial Sequence
  Description of Artificial Sequence: Synthetic oligonucleotide
guggaugaaguugggcgga

SEQ ID NO: 1675899 - RNA, 19 nt, Artificial Sequence
  Description of Artificial Sequence: Synthetic oligonucleotide
guuaacugaggcggcaccu

SEQ ID NO: 1675900 - RNA, 19 nt, Artificial Sequence
  Description of Artificial Sequence: Synthetic oligonucleotide
aggcagccgcaucugggga

SEQ ID NO: 1675901 - RNA, 19 nt, Artificial Sequence
  Description of Artificial Sequence: Synthetic oligonucleotide
guugggcggaaagccauuc

SEQ ID NO: 1675902 - RNA, 19 nt, Artificial Sequence
  Description of Artificial Sequence: Synthetic oligonucleotide
ggaccggacugcucgggcc

SEQ ID NO: 1675903 - RNA, 19 nt, Artificial Sequence
  Description of Artificial Sequence: Synthetic oligonucleotide
gucugccgaguccaagauc

SEQ ID NO: 1675904 - RNA, 19 nt, Artificial Sequence
  Description of Artificial Sequence: Synthetic oligonucleotide
acccaggggugugacccac

SEQ ID NO: 1675905 - RNA, 19 nt, Artificial Sequence
  Description of Artificial Sequence: Synthetic oligonucleotide
acgggaugggucaacugaa

SEQ ID NO: 1675906 - RNA, 19 nt, Artificial Sequence
  Description of Artificial Sequence: Synthetic oligonucleotide
accggcaggugggagacau

SEQ ID NO: 1675907 - RNA, 19 nt, Artificial Sequence
  Description of Artificial Sequence: Synthetic oligonucleotide
cguguguccagaagcaguc

SEQ ID NO: 1675908 - RNA, 19 nt, Artificial Sequence
  Description of Artificial Sequence: Synthetic oligonucleotide
gucugccagggcucaucag

SEQ ID NO: 1675909 - RNA, 19 nt, Artificial Sequence
  Description of Artificial Sequence: Synthetic oligonucleotide
uacccaggggugugaccca

SEQ ID NO: 1675910 - RNA, 19 nt, Artificial Sequence
  Description of Artificial Sequence: Synthetic oligonucleotide
ugcaggcgcccaccauagc

SEQ ID NO: 1675911 - RNA, 19 nt, Artificial Sequence
  Description of Artificial Sequence: Synthetic oligonucleotide
ggauuuucaucaccugacu

SEQ ID NO: 1675912 - RNA, 19 nt, Artificial Sequence
  Description of Artificial Sequence: Synthetic oligonucleotide
caccucuaugcagcaggcc

SEQ ID NO: 1675913 - RNA, 19 nt, Artificial Sequence
  Description of Artificial Sequence: Synthetic oligonucleotide
ccggcccucggcaaagucc

SEQ ID NO: 1675914 - RNA, 19 nt, Artificial Sequence
  Description of Artificial Sequence: Synthetic oligonucleotide
agggcccuugccaggucac

SEQ ID NO: 1675915 - RNA, 19 nt, Artificial Sequence
  Description of Artificial Sequence: Synthetic oligonucleotide
cgaacugcucacgacacac

SEQ ID NO: 1675916 - RNA, 19 nt, Artificial Sequence
  Description of Artificial Sequence: Synthetic oligonucleotide
ggcuucugggagcuggaga

SEQ ID NO: 1675917 - RNA, 19 nt, Artificial Sequence
  Description of Artificial Sequence: Synthetic oligonucleotide
gugaaccggcaggugggag

SEQ ID NO: 1675918 - RNA, 19 nt, Artificial Sequence
  Description of Artificial Sequence: Synthetic oligonucleotide
guagacgcacgaacugcuc

SEQ ID NO: 1675919 - RNA, 19 nt, Artificial Sequence
  Description of Artificial Sequence: Synthetic oligonucleotide
gcgugugacuccauacacc

SEQ ID NO: 1675920 - RNA, 19 nt, Artificial Sequence
  Description of Artificial Sequence: Synthetic oligonucleotide
caugaccucaucugcgaau

SEQ ID NO: 1675921 - RNA, 19 nt, Artificial Sequence
  Description of Artificial Sequence: Synthetic oligonucleotide
cacgacacaccucauucau

SEQ ID NO: 1675922 - RNA, 19 nt, Artificial Sequence
  Description of Artificial Sequence: Synthetic oligonucleotide
agacgaggcgcacgaggua

SEQ ID NO: 1675923 - RNA, 19 nt, Artificial Sequence
  Description of Artificial Sequence: Synthetic oligonucleotide
gccgagcgcagcguaaugc

SEQ ID NO: 1675924 - RNA, 19 nt, Artificial Sequence
  Description of Artificial Sequence: Synthetic oligonucleotide
gaguucgcgcagacgcuuc

SEQ ID NO: 1675925 - RNA, 19 nt, Artificial Sequence
  Description of Artificial Sequence: Synthetic oligonucleotide
ccgucaugggguugucugc

SEQ ID NO: 1675926 - RNA, 19 nt, Artificial Sequence
  Description of Artificial Sequence: Synthetic oligonucleotide
cugagugagagaugagguu

SEQ ID NO: 1675927 - RNA, 19 nt, Artificial Sequence
  Description of Artificial Sequence: Synthetic oligonucleotide
uaccggucuuuggcaagga

SEQ ID NO: 1675928 - RNA, 19 nt, Artificial Sequence
  Description of Artificial Sequence: Synthetic oligonucleotide
uggccggcccucggcaaag

SEQ ID NO: 1675929 - RNA, 19 nt, Artificial Sequence
  Description of Artificial Sequence: Synthetic oligonucleotide
gcugucgcggccgagcgca

SEQ ID NO: 1675930 - RNA, 19 nt, Artificial Sequence
  Description of Artificial Sequence: Synthetic oligonucleotide
cucacggugauagggcugu

SEQ ID NO: 1675931 - RNA, 19 nt, Artificial Sequence
  Description of Artificial Sequence: Synthetic oligonucleotide
aucuggggaccggacugcu

SEQ ID NO: 1675932 - RNA, 19 nt, Artificial Sequence
  Description of Artificial Sequence: Synthetic oligonucleotide
gggaccggacugcucgggc

SEQ ID NO: 1675933 - RNA, 19 nt, Artificial Sequence
  Description of Artificial Sequence: Synthetic oligonucleotide
ugucgcggccgagcgcagc

SEQ ID NO: 1675934 - RNA, 19 nt, Artificial Sequence
  Description of Artificial Sequence: Synthetic oligonucleotide
gcuggagaacaucuccugu

SEQ ID NO: 1675935 - RNA, 19 nt, Artificial Sequence
  Description of Artificial Sequence: Synthetic oligonucleotide
gcgcugucgcggccgagcg

SEQ ID NO: 1675936 - RNA, 19 nt, Artificial Sequence
  Description of Artificial Sequence: Synthetic oligonucleotide
ccgaguccaagaucucuuc

SEQ ID NO: 1675937 - RNA, 19 nt, Artificial Sequence
  Description of Artificial Sequence: Synthetic oligonucleotide
agggcucaucagcuuccau

SEQ ID NO: 1675938 - RNA, 19 nt, Artificial Sequence
  Description of Artificial Sequence: Synthetic oligonucleotide
gguuggcgcucucggucag

SEQ ID NO: 1675939 - RNA, 19 nt, Artificial Sequence
  Description of Artificial Sequence: Synthetic oligonucleotide
cgaaucucaggcgcaugcg

SEQ ID NO: 1675940 - RNA, 19 nt, Artificial Sequence
  Description of Artificial Sequence: Synthetic oligonucleotide
gggaugucagcggcgugug

SEQ ID NO: 1675941 - RNA, 19 nt, Artificial Sequence
  Description of Artificial Sequence: Synthetic oligonucleotide
gcaccugcgcugucgcggc

SEQ ID NO: 1675942 - RNA, 19 nt, Artificial Sequence
  Description of Artificial Sequence: Synthetic oligonucleotide
gcgcacgagguagugugag

SEQ ID NO: 1675943 - RNA, 19 nt, Artificial Sequence
  Description of Artificial Sequence: Synthetic oligonucleotide
cugccgaguccaagaucuc

SEQ ID NO: 1675944 - RNA, 19 nt, Artificial Sequence
  Description of Artificial Sequence: Synthetic oligonucleotide
ccucacggugauagggcug

SEQ ID NO: 1675945 - RNA, 19 nt, Artificial Sequence
  Description of Artificial Sequence: Synthetic oligonucleotide
gcacgggaugggucaacug

SEQ ID NO: 1675946 - RNA, 19 nt, Artificial Sequence
  Description of Artificial Sequence: Synthetic oligonucleotide
agccgcaucuggggaccgg

SEQ ID NO: 1675947 - RNA, 19 nt, Artificial Sequence
  Description of Artificial Sequence: Synthetic oligonucleotide
cuucugggagcuggagaca

SEQ ID NO: 1675948 - RNA, 19 nt, Artificial Sequence
  Description of Artificial Sequence: Synthetic oligonucleotide
cacgagguagugugaggcu

SEQ ID NO: 1675949 - RNA, 19 nt, Artificial Sequence
  Description of Artificial Sequence: Synthetic oligonucleotide
gcacgugggccaccuggag

SEQ ID NO: 1675950 - RNA, 19 nt, Artificial Sequence
  Description of Artificial Sequence: Synthetic oligonucleotide
cccucggcaaaguccaaca

SEQ ID NO: 1675951 - RNA, 19 nt, Artificial Sequence
  Description of Artificial Sequence: Synthetic oligonucleotide
ggauacccaggggugugac

SEQ ID NO: 1675952 - RNA, 19 nt, Artificial Sequence
  Description of Artificial Sequence: Synthetic oligonucleotide
cugaguucgcgcagacgcu

SEQ ID NO: 1675953 - RNA, 19 nt, Artificial Sequence
  Description of Artificial Sequence: Synthetic oligonucleotide
cucgggccaccucuaugca

SEQ ID NO: 1675954 - RNA, 19 nt, Artificial Sequence
  Description of Artificial Sequence: Synthetic oligonucleotide
gauccagucgaggccucgu

SEQ ID NO: 1675955 - RNA, 19 nt, Artificial Sequence
  Description of Artificial Sequence: Synthetic oligonucleotide
gcagccgcaucuggggacc

SEQ ID NO: 1675956 - RNA, 19 nt, Artificial Sequence
  Description of Artificial Sequence: Synthetic oligonucleotide
ggcuauguagacgcacgaa

SEQ ID NO: 1675957 - RNA, 19 nt, Artificial Sequence
  Description of Artificial Sequence: Synthetic oligonucleotide
gguccgagggcauuagguu

SEQ ID NO: 1675958 - RNA, 19 nt, Artificial Sequence
  Description of Artificial Sequence: Synthetic oligonucleotide
acagcacgggaugggucaa

SEQ ID NO: 1675959 - RNA, 19 nt, Artificial Sequence
  Description of Artificial Sequence: Synthetic oligonucleotide
caguggccggcccucggca

SEQ ID NO: 1675960 - RNA, 19 nt, Artificial Sequence
  Description of Artificial Sequence: Synthetic oligonucleotide
cggguaaugaagcccuuca

SEQ ID NO: 1675961 - RNA, 19 nt, Artificial Sequence
  Description of Artificial Sequence: Synthetic oligonucleotide
guucgcgcagacgcuucuc

SEQ ID NO: 1675962 - RNA, 19 nt, Artificial Sequence
  Description of Artificial Sequence: Synthetic oligonucleotide
aguugggcggaaagccauu

SEQ ID NO: 1675963 - RNA, 19 nt, Artificial Sequence
  Description of Artificial Sequence: Synthetic oligonucleotide
ccaggggugugacccacuc

SEQ ID NO: 1675964 - RNA, 19 nt, Artificial Sequence
  Description of Artificial Sequence: Synthetic oligonucleotide
cgcacgaacugcucacgac

SEQ ID NO: 1675965 - RNA, 19 nt, Artificial Sequence
  Description of Artificial Sequence: Synthetic oligonucleotide
ccaccuugcggguaaugaa

SEQ ID NO: 1675966 - RNA, 19 nt, Artificial Sequence
  Description of Artificial Sequence: Synthetic oligonucleotide
aaaguccaacagggcccuu

SEQ ID NO: 1675967 - RNA, 19 nt, Artificial Sequence
  Description of Artificial Sequence: Synthetic oligonucleotide
acgaggcgcacgagguagu

SEQ ID NO: 1675968 - RNA, 19 nt, Artificial Sequence
  Description of Artificial Sequence: Synthetic oligonucleotide
aaccggcaggugggagaca

SEQ ID NO: 1675969 - RNA, 19 nt, Artificial Sequence
  Description of Artificial Sequence: Synthetic oligonucleotide
ggccgagcgcagcguaaug

SEQ ID NO: 1675970 - RNA, 19 nt, Artificial Sequence
  Description of Artificial Sequence: Synthetic oligonucleotide
agucgugcacagagacgaa

SEQ ID NO: 1675971 - RNA, 19 nt, Artificial Sequence
  Description of Artificial Sequence: Synthetic oligonucleotide
agacgaaggucaggcccuu

SEQ ID NO: 1675972 - RNA, 19 nt, Artificial Sequence
  Description of Artificial Sequence: Synthetic oligonucleotide
cugucgcggccgagcgcag

SEQ ID NO: 1675973 - RNA, 19 nt, Artificial Sequence
  Description of Artificial Sequence: Synthetic oligonucleotide
gcuguaugacggggauacc

SEQ ID NO: 1675974 - RNA, 19 nt, Artificial Sequence
  Description of Artificial Sequence: Synthetic oligonucleotide
cagccgcaucuggggaccg

SEQ ID NO: 1675975 - RNA, 19 nt, Artificial Sequence
  Description of Artificial Sequence: Synthetic oligonucleotide
gcgcaugcgcagcgaauca

SEQ ID NO: 1675976 - RNA, 19 nt, Artificial Sequence
  Description of Artificial Sequence: Synthetic oligonucleotide
gcggguaaugaagcccuuc

SEQ ID NO: 1675977 - RNA, 19 nt, Artificial Sequence
  Description of Artificial Sequence: Synthetic oligonucleotide
gaggcgcacgagguagugu

SEQ ID NO: 1675978 - RNA, 19 nt, Artificial Sequence
  Description of Artificial Sequence: Synthetic oligonucleotide
cagcacgggaugggucaac

SEQ ID NO: 1675979 - RNA, 19 nt, Artificial Sequence
  Description of Artificial Sequence: Synthetic oligonucleotide
ggugaaccggcagguggga

SEQ ID NO: 1675980 - RNA, 19 nt, Artificial Sequence
  Description of Artificial Sequence: Synthetic oligonucleotide
gccucacggugauagggcu

SEQ ID NO: 1675981 - RNA, 19 nt, Artificial Sequence
  Description of Artificial Sequence: Synthetic oligonucleotide
aggcgcaugcgcagcgaau

SEQ ID NO: 1675982 - RNA, 19 nt, Artificial Sequence
  Description of Artificial Sequence: Synthetic oligonucleotide
ggaugaaguugggcggaaa

SEQ ID NO: 1675983 - RNA, 19 nt, Artificial Sequence
  Description of Artificial Sequence: Synthetic oligonucleotide
cgcagcgaaucacgcuucc

SEQ ID NO: 1675984 - RNA, 19 nt, Artificial Sequence
  Description of Artificial Sequence: Synthetic oligonucleotide
gcccucggcaaaguccaac

SEQ ID NO: 1675985 - RNA, 19 nt, Artificial Sequence
  Description of Artificial Sequence: Synthetic oligonucleotide
cccaccauagcgugugacu

SEQ ID NO: 1675986 - RNA, 19 nt, Artificial Sequence
  Description of Artificial Sequence: Synthetic oligonucleotide
gcguguguccagaagcagu

SEQ ID NO: 1675987 - RNA, 19 nt, Artificial Sequence
  Description of Artificial Sequence: Synthetic oligonucleotide
gcccaccauagcgugugac

SEQ ID NO: 1675988 - RNA, 19 nt, Artificial Sequence
  Description of Artificial Sequence: Synthetic oligonucleotide
aggcggcaccugcgcuguc

SEQ ID NO: 1675989 - RNA, 19 nt, Artificial Sequence
  Description of Artificial Sequence: Synthetic oligonucleotide
gcguaaugcugcaagccau

SEQ ID NO: 1675990 - RNA, 19 nt, Artificial Sequence
  Description of Artificial Sequence: Synthetic oligonucleotide
gggauacccagggguguga

SEQ ID NO: 1675991 - RNA, 19 nt, Artificial Sequence
  Description of Artificial Sequence: Synthetic oligonucleotide
cccaguggccggcccucgg

SEQ ID NO: 1675992 - RNA, 19 nt, Artificial Sequence
  Description of Artificial Sequence: Synthetic oligonucleotide
ccaugaccucaucugcgaa

SEQ ID NO: 1675993 - RNA, 19 nt, Artificial Sequence
  Description of Artificial Sequence: Synthetic oligonucleotide
ggcagguccgagggcauua

SEQ ID NO: 1675994 - RNA, 19 nt, Artificial Sequence
  Description of Artificial Sequence: Synthetic oligonucleotide
ccgcaucuggggaccggac

SEQ ID NO: 1675995 - RNA, 19 nt, Artificial Sequence
  Description of Artificial Sequence: Synthetic oligonucleotide
gcucacgacacaccucauu

SEQ ID NO: 1675996 - RNA, 19 nt, Artificial Sequence
  Description of Artificial Sequence: Synthetic oligonucleotide
gccgcaucuggggaccgga

SEQ ID NO: 1675997 - RNA, 19 nt, Artificial Sequence
  Description of Artificial Sequence: Synthetic oligonucleotide
cgcaugcgcagcgaaucac

SEQ ID NO: 1675998 - RNA, 19 nt, Artificial Sequence
  Description of Artificial Sequence: Synthetic oligonucleotide
cggcguguguccagaagca

SEQ ID NO: 1675999 - RNA, 19 nt, Artificial Sequence
  Description of Artificial Sequence: Synthetic oligonucleotide
ccauccuuggcgucccgcu

SEQ ID NO: 1676000 - RNA, 19 nt, Artificial Sequence
  Description of Artificial Sequence: Synthetic oligonucleotide
gccggcccucggcaaaguc

SEQ ID NO: 1676001 - RNA, 19 nt, Artificial Sequence
  Description of Artificial Sequence: Synthetic oligonucleotide
gcgcagcgaaucacgcuuc

SEQ ID NO: 1676002 - RNA, 19 nt, Artificial Sequence
  Description of Artificial Sequence: Synthetic oligonucleotide
gguugucugccgaguccaa

SEQ ID NO: 1676003 - RNA, 19 nt, Artificial Sequence
  Description of Artificial Sequence: Synthetic oligonucleotide
cagcggcguguguccagaa

SEQ ID NO: 1676004 - RNA, 19 nt, Artificial Sequence
  Description of Artificial Sequence: Synthetic oligonucleotide
gccgaguccaagaucucuu

SEQ ID NO: 1676005 - RNA, 19 nt, Artificial Sequence
  Description of Artificial Sequence: Synthetic oligonucleotide
ggaugucagcggcgugugu

SEQ ID NO: 1676006 - RNA, 19 nt, Artificial Sequence
  Description of Artificial Sequence: Synthetic oligonucleotide
gcagcgaaucacgcuuccu

SEQ ID NO: 1676007 - RNA, 19 nt, Artificial Sequence
  Description of Artificial Sequence: Synthetic oligonucleotide
caccuuuuaccuggaccuu

SEQ ID NO: 1676008 - RNA, 19 nt, Artificial Sequence
  Description of Artificial Sequence: Synthetic oligonucleotide
ccgggaugucagcggcgug

SEQ ID NO: 1676009 - RNA, 19 nt, Artificial Sequence
  Description of Artificial Sequence: Synthetic oligonucleotide
ccgagggcauuagguuaac

SEQ ID NO: 1676010 - RNA, 19 nt, Artificial Sequence
  Description of Artificial Sequence: Synthetic oligonucleotide
cgaggcgcacgagguagug

SEQ ID NO: 1676011 - RNA, 19 nt, Artificial Sequence
  Description of Artificial Sequence: Synthetic oligonucleotide
gggcuguaugacggggaua

SEQ ID NO: 1676012 - RNA, 19 nt, Artificial Sequence
  Description of Artificial Sequence: Synthetic oligonucleotide
ggcgucccgcuggcggagc

SEQ ID NO: 1676013 - RNA, 19 nt, Artificial Sequence
  Description of Artificial Sequence: Synthetic oligonucleotide
cugcucgggccaccucuau

SEQ ID NO: 1676014 - RNA, 19 nt, Artificial Sequence
  Description of Artificial Sequence: Synthetic oligonucleotide
cgggaugucagcggcgugu

SEQ ID NO: 1676015 - RNA, 19 nt, Artificial Sequence
  Description of Artificial Sequence: Synthetic oligonucleotide
gcggccgagcgcagcguaa

SEQ ID NO: 1676016 - RNA, 19 nt, Artificial Sequence
  Description of Artificial Sequence: Synthetic oligonucleotide
ggcgcccaccauagcgugu

SEQ ID NO: 1676017 - RNA, 19 nt, Artificial Sequence
  Description of Artificial Sequence: Synthetic oligonucleotide
gggcaaguucugagggcuu

SEQ ID NO: 1676018 - RNA, 19 nt, Artificial Sequence
  Description of Artificial Sequence: Synthetic oligonucleotide
ccggcccgucaugggguug

SEQ ID NO: 1676019 - RNA, 19 nt, Artificial Sequence
  Description of Artificial Sequence: Synthetic oligonucleotide
gcgucccgcuggcggagcu

SEQ ID NO: 1676020 - RNA, 19 nt, Artificial Sequence
  Description of Artificial Sequence: Synthetic oligonucleotide
gcccgucaugggguugucu

SEQ ID NO: 1676021 - RNA, 19 nt, Artificial Sequence
  Description of Artificial Sequence: Synthetic oligonucleotide
cgagggcauuagguuaacu

SEQ ID NO: 1676022 - RNA, 19 nt, Artificial Sequence
  Description of Artificial Sequence: Synthetic oligonucleotide
cggggauacccaggggugu

SEQ ID NO: 1676023 - RNA, 19 nt, Artificial Sequence
  Description of Artificial Sequence: Synthetic oligonucleotide
ccauagcgugugacuccau

SEQ ID NO: 1676024 - RNA, 19 nt, Artificial Sequence
  Description of Artificial Sequence: Synthetic oligonucleotide
cgcggccgagcgcagcgua

SEQ ID NO: 1676025 - RNA, 19 nt, Artificial Sequence
  Description of Artificial Sequence: Synthetic oligonucleotide
ccuuggccucacggugaua

SEQ ID NO: 1676026 - RNA, 19 nt, Artificial Sequence
  Description of Artificial Sequence: Synthetic oligonucleotide
uuugacuccucuuagauag

SEQ ID NO: 1676027 - RNA, 19 nt, Artificial Sequence
  Description of Artificial Sequence: Synthetic oligonucleotide
aauaagaucacgguccagc

SEQ ID NO: 1676028 - RNA, 19 nt, Artificial Sequence
  Description of Artificial Sequence: Synthetic oligonucleotide
aauuuacuagauuauagcu

SEQ ID NO: 1676029 - RNA, 19 nt, Artificial Sequence
  Description of Artificial Sequence: Synthetic oligonucleotide
aauccgaggagccagcacc

SEQ ID NO: 1676030 - RNA, 19 nt, Artificial Sequence
  Description of Artificial Sequence: Synthetic oligonucleotide
gguacuaacacauacagcc

SEQ ID NO: 1676031 - RNA, 19 nt, Artificial Sequence
  Description of Artificial Sequence: Synthetic oligonucleotide
gacaagagaacauagugcc

SEQ ID NO: 1676032 - RNA, 19 nt, Artificial Sequence
  Description of Artificial Sequence: Synthetic oligonucleotide
gagaguuucgaccugaaag

SEQ ID NO: 1676033 - RNA, 19 nt, Artificial Sequence
  Description of Artificial Sequence: Synthetic oligonucleotide
uuuguuaaggacaagcaaa

SEQ ID NO: 1676034 - RNA, 19 nt, Artificial Sequence
  Description of Artificial Sequence: Synthetic oligonucleotide
uaauuuacuagauuauagc

SEQ ID NO: 1676035 - RNA, 19 nt, Artificial Sequence
  Description of Artificial Sequence: Synthetic oligonucleotide
aggaauaagaucacggucc

SEQ ID NO: 1676036 - RNA, 19 nt, Artificial Sequence
  Description of Artificial Sequence: Synthetic oligonucleotide
uggacaagagaacauagug

SEQ ID NO: 1676037 - RNA, 19 nt, Artificial Sequence
  Description of Artificial Sequence: Synthetic oligonucleotide
uggauagggaaacaguucc

SEQ ID NO: 1676038 - RNA, 19 nt, Artificial Sequence
  Description of Artificial Sequence: Synthetic oligonucleotide
ucccaugguaguaacaagg

SEQ ID NO: 1676039 - RNA, 19 nt, Artificial Sequence
  Description of Artificial Sequence: Synthetic oligonucleotide
cucgauaacacaauccacc

SEQ ID NO: 1676040 - RNA, 19 nt, Artificial Sequence
  Description of Artificial Sequence: Synthetic oligonucleotide
acauagugcccuuuggagc

SEQ ID NO: 1676041 - RNA, 19 nt, Artificial Sequence
  Description of Artificial Sequence: Synthetic oligonucleotide
uccgcaaacaggaauaaga

SEQ ID NO: 1676042 - RNA, 19 nt, Artificial Sequence
  Description of Artificial Sequence: Synthetic oligonucleotide
uuuacuagauuauagcuuu

SEQ ID NO: 1676043 - RNA, 19 nt, Artificial Sequence
  Description of Artificial Sequence: Synthetic oligonucleotide
aacaaggugguccagcaca

SEQ ID NO: 1676044 - RNA, 19 nt, Artificial Sequence
  Description of Artificial Sequence: Synthetic oligonucleotide
ggaguauccagcaagaacg

SEQ ID NO: 1676045 - RNA, 19 nt, Artificial Sequence
  Description of Artificial Sequence: Synthetic oligonucleotide
ugaaagugggauccgggcg

SEQ ID NO: 1676046 - RNA, 19 nt, Artificial Sequence
  Description of Artificial Sequence: Synthetic oligonucleotide
guaacaaggacugaccagg

SEQ ID NO: 1676047 - RNA, 19 nt, Artificial Sequence
  Description of Artificial Sequence: Synthetic oligonucleotide
ugcacguacccaaauagcc

SEQ ID NO: 1676048 - RNA, 19 nt, Artificial Sequence
  Description of Artificial Sequence: Synthetic oligonucleotide
ucuuagauagcaguaaacu

SEQ ID NO: 1676049 - RNA, 19 nt, Artificial Sequence
  Description of Artificial Sequence: Synthetic oligonucleotide
guuaaggacaagcaaauga

SEQ ID NO: 1676050 - RNA, 19 nt, Artificial Sequence
  Description of Artificial Sequence: Synthetic oligonucleotide
agaggauuugccuacguug

SEQ ID NO: 1676051 - RNA, 19 nt, Artificial Sequence
  Description of Artificial Sequence: Synthetic oligonucleotide
aucgugaccuugcagaggg

SEQ ID NO: 1676052 - RNA, 19 nt, Artificial Sequence
  Description of Artificial Sequence: Synthetic oligonucleotide
acuagauuauagcuuugac

SEQ ID NO: 1676053 - RNA, 19 nt, Artificial Sequence
  Description of Artificial Sequence: Synthetic oligonucleotide
uuuuguuaaggacaagcaa

SEQ ID NO: 1676054 - RNA, 19 nt, Artificial Sequence
  Description of Artificial Sequence: Synthetic oligonucleotide
aaaggagguaaucagccau

SEQ ID NO: 1676055 - RNA, 19 nt, Artificial Sequence
  Description of Artificial Sequence: Synthetic oligonucleotide
uuggguacaccaaucacca

SEQ ID NO: 1676056 - RNA, 19 nt, Artificial Sequence
  Description of Artificial Sequence: Synthetic oligonucleotide
aaccucgauaacacaaucc

SEQ ID NO: 1676057 - RNA, 19 nt, Artificial Sequence
  Description of Artificial Sequence: Synthetic oligonucleotide
agaguuucgaccugaaagu

SEQ ID NO: 1676058 - RNA, 19 nt, Artificial Sequence
  Description of Artificial Sequence: Synthetic oligonucleotide
agaagaccauacuccagcc

SEQ ID NO: 1676059 - RNA, 19 nt, Artificial Sequence
  Description of Artificial Sequence: Synthetic oligonucleotide
ucaugaaccucgauaacac

SEQ ID NO: 1676060 - RNA, 19 nt, Artificial Sequence
  Description of Artificial Sequence: Synthetic oligonucleotide
guugcacguacccaaauag

SEQ ID NO: 1676061 - RNA, 19 nt, Artificial Sequence
  Description of Artificial Sequence: Synthetic oligonucleotide
cuuagauagcaguaaacuc

SEQ ID NO: 1676062 - RNA, 19 nt, Artificial Sequence
  Description of Artificial Sequence: Synthetic oligonucleotide
uuugggaugaucugcuuga

SEQ ID NO: 1676063 - RNA, 19 nt, Artificial Sequence
  Description of Artificial Sequence: Synthetic oligonucleotide
ucuaguggacaagagaaca

SEQ ID NO: 1676064 - RNA, 19 nt, Artificial Sequence
  Description of Artificial Sequence: Synthetic oligonucleotide
cacacuuucaauccgagga

SEQ ID NO: 1676065 - RNA, 19 nt, Artificial Sequence
  Description of Artificial Sequence: Synthetic oligonucleotide
uccagcaagaacgucagug

SEQ ID NO: 1676066 - RNA, 19 nt, Artificial Sequence
  Description of Artificial Sequence: Synthetic oligonucleotide
cauaguguugcacguaccc

SEQ ID NO: 1676067 - RNA, 19 nt, Artificial Sequence
  Description of Artificial Sequence: Synthetic oligonucleotide
ugagucucagguacuaaca

SEQ ID NO: 1676068 - RNA, 19 nt, Artificial Sequence
  Description of Artificial Sequence: Synthetic oligonucleotide
uuauccgcaaacaggaaua

SEQ ID NO: 1676069 - RNA, 19 nt, Artificial Sequence
  Description of Artificial Sequence: Synthetic oligonucleotide
agacugagagaaaaucucc

SEQ ID NO: 1676070 - RNA, 19 nt, Artificial Sequence
  Description of Artificial Sequence: Synthetic oligonucleotide
agaacauagugcccuuugg

SEQ ID NO: 1676071 - RNA, 19 nt, Artificial Sequence
  Description of Artificial Sequence: Synthetic oligonucleotide
guuucgaccugaaaguggg

SEQ ID NO: 1676072 - RNA, 19 nt, Artificial Sequence
  Description of Artificial Sequence: Synthetic oligonucleotide
ucgauaacacaauccacca

SEQ ID NO: 1676073 - RNA, 19 nt, Artificial Sequence
  Description of Artificial Sequence: Synthetic oligonucleotide
uuguuaaggacaagcaaau

SEQ ID NO: 1676074 - RNA, 19 nt, Artificial Sequence
  Description of Artificial Sequence: Synthetic oligonucleotide
cagaagaccauacuccagc

SEQ ID NO: 1676075 - RNA, 19 nt, Artificial Sequence
  Description of Artificial Sequence: Synthetic oligonucleotide
uaacacauacagccucugg

SEQ ID NO: 1676076 - RNA, 19 nt, Artificial Sequence
  Description of Artificial Sequence: Synthetic oligonucleotide
caaaugaggcuucagacca

SEQ ID NO: 1676077 - RNA, 19 nt, Artificial Sequence
  Description of Artificial Sequence: Synthetic oligonucleotide
agcaguaaacucuucuuga

SEQ ID NO: 1676078 - RNA, 19 nt, Artificial Sequence
  Description of Artificial Sequence: Synthetic oligonucleotide
uguaugcagaagaccauac

SEQ ID NO: 1676079 - RNA, 19 nt, Artificial Sequence
  Description of Artificial Sequence: Synthetic oligonucleotide
auuauccgcaaacaggaau

SEQ ID NO: 1676080 - RNA, 19 nt, Artificial Sequence
  Description of Artificial Sequence: Synthetic oligonucleotide
gaagcacucgcgccaagcg

SEQ ID NO: 1676081 - RNA, 19 nt, Artificial Sequence
  Description of Artificial Sequence: Synthetic oligonucleotide
ucucugcucgauuguagcg

SEQ ID NO: 1676082 - RNA, 19 nt, Artificial Sequence
  Description of Artificial Sequence: Synthetic oligonucleotide
aagcacucgcgccaagcgg

SEQ ID NO: 1676083 - RNA, 19 nt, Artificial Sequence
  Description of Artificial Sequence: Synthetic oligonucleotide
guuggguacaccaaucacc

SEQ ID NO: 1676084 - RNA, 19 nt, Artificial Sequence
  Description of Artificial Sequence: Synthetic oligonucleotide
ugagagaggauuugccuac

SEQ ID NO: 1676085 - RNA, 19 nt, Artificial Sequence
  Description of Artificial Sequence: Synthetic oligonucleotide
acuuucaauccgaggagcc

SEQ ID NO: 1676086 - RNA, 19 nt, Artificial Sequence
  Description of Artificial Sequence: Synthetic oligonucleotide
uuccauggaguauguaugc

SEQ ID NO: 1676087 - RNA, 19 nt, Artificial Sequence
  Description of Artificial Sequence: Synthetic oligonucleotide
aacgucaguggacgcucgc

SEQ ID NO: 1676088 - RNA, 19 nt, Artificial Sequence
  Description of Artificial Sequence: Synthetic oligonucleotide
augguaguaacaaggacug

SEQ ID NO: 1676089 - RNA, 19 nt, Artificial Sequence
  Description of Artificial Sequence: Synthetic oligonucleotide
gagaacauagugcccuuug

SEQ ID NO: 1676090 - RNA, 19 nt, Artificial Sequence
  Description of Artificial Sequence: Synthetic oligonucleotide
gauccgggcgucaugaacc

SEQ ID NO: 1676091 - RNA, 19 nt, Artificial Sequence
  Description of Artificial Sequence: Synthetic oligonucleotide
uugcacguacccaaauagc

SEQ ID NO: 1676092 - RNA, 19 nt, Artificial Sequence
  Description of Artificial Sequence: Synthetic oligonucleotide
ucuugagacugagagaaaa

SEQ ID NO: 1676093 - RNA, 19 nt, Artificial Sequence
  Description of Artificial Sequence: Synthetic oligonucleotide
uucucugcucgauuguagc

SEQ ID NO: 1676094 - RNA, 19 nt, Artificial Sequence
  Description of Artificial Sequence: Synthetic oligonucleotide
aggcuucagaccaaguagc

SEQ ID NO: 1676095 - RNA, 19 nt, Artificial Sequence
  Description of Artificial Sequence: Synthetic oligonucleotide
uacccaaauagcccaugcc

SEQ ID NO: 1676096 - RNA, 19 nt, Artificial Sequence
  Description of Artificial Sequence: Synthetic oligonucleotide
cucuuagauagcaguaaac

SEQ ID NO: 1676097 - RNA, 19 nt, Artificial Sequence
  Description of Artificial Sequence: Synthetic oligonucleotide
cacaucgugaccuugcaga

SEQ ID NO: 1676098 - RNA, 19 nt, Artificial Sequence
  Description of Artificial Sequence: Synthetic oligonucleotide
acugcggaagguccggagg

SEQ ID NO: 1676099 - RNA, 19 nt, Artificial Sequence
  Description of Artificial Sequence: Synthetic oligonucleotide
uccgccaaauccauuuugu

SEQ ID NO: 1676100 - RNA, 19 nt, Artificial Sequence
  Description of Artificial Sequence: Synthetic oligonucleotide
uccggaggaagucucgggc

SEQ ID NO: 1676101 - RNA, 19 nt, Artificial Sequence
  Description of Artificial Sequence: Synthetic oligonucleotide
ugaaccucgauaacacaau

SEQ ID NO: 1676102 - RNA, 19 nt, Artificial Sequence
  Description of Artificial Sequence: Synthetic oligonucleotide
auuguagcgguagcuguac

SEQ ID NO: 1676103 - RNA, 19 nt, Artificial Sequence
  Description of Artificial Sequence: Synthetic oligonucleotide
agcucuggugauuccuggc

SEQ ID NO: 1676104 - RNA, 19 nt, Artificial Sequence
  Description of Artificial Sequence: Synthetic oligonucleotide
guuccauggaguauguaug

SEQ ID NO: 1676105 - RNA, 19 nt, Artificial Sequence
  Description of Artificial Sequence: Synthetic oligonucleotide
uuaaacacuccagcugcag

SEQ ID NO: 1676106 - RNA, 19 nt, Artificial Sequence
  Description of Artificial Sequence: Synthetic oligonucleotide
cuagauuauagcuuugacu

SEQ ID NO: 1676107 - RNA, 19 nt, Artificial Sequence
  Description of Artificial Sequence: Synthetic oligonucleotide
uaguguugcacguacccaa

SEQ ID NO: 1676108 - RNA, 19 nt, Artificial Sequence
  Description of Artificial Sequence: Synthetic oligonucleotide
cugagucucagguacuaac

SEQ ID NO: 1676109 - RNA, 19 nt, Artificial Sequence
  Description of Artificial Sequence: Synthetic oligonucleotide
uacuagauuauagcuuuga

SEQ ID NO: 1676110 - RNA, 19 nt, Artificial Sequence
  Description of Artificial Sequence: Synthetic oligonucleotide
aguggacaagagaacauag

SEQ ID NO: 1676111 - RNA, 19 nt, Artificial Sequence
  Description of Artificial Sequence: Synthetic oligonucleotide
auuuacuagauuauagcuu

SEQ ID NO: 1676112 - RNA, 19 nt, Artificial Sequence
  Description of Artificial Sequence: Synthetic oligonucleotide
aguuucgaccugaaagugg

SEQ ID NO: 1676113 - RNA, 19 nt, Artificial Sequence
  Description of Artificial Sequence: Synthetic oligonucleotide
ucaguggacgcucgcacac

SEQ ID NO: 1676114 - RNA, 19 nt, Artificial Sequence
  Description of Artificial Sequence: Synthetic oligonucleotide
uuacuagauuauagcuuug

SEQ ID NO: 1676115 - RNA, 19 nt, Artificial Sequence
  Description of Artificial Sequence: Synthetic oligonucleotide
aacagcccacugcggaagg

SEQ ID NO: 1676116 - RNA, 19 nt, Artificial Sequence
  Description of Artificial Sequence: Synthetic oligonucleotide
guaagauccgccaaaucca

SEQ ID NO: 1676117 - RNA, 19 nt, Artificial Sequence
  Description of Artificial Sequence: Synthetic oligonucleotide
agcacucgcgccaagcggc

SEQ ID NO: 1676118 - RNA, 19 nt, Artificial Sequence
  Description of Artificial Sequence: Synthetic oligonucleotide
aagucucgggcugccaugg

SEQ ID NO: 1676119 - RNA, 19 nt, Artificial Sequence
  Description of Artificial Sequence: Synthetic oligonucleotide
uccugaccaagccauuuac

SEQ ID NO: 1676120 - RNA, 19 nt, Artificial Sequence
  Description of Artificial Sequence: Synthetic oligonucleotide
ucgcacaccuggauucugg

SEQ ID NO: 1676121 - RNA, 19 nt, Artificial Sequence
  Description of Artificial Sequence: Synthetic oligonucleotide
aaggugguccagcacaguu

SEQ ID NO: 1676122 - RNA, 19 nt, Artificial Sequence
  Description of Artificial Sequence: Synthetic oligonucleotide
uuauagcuuugacuccucu

SEQ ID NO: 1676123 - RNA, 19 nt, Artificial Sequence
  Description of Artificial Sequence: Synthetic oligonucleotide
agguacuaacacauacagc

SEQ ID NO: 1676124 - RNA, 19 nt, Artificial Sequence
  Description of Artificial Sequence: Synthetic oligonucleotide
gaugagagaggauuugccu

SEQ ID NO: 1676125 - RNA, 19 nt, Artificial Sequence
  Description of Artificial Sequence: Synthetic oligonucleotide
accaacgugccacaucgug

SEQ ID NO: 1676126 - RNA, 19 nt, Artificial Sequence
  Description of Artificial Sequence: Synthetic oligonucleotide
agaacgucaguggacgcuc

SEQ ID NO: 1676127 - RNA, 19 nt, Artificial Sequence
  Description of Artificial Sequence: Synthetic oligonucleotide
agcaagaacgucaguggac

SEQ ID NO: 1676128 - RNA, 19 nt, Artificial Sequence
  Description of Artificial Sequence: Synthetic oligonucleotide
augagagaggauuugccua

SEQ ID NO: 1676129 - RNA, 19 nt, Artificial Sequence
  Description of Artificial Sequence: Synthetic oligonucleotide
ucgauuguagcgguagcug

SEQ ID NO: 1676130 - RNA, 19 nt, Artificial Sequence
  Description of Artificial Sequence: Synthetic oligonucleotide
cacucuauguggucacagg

SEQ ID NO: 1676131 - RNA, 19 nt, Artificial Sequence
  Description of Artificial Sequence: Synthetic oligonucleotide
uguugcacguacccaaaua

SEQ ID NO: 1676132 - RNA, 19 nt, Artificial Sequence
  Description of Artificial Sequence: Synthetic oligonucleotide
ugugagcacuuucacuuuc

SEQ ID NO: 1676133 - RNA, 19 nt, Artificial Sequence
  Description of Artificial Sequence: Synthetic oligonucleotide
uaagauccgccaaauccau

SEQ ID NO: 1676134 - RNA, 19 nt, Artificial Sequence
  Description of Artificial Sequence: Synthetic oligonucleotide
cagcgaguugaugagagag

SEQ ID NO: 1676135 - RNA, 19 nt, Artificial Sequence
  Description of Artificial Sequence: Synthetic oligonucleotide
ggguacaccaaucaccaug

SEQ ID NO: 1676136 - RNA, 19 nt, Artificial Sequence
  Description of Artificial Sequence: Synthetic oligonucleotide
cauggaguauguaugcaga

SEQ ID NO: 1676137 - RNA, 19 nt, Artificial Sequence
  Description of Artificial Sequence: Synthetic oligonucleotide
uguuaaggacaagcaaaug

SEQ ID NO: 1676138 - RNA, 19 nt, Artificial Sequence
  Description of Artificial Sequence: Synthetic oligonucleotide
aagaacgucaguggacgcu

SEQ ID NO: 1676139 - RNA, 19 nt, Artificial Sequence
  Description of Artificial Sequence: Synthetic oligonucleotide
gcaagaacgucaguggacg

SEQ ID NO: 1676140 - RNA, 19 nt, Artificial Sequence
  Description of Artificial Sequence: Synthetic oligonucleotide
gucaugaaccucgauaaca

SEQ ID NO: 1676141 - RNA, 19 nt, Artificial Sequence
  Description of Artificial Sequence: Synthetic oligonucleotide
uuacacaggcuuccugaga

SEQ ID NO: 1676142 - RNA, 19 nt, Artificial Sequence
  Description of Artificial Sequence: Synthetic oligonucleotide
cucugcucgauuguagcgg

SEQ ID NO: 1676143 - RNA, 19 nt, Artificial Sequence
  Description of Artificial Sequence: Synthetic oligonucleotide
cauuaccugugccugugag

SEQ ID NO: 1676144 - RNA, 19 nt, Artificial Sequence
  Description of Artificial Sequence: Synthetic oligonucleotide
gaggguguaaaggagguaa

SEQ ID NO: 1676145 - RNA, 19 nt, Artificial Sequence
  Description of Artificial Sequence: Synthetic oligonucleotide
ggacaagagaacauagugc

SEQ ID NO: 1676146 - RNA, 19 nt, Artificial Sequence
  Description of Artificial Sequence: Synthetic oligonucleotide
ucugguagcuuuuccuguc

SEQ ID NO: 1676147 - RNA, 19 nt, Artificial Sequence
  Description of Artificial Sequence: Synthetic oligonucleotide
gaaccucgauaacacaauc

SEQ ID NO: 1676148 - RNA, 19 nt, Artificial Sequence
  Description of Artificial Sequence: Synthetic oligonucleotide
ugccacaucgugaccuugc

SEQ ID NO: 1676149 - RNA, 19 nt, Artificial Sequence
  Description of Artificial Sequence: Synthetic oligonucleotide
guacccaaauagcccaugc

SEQ ID NO: 1676150 - RNA, 19 nt, Artificial Sequence
  Description of Artificial Sequence: Synthetic oligonucleotide
gucucagcgaguugaugag

SEQ ID NO: 1676151 - RNA, 19 nt, Artificial Sequence
  Description of Artificial Sequence: Synthetic oligonucleotide
uacguuggguacaccaauc

SEQ ID NO: 1676152 - RNA, 19 nt, Artificial Sequence
  Description of Artificial Sequence: Synthetic oligonucleotide
gauuauagcuuugacuccu

SEQ ID NO: 1676153 - RNA, 19 nt, Artificial Sequence
  Description of Artificial Sequence: Synthetic oligonucleotide
cucuaguggacaagagaac

SEQ ID NO: 1676154 - RNA, 19 nt, Artificial Sequence
  Description of Artificial Sequence: Synthetic oligonucleotide
guugaugagagaggauuug

SEQ ID NO: 1676155 - RNA, 19 nt, Artificial Sequence
  Description of Artificial Sequence: Synthetic oligonucleotide
ugcugcucuguaagauccg

SEQ ID NO: 1676156 - RNA, 19 nt, Artificial Sequence
  Description of Artificial Sequence: Synthetic oligonucleotide
gaguuucgaccugaaagug

SEQ ID NO: 1676157 - RNA, 19 nt, Artificial Sequence
  Description of Artificial Sequence: Synthetic oligonucleotide
augaaccucgauaacacaa

SEQ ID NO: 1676158 - RNA, 19 nt, Artificial Sequence
  Description of Artificial Sequence: Synthetic oligonucleotide
aguuuugggaugaucugcu

SEQ ID NO: 1676159 - RNA, 19 nt, Artificial Sequence
  Description of Artificial Sequence: Synthetic oligonucleotide
ucuguaagauccgccaaau

SEQ ID NO: 1676160 - RNA, 19 nt, Artificial Sequence
  Description of Artificial Sequence: Synthetic oligonucleotide
gauagggaaacaguuccaa

SEQ ID NO: 1676161 - RNA, 19 nt, Artificial Sequence
  Description of Artificial Sequence: Synthetic oligonucleotide
ugacuccucuuagauagca

SEQ ID NO: 1676162 - RNA, 19 nt, Artificial Sequence
  Description of Artificial Sequence: Synthetic oligonucleotide
aagguccggaggaagucuc

SEQ ID NO: 1676163 - RNA, 19 nt, Artificial Sequence
  Description of Artificial Sequence: Synthetic oligonucleotide
acccacucuauguggucac

SEQ ID NO: 1676164 - RNA, 19 nt, Artificial Sequence
  Description of Artificial Sequence: Synthetic oligonucleotide
gacauuaccugugccugug

SEQ ID NO: 1676165 - RNA, 19 nt, Artificial Sequence
  Description of Artificial Sequence: Synthetic oligonucleotide
cacguacccaaauagccca

SEQ ID NO: 1676166 - RNA, 19 nt, Artificial Sequence
  Description of Artificial Sequence: Synthetic oligonucleotide
agccucuggauagggaaac

SEQ ID NO: 1676167 - RNA, 19 nt, Artificial Sequence
  Description of Artificial Sequence: Synthetic oligonucleotide
auccgccaaauccauuuug

SEQ ID NO: 1676168 - RNA, 19 nt, Artificial Sequence
  Description of Artificial Sequence: Synthetic oligonucleotide
cagagggaagcacucgcgc

SEQ ID NO: 1676169 - RNA, 19 nt, Artificial Sequence
  Description of Artificial Sequence: Synthetic oligonucleotide
uccucuuagauagcaguaa

SEQ ID NO: 1676170 - RNA, 19 nt, Artificial Sequence
  Description of Artificial Sequence: Synthetic oligonucleotide
cucuauguggucacaggca

SEQ ID NO: 1676171 - RNA, 19 nt, Artificial Sequence
  Description of Artificial Sequence: Synthetic oligonucleotide
cagucccuuggccaugugg

SEQ ID NO: 1676172 - RNA, 19 nt, Artificial Sequence
  Description of Artificial Sequence: Synthetic oligonucleotide
gaagaccauacuccagcca

SEQ ID NO: 1676173 - RNA, 19 nt, Artificial Sequence
  Description of Artificial Sequence: Synthetic oligonucleotide
auaacacaauccaccagcu

SEQ ID NO: 1676174 - RNA, 19 nt, Artificial Sequence
  Description of Artificial Sequence: Synthetic oligonucleotide
gggaguauccagcaagaac

SEQ ID NO: 1676175 - RNA, 19 nt, Artificial Sequence
  Description of Artificial Sequence: Synthetic oligonucleotide
agcgaguugaugagagagg

SEQ ID NO: 1676176 - RNA, 19 nt, Artificial Sequence
  Description of Artificial Sequence: Synthetic oligonucleotide
ucgaccugaaagugggauc

SEQ ID NO: 1676177 - RNA, 19 nt, Artificial Sequence
  Description of Artificial Sequence: Synthetic oligonucleotide
ugccgucucagcgaguuga

SEQ ID NO: 1676178 - RNA, 19 nt, Artificial Sequence
  Description of Artificial Sequence: Synthetic oligonucleotide
gaaagugggauccgggcgu

SEQ ID NO: 1676179 - RNA, 19 nt, Artificial Sequence
  Description of Artificial Sequence: Synthetic oligonucleotide
uucgaccugaaagugggau

SEQ ID NO: 1676180 - RNA, 19 nt, Artificial Sequence
  Description of Artificial Sequence: Synthetic oligonucleotide
gagaucccaugguaguaac

SEQ ID NO: 1676181 - RNA, 19 nt, Artificial Sequence
  Description of Artificial Sequence: Synthetic oligonucleotide
gagggaagcacucgcgcca

SEQ ID NO: 1676182 - RNA, 19 nt, Artificial Sequence
  Description of Artificial Sequence: Synthetic oligonucleotide
cuugaucaauuccauaagu

SEQ ID NO: 1676183 - RNA, 19 nt, Artificial Sequence
  Description of Artificial Sequence: Synthetic oligonucleotide
auaguguugcacguaccca

SEQ ID NO: 1676184 - RNA, 19 nt, Artificial Sequence
  Description of Artificial Sequence: Synthetic oligonucleotide
aguggacgcucgcacaccu

SEQ ID NO: 1676185 - RNA, 19 nt, Artificial Sequence
  Description of Artificial Sequence: Synthetic oligonucleotide
ugacauuaccugugccugu

SEQ ID NO: 1676186 - RNA, 19 nt, Artificial Sequence
  Description of Artificial Sequence: Synthetic oligonucleotide
ugguccagcacaguuccac

SEQ ID NO: 1676187 - RNA, 19 nt, Artificial Sequence
  Description of Artificial Sequence: Synthetic oligonucleotide
cauagugcccuuuggagcu

SEQ ID NO: 1676188 - RNA, 19 nt, Artificial Sequence
  Description of Artificial Sequence: Synthetic oligonucleotide
caagaacgucaguggacgc

SEQ ID NO: 1676189 - RNA, 19 nt, Artificial Sequence
  Description of Artificial Sequence: Synthetic oligonucleotide
ccauggaguauguaugcag

SEQ ID NO: 1676190 - RNA, 19 nt, Artificial Sequence
  Description of Artificial Sequence: Synthetic oligonucleotide
uccauggaguauguaugca

SEQ ID NO: 1676191 - RNA, 19 nt, Artificial Sequence
  Description of Artificial Sequence: Synthetic oligonucleotide
agcccacugcggaaggucc

SEQ ID NO: 1676192 - RNA, 19 nt, Artificial Sequence
  Description of Artificial Sequence: Synthetic oligonucleotide
ucagcgaguugaugagaga

SEQ ID NO: 1676193 - RNA, 19 nt, Artificial Sequence
  Description of Artificial Sequence: Synthetic oligonucleotide
gaguugaugagagaggauu

SEQ ID NO: 1676194 - RNA, 19 nt, Artificial Sequence
  Description of Artificial Sequence: Synthetic oligonucleotide
gacggcaccccaugccugc

SEQ ID NO: 1676195 - RNA, 19 nt, Artificial Sequence
  Description of Artificial Sequence: Synthetic oligonucleotide
acagagaguuucgaccuga

SEQ ID NO: 1676196 - RNA, 19 nt, Artificial Sequence
  Description of Artificial Sequence: Synthetic oligonucleotide
ccaaguagcucuuggaaca

SEQ ID NO: 1676197 - RNA, 19 nt, Artificial Sequence
  Description of Artificial Sequence: Synthetic oligonucleotide
ggauaacauugacauuacc

SEQ ID NO: 1676198 - RNA, 19 nt, Artificial Sequence
  Description of Artificial Sequence: Synthetic oligonucleotide
ccugaaagugggauccggg

SEQ ID NO: 1676199 - RNA, 19 nt, Artificial Sequence
  Description of Artificial Sequence: Synthetic oligonucleotide
auguucucugcucgauugu

SEQ ID NO: 1676200 - RNA, 19 nt, Artificial Sequence
  Description of Artificial Sequence: Synthetic oligonucleotide
aguuccacacagggccagc

SEQ ID NO: 1676201 - RNA, 19 nt, Artificial Sequence
  Description of Artificial Sequence: Synthetic oligonucleotide
caagagaacauagugcccu

SEQ ID NO: 1676202 - RNA, 19 nt, Artificial Sequence
  Description of Artificial Sequence: Synthetic oligonucleotide
caaguagcucuuggaacag

SEQ ID NO: 1676203 - RNA, 19 nt, Artificial Sequence
  Description of Artificial Sequence: Synthetic oligonucleotide
cacaguacuccauguucuc

SEQ ID NO: 1676204 - RNA, 19 nt, Artificial Sequence
  Description of Artificial Sequence: Synthetic oligonucleotide
gcgucaugaaccucgauaa

SEQ ID NO: 1676205 - RNA, 19 nt, Artificial Sequence
  Description of Artificial Sequence: Synthetic oligonucleotide
gguacaccaaucaccauga

SEQ ID NO: 1676206 - RNA, 19 nt, Artificial Sequence
  Description of Artificial Sequence: Synthetic oligonucleotide
agagaguuucgaccugaaa

SEQ ID NO: 1676207 - RNA, 19 nt, Artificial Sequence
  Description of Artificial Sequence: Synthetic oligonucleotide
aggccauaguguugcacgu

SEQ ID NO: 1676208 - RNA, 19 nt, Artificial Sequence
  Description of Artificial Sequence: Synthetic oligonucleotide
acaguacuccauguucucu

SEQ ID NO: 1676209 - RNA, 19 nt, Artificial Sequence
  Description of Artificial Sequence: Synthetic oligonucleotide
acgugccacaucgugaccu

SEQ ID NO: 1676210 - RNA, 19 nt, Artificial Sequence
  Description of Artificial Sequence: Synthetic oligonucleotide
ucucagcgaguugaugaga

SEQ ID NO: 1676211 - RNA, 19 nt, Artificial Sequence
  Description of Artificial Sequence: Synthetic oligonucleotide
caugaaccucgauaacaca

SEQ ID NO: 1676212 - RNA, 19 nt, Artificial Sequence
  Description of Artificial Sequence: Synthetic oligonucleotide
cuaacacauacagccucug

SEQ ID NO: 1676213 - RNA, 19 nt, Artificial Sequence
  Description of Artificial Sequence: Synthetic oligonucleotide
gccauaguguugcacguac

SEQ ID NO: 1676214 - RNA, 19 nt, Artificial Sequence
  Description of Artificial Sequence: Synthetic oligonucleotide
uucagaccaaguagcucuu

SEQ ID NO: 1676215 - RNA, 19 nt, Artificial Sequence
  Description of Artificial Sequence: Synthetic oligonucleotide
ccgggcgucaugaaccucg

SEQ ID NO: 1676216 - RNA, 19 nt, Artificial Sequence
  Description of Artificial Sequence: Synthetic oligonucleotide
cuguaagauccgccaaauc

SEQ ID NO: 1676217 - RNA, 19 nt, Artificial Sequence
  Description of Artificial Sequence: Synthetic oligonucleotide
ggcucuaguggacaagaga

SEQ ID NO: 1676218 - RNA, 19 nt, Artificial Sequence
  Description of Artificial Sequence: Synthetic oligonucleotide
cuuugacuccucuuagaua

SEQ ID NO: 1676219 - RNA, 19 nt, Artificial Sequence
  Description of Artificial Sequence: Synthetic oligonucleotide
gaccugaaagugggauccg

SEQ ID NO: 1676220 - RNA, 19 nt, Artificial Sequence
  Description of Artificial Sequence: Synthetic oligonucleotide
ggcgucaugaaccucgaua

SEQ ID NO: 1676221 - RNA, 19 nt, Artificial Sequence
  Description of Artificial Sequence: Synthetic oligonucleotide
caacagcccacugcggaag

SEQ ID NO: 1676222 - RNA, 19 nt, Artificial Sequence
  Description of Artificial Sequence: Synthetic oligonucleotide
acaagcaaaugaggcuuca

SEQ ID NO: 1676223 - RNA, 19 nt, Artificial Sequence
  Description of Artificial Sequence: Synthetic oligonucleotide
ucagaccaaguagcucuug

SEQ ID NO: 1676224 - RNA, 19 nt, Artificial Sequence
  Description of Artificial Sequence: Synthetic oligonucleotide
cucuguaagauccgccaaa

SEQ ID NO: 1676225 - RNA, 19 nt, Artificial Sequence
  Description of Artificial Sequence: Synthetic oligonucleotide
gauuguagcgguagcugua

SEQ ID NO: 1676226 - RNA, 19 nt, Artificial Sequence
  Description of Artificial Sequence: Synthetic oligonucleotide
gucucagguacuaacacau

SEQ ID NO: 1676227 - RNA, 19 nt, Artificial Sequence
  Description of Artificial Sequence: Synthetic oligonucleotide
uccgggucuucccaagcuu

SEQ ID NO: 1676228 - RNA, 19 nt, Artificial Sequence
  Description of Artificial Sequence: Synthetic oligonucleotide
acauuaccugugccuguga

SEQ ID NO: 1676229 - RNA, 19 nt, Artificial Sequence
  Description of Artificial Sequence: Synthetic oligonucleotide
acuuuccgggucuucccaa

SEQ ID NO: 1676230 - RNA, 19 nt, Artificial Sequence
  Description of Artificial Sequence: Synthetic oligonucleotide
cacugcggaagguccggag

SEQ ID NO: 1676231 - RNA, 19 nt, Artificial Sequence
  Description of Artificial Sequence: Synthetic oligonucleotide
gucaguggacgcucgcaca

SEQ ID NO: 1676232 - RNA, 19 nt, Artificial Sequence
  Description of Artificial Sequence: Synthetic oligonucleotide
cccgggaguauccagcaag

SEQ ID NO: 1676233 - RNA, 19 nt, Artificial Sequence
  Description of Artificial Sequence: Synthetic oligonucleotide
uugccuacguuggguacac

SEQ ID NO: 1676234 - RNA, 19 nt, Artificial Sequence
  Description of Artificial Sequence: Synthetic oligonucleotide
cacgguccagcaucacuug

SEQ ID NO: 1676235 - RNA, 19 nt, Artificial Sequence
  Description of Artificial Sequence: Synthetic oligonucleotide
ccucgauaacacaauccac

SEQ ID NO: 1676236 - RNA, 19 nt, Artificial Sequence
  Description of Artificial Sequence: Synthetic oligonucleotide
gguaaucagccauggucuc

SEQ ID NO: 1676237 - RNA, 19 nt, Artificial Sequence
  Description of Artificial Sequence: Synthetic oligonucleotide
gcacguacccaaauagccc

SEQ ID NO: 1676238 - RNA, 19 nt, Artificial Sequence
  Description of Artificial Sequence: Synthetic oligonucleotide
gccuacguuggguacacca

SEQ ID NO: 1676239 - RNA, 19 nt, Artificial Sequence
  Description of Artificial Sequence: Synthetic oligonucleotide
cuccucuuagauagcagua

SEQ ID NO: 1676240 - RNA, 19 nt, Artificial Sequence
  Description of Artificial Sequence: Synthetic oligonucleotide
caagcggccccgacggcac

SEQ ID NO: 1676241 - RNA, 19 nt, Artificial Sequence
  Description of Artificial Sequence: Synthetic oligonucleotide
auccgggcgucaugaaccu

SEQ ID NO: 1676242 - RNA, 19 nt, Artificial Sequence
  Description of Artificial Sequence: Synthetic oligonucleotide
cucuggauagggaaacagu

SEQ ID NO: 1676243 - RNA, 19 nt, Artificial Sequence
  Description of Artificial Sequence: Synthetic oligonucleotide
caaggacugaccaggcucu

SEQ ID NO: 1676244 - RNA, 19 nt, Artificial Sequence
  Description of Artificial Sequence: Synthetic oligonucleotide
gccuguugaggguguaaag

SEQ ID NO: 1676245 - RNA, 19 nt, Artificial Sequence
  Description of Artificial Sequence: Synthetic oligonucleotide
agcacccacucuauguggu

SEQ ID NO: 1676246 - RNA, 19 nt, Artificial Sequence
  Description of Artificial Sequence: Synthetic oligonucleotide
cuugagacugagagaaaau

SEQ ID NO: 1676247 - RNA, 19 nt, Artificial Sequence
  Description of Artificial Sequence: Synthetic oligonucleotide
ggauccgggcgucaugaac

SEQ ID NO: 1676248 - RNA, 19 nt, Artificial Sequence
  Description of Artificial Sequence: Synthetic oligonucleotide
cuaguggacaagagaacau

SEQ ID NO: 1676249 - RNA, 19 nt, Artificial Sequence
  Description of Artificial Sequence: Synthetic oligonucleotide
cauccuuuacacaguuugu

SEQ ID NO: 1676250 - RNA, 19 nt, Artificial Sequence
  Description of Artificial Sequence: Synthetic oligonucleotide
ggggucagcauuauccgca

SEQ ID NO: 1676251 - RNA, 19 nt, Artificial Sequence
  Description of Artificial Sequence: Synthetic oligonucleotide
cacauacagccucuggaua

SEQ ID NO: 1676252 - RNA, 19 nt, Artificial Sequence
  Description of Artificial Sequence: Synthetic oligonucleotide
ccauaguguugcacguacc

SEQ ID NO: 1676253 - RNA, 19 nt, Artificial Sequence
  Description of Artificial Sequence: Synthetic oligonucleotide
ggaagcacucgcgccaagc

SEQ ID NO: 1676254 - RNA, 19 nt, Artificial Sequence
  Description of Artificial Sequence: Synthetic oligonucleotide
cagcaccccgggaguaucc

SEQ ID NO: 1676255 - RNA, 19 nt, Artificial Sequence
  Description of Artificial Sequence: Synthetic oligonucleotide
cuuccugagaucccauggu

SEQ ID NO: 1676256 - RNA, 19 nt, Artificial Sequence
  Description of Artificial Sequence: Synthetic oligonucleotide
agguccggaggaagucucg

SEQ ID NO: 1676257 - RNA, 19 nt, Artificial Sequence
  Description of Artificial Sequence: Synthetic oligonucleotide
aguguugcacguacccaaa

SEQ ID NO: 1676258 - RNA, 19 nt, Artificial Sequence
  Description of Artificial Sequence: Synthetic oligonucleotide
guacuaacacauacagccu

SEQ ID NO: 1676259 - RNA, 19 nt, Artificial Sequence
  Description of Artificial Sequence: Synthetic oligonucleotide
aggcucuaguggacaagag

SEQ ID NO: 1676260 - RNA, 19 nt, Artificial Sequence
  Description of Artificial Sequence: Synthetic oligonucleotide
caccaaucaccaugacaca

SEQ ID NO: 1676261 - RNA, 19 nt, Artificial Sequence
  Description of Artificial Sequence: Synthetic oligonucleotide
ucagucccuuggccaugug

SEQ ID NO: 1676262 - RNA, 19 nt, Artificial Sequence
  Description of Artificial Sequence: Synthetic oligonucleotide
acgcucgcacaccuggauu

SEQ ID NO: 1676263 - RNA, 19 nt, Artificial Sequence
  Description of Artificial Sequence: Synthetic oligonucleotide
cuggugauuccuggcucac

SEQ ID NO: 1676264 - RNA, 19 nt, Artificial Sequence
  Description of Artificial Sequence: Synthetic oligonucleotide
gcucgauuguagcgguagc

SEQ ID NO: 1676265 - RNA, 19 nt, Artificial Sequence
  Description of Artificial Sequence: Synthetic oligonucleotide
guggacaagagaacauagu

SEQ ID NO: 1676266 - RNA, 19 nt, Artificial Sequence
  Description of Artificial Sequence: Synthetic oligonucleotide
ccaacgugccacaucguga

SEQ ID NO: 1676267 - RNA, 19 nt, Artificial Sequence
  Description of Artificial Sequence: Synthetic oligonucleotide
cgauaacacaauccaccag

SEQ ID NO: 1676268 - RNA, 19 nt, Artificial Sequence
  Description of Artificial Sequence: Synthetic oligonucleotide
uggguacaccaaucaccau

SEQ ID NO: 1676269 - RNA, 19 nt, Artificial Sequence
  Description of Artificial Sequence: Synthetic oligonucleotide
cacccacucuaugugguca

SEQ ID NO: 1676270 - RNA, 19 nt, Artificial Sequence
  Description of Artificial Sequence: Synthetic oligonucleotide
ggauagggaaacaguucca

SEQ ID NO: 1676271 - RNA, 19 nt, Artificial Sequence
  Description of Artificial Sequence: Synthetic oligonucleotide
ugcggaagguccggaggaa

SEQ ID NO: 1676272 - RNA, 19 nt, Artificial Sequence
  Description of Artificial Sequence: Synthetic oligonucleotide
aaccaacgugccacaucgu

SEQ ID NO: 1676273 - RNA, 19 nt, Artificial Sequence
  Description of Artificial Sequence: Synthetic oligonucleotide
auagugcccuuuggagcug

SEQ ID NO: 1676274 - RNA, 19 nt, Artificial Sequence
  Description of Artificial Sequence: Synthetic oligonucleotide
uucaggccuuuuccuucua

SEQ ID NO: 1676275 - RNA, 19 nt, Artificial Sequence
  Description of Artificial Sequence: Synthetic oligonucleotide
caguggacgcucgcacacc

SEQ ID NO: 1676276 - RNA, 19 nt, Artificial Sequence
  Description of Artificial Sequence: Synthetic oligonucleotide
cucgauuguagcgguagcu

SEQ ID NO: 1676277 - RNA, 19 nt, Artificial Sequence
  Description of Artificial Sequence: Synthetic oligonucleotide
cuacguuggguacaccaau

SEQ ID NO: 1676278 - RNA, 19 nt, Artificial Sequence
  Description of Artificial Sequence: Synthetic oligonucleotide
ggacaagcaaaugaggcuu

SEQ ID NO: 1676279 - RNA, 19 nt, Artificial Sequence
  Description of Artificial Sequence: Synthetic oligonucleotide
guaaucagccauggucucu

SEQ ID NO: 1676280 - RNA, 19 nt, Artificial Sequence
  Description of Artificial Sequence: Synthetic oligonucleotide
ggcaccccaugccugcggc

SEQ ID NO: 1676281 - RNA, 19 nt, Artificial Sequence
  Description of Artificial Sequence: Synthetic oligonucleotide
cguuggguacaccaaucac

SEQ ID NO: 1676282 - RNA, 19 nt, Artificial Sequence
  Description of Artificial Sequence: Synthetic oligonucleotide
gcgguagcuguacuugauc

SEQ ID NO: 1676283 - RNA, 19 nt, Artificial Sequence
  Description of Artificial Sequence: Synthetic oligonucleotide
ccucuuagauagcaguaaa

SEQ ID NO: 1676284 - RNA, 19 nt, Artificial Sequence
  Description of Artificial Sequence: Synthetic oligonucleotide
cagagaguuucgaccugaa

SEQ ID NO: 1676285 - RNA, 19 nt, Artificial Sequence
  Description of Artificial Sequence: Synthetic oligonucleotide
cuccugaccaagccauuua

SEQ ID NO: 1676286 - RNA, 19 nt, Artificial Sequence
  Description of Artificial Sequence: Synthetic oligonucleotide
cucgcacaccuggauucug

SEQ ID NO: 1676287 - RNA, 19 nt, Artificial Sequence
  Description of Artificial Sequence: Synthetic oligonucleotide
cgccaagcggccccgacgg

SEQ ID NO: 1676288 - RNA, 19 nt, Artificial Sequence
  Description of Artificial Sequence: Synthetic oligonucleotide
gauccgccaaauccauuuu

SEQ ID NO: 1676289 - RNA, 19 nt, Artificial Sequence
  Description of Artificial Sequence: Synthetic oligonucleotide
agcaccccgggaguaucca

SEQ ID NO: 1676290 - RNA, 19 nt, Artificial Sequence
  Description of Artificial Sequence: Synthetic oligonucleotide
gacgcucgcacaccuggau

SEQ ID NO: 1676291 - RNA, 19 nt, Artificial Sequence
  Description of Artificial Sequence: Synthetic oligonucleotide
aaggacugaccaggcucua

SEQ ID NO: 1676292 - RNA, 19 nt, Artificial Sequence
  Description of Artificial Sequence: Synthetic oligonucleotide
ccuacguuggguacaccaa

SEQ ID NO: 1676293 - RNA, 19 nt, Artificial Sequence
  Description of Artificial Sequence: Synthetic oligonucleotide
acggcaccccaugccugcg

SEQ ID NO: 1676294 - RNA, 19 nt, Artificial Sequence
  Description of Artificial Sequence: Synthetic oligonucleotide
agggaagcacucgcgccaa

SEQ ID NO: 1676295 - RNA, 19 nt, Artificial Sequence
  Description of Artificial Sequence: Synthetic oligonucleotide
cgcucgcacaccuggauuc

SEQ ID NO: 1676296 - RNA, 19 nt, Artificial Sequence
  Description of Artificial Sequence: Synthetic oligonucleotide
gugccacaucgugaccuug

SEQ ID NO: 1676297 - RNA, 19 nt, Artificial Sequence
  Description of Artificial Sequence: Synthetic oligonucleotide
cccgacggcaccccaugcc

SEQ ID NO: 1676298 - RNA, 19 nt, Artificial Sequence
  Description of Artificial Sequence: Synthetic oligonucleotide
gcggaagguccggaggaag

SEQ ID NO: 1676299 - RNA, 19 nt, Artificial Sequence
  Description of Artificial Sequence: Synthetic oligonucleotide
cauguggccggggaaccaa

SEQ ID NO: 1676300 - RNA, 19 nt, Artificial Sequence
  Description of Artificial Sequence: Synthetic oligonucleotide
cgucaguggacgcucgcac

SEQ ID NO: 1676301 - RNA, 19 nt, Artificial Sequence
  Description of Artificial Sequence: Synthetic oligonucleotide
gcaccccgggaguauccag

SEQ ID NO: 1676302 - RNA, 19 nt, Artificial Sequence
  Description of Artificial Sequence: Synthetic oligonucleotide
cacagcucuggugauuccu

SEQ ID NO: 1676303 - RNA, 19 nt, Artificial Sequence
  Description of Artificial Sequence: Synthetic oligonucleotide
cugccgucucagcgaguug

SEQ ID NO: 1676304 - RNA, 19 nt, Artificial Sequence
  Description of Artificial Sequence: Synthetic oligonucleotide
ccgcaaacaggaauaagau

SEQ ID NO: 1676305 - RNA, 19 nt, Artificial Sequence
  Description of Artificial Sequence: Synthetic oligonucleotide
ugcugccgucucagcgagu

SEQ ID NO: 1676306 - RNA, 19 nt, Artificial Sequence
  Description of Artificial Sequence: Synthetic oligonucleotide
acguacccaaauagcccau

SEQ ID NO: 1676307 - RNA, 19 nt, Artificial Sequence
  Description of Artificial Sequence: Synthetic oligonucleotide
guggacgcucgcacaccug

SEQ ID NO: 1676308 - RNA, 19 nt, Artificial Sequence
  Description of Artificial Sequence: Synthetic oligonucleotide
ugccuacguuggguacacc

SEQ ID NO: 1676309 - RNA, 19 nt, Artificial Sequence
  Description of Artificial Sequence: Synthetic oligonucleotide
cgucaugaaccucgauaac

SEQ ID NO: 1676310 - RNA, 19 nt, Artificial Sequence
  Description of Artificial Sequence: Synthetic oligonucleotide
gccugugagcacuuucacu

SEQ ID NO: 1676311 - RNA, 19 nt, Artificial Sequence
  Description of Artificial Sequence: Synthetic oligonucleotide
cacucgcgccaagcggccc

SEQ ID NO: 1676312 - RNA, 19 nt, Artificial Sequence
  Description of Artificial Sequence: Synthetic oligonucleotide
ggagguaaucagccauggu

SEQ ID NO: 1676313 - RNA, 19 nt, Artificial Sequence
  Description of Artificial Sequence: Synthetic oligonucleotide
gggaagcacucgcgccaag

SEQ ID NO: 1676314 - RNA, 19 nt, Artificial Sequence
  Description of Artificial Sequence: Synthetic oligonucleotide
gccccgacggcaccccaug

SEQ ID NO: 1676315 - RNA, 19 nt, Artificial Sequence
  Description of Artificial Sequence: Synthetic oligonucleotide
acccacucugguagcuuuu

SEQ ID NO: 1676316 - RNA, 19 nt, Artificial Sequence
  Description of Artificial Sequence: Synthetic oligonucleotide
cguacccaaauagcccaug

SEQ ID NO: 1676317 - RNA, 19 nt, Artificial Sequence
  Description of Artificial Sequence: Synthetic oligonucleotide
gcacucgcgccaagcggcc

SEQ ID NO: 1676318 - RNA, 19 nt, Artificial Sequence
  Description of Artificial Sequence: Synthetic oligonucleotide
cugcucgauuguagcggua

SEQ ID NO: 1676319 - RNA, 19 nt, Artificial Sequence
  Description of Artificial Sequence: Synthetic oligonucleotide
gugguccagcacaguucca

SEQ ID NO: 1676320 - RNA, 19 nt, Artificial Sequence
  Description of Artificial Sequence: Synthetic oligonucleotide
ccaagcggccccgacggca

SEQ ID NO: 1676321 - RNA, 19 nt, Artificial Sequence
  Description of Artificial Sequence: Synthetic oligonucleotide
ccggaggaagucucgggcu

SEQ ID NO: 1676322 - RNA, 19 nt, Artificial Sequence
  Description of Artificial Sequence: Synthetic oligonucleotide
cgacggcaccccaugccug

SEQ ID NO: 1676323 - RNA, 19 nt, Artificial Sequence
  Description of Artificial Sequence: Synthetic oligonucleotide
ggccauaguguugcacgua

SEQ ID NO: 1676324 - RNA, 19 nt, Artificial Sequence
  Description of Artificial Sequence: Synthetic oligonucleotide
ggacgcucgcacaccugga

SEQ ID NO: 1676325 - RNA, 19 nt, Artificial Sequence
  Description of Artificial Sequence: Synthetic oligonucleotide
gccugagucucagguacua

SEQ ID NO: 1676326 - RNA, 19 nt, Artificial Sequence
  Description of Artificial Sequence: Synthetic oligonucleotide
gcugccgucucagcgaguu

SEQ ID NO: 1676327 - RNA, 19 nt, Artificial Sequence
  Description of Artificial Sequence: Synthetic oligonucleotide
ccccgacggcaccccaugc

SEQ ID NO: 1676328 - RNA, 19 nt, Artificial Sequence
  Description of Artificial Sequence: Synthetic oligonucleotide
gccaagcggccccgacggc

SEQ ID NO: 1676329 - RNA, 19 nt, Artificial Sequence
  Description of Artificial Sequence: Synthetic oligonucleotide
gcaguuccauggaguaugu

SEQ ID NO: 1676330 - RNA, 19 nt, Artificial Sequence
  Description of Artificial Sequence: Synthetic oligonucleotide
gggauccgggcgucaugaa

SEQ ID NO: 1676331 - RNA, 19 nt, Artificial Sequence
  Description of Artificial Sequence: Synthetic oligonucleotide
ccugagucucagguacuaa

SEQ ID NO: 1676332 - RNA, 19 nt, Artificial Sequence
  Description of Artificial Sequence: Synthetic oligonucleotide
ccgacggcaccccaugccu

SEQ ID NO: 1676333 - RNA, 19 nt, Artificial Sequence
  Description of Artificial Sequence: Synthetic oligonucleotide
ucgcgccaagcggccccga

SEQ ID NO: 1676334 - RNA, 19 nt, Artificial Sequence
  Description of Artificial Sequence: Synthetic oligonucleotide
gcucgcacaccuggauucu

SEQ ID NO: 1676335 - RNA, 19 nt, Artificial Sequence
  Description of Artificial Sequence: Synthetic oligonucleotide
ccgccaaauccauuuuguu

SEQ ID NO: 1676336 - RNA, 19 nt, Artificial Sequence
  Description of Artificial Sequence: Synthetic oligonucleotide
gggaaccaacgugccacau

SEQ ID NO: 1676337 - RNA, 19 nt, Artificial Sequence
  Description of Artificial Sequence: Synthetic oligonucleotide
cgaguugaugagagaggau

SEQ ID NO: 1676338 - RNA, 19 nt, Artificial Sequence
  Description of Artificial Sequence: Synthetic oligonucleotide
cgggcgucaugaaccucga

SEQ ID NO: 1676339 - RNA, 19 nt, Artificial Sequence
  Description of Artificial Sequence: Synthetic oligonucleotide
ccccgggaguauccagcaa

SEQ ID NO: 1676340 - RNA, 19 nt, Artificial Sequence
  Description of Artificial Sequence: Synthetic oligonucleotide
gccagcaccccgggaguau

SEQ ID NO: 1676341 - RNA, 19 nt, Artificial Sequence
  Description of Artificial Sequence: Synthetic oligonucleotide
uccauugaaacccugauac

SEQ ID NO: 1676342 - RNA, 19 nt, Artificial Sequence
  Description of Artificial Sequence: Synthetic oligonucleotide
uuuacugccaccauuuucu

SEQ ID NO: 1676343 - RNA, 19 nt, Artificial Sequence
  Description of Artificial Sequence: Synthetic oligonucleotide
uuugaaauggcucgaagga

SEQ ID NO: 1676344 - RNA, 19 nt, Artificial Sequence
  Description of Artificial Sequence: Synthetic oligonucleotide
accacaaauaggaagaagc

SEQ ID NO: 1676345 - RNA, 19 nt, Artificial Sequence
  Description of Artificial Sequence: Synthetic oligonucleotide
aaaagcgauugccuuuucc

SEQ ID NO: 1676346 - RNA, 19 nt, Artificial Sequence
  Description of Artificial Sequence: Synthetic oligonucleotide
aaggguaggaagcuacagc

SEQ ID NO: 1676347 - RNA, 19 nt, Artificial Sequence
  Description of Artificial Sequence: Synthetic oligonucleotide
acaaauaggaagaagcgac

SEQ ID NO: 1676348 - RNA, 19 nt, Artificial Sequence
  Description of Artificial Sequence: Synthetic oligonucleotide
aauaggaagaagcgacaac

SEQ ID NO: 1676349 - RNA, 19 nt, Artificial Sequence
  Description of Artificial Sequence: Synthetic oligonucleotide
auacuuuaagucaucaacc

SEQ ID NO: 1676350 - RNA, 19 nt, Artificial Sequence
  Description of Artificial Sequence: Synthetic oligonucleotide
uugcauuugaaauggcucg

SEQ ID NO: 1676351 - RNA, 19 nt, Artificial Sequence
  Description of Artificial Sequence: Synthetic oligonucleotide
ucuaguucauacuuuaagu

SEQ ID NO: 1676352 - RNA, 19 nt, Artificial Sequence
  Description of Artificial Sequence: Synthetic oligonucleotide
uucguagugaacuaucccc

SEQ ID NO: 1676353 - RNA, 19 nt, Artificial Sequence
  Description of Artificial Sequence: Synthetic oligonucleotide
ucuccgaugauccacaaaa

SEQ ID NO: 1676354 - RNA, 19 nt, Artificial Sequence
  Description of Artificial Sequence: Synthetic oligonucleotide
agagaucuaccacaaauag

SEQ ID NO: 1676355 - RNA, 19 nt, Artificial Sequence
  Description of Artificial Sequence: Synthetic oligonucleotide
ugaacuauccccacaugag

SEQ ID NO: 1676356 - RNA, 19 nt, Artificial Sequence
  Description of Artificial Sequence: Synthetic oligonucleotide
agaucuaccacaaauagga

SEQ ID NO: 1676357 - RNA, 19 nt, Artificial Sequence
  Description of Artificial Sequence: Synthetic oligonucleotide
gaagcgacaacgcucaaug

SEQ ID NO: 1676358 - RNA, 19 nt, Artificial Sequence
  Description of Artificial Sequence: Synthetic oligonucleotide
cuuauuugcaauaaucaca

SEQ ID NO: 1676359 - RNA, 19 nt, Artificial Sequence
  Description of Artificial Sequence: Synthetic oligonucleotide
ugcaauaaucacaugggac

SEQ ID NO: 1676360 - RNA, 19 nt, Artificial Sequence
  Description of Artificial Sequence: Synthetic oligonucleotide
uuuuauaacagguuugcuu

SEQ ID NO: 1676361 - RNA, 19 nt, Artificial Sequence
  Description of Artificial Sequence: Synthetic oligonucleotide
acugggacaagacugagga

SEQ ID NO: 1676362 - RNA, 19 nt, Artificial Sequence
  Description of Artificial Sequence: Synthetic oligonucleotide
gugaaagcagcucaugccg

SEQ ID NO: 1676363 - RNA, 19 nt, Artificial Sequence
  Description of Artificial Sequence: Synthetic oligonucleotide
agcgauugccuuuuccucc

SEQ ID NO: 1676364 - RNA, 19 nt, Artificial Sequence
  Description of Artificial Sequence: Synthetic oligonucleotide
caugggaccucucagacag

SEQ ID NO: 1676365 - RNA, 19 nt, Artificial Sequence
  Description of Artificial Sequence: Synthetic oligonucleotide
aucuaccacaaauaggaag

SEQ ID NO: 1676366 - RNA, 19 nt, Artificial Sequence
  Description of Artificial Sequence: Synthetic oligonucleotide
gaacuauccccacaugagg

SEQ ID NO: 1676367 - RNA, 19 nt, Artificial Sequence
  Description of Artificial Sequence: Synthetic oligonucleotide
uuuaagucaucaaccugag

SEQ ID NO: 1676368 - RNA, 19 nt, Artificial Sequence
  Description of Artificial Sequence: Synthetic oligonucleotide
aaccaucccagcaugggcc

SEQ ID NO: 1676369 - RNA, 19 nt, Artificial Sequence
  Description of Artificial Sequence: Synthetic oligonucleotide
gcaauaaucacaugggacc

SEQ ID NO: 1676370 - RNA, 19 nt, Artificial Sequence
  Description of Artificial Sequence: Synthetic oligonucleotide
uccacaaaaugucuuuuca

SEQ ID NO: 1676371 - RNA, 19 nt, Artificial Sequence
  Description of Artificial Sequence: Synthetic oligonucleotide
cuuggcguggccuacaaug

SEQ ID NO: 1676372 - RNA, 19 nt, Artificial Sequence
  Description of Artificial Sequence: Synthetic oligonucleotide
uccugcaccucccagugcg

SEQ ID NO: 1676373 - RNA, 19 nt, Artificial Sequence
  Description of Artificial Sequence: Synthetic oligonucleotide
aagcgauugccuuuuccuc

SEQ ID NO: 1676374 - RNA, 19 nt, Artificial Sequence
  Description of Artificial Sequence: Synthetic oligonucleotide
uccgaugauccacaaaaug

SEQ ID NO: 1676375 - RNA, 19 nt, Artificial Sequence
  Description of Artificial Sequence: Synthetic oligonucleotide
aauggcucgaaggagagaa

SEQ ID NO: 1676376 - RNA, 19 nt, Artificial Sequence
  Description of Artificial Sequence: Synthetic oligonucleotide
uacuuuaagucaucaaccu

SEQ ID NO: 1676377 - RNA, 19 nt, Artificial Sequence
  Description of Artificial Sequence: Synthetic oligonucleotide
ggauagaucagccacaauc

SEQ ID NO: 1676378 - RNA, 19 nt, Artificial Sequence
  Description of Artificial Sequence: Synthetic oligonucleotide
cuuugaaacacccaacaca

SEQ ID NO: 1676379 - RNA, 19 nt, Artificial Sequence
  Description of Artificial Sequence: Synthetic oligonucleotide
uugucauuggccaggaaaa

SEQ ID NO: 1676380 - RNA, 19 nt, Artificial Sequence
  Description of Artificial Sequence: Synthetic oligonucleotide
uagaucagccacaaucuca

SEQ ID NO: 1676381 - RNA, 19 nt, Artificial Sequence
  Description of Artificial Sequence: Synthetic oligonucleotide
aggguaggaagcuacagca

SEQ ID NO: 1676382 - RNA, 19 nt, Artificial Sequence
  Description of Artificial Sequence: Synthetic oligonucleotide
cucuaguucauacuuuaag

SEQ ID NO: 1676383 - RNA, 19 nt, Artificial Sequence
  Description of Artificial Sequence: Synthetic oligonucleotide
uugaaacccugauacuggg

SEQ ID NO: 1676384 - RNA, 19 nt, Artificial Sequence
  Description of Artificial Sequence: Synthetic oligonucleotide
ucaaccugaguccacggcu

SEQ ID NO: 1676385 - RNA, 19 nt, Artificial Sequence
  Description of Artificial Sequence: Synthetic oligonucleotide
caauguacucaucuccugg

SEQ ID NO: 1676386 - RNA, 19 nt, Artificial Sequence
  Description of Artificial Sequence: Synthetic oligonucleotide
gaagauuucccagcauugg

SEQ ID NO: 1676387 - RNA, 19 nt, Artificial Sequence
  Description of Artificial Sequence: Synthetic oligonucleotide
aggacaaggacuucacuug

SEQ ID NO: 1676388 - RNA, 19 nt, Artificial Sequence
  Description of Artificial Sequence: Synthetic oligonucleotide
cauugaaacccugauacug

SEQ ID NO: 1676389 - RNA, 19 nt, Artificial Sequence
  Description of Artificial Sequence: Synthetic oligonucleotide
uugcaauaaucacauggga

SEQ ID NO: 1676390 - RNA, 19 nt, Artificial Sequence
  Description of Artificial Sequence: Synthetic oligonucleotide
gagaucuaccacaaauagg

SEQ ID NO: 1676391 - RNA, 19 nt, Artificial Sequence
  Description of Artificial Sequence: Synthetic oligonucleotide
auugaaacccugauacugg

SEQ ID NO: 1676392 - RNA, 19 nt, Artificial Sequence
  Description of Artificial Sequence: Synthetic oligonucleotide
aucaaccugaguccacggc

SEQ ID NO: 1676393 - RNA, 19 nt, Artificial Sequence
  Description of Artificial Sequence: Synthetic oligonucleotide
agaucagccacaaucucac

SEQ ID NO: 1676394 - RNA, 19 nt, Artificial Sequence
  Description of Artificial Sequence: Synthetic oligonucleotide
auagaucagccacaaucuc

SEQ ID NO: 1676395 - RNA, 19 nt, Artificial Sequence
  Description of Artificial Sequence: Synthetic oligonucleotide
ugcggcaauguacucaucu

SEQ ID NO: 1676396 - RNA, 19 nt, Artificial Sequence
  Description of Artificial Sequence: Synthetic oligonucleotide
gagcaaucuagaugaagcc

SEQ ID NO: 1676397 - RNA, 19 nt, Artificial Sequence
  Description of Artificial Sequence: Synthetic oligonucleotide
agcgacaacgcucaaugug

SEQ ID NO: 1676398 - RNA, 19 nt, Artificial Sequence
  Description of Artificial Sequence: Synthetic oligonucleotide
ucguagugaacuaucccca

SEQ ID NO: 1676399 - RNA, 19 nt, Artificial Sequence
  Description of Artificial Sequence: Synthetic oligonucleotide
aaaggguaggaagcuacag

SEQ ID NO: 1676400 - RNA, 19 nt, Artificial Sequence
  Description of Artificial Sequence: Synthetic oligonucleotide
ucaaugugccugaggaagc

SEQ ID NO: 1676401 - RNA, 19 nt, Artificial Sequence
  Description of Artificial Sequence: Synthetic oligonucleotide
uaggaagaagcgacaacgc

SEQ ID NO: 1676402 - RNA, 19 nt, Artificial Sequence
  Description of Artificial Sequence: Synthetic oligonucleotide
caguacucuccgaugaucc

SEQ ID NO: 1676403 - RNA, 19 nt, Artificial Sequence
  Description of Artificial Sequence: Synthetic oligonucleotide
aauaaucacaugggaccuc

SEQ ID NO: 1676404 - RNA, 19 nt, Artificial Sequence
  Description of Artificial Sequence: Synthetic oligonucleotide
uggucaacucucaggauga

SEQ ID NO: 1676405 - RNA, 19 nt, Artificial Sequence
  Description of Artificial Sequence: Synthetic oligonucleotide
agcacacuuugaaacaccc

SEQ ID NO: 1676406 - RNA, 19 nt, Artificial Sequence
  Description of Artificial Sequence: Synthetic oligonucleotide
cccucuuucaccaagguac

SEQ ID NO: 1676407 - RNA, 19 nt, Artificial Sequence
  Description of Artificial Sequence: Synthetic oligonucleotide
uugaaauggcucgaaggag

SEQ ID NO: 1676408 - RNA, 19 nt, Artificial Sequence
  Description of Artificial Sequence: Synthetic oligonucleotide
gaaggagagaagauuuccc

SEQ ID NO: 1676409 - RNA, 19 nt, Artificial Sequence
  Description of Artificial Sequence: Synthetic oligonucleotide
aaauaggaagaagcgacaa

SEQ ID NO: 1676410 - RNA, 19 nt, Artificial Sequence
  Description of Artificial Sequence: Synthetic oligonucleotide
uucagguguagaagcagcu

SEQ ID NO: 1676411 - RNA, 19 nt, Artificial Sequence
  Description of Artificial Sequence: Synthetic oligonucleotide
caaggagagaucuaccaca

SEQ ID NO: 1676412 - RNA, 19 nt, Artificial Sequence
  Description of Artificial Sequence: Synthetic oligonucleotide
gugaacuauccccacauga

SEQ ID NO: 1676413 - RNA, 19 nt, Artificial Sequence
  Description of Artificial Sequence: Synthetic oligonucleotide
gaagccaaccaucccagca

SEQ ID NO: 1676414 - RNA, 19 nt, Artificial Sequence
  Description of Artificial Sequence: Synthetic oligonucleotide
gaggacccgcuccugaccg

SEQ ID NO: 1676415 - RNA, 19 nt, Artificial Sequence
  Description of Artificial Sequence: Synthetic oligonucleotide
uguagaggguggcaccacc

SEQ ID NO: 1676416 - RNA, 19 nt, Artificial Sequence
  Description of Artificial Sequence: Synthetic oligonucleotide
ucaccucccucuuucacca

SEQ ID NO: 1676417 - RNA, 19 nt, Artificial Sequence
  Description of Artificial Sequence: Synthetic oligonucleotide
ggugggauagaucagccac

SEQ ID NO: 1676418 - RNA, 19 nt, Artificial Sequence
  Description of Artificial Sequence: Synthetic oligonucleotide
acuaccaccugagaggcug

SEQ ID NO: 1676419 - RNA, 19 nt, Artificial Sequence
  Description of Artificial Sequence: Synthetic oligonucleotide
uuggcguggccuacaaugc

SEQ ID NO: 1676420 - RNA, 19 nt, Artificial Sequence
  Description of Artificial Sequence: Synthetic oligonucleotide
agaggacccgcuccugacc

SEQ ID NO: 1676421 - RNA, 19 nt, Artificial Sequence
  Description of Artificial Sequence: Synthetic oligonucleotide
ucauacuuuaagucaucaa

SEQ ID NO: 1676422 - RNA, 19 nt, Artificial Sequence
  Description of Artificial Sequence: Synthetic oligonucleotide
aagccaaccaucccagcau

SEQ ID NO: 1676423 - RNA, 19 nt, Artificial Sequence
  Description of Artificial Sequence: Synthetic oligonucleotide
caaucuagaugaagccugc

SEQ ID NO: 1676424 - RNA, 19 nt, Artificial Sequence
  Description of Artificial Sequence: Synthetic oligonucleotide
ggagaucaaucuuauuugc

SEQ ID NO: 1676425 - RNA, 19 nt, Artificial Sequence
  Description of Artificial Sequence: Synthetic oligonucleotide
ccacaaauaggaagaagcg

SEQ ID NO: 1676426 - RNA, 19 nt, Artificial Sequence
  Description of Artificial Sequence: Synthetic oligonucleotide
cucaccucccucuuucacc

SEQ ID NO: 1676427 - RNA, 19 nt, Artificial Sequence
  Description of Artificial Sequence: Synthetic oligonucleotide
cagugaauggagcuggcug

SEQ ID NO: 1676428 - RNA, 19 nt, Artificial Sequence
  Description of Artificial Sequence: Synthetic oligonucleotide
gauagaucagccacaaucu

SEQ ID NO: 1676429 - RNA, 19 nt, Artificial Sequence
  Description of Artificial Sequence: Synthetic oligonucleotide
ucacaugggaccucucaga

SEQ ID NO: 1676430 - RNA, 19 nt, Artificial Sequence
  Description of Artificial Sequence: Synthetic oligonucleotide
uguucuggugugcgccucg

SEQ ID NO: 1676431 - RNA, 19 nt, Artificial Sequence
  Description of Artificial Sequence: Synthetic oligonucleotide
cacacuuugaaacacccaa

SEQ ID NO: 1676432 - RNA, 19 nt, Artificial Sequence
  Description of Artificial Sequence: Synthetic oligonucleotide
uccauucccuccacggacc

SEQ ID NO: 1676433 - RNA, 19 nt, Artificial Sequence
  Description of Artificial Sequence: Synthetic oligonucleotide
gagagcaaucuagaugaag

SEQ ID NO: 1676434 - RNA, 19 nt, Artificial Sequence
  Description of Artificial Sequence: Synthetic oligonucleotide
gaguccacggcucaggcaa

SEQ ID NO: 1676435 - RNA, 19 nt, Artificial Sequence
  Description of Artificial Sequence: Synthetic oligonucleotide
uggugugcgccucggauga

SEQ ID NO: 1676436 - RNA, 19 nt, Artificial Sequence
  Description of Artificial Sequence: Synthetic oligonucleotide
ugugcgccucggaugaugc

SEQ ID NO: 1676437 - RNA, 19 nt, Artificial Sequence
  Description of Artificial Sequence: Synthetic oligonucleotide
gugggcgucaugcagcacc

SEQ ID NO: 1676438 - RNA, 19 nt, Artificial Sequence
  Description of Artificial Sequence: Synthetic oligonucleotide
agcaaucuagaugaagccu

SEQ ID NO: 1676439 - RNA, 19 nt, Artificial Sequence
  Description of Artificial Sequence: Synthetic oligonucleotide
gaccaguacucuccgauga

SEQ ID NO: 1676440 - RNA, 19 nt, Artificial Sequence
  Description of Artificial Sequence: Synthetic oligonucleotide
agugaaggaccuugccaag

SEQ ID NO: 1676441 - RNA, 19 nt, Artificial Sequence
  Description of Artificial Sequence: Synthetic oligonucleotide
cucaggaugauguguccac

SEQ ID NO: 1676442 - RNA, 19 nt, Artificial Sequence
  Description of Artificial Sequence: Synthetic oligonucleotide
ucccaugcuggcacagggg

SEQ ID NO: 1676443 - RNA, 19 nt, Artificial Sequence
  Description of Artificial Sequence: Synthetic oligonucleotide
caggggugcaaguuacagg

SEQ ID NO: 1676444 - RNA, 19 nt, Artificial Sequence
  Description of Artificial Sequence: Synthetic oligonucleotide
aacccugauacugggacaa

SEQ ID NO: 1676445 - RNA, 19 nt, Artificial Sequence
  Description of Artificial Sequence: Synthetic oligonucleotide
ucgaaggagagaagauuuc

SEQ ID NO: 1676446 - RNA, 19 nt, Artificial Sequence
  Description of Artificial Sequence: Synthetic oligonucleotide
acugaggacaaggacuuca

SEQ ID NO: 1676447 - RNA, 19 nt, Artificial Sequence
  Description of Artificial Sequence: Synthetic oligonucleotide
cacaugggaccucucagac

SEQ ID NO: 1676448 - RNA, 19 nt, Artificial Sequence
  Description of Artificial Sequence: Synthetic oligonucleotide
agccaagucugguagguau

SEQ ID NO: 1676449 - RNA, 19 nt, Artificial Sequence
  Description of Artificial Sequence: Synthetic oligonucleotide
uucgggagaucaaucuuau

SEQ ID NO: 1676450 - RNA, 19 nt, Artificial Sequence
  Description of Artificial Sequence: Synthetic oligonucleotide
cugcagugaauggagcugg

SEQ ID NO: 1676451 - RNA, 19 nt, Artificial Sequence
  Description of Artificial Sequence: Synthetic oligonucleotide
caaccaucccagcaugggc

SEQ ID NO: 1676452 - RNA, 19 nt, Artificial Sequence
  Description of Artificial Sequence: Synthetic oligonucleotide
cuuuccggaggccucccgg

SEQ ID NO: 1676453 - RNA, 19 nt, Artificial Sequence
  Description of Artificial Sequence: Synthetic oligonucleotide
caaggcaaugaccuccuuc

SEQ ID NO: 1676454 - RNA, 19 nt, Artificial Sequence
  Description of Artificial Sequence: Synthetic oligonucleotide
uuaagucaucaaccugagu

SEQ ID NO: 1676455 - RNA, 19 nt, Artificial Sequence
  Description of Artificial Sequence: Synthetic oligonucleotide
acuauccccacaugagggu

SEQ ID NO: 1676456 - RNA, 19 nt, Artificial Sequence
  Description of Artificial Sequence: Synthetic oligonucleotide
agacaggccuuugucguac

SEQ ID NO: 1676457 - RNA, 19 nt, Artificial Sequence
  Description of Artificial Sequence: Synthetic oligonucleotide
ugcauuugaaauggcucga

SEQ ID NO: 1676458 - RNA, 19 nt, Artificial Sequence
  Description of Artificial Sequence: Synthetic oligonucleotide
agguucucuccagucagcg

SEQ ID NO: 1676459 - RNA, 19 nt, Artificial Sequence
  Description of Artificial Sequence: Synthetic oligonucleotide
gcaaucuagaugaagccug

SEQ ID NO: 1676460 - RNA, 19 nt, Artificial Sequence
  Description of Artificial Sequence: Synthetic oligonucleotide
ugcaaguuacaggggcacg

SEQ ID NO: 1676461 - RNA, 19 nt, Artificial Sequence
  Description of Artificial Sequence: Synthetic oligonucleotide
uauuugcaauaaucacaug

SEQ ID NO: 1676462 - RNA, 19 nt, Artificial Sequence
  Description of Artificial Sequence: Synthetic oligonucleotide
aggggcacgguugucauug

SEQ ID NO: 1676463 - RNA, 19 nt, Artificial Sequence
  Description of Artificial Sequence: Synthetic oligonucleotide
uggcucgaaggagagaaga

SEQ ID NO: 1676464 - RNA, 19 nt, Artificial Sequence
  Description of Artificial Sequence: Synthetic oligonucleotide
uacagcagguuuugcauuu

SEQ ID NO: 1676465 - RNA, 19 nt, Artificial Sequence
  Description of Artificial Sequence: Synthetic oligonucleotide
cacgugggcgucaugcagc

SEQ ID NO: 1676466 - RNA, 19 nt, Artificial Sequence
  Description of Artificial Sequence: Synthetic oligonucleotide
augauguguccaccgucuc

SEQ ID NO: 1676467 - RNA, 19 nt, Artificial Sequence
  Description of Artificial Sequence: Synthetic oligonucleotide
cuugcuggucaacucucag

SEQ ID NO: 1676468 - RNA, 19 nt, Artificial Sequence
  Description of Artificial Sequence: Synthetic oligonucleotide
agugaacuauccccacaug

SEQ ID NO: 1676469 - RNA, 19 nt, Artificial Sequence
  Description of Artificial Sequence: Synthetic oligonucleotide
gaccuugccaagccaaguc

SEQ ID NO: 1676470 - RNA, 19 nt, Artificial Sequence
  Description of Artificial Sequence: Synthetic oligonucleotide
ugcgccucggaugaugccc

SEQ ID NO: 1676471 - RNA, 19 nt, Artificial Sequence
  Description of Artificial Sequence: Synthetic oligonucleotide
uguugguggccuucguagu

SEQ ID NO: 1676472 - RNA, 19 nt, Artificial Sequence
  Description of Artificial Sequence: Synthetic oligonucleotide
uggauggagcacacuuuga

SEQ ID NO: 1676473 - RNA, 19 nt, Artificial Sequence
  Description of Artificial Sequence: Synthetic oligonucleotide
augccggagccuccauucc

SEQ ID NO: 1676474 - RNA, 19 nt, Artificial Sequence
  Description of Artificial Sequence: Synthetic oligonucleotide
gagaagauuucccagcauu

SEQ ID NO: 1676475 - RNA, 19 nt, Artificial Sequence
  Description of Artificial Sequence: Synthetic oligonucleotide
gagagaucuaccacaaaua

SEQ ID NO: 1676476 - RNA, 19 nt, Artificial Sequence
  Description of Artificial Sequence: Synthetic oligonucleotide
ucuuuccggaggccucccg

SEQ ID NO: 1676477 - RNA, 19 nt, Artificial Sequence
  Description of Artificial Sequence: Synthetic oligonucleotide
cuacaaugcccagggagag

SEQ ID NO: 1676478 - RNA, 19 nt, Artificial Sequence
  Description of Artificial Sequence: Synthetic oligonucleotide
gccaagccaagucugguag

SEQ ID NO: 1676479 - RNA, 19 nt, Artificial Sequence
  Description of Artificial Sequence: Synthetic oligonucleotide
aaucuagaugaagccugca

SEQ ID NO: 1676480 - RNA, 19 nt, Artificial Sequence
  Description of Artificial Sequence: Synthetic oligonucleotide
uugaaacacccaacacagu

SEQ ID NO: 1676481 - RNA, 19 nt, Artificial Sequence
  Description of Artificial Sequence: Synthetic oligonucleotide
aguacucuccgaugaucca

SEQ ID NO: 1676482 - RNA, 19 nt, Artificial Sequence
  Description of Artificial Sequence: Synthetic oligonucleotide
ugccggagccuccauuccc

SEQ ID NO: 1676483 - RNA, 19 nt, Artificial Sequence
  Description of Artificial Sequence: Synthetic oligonucleotide
uggcguggccuacaaugcc

SEQ ID NO: 1676484 - RNA, 19 nt, Artificial Sequence
  Description of Artificial Sequence: Synthetic oligonucleotide
accucccucuuucaccaag

SEQ ID NO: 1676485 - RNA, 19 nt, Artificial Sequence
  Description of Artificial Sequence: Synthetic oligonucleotide
gguacccacaggaaccugg

SEQ ID NO: 1676486 - RNA, 19 nt, Artificial Sequence
  Description of Artificial Sequence: Synthetic oligonucleotide
caccccugucccaugcugg

SEQ ID NO: 1676487 - RNA, 19 nt, Artificial Sequence
  Description of Artificial Sequence: Synthetic oligonucleotide
gaugauccacaaaaugucu

SEQ ID NO: 1676488 - RNA, 19 nt, Artificial Sequence
  Description of Artificial Sequence: Synthetic oligonucleotide
gcaaguuacaggggcacgg

SEQ ID NO: 1676489 - RNA, 19 nt, Artificial Sequence
  Description of Artificial Sequence: Synthetic oligonucleotide
agucaucaaccugagucca

SEQ ID NO: 1676490 - RNA, 19 nt, Artificial Sequence
  Description of Artificial Sequence: Synthetic oligonucleotide
ccuucguagugaacuaucc

SEQ ID NO: 1676491 - RNA, 19 nt, Artificial Sequence
  Description of Artificial Sequence: Synthetic oligonucleotide
cuccgaacuccuugcgggg

SEQ ID NO: 1676492 - RNA, 19 nt, Artificial Sequence
  Description of Artificial Sequence: Synthetic oligonucleotide
ugggauagaucagccacaa

SEQ ID NO: 1676493 - RNA, 19 nt, Artificial Sequence
  Description of Artificial Sequence: Synthetic oligonucleotide
gagcacacuuugaaacacc

SEQ ID NO: 1676494 - RNA, 19 nt, Artificial Sequence
  Description of Artificial Sequence: Synthetic oligonucleotide
caaccugaguccacggcuc

SEQ ID NO: 1676495 - RNA, 19 nt, Artificial Sequence
  Description of Artificial Sequence: Synthetic oligonucleotide
cacggcucaggcaaggaga

SEQ ID NO: 1676496 - RNA, 19 nt, Artificial Sequence
  Description of Artificial Sequence: Synthetic oligonucleotide
cagucagcgcugacaaggc

SEQ ID NO: 1676497 - RNA, 19 nt, Artificial Sequence
  Description of Artificial Sequence: Synthetic oligonucleotide
cugaguccacggcucaggc

SEQ ID NO: 1676498 - RNA, 19 nt, Artificial Sequence
  Description of Artificial Sequence: Synthetic oligonucleotide
cuucgggagaucaaucuua

SEQ ID NO: 1676499 - RNA, 19 nt, Artificial Sequence
  Description of Artificial Sequence: Synthetic oligonucleotide
uagaggacccgcuccugac

SEQ ID NO: 1676500 - RNA, 19 nt, Artificial Sequence
  Description of Artificial Sequence: Synthetic oligonucleotide
gcaaugaccuccuucuguc

SEQ ID NO: 1676501 - RNA, 19 nt, Artificial Sequence
  Description of Artificial Sequence: Synthetic oligonucleotide
uuuccggaggccucccggu

SEQ ID NO: 1676502 - RNA, 19 nt, Artificial Sequence
  Description of Artificial Sequence: Synthetic oligonucleotide
gcgacaacgcucaaugugc

SEQ ID NO: 1676503 - RNA, 19 nt, Artificial Sequence
  Description of Artificial Sequence: Synthetic oligonucleotide
ugaccggguuguccagggg

SEQ ID NO: 1676504 - RNA, 19 nt, Artificial Sequence
  Description of Artificial Sequence: Synthetic oligonucleotide
agagaagauuucccagcau

SEQ ID NO: 1676505 - RNA, 19 nt, Artificial Sequence
  Description of Artificial Sequence: Synthetic oligonucleotide
uccacggaccaguacucuc

SEQ ID NO: 1676506 - RNA, 19 nt, Artificial Sequence
  Description of Artificial Sequence: Synthetic oligonucleotide
cuccuugcggggcucacug

SEQ ID NO: 1676507 - RNA, 19 nt, Artificial Sequence
  Description of Artificial Sequence: Synthetic oligonucleotide
acaugggaccucucagaca

SEQ ID NO: 1676508 - RNA, 19 nt, Artificial Sequence
  Description of Artificial Sequence: Synthetic oligonucleotide
ccaagguacccacaggaac

SEQ ID NO: 1676509 - RNA, 19 nt, Artificial Sequence
  Description of Artificial Sequence: Synthetic oligonucleotide
cacggaccaguacucuccg

SEQ ID NO: 1676510 - RNA, 19 nt, Artificial Sequence
  Description of Artificial Sequence: Synthetic oligonucleotide
uugguggccuucguaguga

SEQ ID NO: 1676511 - RNA, 19 nt, Artificial Sequence
  Description of Artificial Sequence: Synthetic oligonucleotide
cgaugauccacaaaauguc

SEQ ID NO: 1676512 - RNA, 19 nt, Artificial Sequence
  Description of Artificial Sequence: Synthetic oligonucleotide
gcaaggagagaucuaccac

SEQ ID NO: 1676513 - RNA, 19 nt, Artificial Sequence
  Description of Artificial Sequence: Synthetic oligonucleotide
guacucuccgaugauccac

SEQ ID NO: 1676514 - RNA, 19 nt, Artificial Sequence
  Description of Artificial Sequence: Synthetic oligonucleotide
caucuccugggugggauag

SEQ ID NO: 1676515 - RNA, 19 nt, Artificial Sequence
  Description of Artificial Sequence: Synthetic oligonucleotide
caacucucaggaugaugug

SEQ ID NO: 1676516 - RNA, 19 nt, Artificial Sequence
  Description of Artificial Sequence: Synthetic oligonucleotide
agcaugggccauugucuug

SEQ ID NO: 1676517 - RNA, 19 nt, Artificial Sequence
  Description of Artificial Sequence: Synthetic oligonucleotide
ugcuaucuguugguggccu

SEQ ID NO: 1676518 - RNA, 19 nt, Artificial Sequence
  Description of Artificial Sequence: Synthetic oligonucleotide
uccacgugggcgucaugca

SEQ ID NO: 1676519 - RNA, 19 nt, Artificial Sequence
  Description of Artificial Sequence: Synthetic oligonucleotide
cugugacugacugcaggcc

SEQ ID NO: 1676520 - RNA, 19 nt, Artificial Sequence
  Description of Artificial Sequence: Synthetic oligonucleotide
cacgguugucauuggccag

SEQ ID NO: 1676521 - RNA, 19 nt, Artificial Sequence
  Description of Artificial Sequence: Synthetic oligonucleotide
auacugggacaagacugag

SEQ ID NO: 1676522 - RNA, 19 nt, Artificial Sequence
  Description of Artificial Sequence: Synthetic oligonucleotide
aaauggcucgaaggagaga

SEQ ID NO: 1676523 - RNA, 19 nt, Artificial Sequence
  Description of Artificial Sequence: Synthetic oligonucleotide
uacaaugcccagggagagc

SEQ ID NO: 1676524 - RNA, 19 nt, Artificial Sequence
  Description of Artificial Sequence: Synthetic oligonucleotide
cucgaaggagagaagauuu

SEQ ID NO: 1676525 - RNA, 19 nt, Artificial Sequence
  Description of Artificial Sequence: Synthetic oligonucleotide
aacgcucaaugugccugag

SEQ ID NO: 1676526 - RNA, 19 nt, Artificial Sequence
  Description of Artificial Sequence: Synthetic oligonucleotide
gucaacucucaggaugaug

SEQ ID NO: 1676527 - RNA, 19 nt, Artificial Sequence
  Description of Artificial Sequence: Synthetic oligonucleotide
agccacaaucucaccuccc

SEQ ID NO: 1676528 - RNA, 19 nt, Artificial Sequence
  Description of Artificial Sequence: Synthetic oligonucleotide
ucccgcucggcauccacgu

SEQ ID NO: 1676529 - RNA, 19 nt, Artificial Sequence
  Description of Artificial Sequence: Synthetic oligonucleotide
ggguagcuuggguggaugg

SEQ ID NO: 1676530 - RNA, 19 nt, Artificial Sequence
  Description of Artificial Sequence: Synthetic oligonucleotide
ugccaagccaagucuggua

SEQ ID NO: 1676531 - RNA, 19 nt, Artificial Sequence
  Description of Artificial Sequence: Synthetic oligonucleotide
gcaauguacucaucuccug

SEQ ID NO: 1676532 - RNA, 19 nt, Artificial Sequence
  Description of Artificial Sequence: Synthetic oligonucleotide
ugaauggagcuggcugggc

SEQ ID NO: 1676533 - RNA, 19 nt, Artificial Sequence
  Description of Artificial Sequence: Synthetic oligonucleotide
uccgaacuccuugcggggc

SEQ ID NO: 1676534 - RNA, 19 nt, Artificial Sequence
  Description of Artificial Sequence: Synthetic oligonucleotide
guagaggacccgcuccuga

SEQ ID NO: 1676535 - RNA, 19 nt, Artificial Sequence
  Description of Artificial Sequence: Synthetic oligonucleotide
ggcacgguugucauuggcc

SEQ ID NO: 1676536 - RNA, 19 nt, Artificial Sequence
  Description of Artificial Sequence: Synthetic oligonucleotide
agucagcgcugacaaggca

SEQ ID NO: 1676537 - RNA, 19 nt, Artificial Sequence
  Description of Artificial Sequence: Synthetic oligonucleotide
guggccuucguagugaacu

SEQ ID NO: 1676538 - RNA, 19 nt, Artificial Sequence
  Description of Artificial Sequence: Synthetic oligonucleotide
ccuacaaugcccagggaga

SEQ ID NO: 1676539 - RNA, 19 nt, Artificial Sequence
  Description of Artificial Sequence: Synthetic oligonucleotide
guuacaggggcacgguugu

SEQ ID NO: 1676540 - RNA, 19 nt, Artificial Sequence
  Description of Artificial Sequence: Synthetic oligonucleotide
gacuucacuugcuggucaa

SEQ ID NO: 1676541 - RNA, 19 nt, Artificial Sequence
  Description of Artificial Sequence: Synthetic oligonucleotide
cuccugaccggguugucca

SEQ ID NO: 1676542 - RNA, 19 nt, Artificial Sequence
  Description of Artificial Sequence: Synthetic oligonucleotide
agguguagaagcagcugcu

SEQ ID NO: 1676543 - RNA, 19 nt, Artificial Sequence
  Description of Artificial Sequence: Synthetic oligonucleotide
caccauuuucuccauugaa

SEQ ID NO: 1676544 - RNA, 19 nt, Artificial Sequence
  Description of Artificial Sequence: Synthetic oligonucleotide
ugucugccacugcuaucug

SEQ ID NO: 1676545 - RNA, 19 nt, Artificial Sequence
  Description of Artificial Sequence: Synthetic oligonucleotide
uaaucacaugggaccucuc

SEQ ID NO: 1676546 - RNA, 19 nt, Artificial Sequence
  Description of Artificial Sequence: Synthetic oligonucleotide
ccacggaccaguacucucc

SEQ ID NO: 1676547 - RNA, 19 nt, Artificial Sequence
  Description of Artificial Sequence: Synthetic oligonucleotide
uugcggggcucacugugaa

SEQ ID NO: 1676548 - RNA, 19 nt, Artificial Sequence
  Description of Artificial Sequence: Synthetic oligonucleotide
ccucuuucaccaagguacc

SEQ ID NO: 1676549 - RNA, 19 nt, Artificial Sequence
  Description of Artificial Sequence: Synthetic oligonucleotide
gugcaaguuacaggggcac

SEQ ID NO: 1676550 - RNA, 19 nt, Artificial Sequence
  Description of Artificial Sequence: Synthetic oligonucleotide
accaguacucuccgaugau

SEQ ID NO: 1676551 - RNA, 19 nt, Artificial Sequence
  Description of Artificial Sequence: Synthetic oligonucleotide
uccugaccggguuguccag

SEQ ID NO: 1676552 - RNA, 19 nt, Artificial Sequence
  Description of Artificial Sequence: Synthetic oligonucleotide
ccuuguucuggugugcgcc

SEQ ID NO: 1676553 - RNA, 19 nt, Artificial Sequence
  Description of Artificial Sequence: Synthetic oligonucleotide
gcggggcucacugugaaag

SEQ ID NO: 1676554 - RNA, 19 nt, Artificial Sequence
  Description of Artificial Sequence: Synthetic oligonucleotide
ggaccaguacucuccgaug

SEQ ID NO: 1676555 - RNA, 19 nt, Artificial Sequence
  Description of Artificial Sequence: Synthetic oligonucleotide
cuccagguagaggacccgc

SEQ ID NO: 1676556 - RNA, 19 nt, Artificial Sequence
  Description of Artificial Sequence: Synthetic oligonucleotide
ccgaugauccacaaaaugu

SEQ ID NO: 1676557 - RNA, 19 nt, Artificial Sequence
  Description of Artificial Sequence: Synthetic oligonucleotide
cugggacaagacugaggac

SEQ ID NO: 1676558 - RNA, 19 nt, Artificial Sequence
  Description of Artificial Sequence: Synthetic oligonucleotide
gucagcgcugacaaggcaa

SEQ ID NO: 1676559 - RNA, 19 nt, Artificial Sequence
  Description of Artificial Sequence: Synthetic oligonucleotide
uuguccaggggugcaaguu

SEQ ID NO: 1676560 - RNA, 19 nt, Artificial Sequence
  Description of Artificial Sequence: Synthetic oligonucleotide
gaccggguuguccaggggu

SEQ ID NO: 1676561 - RNA, 19 nt, Artificial Sequence
  Description of Artificial Sequence: Synthetic oligonucleotide
caauaaucacaugggaccu

SEQ ID NO: 1676562 - RNA, 19 nt, Artificial Sequence
  Description of Artificial Sequence: Synthetic oligonucleotide
cgaaggagagaagauuucc

SEQ ID NO: 1676563 - RNA, 19 nt, Artificial Sequence
  Description of Artificial Sequence: Synthetic oligonucleotide
cugauacugggacaagacu

SEQ ID NO: 1676564 - RNA, 19 nt, Artificial Sequence
  Description of Artificial Sequence: Synthetic oligonucleotide
ugcuuggcguggccuacaa

SEQ ID NO: 1676565 - RNA, 19 nt, Artificial Sequence
  Description of Artificial Sequence: Synthetic oligonucleotide
gaucuaccacaaauaggaa

SEQ ID NO: 1676566 - RNA, 19 nt, Artificial Sequence
  Description of Artificial Sequence: Synthetic oligonucleotide
accuucagguguagaagca

SEQ ID NO: 1676567 - RNA, 19 nt, Artificial Sequence
  Description of Artificial Sequence: Synthetic oligonucleotide
uggccuucguagugaacua

SEQ ID NO: 1676568 - RNA, 19 nt, Artificial Sequence
  Description of Artificial Sequence: Synthetic oligonucleotide
ucaucuccugggugggaua

SEQ ID NO: 1676569 - RNA, 19 nt, Artificial Sequence
  Description of Artificial Sequence: Synthetic oligonucleotide
cccacauuuuauaacaggu

SEQ ID NO: 1676570 - RNA, 19 nt, Artificial Sequence
  Description of Artificial Sequence: Synthetic oligonucleotide
cugccacugcuaucuguug

SEQ ID NO: 1676571 - RNA, 19 nt, Artificial Sequence
  Description of Artificial Sequence: Synthetic oligonucleotide
gccuccgaacuccuugcgg

SEQ ID NO: 1676572 - RNA, 19 nt, Artificial Sequence
  Description of Artificial Sequence: Synthetic oligonucleotide
gugggauagaucagccaca

SEQ ID NO: 1676573 - RNA, 19 nt, Artificial Sequence
  Description of Artificial Sequence: Synthetic oligonucleotide
cccagcaugggccauuguc

SEQ ID NO: 1676574 - RNA, 19 nt, Artificial Sequence
  Description of Artificial Sequence: Synthetic oligonucleotide
cuccauugaaacccugaua

SEQ ID NO: 1676575 - RNA, 19 nt, Artificial Sequence
  Description of Artificial Sequence: Synthetic oligonucleotide
aggacccgcuccugaccgg

SEQ ID NO: 1676576 - RNA, 19 nt, Artificial Sequence
  Description of Artificial Sequence: Synthetic oligonucleotide
caacgcucaaugugccuga

SEQ ID NO: 1676577 - RNA, 19 nt, Artificial Sequence
  Description of Artificial Sequence: Synthetic oligonucleotide
ccaaccaucccagcauggg

SEQ ID NO: 1676578 - RNA, 19 nt, Artificial Sequence
  Description of Artificial Sequence: Synthetic oligonucleotide
caucagggccuccgaacuc

SEQ ID NO: 1676579 - RNA, 19 nt, Artificial Sequence
  Description of Artificial Sequence: Synthetic oligonucleotide
augaugcccgggaugucug

SEQ ID NO: 1676580 - RNA, 19 nt, Artificial Sequence
  Description of Artificial Sequence: Synthetic oligonucleotide
cuugcggggcucacuguga

SEQ ID NO: 1676581 - RNA, 19 nt, Artificial Sequence
  Description of Artificial Sequence: Synthetic oligonucleotide
ugguggccuucguagugaa

SEQ ID NO: 1676582 - RNA, 19 nt, Artificial Sequence
  Description of Artificial Sequence: Synthetic oligonucleotide
guaggaagcuacagcaggu

SEQ ID NO: 1676583 - RNA, 19 nt, Artificial Sequence
  Description of Artificial Sequence: Synthetic oligonucleotide
ggguaggaagcuacagcag

SEQ ID NO: 1676584 - RNA, 19 nt, Artificial Sequence
  Description of Artificial Sequence: Synthetic oligonucleotide
uucuuuccggaggccuccc

SEQ ID NO: 1676585 - RNA, 19 nt, Artificial Sequence
  Description of Artificial Sequence: Synthetic oligonucleotide
ggcguggccuacaaugccc

SEQ ID NO: 1676586 - RNA, 19 nt, Artificial Sequence
  Description of Artificial Sequence: Synthetic oligonucleotide
accggguuguccaggggug

SEQ ID NO: 1676587 - RNA, 19 nt, Artificial Sequence
  Description of Artificial Sequence: Synthetic oligonucleotide
accgucuccuccaucccca

SEQ ID NO: 1676588 - RNA, 19 nt, Artificial Sequence
  Description of Artificial Sequence: Synthetic oligonucleotide
gacaacgcucaaugugccu

SEQ ID NO: 1676589 - RNA, 19 nt, Artificial Sequence
  Description of Artificial Sequence: Synthetic oligonucleotide
ucccuccacggaccaguac

SEQ ID NO: 1676590 - RNA, 19 nt, Artificial Sequence
  Description of Artificial Sequence: Synthetic oligonucleotide
uguccaccgucuccuccau

SEQ ID NO: 1676591 - RNA, 19 nt, Artificial Sequence
  Description of Artificial Sequence: Synthetic oligonucleotide
guccacggcucaggcaagg

SEQ ID NO: 1676592 - RNA, 19 nt, Artificial Sequence
  Description of Artificial Sequence: Synthetic oligonucleotide
gggcucacugugaaagcag

SEQ ID NO: 1676593 - RNA, 19 nt, Artificial Sequence
  Description of Artificial Sequence: Synthetic oligonucleotide
cagugcggcaauguacuca

SEQ ID NO: 1676594 - RNA, 19 nt, Artificial Sequence
  Description of Artificial Sequence: Synthetic oligonucleotide
cugcaccucccagugcggc

SEQ ID NO: 1676595 - RNA, 19 nt, Artificial Sequence
  Description of Artificial Sequence: Synthetic oligonucleotide
acucuccgaugauccacaa

SEQ ID NO: 1676596 - RNA, 19 nt, Artificial Sequence
  Description of Artificial Sequence: Synthetic oligonucleotide
gcggcaauguacucaucuc

SEQ ID NO: 1676597 - RNA, 19 nt, Artificial Sequence
  Description of Artificial Sequence: Synthetic oligonucleotide
uuguucuggugugcgccuc

SEQ ID NO: 1676598 - RNA, 19 nt, Artificial Sequence
  Description of Artificial Sequence: Synthetic oligonucleotide
cuucacuugcuggucaacu

SEQ ID NO: 1676599 - RNA, 19 nt, Artificial Sequence
  Description of Artificial Sequence: Synthetic oligonucleotide
auccccacaugaggguuca

SEQ ID NO: 1676600 - RNA, 19 nt, Artificial Sequence
  Description of Artificial Sequence: Synthetic oligonucleotide
ucgggagaucaaucuuauu

SEQ ID NO: 1676601 - RNA, 19 nt, Artificial Sequence
  Description of Artificial Sequence: Synthetic oligonucleotide
gugugcgccucggaugaug

SEQ ID NO: 1676602 - RNA, 19 nt, Artificial Sequence
  Description of Artificial Sequence: Synthetic oligonucleotide
accugaguccacggcucag

SEQ ID NO: 1676603 - RNA, 19 nt, Artificial Sequence
  Description of Artificial Sequence: Synthetic oligonucleotide
gggccuccgaacuccuugc

SEQ ID NO: 1676604 - RNA, 19 nt, Artificial Sequence
  Description of Artificial Sequence: Synthetic oligonucleotide
cucccggugcuuggcgugg

SEQ ID NO: 1676605 - RNA, 19 nt, Artificial Sequence
  Description of Artificial Sequence: Synthetic oligonucleotide
ggugaaaggguaggaagcu

SEQ ID NO: 1676606 - RNA, 19 nt, Artificial Sequence
  Description of Artificial Sequence: Synthetic oligonucleotide
cccacaggaaccuggaugu

SEQ ID NO: 1676607 - RNA, 19 nt, Artificial Sequence
  Description of Artificial Sequence: Synthetic oligonucleotide
gaugaagccugcagugaau

SEQ ID NO: 1676608 - RNA, 19 nt, Artificial Sequence
  Description of Artificial Sequence: Synthetic oligonucleotide
ugagccccaggcccuuguu

SEQ ID NO: 1676609 - RNA, 19 nt, Artificial Sequence
  Description of Artificial Sequence: Synthetic oligonucleotide
cuccugcaccucccagugc

SEQ ID NO: 1676610 - RNA, 19 nt, Artificial Sequence
  Description of Artificial Sequence: Synthetic oligonucleotide
cuuguucuggugugcgccu

SEQ ID NO: 1676611 - RNA, 19 nt, Artificial Sequence
  Description of Artificial Sequence: Synthetic oligonucleotide
cccaccaucagggccuccg

SEQ ID NO: 1676612 - RNA, 19 nt, Artificial Sequence
  Description of Artificial Sequence: Synthetic oligonucleotide
gccaaccaucccagcaugg

SEQ ID NO: 1676613 - RNA, 19 nt, Artificial Sequence
  Description of Artificial Sequence: Synthetic oligonucleotide
cguagugaacuauccccac

SEQ ID NO: 1676614 - RNA, 19 nt, Artificial Sequence
  Description of Artificial Sequence: Synthetic oligonucleotide
acggaccaguacucuccga

SEQ ID NO: 1676615 - RNA, 19 nt, Artificial Sequence
  Description of Artificial Sequence: Synthetic oligonucleotide
ugcggggcucacugugaaa

SEQ ID NO: 1676616 - RNA, 19 nt, Artificial Sequence
  Description of Artificial Sequence: Synthetic oligonucleotide
caccucguccaaaacaguu

SEQ ID NO: 1676617 - RNA, 19 nt, Artificial Sequence
  Description of Artificial Sequence: Synthetic oligonucleotide
caagccaagucugguaggu

SEQ ID NO: 1676618 - RNA, 19 nt, Artificial Sequence
  Description of Artificial Sequence: Synthetic oligonucleotide
cgacaacgcucaaugugcc

SEQ ID NO: 1676619 - RNA, 19 nt, Artificial Sequence
  Description of Artificial Sequence: Synthetic oligonucleotide
ccacgugggcgucaugcag

SEQ ID NO: 1676620 - RNA, 19 nt, Artificial Sequence
  Description of Artificial Sequence: Synthetic oligonucleotide
ggacccgcuccugaccggg

SEQ ID NO: 1676621 - RNA, 19 nt, Artificial Sequence
  Description of Artificial Sequence: Synthetic oligonucleotide
cauucccuccacggaccag

SEQ ID NO: 1676622 - RNA, 19 nt, Artificial Sequence
  Description of Artificial Sequence: Synthetic oligonucleotide
gguagcuuggguggaugga

SEQ ID NO: 1676623 - RNA, 19 nt, Artificial Sequence
  Description of Artificial Sequence: Synthetic oligonucleotide
gggugggauagaucagcca

SEQ ID NO: 1676624 - RNA, 19 nt, Artificial Sequence
  Description of Artificial Sequence: Synthetic oligonucleotide
gggcacgguugucauuggc

SEQ ID NO: 1676625 - RNA, 19 nt, Artificial Sequence
  Description of Artificial Sequence: Synthetic oligonucleotide
gugcgccucggaugaugcc

SEQ ID NO: 1676626 - RNA, 19 nt, Artificial Sequence
  Description of Artificial Sequence: Synthetic oligonucleotide
cucucagacaggccuuugu

SEQ ID NO: 1676627 - RNA, 19 nt, Artificial Sequence
  Description of Artificial Sequence: Synthetic oligonucleotide
acuccuugcggggcucacu

SEQ ID NO: 1676628 - RNA, 19 nt, Artificial Sequence
  Description of Artificial Sequence: Synthetic oligonucleotide
ccagcaugggccauugucu

SEQ ID NO: 1676629 - RNA, 19 nt, Artificial Sequence
  Description of Artificial Sequence: Synthetic oligonucleotide
ccaguacucuccgaugauc

SEQ ID NO: 1676630 - RNA, 19 nt, Artificial Sequence
  Description of Artificial Sequence: Synthetic oligonucleotide
gcuccugaccggguugucc

SEQ ID NO: 1676631 - RNA, 19 nt, Artificial Sequence
  Description of Artificial Sequence: Synthetic oligonucleotide
gggacaagacugaggacaa

SEQ ID NO: 1676632 - RNA, 19 nt, Artificial Sequence
  Description of Artificial Sequence: Synthetic oligonucleotide
acaaggcaaugaccuccuu

SEQ ID NO: 1676633 - RNA, 19 nt, Artificial Sequence
  Description of Artificial Sequence: Synthetic oligonucleotide
ccuccacggaccaguacuc

SEQ ID NO: 1676634 - RNA, 19 nt, Artificial Sequence
  Description of Artificial Sequence: Synthetic oligonucleotide
gccuucguagugaacuauc

SEQ ID NO: 1676635 - RNA, 19 nt, Artificial Sequence
  Description of Artificial Sequence: Synthetic oligonucleotide
gacugcaggccaccccugu

SEQ ID NO: 1676636 - RNA, 19 nt, Artificial Sequence
  Description of Artificial Sequence: Synthetic oligonucleotide
uuacaggggcacgguuguc

SEQ ID NO: 1676637 - RNA, 19 nt, Artificial Sequence
  Description of Artificial Sequence: Synthetic oligonucleotide
cgggagaucaaucuuauuu

SEQ ID NO: 1676638 - RNA, 19 nt, Artificial Sequence
  Description of Artificial Sequence: Synthetic oligonucleotide
gguagaggacccgcuccug

SEQ ID NO: 1676639 - RNA, 19 nt, Artificial Sequence
  Description of Artificial Sequence: Synthetic oligonucleotide
ggacaagacugaggacaag

SEQ ID NO: 1676640 - RNA, 19 nt, Artificial Sequence
  Description of Artificial Sequence: Synthetic oligonucleotide
cucuccgaugauccacaaa

SEQ ID NO: 1676641 - RNA, 19 nt, Artificial Sequence
  Description of Artificial Sequence: Synthetic oligonucleotide
ucccagcaugggccauugu

SEQ ID NO: 1676642 - RNA, 19 nt, Artificial Sequence
  Description of Artificial Sequence: Synthetic oligonucleotide
gccacaaucucaccucccu

SEQ ID NO: 1676643 - RNA, 19 nt, Artificial Sequence
  Description of Artificial Sequence: Synthetic oligonucleotide
gcgccucggaugaugcccg

SEQ ID NO: 1676644 - RNA, 19 nt, Artificial Sequence
  Description of Artificial Sequence: Synthetic oligonucleotide
ggggcacgguugucauugg

SEQ ID NO: 1676645 - RNA, 19 nt, Artificial Sequence
  Description of Artificial Sequence: Synthetic oligonucleotide
ccaagucugguagguauca

SEQ ID NO: 1676646 - RNA, 19 nt, Artificial Sequence
  Description of Artificial Sequence: Synthetic oligonucleotide
cagacaggccuuugucgua

SEQ ID NO: 1676647 - RNA, 19 nt, Artificial Sequence
  Description of Artificial Sequence: Synthetic oligonucleotide
cuccgaugauccacaaaau

SEQ ID NO: 1676648 - RNA, 19 nt, Artificial Sequence
  Description of Artificial Sequence: Synthetic oligonucleotide
aggugggcucuggccuucg

SEQ ID NO: 1676649 - RNA, 19 nt, Artificial Sequence
  Description of Artificial Sequence: Synthetic oligonucleotide
caaugugccugaggaagcu

SEQ ID NO: 1676650 - RNA, 19 nt, Artificial Sequence
  Description of Artificial Sequence: Synthetic oligonucleotide
ccugcaccucccagugcgg

SEQ ID NO: 1676651 - RNA, 19 nt, Artificial Sequence
  Description of Artificial Sequence: Synthetic oligonucleotide
gcauuugaaauggcucgaa

SEQ ID NO: 1676652 - RNA, 19 nt, Artificial Sequence
  Description of Artificial Sequence: Synthetic oligonucleotide
cccagugcggcaauguacu

SEQ ID NO: 1676653 - RNA, 19 nt, Artificial Sequence
  Description of Artificial Sequence: Synthetic oligonucleotide
uggagcuggcugggcuuga

SEQ ID NO: 1676654 - RNA, 19 nt, Artificial Sequence
  Description of Artificial Sequence: Synthetic oligonucleotide
caccaucagggccuccgaa

SEQ ID NO: 1676655 - RNA, 19 nt, Artificial Sequence
  Description of Artificial Sequence: Synthetic oligonucleotide
caaguuacaggggcacggu

SEQ ID NO: 1676656 - RNA, 19 nt, Artificial Sequence
  Description of Artificial Sequence: Synthetic oligonucleotide
ccuuugucguacuucucua

SEQ ID NO: 1676657 - RNA, 19 nt, Artificial Sequence
  Description of Artificial Sequence: Synthetic oligonucleotide
aucuccugggugggauaga

SEQ ID NO: 1676658 - RNA, 19 nt, Artificial Sequence
  Description of Artificial Sequence: Synthetic oligonucleotide
cccgggaugucugccacug

SEQ ID NO: 1676659 - RNA, 19 nt, Artificial Sequence
  Description of Artificial Sequence: Synthetic oligonucleotide
ucccggugcuuggcguggc

SEQ ID NO: 1676660 - RNA, 19 nt, Artificial Sequence
  Description of Artificial Sequence: Synthetic oligonucleotide
accucccagugcggcaaug

SEQ ID NO: 1676661 - RNA, 19 nt, Artificial Sequence
  Description of Artificial Sequence: Synthetic oligonucleotide
ccucggaugaugcccggga

SEQ ID NO: 1676662 - RNA, 19 nt, Artificial Sequence
  Description of Artificial Sequence: Synthetic oligonucleotide
gcgauugccuuuuccuccu

SEQ ID NO: 1676663 - RNA, 19 nt, Artificial Sequence
  Description of Artificial Sequence: Synthetic oligonucleotide
cagcaugggccauugucuu

SEQ ID NO: 1676664 - RNA, 19 nt, Artificial Sequence
  Description of Artificial Sequence: Synthetic oligonucleotide
cccuccacggaccaguacu

SEQ ID NO: 1676665 - RNA, 19 nt, Artificial Sequence
  Description of Artificial Sequence: Synthetic oligonucleotide
ccucccggugcuuggcgug

SEQ ID NO: 1676666 - RNA, 19 nt, Artificial Sequence
  Description of Artificial Sequence: Synthetic oligonucleotide
gccucggaugaugcccggg

SEQ ID NO: 1676667 - RNA, 19 nt, Artificial Sequence
  Description of Artificial Sequence: Synthetic oligonucleotide
gccauugucuugagcucca

SEQ ID NO: 1676668 - RNA, 19 nt, Artificial Sequence
  Description of Artificial Sequence: Synthetic oligonucleotide
cccugauacugggacaaga

SEQ ID NO: 1676669 - RNA, 19 nt, Artificial Sequence
  Description of Artificial Sequence: Synthetic oligonucleotide
ccaacacagugaaggaccu

SEQ ID NO: 1676670 - RNA, 19 nt, Artificial Sequence
  Description of Artificial Sequence: Synthetic oligonucleotide
gcagcaccuucagguguag

SEQ ID NO: 1676671 - RNA, 19 nt, Artificial Sequence
  Description of Artificial Sequence: Synthetic oligonucleotide
ccauugaaacccugauacu

SEQ ID NO: 1676672 - RNA, 19 nt, Artificial Sequence
  Description of Artificial Sequence: Synthetic oligonucleotide
cuauccccacaugaggguu

SEQ ID NO: 1676673 - RNA, 19 nt, Artificial Sequence
  Description of Artificial Sequence: Synthetic oligonucleotide
gcucgaaggagagaagauu

SEQ ID NO: 1676674 - RNA, 19 nt, Artificial Sequence
  Description of Artificial Sequence: Synthetic oligonucleotide
cucggaugaugcccgggau

SEQ ID NO: 1676675 - RNA, 19 nt, Artificial Sequence
  Description of Artificial Sequence: Synthetic oligonucleotide
caaugcccagggagagcaa

SEQ ID NO: 1676676 - RNA, 19 nt, Artificial Sequence
  Description of Artificial Sequence: Synthetic oligonucleotide
ccagugcggcaauguacuc

SEQ ID NO: 1676677 - RNA, 19 nt, Artificial Sequence
  Description of Artificial Sequence: Synthetic oligonucleotide
caggugggcucuggccuuc

SEQ ID NO: 1676678 - RNA, 19 nt, Artificial Sequence
  Description of Artificial Sequence: Synthetic oligonucleotide
ccacaugaggguucagggu

SEQ ID NO: 1676679 - RNA, 19 nt, Artificial Sequence
  Description of Artificial Sequence: Synthetic oligonucleotide
gaccucucagacaggccuu

SEQ ID NO: 1676680 - RNA, 19 nt, Artificial Sequence
  Description of Artificial Sequence: Synthetic oligonucleotide
gguggccuucguagugaac

SEQ ID NO: 1676681 - RNA, 19 nt, Artificial Sequence
  Description of Artificial Sequence: Synthetic oligonucleotide
ccucguccaaaacaguuuu

SEQ ID NO: 1676682 - RNA, 19 nt, Artificial Sequence
  Description of Artificial Sequence: Synthetic oligonucleotide
ggaccuugccaagccaagu

SEQ ID NO: 1676683 - RNA, 19 nt, Artificial Sequence
  Description of Artificial Sequence: Synthetic oligonucleotide
ccggguuguccaggggugc

SEQ ID NO: 1676684 - RNA, 19 nt, Artificial Sequence
  Description of Artificial Sequence: Synthetic oligonucleotide
gaggguagcuuggguggau

SEQ ID NO: 1676685 - RNA, 19 nt, Artificial Sequence
  Description of Artificial Sequence: Synthetic oligonucleotide
gcagugaauggagcuggcu

SEQ ID NO: 1676686 - RNA, 19 nt, Artificial Sequence
  Description of Artificial Sequence: Synthetic oligonucleotide
cagcaccuucagguguaga

SEQ ID NO: 1676687 - RNA, 19 nt, Artificial Sequence
  Description of Artificial Sequence: Synthetic oligonucleotide
caagucugguagguaucau

SEQ ID NO: 1676688 - RNA, 19 nt, Artificial Sequence
  Description of Artificial Sequence: Synthetic oligonucleotide
cuccacggaccaguacucu

SEQ ID NO: 1676689 - RNA, 19 nt, Artificial Sequence
  Description of Artificial Sequence: Synthetic oligonucleotide
ccucucagacaggccuuug

SEQ ID NO: 1676690 - RNA, 19 nt, Artificial Sequence
  Description of Artificial Sequence: Synthetic oligonucleotide
caggccaccccugucccau

SEQ ID NO: 1676691 - RNA, 19 nt, Artificial Sequence
  Description of Artificial Sequence: Synthetic oligonucleotide
ccggagccuccauucccuc

SEQ ID NO: 1676692 - RNA, 19 nt, Artificial Sequence
  Description of Artificial Sequence: Synthetic oligonucleotide
gugcggcaauguacucauc

SEQ ID NO: 1676693 - RNA, 19 nt, Artificial Sequence
  Description of Artificial Sequence: Synthetic oligonucleotide
caccucccucuuucaccaa

SEQ ID NO: 1676694 - RNA, 19 nt, Artificial Sequence
  Description of Artificial Sequence: Synthetic oligonucleotide
gggauagaucagccacaau

SEQ ID NO: 1676695 - RNA, 19 nt, Artificial Sequence
  Description of Artificial Sequence: Synthetic oligonucleotide
ggccuucguagugaacuau

SEQ ID NO: 1676696 - RNA, 19 nt, Artificial Sequence
  Description of Artificial Sequence: Synthetic oligonucleotide
cggaccaguacucuccgau

SEQ ID NO: 1676697 - RNA, 19 nt, Artificial Sequence
  Description of Artificial Sequence: Synthetic oligonucleotide
cgauugccuuuuccuccug

SEQ ID NO: 1676698 - RNA, 19 nt, Artificial Sequence
  Description of Artificial Sequence: Synthetic oligonucleotide
gcuaucuguugguggccuu

SEQ ID NO: 1676699 - RNA, 19 nt, Artificial Sequence
  Description of Artificial Sequence: Synthetic oligonucleotide
cucuggccuucgggagauc

SEQ ID NO: 1676700 - RNA, 19 nt, Artificial Sequence
  Description of Artificial Sequence: Synthetic oligonucleotide
gccucccggugcuuggcgu

SEQ ID NO: 1676701 - RNA, 19 nt, Artificial Sequence
  Description of Artificial Sequence: Synthetic oligonucleotide
cgccucggaugaugcccgg

SEQ ID NO: 1676702 - RNA, 19 nt, Artificial Sequence
  Description of Artificial Sequence: Synthetic oligonucleotide
ccaccucguccaaaacagu

SEQ ID NO: 1676703 - RNA, 19 nt, Artificial Sequence
  Description of Artificial Sequence: Synthetic oligonucleotide
ccgaacuccuugcggggcu

SEQ ID NO: 1676704 - RNA, 19 nt, Artificial Sequence
  Description of Artificial Sequence: Synthetic oligonucleotide
ggucaacucucaggaugau

SEQ ID NO: 1676705 - RNA, 19 nt, Artificial Sequence
  Description of Artificial Sequence: Synthetic oligonucleotide
gcuuggcguggccuacaau

SEQ ID NO: 1676706 - RNA, 19 nt, Artificial Sequence
  Description of Artificial Sequence: Synthetic oligonucleotide
ccucccagugcggcaaugu

SEQ ID NO: 1676707 - RNA, 19 nt, Artificial Sequence
  Description of Artificial Sequence: Synthetic oligonucleotide
gcccgggaugucugccacu

SEQ ID NO: 1676708 - RNA, 19 nt, Artificial Sequence
  Description of Artificial Sequence: Synthetic oligonucleotide
cagggccuccgaacuccuu

SEQ ID NO: 1676709 - RNA, 19 nt, Artificial Sequence
  Description of Artificial Sequence: Synthetic oligonucleotide
caccucccagugcggcaau

SEQ ID NO: 1676710 - RNA, 19 nt, Artificial Sequence
  Description of Artificial Sequence: Synthetic oligonucleotide
cgugggcgucaugcagcac

SEQ ID NO: 1676711 - RNA, 19 nt, Artificial Sequence
  Description of Artificial Sequence: Synthetic oligonucleotide
ggugugcgccucggaugau

SEQ ID NO: 1676712 - RNA, 19 nt, Artificial Sequence
  Description of Artificial Sequence: Synthetic oligonucleotide
cgcuccugaccggguuguc

SEQ ID NO: 1676713 - RNA, 19 nt, Artificial Sequence
  Description of Artificial Sequence: Synthetic oligonucleotide
aaacugacaauuuagagac

SEQ ID NO: 1676714 - RNA, 19 nt, Artificial Sequence
  Description of Artificial Sequence: Synthetic oligonucleotide
uguaauuaacauuagaaca

SEQ ID NO: 1676715 - RNA, 19 nt, Artificial Sequence
  Description of Artificial Sequence: Synthetic oligonucleotide
ucguaaacaaucuagacag

SEQ ID NO: 1676716 - RNA, 19 nt, Artificial Sequence
  Description of Artificial Sequence: Synthetic oligonucleotide
auauaauuauacuagguuc

SEQ ID NO: 1676717 - RNA, 19 nt, Artificial Sequence
  Description of Artificial Sequence: Synthetic oligonucleotide
auauagaugaauuccauag

SEQ ID NO: 1676718 - RNA, 19 nt, Artificial Sequence
  Description of Artificial Sequence: Synthetic oligonucleotide
acagauagcaauuuguggg

SEQ ID NO: 1676719 - RNA, 19 nt, Artificial Sequence
  Description of Artificial Sequence: Synthetic oligonucleotide
caagauauaauuauacuag

SEQ ID NO: 1676720 - RNA, 19 nt, Artificial Sequence
  Description of Artificial Sequence: Synthetic oligonucleotide
uuuaccaagaauagaacag

SEQ ID NO: 1676721 - RNA, 19 nt, Artificial Sequence
  Description of Artificial Sequence: Synthetic oligonucleotide
uauuucguaaacaaucuag

SEQ ID NO: 1676722 - RNA, 19 nt, Artificial Sequence
  Description of Artificial Sequence: Synthetic oligonucleotide
uuuacuaguguaauuaaca

SEQ ID NO: 1676723 - RNA, 19 nt, Artificial Sequence
  Description of Artificial Sequence: Synthetic oligonucleotide
aagauauaauuauacuagg

SEQ ID NO: 1676724 - RNA, 19 nt, Artificial Sequence
  Description of Artificial Sequence: Synthetic oligonucleotide
acucauaagaacuuggaag

SEQ ID NO: 1676725 - RNA, 19 nt, Artificial Sequence
  Description of Artificial Sequence: Synthetic oligonucleotide
aauuauacuagguucuugu

SEQ ID NO: 1676726 - RNA, 19 nt, Artificial Sequence
  Description of Artificial Sequence: Synthetic oligonucleotide
aaaauauugagaaagcaga

SEQ ID NO: 1676727 - RNA, 19 nt, Artificial Sequence
  Description of Artificial Sequence: Synthetic oligonucleotide
uauaauuauacuagguucu

SEQ ID NO: 1676728 - RNA, 19 nt, Artificial Sequence
  Description of Artificial Sequence: Synthetic oligonucleotide
uaacauuagaacaaucuug

SEQ ID NO: 1676729 - RNA, 19 nt, Artificial Sequence
  Description of Artificial Sequence: Synthetic oligonucleotide
aaacgaguaucuuauguag

SEQ ID NO: 1676730 - RNA, 19 nt, Artificial Sequence
  Description of Artificial Sequence: Synthetic oligonucleotide
ugugaaaaccgcaacacca

SEQ ID NO: 1676731 - RNA, 19 nt, Artificial Sequence
  Description of Artificial Sequence: Synthetic oligonucleotide
uucguaaacaaucuagaca

SEQ ID NO: 1676732 - RNA, 19 nt, Artificial Sequence
  Description of Artificial Sequence: Synthetic oligonucleotide
gauugagccauuuuacuag

SEQ ID NO: 1676733 - RNA, 19 nt, Artificial Sequence
  Description of Artificial Sequence: Synthetic oligonucleotide
ccuaguagaaacaacaugg

SEQ ID NO: 1676734 - RNA, 19 nt, Artificial Sequence
  Description of Artificial Sequence: Synthetic oligonucleotide
aauuucaccauugcacagc

SEQ ID NO: 1676735 - RNA, 19 nt, Artificial Sequence
  Description of Artificial Sequence: Synthetic oligonucleotide
uauacuagguucuuguaca

SEQ ID NO: 1676736 - RNA, 19 nt, Artificial Sequence
  Description of Artificial Sequence: Synthetic oligonucleotide
uaucuuauguagaugguca

SEQ ID NO: 1676737 - RNA, 19 nt, Artificial Sequence
  Description of Artificial Sequence: Synthetic oligonucleotide
uaacucguguagaacaucg

SEQ ID NO: 1676738 - RNA, 19 nt, Artificial Sequence
  Description of Artificial Sequence: Synthetic oligonucleotide
aacuaaguggaugcaaagc

SEQ ID NO: 1676739 - RNA, 19 nt, Artificial Sequence
  Description of Artificial Sequence: Synthetic oligonucleotide
uauuaaguaugugaaaacc

SEQ ID NO: 1676740 - RNA, 19 nt, Artificial Sequence
  Description of Artificial Sequence: Synthetic oligonucleotide
aaaaguuuaccaagaauag

SEQ ID NO: 1676741 - RNA, 19 nt, Artificial Sequence
  Description of Artificial Sequence: Synthetic oligonucleotide
aauuuagagacagacgaug

SEQ ID NO: 1676742 - RNA, 19 nt, Artificial Sequence
  Description of Artificial Sequence: Synthetic oligonucleotide
gauacugcaauaccauggg

SEQ ID NO: 1676743 - RNA, 19 nt, Artificial Sequence
  Description of Artificial Sequence: Synthetic oligonucleotide
aggggaacuaaguggaugc

SEQ ID NO: 1676744 - RNA, 19 nt, Artificial Sequence
  Description of Artificial Sequence: Synthetic oligonucleotide
agaacaucgaaugaauuuc

SEQ ID NO: 1676745 - RNA, 19 nt, Artificial Sequence
  Description of Artificial Sequence: Synthetic oligonucleotide
gaucagguauccuuuacag

SEQ ID NO: 1676746 - RNA, 19 nt, Artificial Sequence
  Description of Artificial Sequence: Synthetic oligonucleotide
uuauacuagguucuuguac

SEQ ID NO: 1676747 - RNA, 19 nt, Artificial Sequence
  Description of Artificial Sequence: Synthetic oligonucleotide
guauccuuuacagauauag

SEQ ID NO: 1676748 - RNA, 19 nt, Artificial Sequence
  Description of Artificial Sequence: Synthetic oligonucleotide
agaugaauuccauaguaug

SEQ ID NO: 1676749 - RNA, 19 nt, Artificial Sequence
  Description of Artificial Sequence: Synthetic oligonucleotide
uaauaguuccuacaguaac

SEQ ID NO: 1676750 - RNA, 19 nt, Artificial Sequence
  Description of Artificial Sequence: Synthetic oligonucleotide
uacuauaaaaguuuaccaa

SEQ ID NO: 1676751 - RNA, 19 nt, Artificial Sequence
  Description of Artificial Sequence: Synthetic oligonucleotide
ugggguacgaauuuucucc

SEQ ID NO: 1676752 - RNA, 19 nt, Artificial Sequence
  Description of Artificial Sequence: Synthetic oligonucleotide
ucguguagaacaucgaaug

SEQ ID NO: 1676753 - RNA, 19 nt, Artificial Sequence
  Description of Artificial Sequence: Synthetic oligonucleotide
aaaaccgcaacaccacaag

SEQ ID NO: 1676754 - RNA, 19 nt, Artificial Sequence
  Description of Artificial Sequence: Synthetic oligonucleotide
aaguuuaccaagaauagaa

SEQ ID NO: 1676755 - RNA, 19 nt, Artificial Sequence
  Description of Artificial Sequence: Synthetic oligonucleotide
uuuggguagccauucgugg

SEQ ID NO: 1676756 - RNA, 19 nt, Artificial Sequence
  Description of Artificial Sequence: Synthetic oligonucleotide
aaauauugagaaagcagag

SEQ ID NO: 1676757 - RNA, 19 nt, Artificial Sequence
  Description of Artificial Sequence: Synthetic oligonucleotide
aguagaaacaacauggaga

SEQ ID NO: 1676758 - RNA, 19 nt, Artificial Sequence
  Description of Artificial Sequence: Synthetic oligonucleotide
agacgauggccuuaugugc

SEQ ID NO: 1676759 - RNA, 19 nt, Artificial Sequence
  Description of Artificial Sequence: Synthetic oligonucleotide
aauuccauaguaugauccu

SEQ ID NO: 1676760 - RNA, 19 nt, Artificial Sequence
  Description of Artificial Sequence: Synthetic oligonucleotide
uuauccaaccucaacauuu

SEQ ID NO: 1676761 - RNA, 19 nt, Artificial Sequence
  Description of Artificial Sequence: Synthetic oligonucleotide
uauagcaggugauguaagg

SEQ ID NO: 1676762 - RNA, 19 nt, Artificial Sequence
  Description of Artificial Sequence: Synthetic oligonucleotide
gaggaguaaacaaacagug

SEQ ID NO: 1676763 - RNA, 19 nt, Artificial Sequence
  Description of Artificial Sequence: Synthetic oligonucleotide
uuuuacuaguguaauuaac

SEQ ID NO: 1676764 - RNA, 19 nt, Artificial Sequence
  Description of Artificial Sequence: Synthetic oligonucleotide
accuaagugacuucagccg

SEQ ID NO: 1676765 - RNA, 19 nt, Artificial Sequence
  Description of Artificial Sequence: Synthetic oligonucleotide
cucuauuuuaacaagaaua

SEQ ID NO: 1676766 - RNA, 19 nt, Artificial Sequence
  Description of Artificial Sequence: Synthetic oligonucleotide
ugaaaaucagauugugucu

SEQ ID NO: 1676767 - RNA, 19 nt, Artificial Sequence
  Description of Artificial Sequence: Synthetic oligonucleotide
acaaacagugcagaguucg

SEQ ID NO: 1676768 - RNA, 19 nt, Artificial Sequence
  Description of Artificial Sequence: Synthetic oligonucleotide
uagacagauagcaauuugu

SEQ ID NO: 1676769 - RNA, 19 nt, Artificial Sequence
  Description of Artificial Sequence: Synthetic oligonucleotide
acuaguguaauuaacauua

SEQ ID NO: 1676770 - RNA, 19 nt, Artificial Sequence
  Description of Artificial Sequence: Synthetic oligonucleotide
acaucgaaugaauuucuuc

SEQ ID NO: 1676771 - RNA, 19 nt, Artificial Sequence
  Description of Artificial Sequence: Synthetic oligonucleotide
aguauuaaguaugugaaaa

SEQ ID NO: 1676772 - RNA, 19 nt, Artificial Sequence
  Description of Artificial Sequence: Synthetic oligonucleotide
cugacugcccauuauuucg

SEQ ID NO: 1676773 - RNA, 19 nt, Artificial Sequence
  Description of Artificial Sequence: Synthetic oligonucleotide
aguguaauuaacauuagaa

SEQ ID NO: 1676774 - RNA, 19 nt, Artificial Sequence
  Description of Artificial Sequence: Synthetic oligonucleotide
acaaucuagacagauagca

SEQ ID NO: 1676775 - RNA, 19 nt, Artificial Sequence
  Description of Artificial Sequence: Synthetic oligonucleotide
ugacaauuuagagacagac

SEQ ID NO: 1676776 - RNA, 19 nt, Artificial Sequence
  Description of Artificial Sequence: Synthetic oligonucleotide
uaaguaugugaaaaccgca

SEQ ID NO: 1676777 - RNA, 19 nt, Artificial Sequence
  Description of Artificial Sequence: Synthetic oligonucleotide
aauauugagaaagcagagu

SEQ ID NO: 1676778 - RNA, 19 nt, Artificial Sequence
  Description of Artificial Sequence: Synthetic oligonucleotide
uccuaguagaaacaacaug

SEQ ID NO: 1676779 - RNA, 19 nt, Artificial Sequence
  Description of Artificial Sequence: Synthetic oligonucleotide
uauagaugaauuccauagu

SEQ ID NO: 1676780 - RNA, 19 nt, Artificial Sequence
  Description of Artificial Sequence: Synthetic oligonucleotide
guugaagucuuucaccaag

SEQ ID NO: 1676781 - RNA, 19 nt, Artificial Sequence
  Description of Artificial Sequence: Synthetic oligonucleotide
uuuagagacagacgauggc

SEQ ID NO: 1676782 - RNA, 19 nt, Artificial Sequence
  Description of Artificial Sequence: Synthetic oligonucleotide
ugggucacuucuaugguag

SEQ ID NO: 1676783 - RNA, 19 nt, Artificial Sequence
  Description of Artificial Sequence: Synthetic oligonucleotide
acaccuaagugacuucagc

SEQ ID NO: 1676784 - RNA, 19 nt, Artificial Sequence
  Description of Artificial Sequence: Synthetic oligonucleotide
auaaaaguuuaccaagaau

SEQ ID NO: 1676785 - RNA, 19 nt, Artificial Sequence
  Description of Artificial Sequence: Synthetic oligonucleotide
uguagaacaucgaaugaau

SEQ ID NO: 1676786 - RNA, 19 nt, Artificial Sequence
  Description of Artificial Sequence: Synthetic oligonucleotide
uuucguaaacaaucuagac

SEQ ID NO: 1676787 - RNA, 19 nt, Artificial Sequence
  Description of Artificial Sequence: Synthetic oligonucleotide
uuacauuugucaaccuuug

SEQ ID NO: 1676788 - RNA, 19 nt, Artificial Sequence
  Description of Artificial Sequence: Synthetic oligonucleotide
ugugcaugcugaaaaucag

SEQ ID NO: 1676789 - RNA, 19 nt, Artificial Sequence
  Description of Artificial Sequence: Synthetic oligonucleotide
agaacuuggaaguuuuagu

SEQ ID NO: 1676790 - RNA, 19 nt, Artificial Sequence
  Description of Artificial Sequence: Synthetic oligonucleotide
ugcuuuacauuugucaacc

SEQ ID NO: 1676791 - RNA, 19 nt, Artificial Sequence
  Description of Artificial Sequence: Synthetic oligonucleotide
auuucuaauggauuuguuu

SEQ ID NO: 1676792 - RNA, 19 nt, Artificial Sequence
  Description of Artificial Sequence: Synthetic oligonucleotide
caucgaaugaauuucuuca

SEQ ID NO: 1676793 - RNA, 19 nt, Artificial Sequence
  Description of Artificial Sequence: Synthetic oligonucleotide
uaugugaaaaccgcaacac

SEQ ID NO: 1676794 - RNA, 19 nt, Artificial Sequence
  Description of Artificial Sequence: Synthetic oligonucleotide
ucuuucaccaaguguuucc

SEQ ID NO: 1676795 - RNA, 19 nt, Artificial Sequence
  Description of Artificial Sequence: Synthetic oligonucleotide
aauggauuuguuucaugaa

SEQ ID NO: 1676796 - RNA, 19 nt, Artificial Sequence
  Description of Artificial Sequence: Synthetic oligonucleotide
uuaauaguuccuacaguaa

SEQ ID NO: 1676797 - RNA, 19 nt, Artificial Sequence
  Description of Artificial Sequence: Synthetic oligonucleotide
aauaguuccuacaguaacu

SEQ ID NO: 1676798 - RNA, 19 nt, Artificial Sequence
  Description of Artificial Sequence: Synthetic oligonucleotide
ggucuuacagaauguaugg

SEQ ID NO: 1676799 - RNA, 19 nt, Artificial Sequence
  Description of Artificial Sequence: Synthetic oligonucleotide
acgaauuuucuccucuuag

SEQ ID NO: 1676800 - RNA, 19 nt, Artificial Sequence
  Description of Artificial Sequence: Synthetic oligonucleotide
acauuugucaaccuuugaa

SEQ ID NO: 1676801 - RNA, 19 nt, Artificial Sequence
  Description of Artificial Sequence: Synthetic oligonucleotide
uuuucuaaauauacucuua

SEQ ID NO: 1676802 - RNA, 19 nt, Artificial Sequence
  Description of Artificial Sequence: Synthetic oligonucleotide
ucgaaugaauuucuucaug

SEQ ID NO: 1676803 - RNA, 19 nt, Artificial Sequence
  Description of Artificial Sequence: Synthetic oligonucleotide
ugauguaaggguugaaguc

SEQ ID NO: 1676804 - RNA, 19 nt, Artificial Sequence
  Description of Artificial Sequence: Synthetic oligonucleotide
uuacuaguguaauuaacau

SEQ ID NO: 1676805 - RNA, 19 nt, Artificial Sequence
  Description of Artificial Sequence: Synthetic oligonucleotide
aaaguuuaccaagaauaga

SEQ ID NO: 1676806 - RNA, 19 nt, Artificial Sequence
  Description of Artificial Sequence: Synthetic oligonucleotide
uuuacuacauuguccccug

SEQ ID NO: 1676807 - RNA, 19 nt, Artificial Sequence
  Description of Artificial Sequence: Synthetic oligonucleotide
uaccaagaauagaacagug

SEQ ID NO: 1676808 - RNA, 19 nt, Artificial Sequence
  Description of Artificial Sequence: Synthetic oligonucleotide
acaguacucuauuuuaaca

SEQ ID NO: 1676809 - RNA, 19 nt, Artificial Sequence
  Description of Artificial Sequence: Synthetic oligonucleotide
agcacauccaacucauaag

SEQ ID NO: 1676810 - RNA, 19 nt, Artificial Sequence
  Description of Artificial Sequence: Synthetic oligonucleotide
uuagucgccaucuugucau

SEQ ID NO: 1676811 - RNA, 19 nt, Artificial Sequence
  Description of Artificial Sequence: Synthetic oligonucleotide
ucgccaucuugucauauag

SEQ ID NO: 1676812 - RNA, 19 nt, Artificial Sequence
  Description of Artificial Sequence: Synthetic oligonucleotide
ugaucagguauccuuuaca

SEQ ID NO: 1676813 - RNA, 19 nt, Artificial Sequence
  Description of Artificial Sequence: Synthetic oligonucleotide
gaacaaucuugcaacaggc

SEQ ID NO: 1676814 - RNA, 19 nt, Artificial Sequence
  Description of Artificial Sequence: Synthetic oligonucleotide
uagaacaucgaaugaauuu

SEQ ID NO: 1676815 - RNA, 19 nt, Artificial Sequence
  Description of Artificial Sequence: Synthetic oligonucleotide
uaguguaauuaacauuaga

SEQ ID NO: 1676816 - RNA, 19 nt, Artificial Sequence
  Description of Artificial Sequence: Synthetic oligonucleotide
auuuagagacagacgaugg

SEQ ID NO: 1676817 - RNA, 19 nt, Artificial Sequence
  Description of Artificial Sequence: Synthetic oligonucleotide
uacccaaaaucaauucuug

SEQ ID NO: 1676818 - RNA, 19 nt, Artificial Sequence
  Description of Artificial Sequence: Synthetic oligonucleotide
gagacccuuuacuacauug

SEQ ID NO: 1676819 - RNA, 19 nt, Artificial Sequence
  Description of Artificial Sequence: Synthetic oligonucleotide
aaaaucagauugugucucu

SEQ ID NO: 1676820 - RNA, 19 nt, Artificial Sequence
  Description of Artificial Sequence: Synthetic oligonucleotide
auaguuccuacaguaacuc

SEQ ID NO: 1676821 - RNA, 19 nt, Artificial Sequence
  Description of Artificial Sequence: Synthetic oligonucleotide
ugguuagccggcuuuagca

SEQ ID NO: 1676822 - RNA, 19 nt, Artificial Sequence
  Description of Artificial Sequence: Synthetic oligonucleotide
caccuaagugacuucagcc

SEQ ID NO: 1676823 - RNA, 19 nt, Artificial Sequence
  Description of Artificial Sequence: Synthetic oligonucleotide
aaguauuaaguaugugaaa

SEQ ID NO: 1676824 - RNA, 19 nt, Artificial Sequence
  Description of Artificial Sequence: Synthetic oligonucleotide
uaugguaguccuuaucauc

SEQ ID NO: 1676825 - RNA, 19 nt, Artificial Sequence
  Description of Artificial Sequence: Synthetic oligonucleotide
guauuaaguaugugaaaac

SEQ ID NO: 1676826 - RNA, 19 nt, Artificial Sequence
  Description of Artificial Sequence: Synthetic oligonucleotide
ccaagaauagaacaguggc

SEQ ID NO: 1676827 - RNA, 19 nt, Artificial Sequence
  Description of Artificial Sequence: Synthetic oligonucleotide
gaaaaucagauugugucuc

SEQ ID NO: 1676828 - RNA, 19 nt, Artificial Sequence
  Description of Artificial Sequence: Synthetic oligonucleotide
caaagaggggaacuaagug

SEQ ID NO: 1676829 - RNA, 19 nt, Artificial Sequence
  Description of Artificial Sequence: Synthetic oligonucleotide
aagaggggaacuaagugga

SEQ ID NO: 1676830 - RNA, 19 nt, Artificial Sequence
  Description of Artificial Sequence: Synthetic oligonucleotide
ucuuggucgauacugcaau

SEQ ID NO: 1676831 - RNA, 19 nt, Artificial Sequence
  Description of Artificial Sequence: Synthetic oligonucleotide
uagaugaauuccauaguau

SEQ ID NO: 1676832 - RNA, 19 nt, Artificial Sequence
  Description of Artificial Sequence: Synthetic oligonucleotide
aguuuaccaagaauagaac

SEQ ID NO: 1676833 - RNA, 19 nt, Artificial Sequence
  Description of Artificial Sequence: Synthetic oligonucleotide
ugugagacgaaacgaguau

SEQ ID NO: 1676834 - RNA, 19 nt, Artificial Sequence
  Description of Artificial Sequence: Synthetic oligonucleotide
cagacgauggccuuaugug

SEQ ID NO: 1676835 - RNA, 19 nt, Artificial Sequence
  Description of Artificial Sequence: Synthetic oligonucleotide
auaaaaguauuaaguaugu

SEQ ID NO: 1676836 - RNA, 19 nt, Artificial Sequence
  Description of Artificial Sequence: Synthetic oligonucleotide
agcaguucaggcaaagagg

SEQ ID NO: 1676837 - RNA, 19 nt, Artificial Sequence
  Description of Artificial Sequence: Synthetic oligonucleotide
acaccuuggacaaucauug

SEQ ID NO: 1676838 - RNA, 19 nt, Artificial Sequence
  Description of Artificial Sequence: Synthetic oligonucleotide
caguguauuauccaaccuc

SEQ ID NO: 1676839 - RNA, 19 nt, Artificial Sequence
  Description of Artificial Sequence: Synthetic oligonucleotide
gaaacgaguaucuuaugua

SEQ ID NO: 1676840 - RNA, 19 nt, Artificial Sequence
  Description of Artificial Sequence: Synthetic oligonucleotide
acuagguucuuguacagua

SEQ ID NO: 1676841 - RNA, 19 nt, Artificial Sequence
  Description of Artificial Sequence: Synthetic oligonucleotide
auaguaugauccuucccca

SEQ ID NO: 1676842 - RNA, 19 nt, Artificial Sequence
  Description of Artificial Sequence: Synthetic oligonucleotide
aguguauuauccaaccuca

SEQ ID NO: 1676843 - RNA, 19 nt, Artificial Sequence
  Description of Artificial Sequence: Synthetic oligonucleotide
gugcuuugcacacugugag

SEQ ID NO: 1676844 - RNA, 19 nt, Artificial Sequence
  Description of Artificial Sequence: Synthetic oligonucleotide
ucugccgaggaguaaacaa

SEQ ID NO: 1676845 - RNA, 19 nt, Artificial Sequence
  Description of Artificial Sequence: Synthetic oligonucleotide
uaccagcuuaaauauaauc

SEQ ID NO: 1676846 - RNA, 19 nt, Artificial Sequence
  Description of Artificial Sequence: Synthetic oligonucleotide
uggucgauacugcaauacc

SEQ ID NO: 1676847 - RNA, 19 nt, Artificial Sequence
  Description of Artificial Sequence: Synthetic oligonucleotide
uccauaguaugauccuucc

SEQ ID NO: 1676848 - RNA, 19 nt, Artificial Sequence
  Description of Artificial Sequence: Synthetic oligonucleotide
ugaaaaccgcaacaccaca

SEQ ID NO: 1676849 - RNA, 19 nt, Artificial Sequence
  Description of Artificial Sequence: Synthetic oligonucleotide
acuacauuguccccugacu

SEQ ID NO: 1676850 - RNA, 19 nt, Artificial Sequence
  Description of Artificial Sequence: Synthetic oligonucleotide
acaggcaagcaaaauauug

SEQ ID NO: 1676851 - RNA, 19 nt, Artificial Sequence
  Description of Artificial Sequence: Synthetic oligonucleotide
cuuuggguagccauucgug

SEQ ID NO: 1676852 - RNA, 19 nt, Artificial Sequence
  Description of Artificial Sequence: Synthetic oligonucleotide
uaguuccuacaguaacucg

SEQ ID NO: 1676853 - RNA, 19 nt, Artificial Sequence
  Description of Artificial Sequence: Synthetic oligonucleotide
cuugcaacaggcaagcaaa

SEQ ID NO: 1676854 - RNA, 19 nt, Artificial Sequence
  Description of Artificial Sequence: Synthetic oligonucleotide
uaaaaguauuaaguaugug

SEQ ID NO: 1676855 - RNA, 19 nt, Artificial Sequence
  Description of Artificial Sequence: Synthetic oligonucleotide
agauauaauuauacuaggu

SEQ ID NO: 1676856 - RNA, 19 nt, Artificial Sequence
  Description of Artificial Sequence: Synthetic oligonucleotide
accaagaauagaacagugg

SEQ ID NO: 1676857 - RNA, 19 nt, Artificial Sequence
  Description of Artificial Sequence: Synthetic oligonucleotide
augggguacgaauuuucuc

SEQ ID NO: 1676858 - RNA, 19 nt, Artificial Sequence
  Description of Artificial Sequence: Synthetic oligonucleotide
uacaguaacucguguagaa

SEQ ID NO: 1676859 - RNA, 19 nt, Artificial Sequence
  Description of Artificial Sequence: Synthetic oligonucleotide
gauauagcaggugauguaa

SEQ ID NO: 1676860 - RNA, 19 nt, Artificial Sequence
  Description of Artificial Sequence: Synthetic oligonucleotide
caacauggagaaaacugac

SEQ ID NO: 1676861 - RNA, 19 nt, Artificial Sequence
  Description of Artificial Sequence: Synthetic oligonucleotide
accuuggacaaucauugcu

SEQ ID NO: 1676862 - RNA, 19 nt, Artificial Sequence
  Description of Artificial Sequence: Synthetic oligonucleotide
cuuguccuacccaaaauca

SEQ ID NO: 1676863 - RNA, 19 nt, Artificial Sequence
  Description of Artificial Sequence: Synthetic oligonucleotide
auuucguaaacaaucuaga

SEQ ID NO: 1676864 - RNA, 19 nt, Artificial Sequence
  Description of Artificial Sequence: Synthetic oligonucleotide
cucauaagaacuuggaagu

SEQ ID NO: 1676865 - RNA, 19 nt, Artificial Sequence
  Description of Artificial Sequence: Synthetic oligonucleotide
auauaaucuccuccagugu

SEQ ID NO: 1676866 - RNA, 19 nt, Artificial Sequence
  Description of Artificial Sequence: Synthetic oligonucleotide
acgaguaucuuauguagau

SEQ ID NO: 1676867 - RNA, 19 nt, Artificial Sequence
  Description of Artificial Sequence: Synthetic oligonucleotide
auacugcaauaccaugggg

SEQ ID NO: 1676868 - RNA, 19 nt, Artificial Sequence
  Description of Artificial Sequence: Synthetic oligonucleotide
gaaacaacauggagaaaac

SEQ ID NO: 1676869 - RNA, 19 nt, Artificial Sequence
  Description of Artificial Sequence: Synthetic oligonucleotide
ugaauuccauaguaugauc

SEQ ID NO: 1676870 - RNA, 19 nt, Artificial Sequence
  Description of Artificial Sequence: Synthetic oligonucleotide
uacagauauagcaggugau

SEQ ID NO: 1676871 - RNA, 19 nt, Artificial Sequence
  Description of Artificial Sequence: Synthetic oligonucleotide
aggucuuacagaauguaug

SEQ ID NO: 1676872 - RNA, 19 nt, Artificial Sequence
  Description of Artificial Sequence: Synthetic oligonucleotide
cauuuuacuaguguaauua

SEQ ID NO: 1676873 - RNA, 19 nt, Artificial Sequence
  Description of Artificial Sequence: Synthetic oligonucleotide
uacuaguguaauuaacauu

SEQ ID NO: 1676874 - RNA, 19 nt, Artificial Sequence
  Description of Artificial Sequence: Synthetic oligonucleotide
ugccgaggaguaaacaaac

SEQ ID NO: 1676875 - RNA, 19 nt, Artificial Sequence
  Description of Artificial Sequence: Synthetic oligonucleotide
aggauugagccauuuuacu

SEQ ID NO: 1676876 - RNA, 19 nt, Artificial Sequence
  Description of Artificial Sequence: Synthetic oligonucleotide
guucguucagugcagucug

SEQ ID NO: 1676877 - RNA, 19 nt, Artificial Sequence
  Description of Artificial Sequence: Synthetic oligonucleotide
caugagacccuuuacuaca

SEQ ID NO: 1676878 - RNA, 19 nt, Artificial Sequence
  Description of Artificial Sequence: Synthetic oligonucleotide
auacuagguucuuguacag

SEQ ID NO: 1676879 - RNA, 19 nt, Artificial Sequence
  Description of Artificial Sequence: Synthetic oligonucleotide
ucgauacugcaauaccaug

SEQ ID NO: 1676880 - RNA, 19 nt, Artificial Sequence
  Description of Artificial Sequence: Synthetic oligonucleotide
uauccaaccucaacauuuc

SEQ ID NO: 1676881 - RNA, 19 nt, Artificial Sequence
  Description of Artificial Sequence: Synthetic oligonucleotide
uacuacauuguccccugac

SEQ ID NO: 1676882 - RNA, 19 nt, Artificial Sequence
  Description of Artificial Sequence: Synthetic oligonucleotide
agagucacggcugcacacc

SEQ ID NO: 1676883 - RNA, 19 nt, Artificial Sequence
  Description of Artificial Sequence: Synthetic oligonucleotide
caguaacucguguagaaca

SEQ ID NO: 1676884 - RNA, 19 nt, Artificial Sequence
  Description of Artificial Sequence: Synthetic oligonucleotide
aaguaugugaaaaccgcaa

SEQ ID NO: 1676885 - RNA, 19 nt, Artificial Sequence
  Description of Artificial Sequence: Synthetic oligonucleotide
auugugucucuccugucca

SEQ ID NO: 1676886 - RNA, 19 nt, Artificial Sequence
  Description of Artificial Sequence: Synthetic oligonucleotide
acacugugcaaucugccga

SEQ ID NO: 1676887 - RNA, 19 nt, Artificial Sequence
  Description of Artificial Sequence: Synthetic oligonucleotide
aaccgcaacaccacaagga

SEQ ID NO: 1676888 - RNA, 19 nt, Artificial Sequence
  Description of Artificial Sequence: Synthetic oligonucleotide
aguuccuacaguaacucgu

SEQ ID NO: 1676889 - RNA, 19 nt, Artificial Sequence
  Description of Artificial Sequence: Synthetic oligonucleotide
uugaucagguauccuuuac

SEQ ID NO: 1676890 - RNA, 19 nt, Artificial Sequence
  Description of Artificial Sequence: Synthetic oligonucleotide
agccauucgugguuagccg

SEQ ID NO: 1676891 - RNA, 19 nt, Artificial Sequence
  Description of Artificial Sequence: Synthetic oligonucleotide
ugcugaaaaucagauugug

SEQ ID NO: 1676892 - RNA, 19 nt, Artificial Sequence
  Description of Artificial Sequence: Synthetic oligonucleotide
uuaugugcaugcugaaaau

SEQ ID NO: 1676893 - RNA, 19 nt, Artificial Sequence
  Description of Artificial Sequence: Synthetic oligonucleotide
uacaggucuuacagaaugu

SEQ ID NO: 1676894 - RNA, 19 nt, Artificial Sequence
  Description of Artificial Sequence: Synthetic oligonucleotide
ugcagaguucguucagugc

SEQ ID NO: 1676895 - RNA, 19 nt, Artificial Sequence
  Description of Artificial Sequence: Synthetic oligonucleotide
uucaccaaguguuuccuuu

SEQ ID NO: 1676896 - RNA, 19 nt, Artificial Sequence
  Description of Artificial Sequence: Synthetic oligonucleotide
agguauccuuuacagauau

SEQ ID NO: 1676897 - RNA, 19 nt, Artificial Sequence
  Description of Artificial Sequence: Synthetic oligonucleotide
ugcccauuauuucguaaac

SEQ ID NO: 1676898 - RNA, 19 nt, Artificial Sequence
  Description of Artificial Sequence: Synthetic oligonucleotide
cuuugcacacugugagacg

SEQ ID NO: 1676899 - RNA, 19 nt, Artificial Sequence
  Description of Artificial Sequence: Synthetic oligonucleotide
gauguaaggguugaagucu

SEQ ID NO: 1676900 - RNA, 19 nt, Artificial Sequence
  Description of Artificial Sequence: Synthetic oligonucleotide
caguacucuauuuuaacaa

SEQ ID NO: 1676901 - RNA, 19 nt, Artificial Sequence
  Description of Artificial Sequence: Synthetic oligonucleotide
ugugggucacuucuauggu

SEQ ID NO: 1676902 - RNA, 19 nt, Artificial Sequence
  Description of Artificial Sequence: Synthetic oligonucleotide
acugcaauaccauggggua

SEQ ID NO: 1676903 - RNA, 19 nt, Artificial Sequence
  Description of Artificial Sequence: Synthetic oligonucleotide
aucgaaugaauuucuucau

SEQ ID NO: 1676904 - RNA, 19 nt, Artificial Sequence
  Description of Artificial Sequence: Synthetic oligonucleotide
accacaaggauugagccau

SEQ ID NO: 1676905 - RNA, 19 nt, Artificial Sequence
  Description of Artificial Sequence: Synthetic oligonucleotide
cuagguucuuguacaguac

SEQ ID NO: 1676906 - RNA, 19 nt, Artificial Sequence
  Description of Artificial Sequence: Synthetic oligonucleotide
acucguguagaacaucgaa

SEQ ID NO: 1676907 - RNA, 19 nt, Artificial Sequence
  Description of Artificial Sequence: Synthetic oligonucleotide
gacccuuuacuacauuguc

SEQ ID NO: 1676908 - RNA, 19 nt, Artificial Sequence
  Description of Artificial Sequence: Synthetic oligonucleotide
agacgaaacgaguaucuua

SEQ ID NO: 1676909 - RNA, 19 nt, Artificial Sequence
  Description of Artificial Sequence: Synthetic oligonucleotide
uggccuuaugugcaugcug

SEQ ID NO: 1676910 - RNA, 19 nt, Artificial Sequence
  Description of Artificial Sequence: Synthetic oligonucleotide
augugcaugcugaaaauca

SEQ ID NO: 1676911 - RNA, 19 nt, Artificial Sequence
  Description of Artificial Sequence: Synthetic oligonucleotide
auggucaguagcagaaggg

SEQ ID NO: 1676912 - RNA, 19 nt, Artificial Sequence
  Description of Artificial Sequence: Synthetic oligonucleotide
aaucugccgaggaguaaac

SEQ ID NO: 1676913 - RNA, 19 nt, Artificial Sequence
  Description of Artificial Sequence: Synthetic oligonucleotide
uucuuggucgauacugcaa

SEQ ID NO: 1676914 - RNA, 19 nt, Artificial Sequence
  Description of Artificial Sequence: Synthetic oligonucleotide
aguucguucagugcagucu

SEQ ID NO: 1676915 - RNA, 19 nt, Artificial Sequence
  Description of Artificial Sequence: Synthetic oligonucleotide
uuggucgauacugcaauac

SEQ ID NO: 1676916 - RNA, 19 nt, Artificial Sequence
  Description of Artificial Sequence: Synthetic oligonucleotide
ccaacucauaagaacuugg

SEQ ID NO: 1676917 - RNA, 19 nt, Artificial Sequence
  Description of Artificial Sequence: Synthetic oligonucleotide
aucagguauccuuuacaga

SEQ ID NO: 1676918 - RNA, 19 nt, Artificial Sequence
  Description of Artificial Sequence: Synthetic oligonucleotide
auuauacuagguucuugua

SEQ ID NO: 1676919 - RNA, 19 nt, Artificial Sequence
  Description of Artificial Sequence: Synthetic oligonucleotide
agauagcaauuuguggguc

SEQ ID NO: 1676920 - RNA, 19 nt, Artificial Sequence
  Description of Artificial Sequence: Synthetic oligonucleotide
ugacugcccauuauuucgu

SEQ ID NO: 1676921 - RNA, 19 nt, Artificial Sequence
  Description of Artificial Sequence: Synthetic oligonucleotide
uucguucagugcagucugg

SEQ ID NO: 1676922 - RNA, 19 nt, Artificial Sequence
  Description of Artificial Sequence: Synthetic oligonucleotide
ucuaauggauuuguuucau

SEQ ID NO: 1676923 - RNA, 19 nt, Artificial Sequence
  Description of Artificial Sequence: Synthetic oligonucleotide
uggaugcaaagcugguccc

SEQ ID NO: 1676924 - RNA, 19 nt, Artificial Sequence
  Description of Artificial Sequence: Synthetic oligonucleotide
acuucuaugguaguccuua

SEQ ID NO: 1676925 - RNA, 19 nt, Artificial Sequence
  Description of Artificial Sequence: Synthetic oligonucleotide
uccuacaguaacucgugua

SEQ ID NO: 1676926 - RNA, 19 nt, Artificial Sequence
  Description of Artificial Sequence: Synthetic oligonucleotide
agauauagcaggugaugua

SEQ ID NO: 1676927 - RNA, 19 nt, Artificial Sequence
  Description of Artificial Sequence: Synthetic oligonucleotide
aaaucaauucuuggucgau

SEQ ID NO: 1676928 - RNA, 19 nt, Artificial Sequence
  Description of Artificial Sequence: Synthetic oligonucleotide
aaucaauucuuggucgaua

SEQ ID NO: 1676929 - RNA, 19 nt, Artificial Sequence
  Description of Artificial Sequence: Synthetic oligonucleotide
gcagaguucguucagugca

SEQ ID NO: 1676930 - RNA, 19 nt, Artificial Sequence
  Description of Artificial Sequence: Synthetic oligonucleotide
ucguucagugcagucuggg

SEQ ID NO: 1676931 - RNA, 19 nt, Artificial Sequence
  Description of Artificial Sequence: Synthetic oligonucleotide
caacucauaagaacuugga

SEQ ID NO: 1676932 - RNA, 19 nt, Artificial Sequence
  Description of Artificial Sequence: Synthetic oligonucleotide
uaagugacuucagccgugc

SEQ ID NO: 1676933 - RNA, 19 nt, Artificial Sequence
  Description of Artificial Sequence: Synthetic oligonucleotide
accgcaacaccacaaggau

SEQ ID NO: 1676934 - RNA, 19 nt, Artificial Sequence
  Description of Artificial Sequence: Synthetic oligonucleotide
uucagccgugcuuugcaca

SEQ ID NO: 1676935 - RNA, 19 nt, Artificial Sequence
  Description of Artificial Sequence: Synthetic oligonucleotide
gugauguaaggguugaagu

SEQ ID NO: 1676936 - RNA, 19 nt, Artificial Sequence
  Description of Artificial Sequence: Synthetic oligonucleotide
uaguccuuaucaucuuggu

SEQ ID NO: 1676937 - RNA, 19 nt, Artificial Sequence
  Description of Artificial Sequence: Synthetic oligonucleotide
gaggggaacuaaguggaug

SEQ ID NO: 1676938 - RNA, 19 nt, Artificial Sequence
  Description of Artificial Sequence: Synthetic oligonucleotide
auaagaacuuggaaguuuu

SEQ ID NO: 1676939 - RNA, 19 nt, Artificial Sequence
  Description of Artificial Sequence: Synthetic oligonucleotide
auuauccaaccucaacauu

SEQ ID NO: 1676940 - RNA, 19 nt, Artificial Sequence
  Description of Artificial Sequence: Synthetic oligonucleotide
cauauagaugaauuccaua

SEQ ID NO: 1676941 - RNA, 19 nt, Artificial Sequence
  Description of Artificial Sequence: Synthetic oligonucleotide
ccgaggaguaaacaaacag

SEQ ID NO: 1676942 - RNA, 19 nt, Artificial Sequence
  Description of Artificial Sequence: Synthetic oligonucleotide
ugcaaucugccgaggagua

SEQ ID NO: 1676943 - RNA, 19 nt, Artificial Sequence
  Description of Artificial Sequence: Synthetic oligonucleotide
ucuuagucgccaucuuguc

SEQ ID NO: 1676944 - RNA, 19 nt, Artificial Sequence
  Description of Artificial Sequence: Synthetic oligonucleotide
cuuauguagauggucagua

SEQ ID NO: 1676945 - RNA, 19 nt, Artificial Sequence
  Description of Artificial Sequence: Synthetic oligonucleotide
cagaguucguucagugcag

SEQ ID NO: 1676946 - RNA, 19 nt, Artificial Sequence
  Description of Artificial Sequence: Synthetic oligonucleotide
auauagcaggugauguaag

SEQ ID NO: 1676947 - RNA, 19 nt, Artificial Sequence
  Description of Artificial Sequence: Synthetic oligonucleotide
gguaccagcuuaaauauaa

SEQ ID NO: 1676948 - RNA, 19 nt, Artificial Sequence
  Description of Artificial Sequence: Synthetic oligonucleotide
guuccuacaguaacucgug

SEQ ID NO: 1676949 - RNA, 19 nt, Artificial Sequence
  Description of Artificial Sequence: Synthetic oligonucleotide
aauacaggucuuacagaau

SEQ ID NO: 1676950 - RNA, 19 nt, Artificial Sequence
  Description of Artificial Sequence: Synthetic oligonucleotide
gacgaaacgaguaucuuau

SEQ ID NO: 1676951 - RNA, 19 nt, Artificial Sequence
  Description of Artificial Sequence: Synthetic oligonucleotide
ugcuuugcacacugugaga

SEQ ID NO: 1676952 - RNA, 19 nt, Artificial Sequence
  Description of Artificial Sequence: Synthetic oligonucleotide
agguucuuguacaguacuc

SEQ ID NO: 1676953 - RNA, 19 nt, Artificial Sequence
  Description of Artificial Sequence: Synthetic oligonucleotide
gguuagccggcuuuagcag

SEQ ID NO: 1676954 - RNA, 19 nt, Artificial Sequence
  Description of Artificial Sequence: Synthetic oligonucleotide
aaauuccaauucacgcuga

SEQ ID NO: 1676955 - RNA, 19 nt, Artificial Sequence
  Description of Artificial Sequence: Synthetic oligonucleotide
uuccuacaguaacucgugu

SEQ ID NO: 1676956 - RNA, 19 nt, Artificial Sequence
  Description of Artificial Sequence: Synthetic oligonucleotide
cacaccuaagugacuucag

SEQ ID NO: 1676957 - RNA, 19 nt, Artificial Sequence
  Description of Artificial Sequence: Synthetic oligonucleotide
gcuccuaguagaaacaaca

SEQ ID NO: 1676958 - RNA, 19 nt, Artificial Sequence
  Description of Artificial Sequence: Synthetic oligonucleotide
caaucuagacagauagcaa

SEQ ID NO: 1676959 - RNA, 19 nt, Artificial Sequence
  Description of Artificial Sequence: Synthetic oligonucleotide
uuagccggcuuuagcaguu

SEQ ID NO: 1676960 - RNA, 19 nt, Artificial Sequence
  Description of Artificial Sequence: Synthetic oligonucleotide
cuuagucgccaucuuguca

SEQ ID NO: 1676961 - RNA, 19 nt, Artificial Sequence
  Description of Artificial Sequence: Synthetic oligonucleotide
gccauucgugguuagccgg

SEQ ID NO: 1676962 - RNA, 19 nt, Artificial Sequence
  Description of Artificial Sequence: Synthetic oligonucleotide
gugguuagccggcuuuagc

SEQ ID NO: 1676963 - RNA, 19 nt, Artificial Sequence
  Description of Artificial Sequence: Synthetic oligonucleotide
acugugagacgaaacgagu

SEQ ID NO: 1676964 - RNA, 19 nt, Artificial Sequence
  Description of Artificial Sequence: Synthetic oligonucleotide
agacccuuuacuacauugu

SEQ ID NO: 1676965 - RNA, 19 nt, Artificial Sequence
  Description of Artificial Sequence: Synthetic oligonucleotide
acaaggauugagccauuuu

SEQ ID NO: 1676966 - RNA, 19 nt, Artificial Sequence
  Description of Artificial Sequence: Synthetic oligonucleotide
agccgugcuuugcacacug

SEQ ID NO: 1676967 - RNA, 19 nt, Artificial Sequence
  Description of Artificial Sequence: Synthetic oligonucleotide
uggguagccauucgugguu

SEQ ID NO: 1676968 - RNA, 19 nt, Artificial Sequence
  Description of Artificial Sequence: Synthetic oligonucleotide
aguaacucguguagaacau

SEQ ID NO: 1676969 - RNA, 19 nt, Artificial Sequence
  Description of Artificial Sequence: Synthetic oligonucleotide
acgaaacgaguaucuuaug

SEQ ID NO: 1676970 - RNA, 19 nt, Artificial Sequence
  Description of Artificial Sequence: Synthetic oligonucleotide
ggauugagccauuuuacua

SEQ ID NO: 1676971 - RNA, 19 nt, Artificial Sequence
  Description of Artificial Sequence: Synthetic oligonucleotide
gcaacaggcaagcaaaaua

SEQ ID NO: 1676972 - RNA, 19 nt, Artificial Sequence
  Description of Artificial Sequence: Synthetic oligonucleotide
uuacuacauuguccccuga

SEQ ID NO: 1676973 - RNA, 19 nt, Artificial Sequence
  Description of Artificial Sequence: Synthetic oligonucleotide
acugcccauuauuucguaa

SEQ ID NO: 1676974 - RNA, 19 nt, Artificial Sequence
  Description of Artificial Sequence: Synthetic oligonucleotide
aacaucgaaugaauuucuu

SEQ ID NO: 1676975 - RNA, 19 nt, Artificial Sequence
  Description of Artificial Sequence: Synthetic oligonucleotide
ccuuguccuacccaaaauc

SEQ ID NO: 1676976 - RNA, 19 nt, Artificial Sequence
  Description of Artificial Sequence: Synthetic oligonucleotide
cugcccauuauuucguaaa

SEQ ID NO: 1676977 - RNA, 19 nt, Artificial Sequence
  Description of Artificial Sequence: Synthetic oligonucleotide
uacuagguucuuguacagu

SEQ ID NO: 1676978 - RNA, 19 nt, Artificial Sequence
  Description of Artificial Sequence: Synthetic oligonucleotide
caccuuggacaaucauugc

SEQ ID NO: 1676979 - RNA, 19 nt, Artificial Sequence
  Description of Artificial Sequence: Synthetic oligonucleotide
aauuugugggucacuucua

SEQ ID NO: 1676980 - RNA, 19 nt, Artificial Sequence
  Description of Artificial Sequence: Synthetic oligonucleotide
accuuugaaaugucaucuu

SEQ ID NO: 1676981 - RNA, 19 nt, Artificial Sequence
  Description of Artificial Sequence: Synthetic oligonucleotide
aacucguguagaacaucga

SEQ ID NO: 1676982 - RNA, 19 nt, Artificial Sequence
  Description of Artificial Sequence: Synthetic oligonucleotide
ugccacaccuuggacaauc

SEQ ID NO: 1676983 - RNA, 19 nt, Artificial Sequence
  Description of Artificial Sequence: Synthetic oligonucleotide
gaauguauggaggcauucu

SEQ ID NO: 1676984 - RNA, 19 nt, Artificial Sequence
  Description of Artificial Sequence: Synthetic oligonucleotide
cugugagacgaaacgagua

SEQ ID NO: 1676985 - RNA, 19 nt, Artificial Sequence
  Description of Artificial Sequence: Synthetic oligonucleotide
gaguucguucagugcaguc

SEQ ID NO: 1676986 - RNA, 19 nt, Artificial Sequence
  Description of Artificial Sequence: Synthetic oligonucleotide
ggucgauacugcaauacca

SEQ ID NO: 1676987 - RNA, 19 nt, Artificial Sequence
  Description of Artificial Sequence: Synthetic oligonucleotide
gugagacgaaacgaguauc

SEQ ID NO: 1676988 - RNA, 19 nt, Artificial Sequence
  Description of Artificial Sequence: Synthetic oligonucleotide
gaacaucgaaugaauuucu

SEQ ID NO: 1676989 - RNA, 19 nt, Artificial Sequence
  Description of Artificial Sequence: Synthetic oligonucleotide
cugccgaggaguaaacaaa

SEQ ID NO: 1676990 - RNA, 19 nt, Artificial Sequence
  Description of Artificial Sequence: Synthetic oligonucleotide
ugcacacugugagacgaaa

SEQ ID NO: 1676991 - RNA, 19 nt, Artificial Sequence
  Description of Artificial Sequence: Synthetic oligonucleotide
cacauccaacucauaagaa

SEQ ID NO: 1676992 - RNA, 19 nt, Artificial Sequence
  Description of Artificial Sequence: Synthetic oligonucleotide
gacuucagccgugcuuugc

SEQ ID NO: 1676993 - RNA, 19 nt, Artificial Sequence
  Description of Artificial Sequence: Synthetic oligonucleotide
cuuggacaaucauugcugu

SEQ ID NO: 1676994 - RNA, 19 nt, Artificial Sequence
  Description of Artificial Sequence: Synthetic oligonucleotide
ggaacuaaguggaugcaaa

SEQ ID NO: 1676995 - RNA, 19 nt, Artificial Sequence
  Description of Artificial Sequence: Synthetic oligonucleotide
ucacggcugcacaccuaag

SEQ ID NO: 1676996 - RNA, 19 nt, Artificial Sequence
  Description of Artificial Sequence: Synthetic oligonucleotide
aacugacaauuuagagaca

SEQ ID NO: 1676997 - RNA, 19 nt, Artificial Sequence
  Description of Artificial Sequence: Synthetic oligonucleotide
guaacucguguagaacauc

SEQ ID NO: 1676998 - RNA, 19 nt, Artificial Sequence
  Description of Artificial Sequence: Synthetic oligonucleotide
guagccauucgugguuagc

SEQ ID NO: 1676999 - RNA, 19 nt, Artificial Sequence
  Description of Artificial Sequence: Synthetic oligonucleotide
cucguguagaacaucgaau

SEQ ID NO: 1677000 - RNA, 19 nt, Artificial Sequence
  Description of Artificial Sequence: Synthetic oligonucleotide
caccacaaggauugagcca

SEQ ID NO: 1677001 - RNA, 19 nt, Artificial Sequence
  Description of Artificial Sequence: Synthetic oligonucleotide
caaucugccgaggaguaaa

SEQ ID NO: 1677002 - RNA, 19 nt, Artificial Sequence
  Description of Artificial Sequence: Synthetic oligonucleotide
cuacaguaacucguguaga

SEQ ID NO: 1677003 - RNA, 19 nt, Artificial Sequence
  Description of Artificial Sequence: Synthetic oligonucleotide
ggccuuaugugcaugcuga

SEQ ID NO: 1677004 - RNA, 19 nt, Artificial Sequence
  Description of Artificial Sequence: Synthetic oligonucleotide
ugggccccuuguccuaccc

SEQ ID NO: 1677005 - RNA, 19 nt, Artificial Sequence
  Description of Artificial Sequence: Synthetic oligonucleotide
cagauauagcaggugaugu

SEQ ID NO: 1677006 - RNA, 19 nt, Artificial Sequence
  Description of Artificial Sequence: Synthetic oligonucleotide
ugagacccuuuacuacauu

SEQ ID NO: 1677007 - RNA, 19 nt, Artificial Sequence
  Description of Artificial Sequence: Synthetic oligonucleotide
ccauaguaugauccuuccc

SEQ ID NO: 1677008 - RNA, 19 nt, Artificial Sequence
  Description of Artificial Sequence: Synthetic oligonucleotide
guuagccggcuuuagcagu

SEQ ID NO: 1677009 - RNA, 19 nt, Artificial Sequence
  Description of Artificial Sequence: Synthetic oligonucleotide
ugguaguccuuaucaucuu

SEQ ID NO: 1677010 - RNA, 19 nt, Artificial Sequence
  Description of Artificial Sequence: Synthetic oligonucleotide
agaguucguucagugcagu

SEQ ID NO: 1677011 - RNA, 19 nt, Artificial Sequence
  Description of Artificial Sequence: Synthetic oligonucleotide
caugggguacgaauuuucu

SEQ ID NO: 1677012 - RNA, 19 nt, Artificial Sequence
  Description of Artificial Sequence: Synthetic oligonucleotide
uccucuuagucgccaucuu

SEQ ID NO: 1677013 - RNA, 19 nt, Artificial Sequence
  Description of Artificial Sequence: Synthetic oligonucleotide
aacuugguugccacaccuu

SEQ ID NO: 1677014 - RNA, 19 nt, Artificial Sequence
  Description of Artificial Sequence: Synthetic oligonucleotide
caauuuagagacagacgau

SEQ ID NO: 1677015 - RNA, 19 nt, Artificial Sequence
  Description of Artificial Sequence: Synthetic oligonucleotide
cacuguuguuggcuugauc

SEQ ID NO: 1677016 - RNA, 19 nt, Artificial Sequence
  Description of Artificial Sequence: Synthetic oligonucleotide
ccucuuagucgccaucuug

SEQ ID NO: 1677017 - RNA, 19 nt, Artificial Sequence
  Description of Artificial Sequence: Synthetic oligonucleotide
ccauucgugguuagccggc

SEQ ID NO: 1677018 - RNA, 19 nt, Artificial Sequence
  Description of Artificial Sequence: Synthetic oligonucleotide
cugugcaaucugccgagga

SEQ ID NO: 1677019 - RNA, 19 nt, Artificial Sequence
  Description of Artificial Sequence: Synthetic oligonucleotide
ccuuuacuacauugucccc

SEQ ID NO: 1677020 - RNA, 19 nt, Artificial Sequence
  Description of Artificial Sequence: Synthetic oligonucleotide
caccauugcacagcacauc

SEQ ID NO: 1677021 - RNA, 19 nt, Artificial Sequence
  Description of Artificial Sequence: Synthetic oligonucleotide
gugggucacuucuauggua

SEQ ID NO: 1677022 - RNA, 19 nt, Artificial Sequence
  Description of Artificial Sequence: Synthetic oligonucleotide
agccggcuuuagcaguuca

SEQ ID NO: 1677023 - RNA, 19 nt, Artificial Sequence
  Description of Artificial Sequence: Synthetic oligonucleotide
aucugccgaggaguaaaca

SEQ ID NO: 1677024 - RNA, 19 nt, Artificial Sequence
  Description of Artificial Sequence: Synthetic oligonucleotide
cuaugguaguccuuaucau

SEQ ID NO: 1677025 - RNA, 19 nt, Artificial Sequence
  Description of Artificial Sequence: Synthetic oligonucleotide
cauaagaacuuggaaguuu

SEQ ID NO: 1677026 - RNA, 19 nt, Artificial Sequence
  Description of Artificial Sequence: Synthetic oligonucleotide
auggccuuaugugcaugcu

SEQ ID NO: 1677027 - RNA, 19 nt, Artificial Sequence
  Description of Artificial Sequence: Synthetic oligonucleotide
gucgauacugcaauaccau

SEQ ID NO: 1677028 - RNA, 19 nt, Artificial Sequence
  Description of Artificial Sequence: Synthetic oligonucleotide
cuccuaguagaaacaacau

SEQ ID NO: 1677029 - RNA, 19 nt, Artificial Sequence
  Description of Artificial Sequence: Synthetic oligonucleotide
cuuguacaguacucuauuu

SEQ ID NO: 1677030 - RNA, 19 nt, Artificial Sequence
  Description of Artificial Sequence: Synthetic oligonucleotide
caggucuuacagaauguau

SEQ ID NO: 1677031 - RNA, 19 nt, Artificial Sequence
  Description of Artificial Sequence: Synthetic oligonucleotide
cggcuuuagcaguucaggc

SEQ ID NO: 1677032 - RNA, 19 nt, Artificial Sequence
  Description of Artificial Sequence: Synthetic oligonucleotide
gugcaaucugccgaggagu

SEQ ID NO: 1677033 - RNA, 19 nt, Artificial Sequence
  Description of Artificial Sequence: Synthetic oligonucleotide
aguccagguaccagcuuaa

SEQ ID NO: 1677034 - RNA, 19 nt, Artificial Sequence
  Description of Artificial Sequence: Synthetic oligonucleotide
gagacagacgauggccuua

SEQ ID NO: 1677035 - RNA, 19 nt, Artificial Sequence
  Description of Artificial Sequence: Synthetic oligonucleotide
auucgugguuagccggcuu

SEQ ID NO: 1677036 - RNA, 19 nt, Artificial Sequence
  Description of Artificial Sequence: Synthetic oligonucleotide
guagaacaucgaaugaauu

SEQ ID NO: 1677037 - RNA, 19 nt, Artificial Sequence
  Description of Artificial Sequence: Synthetic oligonucleotide
ggcuugaucagguauccuu

SEQ ID NO: 1677038 - RNA, 19 nt, Artificial Sequence
  Description of Artificial Sequence: Synthetic oligonucleotide
gagucacggcugcacaccu

SEQ ID NO: 1677039 - RNA, 19 nt, Artificial Sequence
  Description of Artificial Sequence: Synthetic oligonucleotide
gucgccaucuugucauaua

SEQ ID NO: 1677040 - RNA, 19 nt, Artificial Sequence
  Description of Artificial Sequence: Synthetic oligonucleotide
agucgccaucuugucauau

SEQ ID NO: 1677041 - RNA, 19 nt, Artificial Sequence
  Description of Artificial Sequence: Synthetic oligonucleotide
gcacaccuaagugacuuca

SEQ ID NO: 1677042 - RNA, 19 nt, Artificial Sequence
  Description of Artificial Sequence: Synthetic oligonucleotide
gacugcccauuauuucgua

SEQ ID NO: 1677043 - RNA, 19 nt, Artificial Sequence
  Description of Artificial Sequence: Synthetic oligonucleotide
ucacuguuguuggcuugau

SEQ ID NO: 1677044 - RNA, 19 nt, Artificial Sequence
  Description of Artificial Sequence: Synthetic oligonucleotide
cauuucuaauggauuuguu

SEQ ID NO: 1677045 - RNA, 19 nt, Artificial Sequence
  Description of Artificial Sequence: Synthetic oligonucleotide
cgaggaguaaacaaacagu

SEQ ID NO: 1677046 - RNA, 19 nt, Artificial Sequence
  Description of Artificial Sequence: Synthetic oligonucleotide
uagucgccaucuugucaua

SEQ ID NO: 1677047 - RNA, 19 nt, Artificial Sequence
  Description of Artificial Sequence: Synthetic oligonucleotide
uguccccugacugcccauu

SEQ ID NO: 1677048 - RNA, 19 nt, Artificial Sequence
  Description of Artificial Sequence: Synthetic oligonucleotide
ccacuuuucuaaauauacu

SEQ ID NO: 1677049 - RNA, 19 nt, Artificial Sequence
  Description of Artificial Sequence: Synthetic oligonucleotide
gcacacugugagacgaaac

SEQ ID NO: 1677050 - RNA, 19 nt, Artificial Sequence
  Description of Artificial Sequence: Synthetic oligonucleotide
cuccucuuagucgccaucu

SEQ ID NO: 1677051 - RNA, 19 nt, Artificial Sequence
  Description of Artificial Sequence: Synthetic oligonucleotide
cgaaacgaguaucuuaugu

SEQ ID NO: 1677052 - RNA, 19 nt, Artificial Sequence
  Description of Artificial Sequence: Synthetic oligonucleotide
gggguacgaauuuucuccu

SEQ ID NO: 1677053 - RNA, 19 nt, Artificial Sequence
  Description of Artificial Sequence: Synthetic oligonucleotide
cgaguaucuuauguagaug

SEQ ID NO: 1677054 - RNA, 19 nt, Artificial Sequence
  Description of Artificial Sequence: Synthetic oligonucleotide
agaggggaacuaaguggau

SEQ ID NO: 1677055 - RNA, 19 nt, Artificial Sequence
  Description of Artificial Sequence: Synthetic oligonucleotide
gccggcuuuagcaguucag

SEQ ID NO: 1677056 - RNA, 19 nt, Artificial Sequence
  Description of Artificial Sequence: Synthetic oligonucleotide
cguguagaacaucgaauga

SEQ ID NO: 1677057 - RNA, 19 nt, Artificial Sequence
  Description of Artificial Sequence: Synthetic oligonucleotide
agguaccagcuuaaauaua

SEQ ID NO: 1677058 - RNA, 19 nt, Artificial Sequence
  Description of Artificial Sequence: Synthetic oligonucleotide
ccauuauuucguaaacaau

SEQ ID NO: 1677059 - RNA, 19 nt, Artificial Sequence
  Description of Artificial Sequence: Synthetic oligonucleotide
gccauuuuacuaguguaau

SEQ ID NO: 1677060 - RNA, 19 nt, Artificial Sequence
  Description of Artificial Sequence: Synthetic oligonucleotide
guaccagcuuaaauauaau

SEQ ID NO: 1677061 - RNA, 19 nt, Artificial Sequence
  Description of Artificial Sequence: Synthetic oligonucleotide
uagccggcuuuagcaguuc

SEQ ID NO: 1677062 - RNA, 19 nt, Artificial Sequence
  Description of Artificial Sequence: Synthetic oligonucleotide
gcuugaucagguauccuuu

SEQ ID NO: 1677063 - RNA, 19 nt, Artificial Sequence
  Description of Artificial Sequence: Synthetic oligonucleotide
gccuuaugugcaugcugaa

SEQ ID NO: 1677064 - RNA, 19 nt, Artificial Sequence
  Description of Artificial Sequence: Synthetic oligonucleotide
cguaaacaaucuagacaga

SEQ ID NO: 1677065 - RNA, 19 nt, Artificial Sequence
  Description of Artificial Sequence: Synthetic oligonucleotide
ccuuaugugcaugcugaaa

SEQ ID NO: 1677066 - RNA, 19 nt, Artificial Sequence
  Description of Artificial Sequence: Synthetic oligonucleotide
ccuuuggguagccauucgu

SEQ ID NO: 1677067 - RNA, 19 nt, Artificial Sequence
  Description of Artificial Sequence: Synthetic oligonucleotide
cacuuggauugcuccuagu

SEQ ID NO: 1677068 - RNA, 19 nt, Artificial Sequence
  Description of Artificial Sequence: Synthetic oligonucleotide
uugccacaccuuggacaau

SEQ ID NO: 1677069 - RNA, 19 nt, Artificial Sequence
  Description of Artificial Sequence: Synthetic oligonucleotide
cauucgugguuagccggcu

SEQ ID NO: 1677070 - RNA, 19 nt, Artificial Sequence
  Description of Artificial Sequence: Synthetic oligonucleotide
agucacggcugcacaccua

SEQ ID NO: 1677071 - RNA, 19 nt, Artificial Sequence
  Description of Artificial Sequence: Synthetic oligonucleotide
cgugguuagccggcuuuag

SEQ ID NO: 1677072 - RNA, 19 nt, Artificial Sequence
  Description of Artificial Sequence: Synthetic oligonucleotide
cacuucuaugguaguccuu

SEQ ID NO: 1677073 - RNA, 19 nt, Artificial Sequence
  Description of Artificial Sequence: Synthetic oligonucleotide
gguauccuuuacagauaua

SEQ ID NO: 1677074 - RNA, 19 nt, Artificial Sequence
  Description of Artificial Sequence: Synthetic oligonucleotide
ggguagccauucgugguua

SEQ ID NO: 1677075 - RNA, 19 nt, Artificial Sequence
  Description of Artificial Sequence: Synthetic oligonucleotide
cccuuguccuacccaaaau

SEQ ID NO: 1677076 - RNA, 19 nt, Artificial Sequence
  Description of Artificial Sequence: Synthetic oligonucleotide
gccccuuguccuacccaaa

SEQ ID NO: 1677077 - RNA, 19 nt, Artificial Sequence
  Description of Artificial Sequence: Synthetic oligonucleotide
gccgugcuuugcacacugu

SEQ ID NO: 1677078 - RNA, 19 nt, Artificial Sequence
  Description of Artificial Sequence: Synthetic oligonucleotide
cagugcagucugggccccu

SEQ ID NO: 1677079 - RNA, 19 nt, Artificial Sequence
  Description of Artificial Sequence: Synthetic oligonucleotide
aaguagaugaauguggucc

SEQ ID NO: 1677080 - RNA, 19 nt, Artificial Sequence
  Description of Artificial Sequence: Synthetic oligonucleotide
aagacuucacuuuucgugg

SEQ ID NO: 1677081 - RNA, 19 nt, Artificial Sequence
  Description of Artificial Sequence: Synthetic oligonucleotide
aaucuuagcaucucuaugu

SEQ ID NO: 1677082 - RNA, 19 nt, Artificial Sequence
  Description of Artificial Sequence: Synthetic oligonucleotide
acauacaaaucuuagcauc

SEQ ID NO: 1677083 - RNA, 19 nt, Artificial Sequence
  Description of Artificial Sequence: Synthetic oligonucleotide
ucuuauauauguaggggcc

SEQ ID NO: 1677084 - RNA, 19 nt, Artificial Sequence
  Description of Artificial Sequence: Synthetic oligonucleotide
augaccuuacaguacauac

SEQ ID NO: 1677085 - RNA, 19 nt, Artificial Sequence
  Description of Artificial Sequence: Synthetic oligonucleotide
aaaucucagcccaauaucg

SEQ ID NO: 1677086 - RNA, 19 nt, Artificial Sequence
  Description of Artificial Sequence: Synthetic oligonucleotide
cagaguaucaggcagaaug

SEQ ID NO: 1677087 - RNA, 19 nt, Artificial Sequence
  Description of Artificial Sequence: Synthetic oligonucleotide
acaguaggaacuuaauauc

SEQ ID NO: 1677088 - RNA, 19 nt, Artificial Sequence
  Description of Artificial Sequence: Synthetic oligonucleotide
ugauagauguucaaacaug

SEQ ID NO: 1677089 - RNA, 19 nt, Artificial Sequence
  Description of Artificial Sequence: Synthetic oligonucleotide
aagacgaaguucugaguac

SEQ ID NO: 1677090 - RNA, 19 nt, Artificial Sequence
  Description of Artificial Sequence: Synthetic oligonucleotide
aauaucgccccgaauggcc

SEQ ID NO: 1677091 - RNA, 19 nt, Artificial Sequence
  Description of Artificial Sequence: Synthetic oligonucleotide
uguucaaacaugacuggcc

SEQ ID NO: 1677092 - RNA, 19 nt, Artificial Sequence
  Description of Artificial Sequence: Synthetic oligonucleotide
aagguagauggaaugacac

SEQ ID NO: 1677093 - RNA, 19 nt, Artificial Sequence
  Description of Artificial Sequence: Synthetic oligonucleotide
ugagucaagcuugugauag

SEQ ID NO: 1677094 - RNA, 19 nt, Artificial Sequence
  Description of Artificial Sequence: Synthetic oligonucleotide
uccuacuguaguaucagag

SEQ ID NO: 1677095 - RNA, 19 nt, Artificial Sequence
  Description of Artificial Sequence: Synthetic oligonucleotide
cuauguaugaccuuccuca

SEQ ID NO: 1677096 - RNA, 19 nt, Artificial Sequence
  Description of Artificial Sequence: Synthetic oligonucleotide
uaugaccuuccucauacag

SEQ ID NO: 1677097 - RNA, 19 nt, Artificial Sequence
  Description of Artificial Sequence: Synthetic oligonucleotide
agugcaaaugccaagguag

SEQ ID NO: 1677098 - RNA, 19 nt, Artificial Sequence
  Description of Artificial Sequence: Synthetic oligonucleotide
uggauaugaguacaugacc

SEQ ID NO: 1677099 - RNA, 19 nt, Artificial Sequence
  Description of Artificial Sequence: Synthetic oligonucleotide
gauggauaugaguacauga

SEQ ID NO: 1677100 - RNA, 19 nt, Artificial Sequence
  Description of Artificial Sequence: Synthetic oligonucleotide
ugucagaaaucucagccca

SEQ ID NO: 1677101 - RNA, 19 nt, Artificial Sequence
  Description of Artificial Sequence: Synthetic oligonucleotide
uacuccaccauccacgugu

SEQ ID NO: 1677102 - RNA, 19 nt, Artificial Sequence
  Description of Artificial Sequence: Synthetic oligonucleotide
uagauggaaugacaccucg

SEQ ID NO: 1677103 - RNA, 19 nt, Artificial Sequence
  Description of Artificial Sequence: Synthetic oligonucleotide
ugaguacaugaccuuacag

SEQ ID NO: 1677104 - RNA, 19 nt, Artificial Sequence
  Description of Artificial Sequence: Synthetic oligonucleotide
guaucagaguaucaggcag

SEQ ID NO: 1677105 - RNA, 19 nt, Artificial Sequence
  Description of Artificial Sequence: Synthetic oligonucleotide
ggagauaaggcauauggug

SEQ ID NO: 1677106 - RNA, 19 nt, Artificial Sequence
  Description of Artificial Sequence: Synthetic oligonucleotide
agauaaggcauauggugag

SEQ ID NO: 1677107 - RNA, 19 nt, Artificial Sequence
  Description of Artificial Sequence: Synthetic oligonucleotide
aaucucagcccaauaucgc

SEQ ID NO: 1677108 - RNA, 19 nt, Artificial Sequence
  Description of Artificial Sequence: Synthetic oligonucleotide
auggauaugaguacaugac

SEQ ID NO: 1677109 - RNA, 19 nt, Artificial Sequence
  Description of Artificial Sequence: Synthetic oligonucleotide
gaaauagggcgauccaugc

SEQ ID NO: 1677110 - RNA, 19 nt, Artificial Sequence
  Description of Artificial Sequence: Synthetic oligonucleotide
acuauguaugaccuuccuc

SEQ ID NO: 1677111 - RNA, 19 nt, Artificial Sequence
  Description of Artificial Sequence: Synthetic oligonucleotide
guaggaacuuaauaucugc

SEQ ID NO: 1677112 - RNA, 19 nt, Artificial Sequence
  Description of Artificial Sequence: Synthetic oligonucleotide
agcaaguagaugaaugugg

SEQ ID NO: 1677113 - RNA, 19 nt, Artificial Sequence
  Description of Artificial Sequence: Synthetic oligonucleotide
guucaaacaugacuggccc

SEQ ID NO: 1677114 - RNA, 19 nt, Artificial Sequence
  Description of Artificial Sequence: Synthetic oligonucleotide
ugguguauggugcugucug

SEQ ID NO: 1677115 - RNA, 19 nt, Artificial Sequence
  Description of Artificial Sequence: Synthetic oligonucleotide
uaugaguacaugaccuuac

SEQ ID NO: 1677116 - RNA, 19 nt, Artificial Sequence
  Description of Artificial Sequence: Synthetic oligonucleotide
uacaaaucuuagcaucucu

SEQ ID NO: 1677117 - RNA, 19 nt, Artificial Sequence
  Description of Artificial Sequence: Synthetic oligonucleotide
cucuaugugucucacuggc

SEQ ID NO: 1677118 - RNA, 19 nt, Artificial Sequence
  Description of Artificial Sequence: Synthetic oligonucleotide
gugcauaugaguuccagca

SEQ ID NO: 1677119 - RNA, 19 nt, Artificial Sequence
  Description of Artificial Sequence: Synthetic oligonucleotide
agacgaaguucugaguacc

SEQ ID NO: 1677120 - RNA, 19 nt, Artificial Sequence
  Description of Artificial Sequence: Synthetic oligonucleotide
aaugacaccucggccguac

SEQ ID NO: 1677121 - RNA, 19 nt, Artificial Sequence
  Description of Artificial Sequence: Synthetic oligonucleotide
uggauguguaacuauguau

SEQ ID NO: 1677122 - RNA, 19 nt, Artificial Sequence
  Description of Artificial Sequence: Synthetic oligonucleotide
ugugcauaugaguuccagc

SEQ ID NO: 1677123 - RNA, 19 nt, Artificial Sequence
  Description of Artificial Sequence: Synthetic oligonucleotide
aguuccacuuuuccuuuac

SEQ ID NO: 1677124 - RNA, 19 nt, Artificial Sequence
  Description of Artificial Sequence: Synthetic oligonucleotide
aguaucagaguaucaggca

SEQ ID NO: 1677125 - RNA, 19 nt, Artificial Sequence
  Description of Artificial Sequence: Synthetic oligonucleotide
agcacguacucagacagcg

SEQ ID NO: 1677126 - RNA, 19 nt, Artificial Sequence
  Description of Artificial Sequence: Synthetic oligonucleotide
gaccuuacaguacauacaa

SEQ ID NO: 1677127 - RNA, 19 nt, Artificial Sequence
  Description of Artificial Sequence: Synthetic oligonucleotide
aggaccacugcaucacggc

SEQ ID NO: 1677128 - RNA, 19 nt, Artificial Sequence
  Description of Artificial Sequence: Synthetic oligonucleotide
ucucuaugugucucacugg

SEQ ID NO: 1677129 - RNA, 19 nt, Artificial Sequence
  Description of Artificial Sequence: Synthetic oligonucleotide
ggaacuuaauaucugcaug

SEQ ID NO: 1677130 - RNA, 19 nt, Artificial Sequence
  Description of Artificial Sequence: Synthetic oligonucleotide
ucucagcccaauaucgccc

SEQ ID NO: 1677131 - RNA, 19 nt, Artificial Sequence
  Description of Artificial Sequence: Synthetic oligonucleotide
acguguuugguccccacuc

SEQ ID NO: 1677132 - RNA, 19 nt, Artificial Sequence
  Description of Artificial Sequence: Synthetic oligonucleotide
acgaucagccgagagaagg

SEQ ID NO: 1677133 - RNA, 19 nt, Artificial Sequence
  Description of Artificial Sequence: Synthetic oligonucleotide
uccacgaucagccgagaga

SEQ ID NO: 1677134 - RNA, 19 nt, Artificial Sequence
  Description of Artificial Sequence: Synthetic oligonucleotide
auguguaacuauguaugac

SEQ ID NO: 1677135 - RNA, 19 nt, Artificial Sequence
  Description of Artificial Sequence: Synthetic oligonucleotide
gauguguaacuauguauga

SEQ ID NO: 1677136 - RNA, 19 nt, Artificial Sequence
  Description of Artificial Sequence: Synthetic oligonucleotide
aguagaugaaugugguccu

SEQ ID NO: 1677137 - RNA, 19 nt, Artificial Sequence
  Description of Artificial Sequence: Synthetic oligonucleotide
aaacauccaccccaauccu

SEQ ID NO: 1677138 - RNA, 19 nt, Artificial Sequence
  Description of Artificial Sequence: Synthetic oligonucleotide
aacuauguaugaccuuccu

SEQ ID NO: 1677139 - RNA, 19 nt, Artificial Sequence
  Description of Artificial Sequence: Synthetic oligonucleotide
gagauaaggcauaugguga

SEQ ID NO: 1677140 - RNA, 19 nt, Artificial Sequence
  Description of Artificial Sequence: Synthetic oligonucleotide
guucugaguacccagccac

SEQ ID NO: 1677141 - RNA, 19 nt, Artificial Sequence
  Description of Artificial Sequence: Synthetic oligonucleotide
guacugucgagcaagcugc

SEQ ID NO: 1677142 - RNA, 19 nt, Artificial Sequence
  Description of Artificial Sequence: Synthetic oligonucleotide
cuuauauauguaggggccc

SEQ ID NO: 1677143 - RNA, 19 nt, Artificial Sequence
  Description of Artificial Sequence: Synthetic oligonucleotide
ugagauuccuacuguagua

SEQ ID NO: 1677144 - RNA, 19 nt, Artificial Sequence
  Description of Artificial Sequence: Synthetic oligonucleotide
uuacugagauuccuacugu

SEQ ID NO: 1677145 - RNA, 19 nt, Artificial Sequence
  Description of Artificial Sequence: Synthetic oligonucleotide
ucagccgagagaaggccag

SEQ ID NO: 1677146 - RNA, 19 nt, Artificial Sequence
  Description of Artificial Sequence: Synthetic oligonucleotide
ugcgcuaucucuucuugcu

SEQ ID NO: 1677147 - RNA, 19 nt, Artificial Sequence
  Description of Artificial Sequence: Synthetic oligonucleotide
uccuuaaucccagagcccu

SEQ ID NO: 1677148 - RNA, 19 nt, Artificial Sequence
  Description of Artificial Sequence: Synthetic oligonucleotide
cucaugguccaguccagcg

SEQ ID NO: 1677149 - RNA, 19 nt, Artificial Sequence
  Description of Artificial Sequence: Synthetic oligonucleotide
acacauggcgcccauccag

SEQ ID NO: 1677150 - RNA, 19 nt, Artificial Sequence
  Description of Artificial Sequence: Synthetic oligonucleotide
auacaguaggaacuuaaua

SEQ ID NO: 1677151 - RNA, 19 nt, Artificial Sequence
  Description of Artificial Sequence: Synthetic oligonucleotide
ucauccggcagcacguggc

SEQ ID NO: 1677152 - RNA, 19 nt, Artificial Sequence
  Description of Artificial Sequence: Synthetic oligonucleotide
uuagccuucuacacauuuc

SEQ ID NO: 1677153 - RNA, 19 nt, Artificial Sequence
  Description of Artificial Sequence: Synthetic oligonucleotide
agaaauagggcgauccaug

SEQ ID NO: 1677154 - RNA, 19 nt, Artificial Sequence
  Description of Artificial Sequence: Synthetic oligonucleotide
gauaaggcauauggugagg

SEQ ID NO: 1677155 - RNA, 19 nt, Artificial Sequence
  Description of Artificial Sequence: Synthetic oligonucleotide
aucuuagcaucucuaugug

SEQ ID NO: 1677156 - RNA, 19 nt, Artificial Sequence
  Description of Artificial Sequence: Synthetic oligonucleotide
ugccaagguagauggaaug

SEQ ID NO: 1677157 - RNA, 19 nt, Artificial Sequence
  Description of Artificial Sequence: Synthetic oligonucleotide
aaggcauauggugaggaaa

SEQ ID NO: 1677158 - RNA, 19 nt, Artificial Sequence
  Description of Artificial Sequence: Synthetic oligonucleotide
auagcaggagguggaaugg

SEQ ID NO: 1677159 - RNA, 19 nt, Artificial Sequence
  Description of Artificial Sequence: Synthetic oligonucleotide
auagauguucaaacaugac

SEQ ID NO: 1677160 - RNA, 19 nt, Artificial Sequence
  Description of Artificial Sequence: Synthetic oligonucleotide
uuauauauguaggggcccu

SEQ ID NO: 1677161 - RNA, 19 nt, Artificial Sequence
  Description of Artificial Sequence: Synthetic oligonucleotide
auuccuacuguaguaucag

SEQ ID NO: 1677162 - RNA, 19 nt, Artificial Sequence
  Description of Artificial Sequence: Synthetic oligonucleotide
auauguaggggcccucucu

SEQ ID NO: 1677163 - RNA, 19 nt, Artificial Sequence
  Description of Artificial Sequence: Synthetic oligonucleotide
aaggaccacugcaucacgg

SEQ ID NO: 1677164 - RNA, 19 nt, Artificial Sequence
  Description of Artificial Sequence: Synthetic oligonucleotide
gcauaugaguuccagcaag

SEQ ID NO: 1677165 - RNA, 19 nt, Artificial Sequence
  Description of Artificial Sequence: Synthetic oligonucleotide
ccggcguucacaaacaccc

SEQ ID NO: 1677166 - RNA, 19 nt, Artificial Sequence
  Description of Artificial Sequence: Synthetic oligonucleotide
guagguggugagcucaagc

SEQ ID NO: 1677167 - RNA, 19 nt, Artificial Sequence
  Description of Artificial Sequence: Synthetic oligonucleotide
cccaauaucgccccgaaug

SEQ ID NO: 1677168 - RNA, 19 nt, Artificial Sequence
  Description of Artificial Sequence: Synthetic oligonucleotide
gcagcacguacucagacag

SEQ ID NO: 1677169 - RNA, 19 nt, Artificial Sequence
  Description of Artificial Sequence: Synthetic oligonucleotide
ucugaguacccagccacag

SEQ ID NO: 1677170 - RNA, 19 nt, Artificial Sequence
  Description of Artificial Sequence: Synthetic oligonucleotide
aguaggaacuuaauaucug

SEQ ID NO: 1677171 - RNA, 19 nt, Artificial Sequence
  Description of Artificial Sequence: Synthetic oligonucleotide
auaggagcgaaggguauag

SEQ ID NO: 1677172 - RNA, 19 nt, Artificial Sequence
  Description of Artificial Sequence: Synthetic oligonucleotide
ucccuuuagccuucuacac

SEQ ID NO: 1677173 - RNA, 19 nt, Artificial Sequence
  Description of Artificial Sequence: Synthetic oligonucleotide
agucagugagucaagcuug

SEQ ID NO: 1677174 - RNA, 19 nt, Artificial Sequence
  Description of Artificial Sequence: Synthetic oligonucleotide
ugcauaugaguuccagcaa

SEQ ID NO: 1677175 - RNA, 19 nt, Artificial Sequence
  Description of Artificial Sequence: Synthetic oligonucleotide
aauggagauaaggcauaug

SEQ ID NO: 1677176 - RNA, 19 nt, Artificial Sequence
  Description of Artificial Sequence: Synthetic oligonucleotide
gaccacugcaucacggcgg

SEQ ID NO: 1677177 - RNA, 19 nt, Artificial Sequence
  Description of Artificial Sequence: Synthetic oligonucleotide
ucuaugugucucacuggcu

SEQ ID NO: 1677178 - RNA, 19 nt, Artificial Sequence
  Description of Artificial Sequence: Synthetic oligonucleotide
gauuccuacuguaguauca

SEQ ID NO: 1677179 - RNA, 19 nt, Artificial Sequence
  Description of Artificial Sequence: Synthetic oligonucleotide
ugaguuccagcaaguagau

SEQ ID NO: 1677180 - RNA, 19 nt, Artificial Sequence
  Description of Artificial Sequence: Synthetic oligonucleotide
auaaggcauauggugagga

SEQ ID NO: 1677181 - RNA, 19 nt, Artificial Sequence
  Description of Artificial Sequence: Synthetic oligonucleotide
gacaccucggccguacucc

SEQ ID NO: 1677182 - RNA, 19 nt, Artificial Sequence
  Description of Artificial Sequence: Synthetic oligonucleotide
uucguggugcccucucucc

SEQ ID NO: 1677183 - RNA, 19 nt, Artificial Sequence
  Description of Artificial Sequence: Synthetic oligonucleotide
uauguaugaccuuccucau

SEQ ID NO: 1677184 - RNA, 19 nt, Artificial Sequence
  Description of Artificial Sequence: Synthetic oligonucleotide
cauacaaaucuuagcaucu

SEQ ID NO: 1677185 - RNA, 19 nt, Artificial Sequence
  Description of Artificial Sequence: Synthetic oligonucleotide
accauccacguguuugguc

SEQ ID NO: 1677186 - RNA, 19 nt, Artificial Sequence
  Description of Artificial Sequence: Synthetic oligonucleotide
aggccugagucagugaguc

SEQ ID NO: 1677187 - RNA, 19 nt, Artificial Sequence
  Description of Artificial Sequence: Synthetic oligonucleotide
caagguagauggaaugaca

SEQ ID NO: 1677188 - RNA, 19 nt, Artificial Sequence
  Description of Artificial Sequence: Synthetic oligonucleotide
cccuucuuauauauguagg

SEQ ID NO: 1677189 - RNA, 19 nt, Artificial Sequence
  Description of Artificial Sequence: Synthetic oligonucleotide
gaucagccgagagaaggcc

SEQ ID NO: 1677190 - RNA, 19 nt, Artificial Sequence
  Description of Artificial Sequence: Synthetic oligonucleotide
uacugucgagcaagcugcg

SEQ ID NO: 1677191 - RNA, 19 nt, Artificial Sequence
  Description of Artificial Sequence: Synthetic oligonucleotide
gguggugagcucaagccgg

SEQ ID NO: 1677192 - RNA, 19 nt, Artificial Sequence
  Description of Artificial Sequence: Synthetic oligonucleotide
uuucguggugcccucucuc

SEQ ID NO: 1677193 - RNA, 19 nt, Artificial Sequence
  Description of Artificial Sequence: Synthetic oligonucleotide
gucuggauguguaacuaug

SEQ ID NO: 1677194 - RNA, 19 nt, Artificial Sequence
  Description of Artificial Sequence: Synthetic oligonucleotide
gcauauggugaggaaaagg

SEQ ID NO: 1677195 - RNA, 19 nt, Artificial Sequence
  Description of Artificial Sequence: Synthetic oligonucleotide
ccaauaucgccccgaaugg

SEQ ID NO: 1677196 - RNA, 19 nt, Artificial Sequence
  Description of Artificial Sequence: Synthetic oligonucleotide
uccuggguagaagacuuca

SEQ ID NO: 1677197 - RNA, 19 nt, Artificial Sequence
  Description of Artificial Sequence: Synthetic oligonucleotide
ggggucuuggccaaagagg

SEQ ID NO: 1677198 - RNA, 19 nt, Artificial Sequence
  Description of Artificial Sequence: Synthetic oligonucleotide
agauggaaugacaccucgg

SEQ ID NO: 1677199 - RNA, 19 nt, Artificial Sequence
  Description of Artificial Sequence: Synthetic oligonucleotide
ggagcgaaggguauagaag

SEQ ID NO: 1677200 - RNA, 19 nt, Artificial Sequence
  Description of Artificial Sequence: Synthetic oligonucleotide
cagcacguggccugggugc

SEQ ID NO: 1677201 - RNA, 19 nt, Artificial Sequence
  Description of Artificial Sequence: Synthetic oligonucleotide
gugauagauguucaaacau

SEQ ID NO: 1677202 - RNA, 19 nt, Artificial Sequence
  Description of Artificial Sequence: Synthetic oligonucleotide
uuccuacuguaguaucaga

SEQ ID NO: 1677203 - RNA, 19 nt, Artificial Sequence
  Description of Artificial Sequence: Synthetic oligonucleotide
auaugaguacaugaccuua

SEQ ID NO: 1677204 - RNA, 19 nt, Artificial Sequence
  Description of Artificial Sequence: Synthetic oligonucleotide
ccguacuccaccauccacg

SEQ ID NO: 1677205 - RNA, 19 nt, Artificial Sequence
  Description of Artificial Sequence: Synthetic oligonucleotide
ucagcccaauaucgccccg

SEQ ID NO: 1677206 - RNA, 19 nt, Artificial Sequence
  Description of Artificial Sequence: Synthetic oligonucleotide
caguaggaacuuaauaucu

SEQ ID NO: 1677207 - RNA, 19 nt, Artificial Sequence
  Description of Artificial Sequence: Synthetic oligonucleotide
gcaaaugccaagguagaug

SEQ ID NO: 1677208 - RNA, 19 nt, Artificial Sequence
  Description of Artificial Sequence: Synthetic oligonucleotide
gagucagugagucaagcuu

SEQ ID NO: 1677209 - RNA, 19 nt, Artificial Sequence
  Description of Artificial Sequence: Synthetic oligonucleotide
agucaagcuugugauagau

SEQ ID NO: 1677210 - RNA, 19 nt, Artificial Sequence
  Description of Artificial Sequence: Synthetic oligonucleotide
ggaggauaagccacagggg

SEQ ID NO: 1677211 - RNA, 19 nt, Artificial Sequence
  Description of Artificial Sequence: Synthetic oligonucleotide
caaggaccacugcaucacg

SEQ ID NO: 1677212 - RNA, 19 nt, Artificial Sequence
  Description of Artificial Sequence: Synthetic oligonucleotide
cagcguacugucgagcaag

SEQ ID NO: 1677213 - RNA, 19 nt, Artificial Sequence
  Description of Artificial Sequence: Synthetic oligonucleotide
gccacgggagcccagggcg

SEQ ID NO: 1677214 - RNA, 19 nt, Artificial Sequence
  Description of Artificial Sequence: Synthetic oligonucleotide
agguccguguacaacuguc

SEQ ID NO: 1677215 - RNA, 19 nt, Artificial Sequence
  Description of Artificial Sequence: Synthetic oligonucleotide
cugggugcagccuccgcag

SEQ ID NO: 1677216 - RNA, 19 nt, Artificial Sequence
  Description of Artificial Sequence: Synthetic oligonucleotide
aguccagcguacugucgag

SEQ ID NO: 1677217 - RNA, 19 nt, Artificial Sequence
  Description of Artificial Sequence: Synthetic oligonucleotide
cugaguacccagccacagc

SEQ ID NO: 1677218 - RNA, 19 nt, Artificial Sequence
  Description of Artificial Sequence: Synthetic oligonucleotide
caauaucgccccgaauggc

SEQ ID NO: 1677219 - RNA, 19 nt, Artificial Sequence
  Description of Artificial Sequence: Synthetic oligonucleotide
ucaagccggaggccccggg

SEQ ID NO: 1677220 - RNA, 19 nt, Artificial Sequence
  Description of Artificial Sequence: Synthetic oligonucleotide
gccagaaauagggcgaucc

SEQ ID NO: 1677221 - RNA, 19 nt, Artificial Sequence
  Description of Artificial Sequence: Synthetic oligonucleotide
cugcgcuaucucuucuugc

SEQ ID NO: 1677222 - RNA, 19 nt, Artificial Sequence
  Description of Artificial Sequence: Synthetic oligonucleotide
ccaauccuuaaucccagag

SEQ ID NO: 1677223 - RNA, 19 nt, Artificial Sequence
  Description of Artificial Sequence: Synthetic oligonucleotide
guacaugaccuuacaguac

SEQ ID NO: 1677224 - RNA, 19 nt, Artificial Sequence
  Description of Artificial Sequence: Synthetic oligonucleotide
ucggccguacuccaccauc

SEQ ID NO: 1677225 - RNA, 19 nt, Artificial Sequence
  Description of Artificial Sequence: Synthetic oligonucleotide
accccaauccuuaauccca

SEQ ID NO: 1677226 - RNA, 19 nt, Artificial Sequence
  Description of Artificial Sequence: Synthetic oligonucleotide
ggcaacagccagaaauagg

SEQ ID NO: 1677227 - RNA, 19 nt, Artificial Sequence
  Description of Artificial Sequence: Synthetic oligonucleotide
ugguccugcccacuccugu

SEQ ID NO: 1677228 - RNA, 19 nt, Artificial Sequence
  Description of Artificial Sequence: Synthetic oligonucleotide
ucguggugcccucucucca

SEQ ID NO: 1677229 - RNA, 19 nt, Artificial Sequence
  Description of Artificial Sequence: Synthetic oligonucleotide
gauaugaguacaugaccuu

SEQ ID NO: 1677230 - RNA, 19 nt, Artificial Sequence
  Description of Artificial Sequence: Synthetic oligonucleotide
cugugcauaugaguuccag

SEQ ID NO: 1677231 - RNA, 19 nt, Artificial Sequence
  Description of Artificial Sequence: Synthetic oligonucleotide
uguccauccacaggucuuc

SEQ ID NO: 1677232 - RNA, 19 nt, Artificial Sequence
  Description of Artificial Sequence: Synthetic oligonucleotide
ggauaugaguacaugaccu

SEQ ID NO: 1677233 - RNA, 19 nt, Artificial Sequence
  Description of Artificial Sequence: Synthetic oligonucleotide
agcgaaggguauagaagag

SEQ ID NO: 1677234 - RNA, 19 nt, Artificial Sequence
  Description of Artificial Sequence: Synthetic oligonucleotide
gucagcaccgcggcaacag

SEQ ID NO: 1677235 - RNA, 19 nt, Artificial Sequence
  Description of Artificial Sequence: Synthetic oligonucleotide
cucauccggcagcacgugg

SEQ ID NO: 1677236 - RNA, 19 nt, Artificial Sequence
  Description of Artificial Sequence: Synthetic oligonucleotide
ugucgagcaagcugcgcua

SEQ ID NO: 1677237 - RNA, 19 nt, Artificial Sequence
  Description of Artificial Sequence: Synthetic oligonucleotide
ugacaccucggccguacuc

SEQ ID NO: 1677238 - RNA, 19 nt, Artificial Sequence
  Description of Artificial Sequence: Synthetic oligonucleotide
guccguguacaacugucuc

SEQ ID NO: 1677239 - RNA, 19 nt, Artificial Sequence
  Description of Artificial Sequence: Synthetic oligonucleotide
gcgaaggguauagaagagg

SEQ ID NO: 1677240 - RNA, 19 nt, Artificial Sequence
  Description of Artificial Sequence: Synthetic oligonucleotide
aucauggcagcaggugaag

SEQ ID NO: 1677241 - RNA, 19 nt, Artificial Sequence
  Description of Artificial Sequence: Synthetic oligonucleotide
ucuacacauuucucugcuu

SEQ ID NO: 1677242 - RNA, 19 nt, Artificial Sequence
  Description of Artificial Sequence: Synthetic oligonucleotide
cagaagacacauggcgccc

SEQ ID NO: 1677243 - RNA, 19 nt, Artificial Sequence
  Description of Artificial Sequence: Synthetic oligonucleotide
auccacguguuuggucccc

SEQ ID NO: 1677244 - RNA, 19 nt, Artificial Sequence
  Description of Artificial Sequence: Synthetic oligonucleotide
cguacugucgagcaagcug

SEQ ID NO: 1677245 - RNA, 19 nt, Artificial Sequence
  Description of Artificial Sequence: Synthetic oligonucleotide
ggcguucacaaacacccac

SEQ ID NO: 1677246 - RNA, 19 nt, Artificial Sequence
  Description of Artificial Sequence: Synthetic oligonucleotide
cauaugaguuccagcaagu

SEQ ID NO: 1677247 - RNA, 19 nt, Artificial Sequence
  Description of Artificial Sequence: Synthetic oligonucleotide
gucaagcuugugauagaug

SEQ ID NO: 1677248 - RNA, 19 nt, Artificial Sequence
  Description of Artificial Sequence: Synthetic oligonucleotide
cugagauuccuacuguagu

SEQ ID NO: 1677249 - RNA, 19 nt, Artificial Sequence
  Description of Artificial Sequence: Synthetic oligonucleotide
cauccggcagcacguggcc

SEQ ID NO: 1677250 - RNA, 19 nt, Artificial Sequence
  Description of Artificial Sequence: Synthetic oligonucleotide
gagucaagcuugugauaga

SEQ ID NO: 1677251 - RNA, 19 nt, Artificial Sequence
  Description of Artificial Sequence: Synthetic oligonucleotide
ccaccauccacguguuugg

SEQ ID NO: 1677252 - RNA, 19 nt, Artificial Sequence
  Description of Artificial Sequence: Synthetic oligonucleotide
auguaugaccuuccucaua

SEQ ID NO: 1677253 - RNA, 19 nt, Artificial Sequence
  Description of Artificial Sequence: Synthetic oligonucleotide
auaugaguuccagcaagua

SEQ ID NO: 1677254 - RNA, 19 nt, Artificial Sequence
  Description of Artificial Sequence: Synthetic oligonucleotide
acguggccugggugcagcc

SEQ ID NO: 1677255 - RNA, 19 nt, Artificial Sequence
  Description of Artificial Sequence: Synthetic oligonucleotide
cuuuacugagauuccuacu

SEQ ID NO: 1677256 - RNA, 19 nt, Artificial Sequence
  Description of Artificial Sequence: Synthetic oligonucleotide
guguuugguccccacucca

SEQ ID NO: 1677257 - RNA, 19 nt, Artificial Sequence
  Description of Artificial Sequence: Synthetic oligonucleotide
gacacauggcgcccaucca

SEQ ID NO: 1677258 - RNA, 19 nt, Artificial Sequence
  Description of Artificial Sequence: Synthetic oligonucleotide
cuucaggccuggcugguca

SEQ ID NO: 1677259 - RNA, 19 nt, Artificial Sequence
  Description of Artificial Sequence: Synthetic oligonucleotide
aggcgugcagaagacacau

SEQ ID NO: 1677260 - RNA, 19 nt, Artificial Sequence
  Description of Artificial Sequence: Synthetic oligonucleotide
cuggauguguaacuaugua

SEQ ID NO: 1677261 - RNA, 19 nt, Artificial Sequence
  Description of Artificial Sequence: Synthetic oligonucleotide
caagccggaggccccgggc

SEQ ID NO: 1677262 - RNA, 19 nt, Artificial Sequence
  Description of Artificial Sequence: Synthetic oligonucleotide
gagauuccuacuguaguau

SEQ ID NO: 1677263 - RNA, 19 nt, Artificial Sequence
  Description of Artificial Sequence: Synthetic oligonucleotide
cagcacguacucagacagc

SEQ ID NO: 1677264 - RNA, 19 nt, Artificial Sequence
  Description of Artificial Sequence: Synthetic oligonucleotide
uaucgccccgaauggccac

SEQ ID NO: 1677265 - RNA, 19 nt, Artificial Sequence
  Description of Artificial Sequence: Synthetic oligonucleotide
auaucgccccgaauggcca

SEQ ID NO: 1677266 - RNA, 19 nt, Artificial Sequence
  Description of Artificial Sequence: Synthetic oligonucleotide
acagcgaggcgugcagaag

SEQ ID NO: 1677267 - RNA, 19 nt, Artificial Sequence
  Description of Artificial Sequence: Synthetic oligonucleotide
cgaggcgugcagaagacac

SEQ ID NO: 1677268 - RNA, 19 nt, Artificial Sequence
  Description of Artificial Sequence: Synthetic oligonucleotide
cgauccaugcccaccgccg

SEQ ID NO: 1677269 - RNA, 19 nt, Artificial Sequence
  Description of Artificial Sequence: Synthetic oligonucleotide
uuccagcaaguagaugaau

SEQ ID NO: 1677270 - RNA, 19 nt, Artificial Sequence
  Description of Artificial Sequence: Synthetic oligonucleotide
cacgaucagccgagagaag

SEQ ID NO: 1677271 - RNA, 19 nt, Artificial Sequence
  Description of Artificial Sequence: Synthetic oligonucleotide
gccgccggcguucacaaac

SEQ ID NO: 1677272 - RNA, 19 nt, Artificial Sequence
  Description of Artificial Sequence: Synthetic oligonucleotide
ucgagcaagcugcgcuauc

SEQ ID NO: 1677273 - RNA, 19 nt, Artificial Sequence
  Description of Artificial Sequence: Synthetic oligonucleotide
ggcauauggugaggaaaag

SEQ ID NO: 1677274 - RNA, 19 nt, Artificial Sequence
  Description of Artificial Sequence: Synthetic oligonucleotide
guaugaccuuccucauaca

SEQ ID NO: 1677275 - RNA, 19 nt, Artificial Sequence
  Description of Artificial Sequence: Synthetic oligonucleotide
cugucgagcaagcugcgcu

SEQ ID NO: 1677276 - RNA, 19 nt, Artificial Sequence
  Description of Artificial Sequence: Synthetic oligonucleotide
agcccaauaucgccccgaa

SEQ ID NO: 1677277 - RNA, 19 nt, Artificial Sequence
  Description of Artificial Sequence: Synthetic oligonucleotide
aucgccccgaauggccacg

SEQ ID NO: 1677278 - RNA, 19 nt, Artificial Sequence
  Description of Artificial Sequence: Synthetic oligonucleotide
cagggaggauaagccacag

SEQ ID NO: 1677279 - RNA, 19 nt, Artificial Sequence
  Description of Artificial Sequence: Synthetic oligonucleotide
cgugcagaagacacauggc

SEQ ID NO: 1677280 - RNA, 19 nt, Artificial Sequence
  Description of Artificial Sequence: Synthetic oligonucleotide
gccgaagagcagcacguac

SEQ ID NO: 1677281 - RNA, 19 nt, Artificial Sequence
  Description of Artificial Sequence: Synthetic oligonucleotide
gaggcgugcagaagacaca

SEQ ID NO: 1677282 - RNA, 19 nt, Artificial Sequence
  Description of Artificial Sequence: Synthetic oligonucleotide
gugagucaagcuugugaua

SEQ ID NO: 1677283 - RNA, 19 nt, Artificial Sequence
  Description of Artificial Sequence: Synthetic oligonucleotide
accgcggcaacagccagaa

SEQ ID NO: 1677284 - RNA, 19 nt, Artificial Sequence
  Description of Artificial Sequence: Synthetic oligonucleotide
uggugcugucugugcauau

SEQ ID NO: 1677285 - RNA, 19 nt, Artificial Sequence
  Description of Artificial Sequence: Synthetic oligonucleotide
cguucacaaacacccacug

SEQ ID NO: 1677286 - RNA, 19 nt, Artificial Sequence
  Description of Artificial Sequence: Synthetic oligonucleotide
agcucaugguccaguccag

SEQ ID NO: 1677287 - RNA, 19 nt, Artificial Sequence
  Description of Artificial Sequence: Synthetic oligonucleotide
cgaucagccgagagaaggc

SEQ ID NO: 1677288 - RNA, 19 nt, Artificial Sequence
  Description of Artificial Sequence: Synthetic oligonucleotide
uccacguguuuggucccca

SEQ ID NO: 1677289 - RNA, 19 nt, Artificial Sequence
  Description of Artificial Sequence: Synthetic oligonucleotide
ugguccaguccagcguacu

SEQ ID NO: 1677290 - RNA, 19 nt, Artificial Sequence
  Description of Artificial Sequence: Synthetic oligonucleotide
ccguguacaacugucucuc

SEQ ID NO: 1677291 - RNA, 19 nt, Artificial Sequence
  Description of Artificial Sequence: Synthetic oligonucleotide
gccaagguagauggaauga

SEQ ID NO: 1677292 - RNA, 19 nt, Artificial Sequence
  Description of Artificial Sequence: Synthetic oligonucleotide
ccuggguagaagacuucac

SEQ ID NO: 1677293 - RNA, 19 nt, Artificial Sequence
  Description of Artificial Sequence: Synthetic oligonucleotide
gcugucugugcauaugagu

SEQ ID NO: 1677294 - RNA, 19 nt, Artificial Sequence
  Description of Artificial Sequence: Synthetic oligonucleotide
cuucuugcuggaagacgaa

SEQ ID NO: 1677295 - RNA, 19 nt, Artificial Sequence
  Description of Artificial Sequence: Synthetic oligonucleotide
gcaaguagaugaauguggu

SEQ ID NO: 1677296 - RNA, 19 nt, Artificial Sequence
  Description of Artificial Sequence: Synthetic oligonucleotide
ucagaguaucaggcagaau

SEQ ID NO: 1677297 - RNA, 19 nt, Artificial Sequence
  Description of Artificial Sequence: Synthetic oligonucleotide
agcaccgcggcaacagcca

SEQ ID NO: 1677298 - RNA, 19 nt, Artificial Sequence
  Description of Artificial Sequence: Synthetic oligonucleotide
guccagcguacugucgagc

SEQ ID NO: 1677299 - RNA, 19 nt, Artificial Sequence
  Description of Artificial Sequence: Synthetic oligonucleotide
ccugagucagugagucaag

SEQ ID NO: 1677300 - RNA, 19 nt, Artificial Sequence
  Description of Artificial Sequence: Synthetic oligonucleotide
ucgccccgaauggccacgg

SEQ ID NO: 1677301 - RNA, 19 nt, Artificial Sequence
  Description of Artificial Sequence: Synthetic oligonucleotide
uagggcgauccaugcccac

SEQ ID NO: 1677302 - RNA, 19 nt, Artificial Sequence
  Description of Artificial Sequence: Synthetic oligonucleotide
acuuuucguggugcccucu

SEQ ID NO: 1677303 - RNA, 19 nt, Artificial Sequence
  Description of Artificial Sequence: Synthetic oligonucleotide
gcgauccaugcccaccgcc

SEQ ID NO: 1677304 - RNA, 19 nt, Artificial Sequence
  Description of Artificial Sequence: Synthetic oligonucleotide
ggaauggagauaaggcaua

SEQ ID NO: 1677305 - RNA, 19 nt, Artificial Sequence
  Description of Artificial Sequence: Synthetic oligonucleotide
cacguggccugggugcagc

SEQ ID NO: 1677306 - RNA, 19 nt, Artificial Sequence
  Description of Artificial Sequence: Synthetic oligonucleotide
ggcauaggagcgaagggua

SEQ ID NO: 1677307 - RNA, 19 nt, Artificial Sequence
  Description of Artificial Sequence: Synthetic oligonucleotide
cguguuugguccccacucc

SEQ ID NO: 1677308 - RNA, 19 nt, Artificial Sequence
  Description of Artificial Sequence: Synthetic oligonucleotide
ccaguccagcguacugucg

SEQ ID NO: 1677309 - RNA, 19 nt, Artificial Sequence
  Description of Artificial Sequence: Synthetic oligonucleotide
ccacgaucagccgagagaa

SEQ ID NO: 1677310 - RNA, 19 nt, Artificial Sequence
  Description of Artificial Sequence: Synthetic oligonucleotide
gccguacuccaccauccac

SEQ ID NO: 1677311 - RNA, 19 nt, Artificial Sequence
  Description of Artificial Sequence: Synthetic oligonucleotide
gucagaaaucucagcccaa

SEQ ID NO: 1677312 - RNA, 19 nt, Artificial Sequence
  Description of Artificial Sequence: Synthetic oligonucleotide
cagagaugauggugucaga

SEQ ID NO: 1677313 - RNA, 19 nt, Artificial Sequence
  Description of Artificial Sequence: Synthetic oligonucleotide
gcaucucuaugugucucac

SEQ ID NO: 1677314 - RNA, 19 nt, Artificial Sequence
  Description of Artificial Sequence: Synthetic oligonucleotide
ccagaaauagggcgaucca

SEQ ID NO: 1677315 - RNA, 19 nt, Artificial Sequence
  Description of Artificial Sequence: Synthetic oligonucleotide
cucaagccggaggccccgg

SEQ ID NO: 1677316 - RNA, 19 nt, Artificial Sequence
  Description of Artificial Sequence: Synthetic oligonucleotide
gccggcguucacaaacacc

SEQ ID NO: 1677317 - RNA, 19 nt, Artificial Sequence
  Description of Artificial Sequence: Synthetic oligonucleotide
cagccgagagaaggccagc

SEQ ID NO: 1677318 - RNA, 19 nt, Artificial Sequence
  Description of Artificial Sequence: Synthetic oligonucleotide
gccccgaauggccacggga

SEQ ID NO: 1677319 - RNA, 19 nt, Artificial Sequence
  Description of Artificial Sequence: Synthetic oligonucleotide
gcucaugguccaguccagc

SEQ ID NO: 1677320 - RNA, 19 nt, Artificial Sequence
  Description of Artificial Sequence: Synthetic oligonucleotide
ccugggugcagccuccgca

SEQ ID NO: 1677321 - RNA, 19 nt, Artificial Sequence
  Description of Artificial Sequence: Synthetic oligonucleotide
ccacgggagcccagggcgg

SEQ ID NO: 1677322 - RNA, 19 nt, Artificial Sequence
  Description of Artificial Sequence: Synthetic oligonucleotide
gcucaagccggaggccccg

SEQ ID NO: 1677323 - RNA, 19 nt, Artificial Sequence
  Description of Artificial Sequence: Synthetic oligonucleotide
gcggcaacagccagaaaua

SEQ ID NO: 1677324 - RNA, 19 nt, Artificial Sequence
  Description of Artificial Sequence: Synthetic oligonucleotide
cacguguuugguccccacu

SEQ ID NO: 1677325 - RNA, 19 nt, Artificial Sequence
  Description of Artificial Sequence: Synthetic oligonucleotide
caccgcggcaacagccaga

SEQ ID NO: 1677326 - RNA, 19 nt, Artificial Sequence
  Description of Artificial Sequence: Synthetic oligonucleotide
cagcccaauaucgccccga

SEQ ID NO: 1677327 - RNA, 19 nt, Artificial Sequence
  Description of Artificial Sequence: Synthetic oligonucleotide
cagccgccggcguucacaa

SEQ ID NO: 1677328 - RNA, 19 nt, Artificial Sequence
  Description of Artificial Sequence: Synthetic oligonucleotide
ggucaggggucuuggccaa

SEQ ID NO: 1677329 - RNA, 19 nt, Artificial Sequence
  Description of Artificial Sequence: Synthetic oligonucleotide
gugcccucucuccacuggu

SEQ ID NO: 1677330 - RNA, 19 nt, Artificial Sequence
  Description of Artificial Sequence: Synthetic oligonucleotide
gguccguguacaacugucu

SEQ ID NO: 1677331 - RNA, 19 nt, Artificial Sequence
  Description of Artificial Sequence: Synthetic oligonucleotide
cgaauggccacgggagccc

SEQ ID NO: 1677332 - RNA, 19 nt, Artificial Sequence
  Description of Artificial Sequence: Synthetic oligonucleotide
cggcaacagccagaaauag

SEQ ID NO: 1677333 - RNA, 19 nt, Artificial Sequence
  Description of Artificial Sequence: Synthetic oligonucleotide
guggugcccucucuccacu

SEQ ID NO: 1677334 - RNA, 19 nt, Artificial Sequence
  Description of Artificial Sequence: Synthetic oligonucleotide
cacagccguugccucucca

SEQ ID NO: 1677335 - RNA, 19 nt, Artificial Sequence
  Description of Artificial Sequence: Synthetic oligonucleotide
gcguucacaaacacccacu

SEQ ID NO: 1677336 - RNA, 19 nt, Artificial Sequence
  Description of Artificial Sequence: Synthetic oligonucleotide
gaaugacaccucggccgua

SEQ ID NO: 1677337 - RNA, 19 nt, Artificial Sequence
  Description of Artificial Sequence: Synthetic oligonucleotide
gcaugguguauggugcugu

SEQ ID NO: 1677338 - RNA, 19 nt, Artificial Sequence
  Description of Artificial Sequence: Synthetic oligonucleotide
ccacguguuugguccccac

SEQ ID NO: 1677339 - RNA, 19 nt, Artificial Sequence
  Description of Artificial Sequence: Synthetic oligonucleotide
cagguccguguacaacugu

SEQ ID NO: 1677340 - RNA, 19 nt, Artificial Sequence
  Description of Artificial Sequence: Synthetic oligonucleotide
ggccugagucagugaguca

SEQ ID NO: 1677341 - RNA, 19 nt, Artificial Sequence
  Description of Artificial Sequence: Synthetic oligonucleotide
gcccucucuggauggauau

SEQ ID NO: 1677342 - RNA, 19 nt, Artificial Sequence
  Description of Artificial Sequence: Synthetic oligonucleotide
ugcccaccgccggcccaag

SEQ ID NO: 1677343 - RNA, 19 nt, Artificial Sequence
  Description of Artificial Sequence: Synthetic oligonucleotide
gcacguacucagacagcga

SEQ ID NO: 1677344 - RNA, 19 nt, Artificial Sequence
  Description of Artificial Sequence: Synthetic oligonucleotide
gcaagcugcgcuaucucuu

SEQ ID NO: 1677345 - RNA, 19 nt, Artificial Sequence
  Description of Artificial Sequence: Synthetic oligonucleotide
gucgagcaagcugcgcuau

SEQ ID NO: 1677346 - RNA, 19 nt, Artificial Sequence
  Description of Artificial Sequence: Synthetic oligonucleotide
cggcccaaggaccacugca

SEQ ID NO: 1677347 - RNA, 19 nt, Artificial Sequence
  Description of Artificial Sequence: Synthetic oligonucleotide
guugccucuccagguccgu

SEQ ID NO: 1677348 - RNA, 19 nt, Artificial Sequence
  Description of Artificial Sequence: Synthetic oligonucleotide
ggucuuggccaaagaggua

SEQ ID NO: 1677349 - RNA, 19 nt, Artificial Sequence
  Description of Artificial Sequence: Synthetic oligonucleotide
ccggcccaaggaccacugc

SEQ ID NO: 1677350 - RNA, 19 nt, Artificial Sequence
  Description of Artificial Sequence: Synthetic oligonucleotide
ccucauccggcagcacgug

SEQ ID NO: 1677351 - RNA, 19 nt, Artificial Sequence
  Description of Artificial Sequence: Synthetic oligonucleotide
gcgaggcgugcagaagaca

SEQ ID NO: 1677352 - RNA, 19 nt, Artificial Sequence
  Description of Artificial Sequence: Synthetic oligonucleotide
ccagcguacugucgagcaa

SEQ ID NO: 1677353 - RNA, 19 nt, Artificial Sequence
  Description of Artificial Sequence: Synthetic oligonucleotide
ggcgcccauccagccgccg

SEQ ID NO: 1677354 - RNA, 19 nt, Artificial Sequence
  Description of Artificial Sequence: Synthetic oligonucleotide
ccggaggccccgggcauag

SEQ ID NO: 1677355 - RNA, 19 nt, Artificial Sequence
  Description of Artificial Sequence: Synthetic oligonucleotide
ccucggccguacuccacca

SEQ ID NO: 1677356 - RNA, 19 nt, Artificial Sequence
  Description of Artificial Sequence: Synthetic oligonucleotide
caccauccacguguuuggu

SEQ ID NO: 1677357 - RNA, 19 nt, Artificial Sequence
  Description of Artificial Sequence: Synthetic oligonucleotide
gggcggugccgaagagcag

SEQ ID NO: 1677358 - RNA, 19 nt, Artificial Sequence
  Description of Artificial Sequence: Synthetic oligonucleotide
ggcagccgggcaccaccaa

SEQ ID NO: 1677359 - RNA, 19 nt, Artificial Sequence
  Description of Artificial Sequence: Synthetic oligonucleotide
cucggccguacuccaccau

SEQ ID NO: 1677360 - RNA, 19 nt, Artificial Sequence
  Description of Artificial Sequence: Synthetic oligonucleotide
cacgggagcccagggcggu

SEQ ID NO: 1677361 - RNA, 19 nt, Artificial Sequence
  Description of Artificial Sequence: Synthetic oligonucleotide
ggggcccucucuggaugga

SEQ ID NO: 1677362 - RNA, 19 nt, Artificial Sequence
  Description of Artificial Sequence: Synthetic oligonucleotide
gcccaauaucgccccgaau

SEQ ID NO: 1677363 - RNA, 19 nt, Artificial Sequence
  Description of Artificial Sequence: Synthetic oligonucleotide
gccccgggcauaggagcga

SEQ ID NO: 1677364 - RNA, 19 nt, Artificial Sequence
  Description of Artificial Sequence: Synthetic oligonucleotide
cgccccgaauggccacggg

SEQ ID NO: 1677365 - RNA, 19 nt, Artificial Sequence
  Description of Artificial Sequence: Synthetic oligonucleotide
cccagcugaguugguugcu

SEQ ID NO: 1677366 - RNA, 19 nt, Artificial Sequence
  Description of Artificial Sequence: Synthetic oligonucleotide
ccacaccgccugggucagc

SEQ ID NO: 1677367 - RNA, 19 nt, Artificial Sequence
  Description of Artificial Sequence: Synthetic oligonucleotide
ccgccggcccaaggaccac

SEQ ID NO: 1677368 - RNA, 19 nt, Artificial Sequence
  Description of Artificial Sequence: Synthetic oligonucleotide
ccgcggcaacagccagaaa

SEQ ID NO: 1677369 - RNA, 19 nt, Artificial Sequence
  Description of Artificial Sequence: Synthetic oligonucleotide
cgccggcccaaggaccacu

SEQ ID NO: 1677370 - RNA, 19 nt, Artificial Sequence
  Description of Artificial Sequence: Synthetic oligonucleotide
uuuggugccauacauaucg

SEQ ID NO: 1677371 - RNA, 19 nt, Artificial Sequence
  Description of Artificial Sequence: Synthetic oligonucleotide
aauaauuaacugcaugcac

SEQ ID NO: 1677372 - RNA, 19 nt, Artificial Sequence
  Description of Artificial Sequence: Synthetic oligonucleotide
uguauauacccauacacug

SEQ ID NO: 1677373 - RNA, 19 nt, Artificial Sequence
  Description of Artificial Sequence: Synthetic oligonucleotide
uuauuaaugcuuuugugug

SEQ ID NO: 1677374 - RNA, 19 nt, Artificial Sequence
  Description of Artificial Sequence: Synthetic oligonucleotide
acagacaucgguuuuagag

SEQ ID NO: 1677375 - RNA, 19 nt, Artificial Sequence
  Description of Artificial Sequence: Synthetic oligonucleotide
ucguccaggaaauagaggc

SEQ ID NO: 1677376 - RNA, 19 nt, Artificial Sequence
  Description of Artificial Sequence: Synthetic oligonucleotide
agaugauguacacauacag

SEQ ID NO: 1677377 - RNA, 19 nt, Artificial Sequence
  Description of Artificial Sequence: Synthetic oligonucleotide
aaaugcacgggccagggug

SEQ ID NO: 1677378 - RNA, 19 nt, Artificial Sequence
  Description of Artificial Sequence: Synthetic oligonucleotide
ucauuuaacucauuccugc

SEQ ID NO: 1677379 - RNA, 19 nt, Artificial Sequence
  Description of Artificial Sequence: Synthetic oligonucleotide
cuuaucaauggccagggcc

SEQ ID NO: 1677380 - RNA, 19 nt, Artificial Sequence
  Description of Artificial Sequence: Synthetic oligonucleotide
uguccaaacacucauuuaa

SEQ ID NO: 1677381 - RNA, 19 nt, Artificial Sequence
  Description of Artificial Sequence: Synthetic oligonucleotide
uauacccauacacugacga

SEQ ID NO: 1677382 - RNA, 19 nt, Artificial Sequence
  Description of Artificial Sequence: Synthetic oligonucleotide
uuuuguccgaucuuuuggg

SEQ ID NO: 1677383 - RNA, 19 nt, Artificial Sequence
  Description of Artificial Sequence: Synthetic oligonucleotide
ugaccaaugccuaugcgag

SEQ ID NO: 1677384 - RNA, 19 nt, Artificial Sequence
  Description of Artificial Sequence: Synthetic oligonucleotide
auacauaucggguacccag

SEQ ID NO: 1677385 - RNA, 19 nt, Artificial Sequence
  Description of Artificial Sequence: Synthetic oligonucleotide
uauauacccauacacugac

SEQ ID NO: 1677386 - RNA, 19 nt, Artificial Sequence
  Description of Artificial Sequence: Synthetic oligonucleotide
aaacucuggucccagccgg

SEQ ID NO: 1677387 - RNA, 19 nt, Artificial Sequence
  Description of Artificial Sequence: Synthetic oligonucleotide
auuaacugcaugcacacaa

SEQ ID NO: 1677388 - RNA, 19 nt, Artificial Sequence
  Description of Artificial Sequence: Synthetic oligonucleotide
aauagaggcugguuggugu

SEQ ID NO: 1677389 - RNA, 19 nt, Artificial Sequence
  Description of Artificial Sequence: Synthetic oligonucleotide
cucguaacaggacacaagc

SEQ ID NO: 1677390 - RNA, 19 nt, Artificial Sequence
  Description of Artificial Sequence: Synthetic oligonucleotide
acaucgguuuuagagaccc

SEQ ID NO: 1677391 - RNA, 19 nt, Artificial Sequence
  Description of Artificial Sequence: Synthetic oligonucleotide
uuuagagacccucugccga

SEQ ID NO: 1677392 - RNA, 19 nt, Artificial Sequence
  Description of Artificial Sequence: Synthetic oligonucleotide
uaauuaacugcaugcacac

SEQ ID NO: 1677393 - RNA, 19 nt, Artificial Sequence
  Description of Artificial Sequence: Synthetic oligonucleotide
guuuuagagacccucugcc

SEQ ID NO: 1677394 - RNA, 19 nt, Artificial Sequence
  Description of Artificial Sequence: Synthetic oligonucleotide
auagaagcgaaguggcuuc

SEQ ID NO: 1677395 - RNA, 19 nt, Artificial Sequence
  Description of Artificial Sequence: Synthetic oligonucleotide
cugugauucugcuaguugc

SEQ ID NO: 1677396 - RNA, 19 nt, Artificial Sequence
  Description of Artificial Sequence: Synthetic oligonucleotide
aacucauuccugcuccuag

SEQ ID NO: 1677397 - RNA, 19 nt, Artificial Sequence
  Description of Artificial Sequence: Synthetic oligonucleotide
uacauaucggguacccagg

SEQ ID NO: 1677398 - RNA, 19 nt, Artificial Sequence
  Description of Artificial Sequence: Synthetic oligonucleotide
gguguauauacccauacac

SEQ ID NO: 1677399 - RNA, 19 nt, Artificial Sequence
  Description of Artificial Sequence: Synthetic oligonucleotide
auaauuaacugcaugcaca

SEQ ID NO: 1677400 - RNA, 19 nt, Artificial Sequence
  Description of Artificial Sequence: Synthetic oligonucleotide
cacucauuuaacucauucc

SEQ ID NO: 1677401 - RNA, 19 nt, Artificial Sequence
  Description of Artificial Sequence: Synthetic oligonucleotide
aagcgaaguggcuucuggg

SEQ ID NO: 1677402 - RNA, 19 nt, Artificial Sequence
  Description of Artificial Sequence: Synthetic oligonucleotide
ucagucucuacaaugcguc

SEQ ID NO: 1677403 - RNA, 19 nt, Artificial Sequence
  Description of Artificial Sequence: Synthetic oligonucleotide
uggacauagaagcgaagug

SEQ ID NO: 1677404 - RNA, 19 nt, Artificial Sequence
  Description of Artificial Sequence: Synthetic oligonucleotide
acccagaugaauaauuaac

SEQ ID NO: 1677405 - RNA, 19 nt, Artificial Sequence
  Description of Artificial Sequence: Synthetic oligonucleotide
augaccaaugccuaugcga

SEQ ID NO: 1677406 - RNA, 19 nt, Artificial Sequence
  Description of Artificial Sequence: Synthetic oligonucleotide
gacauagaagcgaaguggc

SEQ ID NO: 1677407 - RNA, 19 nt, Artificial Sequence
  Description of Artificial Sequence: Synthetic oligonucleotide
uuugcugaggcugacacau

SEQ ID NO: 1677408 - RNA, 19 nt, Artificial Sequence
  Description of Artificial Sequence: Synthetic oligonucleotide
aagucgccggacaaggacc

SEQ ID NO: 1677409 - RNA, 19 nt, Artificial Sequence
  Description of Artificial Sequence: Synthetic oligonucleotide
auacccuggagcuagaguu

SEQ ID NO: 1677410 - RNA, 19 nt, Artificial Sequence
  Description of Artificial Sequence: Synthetic oligonucleotide
uagguguauauacccauac

SEQ ID NO: 1677411 - RNA, 19 nt, Artificial Sequence
  Description of Artificial Sequence: Synthetic oligonucleotide
guuucggggagucugccgg

SEQ ID NO: 1677412 - RNA, 19 nt, Artificial Sequence
  Description of Artificial Sequence: Synthetic oligonucleotide
ugcaugcacacaaauucug

SEQ ID NO: 1677413 - RNA, 19 nt, Artificial Sequence
  Description of Artificial Sequence: Synthetic oligonucleotide
gaggguacggcugacagug

SEQ ID NO: 1677414 - RNA, 19 nt, Artificial Sequence
  Description of Artificial Sequence: Synthetic oligonucleotide
uauuaaugcuuuugugugu

SEQ ID NO: 1677415 - RNA, 19 nt, Artificial Sequence
  Description of Artificial Sequence: Synthetic oligonucleotide
gaauaauuaacugcaugca

SEQ ID NO: 1677416 - RNA, 19 nt, Artificial Sequence
  Description of Artificial Sequence: Synthetic oligonucleotide
aagcauacccuggagcuag

SEQ ID NO: 1677417 - RNA, 19 nt, Artificial Sequence
  Description of Artificial Sequence: Synthetic oligonucleotide
cauacacugacgacucucc

SEQ ID NO: 1677418 - RNA, 19 nt, Artificial Sequence
  Description of Artificial Sequence: Synthetic oligonucleotide
uggacaguuccccacaaau

SEQ ID NO: 1677419 - RNA, 19 nt, Artificial Sequence
  Description of Artificial Sequence: Synthetic oligonucleotide
gaggcgcgcacacacaccg

SEQ ID NO: 1677420 - RNA, 19 nt, Artificial Sequence
  Description of Artificial Sequence: Synthetic oligonucleotide
auacacugacgacucuccc

SEQ ID NO: 1677421 - RNA, 19 nt, Artificial Sequence
  Description of Artificial Sequence: Synthetic oligonucleotide
gaagaaagcauacccugga

SEQ ID NO: 1677422 - RNA, 19 nt, Artificial Sequence
  Description of Artificial Sequence: Synthetic oligonucleotide
cuccuagguguauauaccc

SEQ ID NO: 1677423 - RNA, 19 nt, Artificial Sequence
  Description of Artificial Sequence: Synthetic oligonucleotide
cuacaaugcguccacggag

SEQ ID NO: 1677424 - RNA, 19 nt, Artificial Sequence
  Description of Artificial Sequence: Synthetic oligonucleotide
ggacauagaagcgaagugg

SEQ ID NO: 1677425 - RNA, 19 nt, Artificial Sequence
  Description of Artificial Sequence: Synthetic oligonucleotide
agcucacgguccuugaggg

SEQ ID NO: 1677426 - RNA, 19 nt, Artificial Sequence
  Description of Artificial Sequence: Synthetic oligonucleotide
cucuacaaugcguccacgg

SEQ ID NO: 1677427 - RNA, 19 nt, Artificial Sequence
  Description of Artificial Sequence: Synthetic oligonucleotide
cacucugucuaccacacug

SEQ ID NO: 1677428 - RNA, 19 nt, Artificial Sequence
  Description of Artificial Sequence: Synthetic oligonucleotide
uacaaugcguccacggagu

SEQ ID NO: 1677429 - RNA, 19 nt, Artificial Sequence
  Description of Artificial Sequence: Synthetic oligonucleotide
auacccauacacugacgac

SEQ ID NO: 1677430 - RNA, 19 nt, Artificial Sequence
  Description of Artificial Sequence: Synthetic oligonucleotide
gaacaugccacgguuucgg

SEQ ID NO: 1677431 - RNA, 19 nt, Artificial Sequence
  Description of Artificial Sequence: Synthetic oligonucleotide
uagugcucguaacaggaca

SEQ ID NO: 1677432 - RNA, 19 nt, Artificial Sequence
  Description of Artificial Sequence: Synthetic oligonucleotide
gagcucacgguccuugagg

SEQ ID NO: 1677433 - RNA, 19 nt, Artificial Sequence
  Description of Artificial Sequence: Synthetic oligonucleotide
uacacugacgacucucccc

SEQ ID NO: 1677434 - RNA, 19 nt, Artificial Sequence
  Description of Artificial Sequence: Synthetic oligonucleotide
guagaugcuccgcuguagg

SEQ ID NO: 1677435 - RNA, 19 nt, Artificial Sequence
  Description of Artificial Sequence: Synthetic oligonucleotide
gguuuccugacccagauga

SEQ ID NO: 1677436 - RNA, 19 nt, Artificial Sequence
  Description of Artificial Sequence: Synthetic oligonucleotide
gaugcuccgcuguaggccc

SEQ ID NO: 1677437 - RNA, 19 nt, Artificial Sequence
  Description of Artificial Sequence: Synthetic oligonucleotide
auaucggguacccagguuu

SEQ ID NO: 1677438 - RNA, 19 nt, Artificial Sequence
  Description of Artificial Sequence: Synthetic oligonucleotide
aucgguuuuagagacccuc

SEQ ID NO: 1677439 - RNA, 19 nt, Artificial Sequence
  Description of Artificial Sequence: Synthetic oligonucleotide
ucuggcacgcccugggcgg

SEQ ID NO: 1677440 - RNA, 19 nt, Artificial Sequence
  Description of Artificial Sequence: Synthetic oligonucleotide
uggugccauacauaucggg

SEQ ID NO: 1677441 - RNA, 19 nt, Artificial Sequence
  Description of Artificial Sequence: Synthetic oligonucleotide
uacacauacagggucccag

SEQ ID NO: 1677442 - RNA, 19 nt, Artificial Sequence
  Description of Artificial Sequence: Synthetic oligonucleotide
acggcauccggucacucgg

SEQ ID NO: 1677443 - RNA, 19 nt, Artificial Sequence
  Description of Artificial Sequence: Synthetic oligonucleotide
ucguaacaggacacaagcc

SEQ ID NO: 1677444 - RNA, 19 nt, Artificial Sequence
  Description of Artificial Sequence: Synthetic oligonucleotide
ucaugaacaugccacgguu

SEQ ID NO: 1677445 - RNA, 19 nt, Artificial Sequence
  Description of Artificial Sequence: Synthetic oligonucleotide
guaacaggacacaagcccc

SEQ ID NO: 1677446 - RNA, 19 nt, Artificial Sequence
  Description of Artificial Sequence: Synthetic oligonucleotide
ugccauacauaucggguac

SEQ ID NO: 1677447 - RNA, 19 nt, Artificial Sequence
  Description of Artificial Sequence: Synthetic oligonucleotide
uuaugcagcugcccuggag

SEQ ID NO: 1677448 - RNA, 19 nt, Artificial Sequence
  Description of Artificial Sequence: Synthetic oligonucleotide
uacccauacacugacgacu

SEQ ID NO: 1677449 - RNA, 19 nt, Artificial Sequence
  Description of Artificial Sequence: Synthetic oligonucleotide
uccuagguguauauaccca

SEQ ID NO: 1677450 - RNA, 19 nt, Artificial Sequence
  Description of Artificial Sequence: Synthetic oligonucleotide
gcuagaguuacagagguug

SEQ ID NO: 1677451 - RNA, 19 nt, Artificial Sequence
  Description of Artificial Sequence: Synthetic oligonucleotide
agccccaucaggcuguuug

SEQ ID NO: 1677452 - RNA, 19 nt, Artificial Sequence
  Description of Artificial Sequence: Synthetic oligonucleotide
acacugacgacucuccccu

SEQ ID NO: 1677453 - RNA, 19 nt, Artificial Sequence
  Description of Artificial Sequence: Synthetic oligonucleotide
aacaugccacgguuucggg

SEQ ID NO: 1677454 - RNA, 19 nt, Artificial Sequence
  Description of Artificial Sequence: Synthetic oligonucleotide
ugccucagucucuacaaug

SEQ ID NO: 1677455 - RNA, 19 nt, Artificial Sequence
  Description of Artificial Sequence: Synthetic oligonucleotide
ucucgcuggucaaagcucu

SEQ ID NO: 1677456 - RNA, 19 nt, Artificial Sequence
  Description of Artificial Sequence: Synthetic oligonucleotide
aaauagaggcugguuggug

SEQ ID NO: 1677457 - RNA, 19 nt, Artificial Sequence
  Description of Artificial Sequence: Synthetic oligonucleotide
uuaacugcaugcacacaaa

SEQ ID NO: 1677458 - RNA, 19 nt, Artificial Sequence
  Description of Artificial Sequence: Synthetic oligonucleotide
agugcucguaacaggacac

SEQ ID NO: 1677459 - RNA, 19 nt, Artificial Sequence
  Description of Artificial Sequence: Synthetic oligonucleotide
acaugccacgguuucgggg

SEQ ID NO: 1677460 - RNA, 19 nt, Artificial Sequence
  Description of Artificial Sequence: Synthetic oligonucleotide
agaguuacagagguuguga

SEQ ID NO: 1677461 - RNA, 19 nt, Artificial Sequence
  Description of Artificial Sequence: Synthetic oligonucleotide
uggaguguccaaacacuca

SEQ ID NO: 1677462 - RNA, 19 nt, Artificial Sequence
  Description of Artificial Sequence: Synthetic oligonucleotide
acggaguucuguuccauca

SEQ ID NO: 1677463 - RNA, 19 nt, Artificial Sequence
  Description of Artificial Sequence: Synthetic oligonucleotide
agcaagucgccggacaagg

SEQ ID NO: 1677464 - RNA, 19 nt, Artificial Sequence
  Description of Artificial Sequence: Synthetic oligonucleotide
ugauucugcuaguugcagu

SEQ ID NO: 1677465 - RNA, 19 nt, Artificial Sequence
  Description of Artificial Sequence: Synthetic oligonucleotide
ucuaccacacugacccaug

SEQ ID NO: 1677466 - RNA, 19 nt, Artificial Sequence
  Description of Artificial Sequence: Synthetic oligonucleotide
ucgguuuuagagacccucu

SEQ ID NO: 1677467 - RNA, 19 nt, Artificial Sequence
  Description of Artificial Sequence: Synthetic oligonucleotide
cacuacagagcucacgguc

SEQ ID NO: 1677468 - RNA, 19 nt, Artificial Sequence
  Description of Artificial Sequence: Synthetic oligonucleotide
agaaaugcacgggccaggg

SEQ ID NO: 1677469 - RNA, 19 nt, Artificial Sequence
  Description of Artificial Sequence: Synthetic oligonucleotide
uuagggaucugcugcugcu

SEQ ID NO: 1677470 - RNA, 19 nt, Artificial Sequence
  Description of Artificial Sequence: Synthetic oligonucleotide
acgacucuccccucuuugg

SEQ ID NO: 1677471 - RNA, 19 nt, Artificial Sequence
  Description of Artificial Sequence: Synthetic oligonucleotide
agcgaaguggcuucugggu

SEQ ID NO: 1677472 - RNA, 19 nt, Artificial Sequence
  Description of Artificial Sequence: Synthetic oligonucleotide
cguaacaggacacaagccc

SEQ ID NO: 1677473 - RNA, 19 nt, Artificial Sequence
  Description of Artificial Sequence: Synthetic oligonucleotide
gguuuuagagacccucugc

SEQ ID NO: 1677474 - RNA, 19 nt, Artificial Sequence
  Description of Artificial Sequence: Synthetic oligonucleotide
uagaguuacagagguugug

SEQ ID NO: 1677475 - RNA, 19 nt, Artificial Sequence
  Description of Artificial Sequence: Synthetic oligonucleotide
uuguccgaucuuuugggaa

SEQ ID NO: 1677476 - RNA, 19 nt, Artificial Sequence
  Description of Artificial Sequence: Synthetic oligonucleotide
caagucgccggacaaggac

SEQ ID NO: 1677477 - RNA, 19 nt, Artificial Sequence
  Description of Artificial Sequence: Synthetic oligonucleotide
agcucuuaucaauggccag

SEQ ID NO: 1677478 - RNA, 19 nt, Artificial Sequence
  Description of Artificial Sequence: Synthetic oligonucleotide
uggacuggagaaguagaug

SEQ ID NO: 1677479 - RNA, 19 nt, Artificial Sequence
  Description of Artificial Sequence: Synthetic oligonucleotide
caugaccaaugccuaugcg

SEQ ID NO: 1677480 - RNA, 19 nt, Artificial Sequence
  Description of Artificial Sequence: Synthetic oligonucleotide
ucuugggucaggucucgcu

SEQ ID NO: 1677481 - RNA, 19 nt, Artificial Sequence
  Description of Artificial Sequence: Synthetic oligonucleotide
gacgacucuccccucuuug

SEQ ID NO: 1677482 - RNA, 19 nt, Artificial Sequence
  Description of Artificial Sequence: Synthetic oligonucleotide
ggagcuagaguuacagagg

SEQ ID NO: 1677483 - RNA, 19 nt, Artificial Sequence
  Description of Artificial Sequence: Synthetic oligonucleotide
aauuaacugcaugcacaca

SEQ ID NO: 1677484 - RNA, 19 nt, Artificial Sequence
  Description of Artificial Sequence: Synthetic oligonucleotide
caugccacgguuucgggga

SEQ ID NO: 1677485 - RNA, 19 nt, Artificial Sequence
  Description of Artificial Sequence: Synthetic oligonucleotide
aguagaugcuccgcuguag

SEQ ID NO: 1677486 - RNA, 19 nt, Artificial Sequence
  Description of Artificial Sequence: Synthetic oligonucleotide
aucuuuugggaaagcggcg

SEQ ID NO: 1677487 - RNA, 19 nt, Artificial Sequence
  Description of Artificial Sequence: Synthetic oligonucleotide
ggaccugucccagaaaugc

SEQ ID NO: 1677488 - RNA, 19 nt, Artificial Sequence
  Description of Artificial Sequence: Synthetic oligonucleotide
acauaucggguacccaggu

SEQ ID NO: 1677489 - RNA, 19 nt, Artificial Sequence
  Description of Artificial Sequence: Synthetic oligonucleotide
gacccagaugaauaauuaa

SEQ ID NO: 1677490 - RNA, 19 nt, Artificial Sequence
  Description of Artificial Sequence: Synthetic oligonucleotide
cuaccacacugacccaugg

SEQ ID NO: 1677491 - RNA, 19 nt, Artificial Sequence
  Description of Artificial Sequence: Synthetic oligonucleotide
uuuccugacccagaugaau

SEQ ID NO: 1677492 - RNA, 19 nt, Artificial Sequence
  Description of Artificial Sequence: Synthetic oligonucleotide
aguaugccucagucucuac

SEQ ID NO: 1677493 - RNA, 19 nt, Artificial Sequence
  Description of Artificial Sequence: Synthetic oligonucleotide
cucuggcacgcccugggcg

SEQ ID NO: 1677494 - RNA, 19 nt, Artificial Sequence
  Description of Artificial Sequence: Synthetic oligonucleotide
aaguagaugcuccgcugua

SEQ ID NO: 1677495 - RNA, 19 nt, Artificial Sequence
  Description of Artificial Sequence: Synthetic oligonucleotide
cugacagugcuuuuccgga

SEQ ID NO: 1677496 - RNA, 19 nt, Artificial Sequence
  Description of Artificial Sequence: Synthetic oligonucleotide
uaucggguacccagguuuc

SEQ ID NO: 1677497 - RNA, 19 nt, Artificial Sequence
  Description of Artificial Sequence: Synthetic oligonucleotide
guaugccucagucucuaca

SEQ ID NO: 1677498 - RNA, 19 nt, Artificial Sequence
  Description of Artificial Sequence: Synthetic oligonucleotide
cuagugcucguaacaggac

SEQ ID NO: 1677499 - RNA, 19 nt, Artificial Sequence
  Description of Artificial Sequence: Synthetic oligonucleotide
acugacgacucuccccucu

SEQ ID NO: 1677500 - RNA, 19 nt, Artificial Sequence
  Description of Artificial Sequence: Synthetic oligonucleotide
gucucuacaaugcguccac

SEQ ID NO: 1677501 - RNA, 19 nt, Artificial Sequence
  Description of Artificial Sequence: Synthetic oligonucleotide
ucugccgaggcgcgcacac

SEQ ID NO: 1677502 - RNA, 19 nt, Artificial Sequence
  Description of Artificial Sequence: Synthetic oligonucleotide
aaugcacgggccaggguga

SEQ ID NO: 1677503 - RNA, 19 nt, Artificial Sequence
  Description of Artificial Sequence: Synthetic oligonucleotide
acggcugacagugcuuuuc

SEQ ID NO: 1677504 - RNA, 19 nt, Artificial Sequence
  Description of Artificial Sequence: Synthetic oligonucleotide
caaugccuaugcgagcugc

SEQ ID NO: 1677505 - RNA, 19 nt, Artificial Sequence
  Description of Artificial Sequence: Synthetic oligonucleotide
cacggcauccggucacucg

SEQ ID NO: 1677506 - RNA, 19 nt, Artificial Sequence
  Description of Artificial Sequence: Synthetic oligonucleotide
auauacccauacacugacg

SEQ ID NO: 1677507 - RNA, 19 nt, Artificial Sequence
  Description of Artificial Sequence: Synthetic oligonucleotide
cucugucuaccacacugac

SEQ ID NO: 1677508 - RNA, 19 nt, Artificial Sequence
  Description of Artificial Sequence: Synthetic oligonucleotide
gaccaaugccuaugcgagc

SEQ ID NO: 1677509 - RNA, 19 nt, Artificial Sequence
  Description of Artificial Sequence: Synthetic oligonucleotide
aagcucacagacaucgguu

SEQ ID NO: 1677510 - RNA, 19 nt, Artificial Sequence
  Description of Artificial Sequence: Synthetic oligonucleotide
cuuuuccggagggugcugc

SEQ ID NO: 1677511 - RNA, 19 nt, Artificial Sequence
  Description of Artificial Sequence: Synthetic oligonucleotide
aaguaugccucagucucua

SEQ ID NO: 1677512 - RNA, 19 nt, Artificial Sequence
  Description of Artificial Sequence: Synthetic oligonucleotide
acagagcucacgguccuug

SEQ ID NO: 1677513 - RNA, 19 nt, Artificial Sequence
  Description of Artificial Sequence: Synthetic oligonucleotide
aaagcauacccuggagcua

SEQ ID NO: 1677514 - RNA, 19 nt, Artificial Sequence
  Description of Artificial Sequence: Synthetic oligonucleotide
guguauauacccauacacu

SEQ ID NO: 1677515 - RNA, 19 nt, Artificial Sequence
  Description of Artificial Sequence: Synthetic oligonucleotide
aaugccuaugcgagcugcu

SEQ ID NO: 1677516 - RNA, 19 nt, Artificial Sequence
  Description of Artificial Sequence: Synthetic oligonucleotide
aaauucuggcugagacuug

SEQ ID NO: 1677517 - RNA, 19 nt, Artificial Sequence
  Description of Artificial Sequence: Synthetic oligonucleotide
aucggguacccagguuucc

SEQ ID NO: 1677518 - RNA, 19 nt, Artificial Sequence
  Description of Artificial Sequence: Synthetic oligonucleotide
ucacgguccuugaggguac

SEQ ID NO: 1677519 - RNA, 19 nt, Artificial Sequence
  Description of Artificial Sequence: Synthetic oligonucleotide
cuaugcgagcugcugccac

SEQ ID NO: 1677520 - RNA, 19 nt, Artificial Sequence
  Description of Artificial Sequence: Synthetic oligonucleotide
uaucaauggccagggccug

SEQ ID NO: 1677521 - RNA, 19 nt, Artificial Sequence
  Description of Artificial Sequence: Synthetic oligonucleotide
caaauucuggcugagacuu

SEQ ID NO: 1677522 - RNA, 19 nt, Artificial Sequence
  Description of Artificial Sequence: Synthetic oligonucleotide
uuggacaguuccccacaaa

SEQ ID NO: 1677523 - RNA, 19 nt, Artificial Sequence
  Description of Artificial Sequence: Synthetic oligonucleotide
acgguuucggggagucugc

SEQ ID NO: 1677524 - RNA, 19 nt, Artificial Sequence
  Description of Artificial Sequence: Synthetic oligonucleotide
ugcuuuuccggagggugcu

SEQ ID NO: 1677525 - RNA, 19 nt, Artificial Sequence
  Description of Artificial Sequence: Synthetic oligonucleotide
gugccauacauaucgggua

SEQ ID NO: 1677526 - RNA, 19 nt, Artificial Sequence
  Description of Artificial Sequence: Synthetic oligonucleotide
uacccuggagcuagaguua

SEQ ID NO: 1677527 - RNA, 19 nt, Artificial Sequence
  Description of Artificial Sequence: Synthetic oligonucleotide
ggucccagguuucaugaac

SEQ ID NO: 1677528 - RNA, 19 nt, Artificial Sequence
  Description of Artificial Sequence: Synthetic oligonucleotide
ucugccggccaccccuuga

SEQ ID NO: 1677529 - RNA, 19 nt, Artificial Sequence
  Description of Artificial Sequence: Synthetic oligonucleotide
ggucagaagaaagcauacc

SEQ ID NO: 1677530 - RNA, 19 nt, Artificial Sequence
  Description of Artificial Sequence: Synthetic oligonucleotide
gguuucggggagucugccg

SEQ ID NO: 1677531 - RNA, 19 nt, Artificial Sequence
  Description of Artificial Sequence: Synthetic oligonucleotide
gcucuagugcucguaacag

SEQ ID NO: 1677532 - RNA, 19 nt, Artificial Sequence
  Description of Artificial Sequence: Synthetic oligonucleotide
gcaugaccaaugccuaugc

SEQ ID NO: 1677533 - RNA, 19 nt, Artificial Sequence
  Description of Artificial Sequence: Synthetic oligonucleotide
ccggacaaggaccuguccc

SEQ ID NO: 1677534 - RNA, 19 nt, Artificial Sequence
  Description of Artificial Sequence: Synthetic oligonucleotide
agguuuccugacccagaug

SEQ ID NO: 1677535 - RNA, 19 nt, Artificial Sequence
  Description of Artificial Sequence: Synthetic oligonucleotide
acauagaagcgaaguggcu

SEQ ID NO: 1677536 - RNA, 19 nt, Artificial Sequence
  Description of Artificial Sequence: Synthetic oligonucleotide
acucugucuaccacacuga

SEQ ID NO: 1677537 - RNA, 19 nt, Artificial Sequence
  Description of Artificial Sequence: Synthetic oligonucleotide
caucuugggucaggucucg

SEQ ID NO: 1677538 - RNA, 19 nt, Artificial Sequence
  Description of Artificial Sequence: Synthetic oligonucleotide
cauacagggucccagguuu

SEQ ID NO: 1677539 - RNA, 19 nt, Artificial Sequence
  Description of Artificial Sequence: Synthetic oligonucleotide
cuagguguauauacccaua

SEQ ID NO: 1677540 - RNA, 19 nt, Artificial Sequence
  Description of Artificial Sequence: Synthetic oligonucleotide
ccgaucuuuugggaaagcg

SEQ ID NO: 1677541 - RNA, 19 nt, Artificial Sequence
  Description of Artificial Sequence: Synthetic oligonucleotide
caggucucgcuggucaaag

SEQ ID NO: 1677542 - RNA, 19 nt, Artificial Sequence
  Description of Artificial Sequence: Synthetic oligonucleotide
gagucugccggccaccccu

SEQ ID NO: 1677543 - RNA, 19 nt, Artificial Sequence
  Description of Artificial Sequence: Synthetic oligonucleotide
ugucuaccacacugaccca

SEQ ID NO: 1677544 - RNA, 19 nt, Artificial Sequence
  Description of Artificial Sequence: Synthetic oligonucleotide
gaaauagaggcugguuggu

SEQ ID NO: 1677545 - RNA, 19 nt, Artificial Sequence
  Description of Artificial Sequence: Synthetic oligonucleotide
cucagucucuacaaugcgu

SEQ ID NO: 1677546 - RNA, 19 nt, Artificial Sequence
  Description of Artificial Sequence: Synthetic oligonucleotide
ggcugacagugcuuuuccg

SEQ ID NO: 1677547 - RNA, 19 nt, Artificial Sequence
  Description of Artificial Sequence: Synthetic oligonucleotide
gcuccuagguguauauacc

SEQ ID NO: 1677548 - RNA, 19 nt, Artificial Sequence
  Description of Artificial Sequence: Synthetic oligonucleotide
ucggguacccagguuuccu

SEQ ID NO: 1677549 - RNA, 19 nt, Artificial Sequence
  Description of Artificial Sequence: Synthetic oligonucleotide
cacggaguucuguuccauc

SEQ ID NO: 1677550 - RNA, 19 nt, Artificial Sequence
  Description of Artificial Sequence: Synthetic oligonucleotide
cagccccuugacuggagac

SEQ ID NO: 1677551 - RNA, 19 nt, Artificial Sequence
  Description of Artificial Sequence: Synthetic oligonucleotide
uccgaucuuuugggaaagc

SEQ ID NO: 1677552 - RNA, 19 nt, Artificial Sequence
  Description of Artificial Sequence: Synthetic oligonucleotide
caagcucacagacaucggu

SEQ ID NO: 1677553 - RNA, 19 nt, Artificial Sequence
  Description of Artificial Sequence: Synthetic oligonucleotide
cuggacauagaagcgaagu

SEQ ID NO: 1677554 - RNA, 19 nt, Artificial Sequence
  Description of Artificial Sequence: Synthetic oligonucleotide
augccuaugcgagcugcug

SEQ ID NO: 1677555 - RNA, 19 nt, Artificial Sequence
  Description of Artificial Sequence: Synthetic oligonucleotide
ucgccggacaaggaccugu

SEQ ID NO: 1677556 - RNA, 19 nt, Artificial Sequence
  Description of Artificial Sequence: Synthetic oligonucleotide
cuagaguuacagagguugu

SEQ ID NO: 1677557 - RNA, 19 nt, Artificial Sequence
  Description of Artificial Sequence: Synthetic oligonucleotide
gaaagcggcgcuggcaucu

SEQ ID NO: 1677558 - RNA, 19 nt, Artificial Sequence
  Description of Artificial Sequence: Synthetic oligonucleotide
cucuuuggugccauacaua

SEQ ID NO: 1677559 - RNA, 19 nt, Artificial Sequence
  Description of Artificial Sequence: Synthetic oligonucleotide
cccuggaguguccaaacac

SEQ ID NO: 1677560 - RNA, 19 nt, Artificial Sequence
  Description of Artificial Sequence: Synthetic oligonucleotide
gcucguaacaggacacaag

SEQ ID NO: 1677561 - RNA, 19 nt, Artificial Sequence
  Description of Artificial Sequence: Synthetic oligonucleotide
cugggcggcgggcucgucc

SEQ ID NO: 1677562 - RNA, 19 nt, Artificial Sequence
  Description of Artificial Sequence: Synthetic oligonucleotide
uucggggagucugccggcc

SEQ ID NO: 1677563 - RNA, 19 nt, Artificial Sequence
  Description of Artificial Sequence: Synthetic oligonucleotide
cauacauaucggguaccca

SEQ ID NO: 1677564 - RNA, 19 nt, Artificial Sequence
  Description of Artificial Sequence: Synthetic oligonucleotide
gucucgcuggucaaagcuc

SEQ ID NO: 1677565 - RNA, 19 nt, Artificial Sequence
  Description of Artificial Sequence: Synthetic oligonucleotide
acugacccaugggcugccc

SEQ ID NO: 1677566 - RNA, 19 nt, Artificial Sequence
  Description of Artificial Sequence: Synthetic oligonucleotide
augccucagucucuacaau

SEQ ID NO: 1677567 - RNA, 19 nt, Artificial Sequence
  Description of Artificial Sequence: Synthetic oligonucleotide
cucacgguccuugagggua

SEQ ID NO: 1677568 - RNA, 19 nt, Artificial Sequence
  Description of Artificial Sequence: Synthetic oligonucleotide
cauagaagcgaaguggcuu

SEQ ID NO: 1677569 - RNA, 19 nt, Artificial Sequence
  Description of Artificial Sequence: Synthetic oligonucleotide
gaccugucccagaaaugca

SEQ ID NO: 1677570 - RNA, 19 nt, Artificial Sequence
  Description of Artificial Sequence: Synthetic oligonucleotide
ugcgaagcugccgcauggu

SEQ ID NO: 1677571 - RNA, 19 nt, Artificial Sequence
  Description of Artificial Sequence: Synthetic oligonucleotide
ugacgacucuccccucuuu

SEQ ID NO: 1677572 - RNA, 19 nt, Artificial Sequence
  Description of Artificial Sequence: Synthetic oligonucleotide
gggcucguccaggaaauag

SEQ ID NO: 1677573 - RNA, 19 nt, Artificial Sequence
  Description of Artificial Sequence: Synthetic oligonucleotide
cugacccagaugaauaauu

SEQ ID NO: 1677574 - RNA, 19 nt, Artificial Sequence
  Description of Artificial Sequence: Synthetic oligonucleotide
agucgccggacaaggaccu

SEQ ID NO: 1677575 - RNA, 19 nt, Artificial Sequence
  Description of Artificial Sequence: Synthetic oligonucleotide
ccuugagugagcagcuuca

SEQ ID NO: 1677576 - RNA, 19 nt, Artificial Sequence
  Description of Artificial Sequence: Synthetic oligonucleotide
ggugccauacauaucgggu

SEQ ID NO: 1677577 - RNA, 19 nt, Artificial Sequence
  Description of Artificial Sequence: Synthetic oligonucleotide
aacacucauuuaacucauu

SEQ ID NO: 1677578 - RNA, 19 nt, Artificial Sequence
  Description of Artificial Sequence: Synthetic oligonucleotide
ugcguccacggaguucugu

SEQ ID NO: 1677579 - RNA, 19 nt, Artificial Sequence
  Description of Artificial Sequence: Synthetic oligonucleotide
caaugcguccacggaguuc

SEQ ID NO: 1677580 - RNA, 19 nt, Artificial Sequence
  Description of Artificial Sequence: Synthetic oligonucleotide
gccggccaccccuugagug

SEQ ID NO: 1677581 - RNA, 19 nt, Artificial Sequence
  Description of Artificial Sequence: Synthetic oligonucleotide
caaguaugccucagucucu

SEQ ID NO: 1677582 - RNA, 19 nt, Artificial Sequence
  Description of Artificial Sequence: Synthetic oligonucleotide
cacucgggauccugcucug

SEQ ID NO: 1677583 - RNA, 19 nt, Artificial Sequence
  Description of Artificial Sequence: Synthetic oligonucleotide
ccuggacauagaagcgaag

SEQ ID NO: 1677584 - RNA, 19 nt, Artificial Sequence
  Description of Artificial Sequence: Synthetic oligonucleotide
gaaaugcacgggccagggu

SEQ ID NO: 1677585 - RNA, 19 nt, Artificial Sequence
  Description of Artificial Sequence: Synthetic oligonucleotide
gggugauccucuggacugg

SEQ ID NO: 1677586 - RNA, 19 nt, Artificial Sequence
  Description of Artificial Sequence: Synthetic oligonucleotide
augcacgggccagggugac

SEQ ID NO: 1677587 - RNA, 19 nt, Artificial Sequence
  Description of Artificial Sequence: Synthetic oligonucleotide
cccuugagugagcagcuuc

SEQ ID NO: 1677588 - RNA, 19 nt, Artificial Sequence
  Description of Artificial Sequence: Synthetic oligonucleotide
gugaccgcuggcuggucaa

SEQ ID NO: 1677589 - RNA, 19 nt, Artificial Sequence
  Description of Artificial Sequence: Synthetic oligonucleotide
ugcuccgcuguaggcccag

SEQ ID NO: 1677590 - RNA, 19 nt, Artificial Sequence
  Description of Artificial Sequence: Synthetic oligonucleotide
gccauacauaucggguacc

SEQ ID NO: 1677591 - RNA, 19 nt, Artificial Sequence
  Description of Artificial Sequence: Synthetic oligonucleotide
gugcucguaacaggacaca

SEQ ID NO: 1677592 - RNA, 19 nt, Artificial Sequence
  Description of Artificial Sequence: Synthetic oligonucleotide
cagagcucacgguccuuga

SEQ ID NO: 1677593 - RNA, 19 nt, Artificial Sequence
  Description of Artificial Sequence: Synthetic oligonucleotide
gcuguaggcccagggauga

SEQ ID NO: 1677594 - RNA, 19 nt, Artificial Sequence
  Description of Artificial Sequence: Synthetic oligonucleotide
ggacaguuccccacaaaua

SEQ ID NO: 1677595 - RNA, 19 nt, Artificial Sequence
  Description of Artificial Sequence: Synthetic oligonucleotide
cacugacccaugggcugcc

SEQ ID NO: 1677596 - RNA, 19 nt, Artificial Sequence
  Description of Artificial Sequence: Synthetic oligonucleotide
cuuaugcagcugcccugga

SEQ ID NO: 1677597 - RNA, 19 nt, Artificial Sequence
  Description of Artificial Sequence: Synthetic oligonucleotide
cacgguccuugaggguacg

SEQ ID NO: 1677598 - RNA, 19 nt, Artificial Sequence
  Description of Artificial Sequence: Synthetic oligonucleotide
ccucacggcauccggucac

SEQ ID NO: 1677599 - RNA, 19 nt, Artificial Sequence
  Description of Artificial Sequence: Synthetic oligonucleotide
cgguuuuagagacccucug

SEQ ID NO: 1677600 - RNA, 19 nt, Artificial Sequence
  Description of Artificial Sequence: Synthetic oligonucleotide
gccggacaaggaccugucc

SEQ ID NO: 1677601 - RNA, 19 nt, Artificial Sequence
  Description of Artificial Sequence: Synthetic oligonucleotide
ccuagguguauauacccau

SEQ ID NO: 1677602 - RNA, 19 nt, Artificial Sequence
  Description of Artificial Sequence: Synthetic oligonucleotide
ucacggcauccggucacuc

SEQ ID NO: 1677603 - RNA, 19 nt, Artificial Sequence
  Description of Artificial Sequence: Synthetic oligonucleotide
caaggaccugucccagaaa

SEQ ID NO: 1677604 - RNA, 19 nt, Artificial Sequence
  Description of Artificial Sequence: Synthetic oligonucleotide
gucuaccacacugacccau

SEQ ID NO: 1677605 - RNA, 19 nt, Artificial Sequence
  Description of Artificial Sequence: Synthetic oligonucleotide
agcuagaguuacagagguu

SEQ ID NO: 1677606 - RNA, 19 nt, Artificial Sequence
  Description of Artificial Sequence: Synthetic oligonucleotide
cacugacgacucuccccuc

SEQ ID NO: 1677607 - RNA, 19 nt, Artificial Sequence
  Description of Artificial Sequence: Synthetic oligonucleotide
ggagucugccggccacccc

SEQ ID NO: 1677608 - RNA, 19 nt, Artificial Sequence
  Description of Artificial Sequence: Synthetic oligonucleotide
ggcuguuugcugaggcuga

SEQ ID NO: 1677609 - RNA, 19 nt, Artificial Sequence
  Description of Artificial Sequence: Synthetic oligonucleotide
gaccgcuggcuggucaaaa

SEQ ID NO: 1677610 - RNA, 19 nt, Artificial Sequence
  Description of Artificial Sequence: Synthetic oligonucleotide
gcccuggacauagaagcga

SEQ ID NO: 1677611 - RNA, 19 nt, Artificial Sequence
  Description of Artificial Sequence: Synthetic oligonucleotide
uacagagcucacgguccuu

SEQ ID NO: 1677612 - RNA, 19 nt, Artificial Sequence
  Description of Artificial Sequence: Synthetic oligonucleotide
ugccacgguuucggggagu

SEQ ID NO: 1677613 - RNA, 19 nt, Artificial Sequence
  Description of Artificial Sequence: Synthetic oligonucleotide
ggguacggcugacagugcu

SEQ ID NO: 1677614 - RNA, 19 nt, Artificial Sequence
  Description of Artificial Sequence: Synthetic oligonucleotide
cccuggacauagaagcgaa

SEQ ID NO: 1677615 - RNA, 19 nt, Artificial Sequence
  Description of Artificial Sequence: Synthetic oligonucleotide
cggucacucgggauccugc

SEQ ID NO: 1677616 - RNA, 19 nt, Artificial Sequence
  Description of Artificial Sequence: Synthetic oligonucleotide
ggcauccggucacucggga

SEQ ID NO: 1677617 - RNA, 19 nt, Artificial Sequence
  Description of Artificial Sequence: Synthetic oligonucleotide
ggucacucgggauccugcu

SEQ ID NO: 1677618 - RNA, 19 nt, Artificial Sequence
  Description of Artificial Sequence: Synthetic oligonucleotide
cuggcacgcccugggcggc

SEQ ID NO: 1677619 - RNA, 19 nt, Artificial Sequence
  Description of Artificial Sequence: Synthetic oligonucleotide
ccccugcaugaccaaugcc

SEQ ID NO: 1677620 - RNA, 19 nt, Artificial Sequence
  Description of Artificial Sequence: Synthetic oligonucleotide
ccaaugccuaugcgagcug

SEQ ID NO: 1677621 - RNA, 19 nt, Artificial Sequence
  Description of Artificial Sequence: Synthetic oligonucleotide
cccaaguaugccucagucu

SEQ ID NO: 1677622 - RNA, 19 nt, Artificial Sequence
  Description of Artificial Sequence: Synthetic oligonucleotide
cauaucggguacccagguu

SEQ ID NO: 1677623 - RNA, 19 nt, Artificial Sequence
  Description of Artificial Sequence: Synthetic oligonucleotide
agcauacccuggagcuaga

SEQ ID NO: 1677624 - RNA, 19 nt, Artificial Sequence
  Description of Artificial Sequence: Synthetic oligonucleotide
uccggucacucgggauccu

SEQ ID NO: 1677625 - RNA, 19 nt, Artificial Sequence
  Description of Artificial Sequence: Synthetic oligonucleotide
caucgguuuuagagacccu

SEQ ID NO: 1677626 - RNA, 19 nt, Artificial Sequence
  Description of Artificial Sequence: Synthetic oligonucleotide
gcuuuuccggagggugcug

SEQ ID NO: 1677627 - RNA, 19 nt, Artificial Sequence
  Description of Artificial Sequence: Synthetic oligonucleotide
gccacgguuucggggaguc

SEQ ID NO: 1677628 - RNA, 19 nt, Artificial Sequence
  Description of Artificial Sequence: Synthetic oligonucleotide
cgaggcgcgcacacacacc

SEQ ID NO: 1677629 - RNA, 19 nt, Artificial Sequence
  Description of Artificial Sequence: Synthetic oligonucleotide
ccggccaccccuugaguga

SEQ ID NO: 1677630 - RNA, 19 nt, Artificial Sequence
  Description of Artificial Sequence: Synthetic oligonucleotide
gucgccggacaaggaccug

SEQ ID NO: 1677631 - RNA, 19 nt, Artificial Sequence
  Description of Artificial Sequence: Synthetic oligonucleotide
gcaagucgccggacaagga

SEQ ID NO: 1677632 - RNA, 19 nt, Artificial Sequence
  Description of Artificial Sequence: Synthetic oligonucleotide
cggcgcuggcaucuggccc

SEQ ID NO: 1677633 - RNA, 19 nt, Artificial Sequence
  Description of Artificial Sequence: Synthetic oligonucleotide
cgccucacggcauccgguc

SEQ ID NO: 1677634 - RNA, 19 nt, Artificial Sequence
  Description of Artificial Sequence: Synthetic oligonucleotide
gcggcgggcucguccagga

SEQ ID NO: 1677635 - RNA, 19 nt, Artificial Sequence
  Description of Artificial Sequence: Synthetic oligonucleotide
ccagccccuugacuggaga

SEQ ID NO: 1677636 - RNA, 19 nt, Artificial Sequence
  Description of Artificial Sequence: Synthetic oligonucleotide
cugacgacucuccccucuu

SEQ ID NO: 1677637 - RNA, 19 nt, Artificial Sequence
  Description of Artificial Sequence: Synthetic oligonucleotide
agucugccggccaccccuu

SEQ ID NO: 1677638 - RNA, 19 nt, Artificial Sequence
  Description of Artificial Sequence: Synthetic oligonucleotide
augcguccacggaguucug

SEQ ID NO: 1677639 - RNA, 19 nt, Artificial Sequence
  Description of Artificial Sequence: Synthetic oligonucleotide
ccggucacucgggauccug

SEQ ID NO: 1677640 - RNA, 19 nt, Artificial Sequence
  Description of Artificial Sequence: Synthetic oligonucleotide
gcauccggucacucgggau

SEQ ID NO: 1677641 - RNA, 19 nt, Artificial Sequence
  Description of Artificial Sequence: Synthetic oligonucleotide
cucugccgaggcgcgcaca

SEQ ID NO: 1677642 - RNA, 19 nt, Artificial Sequence
  Description of Artificial Sequence: Synthetic oligonucleotide
gccccuugacuggagacau

SEQ ID NO: 1677643 - RNA, 19 nt, Artificial Sequence
  Description of Artificial Sequence: Synthetic oligonucleotide
ccuaugcgagcugcugcca

SEQ ID NO: 1677644 - RNA, 19 nt, Artificial Sequence
  Description of Artificial Sequence: Synthetic oligonucleotide
ccgcuguaggcccagggau

SEQ ID NO: 1677645 - RNA, 19 nt, Artificial Sequence
  Description of Artificial Sequence: Synthetic oligonucleotide
cgccggacaaggaccuguc

SEQ ID NO: 1677646 - RNA, 19 nt, Artificial Sequence
  Description of Artificial Sequence: Synthetic oligonucleotide
gguacggcugacagugcuu

SEQ ID NO: 1677647 - RNA, 19 nt, Artificial Sequence
  Description of Artificial Sequence: Synthetic oligonucleotide
cucgcuggucaaagcucuu

SEQ ID NO: 1677648 - RNA, 19 nt, Artificial Sequence
  Description of Artificial Sequence: Synthetic oligonucleotide
ccucugccgaggcgcgcac

SEQ ID NO: 1677649 - RNA, 19 nt, Artificial Sequence
  Description of Artificial Sequence: Synthetic oligonucleotide
gcgggcucguccaggaaau

SEQ ID NO: 1677650 - RNA, 19 nt, Artificial Sequence
  Description of Artificial Sequence: Synthetic oligonucleotide
cuggcccgccucacggcau

SEQ ID NO: 1677651 - RNA, 19 nt, Artificial Sequence
  Description of Artificial Sequence: Synthetic oligonucleotide
cccucugccgaggcgcgca

SEQ ID NO: 1677652 - RNA, 19 nt, Artificial Sequence
  Description of Artificial Sequence: Synthetic oligonucleotide
cccauacacugacgacucu

SEQ ID NO: 1677653 - RNA, 19 nt, Artificial Sequence
  Description of Artificial Sequence: Synthetic oligonucleotide
ccagccgggcagggugauc

SEQ ID NO: 1677654 - RNA, 19 nt, Artificial Sequence
  Description of Artificial Sequence: Synthetic oligonucleotide
ccacgguuucggggagucu

SEQ ID NO: 1677655 - RNA, 19 nt, Artificial Sequence
  Description of Artificial Sequence: Synthetic oligonucleotide
ccccuugacuggagacauu

SEQ ID NO: 1677656 - RNA, 19 nt, Artificial Sequence
  Description of Artificial Sequence: Synthetic oligonucleotide
cgcuggcaucuggcccgcc

SEQ ID NO: 1677657 - RNA, 19 nt, Artificial Sequence
  Description of Artificial Sequence: Synthetic oligonucleotide
aucaagaaugcauaaauac

SEQ ID NO: 1677658 - RNA, 19 nt, Artificial Sequence
  Description of Artificial Sequence: Synthetic oligonucleotide
aaugcauaaauaccacagc

SEQ ID NO: 1677659 - RNA, 19 nt, Artificial Sequence
  Description of Artificial Sequence: Synthetic oligonucleotide
aaauagagggcuuaaacgu

SEQ ID NO: 1677660 - RNA, 19 nt, Artificial Sequence
  Description of Artificial Sequence: Synthetic oligonucleotide
uguggaaucaggcaaauca

SEQ ID NO: 1677661 - RNA, 19 nt, Artificial Sequence
  Description of Artificial Sequence: Synthetic oligonucleotide
uaacucauagaguaaaagg

SEQ ID NO: 1677662 - RNA, 19 nt, Artificial Sequence
  Description of Artificial Sequence: Synthetic oligonucleotide
ucaagaaugcauaaauacc

SEQ ID NO: 1677663 - RNA, 19 nt, Artificial Sequence
  Description of Artificial Sequence: Synthetic oligonucleotide
uucuucauagagaucacgg

SEQ ID NO: 1677664 - RNA, 19 nt, Artificial Sequence
  Description of Artificial Sequence: Synthetic oligonucleotide
acuuuaauaugccagacca

SEQ ID NO: 1677665 - RNA, 19 nt, Artificial Sequence
  Description of Artificial Sequence: Synthetic oligonucleotide
uuaaauagagggcuuaaac

SEQ ID NO: 1677666 - RNA, 19 nt, Artificial Sequence
  Description of Artificial Sequence: Synthetic oligonucleotide
guuacaguccacuucaccg

SEQ ID NO: 1677667 - RNA, 19 nt, Artificial Sequence
  Description of Artificial Sequence: Synthetic oligonucleotide
agagaaaaugaacaagggg

SEQ ID NO: 1677668 - RNA, 19 nt, Artificial Sequence
  Description of Artificial Sequence: Synthetic oligonucleotide
uucauagagaucacggagg

SEQ ID NO: 1677669 - RNA, 19 nt, Artificial Sequence
  Description of Artificial Sequence: Synthetic oligonucleotide
aucucuagcaucucgcugc

SEQ ID NO: 1677670 - RNA, 19 nt, Artificial Sequence
  Description of Artificial Sequence: Synthetic oligonucleotide
uaauaugccagaccaauca

SEQ ID NO: 1677671 - RNA, 19 nt, Artificial Sequence
  Description of Artificial Sequence: Synthetic oligonucleotide
aaacaucuguauucgcagc

SEQ ID NO: 1677672 - RNA, 19 nt, Artificial Sequence
  Description of Artificial Sequence: Synthetic oligonucleotide
ugccagaccaaucaagagg

SEQ ID NO: 1677673 - RNA, 19 nt, Artificial Sequence
  Description of Artificial Sequence: Synthetic oligonucleotide
aaacguuacaguccacuuc

SEQ ID NO: 1677674 - RNA, 19 nt, Artificial Sequence
  Description of Artificial Sequence: Synthetic oligonucleotide
gaggaagugauuaggagcg

SEQ ID NO: 1677675 - RNA, 19 nt, Artificial Sequence
  Description of Artificial Sequence: Synthetic oligonucleotide
ucaggcauuuucaucacag

SEQ ID NO: 1677676 - RNA, 19 nt, Artificial Sequence
  Description of Artificial Sequence: Synthetic oligonucleotide
uguauucgcagcacggagg

SEQ ID NO: 1677677 - RNA, 19 nt, Artificial Sequence
  Description of Artificial Sequence: Synthetic oligonucleotide
ugcacuaucucuagcaucu

SEQ ID NO: 1677678 - RNA, 19 nt, Artificial Sequence
  Description of Artificial Sequence: Synthetic oligonucleotide
ucauagaguaaaaggagac

SEQ ID NO: 1677679 - RNA, 19 nt, Artificial Sequence
  Description of Artificial Sequence: Synthetic oligonucleotide
gaauauacgugcaagcggc

SEQ ID NO: 1677680 - RNA, 19 nt, Artificial Sequence
  Description of Artificial Sequence: Synthetic oligonucleotide
agugcgaugaugaacuccc

SEQ ID NO: 1677681 - RNA, 19 nt, Artificial Sequence
  Description of Artificial Sequence: Synthetic oligonucleotide
gaucacuuuaauaugccag

SEQ ID NO: 1677682 - RNA, 19 nt, Artificial Sequence
  Description of Artificial Sequence: Synthetic oligonucleotide
acacauaacucauagagua

SEQ ID NO: 1677683 - RNA, 19 nt, Artificial Sequence
  Description of Artificial Sequence: Synthetic oligonucleotide
ugaagaucuuguccguucg

SEQ ID NO: 1677684 - RNA, 19 nt, Artificial Sequence
  Description of Artificial Sequence: Synthetic oligonucleotide
gagacaaaaggauccgccg

SEQ ID NO: 1677685 - RNA, 19 nt, Artificial Sequence
  Description of Artificial Sequence: Synthetic oligonucleotide
uaugccagaccaaucaaga

SEQ ID NO: 1677686 - RNA, 19 nt, Artificial Sequence
  Description of Artificial Sequence: Synthetic oligonucleotide
acggaauauacgugcaagc

SEQ ID NO: 1677687 - RNA, 19 nt, Artificial Sequence
  Description of Artificial Sequence: Synthetic oligonucleotide
ucuagcaucucgcugcggc

SEQ ID NO: 1677688 - RNA, 19 nt, Artificial Sequence
  Description of Artificial Sequence: Synthetic oligonucleotide
auagaguaaaaggagacca

SEQ ID NO: 1677689 - RNA, 19 nt, Artificial Sequence
  Description of Artificial Sequence: Synthetic oligonucleotide
augcauaaauaccacagca

SEQ ID NO: 1677690 - RNA, 19 nt, Artificial Sequence
  Description of Artificial Sequence: Synthetic oligonucleotide
ucaccguacacauaacuca

SEQ ID NO: 1677691 - RNA, 19 nt, Artificial Sequence
  Description of Artificial Sequence: Synthetic oligonucleotide
uaaaaggagaccacggaau

SEQ ID NO: 1677692 - RNA, 19 nt, Artificial Sequence
  Description of Artificial Sequence: Synthetic oligonucleotide
uuuaauaugccagaccaau

SEQ ID NO: 1677693 - RNA, 19 nt, Artificial Sequence
  Description of Artificial Sequence: Synthetic oligonucleotide
ugcauaaauaccacagcac

SEQ ID NO: 1677694 - RNA, 19 nt, Artificial Sequence
  Description of Artificial Sequence: Synthetic oligonucleotide
agaggucacgcucagugcg

SEQ ID NO: 1677695 - RNA, 19 nt, Artificial Sequence
  Description of Artificial Sequence: Synthetic oligonucleotide
aaggcaguggcauuaaaua

SEQ ID NO: 1677696 - RNA, 19 nt, Artificial Sequence
  Description of Artificial Sequence: Synthetic oligonucleotide
caaacaucuguauucgcag

SEQ ID NO: 1677697 - RNA, 19 nt, Artificial Sequence
  Description of Artificial Sequence: Synthetic oligonucleotide
agagacaaaaggauccgcc

SEQ ID NO: 1677698 - RNA, 19 nt, Artificial Sequence
  Description of Artificial Sequence: Synthetic oligonucleotide
uggcaguggagacuaaccg

SEQ ID NO: 1677699 - RNA, 19 nt, Artificial Sequence
  Description of Artificial Sequence: Synthetic oligonucleotide
aggcauuuucaucacagag

SEQ ID NO: 1677700 - RNA, 19 nt, Artificial Sequence
  Description of Artificial Sequence: Synthetic oligonucleotide
uuguuuguguccaucugcc

SEQ ID NO: 1677701 - RNA, 19 nt, Artificial Sequence
  Description of Artificial Sequence: Synthetic oligonucleotide
agacaaaaggauccgccgg

SEQ ID NO: 1677702 - RNA, 19 nt, Artificial Sequence
  Description of Artificial Sequence: Synthetic oligonucleotide
agaguaaaaggagaccacg

SEQ ID NO: 1677703 - RNA, 19 nt, Artificial Sequence
  Description of Artificial Sequence: Synthetic oligonucleotide
uggaaucaggcaaaucaag

SEQ ID NO: 1677704 - RNA, 19 nt, Artificial Sequence
  Description of Artificial Sequence: Synthetic oligonucleotide
uugaucacuuuaauaugcc

SEQ ID NO: 1677705 - RNA, 19 nt, Artificial Sequence
  Description of Artificial Sequence: Synthetic oligonucleotide
acuaucucuagcaucucgc

SEQ ID NO: 1677706 - RNA, 19 nt, Artificial Sequence
  Description of Artificial Sequence: Synthetic oligonucleotide
aaaaggauccgccggcuga

SEQ ID NO: 1677707 - RNA, 19 nt, Artificial Sequence
  Description of Artificial Sequence: Synthetic oligonucleotide
agugauuaggagcgcgggc

SEQ ID NO: 1677708 - RNA, 19 nt, Artificial Sequence
  Description of Artificial Sequence: Synthetic oligonucleotide
auaacucauagaguaaaag

SEQ ID NO: 1677709 - RNA, 19 nt, Artificial Sequence
  Description of Artificial Sequence: Synthetic oligonucleotide
ucauagagaucacggagga

SEQ ID NO: 1677710 - RNA, 19 nt, Artificial Sequence
  Description of Artificial Sequence: Synthetic oligonucleotide
auguccauaguccugggca

SEQ ID NO: 1677711 - RNA, 19 nt, Artificial Sequence
  Description of Artificial Sequence: Synthetic oligonucleotide
gagggcuuaaacguuacag

SEQ ID NO: 1677712 - RNA, 19 nt, Artificial Sequence
  Description of Artificial Sequence: Synthetic oligonucleotide
aucacuuuaauaugccaga

SEQ ID NO: 1677713 - RNA, 19 nt, Artificial Sequence
  Description of Artificial Sequence: Synthetic oligonucleotide
ggaauauacgugcaagcgg

SEQ ID NO: 1677714 - RNA, 19 nt, Artificial Sequence
  Description of Artificial Sequence: Synthetic oligonucleotide
uuaaacguuacaguccacu

SEQ ID NO: 1677715 - RNA, 19 nt, Artificial Sequence
  Description of Artificial Sequence: Synthetic oligonucleotide
uucaccguacacauaacuc

SEQ ID NO: 1677716 - RNA, 19 nt, Artificial Sequence
  Description of Artificial Sequence: Synthetic oligonucleotide
gaguaaaaggagaccacgg

SEQ ID NO: 1677717 - RNA, 19 nt, Artificial Sequence
  Description of Artificial Sequence: Synthetic oligonucleotide
gaccacggaauauacgugc

SEQ ID NO: 1677718 - RNA, 19 nt, Artificial Sequence
  Description of Artificial Sequence: Synthetic oligonucleotide
aaggcuugccugucuacuc

SEQ ID NO: 1677719 - RNA, 19 nt, Artificial Sequence
  Description of Artificial Sequence: Synthetic oligonucleotide
guauucgcagcacggaggg

SEQ ID NO: 1677720 - RNA, 19 nt, Artificial Sequence
  Description of Artificial Sequence: Synthetic oligonucleotide
aacuggcuagcgcugcugg

SEQ ID NO: 1677721 - RNA, 19 nt, Artificial Sequence
  Description of Artificial Sequence: Synthetic oligonucleotide
caaagcugaagauggcagg

SEQ ID NO: 1677722 - RNA, 19 nt, Artificial Sequence
  Description of Artificial Sequence: Synthetic oligonucleotide
aauaugccagaccaaucaa

SEQ ID NO: 1677723 - RNA, 19 nt, Artificial Sequence
  Description of Artificial Sequence: Synthetic oligonucleotide
aaaaggagaccacggaaua

SEQ ID NO: 1677724 - RNA, 19 nt, Artificial Sequence
  Description of Artificial Sequence: Synthetic oligonucleotide
uggcauuaaauagagggcu

SEQ ID NO: 1677725 - RNA, 19 nt, Artificial Sequence
  Description of Artificial Sequence: Synthetic oligonucleotide
uguccguucguuucuccgg

SEQ ID NO: 1677726 - RNA, 19 nt, Artificial Sequence
  Description of Artificial Sequence: Synthetic oligonucleotide
aagugauuaggagcgcggg

SEQ ID NO: 1677727 - RNA, 19 nt, Artificial Sequence
  Description of Artificial Sequence: Synthetic oligonucleotide
ugaucacuuuaauaugcca

SEQ ID NO: 1677728 - RNA, 19 nt, Artificial Sequence
  Description of Artificial Sequence: Synthetic oligonucleotide
gugauuaggagcgcgggcg

SEQ ID NO: 1677729 - RNA, 19 nt, Artificial Sequence
  Description of Artificial Sequence: Synthetic oligonucleotide
cucgagcccaaguucagcg

SEQ ID NO: 1677730 - RNA, 19 nt, Artificial Sequence
  Description of Artificial Sequence: Synthetic oligonucleotide
gaagugauuaggagcgcgg

SEQ ID NO: 1677731 - RNA, 19 nt, Artificial Sequence
  Description of Artificial Sequence: Synthetic oligonucleotide
cauagaguaaaaggagacc

SEQ ID NO: 1677732 - RNA, 19 nt, Artificial Sequence
  Description of Artificial Sequence: Synthetic oligonucleotide
gagaccacggaauauacgu

SEQ ID NO: 1677733 - RNA, 19 nt, Artificial Sequence
  Description of Artificial Sequence: Synthetic oligonucleotide
uuguccguucguuucuccg

SEQ ID NO: 1677734 - RNA, 19 nt, Artificial Sequence
  Description of Artificial Sequence: Synthetic oligonucleotide
agagaucacggaggaaucc

SEQ ID NO: 1677735 - RNA, 19 nt, Artificial Sequence
  Description of Artificial Sequence: Synthetic oligonucleotide
ugaagauggcaggacaagc

SEQ ID NO: 1677736 - RNA, 19 nt, Artificial Sequence
  Description of Artificial Sequence: Synthetic oligonucleotide
gaagucgauggugccaucg

SEQ ID NO: 1677737 - RNA, 19 nt, Artificial Sequence
  Description of Artificial Sequence: Synthetic oligonucleotide
gggaccaugcuucaaaggc

SEQ ID NO: 1677738 - RNA, 19 nt, Artificial Sequence
  Description of Artificial Sequence: Synthetic oligonucleotide
cacuuuaauaugccagacc

SEQ ID NO: 1677739 - RNA, 19 nt, Artificial Sequence
  Description of Artificial Sequence: Synthetic oligonucleotide
agggcuuaaacguuacagu

SEQ ID NO: 1677740 - RNA, 19 nt, Artificial Sequence
  Description of Artificial Sequence: Synthetic oligonucleotide
ucggagagacaaaaggauc

SEQ ID NO: 1677741 - RNA, 19 nt, Artificial Sequence
  Description of Artificial Sequence: Synthetic oligonucleotide
cucauagaguaaaaggaga

SEQ ID NO: 1677742 - RNA, 19 nt, Artificial Sequence
  Description of Artificial Sequence: Synthetic oligonucleotide
aguggagacuaaccggcuc

SEQ ID NO: 1677743 - RNA, 19 nt, Artificial Sequence
  Description of Artificial Sequence: Synthetic oligonucleotide
acaaacaucuguauucgca

SEQ ID NO: 1677744 - RNA, 19 nt, Artificial Sequence
  Description of Artificial Sequence: Synthetic oligonucleotide
aaucaagaaugcauaaaua

SEQ ID NO: 1677745 - RNA, 19 nt, Artificial Sequence
  Description of Artificial Sequence: Synthetic oligonucleotide
ucucuagcaucucgcugcg

SEQ ID NO: 1677746 - RNA, 19 nt, Artificial Sequence
  Description of Artificial Sequence: Synthetic oligonucleotide
cagauguccauaguccugg

SEQ ID NO: 1677747 - RNA, 19 nt, Artificial Sequence
  Description of Artificial Sequence: Synthetic oligonucleotide
gagacuaaccggcuccggc

SEQ ID NO: 1677748 - RNA, 19 nt, Artificial Sequence
  Description of Artificial Sequence: Synthetic oligonucleotide
guaaaaggagaccacggaa

SEQ ID NO: 1677749 - RNA, 19 nt, Artificial Sequence
  Description of Artificial Sequence: Synthetic oligonucleotide
gaggauggagcacacacaa

SEQ ID NO: 1677750 - RNA, 19 nt, Artificial Sequence
  Description of Artificial Sequence: Synthetic oligonucleotide
ggagccaugcacuggaaag

SEQ ID NO: 1677751 - RNA, 19 nt, Artificial Sequence
  Description of Artificial Sequence: Synthetic oligonucleotide
caucuguauucgcagcacg

SEQ ID NO: 1677752 - RNA, 19 nt, Artificial Sequence
  Description of Artificial Sequence: Synthetic oligonucleotide
gcauaaauaccacagcaca

SEQ ID NO: 1677753 - RNA, 19 nt, Artificial Sequence
  Description of Artificial Sequence: Synthetic oligonucleotide
cacuaucucuagcaucucg

SEQ ID NO: 1677754 - RNA, 19 nt, Artificial Sequence
  Description of Artificial Sequence: Synthetic oligonucleotide
aagcugaagauggcaggac

SEQ ID NO: 1677755 - RNA, 19 nt, Artificial Sequence
  Description of Artificial Sequence: Synthetic oligonucleotide
cuuagaacuggcuagcgcu

SEQ ID NO: 1677756 - RNA, 19 nt, Artificial Sequence
  Description of Artificial Sequence: Synthetic oligonucleotide
aaaggcuugccugucuacu

SEQ ID NO: 1677757 - RNA, 19 nt, Artificial Sequence
  Description of Artificial Sequence: Synthetic oligonucleotide
caugcauguaucuccugug

SEQ ID NO: 1677758 - RNA, 19 nt, Artificial Sequence
  Description of Artificial Sequence: Synthetic oligonucleotide
agccaugcacuggaaaggc

SEQ ID NO: 1677759 - RNA, 19 nt, Artificial Sequence
  Description of Artificial Sequence: Synthetic oligonucleotide
agcaaccggacaauggacg

SEQ ID NO: 1677760 - RNA, 19 nt, Artificial Sequence
  Description of Artificial Sequence: Synthetic oligonucleotide
uaaacguuacaguccacuu

SEQ ID NO: 1677761 - RNA, 19 nt, Artificial Sequence
  Description of Artificial Sequence: Synthetic oligonucleotide
cuuuugcaagcaaagcuga

SEQ ID NO: 1677762 - RNA, 19 nt, Artificial Sequence
  Description of Artificial Sequence: Synthetic oligonucleotide
caugguaucuggcagugga

SEQ ID NO: 1677763 - RNA, 19 nt, Artificial Sequence
  Description of Artificial Sequence: Synthetic oligonucleotide
guggagacuaaccggcucc

SEQ ID NO: 1677764 - RNA, 19 nt, Artificial Sequence
  Description of Artificial Sequence: Synthetic oligonucleotide
guggcauuaaauagagggc

SEQ ID NO: 1677765 - RNA, 19 nt, Artificial Sequence
  Description of Artificial Sequence: Synthetic oligonucleotide
cuguauucgcagcacggag

SEQ ID NO: 1677766 - RNA, 19 nt, Artificial Sequence
  Description of Artificial Sequence: Synthetic oligonucleotide
uauacgugcaagcggcuuu

SEQ ID NO: 1677767 - RNA, 19 nt, Artificial Sequence
  Description of Artificial Sequence: Synthetic oligonucleotide
aucuguauucgcagcacgg

SEQ ID NO: 1677768 - RNA, 19 nt, Artificial Sequence
  Description of Artificial Sequence: Synthetic oligonucleotide
acaagccuguguuucuuug

SEQ ID NO: 1677769 - RNA, 19 nt, Artificial Sequence
  Description of Artificial Sequence: Synthetic oligonucleotide
ggcaguggagacuaaccgg

SEQ ID NO: 1677770 - RNA, 19 nt, Artificial Sequence
  Description of Artificial Sequence: Synthetic oligonucleotide
ggucauacaugcugaaggc

SEQ ID NO: 1677771 - RNA, 19 nt, Artificial Sequence
  Description of Artificial Sequence: Synthetic oligonucleotide
accuucgccgcucggagag

SEQ ID NO: 1677772 - RNA, 19 nt, Artificial Sequence
  Description of Artificial Sequence: Synthetic oligonucleotide
auggacgggucacucuugg

SEQ ID NO: 1677773 - RNA, 19 nt, Artificial Sequence
  Description of Artificial Sequence: Synthetic oligonucleotide
acaucuguauucgcagcac

SEQ ID NO: 1677774 - RNA, 19 nt, Artificial Sequence
  Description of Artificial Sequence: Synthetic oligonucleotide
cacggaauauacgugcaag

SEQ ID NO: 1677775 - RNA, 19 nt, Artificial Sequence
  Description of Artificial Sequence: Synthetic oligonucleotide
ucacuuuaauaugccagac

SEQ ID NO: 1677776 - RNA, 19 nt, Artificial Sequence
  Description of Artificial Sequence: Synthetic oligonucleotide
auaugccagaccaaucaag

SEQ ID NO: 1677777 - RNA, 19 nt, Artificial Sequence
  Description of Artificial Sequence: Synthetic oligonucleotide
agacuaaccggcuccggca

SEQ ID NO: 1677778 - RNA, 19 nt, Artificial Sequence
  Description of Artificial Sequence: Synthetic oligonucleotide
cuucuguuccagcuugccc

SEQ ID NO: 1677779 - RNA, 19 nt, Artificial Sequence
  Description of Artificial Sequence: Synthetic oligonucleotide
gugcaagcggcuuugguca

SEQ ID NO: 1677780 - RNA, 19 nt, Artificial Sequence
  Description of Artificial Sequence: Synthetic oligonucleotide
aauagagggcuuaaacguu

SEQ ID NO: 1677781 - RNA, 19 nt, Artificial Sequence
  Description of Artificial Sequence: Synthetic oligonucleotide
ucgagcccaaguucagcgg

SEQ ID NO: 1677782 - RNA, 19 nt, Artificial Sequence
  Description of Artificial Sequence: Synthetic oligonucleotide
cacuucaccguacacauaa

SEQ ID NO: 1677783 - RNA, 19 nt, Artificial Sequence
  Description of Artificial Sequence: Synthetic oligonucleotide
cugaagaucuuguccguuc

SEQ ID NO: 1677784 - RNA, 19 nt, Artificial Sequence
  Description of Artificial Sequence: Synthetic oligonucleotide
cagaccaaucaagagggag

SEQ ID NO: 1677785 - RNA, 19 nt, Artificial Sequence
  Description of Artificial Sequence: Synthetic oligonucleotide
aaggagaccacggaauaua

SEQ ID NO: 1677786 - RNA, 19 nt, Artificial Sequence
  Description of Artificial Sequence: Synthetic oligonucleotide
ugcugaaggcccacuugag

SEQ ID NO: 1677787 - RNA, 19 nt, Artificial Sequence
  Description of Artificial Sequence: Synthetic oligonucleotide
cucgcugcggcugauguag

SEQ ID NO: 1677788 - RNA, 19 nt, Artificial Sequence
  Description of Artificial Sequence: Synthetic oligonucleotide
cugucuacucuccaucuuc

SEQ ID NO: 1677789 - RNA, 19 nt, Artificial Sequence
  Description of Artificial Sequence: Synthetic oligonucleotide
auucgcagcacggagggca

SEQ ID NO: 1677790 - RNA, 19 nt, Artificial Sequence
  Description of Artificial Sequence: Synthetic oligonucleotide
gcuuaaacguuacagucca

SEQ ID NO: 1677791 - RNA, 19 nt, Artificial Sequence
  Description of Artificial Sequence: Synthetic oligonucleotide
gauccgccggcugaggagg

SEQ ID NO: 1677792 - RNA, 19 nt, Artificial Sequence
  Description of Artificial Sequence: Synthetic oligonucleotide
ugguaucuggcaguggaga

SEQ ID NO: 1677793 - RNA, 19 nt, Artificial Sequence
  Description of Artificial Sequence: Synthetic oligonucleotide
aaccggacaauggacgggu

SEQ ID NO: 1677794 - RNA, 19 nt, Artificial Sequence
  Description of Artificial Sequence: Synthetic oligonucleotide
ugcaagcaaagcugaagau

SEQ ID NO: 1677795 - RNA, 19 nt, Artificial Sequence
  Description of Artificial Sequence: Synthetic oligonucleotide
uucaggcauuuucaucaca

SEQ ID NO: 1677796 - RNA, 19 nt, Artificial Sequence
  Description of Artificial Sequence: Synthetic oligonucleotide
cuucucgagcccaaguuca

SEQ ID NO: 1677797 - RNA, 19 nt, Artificial Sequence
  Description of Artificial Sequence: Synthetic oligonucleotide
uucucgagcccaaguucag

SEQ ID NO: 1677798 - RNA, 19 nt, Artificial Sequence
  Description of Artificial Sequence: Synthetic oligonucleotide
ggaggaauccacuuuugca

SEQ ID NO: 1677799 - RNA, 19 nt, Artificial Sequence
  Description of Artificial Sequence: Synthetic oligonucleotide
cacaaacaucuguauucgc

SEQ ID NO: 1677800 - RNA, 19 nt, Artificial Sequence
  Description of Artificial Sequence: Synthetic oligonucleotide
ugauuaggagcgcgggcgu

SEQ ID NO: 1677801 - RNA, 19 nt, Artificial Sequence
  Description of Artificial Sequence: Synthetic oligonucleotide
guucguuucuccggugugg

SEQ ID NO: 1677802 - RNA, 19 nt, Artificial Sequence
  Description of Artificial Sequence: Synthetic oligonucleotide
ggcccugcgaccuucgccg

SEQ ID NO: 1677803 - RNA, 19 nt, Artificial Sequence
  Description of Artificial Sequence: Synthetic oligonucleotide
gagagacaaaaggauccgc

SEQ ID NO: 1677804 - RNA, 19 nt, Artificial Sequence
  Description of Artificial Sequence: Synthetic oligonucleotide
gaaaggcuugccugucuac

SEQ ID NO: 1677805 - RNA, 19 nt, Artificial Sequence
  Description of Artificial Sequence: Synthetic oligonucleotide
agaucacggaggaauccac

SEQ ID NO: 1677806 - RNA, 19 nt, Artificial Sequence
  Description of Artificial Sequence: Synthetic oligonucleotide
uaucuggcaguggagacua

SEQ ID NO: 1677807 - RNA, 19 nt, Artificial Sequence
  Description of Artificial Sequence: Synthetic oligonucleotide
guagccguugccguccagg

SEQ ID NO: 1677808 - RNA, 19 nt, Artificial Sequence
  Description of Artificial Sequence: Synthetic oligonucleotide
uggagacuaaccggcuccg

SEQ ID NO: 1677809 - RNA, 19 nt, Artificial Sequence
  Description of Artificial Sequence: Synthetic oligonucleotide
cacuuuugcaagcaaagcu

SEQ ID NO: 1677810 - RNA, 19 nt, Artificial Sequence
  Description of Artificial Sequence: Synthetic oligonucleotide
ggaagugauuaggagcgcg

SEQ ID NO: 1677811 - RNA, 19 nt, Artificial Sequence
  Description of Artificial Sequence: Synthetic oligonucleotide
acaauggacgggucacucu

SEQ ID NO: 1677812 - RNA, 19 nt, Artificial Sequence
  Description of Artificial Sequence: Synthetic oligonucleotide
aauauacgugcaagcggcu

SEQ ID NO: 1677813 - RNA, 19 nt, Artificial Sequence
  Description of Artificial Sequence: Synthetic oligonucleotide
gcaaccggacaauggacgg

SEQ ID NO: 1677814 - RNA, 19 nt, Artificial Sequence
  Description of Artificial Sequence: Synthetic oligonucleotide
uuucaucacagaggacacc

SEQ ID NO: 1677815 - RNA, 19 nt, Artificial Sequence
  Description of Artificial Sequence: Synthetic oligonucleotide
cggagagacaaaaggaucc

SEQ ID NO: 1677816 - RNA, 19 nt, Artificial Sequence
  Description of Artificial Sequence: Synthetic oligonucleotide
agucgauggugccaucgcu

SEQ ID NO: 1677817 - RNA, 19 nt, Artificial Sequence
  Description of Artificial Sequence: Synthetic oligonucleotide
cugcacuaucucuagcauc

SEQ ID NO: 1677818 - RNA, 19 nt, Artificial Sequence
  Description of Artificial Sequence: Synthetic oligonucleotide
ggcuuaaacguuacagucc

SEQ ID NO: 1677819 - RNA, 19 nt, Artificial Sequence
  Description of Artificial Sequence: Synthetic oligonucleotide
ggagagacaaaaggauccg

SEQ ID NO: 1677820 - RNA, 19 nt, Artificial Sequence
  Description of Artificial Sequence: Synthetic oligonucleotide
aucacggaggaauccacuu

SEQ ID NO: 1677821 - RNA, 19 nt, Artificial Sequence
  Description of Artificial Sequence: Synthetic oligonucleotide
gacuaaccggcuccggcac

SEQ ID NO: 1677822 - RNA, 19 nt, Artificial Sequence
  Description of Artificial Sequence: Synthetic oligonucleotide
uacaguccacuucaccgua

SEQ ID NO: 1677823 - RNA, 19 nt, Artificial Sequence
  Description of Artificial Sequence: Synthetic oligonucleotide
ccguacacauaacucauag

SEQ ID NO: 1677824 - RNA, 19 nt, Artificial Sequence
  Description of Artificial Sequence: Synthetic oligonucleotide
gagaucacggaggaaucca

SEQ ID NO: 1677825 - RNA, 19 nt, Artificial Sequence
  Description of Artificial Sequence: Synthetic oligonucleotide
uucguuucuccggugugga

SEQ ID NO: 1677826 - RNA, 19 nt, Artificial Sequence
  Description of Artificial Sequence: Synthetic oligonucleotide
uucagcggcggcugaggcc

SEQ ID NO: 1677827 - RNA, 19 nt, Artificial Sequence
  Description of Artificial Sequence: Synthetic oligonucleotide
cagacuuggggcggcaggg

SEQ ID NO: 1677828 - RNA, 19 nt, Artificial Sequence
  Description of Artificial Sequence: Synthetic oligonucleotide
cuucaggcauuuucaucac

SEQ ID NO: 1677829 - RNA, 19 nt, Artificial Sequence
  Description of Artificial Sequence: Synthetic oligonucleotide
uggagccaugcacuggaaa

SEQ ID NO: 1677830 - RNA, 19 nt, Artificial Sequence
  Description of Artificial Sequence: Synthetic oligonucleotide
ucacggaggaauccacuuu

SEQ ID NO: 1677831 - RNA, 19 nt, Artificial Sequence
  Description of Artificial Sequence: Synthetic oligonucleotide
cuuguccguucguuucucc

SEQ ID NO: 1677832 - RNA, 19 nt, Artificial Sequence
  Description of Artificial Sequence: Synthetic oligonucleotide
cuuuaauaugccagaccaa

SEQ ID NO: 1677833 - RNA, 19 nt, Artificial Sequence
  Description of Artificial Sequence: Synthetic oligonucleotide
cagcaaccggacaauggac

SEQ ID NO: 1677834 - RNA, 19 nt, Artificial Sequence
  Description of Artificial Sequence: Synthetic oligonucleotide
aaguucagcggcggcugag

SEQ ID NO: 1677835 - RNA, 19 nt, Artificial Sequence
  Description of Artificial Sequence: Synthetic oligonucleotide
gcaguggagacuaaccggc

SEQ ID NO: 1677836 - RNA, 19 nt, Artificial Sequence
  Description of Artificial Sequence: Synthetic oligonucleotide
uuggcaccuuugaugaauu

SEQ ID NO: 1677837 - RNA, 19 nt, Artificial Sequence
  Description of Artificial Sequence: Synthetic oligonucleotide
acagccagacuuggggcgg

SEQ ID NO: 1677838 - RNA, 19 nt, Artificial Sequence
  Description of Artificial Sequence: Synthetic oligonucleotide
aggcuugccugucuacucu

SEQ ID NO: 1677839 - RNA, 19 nt, Artificial Sequence
  Description of Artificial Sequence: Synthetic oligonucleotide
cuccgcagguccaccaccc

SEQ ID NO: 1677840 - RNA, 19 nt, Artificial Sequence
  Description of Artificial Sequence: Synthetic oligonucleotide
gucgcacugcagcaaccgg

SEQ ID NO: 1677841 - RNA, 19 nt, Artificial Sequence
  Description of Artificial Sequence: Synthetic oligonucleotide
ggucagagaaaaugaacaa

SEQ ID NO: 1677842 - RNA, 19 nt, Artificial Sequence
  Description of Artificial Sequence: Synthetic oligonucleotide
cagugcgaugaugaacucc

SEQ ID NO: 1677843 - RNA, 19 nt, Artificial Sequence
  Description of Artificial Sequence: Synthetic oligonucleotide
cuuaaacguuacaguccac

SEQ ID NO: 1677844 - RNA, 19 nt, Artificial Sequence
  Description of Artificial Sequence: Synthetic oligonucleotide
gucacgcucagugcgauga

SEQ ID NO: 1677845 - RNA, 19 nt, Artificial Sequence
  Description of Artificial Sequence: Synthetic oligonucleotide
uuaggagcgcgggcguccg

SEQ ID NO: 1677846 - RNA, 19 nt, Artificial Sequence
  Description of Artificial Sequence: Synthetic oligonucleotide
uccgcagguccaccacccg

SEQ ID NO: 1677847 - RNA, 19 nt, Artificial Sequence
  Description of Artificial Sequence: Synthetic oligonucleotide
cacauaacucauagaguaa

SEQ ID NO: 1677848 - RNA, 19 nt, Artificial Sequence
  Description of Artificial Sequence: Synthetic oligonucleotide
gaggccgaggaagugauua

SEQ ID NO: 1677849 - RNA, 19 nt, Artificial Sequence
  Description of Artificial Sequence: Synthetic oligonucleotide
uagccguugccguccaggu

SEQ ID NO: 1677850 - RNA, 19 nt, Artificial Sequence
  Description of Artificial Sequence: Synthetic oligonucleotide
cgcucggagagacaaaagg

SEQ ID NO: 1677851 - RNA, 19 nt, Artificial Sequence
  Description of Artificial Sequence: Synthetic oligonucleotide
uggcuagcgcugcuggggu

SEQ ID NO: 1677852 - RNA, 19 nt, Artificial Sequence
  Description of Artificial Sequence: Synthetic oligonucleotide
agaacuggcuagcgcugcu

SEQ ID NO: 1677853 - RNA, 19 nt, Artificial Sequence
  Description of Artificial Sequence: Synthetic oligonucleotide
ggcaguggcauuaaauaga

SEQ ID NO: 1677854 - RNA, 19 nt, Artificial Sequence
  Description of Artificial Sequence: Synthetic oligonucleotide
agagggcuuaaacguuaca

SEQ ID NO: 1677855 - RNA, 19 nt, Artificial Sequence
  Description of Artificial Sequence: Synthetic oligonucleotide
acaaaaggauccgccggcu

SEQ ID NO: 1677856 - RNA, 19 nt, Artificial Sequence
  Description of Artificial Sequence: Synthetic oligonucleotide
uguagauggccugcacuau

SEQ ID NO: 1677857 - RNA, 19 nt, Artificial Sequence
  Description of Artificial Sequence: Synthetic oligonucleotide
auagagggcuuaaacguua

SEQ ID NO: 1677858 - RNA, 19 nt, Artificial Sequence
  Description of Artificial Sequence: Synthetic oligonucleotide
agaccacggaauauacgug

SEQ ID NO: 1677859 - RNA, 19 nt, Artificial Sequence
  Description of Artificial Sequence: Synthetic oligonucleotide
caaccggacaauggacggg

SEQ ID NO: 1677860 - RNA, 19 nt, Artificial Sequence
  Description of Artificial Sequence: Synthetic oligonucleotide
ggagcacacacaaacaucu

SEQ ID NO: 1677861 - RNA, 19 nt, Artificial Sequence
  Description of Artificial Sequence: Synthetic oligonucleotide
cggaauauacgugcaagcg

SEQ ID NO: 1677862 - RNA, 19 nt, Artificial Sequence
  Description of Artificial Sequence: Synthetic oligonucleotide
cacugcagcaaccggacaa

SEQ ID NO: 1677863 - RNA, 19 nt, Artificial Sequence
  Description of Artificial Sequence: Synthetic oligonucleotide
acuucaccguacacauaac

SEQ ID NO: 1677864 - RNA, 19 nt, Artificial Sequence
  Description of Artificial Sequence: Synthetic oligonucleotide
gcgaugaugaacucccgga

SEQ ID NO: 1677865 - RNA, 19 nt, Artificial Sequence
  Description of Artificial Sequence: Synthetic oligonucleotide
cucggagagacaaaaggau

SEQ ID NO: 1677866 - RNA, 19 nt, Artificial Sequence
  Description of Artificial Sequence: Synthetic oligonucleotide
augguaucuggcaguggag

SEQ ID NO: 1677867 - RNA, 19 nt, Artificial Sequence
  Description of Artificial Sequence: Synthetic oligonucleotide
ccuuagaacuggcuagcgc

SEQ ID NO: 1677868 - RNA, 19 nt, Artificial Sequence
  Description of Artificial Sequence: Synthetic oligonucleotide
uccgguguggacucaucuu

SEQ ID NO: 1677869 - RNA, 19 nt, Artificial Sequence
  Description of Artificial Sequence: Synthetic oligonucleotide
acaguccacuucaccguac

SEQ ID NO: 1677870 - RNA, 19 nt, Artificial Sequence
  Description of Artificial Sequence: Synthetic oligonucleotide
uggacgggucacucuuggc

SEQ ID NO: 1677871 - RNA, 19 nt, Artificial Sequence
  Description of Artificial Sequence: Synthetic oligonucleotide
ccgaggaagugauuaggag

SEQ ID NO: 1677872 - RNA, 19 nt, Artificial Sequence
  Description of Artificial Sequence: Synthetic oligonucleotide
cuucaccguacacauaacu

SEQ ID NO: 1677873 - RNA, 19 nt, Artificial Sequence
  Description of Artificial Sequence: Synthetic oligonucleotide
cacuggacgcgguccgccg

SEQ ID NO: 1677874 - RNA, 19 nt, Artificial Sequence
  Description of Artificial Sequence: Synthetic oligonucleotide
agcgcugcuggggucgcac

SEQ ID NO: 1677875 - RNA, 19 nt, Artificial Sequence
  Description of Artificial Sequence: Synthetic oligonucleotide
ggucgcacugcagcaaccg

SEQ ID NO: 1677876 - RNA, 19 nt, Artificial Sequence
  Description of Artificial Sequence: Synthetic oligonucleotide
agcccaaguucagcggcgg

SEQ ID NO: 1677877 - RNA, 19 nt, Artificial Sequence
  Description of Artificial Sequence: Synthetic oligonucleotide
ucagugcgaugaugaacuc

SEQ ID NO: 1677878 - RNA, 19 nt, Artificial Sequence
  Description of Artificial Sequence: Synthetic oligonucleotide
gcuucucgagcccaaguuc

SEQ ID NO: 1677879 - RNA, 19 nt, Artificial Sequence
  Description of Artificial Sequence: Synthetic oligonucleotide
cuaaccggcuccggcacug

SEQ ID NO: 1677880 - RNA, 19 nt, Artificial Sequence
  Description of Artificial Sequence: Synthetic oligonucleotide
gcauguaucuccuguggaa

SEQ ID NO: 1677881 - RNA, 19 nt, Artificial Sequence
  Description of Artificial Sequence: Synthetic oligonucleotide
agacuuggggcggcagggg

SEQ ID NO: 1677882 - RNA, 19 nt, Artificial Sequence
  Description of Artificial Sequence: Synthetic oligonucleotide
gcucggagagacaaaagga

SEQ ID NO: 1677883 - RNA, 19 nt, Artificial Sequence
  Description of Artificial Sequence: Synthetic oligonucleotide
ggccgaggaagugauuagg

SEQ ID NO: 1677884 - RNA, 19 nt, Artificial Sequence
  Description of Artificial Sequence: Synthetic oligonucleotide
caggcauuuucaucacaga

SEQ ID NO: 1677885 - RNA, 19 nt, Artificial Sequence
  Description of Artificial Sequence: Synthetic oligonucleotide
uccguucguuucuccggug

SEQ ID NO: 1677886 - RNA, 19 nt, Artificial Sequence
  Description of Artificial Sequence: Synthetic oligonucleotide
ucgccgcucggagagacaa

SEQ ID NO: 1677887 - RNA, 19 nt, Artificial Sequence
  Description of Artificial Sequence: Synthetic oligonucleotide
auauacgugcaagcggcuu

SEQ ID NO: 1677888 - RNA, 19 nt, Artificial Sequence
  Description of Artificial Sequence: Synthetic oligonucleotide
acuaaccggcuccggcacu

SEQ ID NO: 1677889 - RNA, 19 nt, Artificial Sequence
  Description of Artificial Sequence: Synthetic oligonucleotide
uguagccguugccguccag

SEQ ID NO: 1677890 - RNA, 19 nt, Artificial Sequence
  Description of Artificial Sequence: Synthetic oligonucleotide
accacggaauauacgugca

SEQ ID NO: 1677891 - RNA, 19 nt, Artificial Sequence
  Description of Artificial Sequence: Synthetic oligonucleotide
ggauccgccggcugaggag

SEQ ID NO: 1677892 - RNA, 19 nt, Artificial Sequence
  Description of Artificial Sequence: Synthetic oligonucleotide
ucuuguccguucguuucuc

SEQ ID NO: 1677893 - RNA, 19 nt, Artificial Sequence
  Description of Artificial Sequence: Synthetic oligonucleotide
ugcuugcccaugguaucug

SEQ ID NO: 1677894 - RNA, 19 nt, Artificial Sequence
  Description of Artificial Sequence: Synthetic oligonucleotide
gcuagcgcugcuggggucg

SEQ ID NO: 1677895 - RNA, 19 nt, Artificial Sequence
  Description of Artificial Sequence: Synthetic oligonucleotide
gaagaucuuguccguucgu

SEQ ID NO: 1677896 - RNA, 19 nt, Artificial Sequence
  Description of Artificial Sequence: Synthetic oligonucleotide
ugugggcgaccgccgcucc

SEQ ID NO: 1677897 - RNA, 19 nt, Artificial Sequence
  Description of Artificial Sequence: Synthetic oligonucleotide
acugcagcaaccggacaau

SEQ ID NO: 1677898 - RNA, 19 nt, Artificial Sequence
  Description of Artificial Sequence: Synthetic oligonucleotide
cuaucucuagcaucucgcu

SEQ ID NO: 1677899 - RNA, 19 nt, Artificial Sequence
  Description of Artificial Sequence: Synthetic oligonucleotide
uccgugcgcccgcagccgc

SEQ ID NO: 1677900 - RNA, 19 nt, Artificial Sequence
  Description of Artificial Sequence: Synthetic oligonucleotide
accggcuccggcacuggac

SEQ ID NO: 1677901 - RNA, 19 nt, Artificial Sequence
  Description of Artificial Sequence: Synthetic oligonucleotide
agcacggagggcagauguc

SEQ ID NO: 1677902 - RNA, 19 nt, Artificial Sequence
  Description of Artificial Sequence: Synthetic oligonucleotide
cgugcaagcggcuuugguc

SEQ ID NO: 1677903 - RNA, 19 nt, Artificial Sequence
  Description of Artificial Sequence: Synthetic oligonucleotide
gagcgcgggcguccgugcg

SEQ ID NO: 1677904 - RNA, 19 nt, Artificial Sequence
  Description of Artificial Sequence: Synthetic oligonucleotide
gauuaggagcgcgggcguc

SEQ ID NO: 1677905 - RNA, 19 nt, Artificial Sequence
  Description of Artificial Sequence: Synthetic oligonucleotide
gacgcgguccgccggcuuc

SEQ ID NO: 1677906 - RNA, 19 nt, Artificial Sequence
  Description of Artificial Sequence: Synthetic oligonucleotide
uauucgcagcacggagggc

SEQ ID NO: 1677907 - RNA, 19 nt, Artificial Sequence
  Description of Artificial Sequence: Synthetic oligonucleotide
acguuacaguccacuucac

SEQ ID NO: 1677908 - RNA, 19 nt, Artificial Sequence
  Description of Artificial Sequence: Synthetic oligonucleotide
ugggcgaccgccgcuccgc

SEQ ID NO: 1677909 - RNA, 19 nt, Artificial Sequence
  Description of Artificial Sequence: Synthetic oligonucleotide
gcgaccgccgcuccgcagg

SEQ ID NO: 1677910 - RNA, 19 nt, Artificial Sequence
  Description of Artificial Sequence: Synthetic oligonucleotide
uccggcacuggacgcgguc

SEQ ID NO: 1677911 - RNA, 19 nt, Artificial Sequence
  Description of Artificial Sequence: Synthetic oligonucleotide
ugccccgagaggucacgcu

SEQ ID NO: 1677912 - RNA, 19 nt, Artificial Sequence
  Description of Artificial Sequence: Synthetic oligonucleotide
cuucgccgcucggagagac

SEQ ID NO: 1677913 - RNA, 19 nt, Artificial Sequence
  Description of Artificial Sequence: Synthetic oligonucleotide
gcacggagggcagaugucc

SEQ ID NO: 1677914 - RNA, 19 nt, Artificial Sequence
  Description of Artificial Sequence: Synthetic oligonucleotide
ggaccaugcuucaaaggca

SEQ ID NO: 1677915 - RNA, 19 nt, Artificial Sequence
  Description of Artificial Sequence: Synthetic oligonucleotide
ccgguguggacucaucuuc

SEQ ID NO: 1677916 - RNA, 19 nt, Artificial Sequence
  Description of Artificial Sequence: Synthetic oligonucleotide
uaaccggcuccggcacugg

SEQ ID NO: 1677917 - RNA, 19 nt, Artificial Sequence
  Description of Artificial Sequence: Synthetic oligonucleotide
cacgcucagugcgaugaug

SEQ ID NO: 1677918 - RNA, 19 nt, Artificial Sequence
  Description of Artificial Sequence: Synthetic oligonucleotide
cugauguagccguugccgu

SEQ ID NO: 1677919 - RNA, 19 nt, Artificial Sequence
  Description of Artificial Sequence: Synthetic oligonucleotide
cuggacgcgguccgccggc

SEQ ID NO: 1677920 - RNA, 19 nt, Artificial Sequence
  Description of Artificial Sequence: Synthetic oligonucleotide
cguuacaguccacuucacc

SEQ ID NO: 1677921 - RNA, 19 nt, Artificial Sequence
  Description of Artificial Sequence: Synthetic oligonucleotide
acggaggaauccacuuuug

SEQ ID NO: 1677922 - RNA, 19 nt, Artificial Sequence
  Description of Artificial Sequence: Synthetic oligonucleotide
guccauaguccugggcaug

SEQ ID NO: 1677923 - RNA, 19 nt, Artificial Sequence
  Description of Artificial Sequence: Synthetic oligonucleotide
ucacgcucagugcgaugau

SEQ ID NO: 1677924 - RNA, 19 nt, Artificial Sequence
  Description of Artificial Sequence: Synthetic oligonucleotide
uucgccgcucggagagaca

SEQ ID NO: 1677925 - RNA, 19 nt, Artificial Sequence
  Description of Artificial Sequence: Synthetic oligonucleotide
ucgcugcggcugauguagc

SEQ ID NO: 1677926 - RNA, 19 nt, Artificial Sequence
  Description of Artificial Sequence: Synthetic oligonucleotide
acggagggcagauguccau

SEQ ID NO: 1677927 - RNA, 19 nt, Artificial Sequence
  Description of Artificial Sequence: Synthetic oligonucleotide
ggcagauguccauaguccu

SEQ ID NO: 1677928 - RNA, 19 nt, Artificial Sequence
  Description of Artificial Sequence: Synthetic oligonucleotide
gugcgaugaugaacucccg

SEQ ID NO: 1677929 - RNA, 19 nt, Artificial Sequence
  Description of Artificial Sequence: Synthetic oligonucleotide
gcaugcauguaucuccugu

SEQ ID NO: 1677930 - RNA, 19 nt, Artificial Sequence
  Description of Artificial Sequence: Synthetic oligonucleotide
gaucacggaggaauccacu

SEQ ID NO: 1677931 - RNA, 19 nt, Artificial Sequence
  Description of Artificial Sequence: Synthetic oligonucleotide
ccggcuccggcacuggacg

SEQ ID NO: 1677932 - RNA, 19 nt, Artificial Sequence
  Description of Artificial Sequence: Synthetic oligonucleotide
uugccccgagaggucacgc

SEQ ID NO: 1677933 - RNA, 19 nt, Artificial Sequence
  Description of Artificial Sequence: Synthetic oligonucleotide
cacggagggcagaugucca

SEQ ID NO: 1677934 - RNA, 19 nt, Artificial Sequence
  Description of Artificial Sequence: Synthetic oligonucleotide
ggaaaggcuugccugucua

SEQ ID NO: 1677935 - RNA, 19 nt, Artificial Sequence
  Description of Artificial Sequence: Synthetic oligonucleotide
aagcggcuuuggucagaga

SEQ ID NO: 1677936 - RNA, 19 nt, Artificial Sequence
  Description of Artificial Sequence: Synthetic oligonucleotide
gaccuucgccgcucggaga

SEQ ID NO: 1677937 - RNA, 19 nt, Artificial Sequence
  Description of Artificial Sequence: Synthetic oligonucleotide
guaucuggcaguggagacu

SEQ ID NO: 1677938 - RNA, 19 nt, Artificial Sequence
  Description of Artificial Sequence: Synthetic oligonucleotide
aggagcgcgggcguccgug

SEQ ID NO: 1677939 - RNA, 19 nt, Artificial Sequence
  Description of Artificial Sequence: Synthetic oligonucleotide
caccguacacauaacucau

SEQ ID NO: 1677940 - RNA, 19 nt, Artificial Sequence
  Description of Artificial Sequence: Synthetic oligonucleotide
cuguggaaucaggcaaauc

SEQ ID NO: 1677941 - RNA, 19 nt, Artificial Sequence
  Description of Artificial Sequence: Synthetic oligonucleotide
gagggaggauggagcacac

SEQ ID NO: 1677942 - RNA, 19 nt, Artificial Sequence
  Description of Artificial Sequence: Synthetic oligonucleotide
ggcaccuuugaugaauucu

SEQ ID NO: 1677943 - RNA, 19 nt, Artificial Sequence
  Description of Artificial Sequence: Synthetic oligonucleotide
auguagccguugccgucca

SEQ ID NO: 1677944 - RNA, 19 nt, Artificial Sequence
  Description of Artificial Sequence: Synthetic oligonucleotide
cagaggacaccaucuugua

SEQ ID NO: 1677945 - RNA, 19 nt, Artificial Sequence
  Description of Artificial Sequence: Synthetic oligonucleotide
caauggacgggucacucuu

SEQ ID NO: 1677946 - RNA, 19 nt, Artificial Sequence
  Description of Artificial Sequence: Synthetic oligonucleotide
ggagacuaaccggcuccgg

SEQ ID NO: 1677947 - RNA, 19 nt, Artificial Sequence
  Description of Artificial Sequence: Synthetic oligonucleotide
gcauuaaauagagggcuua

SEQ ID NO: 1677948 - RNA, 19 nt, Artificial Sequence
  Description of Artificial Sequence: Synthetic oligonucleotide
gugggcgaccgccgcuccg

SEQ ID NO: 1677949 - RNA, 19 nt, Artificial Sequence
  Description of Artificial Sequence: Synthetic oligonucleotide
cggaggaauccacuuuugc

SEQ ID NO: 1677950 - RNA, 19 nt, Artificial Sequence
  Description of Artificial Sequence: Synthetic oligonucleotide
cagcacggagggcagaugu

SEQ ID NO: 1677951 - RNA, 19 nt, Artificial Sequence
  Description of Artificial Sequence: Synthetic oligonucleotide
uggggucgcacugcagcaa

SEQ ID NO: 1677952 - RNA, 19 nt, Artificial Sequence
  Description of Artificial Sequence: Synthetic oligonucleotide
ggggucgcacugcagcaac

SEQ ID NO: 1677953 - RNA, 19 nt, Artificial Sequence
  Description of Artificial Sequence: Synthetic oligonucleotide
gccgaggaagugauuagga

SEQ ID NO: 1677954 - RNA, 19 nt, Artificial Sequence
  Description of Artificial Sequence: Synthetic oligonucleotide
cacggaggaauccacuuuu

SEQ ID NO: 1677955 - RNA, 19 nt, Artificial Sequence
  Description of Artificial Sequence: Synthetic oligonucleotide
cucuagcaucucgcugcgg

SEQ ID NO: 1677956 - RNA, 19 nt, Artificial Sequence
  Description of Artificial Sequence: Synthetic oligonucleotide
guccgugcgcccgcagccg

SEQ ID NO: 1677957 - RNA, 19 nt, Artificial Sequence
  Description of Artificial Sequence: Synthetic oligonucleotide
cuagcaucucgcugcggcu

SEQ ID NO: 1677958 - RNA, 19 nt, Artificial Sequence
  Description of Artificial Sequence: Synthetic oligonucleotide
guccguucguuucuccggu

SEQ ID NO: 1677959 - RNA, 19 nt, Artificial Sequence
  Description of Artificial Sequence: Synthetic oligonucleotide
cugcgaccuucgccgcucg

SEQ ID NO: 1677960 - RNA, 19 nt, Artificial Sequence
  Description of Artificial Sequence: Synthetic oligonucleotide
gacaagccuguguuucuuu

SEQ ID NO: 1677961 - RNA, 19 nt, Artificial Sequence
  Description of Artificial Sequence: Synthetic oligonucleotide
accggacaauggacggguc

SEQ ID NO: 1677962 - RNA, 19 nt, Artificial Sequence
  Description of Artificial Sequence: Synthetic oligonucleotide
cccuuagaacuggcuagcg

SEQ ID NO: 1677963 - RNA, 19 nt, Artificial Sequence
  Description of Artificial Sequence: Synthetic oligonucleotide
gagggcagauguccauagu

SEQ ID NO: 1677964 - RNA, 19 nt, Artificial Sequence
  Description of Artificial Sequence: Synthetic oligonucleotide
ccccuuagaacuggcuagc

SEQ ID NO: 1677965 - RNA, 19 nt, Artificial Sequence
  Description of Artificial Sequence: Synthetic oligonucleotide
caaguucagcggcggcuga

SEQ ID NO: 1677966 - RNA, 19 nt, Artificial Sequence
  Description of Artificial Sequence: Synthetic oligonucleotide
cuccgguguggacucaucu

SEQ ID NO: 1677967 - RNA, 19 nt, Artificial Sequence
  Description of Artificial Sequence: Synthetic oligonucleotide
gguccaccacccgcagucg

SEQ ID NO: 1677968 - RNA, 19 nt, Artificial Sequence
  Description of Artificial Sequence: Synthetic oligonucleotide
cuagcgcugcuggggucgc

SEQ ID NO: 1677969 - RNA, 19 nt, Artificial Sequence
  Description of Artificial Sequence: Synthetic oligonucleotide
caucucgcugcggcugaug

SEQ ID NO: 1677970 - RNA, 19 nt, Artificial Sequence
  Description of Artificial Sequence: Synthetic oligonucleotide
aggauggagcacacacaaa

SEQ ID NO: 1677971 - RNA, 19 nt, Artificial Sequence
  Description of Artificial Sequence: Synthetic oligonucleotide
accguacacauaacucaua

SEQ ID NO: 1677972 - RNA, 19 nt, Artificial Sequence
  Description of Artificial Sequence: Synthetic oligonucleotide
gccccgagaggucacgcuc

SEQ ID NO: 1677973 - RNA, 19 nt, Artificial Sequence
  Description of Artificial Sequence: Synthetic oligonucleotide
aggucacgcucagugcgau

SEQ ID NO: 1677974 - RNA, 19 nt, Artificial Sequence
  Description of Artificial Sequence: Synthetic oligonucleotide
caccacccgcagucgccgc

SEQ ID NO: 1677975 - RNA, 19 nt, Artificial Sequence
  Description of Artificial Sequence: Synthetic oligonucleotide
ggucacgcucagugcgaug

SEQ ID NO: 1677976 - RNA, 19 nt, Artificial Sequence
  Description of Artificial Sequence: Synthetic oligonucleotide
gugugggcgaccgccgcuc

SEQ ID NO: 1677977 - RNA, 19 nt, Artificial Sequence
  Description of Artificial Sequence: Synthetic oligonucleotide
gcuccggcacuggacgcgg

SEQ ID NO: 1677978 - RNA, 19 nt, Artificial Sequence
  Description of Artificial Sequence: Synthetic oligonucleotide
cggacaauggacgggucac

SEQ ID NO: 1677979 - RNA, 19 nt, Artificial Sequence
  Description of Artificial Sequence: Synthetic oligonucleotide
gggagcgaggugugggcga

SEQ ID NO: 1677980 - RNA, 19 nt, Artificial Sequence
  Description of Artificial Sequence: Synthetic oligonucleotide
ggagcgcgggcguccgugc

SEQ ID NO: 1677981 - RNA, 19 nt, Artificial Sequence
  Description of Artificial Sequence: Synthetic oligonucleotide
auaccacagcacagccaga

SEQ ID NO: 1677982 - RNA, 19 nt, Artificial Sequence
  Description of Artificial Sequence: Synthetic oligonucleotide
cagccagacuuggggcggc

SEQ ID NO: 1677983 - RNA, 19 nt, Artificial Sequence
  Description of Artificial Sequence: Synthetic oligonucleotide
cguucguuucuccggugug

SEQ ID NO: 1677984 - RNA, 19 nt, Artificial Sequence
  Description of Artificial Sequence: Synthetic oligonucleotide
cagggacagcuugccauca

SEQ ID NO: 1677985 - RNA, 19 nt, Artificial Sequence
  Description of Artificial Sequence: Synthetic oligonucleotide
cgaccuucgccgcucggag

SEQ ID NO: 1677986 - RNA, 19 nt, Artificial Sequence
  Description of Artificial Sequence: Synthetic oligonucleotide
ggcuucucgagcccaaguu

SEQ ID NO: 1677987 - RNA, 19 nt, Artificial Sequence
  Description of Artificial Sequence: Synthetic oligonucleotide
gccugucuacucuccaucu

SEQ ID NO: 1677988 - RNA, 19 nt, Artificial Sequence
  Description of Artificial Sequence: Synthetic oligonucleotide
ccaccacccgcagucgccg

SEQ ID NO: 1677989 - RNA, 19 nt, Artificial Sequence
  Description of Artificial Sequence: Synthetic oligonucleotide
ggagcgaggugugggcgac

SEQ ID NO: 1677990 - RNA, 19 nt, Artificial Sequence
  Description of Artificial Sequence: Synthetic oligonucleotide
caguggagacuaaccggcu

SEQ ID NO: 1677991 - RNA, 19 nt, Artificial Sequence
  Description of Artificial Sequence: Synthetic oligonucleotide
cgcagucgccgccagcccg

SEQ ID NO: 1677992 - RNA, 19 nt, Artificial Sequence
  Description of Artificial Sequence: Synthetic oligonucleotide
cguccgugcgcccgcagcc

SEQ ID NO: 1677993 - RNA, 19 nt, Artificial Sequence
  Description of Artificial Sequence: Synthetic oligonucleotide
gagcgaggugugggcgacc

SEQ ID NO: 1677994 - RNA, 19 nt, Artificial Sequence
  Description of Artificial Sequence: Synthetic oligonucleotide
gcguccgugcgcccgcagc

SEQ ID NO: 1677995 - RNA, 19 nt, Artificial Sequence
  Description of Artificial Sequence: Synthetic oligonucleotide
ccggacaauggacggguca

SEQ ID NO: 1677996 - RNA, 19 nt, Artificial Sequence
  Description of Artificial Sequence: Synthetic oligonucleotide
gcacuggacgcgguccgcc

SEQ ID NO: 1677997 - RNA, 19 nt, Artificial Sequence
  Description of Artificial Sequence: Synthetic oligonucleotide
gccguccaggucauacaug

SEQ ID NO: 1677998 - RNA, 19 nt, Artificial Sequence
  Description of Artificial Sequence: Synthetic oligonucleotide
uggacgcgguccgccggcu

SEQ ID NO: 1677999 - RNA, 19 nt, Artificial Sequence
  Description of Artificial Sequence: Synthetic oligonucleotide
gucuacucuccaucuucuu

SEQ ID NO: 1678000 - RNA, 19 nt, Artificial Sequence
  Description of Artificial Sequence: Synthetic oligonucleotide
gggucgcacugcagcaacc

SEQ ID NO: 1678001 - RNA, 19 nt, Artificial Sequence
  Description of Artificial Sequence: Synthetic oligonucleotide
cccgagaggucacgcucag

SEQ ID NO: 1678002 - RNA, 19 nt, Artificial Sequence
  Description of Artificial Sequence: Synthetic oligonucleotide
ggcauuaaauagagggcuu

SEQ ID NO: 1678003 - RNA, 19 nt, Artificial Sequence
  Description of Artificial Sequence: Synthetic oligonucleotide
cacccgcagucgccgccag

SEQ ID NO: 1678004 - RNA, 19 nt, Artificial Sequence
  Description of Artificial Sequence: Synthetic oligonucleotide
gccgcgccggcccugcgac

SEQ ID NO: 1678005 - RNA, 19 nt, Artificial Sequence
  Description of Artificial Sequence: Synthetic oligonucleotide
gcgaccuucgccgcucgga

SEQ ID NO: 1678006 - RNA, 19 nt, Artificial Sequence
  Description of Artificial Sequence: Synthetic oligonucleotide
agccagacuuggggcggca

SEQ ID NO: 1678007 - RNA, 19 nt, Artificial Sequence
  Description of Artificial Sequence: Synthetic oligonucleotide
gcccaugguaucuggcagu

SEQ ID NO: 1678008 - RNA, 19 nt, Artificial Sequence
  Description of Artificial Sequence: Synthetic oligonucleotide
gcgguccgccggcuucucg

SEQ ID NO: 1678009 - RNA, 19 nt, Artificial Sequence
  Description of Artificial Sequence: Synthetic oligonucleotide
ggcgaccgccgcuccgcag

SEQ ID NO: 1678010 - RNA, 19 nt, Artificial Sequence
  Description of Artificial Sequence: Synthetic oligonucleotide
gccagacuuggggcggcag

SEQ ID NO: 1678011 - RNA, 19 nt, Artificial Sequence
  Description of Artificial Sequence: Synthetic oligonucleotide
ggcacuggacgcgguccgc

SEQ ID NO: 1678012 - RNA, 19 nt, Artificial Sequence
  Description of Artificial Sequence: Synthetic oligonucleotide
gcgggcguccgugcgcccg

SEQ ID NO: 1678013 - RNA, 19 nt, Artificial Sequence
  Description of Artificial Sequence: Synthetic oligonucleotide
ccccgagaggucacgcuca

SEQ ID NO: 1678014 - RNA, 19 nt, Artificial Sequence
  Description of Artificial Sequence: Synthetic oligonucleotide
ccacggaauauacgugcaa

SEQ ID NO: 1678015 - RNA, 19 nt, Artificial Sequence
  Description of Artificial Sequence: Synthetic oligonucleotide
gccugaagaucuuguccgu

SEQ ID NO: 1678016 - RNA, 19 nt, Artificial Sequence
  Description of Artificial Sequence: Synthetic oligonucleotide
ggcuagcgcugcugggguc

SEQ ID NO: 1678017 - RNA, 19 nt, Artificial Sequence
  Description of Artificial Sequence: Synthetic oligonucleotide
ccugcgaccuucgccgcuc

SEQ ID NO: 1678018 - RNA, 19 nt, Artificial Sequence
  Description of Artificial Sequence: Synthetic oligonucleotide
ccagaccaaucaagaggga

SEQ ID NO: 1678019 - RNA, 19 nt, Artificial Sequence
  Description of Artificial Sequence: Synthetic oligonucleotide
gggcaugcauguaucuccu

SEQ ID NO: 1678020 - RNA, 19 nt, Artificial Sequence
  Description of Artificial Sequence: Synthetic oligonucleotide
cggcccugcgaccuucgcc

SEQ ID NO: 1678021 - RNA, 19 nt, Artificial Sequence
  Description of Artificial Sequence: Synthetic oligonucleotide
caacugucccaaagcccau

SEQ ID NO: 1678022 - RNA, 19 nt, Artificial Sequence
  Description of Artificial Sequence: Synthetic oligonucleotide
ggacucaucuucaggcauu

SEQ ID NO: 1678023 - RNA, 19 nt, Artificial Sequence
  Description of Artificial Sequence: Synthetic oligonucleotide
ccggaagucgauggugcca

SEQ ID NO: 1678024 - RNA, 19 nt, Artificial Sequence
  Description of Artificial Sequence: Synthetic oligonucleotide
ccugcacuaucucuagcau

SEQ ID NO: 1678025 - RNA, 19 nt, Artificial Sequence
  Description of Artificial Sequence: Synthetic oligonucleotide
gcacuaucucuagcaucuc

SEQ ID NO: 1678026 - RNA, 19 nt, Artificial Sequence
  Description of Artificial Sequence: Synthetic oligonucleotide
ggugugggcgaccgccgcu

SEQ ID NO: 1678027 - RNA, 19 nt, Artificial Sequence
  Description of Artificial Sequence: Synthetic oligonucleotide
ggacaauggacgggucacu

SEQ ID NO: 1678028 - RNA, 19 nt, Artificial Sequence
  Description of Artificial Sequence: Synthetic oligonucleotide
gcgaggugugggcgaccgc

SEQ ID NO: 1678029 - RNA, 19 nt, Artificial Sequence
  Description of Artificial Sequence: Synthetic oligonucleotide
ggcguccgugcgcccgcag

SEQ ID NO: 1678030 - RNA, 19 nt, Artificial Sequence
  Description of Artificial Sequence: Synthetic oligonucleotide
ccgcagucgccgccagccc

SEQ ID NO: 1678031 - RNA, 19 nt, Artificial Sequence
  Description of Artificial Sequence: Synthetic oligonucleotide
aucuggcaguggagacuaa

SEQ ID NO: 1678032 - RNA, 19 nt, Artificial Sequence
  Description of Artificial Sequence: Synthetic oligonucleotide
ccgugcgcccgcagccgcc

SEQ ID NO: 1678033 - RNA, 19 nt, Artificial Sequence
  Description of Artificial Sequence: Synthetic oligonucleotide
ccguucguuucuccggugu

SEQ ID NO: 1678034 - RNA, 19 nt, Artificial Sequence
  Description of Artificial Sequence: Synthetic oligonucleotide
ggacaagccuguguuucuu

SEQ ID NO: 1678035 - RNA, 19 nt, Artificial Sequence
  Description of Artificial Sequence: Synthetic oligonucleotide
ccggcuucucgagcccaag

SEQ ID NO: 1678036 - RNA, 19 nt, Artificial Sequence
  Description of Artificial Sequence: Synthetic oligonucleotide
cgguccgccggcuucucga

SEQ ID NO: 1678037 - RNA, 19 nt, Artificial Sequence
  Description of Artificial Sequence: Synthetic oligonucleotide
gccaugcacuggaaaggcu

SEQ ID NO: 1678038 - RNA, 19 nt, Artificial Sequence
  Description of Artificial Sequence: Synthetic oligonucleotide
cggcuccggcacuggacgc

SEQ ID NO: 1678039 - RNA, 19 nt, Artificial Sequence
  Description of Artificial Sequence: Synthetic oligonucleotide
cgugcgcccgcagccgccg

SEQ ID NO: 1678040 - RNA, 19 nt, Artificial Sequence
  Description of Artificial Sequence: Synthetic oligonucleotide
ccacuucaccguacacaua

SEQ ID NO: 1678041 - RNA, 19 nt, Artificial Sequence
  Description of Artificial Sequence: Synthetic oligonucleotide
cgggcguccgugcgcccgc

SEQ ID NO: 1678042 - RNA, 19 nt, Artificial Sequence
  Description of Artificial Sequence: Synthetic oligonucleotide
ccuguggaaucaggcaaau

SEQ ID NO: 1678043 - RNA, 19 nt, Artificial Sequence
  Description of Artificial Sequence: Synthetic oligonucleotide
ccaucugccugaagaucuu

SEQ ID NO: 1678044 - RNA, 19 nt, Artificial Sequence
  Description of Artificial Sequence: Synthetic oligonucleotide
ccacccgcagucgccgcca

SEQ ID NO: 1678045 - RNA, 19 nt, Artificial Sequence
  Description of Artificial Sequence: Synthetic oligonucleotide
gccggcuucucgagcccaa

SEQ ID NO: 1678046 - RNA, 19 nt, Artificial Sequence
  Description of Artificial Sequence: Synthetic oligonucleotide
ccggcugaggagggagcga

SEQ ID NO: 1678047 - RNA, 19 nt, Artificial Sequence
  Description of Artificial Sequence: Synthetic oligonucleotide
ccuucgccgcucggagaga

SEQ ID NO: 1678048 - RNA, 19 nt, Artificial Sequence
  Description of Artificial Sequence: Synthetic oligonucleotide
cgccgcuccgcagguccac

SEQ ID NO: 1678049 - RNA, 19 nt, Artificial Sequence
  Description of Artificial Sequence: Synthetic oligonucleotide
ccgagaggucacgcucagu

SEQ ID NO: 1678050 - RNA, 19 nt, Artificial Sequence
  Description of Artificial Sequence: Synthetic oligonucleotide
cgaccgccgcuccgcaggu

SEQ ID NO: 1678051 - RNA, 19 nt, Artificial Sequence
  Description of Artificial Sequence: Synthetic oligonucleotide
cgcgguccgccggcuucuc

SEQ ID NO: 1678052 - RNA, 19 nt, Artificial Sequence
  Description of Artificial Sequence: Synthetic oligonucleotide
gcgccggcccugcgaccuu

SEQ ID NO: 1678053 - RNA, 19 nt, Artificial Sequence
  Description of Artificial Sequence: Synthetic oligonucleotide
cguugccguccaggucaua

SEQ ID NO: 1678054 - RNA, 19 nt, Artificial Sequence
  Description of Artificial Sequence: Synthetic oligonucleotide
aagaaacacaauuugaucu

SEQ ID NO: 1678055 - RNA, 19 nt, Artificial Sequence
  Description of Artificial Sequence: Synthetic oligonucleotide
auucaaaagagguaauugc

SEQ ID NO: 1678056 - RNA, 19 nt, Artificial Sequence
  Description of Artificial Sequence: Synthetic oligonucleotide
aauagacuuaaugugaagg

SEQ ID NO: 1678057 - RNA, 19 nt, Artificial Sequence
  Description of Artificial Sequence: Synthetic oligonucleotide
uguucuuuaggucugagca

SEQ ID NO: 1678058 - RNA, 19 nt, Artificial Sequence
  Description of Artificial Sequence: Synthetic oligonucleotide
ugaagguacacuaugcagg

SEQ ID NO: 1678059 - RNA, 19 nt, Artificial Sequence
  Description of Artificial Sequence: Synthetic oligonucleotide
uuuagcaugauacugucac

SEQ ID NO: 1678060 - RNA, 19 nt, Artificial Sequence
  Description of Artificial Sequence: Synthetic oligonucleotide
acuacucgggaauugaagc

SEQ ID NO: 1678061 - RNA, 19 nt, Artificial Sequence
  Description of Artificial Sequence: Synthetic oligonucleotide
aguuuuauaaaauacugaa

SEQ ID NO: 1678062 - RNA, 19 nt, Artificial Sequence
  Description of Artificial Sequence: Synthetic oligonucleotide
aaauacagauuacuacgac

SEQ ID NO: 1678063 - RNA, 19 nt, Artificial Sequence
  Description of Artificial Sequence: Synthetic oligonucleotide
uucaaaagagguaauugcc

SEQ ID NO: 1678064 - RNA, 19 nt, Artificial Sequence
  Description of Artificial Sequence: Synthetic oligonucleotide
cauacacgcacaaugaagg

SEQ ID NO: 1678065 - RNA, 19 nt, Artificial Sequence
  Description of Artificial Sequence: Synthetic oligonucleotide
auuauaucauagcaccggc

SEQ ID NO: 1678066 - RNA, 19 nt, Artificial Sequence
  Description of Artificial Sequence: Synthetic oligonucleotide
ucaaguaguaguuagcacu

SEQ ID NO: 1678067 - RNA, 19 nt, Artificial Sequence
  Description of Artificial Sequence: Synthetic oligonucleotide
auagacuuaaugugaaggg

SEQ ID NO: 1678068 - RNA, 19 nt, Artificial Sequence
  Description of Artificial Sequence: Synthetic oligonucleotide
uugaauaauaggcucaccu

SEQ ID NO: 1678069 - RNA, 19 nt, Artificial Sequence
  Description of Artificial Sequence: Synthetic oligonucleotide
uauuauaucauagcaccgg

SEQ ID NO: 1678070 - RNA, 19 nt, Artificial Sequence
  Description of Artificial Sequence: Synthetic oligonucleotide
uauaucauagcaccggcug

SEQ ID NO: 1678071 - RNA, 19 nt, Artificial Sequence
  Description of Artificial Sequence: Synthetic oligonucleotide
accuaaaauuuccaaagac

SEQ ID NO: 1678072 - RNA, 19 nt, Artificial Sequence
  Description of Artificial Sequence: Synthetic oligonucleotide
gguauuauaucauagcacc

SEQ ID NO: 1678073 - RNA, 19 nt, Artificial Sequence
  Description of Artificial Sequence: Synthetic oligonucleotide
auaggcacaauuaaucugc

SEQ ID NO: 1678074 - RNA, 19 nt, Artificial Sequence
  Description of Artificial Sequence: Synthetic oligonucleotide
agcuauuuugaauaauagg

SEQ ID NO: 1678075 - RNA, 19 nt, Artificial Sequence
  Description of Artificial Sequence: Synthetic oligonucleotide
auuacuacgacauguccag

SEQ ID NO: 1678076 - RNA, 19 nt, Artificial Sequence
  Description of Artificial Sequence: Synthetic oligonucleotide
gcuauuuugaauaauaggc

SEQ ID NO: 1678077 - RNA, 19 nt, Artificial Sequence
  Description of Artificial Sequence: Synthetic oligonucleotide
auuccaaagacuuguagug

SEQ ID NO: 1678078 - RNA, 19 nt, Artificial Sequence
  Description of Artificial Sequence: Synthetic oligonucleotide
aguuaugacaaacaccaug

SEQ ID NO: 1678079 - RNA, 19 nt, Artificial Sequence
  Description of Artificial Sequence: Synthetic oligonucleotide
ugguaaaaccgauaggaag

SEQ ID NO: 1678080 - RNA, 19 nt, Artificial Sequence
  Description of Artificial Sequence: Synthetic oligonucleotide
uguuaauucccagaagagg

SEQ ID NO: 1678081 - RNA, 19 nt, Artificial Sequence
  Description of Artificial Sequence: Synthetic oligonucleotide
aguaguuagcacuuuaacu

SEQ ID NO: 1678082 - RNA, 19 nt, Artificial Sequence
  Description of Artificial Sequence: Synthetic oligonucleotide
ucauacacgcacaaugaag

SEQ ID NO: 1678083 - RNA, 19 nt, Artificial Sequence
  Description of Artificial Sequence: Synthetic oligonucleotide
cuaucauacacgcacaaug

SEQ ID NO: 1678084 - RNA, 19 nt, Artificial Sequence
  Description of Artificial Sequence: Synthetic oligonucleotide
agauuacuacgacaugucc

SEQ ID NO: 1678085 - RNA, 19 nt, Artificial Sequence
  Description of Artificial Sequence: Synthetic oligonucleotide
uauucaaaagagguaauug

SEQ ID NO: 1678086 - RNA, 19 nt, Artificial Sequence
  Description of Artificial Sequence: Synthetic oligonucleotide
acaaccguuuaauuaaguc

SEQ ID NO: 1678087 - RNA, 19 nt, Artificial Sequence
  Description of Artificial Sequence: Synthetic oligonucleotide
aauaguacuguuguauuca

SEQ ID NO: 1678088 - RNA, 19 nt, Artificial Sequence
  Description of Artificial Sequence: Synthetic oligonucleotide
uagcacuuuaacuacucgg

SEQ ID NO: 1678089 - RNA, 19 nt, Artificial Sequence
  Description of Artificial Sequence: Synthetic oligonucleotide
gaaggcuaugguaaaaccg

SEQ ID NO: 1678090 - RNA, 19 nt, Artificial Sequence
  Description of Artificial Sequence: Synthetic oligonucleotide
acccauagguguuaauucc

SEQ ID NO: 1678091 - RNA, 19 nt, Artificial Sequence
  Description of Artificial Sequence: Synthetic oligonucleotide
aaccugauucuaaauagac

SEQ ID NO: 1678092 - RNA, 19 nt, Artificial Sequence
  Description of Artificial Sequence: Synthetic oligonucleotide
uuaauuaagucaagaucug

SEQ ID NO: 1678093 - RNA, 19 nt, Artificial Sequence
  Description of Artificial Sequence: Synthetic oligonucleotide
accgauaggaagguaaacc

SEQ ID NO: 1678094 - RNA, 19 nt, Artificial Sequence
  Description of Artificial Sequence: Synthetic oligonucleotide
uaucauacacgcacaauga

SEQ ID NO: 1678095 - RNA, 19 nt, Artificial Sequence
  Description of Artificial Sequence: Synthetic oligonucleotide
agcauaaucauuccugugu

SEQ ID NO: 1678096 - RNA, 19 nt, Artificial Sequence
  Description of Artificial Sequence: Synthetic oligonucleotide
acaauuaaucugcagguga

SEQ ID NO: 1678097 - RNA, 19 nt, Artificial Sequence
  Description of Artificial Sequence: Synthetic oligonucleotide
guugcagucauucuuuagc

SEQ ID NO: 1678098 - RNA, 19 nt, Artificial Sequence
  Description of Artificial Sequence: Synthetic oligonucleotide
cauauuauuggaaacagua

SEQ ID NO: 1678099 - RNA, 19 nt, Artificial Sequence
  Description of Artificial Sequence: Synthetic oligonucleotide
uaaucugcaggugaggaag

SEQ ID NO: 1678100 - RNA, 19 nt, Artificial Sequence
  Description of Artificial Sequence: Synthetic oligonucleotide
gguaaaaccgauaggaagg

SEQ ID NO: 1678101 - RNA, 19 nt, Artificial Sequence
  Description of Artificial Sequence: Synthetic oligonucleotide
ucuggcacgauuccaaaga

SEQ ID NO: 1678102 - RNA, 19 nt, Artificial Sequence
  Description of Artificial Sequence: Synthetic oligonucleotide
uuaagucaagaucuguuuc

SEQ ID NO: 1678103 - RNA, 19 nt, Artificial Sequence
  Description of Artificial Sequence: Synthetic oligonucleotide
agauaaaggcacuucauau

SEQ ID NO: 1678104 - RNA, 19 nt, Artificial Sequence
  Description of Artificial Sequence: Synthetic oligonucleotide
acuacgacauguccagagc

SEQ ID NO: 1678105 - RNA, 19 nt, Artificial Sequence
  Description of Artificial Sequence: Synthetic oligonucleotide
uguaucagguguuaaaauu

SEQ ID NO: 1678106 - RNA, 19 nt, Artificial Sequence
  Description of Artificial Sequence: Synthetic oligonucleotide
aauuaaucugcaggugagg

SEQ ID NO: 1678107 - RNA, 19 nt, Artificial Sequence
  Description of Artificial Sequence: Synthetic oligonucleotide
aguugaagguacacuaugc

SEQ ID NO: 1678108 - RNA, 19 nt, Artificial Sequence
  Description of Artificial Sequence: Synthetic oligonucleotide
gcuaugguaaaaccgauag

SEQ ID NO: 1678109 - RNA, 19 nt, Artificial Sequence
  Description of Artificial Sequence: Synthetic oligonucleotide
gaauaauaggcucaccuaa

SEQ ID NO: 1678110 - RNA, 19 nt, Artificial Sequence
  Description of Artificial Sequence: Synthetic oligonucleotide
aaaugagucuauaaaagua

SEQ ID NO: 1678111 - RNA, 19 nt, Artificial Sequence
  Description of Artificial Sequence: Synthetic oligonucleotide
guuaauucccagaagagga

SEQ ID NO: 1678112 - RNA, 19 nt, Artificial Sequence
  Description of Artificial Sequence: Synthetic oligonucleotide
auacguauagcuuauuguu

SEQ ID NO: 1678113 - RNA, 19 nt, Artificial Sequence
  Description of Artificial Sequence: Synthetic oligonucleotide
agguauuauaucauagcac

SEQ ID NO: 1678114 - RNA, 19 nt, Artificial Sequence
  Description of Artificial Sequence: Synthetic oligonucleotide
ugucacuuaggucgaggcg

SEQ ID NO: 1678115 - RNA, 19 nt, Artificial Sequence
  Description of Artificial Sequence: Synthetic oligonucleotide
aaccguuuaauuaagucaa

SEQ ID NO: 1678116 - RNA, 19 nt, Artificial Sequence
  Description of Artificial Sequence: Synthetic oligonucleotide
auacacgcacaaugaaggc

SEQ ID NO: 1678117 - RNA, 19 nt, Artificial Sequence
  Description of Artificial Sequence: Synthetic oligonucleotide
gucacuuaggucgaggcgg

SEQ ID NO: 1678118 - RNA, 19 nt, Artificial Sequence
  Description of Artificial Sequence: Synthetic oligonucleotide
uacuacgacauguccagag

SEQ ID NO: 1678119 - RNA, 19 nt, Artificial Sequence
  Description of Artificial Sequence: Synthetic oligonucleotide
uagguguuaauucccagaa

SEQ ID NO: 1678120 - RNA, 19 nt, Artificial Sequence
  Description of Artificial Sequence: Synthetic oligonucleotide
aaaaccgauaggaagguaa

SEQ ID NO: 1678121 - RNA, 19 nt, Artificial Sequence
  Description of Artificial Sequence: Synthetic oligonucleotide
agaccuaaacacuugugcu

SEQ ID NO: 1678122 - RNA, 19 nt, Artificial Sequence
  Description of Artificial Sequence: Synthetic oligonucleotide
ugaaggcuaugguaaaacc

SEQ ID NO: 1678123 - RNA, 19 nt, Artificial Sequence
  Description of Artificial Sequence: Synthetic oligonucleotide
agcacuuuaacuacucggg

SEQ ID NO: 1678124 - RNA, 19 nt, Artificial Sequence
  Description of Artificial Sequence: Synthetic oligonucleotide
aaggcuaugguaaaaccga

SEQ ID NO: 1678125 - RNA, 19 nt, Artificial Sequence
  Description of Artificial Sequence: Synthetic oligonucleotide
uucuagucaacugacuuca

SEQ ID NO: 1678126 - RNA, 19 nt, Artificial Sequence
  Description of Artificial Sequence: Synthetic oligonucleotide
agcaacuggauucgcugcc

SEQ ID NO: 1678127 - RNA, 19 nt, Artificial Sequence
  Description of Artificial Sequence: Synthetic oligonucleotide
uuccaaaggaugaggagac

SEQ ID NO: 1678128 - RNA, 19 nt, Artificial Sequence
  Description of Artificial Sequence: Synthetic oligonucleotide
ucacuaaucuguaaacaau

SEQ ID NO: 1678129 - RNA, 19 nt, Artificial Sequence
  Description of Artificial Sequence: Synthetic oligonucleotide
acguauagcuuauuguucu

SEQ ID NO: 1678130 - RNA, 19 nt, Artificial Sequence
  Description of Artificial Sequence: Synthetic oligonucleotide
acagauuacuacgacaugu

SEQ ID NO: 1678131 - RNA, 19 nt, Artificial Sequence
  Description of Artificial Sequence: Synthetic oligonucleotide
ugagucuauaaaaguagaa

SEQ ID NO: 1678132 - RNA, 19 nt, Artificial Sequence
  Description of Artificial Sequence: Synthetic oligonucleotide
ugauaccccaaaucucugg

SEQ ID NO: 1678133 - RNA, 19 nt, Artificial Sequence
  Description of Artificial Sequence: Synthetic oligonucleotide
uuagccagcgguaauuuua

SEQ ID NO: 1678134 - RNA, 19 nt, Artificial Sequence
  Description of Artificial Sequence: Synthetic oligonucleotide
uuaauaguacuguuguauu

SEQ ID NO: 1678135 - RNA, 19 nt, Artificial Sequence
  Description of Artificial Sequence: Synthetic oligonucleotide
auucuuuagcaugauacug

SEQ ID NO: 1678136 - RNA, 19 nt, Artificial Sequence
  Description of Artificial Sequence: Synthetic oligonucleotide
ugaauaauaggcucaccua

SEQ ID NO: 1678137 - RNA, 19 nt, Artificial Sequence
  Description of Artificial Sequence: Synthetic oligonucleotide
agaaucaucucuauauucu

SEQ ID NO: 1678138 - RNA, 19 nt, Artificial Sequence
  Description of Artificial Sequence: Synthetic oligonucleotide
caaccguuuaauuaaguca

SEQ ID NO: 1678139 - RNA, 19 nt, Artificial Sequence
  Description of Artificial Sequence: Synthetic oligonucleotide
uccaaagaccuaaacacuu

SEQ ID NO: 1678140 - RNA, 19 nt, Artificial Sequence
  Description of Artificial Sequence: Synthetic oligonucleotide
agguacacuaugcagggcu

SEQ ID NO: 1678141 - RNA, 19 nt, Artificial Sequence
  Description of Artificial Sequence: Synthetic oligonucleotide
uuucuagucaacugacuuc

SEQ ID NO: 1678142 - RNA, 19 nt, Artificial Sequence
  Description of Artificial Sequence: Synthetic oligonucleotide
uacguauagcuuauuguuc

SEQ ID NO: 1678143 - RNA, 19 nt, Artificial Sequence
  Description of Artificial Sequence: Synthetic oligonucleotide
aagcauaaucauuccugug

SEQ ID NO: 1678144 - RNA, 19 nt, Artificial Sequence
  Description of Artificial Sequence: Synthetic oligonucleotide
uuauaucauagcaccggcu

SEQ ID NO: 1678145 - RNA, 19 nt, Artificial Sequence
  Description of Artificial Sequence: Synthetic oligonucleotide
uugcagucauucuuuagca

SEQ ID NO: 1678146 - RNA, 19 nt, Artificial Sequence
  Description of Artificial Sequence: Synthetic oligonucleotide
ugauucuaaauagacuuaa

SEQ ID NO: 1678147 - RNA, 19 nt, Artificial Sequence
  Description of Artificial Sequence: Synthetic oligonucleotide
gauuacuacgacaugucca

SEQ ID NO: 1678148 - RNA, 19 nt, Artificial Sequence
  Description of Artificial Sequence: Synthetic oligonucleotide
uuuugaauaauaggcucac

SEQ ID NO: 1678149 - RNA, 19 nt, Artificial Sequence
  Description of Artificial Sequence: Synthetic oligonucleotide
aggcggacaagguugggac

SEQ ID NO: 1678150 - RNA, 19 nt, Artificial Sequence
  Description of Artificial Sequence: Synthetic oligonucleotide
guauuauaucauagcaccg

SEQ ID NO: 1678151 - RNA, 19 nt, Artificial Sequence
  Description of Artificial Sequence: Synthetic oligonucleotide
uucuuuaggucugagcaga

SEQ ID NO: 1678152 - RNA, 19 nt, Artificial Sequence
  Description of Artificial Sequence: Synthetic oligonucleotide
cacacaacacccauaggug

SEQ ID NO: 1678153 - RNA, 19 nt, Artificial Sequence
  Description of Artificial Sequence: Synthetic oligonucleotide
cuacgacauguccagagcc

SEQ ID NO: 1678154 - RNA, 19 nt, Artificial Sequence
  Description of Artificial Sequence: Synthetic oligonucleotide
aacuacucgggaauugaag

SEQ ID NO: 1678155 - RNA, 19 nt, Artificial Sequence
  Description of Artificial Sequence: Synthetic oligonucleotide
acuaaucuguaaacaauag

SEQ ID NO: 1678156 - RNA, 19 nt, Artificial Sequence
  Description of Artificial Sequence: Synthetic oligonucleotide
cauaguuggccuugcaaug

SEQ ID NO: 1678157 - RNA, 19 nt, Artificial Sequence
  Description of Artificial Sequence: Synthetic oligonucleotide
uuuaacuacucgggaauug

SEQ ID NO: 1678158 - RNA, 19 nt, Artificial Sequence
  Description of Artificial Sequence: Synthetic oligonucleotide
uuaacuacucgggaauuga

SEQ ID NO: 1678159 - RNA, 19 nt, Artificial Sequence
  Description of Artificial Sequence: Synthetic oligonucleotide
agguguuggagguaguuga

SEQ ID NO: 1678160 - RNA, 19 nt, Artificial Sequence
  Description of Artificial Sequence: Synthetic oligonucleotide
augauacugucacuuaggu

SEQ ID NO: 1678161 - RNA, 19 nt, Artificial Sequence
  Description of Artificial Sequence: Synthetic oligonucleotide
cagguauuauaucauagca

SEQ ID NO: 1678162 - RNA, 19 nt, Artificial Sequence
  Description of Artificial Sequence: Synthetic oligonucleotide
uaggaagguaaaccaaggu

SEQ ID NO: 1678163 - RNA, 19 nt, Artificial Sequence
  Description of Artificial Sequence: Synthetic oligonucleotide
ugggacaaccguuuaauua

SEQ ID NO: 1678164 - RNA, 19 nt, Artificial Sequence
  Description of Artificial Sequence: Synthetic oligonucleotide
ucuuuagcaugauacuguc

SEQ ID NO: 1678165 - RNA, 19 nt, Artificial Sequence
  Description of Artificial Sequence: Synthetic oligonucleotide
gucuauaaaaguagaaauc

SEQ ID NO: 1678166 - RNA, 19 nt, Artificial Sequence
  Description of Artificial Sequence: Synthetic oligonucleotide
uaucauagcaccggcugag

SEQ ID NO: 1678167 - RNA, 19 nt, Artificial Sequence
  Description of Artificial Sequence: Synthetic oligonucleotide
auaggaagguaaaccaagg

SEQ ID NO: 1678168 - RNA, 19 nt, Artificial Sequence
  Description of Artificial Sequence: Synthetic oligonucleotide
gcaagcacuucauacacag

SEQ ID NO: 1678169 - RNA, 19 nt, Artificial Sequence
  Description of Artificial Sequence: Synthetic oligonucleotide
uuuccuuucagcccaccau

SEQ ID NO: 1678170 - RNA, 19 nt, Artificial Sequence
  Description of Artificial Sequence: Synthetic oligonucleotide
auaguuggccuugcaaugg

SEQ ID NO: 1678171 - RNA, 19 nt, Artificial Sequence
  Description of Artificial Sequence: Synthetic oligonucleotide
aaccgauaggaagguaaac

SEQ ID NO: 1678172 - RNA, 19 nt, Artificial Sequence
  Description of Artificial Sequence: Synthetic oligonucleotide
ugagugagagguguuggag

SEQ ID NO: 1678173 - RNA, 19 nt, Artificial Sequence
  Description of Artificial Sequence: Synthetic oligonucleotide
agguaauugccuuuauuaa

SEQ ID NO: 1678174 - RNA, 19 nt, Artificial Sequence
  Description of Artificial Sequence: Synthetic oligonucleotide
ucagucggcacuugauacc

SEQ ID NO: 1678175 - RNA, 19 nt, Artificial Sequence
  Description of Artificial Sequence: Synthetic oligonucleotide
gacaagguugggacaaccg

SEQ ID NO: 1678176 - RNA, 19 nt, Artificial Sequence
  Description of Artificial Sequence: Synthetic oligonucleotide
acuugauaccccaaaucuc

SEQ ID NO: 1678177 - RNA, 19 nt, Artificial Sequence
  Description of Artificial Sequence: Synthetic oligonucleotide
uguuggagguaguugaguu

SEQ ID NO: 1678178 - RNA, 19 nt, Artificial Sequence
  Description of Artificial Sequence: Synthetic oligonucleotide
gugaaauaggcacaauuaa

SEQ ID NO: 1678179 - RNA, 19 nt, Artificial Sequence
  Description of Artificial Sequence: Synthetic oligonucleotide
ugacuucacaccugcacac

SEQ ID NO: 1678180 - RNA, 19 nt, Artificial Sequence
  Description of Artificial Sequence: Synthetic oligonucleotide
cuauuuugaauaauaggcu

SEQ ID NO: 1678181 - RNA, 19 nt, Artificial Sequence
  Description of Artificial Sequence: Synthetic oligonucleotide
aggcucaccuaaaauuucc

SEQ ID NO: 1678182 - RNA, 19 nt, Artificial Sequence
  Description of Artificial Sequence: Synthetic oligonucleotide
uacagauuacuacgacaug

SEQ ID NO: 1678183 - RNA, 19 nt, Artificial Sequence
  Description of Artificial Sequence: Synthetic oligonucleotide
cuugauaccccaaaucucu

SEQ ID NO: 1678184 - RNA, 19 nt, Artificial Sequence
  Description of Artificial Sequence: Synthetic oligonucleotide
cauagguguuaauucccag

SEQ ID NO: 1678185 - RNA, 19 nt, Artificial Sequence
  Description of Artificial Sequence: Synthetic oligonucleotide
caacugacuucacaccugc

SEQ ID NO: 1678186 - RNA, 19 nt, Artificial Sequence
  Description of Artificial Sequence: Synthetic oligonucleotide
gucagucggcacuugauac

SEQ ID NO: 1678187 - RNA, 19 nt, Artificial Sequence
  Description of Artificial Sequence: Synthetic oligonucleotide
uuugcagagucagucggca

SEQ ID NO: 1678188 - RNA, 19 nt, Artificial Sequence
  Description of Artificial Sequence: Synthetic oligonucleotide
guguuaauucccagaagag

SEQ ID NO: 1678189 - RNA, 19 nt, Artificial Sequence
  Description of Artificial Sequence: Synthetic oligonucleotide
uugauaccccaaaucucug

SEQ ID NO: 1678190 - RNA, 19 nt, Artificial Sequence
  Description of Artificial Sequence: Synthetic oligonucleotide
ugcuuuuguguaucaggug

SEQ ID NO: 1678191 - RNA, 19 nt, Artificial Sequence
  Description of Artificial Sequence: Synthetic oligonucleotide
cacccauagguguuaauuc

SEQ ID NO: 1678192 - RNA, 19 nt, Artificial Sequence
  Description of Artificial Sequence: Synthetic oligonucleotide
uguuguccauaguuggccu

SEQ ID NO: 1678193 - RNA, 19 nt, Artificial Sequence
  Description of Artificial Sequence: Synthetic oligonucleotide
guuaauaguacuguuguau

SEQ ID NO: 1678194 - RNA, 19 nt, Artificial Sequence
  Description of Artificial Sequence: Synthetic oligonucleotide
auagcaccggcugagugag

SEQ ID NO: 1678195 - RNA, 19 nt, Artificial Sequence
  Description of Artificial Sequence: Synthetic oligonucleotide
ugcuuugaggacacagcac

SEQ ID NO: 1678196 - RNA, 19 nt, Artificial Sequence
  Description of Artificial Sequence: Synthetic oligonucleotide
uuaggucugagcagauaaa

SEQ ID NO: 1678197 - RNA, 19 nt, Artificial Sequence
  Description of Artificial Sequence: Synthetic oligonucleotide
uuugaauaauaggcucacc

SEQ ID NO: 1678198 - RNA, 19 nt, Artificial Sequence
  Description of Artificial Sequence: Synthetic oligonucleotide
ucgaggcggacaagguugg

SEQ ID NO: 1678199 - RNA, 19 nt, Artificial Sequence
  Description of Artificial Sequence: Synthetic oligonucleotide
ugcaggguagcaucuggca

SEQ ID NO: 1678200 - RNA, 19 nt, Artificial Sequence
  Description of Artificial Sequence: Synthetic oligonucleotide
caaaggaugaggagacauc

SEQ ID NO: 1678201 - RNA, 19 nt, Artificial Sequence
  Description of Artificial Sequence: Synthetic oligonucleotide
uacacgcacaaugaaggcu

SEQ ID NO: 1678202 - RNA, 19 nt, Artificial Sequence
  Description of Artificial Sequence: Synthetic oligonucleotide
acagaaucaucucuauauu

SEQ ID NO: 1678203 - RNA, 19 nt, Artificial Sequence
  Description of Artificial Sequence: Synthetic oligonucleotide
accccaaaucucuggguuc

SEQ ID NO: 1678204 - RNA, 19 nt, Artificial Sequence
  Description of Artificial Sequence: Synthetic oligonucleotide
auauuauuggaaacaguaa

SEQ ID NO: 1678205 - RNA, 19 nt, Artificial Sequence
  Description of Artificial Sequence: Synthetic oligonucleotide
gacuuaaugugaagggcac

SEQ ID NO: 1678206 - RNA, 19 nt, Artificial Sequence
  Description of Artificial Sequence: Synthetic oligonucleotide
aucauacacgcacaaugaa

SEQ ID NO: 1678207 - RNA, 19 nt, Artificial Sequence
  Description of Artificial Sequence: Synthetic oligonucleotide
agguguuaauucccagaag

SEQ ID NO: 1678208 - RNA, 19 nt, Artificial Sequence
  Description of Artificial Sequence: Synthetic oligonucleotide
uuucagcccaccauacgua

SEQ ID NO: 1678209 - RNA, 19 nt, Artificial Sequence
  Description of Artificial Sequence: Synthetic oligonucleotide
gucgaggcggacaagguug

SEQ ID NO: 1678210 - RNA, 19 nt, Artificial Sequence
  Description of Artificial Sequence: Synthetic oligonucleotide
gugcuuugaggacacagca

SEQ ID NO: 1678211 - RNA, 19 nt, Artificial Sequence
  Description of Artificial Sequence: Synthetic oligonucleotide
uccagcaacuggauucgcu

SEQ ID NO: 1678212 - RNA, 19 nt, Artificial Sequence
  Description of Artificial Sequence: Synthetic oligonucleotide
cauacguauagcuuauugu

SEQ ID NO: 1678213 - RNA, 19 nt, Artificial Sequence
  Description of Artificial Sequence: Synthetic oligonucleotide
uuccaaagacuuguagugu

SEQ ID NO: 1678214 - RNA, 19 nt, Artificial Sequence
  Description of Artificial Sequence: Synthetic oligonucleotide
gggacaaccguuuaauuaa

SEQ ID NO: 1678215 - RNA, 19 nt, Artificial Sequence
  Description of Artificial Sequence: Synthetic oligonucleotide
uagcaugauacugucacuu

SEQ ID NO: 1678216 - RNA, 19 nt, Artificial Sequence
  Description of Artificial Sequence: Synthetic oligonucleotide
uaggcucaccuaaaauuuc

SEQ ID NO: 1678217 - RNA, 19 nt, Artificial Sequence
  Description of Artificial Sequence: Synthetic oligonucleotide
uuggcucaaauuucgcuuu

SEQ ID NO: 1678218 - RNA, 19 nt, Artificial Sequence
  Description of Artificial Sequence: Synthetic oligonucleotide
uaggcacaauuaaucugca

SEQ ID NO: 1678219 - RNA, 19 nt, Artificial Sequence
  Description of Artificial Sequence: Synthetic oligonucleotide
ucccuaucauacacgcaca

SEQ ID NO: 1678220 - RNA, 19 nt, Artificial Sequence
  Description of Artificial Sequence: Synthetic oligonucleotide
uagccagcgguaauuuuaa

SEQ ID NO: 1678221 - RNA, 19 nt, Artificial Sequence
  Description of Artificial Sequence: Synthetic oligonucleotide
ucacuuaggucgaggcgga

SEQ ID NO: 1678222 - RNA, 19 nt, Artificial Sequence
  Description of Artificial Sequence: Synthetic oligonucleotide
aaaccgauaggaagguaaa

SEQ ID NO: 1678223 - RNA, 19 nt, Artificial Sequence
  Description of Artificial Sequence: Synthetic oligonucleotide
aacuggauucgcugccggu

SEQ ID NO: 1678224 - RNA, 19 nt, Artificial Sequence
  Description of Artificial Sequence: Synthetic oligonucleotide
aguuaauaguacuguugua

SEQ ID NO: 1678225 - RNA, 19 nt, Artificial Sequence
  Description of Artificial Sequence: Synthetic oligonucleotide
cagcaacuggauucgcugc

SEQ ID NO: 1678226 - RNA, 19 nt, Artificial Sequence
  Description of Artificial Sequence: Synthetic oligonucleotide
uuuguguaucagguguuaa

SEQ ID NO: 1678227 - RNA, 19 nt, Artificial Sequence
  Description of Artificial Sequence: Synthetic oligonucleotide
cacaauuaaucugcaggug

SEQ ID NO: 1678228 - RNA, 19 nt, Artificial Sequence
  Description of Artificial Sequence: Synthetic oligonucleotide
aacuguuagccagcgguaa

SEQ ID NO: 1678229 - RNA, 19 nt, Artificial Sequence
  Description of Artificial Sequence: Synthetic oligonucleotide
cuacucgggaauugaagca

SEQ ID NO: 1678230 - RNA, 19 nt, Artificial Sequence
  Description of Artificial Sequence: Synthetic oligonucleotide
cacuuuaacuacucgggaa

SEQ ID NO: 1678231 - RNA, 19 nt, Artificial Sequence
  Description of Artificial Sequence: Synthetic oligonucleotide
cuagucaacugacuucaca

SEQ ID NO: 1678232 - RNA, 19 nt, Artificial Sequence
  Description of Artificial Sequence: Synthetic oligonucleotide
aagagguaauugccuuuau

SEQ ID NO: 1678233 - RNA, 19 nt, Artificial Sequence
  Description of Artificial Sequence: Synthetic oligonucleotide
cagucggcacuugauaccc

SEQ ID NO: 1678234 - RNA, 19 nt, Artificial Sequence
  Description of Artificial Sequence: Synthetic oligonucleotide
gucaacugacuucacaccu

SEQ ID NO: 1678235 - RNA, 19 nt, Artificial Sequence
  Description of Artificial Sequence: Synthetic oligonucleotide
caucacuaaucuguaaaca

SEQ ID NO: 1678236 - RNA, 19 nt, Artificial Sequence
  Description of Artificial Sequence: Synthetic oligonucleotide
acacccauagguguuaauu

SEQ ID NO: 1678237 - RNA, 19 nt, Artificial Sequence
  Description of Artificial Sequence: Synthetic oligonucleotide
uuuuguguaucagguguua

SEQ ID NO: 1678238 - RNA, 19 nt, Artificial Sequence
  Description of Artificial Sequence: Synthetic oligonucleotide
auaccccaaaucucugggu

SEQ ID NO: 1678239 - RNA, 19 nt, Artificial Sequence
  Description of Artificial Sequence: Synthetic oligonucleotide
agucagucggcacuugaua

SEQ ID NO: 1678240 - RNA, 19 nt, Artificial Sequence
  Description of Artificial Sequence: Synthetic oligonucleotide
gcuuuuguguaucaggugu

SEQ ID NO: 1678241 - RNA, 19 nt, Artificial Sequence
  Description of Artificial Sequence: Synthetic oligonucleotide
ggugaaauaggcacaauua

SEQ ID NO: 1678242 - RNA, 19 nt, Artificial Sequence
  Description of Artificial Sequence: Synthetic oligonucleotide
accugauucuaaauagacu

SEQ ID NO: 1678243 - RNA, 19 nt, Artificial Sequence
  Description of Artificial Sequence: Synthetic oligonucleotide
ugagacgcuaccagcccau

SEQ ID NO: 1678244 - RNA, 19 nt, Artificial Sequence
  Description of Artificial Sequence: Synthetic oligonucleotide
ucuagucaacugacuucac

SEQ ID NO: 1678245 - RNA, 19 nt, Artificial Sequence
  Description of Artificial Sequence: Synthetic oligonucleotide
caacuggauucgcugccgg

SEQ ID NO: 1678246 - RNA, 19 nt, Artificial Sequence
  Description of Artificial Sequence: Synthetic oligonucleotide
ggcucccuaucauacacgc

SEQ ID NO: 1678247 - RNA, 19 nt, Artificial Sequence
  Description of Artificial Sequence: Synthetic oligonucleotide
gugugggaauuucuccaag

SEQ ID NO: 1678248 - RNA, 19 nt, Artificial Sequence
  Description of Artificial Sequence: Synthetic oligonucleotide
cuuucagcccaccauacgu

SEQ ID NO: 1678249 - RNA, 19 nt, Artificial Sequence
  Description of Artificial Sequence: Synthetic oligonucleotide
aagguugggacaaccguuu

SEQ ID NO: 1678250 - RNA, 19 nt, Artificial Sequence
  Description of Artificial Sequence: Synthetic oligonucleotide
ccauacguauagcuuauug

SEQ ID NO: 1678251 - RNA, 19 nt, Artificial Sequence
  Description of Artificial Sequence: Synthetic oligonucleotide
ugagcagauaaaggcacuu

SEQ ID NO: 1678252 - RNA, 19 nt, Artificial Sequence
  Description of Artificial Sequence: Synthetic oligonucleotide
guaguaguuagcacuuuaa

SEQ ID NO: 1678253 - RNA, 19 nt, Artificial Sequence
  Description of Artificial Sequence: Synthetic oligonucleotide
ggaugaggagacaucauuc

SEQ ID NO: 1678254 - RNA, 19 nt, Artificial Sequence
  Description of Artificial Sequence: Synthetic oligonucleotide
aaacuguuagccagcggua

SEQ ID NO: 1678255 - RNA, 19 nt, Artificial Sequence
  Description of Artificial Sequence: Synthetic oligonucleotide
acuguuagccagcgguaau

SEQ ID NO: 1678256 - RNA, 19 nt, Artificial Sequence
  Description of Artificial Sequence: Synthetic oligonucleotide
agcaugauacugucacuua

SEQ ID NO: 1678257 - RNA, 19 nt, Artificial Sequence
  Description of Artificial Sequence: Synthetic oligonucleotide
aguagaguuucagguauua

SEQ ID NO: 1678258 - RNA, 19 nt, Artificial Sequence
  Description of Artificial Sequence: Synthetic oligonucleotide
uggcagcccaucacuaauc

SEQ ID NO: 1678259 - RNA, 19 nt, Artificial Sequence
  Description of Artificial Sequence: Synthetic oligonucleotide
acacgcacaaugaaggcua

SEQ ID NO: 1678260 - RNA, 19 nt, Artificial Sequence
  Description of Artificial Sequence: Synthetic oligonucleotide
cgggaauugaagcauaauc

SEQ ID NO: 1678261 - RNA, 19 nt, Artificial Sequence
  Description of Artificial Sequence: Synthetic oligonucleotide
acuuaaugugaagggcacu

SEQ ID NO: 1678262 - RNA, 19 nt, Artificial Sequence
  Description of Artificial Sequence: Synthetic oligonucleotide
acuuaggucgaggcggaca

SEQ ID NO: 1678263 - RNA, 19 nt, Artificial Sequence
  Description of Artificial Sequence: Synthetic oligonucleotide
uguuagccagcgguaauuu

SEQ ID NO: 1678264 - RNA, 19 nt, Artificial Sequence
  Description of Artificial Sequence: Synthetic oligonucleotide
gcugagugagagguguugg

SEQ ID NO: 1678265 - RNA, 19 nt, Artificial Sequence
  Description of Artificial Sequence: Synthetic oligonucleotide
ccagcaacuggauucgcug

SEQ ID NO: 1678266 - RNA, 19 nt, Artificial Sequence
  Description of Artificial Sequence: Synthetic oligonucleotide
ccaaagaccuaaacacuug

SEQ ID NO: 1678267 - RNA, 19 nt, Artificial Sequence
  Description of Artificial Sequence: Synthetic oligonucleotide
uugggacaaccguuuaauu

SEQ ID NO: 1678268 - RNA, 19 nt, Artificial Sequence
  Description of Artificial Sequence: Synthetic oligonucleotide
augguaaaaccgauaggaa

SEQ ID NO: 1678269 - RNA, 19 nt, Artificial Sequence
  Description of Artificial Sequence: Synthetic oligonucleotide
gcacaauuaaucugcaggu

SEQ ID NO: 1678270 - RNA, 19 nt, Artificial Sequence
  Description of Artificial Sequence: Synthetic oligonucleotide
agaguugaagguacacuau

SEQ ID NO: 1678271 - RNA, 19 nt, Artificial Sequence
  Description of Artificial Sequence: Synthetic oligonucleotide
agacgcuaccagcccauga

SEQ ID NO: 1678272 - RNA, 19 nt, Artificial Sequence
  Description of Artificial Sequence: Synthetic oligonucleotide
guaucagguguuaaaauuu

SEQ ID NO: 1678273 - RNA, 19 nt, Artificial Sequence
  Description of Artificial Sequence: Synthetic oligonucleotide
gaccuaaacacuugugcuu

SEQ ID NO: 1678274 - RNA, 19 nt, Artificial Sequence
  Description of Artificial Sequence: Synthetic oligonucleotide
ccgauaggaagguaaacca

SEQ ID NO: 1678275 - RNA, 19 nt, Artificial Sequence
  Description of Artificial Sequence: Synthetic oligonucleotide
caaagaccuaaacacuugu

SEQ ID NO: 1678276 - RNA, 19 nt, Artificial Sequence
  Description of Artificial Sequence: Synthetic oligonucleotide
accguuuaauuaagucaag

SEQ ID NO: 1678277 - RNA, 19 nt, Artificial Sequence
  Description of Artificial Sequence: Synthetic oligonucleotide
gguguuaaaauuucucauu

SEQ ID NO: 1678278 - RNA, 19 nt, Artificial Sequence
  Description of Artificial Sequence: Synthetic oligonucleotide
aaacaccaugaaaacuguu

SEQ ID NO: 1678279 - RNA, 19 nt, Artificial Sequence
  Description of Artificial Sequence: Synthetic oligonucleotide
uguccauaguuggccuugc

SEQ ID NO: 1678280 - RNA, 19 nt, Artificial Sequence
  Description of Artificial Sequence: Synthetic oligonucleotide
cacgauuccaaagacuugu

SEQ ID NO: 1678281 - RNA, 19 nt, Artificial Sequence
  Description of Artificial Sequence: Synthetic oligonucleotide
gacgcuaccagcccaugau

SEQ ID NO: 1678282 - RNA, 19 nt, Artificial Sequence
  Description of Artificial Sequence: Synthetic oligonucleotide
cugagugagagguguugga

SEQ ID NO: 1678283 - RNA, 19 nt, Artificial Sequence
  Description of Artificial Sequence: Synthetic oligonucleotide
agcaucuggcacgauucca

SEQ ID NO: 1678284 - RNA, 19 nt, Artificial Sequence
  Description of Artificial Sequence: Synthetic oligonucleotide
uaaaaccgauaggaaggua

SEQ ID NO: 1678285 - RNA, 19 nt, Artificial Sequence
  Description of Artificial Sequence: Synthetic oligonucleotide
cauaaucauuccuguguua

SEQ ID NO: 1678286 - RNA, 19 nt, Artificial Sequence
  Description of Artificial Sequence: Synthetic oligonucleotide
agcccaccauacguauagc

SEQ ID NO: 1678287 - RNA, 19 nt, Artificial Sequence
  Description of Artificial Sequence: Synthetic oligonucleotide
gccagcgguaauuuuaaaa

SEQ ID NO: 1678288 - RNA, 19 nt, Artificial Sequence
  Description of Artificial Sequence: Synthetic oligonucleotide
uuacuacgacauguccaga

SEQ ID NO: 1678289 - RNA, 19 nt, Artificial Sequence
  Description of Artificial Sequence: Synthetic oligonucleotide
caaguaguaguuagcacuu

SEQ ID NO: 1678290 - RNA, 19 nt, Artificial Sequence
  Description of Artificial Sequence: Synthetic oligonucleotide
ucagcccaccauacguaua

SEQ ID NO: 1678291 - RNA, 19 nt, Artificial Sequence
  Description of Artificial Sequence: Synthetic oligonucleotide
uggcucaaauuucgcuuua

SEQ ID NO: 1678292 - RNA, 19 nt, Artificial Sequence
  Description of Artificial Sequence: Synthetic oligonucleotide
guaaaaccgauaggaaggu

SEQ ID NO: 1678293 - RNA, 19 nt, Artificial Sequence
  Description of Artificial Sequence: Synthetic oligonucleotide
ggacaaccguuuaauuaag

SEQ ID NO: 1678294 - RNA, 19 nt, Artificial Sequence
  Description of Artificial Sequence: Synthetic oligonucleotide
ucgggaauugaagcauaau

SEQ ID NO: 1678295 - RNA, 19 nt, Artificial Sequence
  Description of Artificial Sequence: Synthetic oligonucleotide
aaguagaguuucagguauu

SEQ ID NO: 1678296 - RNA, 19 nt, Artificial Sequence
  Description of Artificial Sequence: Synthetic oligonucleotide
uuaggucgaggcggacaag

SEQ ID NO: 1678297 - RNA, 19 nt, Artificial Sequence
  Description of Artificial Sequence: Synthetic oligonucleotide
ucggcacuugauaccccaa

SEQ ID NO: 1678298 - RNA, 19 nt, Artificial Sequence
  Description of Artificial Sequence: Synthetic oligonucleotide
guugggacaaccguuuaau

SEQ ID NO: 1678299 - RNA, 19 nt, Artificial Sequence
  Description of Artificial Sequence: Synthetic oligonucleotide
cuuaaugugaagggcacuu

SEQ ID NO: 1678300 - RNA, 19 nt, Artificial Sequence
  Description of Artificial Sequence: Synthetic oligonucleotide
auacugucacuuaggucga

SEQ ID NO: 1678301 - RNA, 19 nt, Artificial Sequence
  Description of Artificial Sequence: Synthetic oligonucleotide
ccuuucagcccaccauacg

SEQ ID NO: 1678302 - RNA, 19 nt, Artificial Sequence
  Description of Artificial Sequence: Synthetic oligonucleotide
cucgggaauugaagcauaa

SEQ ID NO: 1678303 - RNA, 19 nt, Artificial Sequence
  Description of Artificial Sequence: Synthetic oligonucleotide
cugagacgcuaccagccca

SEQ ID NO: 1678304 - RNA, 19 nt, Artificial Sequence
  Description of Artificial Sequence: Synthetic oligonucleotide
agcaagcacuucauacaca

SEQ ID NO: 1678305 - RNA, 19 nt, Artificial Sequence
  Description of Artificial Sequence: Synthetic oligonucleotide
ggccugagacgcuaccagc

SEQ ID NO: 1678306 - RNA, 19 nt, Artificial Sequence
  Description of Artificial Sequence: Synthetic oligonucleotide
acaacacccauagguguua

SEQ ID NO: 1678307 - RNA, 19 nt, Artificial Sequence
  Description of Artificial Sequence: Synthetic oligonucleotide
aggguagcaucuggcacga

SEQ ID NO: 1678308 - RNA, 19 nt, Artificial Sequence
  Description of Artificial Sequence: Synthetic oligonucleotide
gccugagacgcuaccagcc

SEQ ID NO: 1678309 - RNA, 19 nt, Artificial Sequence
  Description of Artificial Sequence: Synthetic oligonucleotide
uaguugaguugcagucauu

SEQ ID NO: 1678310 - RNA, 19 nt, Artificial Sequence
  Description of Artificial Sequence: Synthetic oligonucleotide
ccaccauacguauagcuua

SEQ ID NO: 1678311 - RNA, 19 nt, Artificial Sequence
  Description of Artificial Sequence: Synthetic oligonucleotide
ccugagacgcuaccagccc

SEQ ID NO: 1678312 - RNA, 19 nt, Artificial Sequence
  Description of Artificial Sequence: Synthetic oligonucleotide
caagguugggacaaccguu

SEQ ID NO: 1678313 - RNA, 19 nt, Artificial Sequence
  Description of Artificial Sequence: Synthetic oligonucleotide
acgcuaccagcccaugauu

SEQ ID NO: 1678314 - RNA, 19 nt, Artificial Sequence
  Description of Artificial Sequence: Synthetic oligonucleotide
gguggugaaauaggcacaa

SEQ ID NO: 1678315 - RNA, 19 nt, Artificial Sequence
  Description of Artificial Sequence: Synthetic oligonucleotide
gacaaccguuuaauuaagu

SEQ ID NO: 1678316 - RNA, 19 nt, Artificial Sequence
  Description of Artificial Sequence: Synthetic oligonucleotide
gcuuauuguucuucaaaau

SEQ ID NO: 1678317 - RNA, 19 nt, Artificial Sequence
  Description of Artificial Sequence: Synthetic oligonucleotide
agguugggacaaccguuua

SEQ ID NO: 1678318 - RNA, 19 nt, Artificial Sequence
  Description of Artificial Sequence: Synthetic oligonucleotide
aggcuaugguaaaaccgau

SEQ ID NO: 1678319 - RNA, 19 nt, Artificial Sequence
  Description of Artificial Sequence: Synthetic oligonucleotide
gagacgcuaccagcccaug

SEQ ID NO: 1678320 - RNA, 19 nt, Artificial Sequence
  Description of Artificial Sequence: Synthetic oligonucleotide
ccuaaacacuugugcuuug

SEQ ID NO: 1678321 - RNA, 19 nt, Artificial Sequence
  Description of Artificial Sequence: Synthetic oligonucleotide
cugacagaaucaucucuau

SEQ ID NO: 1678322 - RNA, 19 nt, Artificial Sequence
  Description of Artificial Sequence: Synthetic oligonucleotide
ccguuuaauuaagucaaga

SEQ ID NO: 1678323 - RNA, 19 nt, Artificial Sequence
  Description of Artificial Sequence: Synthetic oligonucleotide
guccauaguuggccuugca

SEQ ID NO: 1678324 - RNA, 19 nt, Artificial Sequence
  Description of Artificial Sequence: Synthetic oligonucleotide
acgcacaaugaaggcuaug

SEQ ID NO: 1678325 - RNA, 19 nt, Artificial Sequence
  Description of Artificial Sequence: Synthetic oligonucleotide
acucgggaauugaagcaua

SEQ ID NO: 1678326 - RNA, 19 nt, Artificial Sequence
  Description of Artificial Sequence: Synthetic oligonucleotide
agccagcgguaauuuuaaa

SEQ ID NO: 1678327 - RNA, 19 nt, Artificial Sequence
  Description of Artificial Sequence: Synthetic oligonucleotide
cacaacacccauagguguu

SEQ ID NO: 1678328 - RNA, 19 nt, Artificial Sequence
  Description of Artificial Sequence: Synthetic oligonucleotide
aggucgaggcggacaaggu

SEQ ID NO: 1678329 - RNA, 19 nt, Artificial Sequence
  Description of Artificial Sequence: Synthetic oligonucleotide
agcccacuggcagcccauc

SEQ ID NO: 1678330 - RNA, 19 nt, Artificial Sequence
  Description of Artificial Sequence: Synthetic oligonucleotide
gcacgauuccaaagacuug

SEQ ID NO: 1678331 - RNA, 19 nt, Artificial Sequence
  Description of Artificial Sequence: Synthetic oligonucleotide
acgauuccaaagacuugua

SEQ ID NO: 1678332 - RNA, 19 nt, Artificial Sequence
  Description of Artificial Sequence: Synthetic oligonucleotide
guagaguuucagguauuau

SEQ ID NO: 1678333 - RNA, 19 nt, Artificial Sequence
  Description of Artificial Sequence: Synthetic oligonucleotide
gagucagucggcacuugau

SEQ ID NO: 1678334 - RNA, 19 nt, Artificial Sequence
  Description of Artificial Sequence: Synthetic oligonucleotide
gcaccggcugagugagagg

SEQ ID NO: 1678335 - RNA, 19 nt, Artificial Sequence
  Description of Artificial Sequence: Synthetic oligonucleotide
caccauacguauagcuuau

SEQ ID NO: 1678336 - RNA, 19 nt, Artificial Sequence
  Description of Artificial Sequence: Synthetic oligonucleotide
ggcacuugauaccccaaau

SEQ ID NO: 1678337 - RNA, 19 nt, Artificial Sequence
  Description of Artificial Sequence: Synthetic oligonucleotide
guuagccagcgguaauuuu

SEQ ID NO: 1678338 - RNA, 19 nt, Artificial Sequence
  Description of Artificial Sequence: Synthetic oligonucleotide
ggcggacaagguugggaca

SEQ ID NO: 1678339 - RNA, 19 nt, Artificial Sequence
  Description of Artificial Sequence: Synthetic oligonucleotide
ggcagcccaucacuaaucu

SEQ ID NO: 1678340 - RNA, 19 nt, Artificial Sequence
  Description of Artificial Sequence: Synthetic oligonucleotide
cgauaggaagguaaaccaa

SEQ ID NO: 1678341 - RNA, 19 nt, Artificial Sequence
  Description of Artificial Sequence: Synthetic oligonucleotide
gcggacaagguugggacaa

SEQ ID NO: 1678342 - RNA, 19 nt, Artificial Sequence
  Description of Artificial Sequence: Synthetic oligonucleotide
ggaaacaguaacacuucuu

SEQ ID NO: 1678343 - RNA, 19 nt, Artificial Sequence
  Description of Artificial Sequence: Synthetic oligonucleotide
gcccaccauacguauagcu

SEQ ID NO: 1678344 - RNA, 19 nt, Artificial Sequence
  Description of Artificial Sequence: Synthetic oligonucleotide
accauacguauagcuuauu

SEQ ID NO: 1678345 - RNA, 19 nt, Artificial Sequence
  Description of Artificial Sequence: Synthetic oligonucleotide
gaagggcacuuggaagagu

SEQ ID NO: 1678346 - RNA, 19 nt, Artificial Sequence
  Description of Artificial Sequence: Synthetic oligonucleotide
ggcuaugguaaaaccgaua

SEQ ID NO: 1678347 - RNA, 19 nt, Artificial Sequence
  Description of Artificial Sequence: Synthetic oligonucleotide
cacuuaggucgaggcggac

SEQ ID NO: 1678348 - RNA, 19 nt, Artificial Sequence
  Description of Artificial Sequence: Synthetic oligonucleotide
ggauucgcugccgguguuc

SEQ ID NO: 1678349 - RNA, 19 nt, Artificial Sequence
  Description of Artificial Sequence: Synthetic oligonucleotide
caacacccauagguguuaa

SEQ ID NO: 1678350 - RNA, 19 nt, Artificial Sequence
  Description of Artificial Sequence: Synthetic oligonucleotide
ccaaaggaugaggagacau

SEQ ID NO: 1678351 - RNA, 19 nt, Artificial Sequence
  Description of Artificial Sequence: Synthetic oligonucleotide
cccuaucauacacgcacaa

SEQ ID NO: 1678352 - RNA, 19 nt, Artificial Sequence
  Description of Artificial Sequence: Synthetic oligonucleotide
ggucgaggcggacaagguu

SEQ ID NO: 1678353 - RNA, 19 nt, Artificial Sequence
  Description of Artificial Sequence: Synthetic oligonucleotide
cgacauguccagagcccac

SEQ ID NO: 1678354 - RNA, 19 nt, Artificial Sequence
  Description of Artificial Sequence: Synthetic oligonucleotide
cccaccauacguauagcuu

SEQ ID NO: 1678355 - RNA, 19 nt, Artificial Sequence
  Description of Artificial Sequence: Synthetic oligonucleotide
gcucccuaucauacacgca

SEQ ID NO: 1678356 - RNA, 19 nt, Artificial Sequence
  Description of Artificial Sequence: Synthetic oligonucleotide
cacgcacaaugaaggcuau

SEQ ID NO: 1678357 - RNA, 19 nt, Artificial Sequence
  Description of Artificial Sequence: Synthetic oligonucleotide
ccuugcaaugguggugaaa

SEQ ID NO: 1678358 - RNA, 19 nt, Artificial Sequence
  Description of Artificial Sequence: Synthetic oligonucleotide
ccuaucauacacgcacaau

SEQ ID NO: 1678359 - RNA, 19 nt, Artificial Sequence
  Description of Artificial Sequence: Synthetic oligonucleotide
gagcccacuggcagcccau

SEQ ID NO: 1678360 - RNA, 19 nt, Artificial Sequence
  Description of Artificial Sequence: Synthetic oligonucleotide
cggcacuugauaccccaaa

SEQ ID NO: 1678361 - RNA, 19 nt, Artificial Sequence
  Description of Artificial Sequence: Synthetic oligonucleotide
cggacaagguugggacaac

SEQ ID NO: 1678362 - RNA, 19 nt, Artificial Sequence
  Description of Artificial Sequence: Synthetic oligonucleotide
cguauagcuuauuguucuu

SEQ ID NO: 1678363 - RNA, 19 nt, Artificial Sequence
  Description of Artificial Sequence: Synthetic oligonucleotide
ggguagcaucuggcacgau

SEQ ID NO: 1678364 - RNA, 19 nt, Artificial Sequence
  Description of Artificial Sequence: Synthetic oligonucleotide
uuuccuauaguucugagag

SEQ ID NO: 1678365 - RNA, 19 nt, Artificial Sequence
  Description of Artificial Sequence: Synthetic oligonucleotide
ugaauuacaaaguaggcag

SEQ ID NO: 1678366 - RNA, 19 nt, Artificial Sequence
  Description of Artificial Sequence: Synthetic oligonucleotide
aaaaggcugaauuacaaag

SEQ ID NO: 1678367 - RNA, 19 nt, Artificial Sequence
  Description of Artificial Sequence: Synthetic oligonucleotide
uuauacacagcuaagagga

SEQ ID NO: 1678368 - RNA, 19 nt, Artificial Sequence
  Description of Artificial Sequence: Synthetic oligonucleotide
accuuaugcaucuugcugc

SEQ ID NO: 1678369 - RNA, 19 nt, Artificial Sequence
  Description of Artificial Sequence: Synthetic oligonucleotide
aguuaggaggaccuuauac

SEQ ID NO: 1678370 - RNA, 19 nt, Artificial Sequence
  Description of Artificial Sequence: Synthetic oligonucleotide
cuuauacacagcuaagagg

SEQ ID NO: 1678371 - RNA, 19 nt, Artificial Sequence
  Description of Artificial Sequence: Synthetic oligonucleotide
aguaguuuccuauaguucu

SEQ ID NO: 1678372 - RNA, 19 nt, Artificial Sequence
  Description of Artificial Sequence: Synthetic oligonucleotide
ugucugucucaccagaucg

SEQ ID NO: 1678373 - RNA, 19 nt, Artificial Sequence
  Description of Artificial Sequence: Synthetic oligonucleotide
uguaacagugguuuaacca

SEQ ID NO: 1678374 - RNA, 19 nt, Artificial Sequence
  Description of Artificial Sequence: Synthetic oligonucleotide
aucgcagaugaccaaaggc

SEQ ID NO: 1678375 - RNA, 19 nt, Artificial Sequence
  Description of Artificial Sequence: Synthetic oligonucleotide
augagcuugagucuguaac

SEQ ID NO: 1678376 - RNA, 19 nt, Artificial Sequence
  Description of Artificial Sequence: Synthetic oligonucleotide
agugguuuaaccaugcggg

SEQ ID NO: 1678377 - RNA, 19 nt, Artificial Sequence
  Description of Artificial Sequence: Synthetic oligonucleotide
accggcauagccaauaucc

SEQ ID NO: 1678378 - RNA, 19 nt, Artificial Sequence
  Description of Artificial Sequence: Synthetic oligonucleotide
uuuucgauugccuuuucug

SEQ ID NO: 1678379 - RNA, 19 nt, Artificial Sequence
  Description of Artificial Sequence: Synthetic oligonucleotide
ugaacaagauuaaucccag

SEQ ID NO: 1678380 - RNA, 19 nt, Artificial Sequence
  Description of Artificial Sequence: Synthetic oligonucleotide
uccaaaacgaaaucccucc

SEQ ID NO: 1678381 - RNA, 19 nt, Artificial Sequence
  Description of Artificial Sequence: Synthetic oligonucleotide
aaaagcucccguaaaaucu

SEQ ID NO: 1678382 - RNA, 19 nt, Artificial Sequence
  Description of Artificial Sequence: Synthetic oligonucleotide
ugagaaaccccucagcgaa

SEQ ID NO: 1678383 - RNA, 19 nt, Artificial Sequence
  Description of Artificial Sequence: Synthetic oligonucleotide
agcuaaaaggcugaauuac

SEQ ID NO: 1678384 - RNA, 19 nt, Artificial Sequence
  Description of Artificial Sequence: Synthetic oligonucleotide
gggagcguuacuuugaggg

SEQ ID NO: 1678385 - RNA, 19 nt, Artificial Sequence
  Description of Artificial Sequence: Synthetic oligonucleotide
aaaacgaaaucccuccaaa

SEQ ID NO: 1678386 - RNA, 19 nt, Artificial Sequence
  Description of Artificial Sequence: Synthetic oligonucleotide
cugagguucauucuuuucc

SEQ ID NO: 1678387 - RNA, 19 nt, Artificial Sequence
  Description of Artificial Sequence: Synthetic oligonucleotide
agaugcugaucucauuagc

SEQ ID NO: 1678388 - RNA, 19 nt, Artificial Sequence
  Description of Artificial Sequence: Synthetic oligonucleotide
ucgcagaugaccaaaggcu

SEQ ID NO: 1678389 - RNA, 19 nt, Artificial Sequence
  Description of Artificial Sequence: Synthetic oligonucleotide
agugugagcucccgaaagc

SEQ ID NO: 1678390 - RNA, 19 nt, Artificial Sequence
  Description of Artificial Sequence: Synthetic oligonucleotide
agugcccuuauucucuggc

SEQ ID NO: 1678391 - RNA, 19 nt, Artificial Sequence
  Description of Artificial Sequence: Synthetic oligonucleotide
uuucgauugccuuuucuga

SEQ ID NO: 1678392 - RNA, 19 nt, Artificial Sequence
  Description of Artificial Sequence: Synthetic oligonucleotide
ucggcaugaccacagacug

SEQ ID NO: 1678393 - RNA, 19 nt, Artificial Sequence
  Description of Artificial Sequence: Synthetic oligonucleotide
aaauucuucggaguguccu

SEQ ID NO: 1678394 - RNA, 19 nt, Artificial Sequence
  Description of Artificial Sequence: Synthetic oligonucleotide
aaguucggaagaaugagcu

SEQ ID NO: 1678395 - RNA, 19 nt, Artificial Sequence
  Description of Artificial Sequence: Synthetic oligonucleotide
uguuuucggcacuggaagg

SEQ ID NO: 1678396 - RNA, 19 nt, Artificial Sequence
  Description of Artificial Sequence: Synthetic oligonucleotide
uguuuaaggaggcaucuuu

SEQ ID NO: 1678397 - RNA, 19 nt, Artificial Sequence
  Description of Artificial Sequence: Synthetic oligonucleotide
guuaggaggaccuuauaca

SEQ ID NO: 1678398 - RNA, 19 nt, Artificial Sequence
  Description of Artificial Sequence: Synthetic oligonucleotide
caggucaugcaccuuaugc

SEQ ID NO: 1678399 - RNA, 19 nt, Artificial Sequence
  Description of Artificial Sequence: Synthetic oligonucleotide
ggugcuaaggagcuaaaag

SEQ ID NO: 1678400 - RNA, 19 nt, Artificial Sequence
  Description of Artificial Sequence: Synthetic oligonucleotide
cagugguuuaaccaugcgg

SEQ ID NO: 1678401 - RNA, 19 nt, Artificial Sequence
  Description of Artificial Sequence: Synthetic oligonucleotide
gaugaccaaaggcugggcc

SEQ ID NO: 1678402 - RNA, 19 nt, Artificial Sequence
  Description of Artificial Sequence: Synthetic oligonucleotide
ugcaacauggcuuccccgc

SEQ ID NO: 1678403 - RNA, 19 nt, Artificial Sequence
  Description of Artificial Sequence: Synthetic oligonucleotide
ugagguucauucuuuucca

SEQ ID NO: 1678404 - RNA, 19 nt, Artificial Sequence
  Description of Artificial Sequence: Synthetic oligonucleotide
aaaggcugaauuacaaagu

SEQ ID NO: 1678405 - RNA, 19 nt, Artificial Sequence
  Description of Artificial Sequence: Synthetic oligonucleotide
agacugacaguguuuucgg

SEQ ID NO: 1678406 - RNA, 19 nt, Artificial Sequence
  Description of Artificial Sequence: Synthetic oligonucleotide
aucuuuugggaauggaagu

SEQ ID NO: 1678407 - RNA, 19 nt, Artificial Sequence
  Description of Artificial Sequence: Synthetic oligonucleotide
agggguaaugucugggcac

SEQ ID NO: 1678408 - RNA, 19 nt, Artificial Sequence
  Description of Artificial Sequence: Synthetic oligonucleotide
caguaaacaggucaugcac

SEQ ID NO: 1678409 - RNA, 19 nt, Artificial Sequence
  Description of Artificial Sequence: Synthetic oligonucleotide
uagaugcugaucucauuag

SEQ ID NO: 1678410 - RNA, 19 nt, Artificial Sequence
  Description of Artificial Sequence: Synthetic oligonucleotide
gaaaggagcuuugucuccg

SEQ ID NO: 1678411 - RNA, 19 nt, Artificial Sequence
  Description of Artificial Sequence: Synthetic oligonucleotide
uaacagugguuuaaccaug

SEQ ID NO: 1678412 - RNA, 19 nt, Artificial Sequence
  Description of Artificial Sequence: Synthetic oligonucleotide
uguagacuuuccagugggg

SEQ ID NO: 1678413 - RNA, 19 nt, Artificial Sequence
  Description of Artificial Sequence: Synthetic oligonucleotide
cacagcuaagaggagaggg

SEQ ID NO: 1678414 - RNA, 19 nt, Artificial Sequence
  Description of Artificial Sequence: Synthetic oligonucleotide
gaagggagggaugagcugc

SEQ ID NO: 1678415 - RNA, 19 nt, Artificial Sequence
  Description of Artificial Sequence: Synthetic oligonucleotide
acaguaaacaggucaugca

SEQ ID NO: 1678416 - RNA, 19 nt, Artificial Sequence
  Description of Artificial Sequence: Synthetic oligonucleotide
aggaagcacuuguuuaagg

SEQ ID NO: 1678417 - RNA, 19 nt, Artificial Sequence
  Description of Artificial Sequence: Synthetic oligonucleotide
agcgccaccacuuggugag

SEQ ID NO: 1678418 - RNA, 19 nt, Artificial Sequence
  Description of Artificial Sequence: Synthetic oligonucleotide
aggucaugcaccuuaugca

SEQ ID NO: 1678419 - RNA, 19 nt, Artificial Sequence
  Description of Artificial Sequence: Synthetic oligonucleotide
cuuugagggguaaugucug

SEQ ID NO: 1678420 - RNA, 19 nt, Artificial Sequence
  Description of Artificial Sequence: Synthetic oligonucleotide
uucgauugccuuuucugac

SEQ ID NO: 1678421 - RNA, 19 nt, Artificial Sequence
  Description of Artificial Sequence: Synthetic oligonucleotide
cuauaguucugagagggug

SEQ ID NO: 1678422 - RNA, 19 nt, Artificial Sequence
  Description of Artificial Sequence: Synthetic oligonucleotide
ugucuccgagggaaguucg

SEQ ID NO: 1678423 - RNA, 19 nt, Artificial Sequence
  Description of Artificial Sequence: Synthetic oligonucleotide
ugagggguaaugucugggc

SEQ ID NO: 1678424 - RNA, 19 nt, Artificial Sequence
  Description of Artificial Sequence: Synthetic oligonucleotide
ugacucguucugcucacag

SEQ ID NO: 1678425 - RNA, 19 nt, Artificial Sequence
  Description of Artificial Sequence: Synthetic oligonucleotide
aggagcuuugucuccgagg

SEQ ID NO: 1678426 - RNA, 19 nt, Artificial Sequence
  Description of Artificial Sequence: Synthetic oligonucleotide
ucguucugcucacagcccc

SEQ ID NO: 1678427 - RNA, 19 nt, Artificial Sequence
  Description of Artificial Sequence: Synthetic oligonucleotide
guuuucggcacuggaaggg

SEQ ID NO: 1678428 - RNA, 19 nt, Artificial Sequence
  Description of Artificial Sequence: Synthetic oligonucleotide
gaaugugauggaugaagga

SEQ ID NO: 1678429 - RNA, 19 nt, Artificial Sequence
  Description of Artificial Sequence: Synthetic oligonucleotide
ucggaguguccucugggag

SEQ ID NO: 1678430 - RNA, 19 nt, Artificial Sequence
  Description of Artificial Sequence: Synthetic oligonucleotide
ucccgaaagcacuggcucg

SEQ ID NO: 1678431 - RNA, 19 nt, Artificial Sequence
  Description of Artificial Sequence: Synthetic oligonucleotide
uguucagaggucuccucca

SEQ ID NO: 1678432 - RNA, 19 nt, Artificial Sequence
  Description of Artificial Sequence: Synthetic oligonucleotide
cugaauuacaaaguaggca

SEQ ID NO: 1678433 - RNA, 19 nt, Artificial Sequence
  Description of Artificial Sequence: Synthetic oligonucleotide
uucggaagaaugagcuuga

SEQ ID NO: 1678434 - RNA, 19 nt, Artificial Sequence
  Description of Artificial Sequence: Synthetic oligonucleotide
acuuugagggguaaugucu

SEQ ID NO: 1678435 - RNA, 19 nt, Artificial Sequence
  Description of Artificial Sequence: Synthetic oligonucleotide
ucgauugccuuuucugaca

SEQ ID NO: 1678436 - RNA, 19 nt, Artificial Sequence
  Description of Artificial Sequence: Synthetic oligonucleotide
agaggucaaagucugugaa

SEQ ID NO: 1678437 - RNA, 19 nt, Artificial Sequence
  Description of Artificial Sequence: Synthetic oligonucleotide
uaucggcaugaccacagac

SEQ ID NO: 1678438 - RNA, 19 nt, Artificial Sequence
  Description of Artificial Sequence: Synthetic oligonucleotide
cuguaacagugguuuaacc

SEQ ID NO: 1678439 - RNA, 19 nt, Artificial Sequence
  Description of Artificial Sequence: Synthetic oligonucleotide
ugagcucccgaaagcacug

SEQ ID NO: 1678440 - RNA, 19 nt, Artificial Sequence
  Description of Artificial Sequence: Synthetic oligonucleotide
ugguuuaaccaugcgggcc

SEQ ID NO: 1678441 - RNA, 19 nt, Artificial Sequence
  Description of Artificial Sequence: Synthetic oligonucleotide
gguuuaaccaugcgggccc

SEQ ID NO: 1678442 - RNA, 19 nt, Artificial Sequence
  Description of Artificial Sequence: Synthetic oligonucleotide
augaaggagcgccaagugu

SEQ ID NO: 1678443 - RNA, 19 nt, Artificial Sequence
  Description of Artificial Sequence: Synthetic oligonucleotide
gagcuugagucuguaacag

SEQ ID NO: 1678444 - RNA, 19 nt, Artificial Sequence
  Description of Artificial Sequence: Synthetic oligonucleotide
aggaaaugggaaccaccuc

SEQ ID NO: 1678445 - RNA, 19 nt, Artificial Sequence
  Description of Artificial Sequence: Synthetic oligonucleotide
aaggagcuuugucuccgag

SEQ ID NO: 1678446 - RNA, 19 nt, Artificial Sequence
  Description of Artificial Sequence: Synthetic oligonucleotide
caccuuaugcaucuugcug

SEQ ID NO: 1678447 - RNA, 19 nt, Artificial Sequence
  Description of Artificial Sequence: Synthetic oligonucleotide
cagaggagugcccuuauuc

SEQ ID NO: 1678448 - RNA, 19 nt, Artificial Sequence
  Description of Artificial Sequence: Synthetic oligonucleotide
ccugucuugaucaccagag

SEQ ID NO: 1678449 - RNA, 19 nt, Artificial Sequence
  Description of Artificial Sequence: Synthetic oligonucleotide
acggagucucucaaaauuc

SEQ ID NO: 1678450 - RNA, 19 nt, Artificial Sequence
  Description of Artificial Sequence: Synthetic oligonucleotide
ccuuauacacagcuaagag

SEQ ID NO: 1678451 - RNA, 19 nt, Artificial Sequence
  Description of Artificial Sequence: Synthetic oligonucleotide
acagugguuuaaccaugcg

SEQ ID NO: 1678452 - RNA, 19 nt, Artificial Sequence
  Description of Artificial Sequence: Synthetic oligonucleotide
aaugagcuugagucuguaa

SEQ ID NO: 1678453 - RNA, 19 nt, Artificial Sequence
  Description of Artificial Sequence: Synthetic oligonucleotide
uuucggcacuggaagggag

SEQ ID NO: 1678454 - RNA, 19 nt, Artificial Sequence
  Description of Artificial Sequence: Synthetic oligonucleotide
gguuccaucgcagaugacc

SEQ ID NO: 1678455 - RNA, 19 nt, Artificial Sequence
  Description of Artificial Sequence: Synthetic oligonucleotide
uuaaccaugcgggcccgcg

SEQ ID NO: 1678456 - RNA, 19 nt, Artificial Sequence
  Description of Artificial Sequence: Synthetic oligonucleotide
ugugagcucccgaaagcac

SEQ ID NO: 1678457 - RNA, 19 nt, Artificial Sequence
  Description of Artificial Sequence: Synthetic oligonucleotide
agaucgacagucucugaaa

SEQ ID NO: 1678458 - RNA, 19 nt, Artificial Sequence
  Description of Artificial Sequence: Synthetic oligonucleotide
ugaugaccagaggucaaag

SEQ ID NO: 1678459 - RNA, 19 nt, Artificial Sequence
  Description of Artificial Sequence: Synthetic oligonucleotide
guagcugucugauaaauuu

SEQ ID NO: 1678460 - RNA, 19 nt, Artificial Sequence
  Description of Artificial Sequence: Synthetic oligonucleotide
gcaugagaaaugcugaauc

SEQ ID NO: 1678461 - RNA, 19 nt, Artificial Sequence
  Description of Artificial Sequence: Synthetic oligonucleotide
uggaugaaggagcgccaag

SEQ ID NO: 1678462 - RNA, 19 nt, Artificial Sequence
  Description of Artificial Sequence: Synthetic oligonucleotide
caucgcagaugaccaaagg

SEQ ID NO: 1678463 - RNA, 19 nt, Artificial Sequence
  Description of Artificial Sequence: Synthetic oligonucleotide
accaggaagcacuuguuua

SEQ ID NO: 1678464 - RNA, 19 nt, Artificial Sequence
  Description of Artificial Sequence: Synthetic oligonucleotide
ugcccuuauucucuggcau

SEQ ID NO: 1678465 - RNA, 19 nt, Artificial Sequence
  Description of Artificial Sequence: Synthetic oligonucleotide
cuugucauagaugcugauc

SEQ ID NO: 1678466 - RNA, 19 nt, Artificial Sequence
  Description of Artificial Sequence: Synthetic oligonucleotide
uucggaguguccucuggga

SEQ ID NO: 1678467 - RNA, 19 nt, Artificial Sequence
  Description of Artificial Sequence: Synthetic oligonucleotide
auggguaaggaaaugggaa

SEQ ID NO: 1678468 - RNA, 19 nt, Artificial Sequence
  Description of Artificial Sequence: Synthetic oligonucleotide
gacucguucugcucacagc

SEQ ID NO: 1678469 - RNA, 19 nt, Artificial Sequence
  Description of Artificial Sequence: Synthetic oligonucleotide
gaccuuauacacagcuaag

SEQ ID NO: 1678470 - RNA, 19 nt, Artificial Sequence
  Description of Artificial Sequence: Synthetic oligonucleotide
ggaaccaccucucaggaaa

SEQ ID NO: 1678471 - RNA, 19 nt, Artificial Sequence
  Description of Artificial Sequence: Synthetic oligonucleotide
gagcuaaaaggcugaauua

SEQ ID NO: 1678472 - RNA, 19 nt, Artificial Sequence
  Description of Artificial Sequence: Synthetic oligonucleotide
acuggcucgggugcuaagg

SEQ ID NO: 1678473 - RNA, 19 nt, Artificial Sequence
  Description of Artificial Sequence: Synthetic oligonucleotide
accagaucgacagucucug

SEQ ID NO: 1678474 - RNA, 19 nt, Artificial Sequence
  Description of Artificial Sequence: Synthetic oligonucleotide
aaaggagcuuugucuccga

SEQ ID NO: 1678475 - RNA, 19 nt, Artificial Sequence
  Description of Artificial Sequence: Synthetic oligonucleotide
aagauuaaucccagaguua

SEQ ID NO: 1678476 - RNA, 19 nt, Artificial Sequence
  Description of Artificial Sequence: Synthetic oligonucleotide
ggagcguuacuuugagggg

SEQ ID NO: 1678477 - RNA, 19 nt, Artificial Sequence
  Description of Artificial Sequence: Synthetic oligonucleotide
ucggcacuggaagggaggg

SEQ ID NO: 1678478 - RNA, 19 nt, Artificial Sequence
  Description of Artificial Sequence: Synthetic oligonucleotide
gugguuuaaccaugcgggc

SEQ ID NO: 1678479 - RNA, 19 nt, Artificial Sequence
  Description of Artificial Sequence: Synthetic oligonucleotide
gugguuccaucgcagauga

SEQ ID NO: 1678480 - RNA, 19 nt, Artificial Sequence
  Description of Artificial Sequence: Synthetic oligonucleotide
agcuuugucuccgagggaa

SEQ ID NO: 1678481 - RNA, 19 nt, Artificial Sequence
  Description of Artificial Sequence: Synthetic oligonucleotide
uaguuuccuauaguucuga

SEQ ID NO: 1678482 - RNA, 19 nt, Artificial Sequence
  Description of Artificial Sequence: Synthetic oligonucleotide
ugaucuguucagaggucuc

SEQ ID NO: 1678483 - RNA, 19 nt, Artificial Sequence
  Description of Artificial Sequence: Synthetic oligonucleotide
ugggagcguuacuuugagg

SEQ ID NO: 1678484 - RNA, 19 nt, Artificial Sequence
  Description of Artificial Sequence: Synthetic oligonucleotide
ugagucuguaacagugguu

SEQ ID NO: 1678485 - RNA, 19 nt, Artificial Sequence
  Description of Artificial Sequence: Synthetic oligonucleotide
ucugacucguucugcucac

SEQ ID NO: 1678486 - RNA, 19 nt, Artificial Sequence
  Description of Artificial Sequence: Synthetic oligonucleotide
gaggcaucuuuugggaaug

SEQ ID NO: 1678487 - RNA, 19 nt, Artificial Sequence
  Description of Artificial Sequence: Synthetic oligonucleotide
aucggcaugaccacagacu

SEQ ID NO: 1678488 - RNA, 19 nt, Artificial Sequence
  Description of Artificial Sequence: Synthetic oligonucleotide
uuuucggcacuggaaggga

SEQ ID NO: 1678489 - RNA, 19 nt, Artificial Sequence
  Description of Artificial Sequence: Synthetic oligonucleotide
uacaggcaugagaaaugcu

SEQ ID NO: 1678490 - RNA, 19 nt, Artificial Sequence
  Description of Artificial Sequence: Synthetic oligonucleotide
gcagugaacaagauuaauc

SEQ ID NO: 1678491 - RNA, 19 nt, Artificial Sequence
  Description of Artificial Sequence: Synthetic oligonucleotide
guuccaucgcagaugacca

SEQ ID NO: 1678492 - RNA, 19 nt, Artificial Sequence
  Description of Artificial Sequence: Synthetic oligonucleotide
cagccgaaugugauggaug

SEQ ID NO: 1678493 - RNA, 19 nt, Artificial Sequence
  Description of Artificial Sequence: Synthetic oligonucleotide
guagacuuuccagugggga

SEQ ID NO: 1678494 - RNA, 19 nt, Artificial Sequence
  Description of Artificial Sequence: Synthetic oligonucleotide
gugagaaaccccucagcga

SEQ ID NO: 1678495 - RNA, 19 nt, Artificial Sequence
  Description of Artificial Sequence: Synthetic oligonucleotide
uaaccaugcgggcccgcgc

SEQ ID NO: 1678496 - RNA, 19 nt, Artificial Sequence
  Description of Artificial Sequence: Synthetic oligonucleotide
gucaaagucugugaaacgu

SEQ ID NO: 1678497 - RNA, 19 nt, Artificial Sequence
  Description of Artificial Sequence: Synthetic oligonucleotide
gaacaagauuaaucccaga

SEQ ID NO: 1678498 - RNA, 19 nt, Artificial Sequence
  Description of Artificial Sequence: Synthetic oligonucleotide
guggggagcaccggcauag

SEQ ID NO: 1678499 - RNA, 19 nt, Artificial Sequence
  Description of Artificial Sequence: Synthetic oligonucleotide
ucgggugcuaaggagcuaa

SEQ ID NO: 1678500 - RNA, 19 nt, Artificial Sequence
  Description of Artificial Sequence: Synthetic oligonucleotide
uccaucgcagaugaccaaa

SEQ ID NO: 1678501 - RNA, 19 nt, Artificial Sequence
  Description of Artificial Sequence: Synthetic oligonucleotide
ccucgaacaacaaagggaa

SEQ ID NO: 1678502 - RNA, 19 nt, Artificial Sequence
  Description of Artificial Sequence: Synthetic oligonucleotide
gaaaccccucagcgaagcc

SEQ ID NO: 1678503 - RNA, 19 nt, Artificial Sequence
  Description of Artificial Sequence: Synthetic oligonucleotide
cugggagcguuacuuugag

SEQ ID NO: 1678504 - RNA, 19 nt, Artificial Sequence
  Description of Artificial Sequence: Synthetic oligonucleotide
ugacaguguuuucggcacu

SEQ ID NO: 1678505 - RNA, 19 nt, Artificial Sequence
  Description of Artificial Sequence: Synthetic oligonucleotide
cucggggacaccagccgcc

SEQ ID NO: 1678506 - RNA, 19 nt, Artificial Sequence
  Description of Artificial Sequence: Synthetic oligonucleotide
gagggugguuccaucgcag

SEQ ID NO: 1678507 - RNA, 19 nt, Artificial Sequence
  Description of Artificial Sequence: Synthetic oligonucleotide
ggcagcgcgacccggaagc

SEQ ID NO: 1678508 - RNA, 19 nt, Artificial Sequence
  Description of Artificial Sequence: Synthetic oligonucleotide
gaugaccagaggucaaagu

SEQ ID NO: 1678509 - RNA, 19 nt, Artificial Sequence
  Description of Artificial Sequence: Synthetic oligonucleotide
ucuccgagggaaguucgga

SEQ ID NO: 1678510 - RNA, 19 nt, Artificial Sequence
  Description of Artificial Sequence: Synthetic oligonucleotide
ccgaaugugauggaugaag

SEQ ID NO: 1678511 - RNA, 19 nt, Artificial Sequence
  Description of Artificial Sequence: Synthetic oligonucleotide
agccccuugaugaccagag

SEQ ID NO: 1678512 - RNA, 19 nt, Artificial Sequence
  Description of Artificial Sequence: Synthetic oligonucleotide
aaggagcgccaagugugag

SEQ ID NO: 1678513 - RNA, 19 nt, Artificial Sequence
  Description of Artificial Sequence: Synthetic oligonucleotide
ucagccgaaugugauggau

SEQ ID NO: 1678514 - RNA, 19 nt, Artificial Sequence
  Description of Artificial Sequence: Synthetic oligonucleotide
cgggccucgaacaacaaag

SEQ ID NO: 1678515 - RNA, 19 nt, Artificial Sequence
  Description of Artificial Sequence: Synthetic oligonucleotide
ggagaggguacuggggugg

SEQ ID NO: 1678516 - RNA, 19 nt, Artificial Sequence
  Description of Artificial Sequence: Synthetic oligonucleotide
gauggaugaaggagcgcca

SEQ ID NO: 1678517 - RNA, 19 nt, Artificial Sequence
  Description of Artificial Sequence: Synthetic oligonucleotide
agaggacggagucucucaa

SEQ ID NO: 1678518 - RNA, 19 nt, Artificial Sequence
  Description of Artificial Sequence: Synthetic oligonucleotide
aguucggaagaaugagcuu

SEQ ID NO: 1678519 - RNA, 19 nt, Artificial Sequence
  Description of Artificial Sequence: Synthetic oligonucleotide
ccuuaugcaucuugcugcc

SEQ ID NO: 1678520 - RNA, 19 nt, Artificial Sequence
  Description of Artificial Sequence: Synthetic oligonucleotide
cagaucgacagucucugaa

SEQ ID NO: 1678521 - RNA, 19 nt, Artificial Sequence
  Description of Artificial Sequence: Synthetic oligonucleotide
agcgaagcccucuguggcu

SEQ ID NO: 1678522 - RNA, 19 nt, Artificial Sequence
  Description of Artificial Sequence: Synthetic oligonucleotide
caacaguaaacaggucaug

SEQ ID NO: 1678523 - RNA, 19 nt, Artificial Sequence
  Description of Artificial Sequence: Synthetic oligonucleotide
gacaugccacacugauggc

SEQ ID NO: 1678524 - RNA, 19 nt, Artificial Sequence
  Description of Artificial Sequence: Synthetic oligonucleotide
guuuaaccaugcgggcccg

SEQ ID NO: 1678525 - RNA, 19 nt, Artificial Sequence
  Description of Artificial Sequence: Synthetic oligonucleotide
ggccccucuggcuacaaug

SEQ ID NO: 1678526 - RNA, 19 nt, Artificial Sequence
  Description of Artificial Sequence: Synthetic oligonucleotide
ggcauguacuucuuggcaa

SEQ ID NO: 1678527 - RNA, 19 nt, Artificial Sequence
  Description of Artificial Sequence: Synthetic oligonucleotide
uccuugcagaggagugccc

SEQ ID NO: 1678528 - RNA, 19 nt, Artificial Sequence
  Description of Artificial Sequence: Synthetic oligonucleotide
uuugucuccgagggaaguu

SEQ ID NO: 1678529 - RNA, 19 nt, Artificial Sequence
  Description of Artificial Sequence: Synthetic oligonucleotide
acuuggugagaaaccccuc

SEQ ID NO: 1678530 - RNA, 19 nt, Artificial Sequence
  Description of Artificial Sequence: Synthetic oligonucleotide
gagaaaccccucagcgaag

SEQ ID NO: 1678531 - RNA, 19 nt, Artificial Sequence
  Description of Artificial Sequence: Synthetic oligonucleotide
gaauuacaaaguaggcagu

SEQ ID NO: 1678532 - RNA, 19 nt, Artificial Sequence
  Description of Artificial Sequence: Synthetic oligonucleotide
aggaggcaucuuuugggaa

SEQ ID NO: 1678533 - RNA, 19 nt, Artificial Sequence
  Description of Artificial Sequence: Synthetic oligonucleotide
agggugguuccaucgcaga

SEQ ID NO: 1678534 - RNA, 19 nt, Artificial Sequence
  Description of Artificial Sequence: Synthetic oligonucleotide
uucaggguacaggcaugag

SEQ ID NO: 1678535 - RNA, 19 nt, Artificial Sequence
  Description of Artificial Sequence: Synthetic oligonucleotide
gaauggaaguuggcuaaaa

SEQ ID NO: 1678536 - RNA, 19 nt, Artificial Sequence
  Description of Artificial Sequence: Synthetic oligonucleotide
caccagaggacggagucuc

SEQ ID NO: 1678537 - RNA, 19 nt, Artificial Sequence
  Description of Artificial Sequence: Synthetic oligonucleotide
cuuguuuaaggaggcaucu

SEQ ID NO: 1678538 - RNA, 19 nt, Artificial Sequence
  Description of Artificial Sequence: Synthetic oligonucleotide
caugccacacugauggccu

SEQ ID NO: 1678539 - RNA, 19 nt, Artificial Sequence
  Description of Artificial Sequence: Synthetic oligonucleotide
cuugaugaccagaggucaa

SEQ ID NO: 1678540 - RNA, 19 nt, Artificial Sequence
  Description of Artificial Sequence: Synthetic oligonucleotide
gauggccugucugucucac

SEQ ID NO: 1678541 - RNA, 19 nt, Artificial Sequence
  Description of Artificial Sequence: Synthetic oligonucleotide
ugcagaggagugcccuuau

SEQ ID NO: 1678542 - RNA, 19 nt, Artificial Sequence
  Description of Artificial Sequence: Synthetic oligonucleotide
gucuguaacagugguuuaa

SEQ ID NO: 1678543 - RNA, 19 nt, Artificial Sequence
  Description of Artificial Sequence: Synthetic oligonucleotide
gguaaggaaaugggaacca

SEQ ID NO: 1678544 - RNA, 19 nt, Artificial Sequence
  Description of Artificial Sequence: Synthetic oligonucleotide
cccgcugccaacaguaaac

SEQ ID NO: 1678545 - RNA, 19 nt, Artificial Sequence
  Description of Artificial Sequence: Synthetic oligonucleotide
gggaaguucggaagaauga

SEQ ID NO: 1678546 - RNA, 19 nt, Artificial Sequence
  Description of Artificial Sequence: Synthetic oligonucleotide
agucuguaacagugguuua

SEQ ID NO: 1678547 - RNA, 19 nt, Artificial Sequence
  Description of Artificial Sequence: Synthetic oligonucleotide
uuguuuaaggaggcaucuu

SEQ ID NO: 1678548 - RNA, 19 nt, Artificial Sequence
  Description of Artificial Sequence: Synthetic oligonucleotide
gagcguuacuuugaggggu

SEQ ID NO: 1678549 - RNA, 19 nt, Artificial Sequence
  Description of Artificial Sequence: Synthetic oligonucleotide
uuccaucgcagaugaccaa

SEQ ID NO: 1678550 - RNA, 19 nt, Artificial Sequence
  Description of Artificial Sequence: Synthetic oligonucleotide
aagggagggaugagcugca

SEQ ID NO: 1678551 - RNA, 19 nt, Artificial Sequence
  Description of Artificial Sequence: Synthetic oligonucleotide
cagaggacggagucucuca

SEQ ID NO: 1678552 - RNA, 19 nt, Artificial Sequence
  Description of Artificial Sequence: Synthetic oligonucleotide
uuuaaccaugcgggcccgc

SEQ ID NO: 1678553 - RNA, 19 nt, Artificial Sequence
  Description of Artificial Sequence: Synthetic oligonucleotide
gugcccuuauucucuggca

SEQ ID NO: 1678554 - RNA, 19 nt, Artificial Sequence
  Description of Artificial Sequence: Synthetic oligonucleotide
ggcucgggugcuaaggagc

SEQ ID NO: 1678555 - RNA, 19 nt, Artificial Sequence
  Description of Artificial Sequence: Synthetic oligonucleotide
uccggcagcgcgacccgga

SEQ ID NO: 1678556 - RNA, 19 nt, Artificial Sequence
  Description of Artificial Sequence: Synthetic oligonucleotide
ccggcauagccaauauccc

SEQ ID NO: 1678557 - RNA, 19 nt, Artificial Sequence
  Description of Artificial Sequence: Synthetic oligonucleotide
aucagccgaaugugaugga

SEQ ID NO: 1678558 - RNA, 19 nt, Artificial Sequence
  Description of Artificial Sequence: Synthetic oligonucleotide
gucaugcaccuuaugcauc

SEQ ID NO: 1678559 - RNA, 19 nt, Artificial Sequence
  Description of Artificial Sequence: Synthetic oligonucleotide
gucuccgagggaaguucgg

SEQ ID NO: 1678560 - RNA, 19 nt, Artificial Sequence
  Description of Artificial Sequence: Synthetic oligonucleotide
gaggacggagucucucaaa

SEQ ID NO: 1678561 - RNA, 19 nt, Artificial Sequence
  Description of Artificial Sequence: Synthetic oligonucleotide
cgcagaugaccaaaggcug

SEQ ID NO: 1678562 - RNA, 19 nt, Artificial Sequence
  Description of Artificial Sequence: Synthetic oligonucleotide
auggaugaaggagcgccaa

SEQ ID NO: 1678563 - RNA, 19 nt, Artificial Sequence
  Description of Artificial Sequence: Synthetic oligonucleotide
gcccuuauucucuggcaug

SEQ ID NO: 1678564 - RNA, 19 nt, Artificial Sequence
  Description of Artificial Sequence: Synthetic oligonucleotide
uugcagaggagugcccuua

SEQ ID NO: 1678565 - RNA, 19 nt, Artificial Sequence
  Description of Artificial Sequence: Synthetic oligonucleotide
gagaggguacugggguggc

SEQ ID NO: 1678566 - RNA, 19 nt, Artificial Sequence
  Description of Artificial Sequence: Synthetic oligonucleotide
ggagugcccuuauucucug

SEQ ID NO: 1678567 - RNA, 19 nt, Artificial Sequence
  Description of Artificial Sequence: Synthetic oligonucleotide
cucccguaaaaucugugau

SEQ ID NO: 1678568 - RNA, 19 nt, Artificial Sequence
  Description of Artificial Sequence: Synthetic oligonucleotide
agcaccggcauagccaaua

SEQ ID NO: 1678569 - RNA, 19 nt, Artificial Sequence
  Description of Artificial Sequence: Synthetic oligonucleotide
ggucaugcaccuuaugcau

SEQ ID NO: 1678570 - RNA, 19 nt, Artificial Sequence
  Description of Artificial Sequence: Synthetic oligonucleotide
uaaacaggucaugcaccuu

SEQ ID NO: 1678571 - RNA, 19 nt, Artificial Sequence
  Description of Artificial Sequence: Synthetic oligonucleotide
augccacacugauggccug

SEQ ID NO: 1678572 - RNA, 19 nt, Artificial Sequence
  Description of Artificial Sequence: Synthetic oligonucleotide
cuccgagggaaguucggaa

SEQ ID NO: 1678573 - RNA, 19 nt, Artificial Sequence
  Description of Artificial Sequence: Synthetic oligonucleotide
cuggcucgggugcuaagga

SEQ ID NO: 1678574 - RNA, 19 nt, Artificial Sequence
  Description of Artificial Sequence: Synthetic oligonucleotide
agcucccguaaaaucugug

SEQ ID NO: 1678575 - RNA, 19 nt, Artificial Sequence
  Description of Artificial Sequence: Synthetic oligonucleotide
cagaguuaggaggaccuua

SEQ ID NO: 1678576 - RNA, 19 nt, Artificial Sequence
  Description of Artificial Sequence: Synthetic oligonucleotide
caccggcauagccaauauc

SEQ ID NO: 1678577 - RNA, 19 nt, Artificial Sequence
  Description of Artificial Sequence: Synthetic oligonucleotide
cccgaaagcacuggcucgg

SEQ ID NO: 1678578 - RNA, 19 nt, Artificial Sequence
  Description of Artificial Sequence: Synthetic oligonucleotide
cucgaacaacaaagggaaa

SEQ ID NO: 1678579 - RNA, 19 nt, Artificial Sequence
  Description of Artificial Sequence: Synthetic oligonucleotide
cuaucggcaugaccacaga

SEQ ID NO: 1678580 - RNA, 19 nt, Artificial Sequence
  Description of Artificial Sequence: Synthetic oligonucleotide
gggcaaggacaucagccga

SEQ ID NO: 1678581 - RNA, 19 nt, Artificial Sequence
  Description of Artificial Sequence: Synthetic oligonucleotide
uuccggcagcgcgacccgg

SEQ ID NO: 1678582 - RNA, 19 nt, Artificial Sequence
  Description of Artificial Sequence: Synthetic oligonucleotide
cugggccaaccacuuccug

SEQ ID NO: 1678583 - RNA, 19 nt, Artificial Sequence
  Description of Artificial Sequence: Synthetic oligonucleotide
gggguaaugucugggcaca

SEQ ID NO: 1678584 - RNA, 19 nt, Artificial Sequence
  Description of Artificial Sequence: Synthetic oligonucleotide
cacuggcucgggugcuaag

SEQ ID NO: 1678585 - RNA, 19 nt, Artificial Sequence
  Description of Artificial Sequence: Synthetic oligonucleotide
gccccuugaugaccagagg

SEQ ID NO: 1678586 - RNA, 19 nt, Artificial Sequence
  Description of Artificial Sequence: Synthetic oligonucleotide
ugguuccaucgcagaugac

SEQ ID NO: 1678587 - RNA, 19 nt, Artificial Sequence
  Description of Artificial Sequence: Synthetic oligonucleotide
ggagcgccaagugugagcu

SEQ ID NO: 1678588 - RNA, 19 nt, Artificial Sequence
  Description of Artificial Sequence: Synthetic oligonucleotide
ccaacaguaaacaggucau

SEQ ID NO: 1678589 - RNA, 19 nt, Artificial Sequence
  Description of Artificial Sequence: Synthetic oligonucleotide
agcguuacuuugaggggua

SEQ ID NO: 1678590 - RNA, 19 nt, Artificial Sequence
  Description of Artificial Sequence: Synthetic oligonucleotide
cucuaucggcaugaccaca

SEQ ID NO: 1678591 - RNA, 19 nt, Artificial Sequence
  Description of Artificial Sequence: Synthetic oligonucleotide
gcuuugucuccgagggaag

SEQ ID NO: 1678592 - RNA, 19 nt, Artificial Sequence
  Description of Artificial Sequence: Synthetic oligonucleotide
gaucaccagaggacggagu

SEQ ID NO: 1678593 - RNA, 19 nt, Artificial Sequence
  Description of Artificial Sequence: Synthetic oligonucleotide
cacagacugacaguguuuu

SEQ ID NO: 1678594 - RNA, 19 nt, Artificial Sequence
  Description of Artificial Sequence: Synthetic oligonucleotide
cuuugucuccgagggaagu

SEQ ID NO: 1678595 - RNA, 19 nt, Artificial Sequence
  Description of Artificial Sequence: Synthetic oligonucleotide
gcuaagaggagaggguacu

SEQ ID NO: 1678596 - RNA, 19 nt, Artificial Sequence
  Description of Artificial Sequence: Synthetic oligonucleotide
cugcuuccggcagcgcgac

SEQ ID NO: 1678597 - RNA, 19 nt, Artificial Sequence
  Description of Artificial Sequence: Synthetic oligonucleotide
gcaccuuaugcaucuugcu

SEQ ID NO: 1678598 - RNA, 19 nt, Artificial Sequence
  Description of Artificial Sequence: Synthetic oligonucleotide
ggcaaggacaucagccgaa

SEQ ID NO: 1678599 - RNA, 19 nt, Artificial Sequence
  Description of Artificial Sequence: Synthetic oligonucleotide
ccccuugaugaccagaggu

SEQ ID NO: 1678600 - RNA, 19 nt, Artificial Sequence
  Description of Artificial Sequence: Synthetic oligonucleotide
ccugcuuccggcagcgcga

SEQ ID NO: 1678601 - RNA, 19 nt, Artificial Sequence
  Description of Artificial Sequence: Synthetic oligonucleotide
cucgggcuccucccgccuc

SEQ ID NO: 1678602 - RNA, 19 nt, Artificial Sequence
  Description of Artificial Sequence: Synthetic oligonucleotide
caggcucuaucggcaugac

SEQ ID NO: 1678603 - RNA, 19 nt, Artificial Sequence
  Description of Artificial Sequence: Synthetic oligonucleotide
ggaggaccuuauacacagc

SEQ ID NO: 1678604 - RNA, 19 nt, Artificial Sequence
  Description of Artificial Sequence: Synthetic oligonucleotide
cccagaguuaggaggaccu

SEQ ID NO: 1678605 - RNA, 19 nt, Artificial Sequence
  Description of Artificial Sequence: Synthetic oligonucleotide
ggacaccagccgccgggcc

SEQ ID NO: 1678606 - RNA, 19 nt, Artificial Sequence
  Description of Artificial Sequence: Synthetic oligonucleotide
gggcccgcgcccucucggg

SEQ ID NO: 1678607 - RNA, 19 nt, Artificial Sequence
  Description of Artificial Sequence: Synthetic oligonucleotide
gcaacauggcuuccccgcu

SEQ ID NO: 1678608 - RNA, 19 nt, Artificial Sequence
  Description of Artificial Sequence: Synthetic oligonucleotide
cuugcagaggagugcccuu

SEQ ID NO: 1678609 - RNA, 19 nt, Artificial Sequence
  Description of Artificial Sequence: Synthetic oligonucleotide
gcagcgcgacccggaagcg

SEQ ID NO: 1678610 - RNA, 19 nt, Artificial Sequence
  Description of Artificial Sequence: Synthetic oligonucleotide
gggugcuaaggagcuaaaa

SEQ ID NO: 1678611 - RNA, 19 nt, Artificial Sequence
  Description of Artificial Sequence: Synthetic oligonucleotide
gggaaccaccucucaggaa

SEQ ID NO: 1678612 - RNA, 19 nt, Artificial Sequence
  Description of Artificial Sequence: Synthetic oligonucleotide
caugcgggcccgcgcccuc

SEQ ID NO: 1678613 - RNA, 19 nt, Artificial Sequence
  Description of Artificial Sequence: Synthetic oligonucleotide
ggcagugaacaagauuaau

SEQ ID NO: 1678614 - RNA, 19 nt, Artificial Sequence
  Description of Artificial Sequence: Synthetic oligonucleotide
cugacucguucugcucaca

SEQ ID NO: 1678615 - RNA, 19 nt, Artificial Sequence
  Description of Artificial Sequence: Synthetic oligonucleotide
ggacggagucucucaaaau

SEQ ID NO: 1678616 - RNA, 19 nt, Artificial Sequence
  Description of Artificial Sequence: Synthetic oligonucleotide
agcacuggcucgggugcua

SEQ ID NO: 1678617 - RNA, 19 nt, Artificial Sequence
  Description of Artificial Sequence: Synthetic oligonucleotide
cucacgccgccggccgggc

SEQ ID NO: 1678618 - RNA, 19 nt, Artificial Sequence
  Description of Artificial Sequence: Synthetic oligonucleotide
ggcuuccccgcugccaaca

SEQ ID NO: 1678619 - RNA, 19 nt, Artificial Sequence
  Description of Artificial Sequence: Synthetic oligonucleotide
ccgccucggggacaccagc

SEQ ID NO: 1678620 - RNA, 19 nt, Artificial Sequence
  Description of Artificial Sequence: Synthetic oligonucleotide
ccucacgccgccggccggg

SEQ ID NO: 1678621 - RNA, 19 nt, Artificial Sequence
  Description of Artificial Sequence: Synthetic oligonucleotide
gcucgggugcuaaggagcu

SEQ ID NO: 1678622 - RNA, 19 nt, Artificial Sequence
  Description of Artificial Sequence: Synthetic oligonucleotide
ccgcugccaacaguaaaca

SEQ ID NO: 1678623 - RNA, 19 nt, Artificial Sequence
  Description of Artificial Sequence: Synthetic oligonucleotide
gcaaggacaucagccgaau

SEQ ID NO: 1678624 - RNA, 19 nt, Artificial Sequence
  Description of Artificial Sequence: Synthetic oligonucleotide
gcaugaccacagacugaca

SEQ ID NO: 1678625 - RNA, 19 nt, Artificial Sequence
  Description of Artificial Sequence: Synthetic oligonucleotide
cggaagcggcccucacgcc

SEQ ID NO: 1678626 - RNA, 19 nt, Artificial Sequence
  Description of Artificial Sequence: Synthetic oligonucleotide
gcaccggcauagccaauau

SEQ ID NO: 1678627 - RNA, 19 nt, Artificial Sequence
  Description of Artificial Sequence: Synthetic oligonucleotide
cccucacgccgccggccgg

SEQ ID NO: 1678628 - RNA, 19 nt, Artificial Sequence
  Description of Artificial Sequence: Synthetic oligonucleotide
ccgggccucgaacaacaaa

SEQ ID NO: 1678629 - RNA, 19 nt, Artificial Sequence
  Description of Artificial Sequence: Synthetic oligonucleotide
ggaccaggaagcacuuguu

SEQ ID NO: 1678630 - RNA, 19 nt, Artificial Sequence
  Description of Artificial Sequence: Synthetic oligonucleotide
ccccgcugccaacaguaaa

SEQ ID NO: 1678631 - RNA, 19 nt, Artificial Sequence
  Description of Artificial Sequence: Synthetic oligonucleotide
caccagccgccgggccagg

SEQ ID NO: 1678632 - RNA, 19 nt, Artificial Sequence
  Description of Artificial Sequence: Synthetic oligonucleotide
ccacagacugacaguguuu

SEQ ID NO: 1678633 - RNA, 19 nt, Artificial Sequence
  Description of Artificial Sequence: Synthetic oligonucleotide
cucgggugcuaaggagcua

SEQ ID NO: 1678634 - RNA, 19 nt, Artificial Sequence
  Description of Artificial Sequence: Synthetic oligonucleotide
gcguuacuuugagggguaa

SEQ ID NO: 1678635 - RNA, 19 nt, Artificial Sequence
  Description of Artificial Sequence: Synthetic oligonucleotide
cgauugccuuuucugacau

SEQ ID NO: 1678636 - RNA, 19 nt, Artificial Sequence
  Description of Artificial Sequence: Synthetic oligonucleotide
gcagaggagugcccuuauu

SEQ ID NO: 1678637 - RNA, 19 nt, Artificial Sequence
  Description of Artificial Sequence: Synthetic oligonucleotide
gcacuggcucgggugcuaa

SEQ ID NO: 1678638 - RNA, 19 nt, Artificial Sequence
  Description of Artificial Sequence: Synthetic oligonucleotide
cgcgacccggaagcggccc

SEQ ID NO: 1678639 - RNA, 19 nt, Artificial Sequence
  Description of Artificial Sequence: Synthetic oligonucleotide
cggcagcgcgacccggaag

SEQ ID NO: 1678640 - RNA, 19 nt, Artificial Sequence
  Description of Artificial Sequence: Synthetic oligonucleotide
gagcaccggcauagccaau

SEQ ID NO: 1678641 - RNA, 19 nt, Artificial Sequence
  Description of Artificial Sequence: Synthetic oligonucleotide
cgccggccgggccucgaac

SEQ ID NO: 1678642 - RNA, 19 nt, Artificial Sequence
  Description of Artificial Sequence: Synthetic oligonucleotide
cggcccucacgccgccggc

SEQ ID NO: 1678643 - RNA, 19 nt, Artificial Sequence
  Description of Artificial Sequence: Synthetic oligonucleotide
cgggugcuaaggagcuaaa

SEQ ID NO: 1678644 - RNA, 19 nt, Artificial Sequence
  Description of Artificial Sequence: Synthetic oligonucleotide
cguuacuuugagggguaau

SEQ ID NO: 1678645 - RNA, 19 nt, Artificial Sequence
  Description of Artificial Sequence: Synthetic oligonucleotide
ccagaguuaggaggaccuu

SEQ ID NO: 1678646 - RNA, 19 nt, Artificial Sequence
  Description of Artificial Sequence: Synthetic oligonucleotide
gggccccucuggcuacaau

SEQ ID NO: 1678647 - RNA, 19 nt, Artificial Sequence
  Description of Artificial Sequence: Synthetic oligonucleotide
gccgccggccgggccucga

SEQ ID NO: 1678648 - RNA, 19 nt, Artificial Sequence
  Description of Artificial Sequence: Synthetic oligonucleotide
aauggcaucaccucaagcc

SEQ ID NO: 1678649 - RNA, 19 nt, Artificial Sequence
  Description of Artificial Sequence: Synthetic oligonucleotide
aaaauuuugaaucuuuauc

SEQ ID NO: 1678650 - RNA, 19 nt, Artificial Sequence
  Description of Artificial Sequence: Synthetic oligonucleotide
aaacuaacuagacaaaggg

SEQ ID NO: 1678651 - RNA, 19 nt, Artificial Sequence
  Description of Artificial Sequence: Synthetic oligonucleotide
aaauuuugaaucuuuaucu

SEQ ID NO: 1678652 - RNA, 19 nt, Artificial Sequence
  Description of Artificial Sequence: Synthetic oligonucleotide
aaagaaaacauaaagacug

SEQ ID NO: 1678653 - RNA, 19 nt, Artificial Sequence
  Description of Artificial Sequence: Synthetic oligonucleotide
acugaaaacaaacagcaac

SEQ ID NO: 1678654 - RNA, 19 nt, Artificial Sequence
  Description of Artificial Sequence: Synthetic oligonucleotide
auuaacccaagcuauaggc

SEQ ID NO: 1678655 - RNA, 19 nt, Artificial Sequence
  Description of Artificial Sequence: Synthetic oligonucleotide
aaaacaaacagcaaccagg

SEQ ID NO: 1678656 - RNA, 19 nt, Artificial Sequence
  Description of Artificial Sequence: Synthetic oligonucleotide
aauugaugagacuuaaaag

SEQ ID NO: 1678657 - RNA, 19 nt, Artificial Sequence
  Description of Artificial Sequence: Synthetic oligonucleotide
aacugcaucacauuccucg

SEQ ID NO: 1678658 - RNA, 19 nt, Artificial Sequence
  Description of Artificial Sequence: Synthetic oligonucleotide
auugaugagacuuaaaaga

SEQ ID NO: 1678659 - RNA, 19 nt, Artificial Sequence
  Description of Artificial Sequence: Synthetic oligonucleotide
aaaugaaauuaacccaagc

SEQ ID NO: 1678660 - RNA, 19 nt, Artificial Sequence
  Description of Artificial Sequence: Synthetic oligonucleotide
aacauaaagacugaaaaca

SEQ ID NO: 1678661 - RNA, 19 nt, Artificial Sequence
  Description of Artificial Sequence: Synthetic oligonucleotide
aaauauaugccaaauacca

SEQ ID NO: 1678662 - RNA, 19 nt, Artificial Sequence
  Description of Artificial Sequence: Synthetic oligonucleotide
uucaaugucuggcacaggg

SEQ ID NO: 1678663 - RNA, 19 nt, Artificial Sequence
  Description of Artificial Sequence: Synthetic oligonucleotide
aauugauaaagacaaacua

SEQ ID NO: 1678664 - RNA, 19 nt, Artificial Sequence
  Description of Artificial Sequence: Synthetic oligonucleotide
cuaaagucaaauauaugcc

SEQ ID NO: 1678665 - RNA, 19 nt, Artificial Sequence
  Description of Artificial Sequence: Synthetic oligonucleotide
auaaagacugaaaacaaac

SEQ ID NO: 1678666 - RNA, 19 nt, Artificial Sequence
  Description of Artificial Sequence: Synthetic oligonucleotide
uugaugagacuuaaaagag

SEQ ID NO: 1678667 - RNA, 19 nt, Artificial Sequence
  Description of Artificial Sequence: Synthetic oligonucleotide
aguuguuucucagaaacgc

SEQ ID NO: 1678668 - RNA, 19 nt, Artificial Sequence
  Description of Artificial Sequence: Synthetic oligonucleotide
aauuaacccaagcuauagg

SEQ ID NO: 1678669 - RNA, 19 nt, Artificial Sequence
  Description of Artificial Sequence: Synthetic oligonucleotide
acacgaagcagucuaaugg

SEQ ID NO: 1678670 - RNA, 19 nt, Artificial Sequence
  Description of Artificial Sequence: Synthetic oligonucleotide
agacaaacuaacuagacaa

SEQ ID NO: 1678671 - RNA, 19 nt, Artificial Sequence
  Description of Artificial Sequence: Synthetic oligonucleotide
ugaaauuaacccaagcuau

SEQ ID NO: 1678672 - RNA, 19 nt, Artificial Sequence
  Description of Artificial Sequence: Synthetic oligonucleotide
uaugccaaauaccaguccc

SEQ ID NO: 1678673 - RNA, 19 nt, Artificial Sequence
  Description of Artificial Sequence: Synthetic oligonucleotide
uuaucugaaaaucccgaag

SEQ ID NO: 1678674 - RNA, 19 nt, Artificial Sequence
  Description of Artificial Sequence: Synthetic oligonucleotide
aagauacaucucuugcagc

SEQ ID NO: 1678675 - RNA, 19 nt, Artificial Sequence
  Description of Artificial Sequence: Synthetic oligonucleotide
acuaacuagacaaagggag

SEQ ID NO: 1678676 - RNA, 19 nt, Artificial Sequence
  Description of Artificial Sequence: Synthetic oligonucleotide
uugaagauacaucucuugc

SEQ ID NO: 1678677 - RNA, 19 nt, Artificial Sequence
  Description of Artificial Sequence: Synthetic oligonucleotide
ugaauugauaaagacaaac

SEQ ID NO: 1678678 - RNA, 19 nt, Artificial Sequence
  Description of Artificial Sequence: Synthetic oligonucleotide
auauaugccaaauaccagu

SEQ ID NO: 1678679 - RNA, 19 nt, Artificial Sequence
  Description of Artificial Sequence: Synthetic oligonucleotide
uaaagacaaacuaacuaga

SEQ ID NO: 1678680 - RNA, 19 nt, Artificial Sequence
  Description of Artificial Sequence: Synthetic oligonucleotide
ucacacucaaguaacuucc

SEQ ID NO: 1678681 - RNA, 19 nt, Artificial Sequence
  Description of Artificial Sequence: Synthetic oligonucleotide
cauuccgacacuuaauuag

SEQ ID NO: 1678682 - RNA, 19 nt, Artificial Sequence
  Description of Artificial Sequence: Synthetic oligonucleotide
gaauugaugagacuuaaaa

SEQ ID NO: 1678683 - RNA, 19 nt, Artificial Sequence
  Description of Artificial Sequence: Synthetic oligonucleotide
aacuucccauuucaaauuc

SEQ ID NO: 1678684 - RNA, 19 nt, Artificial Sequence
  Description of Artificial Sequence: Synthetic oligonucleotide
aaauuaacccaagcuauag

SEQ ID NO: 1678685 - RNA, 19 nt, Artificial Sequence
  Description of Artificial Sequence: Synthetic oligonucleotide
ugcugaauugauaaagaca

SEQ ID NO: 1678686 - RNA, 19 nt, Artificial Sequence
  Description of Artificial Sequence: Synthetic oligonucleotide
aaaucccgaagccauguag

SEQ ID NO: 1678687 - RNA, 19 nt, Artificial Sequence
  Description of Artificial Sequence: Synthetic oligonucleotide
ugaagagugcauuaucuca

SEQ ID NO: 1678688 - RNA, 19 nt, Artificial Sequence
  Description of Artificial Sequence: Synthetic oligonucleotide
ugaucacaggaauugauga

SEQ ID NO: 1678689 - RNA, 19 nt, Artificial Sequence
  Description of Artificial Sequence: Synthetic oligonucleotide
agaaggagcgaucucaucu

SEQ ID NO: 1678690 - RNA, 19 nt, Artificial Sequence
  Description of Artificial Sequence: Synthetic oligonucleotide
uggaacauuucuucuaggc

SEQ ID NO: 1678691 - RNA, 19 nt, Artificial Sequence
  Description of Artificial Sequence: Synthetic oligonucleotide
cauuaucucauuccgacac

SEQ ID NO: 1678692 - RNA, 19 nt, Artificial Sequence
  Description of Artificial Sequence: Synthetic oligonucleotide
gacuuaaaagagcaacugc

SEQ ID NO: 1678693 - RNA, 19 nt, Artificial Sequence
  Description of Artificial Sequence: Synthetic oligonucleotide
uugauuugagaucucuucu

SEQ ID NO: 1678694 - RNA, 19 nt, Artificial Sequence
  Description of Artificial Sequence: Synthetic oligonucleotide
ucugaguuguuucucagaa

SEQ ID NO: 1678695 - RNA, 19 nt, Artificial Sequence
  Description of Artificial Sequence: Synthetic oligonucleotide
ugagacuuaaaagagcaac

SEQ ID NO: 1678696 - RNA, 19 nt, Artificial Sequence
  Description of Artificial Sequence: Synthetic oligonucleotide
ugaugagacuuaaaagagc

SEQ ID NO: 1678697 - RNA, 19 nt, Artificial Sequence
  Description of Artificial Sequence: Synthetic oligonucleotide
auuuugaaucuuuaucuga

SEQ ID NO: 1678698 - RNA, 19 nt, Artificial Sequence
  Description of Artificial Sequence: Synthetic oligonucleotide
aauauaugccaaauaccag

SEQ ID NO: 1678699 - RNA, 19 nt, Artificial Sequence
  Description of Artificial Sequence: Synthetic oligonucleotide
gaagccauguagaugauac

SEQ ID NO: 1678700 - RNA, 19 nt, Artificial Sequence
  Description of Artificial Sequence: Synthetic oligonucleotide
uuccggucaaccaugaagu

SEQ ID NO: 1678701 - RNA, 19 nt, Artificial Sequence
  Description of Artificial Sequence: Synthetic oligonucleotide
agcaauuccauuucaauuu

SEQ ID NO: 1678702 - RNA, 19 nt, Artificial Sequence
  Description of Artificial Sequence: Synthetic oligonucleotide
ucuauucuggaauguacug

SEQ ID NO: 1678703 - RNA, 19 nt, Artificial Sequence
  Description of Artificial Sequence: Synthetic oligonucleotide
uguaaggccauuucugaga

SEQ ID NO: 1678704 - RNA, 19 nt, Artificial Sequence
  Description of Artificial Sequence: Synthetic oligonucleotide
aagccauguagaugauacc

SEQ ID NO: 1678705 - RNA, 19 nt, Artificial Sequence
  Description of Artificial Sequence: Synthetic oligonucleotide
gaugugaugccucaagauc

SEQ ID NO: 1678706 - RNA, 19 nt, Artificial Sequence
  Description of Artificial Sequence: Synthetic oligonucleotide
ucauuuggguucuaaaguc

SEQ ID NO: 1678707 - RNA, 19 nt, Artificial Sequence
  Description of Artificial Sequence: Synthetic oligonucleotide
gaaacuggcgagcucgcgg

SEQ ID NO: 1678708 - RNA, 19 nt, Artificial Sequence
  Description of Artificial Sequence: Synthetic oligonucleotide
uuaacccaagcuauaggca

SEQ ID NO: 1678709 - RNA, 19 nt, Artificial Sequence
  Description of Artificial Sequence: Synthetic oligonucleotide
ucacguuuccacucuaugc

SEQ ID NO: 1678710 - RNA, 19 nt, Artificial Sequence
  Description of Artificial Sequence: Synthetic oligonucleotide
uggaauauucuugaauuca

SEQ ID NO: 1678711 - RNA, 19 nt, Artificial Sequence
  Description of Artificial Sequence: Synthetic oligonucleotide
agucuaauggcaucaccuc

SEQ ID NO: 1678712 - RNA, 19 nt, Artificial Sequence
  Description of Artificial Sequence: Synthetic oligonucleotide
uauaugccaaauaccaguc

SEQ ID NO: 1678713 - RNA, 19 nt, Artificial Sequence
  Description of Artificial Sequence: Synthetic oligonucleotide
ucaaugucuggcacagggg

SEQ ID NO: 1678714 - RNA, 19 nt, Artificial Sequence
  Description of Artificial Sequence: Synthetic oligonucleotide
guagaugauaccuucaucu

SEQ ID NO: 1678715 - RNA, 19 nt, Artificial Sequence
  Description of Artificial Sequence: Synthetic oligonucleotide
gaucacaggaauugaugag

SEQ ID NO: 1678716 - RNA, 19 nt, Artificial Sequence
  Description of Artificial Sequence: Synthetic oligonucleotide
ucuggaggcgacacgaagc

SEQ ID NO: 1678717 - RNA, 19 nt, Artificial Sequence
  Description of Artificial Sequence: Synthetic oligonucleotide
gaugauaccuucaucucug

SEQ ID NO: 1678718 - RNA, 19 nt, Artificial Sequence
  Description of Artificial Sequence: Synthetic oligonucleotide
ucagaaacgcuuuuaccac

SEQ ID NO: 1678719 - RNA, 19 nt, Artificial Sequence
  Description of Artificial Sequence: Synthetic oligonucleotide
cucagcgcaauugagacgc

SEQ ID NO: 1678720 - RNA, 19 nt, Artificial Sequence
  Description of Artificial Sequence: Synthetic oligonucleotide
aauugagacgcgccgccag

SEQ ID NO: 1678721 - RNA, 19 nt, Artificial Sequence
  Description of Artificial Sequence: Synthetic oligonucleotide
uaacccaagcuauaggcac

SEQ ID NO: 1678722 - RNA, 19 nt, Artificial Sequence
  Description of Artificial Sequence: Synthetic oligonucleotide
uacucagcgcaauugagac

SEQ ID NO: 1678723 - RNA, 19 nt, Artificial Sequence
  Description of Artificial Sequence: Synthetic oligonucleotide
acuagacaaagggagaaag

SEQ ID NO: 1678724 - RNA, 19 nt, Artificial Sequence
  Description of Artificial Sequence: Synthetic oligonucleotide
cuuccggucaaccaugaag

SEQ ID NO: 1678725 - RNA, 19 nt, Artificial Sequence
  Description of Artificial Sequence: Synthetic oligonucleotide
ugugacuuucuuccgguca

SEQ ID NO: 1678726 - RNA, 19 nt, Artificial Sequence
  Description of Artificial Sequence: Synthetic oligonucleotide
caagcuauaggcacauuug

SEQ ID NO: 1678727 - RNA, 19 nt, Artificial Sequence
  Description of Artificial Sequence: Synthetic oligonucleotide
agaucucacguuuccacuc

SEQ ID NO: 1678728 - RNA, 19 nt, Artificial Sequence
  Description of Artificial Sequence: Synthetic oligonucleotide
cauggaacauuucuucuag

SEQ ID NO: 1678729 - RNA, 19 nt, Artificial Sequence
  Description of Artificial Sequence: Synthetic oligonucleotide
auuccgacacuuaauuagc

SEQ ID NO: 1678730 - RNA, 19 nt, Artificial Sequence
  Description of Artificial Sequence: Synthetic oligonucleotide
aagaucucacguuuccacu

SEQ ID NO: 1678731 - RNA, 19 nt, Artificial Sequence
  Description of Artificial Sequence: Synthetic oligonucleotide
uuggcuaccucccaagcgu

SEQ ID NO: 1678732 - RNA, 19 nt, Artificial Sequence
  Description of Artificial Sequence: Synthetic oligonucleotide
acacagcaaagucuggagg

SEQ ID NO: 1678733 - RNA, 19 nt, Artificial Sequence
  Description of Artificial Sequence: Synthetic oligonucleotide
ucuaauggcaucaccucaa

SEQ ID NO: 1678734 - RNA, 19 nt, Artificial Sequence
  Description of Artificial Sequence: Synthetic oligonucleotide
uucuggaauguacugcuac

SEQ ID NO: 1678735 - RNA, 19 nt, Artificial Sequence
  Description of Artificial Sequence: Synthetic oligonucleotide
uugaugugaugccucaaga

SEQ ID NO: 1678736 - RNA, 19 nt, Artificial Sequence
  Description of Artificial Sequence: Synthetic oligonucleotide
agaugauaccuucaucucu

SEQ ID NO: 1678737 - RNA, 19 nt, Artificial Sequence
  Description of Artificial Sequence: Synthetic oligonucleotide
aaccaugaagugaucacag

SEQ ID NO: 1678738 - RNA, 19 nt, Artificial Sequence
  Description of Artificial Sequence: Synthetic oligonucleotide
gaaggagagcaccucgcgg

SEQ ID NO: 1678739 - RNA, 19 nt, Artificial Sequence
  Description of Artificial Sequence: Synthetic oligonucleotide
uauaggcacauuugcauuc

SEQ ID NO: 1678740 - RNA, 19 nt, Artificial Sequence
  Description of Artificial Sequence: Synthetic oligonucleotide
acugcaguaagcagucugc

SEQ ID NO: 1678741 - RNA, 19 nt, Artificial Sequence
  Description of Artificial Sequence: Synthetic oligonucleotide
cacgaagcagucuaauggc

SEQ ID NO: 1678742 - RNA, 19 nt, Artificial Sequence
  Description of Artificial Sequence: Synthetic oligonucleotide
cucuaugcacaccugacac

SEQ ID NO: 1678743 - RNA, 19 nt, Artificial Sequence
  Description of Artificial Sequence: Synthetic oligonucleotide
guugaugugaugccucaag

SEQ ID NO: 1678744 - RNA, 19 nt, Artificial Sequence
  Description of Artificial Sequence: Synthetic oligonucleotide
aagucaaauauaugccaaa

SEQ ID NO: 1678745 - RNA, 19 nt, Artificial Sequence
  Description of Artificial Sequence: Synthetic oligonucleotide
ugagaucugaguuguuucu

SEQ ID NO: 1678746 - RNA, 19 nt, Artificial Sequence
  Description of Artificial Sequence: Synthetic oligonucleotide
caagaucucacguuuccac

SEQ ID NO: 1678747 - RNA, 19 nt, Artificial Sequence
  Description of Artificial Sequence: Synthetic oligonucleotide
gaggcugucuagcuucugg

SEQ ID NO: 1678748 - RNA, 19 nt, Artificial Sequence
  Description of Artificial Sequence: Synthetic oligonucleotide
ugaggcugaaacuggcgag

SEQ ID NO: 1678749 - RNA, 19 nt, Artificial Sequence
  Description of Artificial Sequence: Synthetic oligonucleotide
aaauucacauccaucucgu

SEQ ID NO: 1678750 - RNA, 19 nt, Artificial Sequence
  Description of Artificial Sequence: Synthetic oligonucleotide
aacuaacuagacaaaggga

SEQ ID NO: 1678751 - RNA, 19 nt, Artificial Sequence
  Description of Artificial Sequence: Synthetic oligonucleotide
ucagcaauuccauuucaau

SEQ ID NO: 1678752 - RNA, 19 nt, Artificial Sequence
  Description of Artificial Sequence: Synthetic oligonucleotide
agacuuaaaagagcaacug

SEQ ID NO: 1678753 - RNA, 19 nt, Artificial Sequence
  Description of Artificial Sequence: Synthetic oligonucleotide
ucuugaauucauucagaaa

SEQ ID NO: 1678754 - RNA, 19 nt, Artificial Sequence
  Description of Artificial Sequence: Synthetic oligonucleotide
ucuggaauguacugcuaca

SEQ ID NO: 1678755 - RNA, 19 nt, Artificial Sequence
  Description of Artificial Sequence: Synthetic oligonucleotide
acaccugacacugaggcug

SEQ ID NO: 1678756 - RNA, 19 nt, Artificial Sequence
  Description of Artificial Sequence: Synthetic oligonucleotide
gcugaauugauaaagacaa

SEQ ID NO: 1678757 - RNA, 19 nt, Artificial Sequence
  Description of Artificial Sequence: Synthetic oligonucleotide
cuuuaucugaaaaucccga

SEQ ID NO: 1678758 - RNA, 19 nt, Artificial Sequence
  Description of Artificial Sequence: Synthetic oligonucleotide
auugagacgcgccgccagc

SEQ ID NO: 1678759 - RNA, 19 nt, Artificial Sequence
  Description of Artificial Sequence: Synthetic oligonucleotide
gacacgaagcagucuaaug

SEQ ID NO: 1678760 - RNA, 19 nt, Artificial Sequence
  Description of Artificial Sequence: Synthetic oligonucleotide
ucuuucaggugucugucuc

SEQ ID NO: 1678761 - RNA, 19 nt, Artificial Sequence
  Description of Artificial Sequence: Synthetic oligonucleotide
ugaaaaucccgaagccaug

SEQ ID NO: 1678762 - RNA, 19 nt, Artificial Sequence
  Description of Artificial Sequence: Synthetic oligonucleotide
cucaagaucucacguuucc

SEQ ID NO: 1678763 - RNA, 19 nt, Artificial Sequence
  Description of Artificial Sequence: Synthetic oligonucleotide
uucaucucugaagagugca

SEQ ID NO: 1678764 - RNA, 19 nt, Artificial Sequence
  Description of Artificial Sequence: Synthetic oligonucleotide
aacgcuuuuaccacaucca

SEQ ID NO: 1678765 - RNA, 19 nt, Artificial Sequence
  Description of Artificial Sequence: Synthetic oligonucleotide
acguuuccacucuaugcac

SEQ ID NO: 1678766 - RNA, 19 nt, Artificial Sequence
  Description of Artificial Sequence: Synthetic oligonucleotide
gacgaagcccugcaggcag

SEQ ID NO: 1678767 - RNA, 19 nt, Artificial Sequence
  Description of Artificial Sequence: Synthetic oligonucleotide
acauuugcauucauuuggg

SEQ ID NO: 1678768 - RNA, 19 nt, Artificial Sequence
  Description of Artificial Sequence: Synthetic oligonucleotide
ugaugugaugccucaagau

SEQ ID NO: 1678769 - RNA, 19 nt, Artificial Sequence
  Description of Artificial Sequence: Synthetic oligonucleotide
caucacauuccucgggucc

SEQ ID NO: 1678770 - RNA, 19 nt, Artificial Sequence
  Description of Artificial Sequence: Synthetic oligonucleotide
aagucuggaggcgacacga

SEQ ID NO: 1678771 - RNA, 19 nt, Artificial Sequence
  Description of Artificial Sequence: Synthetic oligonucleotide
ugaagugaucacaggaauu

SEQ ID NO: 1678772 - RNA, 19 nt, Artificial Sequence
  Description of Artificial Sequence: Synthetic oligonucleotide
gaauugauaaagacaaacu

SEQ ID NO: 1678773 - RNA, 19 nt, Artificial Sequence
  Description of Artificial Sequence: Synthetic oligonucleotide
uaacuagacaaagggagaa

SEQ ID NO: 1678774 - RNA, 19 nt, Artificial Sequence
  Description of Artificial Sequence: Synthetic oligonucleotide
acgcuuuuaccacauccag

SEQ ID NO: 1678775 - RNA, 19 nt, Artificial Sequence
  Description of Artificial Sequence: Synthetic oligonucleotide
gaguuguuucucagaaacg

SEQ ID NO: 1678776 - RNA, 19 nt, Artificial Sequence
  Description of Artificial Sequence: Synthetic oligonucleotide
cacuuaauuagcucuguga

SEQ ID NO: 1678777 - RNA, 19 nt, Artificial Sequence
  Description of Artificial Sequence: Synthetic oligonucleotide
caguuuugagaacacagca

SEQ ID NO: 1678778 - RNA, 19 nt, Artificial Sequence
  Description of Artificial Sequence: Synthetic oligonucleotide
guaacuucccauuucaaau

SEQ ID NO: 1678779 - RNA, 19 nt, Artificial Sequence
  Description of Artificial Sequence: Synthetic oligonucleotide
cugagaucugaguuguuuc

SEQ ID NO: 1678780 - RNA, 19 nt, Artificial Sequence
  Description of Artificial Sequence: Synthetic oligonucleotide
cagggguugauacugugug

SEQ ID NO: 1678781 - RNA, 19 nt, Artificial Sequence
  Description of Artificial Sequence: Synthetic oligonucleotide
ugcaucgggaaccgccgcg

SEQ ID NO: 1678782 - RNA, 19 nt, Artificial Sequence
  Description of Artificial Sequence: Synthetic oligonucleotide
uguuucucagaaacgcuuu

SEQ ID NO: 1678783 - RNA, 19 nt, Artificial Sequence
  Description of Artificial Sequence: Synthetic oligonucleotide
guagauggaggcugucuag

SEQ ID NO: 1678784 - RNA, 19 nt, Artificial Sequence
  Description of Artificial Sequence: Synthetic oligonucleotide
gugugugcugaauugauaa

SEQ ID NO: 1678785 - RNA, 19 nt, Artificial Sequence
  Description of Artificial Sequence: Synthetic oligonucleotide
aggugucugucucucauca

SEQ ID NO: 1678786 - RNA, 19 nt, Artificial Sequence
  Description of Artificial Sequence: Synthetic oligonucleotide
gagcucgcggguugcaucg

SEQ ID NO: 1678787 - RNA, 19 nt, Artificial Sequence
  Description of Artificial Sequence: Synthetic oligonucleotide
uaacuucccauuucaaauu

SEQ ID NO: 1678788 - RNA, 19 nt, Artificial Sequence
  Description of Artificial Sequence: Synthetic oligonucleotide
cuaacuagacaaagggaga

SEQ ID NO: 1678789 - RNA, 19 nt, Artificial Sequence
  Description of Artificial Sequence: Synthetic oligonucleotide
uuggcauggaacauuucuu

SEQ ID NO: 1678790 - RNA, 19 nt, Artificial Sequence
  Description of Artificial Sequence: Synthetic oligonucleotide
aguccucgaggcaugaagg

SEQ ID NO: 1678791 - RNA, 19 nt, Artificial Sequence
  Description of Artificial Sequence: Synthetic oligonucleotide
gugcugaauugauaaagac

SEQ ID NO: 1678792 - RNA, 19 nt, Artificial Sequence
  Description of Artificial Sequence: Synthetic oligonucleotide
agcgcaauugagacgcgcc

SEQ ID NO: 1678793 - RNA, 19 nt, Artificial Sequence
  Description of Artificial Sequence: Synthetic oligonucleotide
gaauguacugcuacaaucu

SEQ ID NO: 1678794 - RNA, 19 nt, Artificial Sequence
  Description of Artificial Sequence: Synthetic oligonucleotide
cuucuaggcaguuuugaga

SEQ ID NO: 1678795 - RNA, 19 nt, Artificial Sequence
  Description of Artificial Sequence: Synthetic oligonucleotide
uggauuuggcucacacuca

SEQ ID NO: 1678796 - RNA, 19 nt, Artificial Sequence
  Description of Artificial Sequence: Synthetic oligonucleotide
ugaugccucaagaucucac

SEQ ID NO: 1678797 - RNA, 19 nt, Artificial Sequence
  Description of Artificial Sequence: Synthetic oligonucleotide
acucuaugcacaccugaca

SEQ ID NO: 1678798 - RNA, 19 nt, Artificial Sequence
  Description of Artificial Sequence: Synthetic oligonucleotide
ucucauuccgacacuuaau

SEQ ID NO: 1678799 - RNA, 19 nt, Artificial Sequence
  Description of Artificial Sequence: Synthetic oligonucleotide
augcacaccugacacugag

SEQ ID NO: 1678800 - RNA, 19 nt, Artificial Sequence
  Description of Artificial Sequence: Synthetic oligonucleotide
aggagaaggagcgaucuca

SEQ ID NO: 1678801 - RNA, 19 nt, Artificial Sequence
  Description of Artificial Sequence: Synthetic oligonucleotide
cacguuuccacucuaugca

SEQ ID NO: 1678802 - RNA, 19 nt, Artificial Sequence
  Description of Artificial Sequence: Synthetic oligonucleotide
gugaucacaggaauugaug

SEQ ID NO: 1678803 - RNA, 19 nt, Artificial Sequence
  Description of Artificial Sequence: Synthetic oligonucleotide
uggaauguacugcuacaau

SEQ ID NO: 1678804 - RNA, 19 nt, Artificial Sequence
  Description of Artificial Sequence: Synthetic oligonucleotide
cuggcacagggguugauac

SEQ ID NO: 1678805 - RNA, 19 nt, Artificial Sequence
  Description of Artificial Sequence: Synthetic oligonucleotide
auuaucucauuccgacacu

SEQ ID NO: 1678806 - RNA, 19 nt, Artificial Sequence
  Description of Artificial Sequence: Synthetic oligonucleotide
acucagcgcaauugagacg

SEQ ID NO: 1678807 - RNA, 19 nt, Artificial Sequence
  Description of Artificial Sequence: Synthetic oligonucleotide
uuccgacacuuaauuagcu

SEQ ID NO: 1678808 - RNA, 19 nt, Artificial Sequence
  Description of Artificial Sequence: Synthetic oligonucleotide
uugauacugugugugcuga

SEQ ID NO: 1678809 - RNA, 19 nt, Artificial Sequence
  Description of Artificial Sequence: Synthetic oligonucleotide
ugcuacaaucucuggaaua

SEQ ID NO: 1678810 - RNA, 19 nt, Artificial Sequence
  Description of Artificial Sequence: Synthetic oligonucleotide
ugcaguaagcagucugcga

SEQ ID NO: 1678811 - RNA, 19 nt, Artificial Sequence
  Description of Artificial Sequence: Synthetic oligonucleotide
uuuuguacucagcgcaauu

SEQ ID NO: 1678812 - RNA, 19 nt, Artificial Sequence
  Description of Artificial Sequence: Synthetic oligonucleotide
ucugcgauggaaggagagc

SEQ ID NO: 1678813 - RNA, 19 nt, Artificial Sequence
  Description of Artificial Sequence: Synthetic oligonucleotide
cacucuaugcacaccugac

SEQ ID NO: 1678814 - RNA, 19 nt, Artificial Sequence
  Description of Artificial Sequence: Synthetic oligonucleotide
guugcaucgggaaccgccg

SEQ ID NO: 1678815 - RNA, 19 nt, Artificial Sequence
  Description of Artificial Sequence: Synthetic oligonucleotide
ucugagaucugaguuguuu

SEQ ID NO: 1678816 - RNA, 19 nt, Artificial Sequence
  Description of Artificial Sequence: Synthetic oligonucleotide
ugcacgucuccauuucugu

SEQ ID NO: 1678817 - RNA, 19 nt, Artificial Sequence
  Description of Artificial Sequence: Synthetic oligonucleotide
uccgacacuuaauuagcuc

SEQ ID NO: 1678818 - RNA, 19 nt, Artificial Sequence
  Description of Artificial Sequence: Synthetic oligonucleotide
cuagacaaagggagaaaga

SEQ ID NO: 1678819 - RNA, 19 nt, Artificial Sequence
  Description of Artificial Sequence: Synthetic oligonucleotide
ucaagaucucacguuucca

SEQ ID NO: 1678820 - RNA, 19 nt, Artificial Sequence
  Description of Artificial Sequence: Synthetic oligonucleotide
ggaacauuucuucuaggca

SEQ ID NO: 1678821 - RNA, 19 nt, Artificial Sequence
  Description of Artificial Sequence: Synthetic oligonucleotide
ugugaugccucaagaucuc

SEQ ID NO: 1678822 - RNA, 19 nt, Artificial Sequence
  Description of Artificial Sequence: Synthetic oligonucleotide
ugugugcugaauugauaaa

SEQ ID NO: 1678823 - RNA, 19 nt, Artificial Sequence
  Description of Artificial Sequence: Synthetic oligonucleotide
acacucaaguaacuuccca

SEQ ID NO: 1678824 - RNA, 19 nt, Artificial Sequence
  Description of Artificial Sequence: Synthetic oligonucleotide
aagugaucacaggaauuga

SEQ ID NO: 1678825 - RNA, 19 nt, Artificial Sequence
  Description of Artificial Sequence: Synthetic oligonucleotide
cuaauggcaucaccucaag

SEQ ID NO: 1678826 - RNA, 19 nt, Artificial Sequence
  Description of Artificial Sequence: Synthetic oligonucleotide
cacacucaaguaacuuccc

SEQ ID NO: 1678827 - RNA, 19 nt, Artificial Sequence
  Description of Artificial Sequence: Synthetic oligonucleotide
ggagcgaucucaucuuugc

SEQ ID NO: 1678828 - RNA, 19 nt, Artificial Sequence
  Description of Artificial Sequence: Synthetic oligonucleotide
aggcaugaaggccuuggcu

SEQ ID NO: 1678829 - RNA, 19 nt, Artificial Sequence
  Description of Artificial Sequence: Synthetic oligonucleotide
cuuggcauggaacauuucu

SEQ ID NO: 1678830 - RNA, 19 nt, Artificial Sequence
  Description of Artificial Sequence: Synthetic oligonucleotide
cauccaguugauuugagau

SEQ ID NO: 1678831 - RNA, 19 nt, Artificial Sequence
  Description of Artificial Sequence: Synthetic oligonucleotide
ugaaacuggcgagcucgcg

SEQ ID NO: 1678832 - RNA, 19 nt, Artificial Sequence
  Description of Artificial Sequence: Synthetic oligonucleotide
aucuagucugcagagucca

SEQ ID NO: 1678833 - RNA, 19 nt, Artificial Sequence
  Description of Artificial Sequence: Synthetic oligonucleotide
aaaaucccgaagccaugua

SEQ ID NO: 1678834 - RNA, 19 nt, Artificial Sequence
  Description of Artificial Sequence: Synthetic oligonucleotide
cauguagaugauaccuuca

SEQ ID NO: 1678835 - RNA, 19 nt, Artificial Sequence
  Description of Artificial Sequence: Synthetic oligonucleotide
cagucugcgauggaaggag

SEQ ID NO: 1678836 - RNA, 19 nt, Artificial Sequence
  Description of Artificial Sequence: Synthetic oligonucleotide
guugggaccaaggccgggg

SEQ ID NO: 1678837 - RNA, 19 nt, Artificial Sequence
  Description of Artificial Sequence: Synthetic oligonucleotide
gaggcaugaaggccuuggc

SEQ ID NO: 1678838 - RNA, 19 nt, Artificial Sequence
  Description of Artificial Sequence: Synthetic oligonucleotide
uuaucucauuccgacacuu

SEQ ID NO: 1678839 - RNA, 19 nt, Artificial Sequence
  Description of Artificial Sequence: Synthetic oligonucleotide
aacuagacaaagggagaaa

SEQ ID NO: 1678840 - RNA, 19 nt, Artificial Sequence
  Description of Artificial Sequence: Synthetic oligonucleotide
gacuuucuuccggucaacc

SEQ ID NO: 1678841 - RNA, 19 nt, Artificial Sequence
  Description of Artificial Sequence: Synthetic oligonucleotide
uccacucuaugcacaccug

SEQ ID NO: 1678842 - RNA, 19 nt, Artificial Sequence
  Description of Artificial Sequence: Synthetic oligonucleotide
ugcgauggaaggagagcac

SEQ ID NO: 1678843 - RNA, 19 nt, Artificial Sequence
  Description of Artificial Sequence: Synthetic oligonucleotide
guacugcuacaaucucugg

SEQ ID NO: 1678844 - RNA, 19 nt, Artificial Sequence
  Description of Artificial Sequence: Synthetic oligonucleotide
cccgaagccauguagauga

SEQ ID NO: 1678845 - RNA, 19 nt, Artificial Sequence
  Description of Artificial Sequence: Synthetic oligonucleotide
agcaaagucuggaggcgac

SEQ ID NO: 1678846 - RNA, 19 nt, Artificial Sequence
  Description of Artificial Sequence: Synthetic oligonucleotide
ucccaagcguccacaggcc

SEQ ID NO: 1678847 - RNA, 19 nt, Artificial Sequence
  Description of Artificial Sequence: Synthetic oligonucleotide
ucgggaaccgccgcggcag

SEQ ID NO: 1678848 - RNA, 19 nt, Artificial Sequence
  Description of Artificial Sequence: Synthetic oligonucleotide
agcuauaggcacauuugca

SEQ ID NO: 1678849 - RNA, 19 nt, Artificial Sequence
  Description of Artificial Sequence: Synthetic oligonucleotide
cagugcccugccuucaccc

SEQ ID NO: 1678850 - RNA, 19 nt, Artificial Sequence
  Description of Artificial Sequence: Synthetic oligonucleotide
uaucucauuccgacacuua

SEQ ID NO: 1678851 - RNA, 19 nt, Artificial Sequence
  Description of Artificial Sequence: Synthetic oligonucleotide
aauucacauccaucucguu

SEQ ID NO: 1678852 - RNA, 19 nt, Artificial Sequence
  Description of Artificial Sequence: Synthetic oligonucleotide
ucucugaagagugcauuau

SEQ ID NO: 1678853 - RNA, 19 nt, Artificial Sequence
  Description of Artificial Sequence: Synthetic oligonucleotide
cugcaguaagcagucugcg

SEQ ID NO: 1678854 - RNA, 19 nt, Artificial Sequence
  Description of Artificial Sequence: Synthetic oligonucleotide
gagacgcgccgccagcucc

SEQ ID NO: 1678855 - RNA, 19 nt, Artificial Sequence
  Description of Artificial Sequence: Synthetic oligonucleotide
uccggucaaccaugaagug

SEQ ID NO: 1678856 - RNA, 19 nt, Artificial Sequence
  Description of Artificial Sequence: Synthetic oligonucleotide
gcaguuuccccagugcacg

SEQ ID NO: 1678857 - RNA, 19 nt, Artificial Sequence
  Description of Artificial Sequence: Synthetic oligonucleotide
aaggagcgaucucaucuuu

SEQ ID NO: 1678858 - RNA, 19 nt, Artificial Sequence
  Description of Artificial Sequence: Synthetic oligonucleotide
agcuccgacaacaccaugu

SEQ ID NO: 1678859 - RNA, 19 nt, Artificial Sequence
  Description of Artificial Sequence: Synthetic oligonucleotide
agugaucacaggaauugau

SEQ ID NO: 1678860 - RNA, 19 nt, Artificial Sequence
  Description of Artificial Sequence: Synthetic oligonucleotide
gauuuggcucacacucaag

SEQ ID NO: 1678861 - RNA, 19 nt, Artificial Sequence
  Description of Artificial Sequence: Synthetic oligonucleotide
ucucacguuuccacucuau

SEQ ID NO: 1678862 - RNA, 19 nt, Artificial Sequence
  Description of Artificial Sequence: Synthetic oligonucleotide
guccucgaggcaugaaggc

SEQ ID NO: 1678863 - RNA, 19 nt, Artificial Sequence
  Description of Artificial Sequence: Synthetic oligonucleotide
ucuaggcaguuuugagaac

SEQ ID NO: 1678864 - RNA, 19 nt, Artificial Sequence
  Description of Artificial Sequence: Synthetic oligonucleotide
aggaauugaugagacuuaa

SEQ ID NO: 1678865 - RNA, 19 nt, Artificial Sequence
  Description of Artificial Sequence: Synthetic oligonucleotide
gguugcaucgggaaccgcc

SEQ ID NO: 1678866 - RNA, 19 nt, Artificial Sequence
  Description of Artificial Sequence: Synthetic oligonucleotide
gguucuaaagucaaauaua

SEQ ID NO: 1678867 - RNA, 19 nt, Artificial Sequence
  Description of Artificial Sequence: Synthetic oligonucleotide
cugaggcugaaacuggcga

SEQ ID NO: 1678868 - RNA, 19 nt, Artificial Sequence
  Description of Artificial Sequence: Synthetic oligonucleotide
ucagcgcaauugagacgcg

SEQ ID NO: 1678869 - RNA, 19 nt, Artificial Sequence
  Description of Artificial Sequence: Synthetic oligonucleotide
cauuucuguugaugugaug

SEQ ID NO: 1678870 - RNA, 19 nt, Artificial Sequence
  Description of Artificial Sequence: Synthetic oligonucleotide
aaggccggggacugcagua

SEQ ID NO: 1678871 - RNA, 19 nt, Artificial Sequence
  Description of Artificial Sequence: Synthetic oligonucleotide
ccaucuagucugcagaguc

SEQ ID NO: 1678872 - RNA, 19 nt, Artificial Sequence
  Description of Artificial Sequence: Synthetic oligonucleotide
aggccaggccggcaguuuc

SEQ ID NO: 1678873 - RNA, 19 nt, Artificial Sequence
  Description of Artificial Sequence: Synthetic oligonucleotide
gaaaaucccgaagccaugu

SEQ ID NO: 1678874 - RNA, 19 nt, Artificial Sequence
  Description of Artificial Sequence: Synthetic oligonucleotide
gccgacgaagcccugcagg

SEQ ID NO: 1678875 - RNA, 19 nt, Artificial Sequence
  Description of Artificial Sequence: Synthetic oligonucleotide
auaggcacauuugcauuca

SEQ ID NO: 1678876 - RNA, 19 nt, Artificial Sequence
  Description of Artificial Sequence: Synthetic oligonucleotide
ggcaugaaggccuuggcua

SEQ ID NO: 1678877 - RNA, 19 nt, Artificial Sequence
  Description of Artificial Sequence: Synthetic oligonucleotide
ggguucuaaagucaaauau

SEQ ID NO: 1678878 - RNA, 19 nt, Artificial Sequence
  Description of Artificial Sequence: Synthetic oligonucleotide
uccucguuugucugccagu

SEQ ID NO: 1678879 - RNA, 19 nt, Artificial Sequence
  Description of Artificial Sequence: Synthetic oligonucleotide
aucccgaagccauguagau

SEQ ID NO: 1678880 - RNA, 19 nt, Artificial Sequence
  Description of Artificial Sequence: Synthetic oligonucleotide
ucggguccucguuugucug

SEQ ID NO: 1678881 - RNA, 19 nt, Artificial Sequence
  Description of Artificial Sequence: Synthetic oligonucleotide
cugcuugaagauacaucuc

SEQ ID NO: 1678882 - RNA, 19 nt, Artificial Sequence
  Description of Artificial Sequence: Synthetic oligonucleotide
gcaauugagacgcgccgcc

SEQ ID NO: 1678883 - RNA, 19 nt, Artificial Sequence
  Description of Artificial Sequence: Synthetic oligonucleotide
augauaccuucaucucuga

SEQ ID NO: 1678884 - RNA, 19 nt, Artificial Sequence
  Description of Artificial Sequence: Synthetic oligonucleotide
uugcaucgggaaccgccgc

SEQ ID NO: 1678885 - RNA, 19 nt, Artificial Sequence
  Description of Artificial Sequence: Synthetic oligonucleotide
cugcgauggaaggagagca

SEQ ID NO: 1678886 - RNA, 19 nt, Artificial Sequence
  Description of Artificial Sequence: Synthetic oligonucleotide
cucguuugucugccagucc

SEQ ID NO: 1678887 - RNA, 19 nt, Artificial Sequence
  Description of Artificial Sequence: Synthetic oligonucleotide
cacagggguugauacugug

SEQ ID NO: 1678888 - RNA, 19 nt, Artificial Sequence
  Description of Artificial Sequence: Synthetic oligonucleotide
ucccgaagccauguagaug

SEQ ID NO: 1678889 - RNA, 19 nt, Artificial Sequence
  Description of Artificial Sequence: Synthetic oligonucleotide
gucugcgauggaaggagag

SEQ ID NO: 1678890 - RNA, 19 nt, Artificial Sequence
  Description of Artificial Sequence: Synthetic oligonucleotide
gagaaggagcgaucucauc

SEQ ID NO: 1678891 - RNA, 19 nt, Artificial Sequence
  Description of Artificial Sequence: Synthetic oligonucleotide
aguuuccccagugcacguc

SEQ ID NO: 1678892 - RNA, 19 nt, Artificial Sequence
  Description of Artificial Sequence: Synthetic oligonucleotide
cuggaggcgacacgaagca

SEQ ID NO: 1678893 - RNA, 19 nt, Artificial Sequence
  Description of Artificial Sequence: Synthetic oligonucleotide
ugauacugugugugcugaa

SEQ ID NO: 1678894 - RNA, 19 nt, Artificial Sequence
  Description of Artificial Sequence: Synthetic oligonucleotide
agcaccucgcggccgacga

SEQ ID NO: 1678895 - RNA, 19 nt, Artificial Sequence
  Description of Artificial Sequence: Synthetic oligonucleotide
gcgcaauugagacgcgccg

SEQ ID NO: 1678896 - RNA, 19 nt, Artificial Sequence
  Description of Artificial Sequence: Synthetic oligonucleotide
cuucuguaaggccauuucu

SEQ ID NO: 1678897 - RNA, 19 nt, Artificial Sequence
  Description of Artificial Sequence: Synthetic oligonucleotide
gucagaugucaacagcugu

SEQ ID NO: 1678898 - RNA, 19 nt, Artificial Sequence
  Description of Artificial Sequence: Synthetic oligonucleotide
cuguugaugugaugccuca

SEQ ID NO: 1678899 - RNA, 19 nt, Artificial Sequence
  Description of Artificial Sequence: Synthetic oligonucleotide
ucuggcacagggguugaua

SEQ ID NO: 1678900 - RNA, 19 nt, Artificial Sequence
  Description of Artificial Sequence: Synthetic oligonucleotide
gaucucacguuuccacucu

SEQ ID NO: 1678901 - RNA, 19 nt, Artificial Sequence
  Description of Artificial Sequence: Synthetic oligonucleotide
ucuagucugcagaguccau

SEQ ID NO: 1678902 - RNA, 19 nt, Artificial Sequence
  Description of Artificial Sequence: Synthetic oligonucleotide
ggguugauacugugugugc

SEQ ID NO: 1678903 - RNA, 19 nt, Artificial Sequence
  Description of Artificial Sequence: Synthetic oligonucleotide
uguugaugugaugccucaa

SEQ ID NO: 1678904 - RNA, 19 nt, Artificial Sequence
  Description of Artificial Sequence: Synthetic oligonucleotide
ucgcggccgacgaagcccu

SEQ ID NO: 1678905 - RNA, 19 nt, Artificial Sequence
  Description of Artificial Sequence: Synthetic oligonucleotide
cucauuccgacacuuaauu

SEQ ID NO: 1678906 - RNA, 19 nt, Artificial Sequence
  Description of Artificial Sequence: Synthetic oligonucleotide
cugaauugauaaagacaaa

SEQ ID NO: 1678907 - RNA, 19 nt, Artificial Sequence
  Description of Artificial Sequence: Synthetic oligonucleotide
ucaccucaagccucucuuu

SEQ ID NO: 1678908 - RNA, 19 nt, Artificial Sequence
  Description of Artificial Sequence: Synthetic oligonucleotide
uugagacgcgccgccagcu

SEQ ID NO: 1678909 - RNA, 19 nt, Artificial Sequence
  Description of Artificial Sequence: Synthetic oligonucleotide
gaaggagcgaucucaucuu

SEQ ID NO: 1678910 - RNA, 19 nt, Artificial Sequence
  Description of Artificial Sequence: Synthetic oligonucleotide
cuggaauguacugcuacaa

SEQ ID NO: 1678911 - RNA, 19 nt, Artificial Sequence
  Description of Artificial Sequence: Synthetic oligonucleotide
gguggcguugggaccaagg

SEQ ID NO: 1678912 - RNA, 19 nt, Artificial Sequence
  Description of Artificial Sequence: Synthetic oligonucleotide
ucgcggguugcaucgggaa

SEQ ID NO: 1678913 - RNA, 19 nt, Artificial Sequence
  Description of Artificial Sequence: Synthetic oligonucleotide
cagugcacgucuccauuuc

SEQ ID NO: 1678914 - RNA, 19 nt, Artificial Sequence
  Description of Artificial Sequence: Synthetic oligonucleotide
gcaguaagcagucugcgau

SEQ ID NO: 1678915 - RNA, 19 nt, Artificial Sequence
  Description of Artificial Sequence: Synthetic oligonucleotide
gaggcgacacgaagcaguc

SEQ ID NO: 1678916 - RNA, 19 nt, Artificial Sequence
  Description of Artificial Sequence: Synthetic oligonucleotide
ggcgacacgaagcagucua

SEQ ID NO: 1678917 - RNA, 19 nt, Artificial Sequence
  Description of Artificial Sequence: Synthetic oligonucleotide
ccgacgaagcccugcaggc

SEQ ID NO: 1678918 - RNA, 19 nt, Artificial Sequence
  Description of Artificial Sequence: Synthetic oligonucleotide
caggccggcaguuucccca

SEQ ID NO: 1678919 - RNA, 19 nt, Artificial Sequence
  Description of Artificial Sequence: Synthetic oligonucleotide
ggauuuggcucacacucaa

SEQ ID NO: 1678920 - RNA, 19 nt, Artificial Sequence
  Description of Artificial Sequence: Synthetic oligonucleotide
aggagcgaucucaucuuug

SEQ ID NO: 1678921 - RNA, 19 nt, Artificial Sequence
  Description of Artificial Sequence: Synthetic oligonucleotide
caggugucugucucucauc

SEQ ID NO: 1678922 - RNA, 19 nt, Artificial Sequence
  Description of Artificial Sequence: Synthetic oligonucleotide
uggaggcgacacgaagcag

SEQ ID NO: 1678923 - RNA, 19 nt, Artificial Sequence
  Description of Artificial Sequence: Synthetic oligonucleotide
ggugucugucucucaucag

SEQ ID NO: 1678924 - RNA, 19 nt, Artificial Sequence
  Description of Artificial Sequence: Synthetic oligonucleotide
aucgggaaccgccgcggca

SEQ ID NO: 1678925 - RNA, 19 nt, Artificial Sequence
  Description of Artificial Sequence: Synthetic oligonucleotide
ugacuuucuuccggucaac

SEQ ID NO: 1678926 - RNA, 19 nt, Artificial Sequence
  Description of Artificial Sequence: Synthetic oligonucleotide
gagagcaccucgcggccga

SEQ ID NO: 1678927 - RNA, 19 nt, Artificial Sequence
  Description of Artificial Sequence: Synthetic oligonucleotide
cauggauuuggcucacacu

SEQ ID NO: 1678928 - RNA, 19 nt, Artificial Sequence
  Description of Artificial Sequence: Synthetic oligonucleotide
acauuccucggguccucgu

SEQ ID NO: 1678929 - RNA, 19 nt, Artificial Sequence
  Description of Artificial Sequence: Synthetic oligonucleotide
gcauuaucucauuccgaca

SEQ ID NO: 1678930 - RNA, 19 nt, Artificial Sequence
  Description of Artificial Sequence: Synthetic oligonucleotide
gcggguugcaucgggaacc

SEQ ID NO: 1678931 - RNA, 19 nt, Artificial Sequence
  Description of Artificial Sequence: Synthetic oligonucleotide
cugaguuguuucucagaaa

SEQ ID NO: 1678932 - RNA, 19 nt, Artificial Sequence
  Description of Artificial Sequence: Synthetic oligonucleotide
gcgauggaaggagagcacc

SEQ ID NO: 1678933 - RNA, 19 nt, Artificial Sequence
  Description of Artificial Sequence: Synthetic oligonucleotide
cuggcgagcucgcggguug

SEQ ID NO: 1678934 - RNA, 19 nt, Artificial Sequence
  Description of Artificial Sequence: Synthetic oligonucleotide
caccucgcggccgacgaag

SEQ ID NO: 1678935 - RNA, 19 nt, Artificial Sequence
  Description of Artificial Sequence: Synthetic oligonucleotide
aggcaguuuugagaacaca

SEQ ID NO: 1678936 - RNA, 19 nt, Artificial Sequence
  Description of Artificial Sequence: Synthetic oligonucleotide
cacauuccucggguccucg

SEQ ID NO: 1678937 - RNA, 19 nt, Artificial Sequence
  Description of Artificial Sequence: Synthetic oligonucleotide
aaccgccgcggcagguggc

SEQ ID NO: 1678938 - RNA, 19 nt, Artificial Sequence
  Description of Artificial Sequence: Synthetic oligonucleotide
cagcgcaauugagacgcgc

SEQ ID NO: 1678939 - RNA, 19 nt, Artificial Sequence
  Description of Artificial Sequence: Synthetic oligonucleotide
augagacuuaaaagagcaa

SEQ ID NO: 1678940 - RNA, 19 nt, Artificial Sequence
  Description of Artificial Sequence: Synthetic oligonucleotide
uucauggauuuggcucaca

SEQ ID NO: 1678941 - RNA, 19 nt, Artificial Sequence
  Description of Artificial Sequence: Synthetic oligonucleotide
cuaccucccaagcguccac

SEQ ID NO: 1678942 - RNA, 19 nt, Artificial Sequence
  Description of Artificial Sequence: Synthetic oligonucleotide
guuuccccagugcacgucu

SEQ ID NO: 1678943 - RNA, 19 nt, Artificial Sequence
  Description of Artificial Sequence: Synthetic oligonucleotide
ccgacacuuaauuagcucu

SEQ ID NO: 1678944 - RNA, 19 nt, Artificial Sequence
  Description of Artificial Sequence: Synthetic oligonucleotide
uccucggguccucguuugu

SEQ ID NO: 1678945 - RNA, 19 nt, Artificial Sequence
  Description of Artificial Sequence: Synthetic oligonucleotide
gcaaccaggaaaugaaauu

SEQ ID NO: 1678946 - RNA, 19 nt, Artificial Sequence
  Description of Artificial Sequence: Synthetic oligonucleotide
ggaauauucuugaauucau

SEQ ID NO: 1678947 - RNA, 19 nt, Artificial Sequence
  Description of Artificial Sequence: Synthetic oligonucleotide
gcuacaaucucuggaauau

SEQ ID NO: 1678948 - RNA, 19 nt, Artificial Sequence
  Description of Artificial Sequence: Synthetic oligonucleotide
cucaaguaacuucccauuu

SEQ ID NO: 1678949 - RNA, 19 nt, Artificial Sequence
  Description of Artificial Sequence: Synthetic oligonucleotide
guaagcagucugcgaugga

SEQ ID NO: 1678950 - RNA, 19 nt, Artificial Sequence
  Description of Artificial Sequence: Synthetic oligonucleotide
aucucacguuuccacucua

SEQ ID NO: 1678951 - RNA, 19 nt, Artificial Sequence
  Description of Artificial Sequence: Synthetic oligonucleotide
cagcuguucuauucuggaa

SEQ ID NO: 1678952 - RNA, 19 nt, Artificial Sequence
  Description of Artificial Sequence: Synthetic oligonucleotide
cauuugcauucauuugggu

SEQ ID NO: 1678953 - RNA, 19 nt, Artificial Sequence
  Description of Artificial Sequence: Synthetic oligonucleotide
agacgcgccgccagcuccg

SEQ ID NO: 1678954 - RNA, 19 nt, Artificial Sequence
  Description of Artificial Sequence: Synthetic oligonucleotide
agccucucuuucagguguc

SEQ ID NO: 1678955 - RNA, 19 nt, Artificial Sequence
  Description of Artificial Sequence: Synthetic oligonucleotide
ugucuggcacagggguuga

SEQ ID NO: 1678956 - RNA, 19 nt, Artificial Sequence
  Description of Artificial Sequence: Synthetic oligonucleotide
uucugagaucugaguuguu

SEQ ID NO: 1678957 - RNA, 19 nt, Artificial Sequence
  Description of Artificial Sequence: Synthetic oligonucleotide
acauuucuucuaggcaguu

SEQ ID NO: 1678958 - RNA, 19 nt, Artificial Sequence
  Description of Artificial Sequence: Synthetic oligonucleotide
ccucaagaucucacguuuc

SEQ ID NO: 1678959 - RNA, 19 nt, Artificial Sequence
  Description of Artificial Sequence: Synthetic oligonucleotide
gguugauacugugugugcu

SEQ ID NO: 1678960 - RNA, 19 nt, Artificial Sequence
  Description of Artificial Sequence: Synthetic oligonucleotide
cacagcccagucagauguc

SEQ ID NO: 1678961 - RNA, 19 nt, Artificial Sequence
  Description of Artificial Sequence: Synthetic oligonucleotide
agucugcgauggaaggaga

SEQ ID NO: 1678962 - RNA, 19 nt, Artificial Sequence
  Description of Artificial Sequence: Synthetic oligonucleotide
caguugauuugagaucucu

SEQ ID NO: 1678963 - RNA, 19 nt, Artificial Sequence
  Description of Artificial Sequence: Synthetic oligonucleotide
cugugugugcugaauugau

SEQ ID NO: 1678964 - RNA, 19 nt, Artificial Sequence
  Description of Artificial Sequence: Synthetic oligonucleotide
cagcaaagucuggaggcga

SEQ ID NO: 1678965 - RNA, 19 nt, Artificial Sequence
  Description of Artificial Sequence: Synthetic oligonucleotide
ggggacugcaguaagcagu

SEQ ID NO: 1678966 - RNA, 19 nt, Artificial Sequence
  Description of Artificial Sequence: Synthetic oligonucleotide
cucgcggguugcaucggga

SEQ ID NO: 1678967 - RNA, 19 nt, Artificial Sequence
  Description of Artificial Sequence: Synthetic oligonucleotide
caccugacacugaggcuga

SEQ ID NO: 1678968 - RNA, 19 nt, Artificial Sequence
  Description of Artificial Sequence: Synthetic oligonucleotide
ggaauugaugagacuuaaa

SEQ ID NO: 1678969 - RNA, 19 nt, Artificial Sequence
  Description of Artificial Sequence: Synthetic oligonucleotide
ggaggcgacacgaagcagu

SEQ ID NO: 1678970 - RNA, 19 nt, Artificial Sequence
  Description of Artificial Sequence: Synthetic oligonucleotide
gcucgcggguugcaucggg

SEQ ID NO: 1678971 - RNA, 19 nt, Artificial Sequence
  Description of Artificial Sequence: Synthetic oligonucleotide
auucuggaauguacugcua

SEQ ID NO: 1678972 - RNA, 19 nt, Artificial Sequence
  Description of Artificial Sequence: Synthetic oligonucleotide
ccucguuugucugccaguc

SEQ ID NO: 1678973 - RNA, 19 nt, Artificial Sequence
  Description of Artificial Sequence: Synthetic oligonucleotide
gccgccagcuccgacaaca

SEQ ID NO: 1678974 - RNA, 19 nt, Artificial Sequence
  Description of Artificial Sequence: Synthetic oligonucleotide
agagcaccucgcggccgac

SEQ ID NO: 1678975 - RNA, 19 nt, Artificial Sequence
  Description of Artificial Sequence: Synthetic oligonucleotide
ccacucuaugcacaccuga

SEQ ID NO: 1678976 - RNA, 19 nt, Artificial Sequence
  Description of Artificial Sequence: Synthetic oligonucleotide
ucgaggcaugaaggccuug

SEQ ID NO: 1678977 - RNA, 19 nt, Artificial Sequence
  Description of Artificial Sequence: Synthetic oligonucleotide
gccggcaguuuccccagug

SEQ ID NO: 1678978 - RNA, 19 nt, Artificial Sequence
  Description of Artificial Sequence: Synthetic oligonucleotide
cagcuccgacaacaccaug

SEQ ID NO: 1678979 - RNA, 19 nt, Artificial Sequence
  Description of Artificial Sequence: Synthetic oligonucleotide
agcucgcggguugcaucgg

SEQ ID NO: 1678980 - RNA, 19 nt, Artificial Sequence
  Description of Artificial Sequence: Synthetic oligonucleotide
ggccggggacugcaguaag

SEQ ID NO: 1678981 - RNA, 19 nt, Artificial Sequence
  Description of Artificial Sequence: Synthetic oligonucleotide
ccaagcuauaggcacauuu

SEQ ID NO: 1678982 - RNA, 19 nt, Artificial Sequence
  Description of Artificial Sequence: Synthetic oligonucleotide
uggcgagcucgcggguugc

SEQ ID NO: 1678983 - RNA, 19 nt, Artificial Sequence
  Description of Artificial Sequence: Synthetic oligonucleotide
cgcaauugagacgcgccgc

SEQ ID NO: 1678984 - RNA, 19 nt, Artificial Sequence
  Description of Artificial Sequence: Synthetic oligonucleotide
cuucugcugcuugaagaua

SEQ ID NO: 1678985 - RNA, 19 nt, Artificial Sequence
  Description of Artificial Sequence: Synthetic oligonucleotide
cacaccugacacugaggcu

SEQ ID NO: 1678986 - RNA, 19 nt, Artificial Sequence
  Description of Artificial Sequence: Synthetic oligonucleotide
gcauucauuuggguucuaa

SEQ ID NO: 1678987 - RNA, 19 nt, Artificial Sequence
  Description of Artificial Sequence: Synthetic oligonucleotide
cuccgacaacaccaugucu

SEQ ID NO: 1678988 - RNA, 19 nt, Artificial Sequence
  Description of Artificial Sequence: Synthetic oligonucleotide
agucuggaggcgacacgaa

SEQ ID NO: 1678989 - RNA, 19 nt, Artificial Sequence
  Description of Artificial Sequence: Synthetic oligonucleotide
ccucgaggcaugaaggccu

SEQ ID NO: 1678990 - RNA, 19 nt, Artificial Sequence
  Description of Artificial Sequence: Synthetic oligonucleotide
ggcugaaacuggcgagcuc

SEQ ID NO: 1678991 - RNA, 19 nt, Artificial Sequence
  Description of Artificial Sequence: Synthetic oligonucleotide
ggcuaccucccaagcgucc

SEQ ID NO: 1678992 - RNA, 19 nt, Artificial Sequence
  Description of Artificial Sequence: Synthetic oligonucleotide
ggcagugcccugccuucac

SEQ ID NO: 1678993 - RNA, 19 nt, Artificial Sequence
  Description of Artificial Sequence: Synthetic oligonucleotide
ccggucaaccaugaaguga

SEQ ID NO: 1678994 - RNA, 19 nt, Artificial Sequence
  Description of Artificial Sequence: Synthetic oligonucleotide
ggccgacgaagcccugcag

SEQ ID NO: 1678995 - RNA, 19 nt, Artificial Sequence
  Description of Artificial Sequence: Synthetic oligonucleotide
ccaguugauuugagaucuc

SEQ ID NO: 1678996 - RNA, 19 nt, Artificial Sequence
  Description of Artificial Sequence: Synthetic oligonucleotide
gcaaagucuggaggcgaca

SEQ ID NO: 1678997 - RNA, 19 nt, Artificial Sequence
  Description of Artificial Sequence: Synthetic oligonucleotide
cggucaaccaugaagugau

SEQ ID NO: 1678998 - RNA, 19 nt, Artificial Sequence
  Description of Artificial Sequence: Synthetic oligonucleotide
ugcauucauuuggguucua

SEQ ID NO: 1678999 - RNA, 19 nt, Artificial Sequence
  Description of Artificial Sequence: Synthetic oligonucleotide
cggggacugcaguaagcag

SEQ ID NO: 1679000 - RNA, 19 nt, Artificial Sequence
  Description of Artificial Sequence: Synthetic oligonucleotide
gccggggacugcaguaagc

SEQ ID NO: 1679001 - RNA, 19 nt, Artificial Sequence
  Description of Artificial Sequence: Synthetic oligonucleotide
cauuccucggguccucguu

SEQ ID NO: 1679002 - RNA, 19 nt, Artificial Sequence
  Description of Artificial Sequence: Synthetic oligonucleotide
ccggggacugcaguaagca

SEQ ID NO: 1679003 - RNA, 19 nt, Artificial Sequence
  Description of Artificial Sequence: Synthetic oligonucleotide
ggccuuggcuaccucccaa

SEQ ID NO: 1679004 - RNA, 19 nt, Artificial Sequence
  Description of Artificial Sequence: Synthetic oligonucleotide
caguuuccccagugcacgu

SEQ ID NO: 1679005 - RNA, 19 nt, Artificial Sequence
  Description of Artificial Sequence: Synthetic oligonucleotide
cgagcucgcggguugcauc

SEQ ID NO: 1679006 - RNA, 19 nt, Artificial Sequence
  Description of Artificial Sequence: Synthetic oligonucleotide
cggguccucguuugucugc

SEQ ID NO: 1679007 - RNA, 19 nt, Artificial Sequence
  Description of Artificial Sequence: Synthetic oligonucleotide
ggagaaggagcgaucucau

SEQ ID NO: 1679008 - RNA, 19 nt, Artificial Sequence
  Description of Artificial Sequence: Synthetic oligonucleotide
agguggcguugggaccaag

SEQ ID NO: 1679009 - RNA, 19 nt, Artificial Sequence
  Description of Artificial Sequence: Synthetic oligonucleotide
ccaggccggcaguuucccc

SEQ ID NO: 1679010 - RNA, 19 nt, Artificial Sequence
  Description of Artificial Sequence: Synthetic oligonucleotide
ggucaaccaugaagugauc

SEQ ID NO: 1679011 - RNA, 19 nt, Artificial Sequence
  Description of Artificial Sequence: Synthetic oligonucleotide
cggguugcaucgggaaccg

SEQ ID NO: 1679012 - RNA, 19 nt, Artificial Sequence
  Description of Artificial Sequence: Synthetic oligonucleotide
cccaagcguccacaggcca

SEQ ID NO: 1679013 - RNA, 19 nt, Artificial Sequence
  Description of Artificial Sequence: Synthetic oligonucleotide
gguccucguuugucugcca

SEQ ID NO: 1679014 - RNA, 19 nt, Artificial Sequence
  Description of Artificial Sequence: Synthetic oligonucleotide
cgcggguugcaucgggaac

SEQ ID NO: 1679015 - RNA, 19 nt, Artificial Sequence
  Description of Artificial Sequence: Synthetic oligonucleotide
ccgccagcuccgacaacac

SEQ ID NO: 1679016 - RNA, 19 nt, Artificial Sequence
  Description of Artificial Sequence: Synthetic oligonucleotide
gcggccgacgaagcccugc

SEQ ID NO: 1679017 - RNA, 19 nt, Artificial Sequence
  Description of Artificial Sequence: Synthetic oligonucleotide
ccucggguccucguuuguc

SEQ ID NO: 1679018 - RNA, 19 nt, Artificial Sequence
  Description of Artificial Sequence: Synthetic oligonucleotide
cgaagcagucuaauggcau

SEQ ID NO: 1679019 - RNA, 19 nt, Artificial Sequence
  Description of Artificial Sequence: Synthetic oligonucleotide
cgcuuuuaccacauccagu

SEQ ID NO: 1679020 - RNA, 19 nt, Artificial Sequence
  Description of Artificial Sequence: Synthetic oligonucleotide
ggcucacacucaaguaacu

SEQ ID NO: 1679021 - RNA, 19 nt, Artificial Sequence
  Description of Artificial Sequence: Synthetic oligonucleotide
cucgaggcaugaaggccuu

SEQ ID NO: 1679022 - RNA, 19 nt, Artificial Sequence
  Description of Artificial Sequence: Synthetic oligonucleotide
gcacgucuccauuucuguu

SEQ ID NO: 1679023 - RNA, 19 nt, Artificial Sequence
  Description of Artificial Sequence: Synthetic oligonucleotide
cgauggaaggagagcaccu

SEQ ID NO: 1679024 - RNA, 19 nt, Artificial Sequence
  Description of Artificial Sequence: Synthetic oligonucleotide
gccgcggcagguggcguug

SEQ ID NO: 1679025 - RNA, 19 nt, Artificial Sequence
  Description of Artificial Sequence: Synthetic oligonucleotide
gcggcagguggcguuggga

SEQ ID NO: 1679026 - RNA, 19 nt, Artificial Sequence
  Description of Artificial Sequence: Synthetic oligonucleotide
gcgacacgaagcagucuaa

SEQ ID NO: 1679027 - RNA, 19 nt, Artificial Sequence
  Description of Artificial Sequence: Synthetic oligonucleotide
gacgcgccgccagcuccga

SEQ ID NO: 1679028 - RNA, 19 nt, Artificial Sequence
  Description of Artificial Sequence: Synthetic oligonucleotide
gcgccgccagcuccgacaa

SEQ ID NO: 1679029 - RNA, 19 nt, Artificial Sequence
  Description of Artificial Sequence: Synthetic oligonucleotide
gaggccaggccggcaguuu

SEQ ID NO: 1679030 - RNA, 19 nt, Artificial Sequence
  Description of Artificial Sequence: Synthetic oligonucleotide
ggcgagcucgcggguugca

SEQ ID NO: 1679031 - RNA, 19 nt, Artificial Sequence
  Description of Artificial Sequence: Synthetic oligonucleotide
cggccgacgaagcccugca

SEQ ID NO: 1679032 - RNA, 19 nt, Artificial Sequence
  Description of Artificial Sequence: Synthetic oligonucleotide
gucuggcacagggguugau

SEQ ID NO: 1679033 - RNA, 19 nt, Artificial Sequence
  Description of Artificial Sequence: Synthetic oligonucleotide
ccaguccucgaggcaugaa

SEQ ID NO: 1679034 - RNA, 19 nt, Artificial Sequence
  Description of Artificial Sequence: Synthetic oligonucleotide
gcgagcucgcggguugcau

SEQ ID NO: 1679035 - RNA, 19 nt, Artificial Sequence
  Description of Artificial Sequence: Synthetic oligonucleotide
cgacacgaagcagucuaau

SEQ ID NO: 1679036 - RNA, 19 nt, Artificial Sequence
  Description of Artificial Sequence: Synthetic oligonucleotide
ccgaagccauguagaugau

SEQ ID NO: 1679037 - RNA, 19 nt, Artificial Sequence
  Description of Artificial Sequence: Synthetic oligonucleotide
cgcggccgacgaagcccug

SEQ ID NO: 1679038 - RNA, 19 nt, Artificial Sequence
  Description of Artificial Sequence: Synthetic oligonucleotide
cgccgcggcagguggcguu

SEQ ID NO: 1679039 - RNA, 19 nt, Artificial Sequence
  Description of Artificial Sequence: Synthetic oligonucleotide
ccgccgcggcagguggcgu

SEQ ID NO: 1679040 - RNA, 19 nt, Artificial Sequence
  Description of Artificial Sequence: Synthetic oligonucleotide
aaauaggagucucuuaacc

SEQ ID NO: 1679041 - RNA, 19 nt, Artificial Sequence
  Description of Artificial Sequence: Synthetic oligonucleotide
aaaacaaccauggaugagc

SEQ ID NO: 1679042 - RNA, 19 nt, Artificial Sequence
  Description of Artificial Sequence: Synthetic oligonucleotide
aauaggagucucuuaaccg

SEQ ID NO: 1679043 - RNA, 19 nt, Artificial Sequence
  Description of Artificial Sequence: Synthetic oligonucleotide
aaggauuccaguucucccc

SEQ ID NO: 1679044 - RNA, 19 nt, Artificial Sequence
  Description of Artificial Sequence: Synthetic oligonucleotide
uguuggauauagcaggucg

SEQ ID NO: 1679045 - RNA, 19 nt, Artificial Sequence
  Description of Artificial Sequence: Synthetic oligonucleotide
aaugagagagcucuucguc

SEQ ID NO: 1679046 - RNA, 19 nt, Artificial Sequence
  Description of Artificial Sequence: Synthetic oligonucleotide
uucuguuggauauagcagg

SEQ ID NO: 1679047 - RNA, 19 nt, Artificial Sequence
  Description of Artificial Sequence: Synthetic oligonucleotide
uacaucauguguaacaugu

SEQ ID NO: 1679048 - RNA, 19 nt, Artificial Sequence
  Description of Artificial Sequence: Synthetic oligonucleotide
caucaaugcaacaucaggg

SEQ ID NO: 1679049 - RNA, 19 nt, Artificial Sequence
  Description of Artificial Sequence: Synthetic oligonucleotide
ucuucuguuggauauagca

SEQ ID NO: 1679050 - RNA, 19 nt, Artificial Sequence
  Description of Artificial Sequence: Synthetic oligonucleotide
ucggaauuccucaaugacg

SEQ ID NO: 1679051 - RNA, 19 nt, Artificial Sequence
  Description of Artificial Sequence: Synthetic oligonucleotide
uuacuguaaggcuugauga

SEQ ID NO: 1679052 - RNA, 19 nt, Artificial Sequence
  Description of Artificial Sequence: Synthetic oligonucleotide
aauuccucaaugacguugc

SEQ ID NO: 1679053 - RNA, 19 nt, Artificial Sequence
  Description of Artificial Sequence: Synthetic oligonucleotide
uuguaggucacgaugacgu

SEQ ID NO: 1679054 - RNA, 19 nt, Artificial Sequence
  Description of Artificial Sequence: Synthetic oligonucleotide
auugcaguucaccugggcg

SEQ ID NO: 1679055 - RNA, 19 nt, Artificial Sequence
  Description of Artificial Sequence: Synthetic oligonucleotide
uggauuuucuguuuggcca

SEQ ID NO: 1679056 - RNA, 19 nt, Artificial Sequence
  Description of Artificial Sequence: Synthetic oligonucleotide
ugcauguacaggcacacgc

SEQ ID NO: 1679057 - RNA, 19 nt, Artificial Sequence
  Description of Artificial Sequence: Synthetic oligonucleotide
ugugauucaucaaugcaac

SEQ ID NO: 1679058 - RNA, 19 nt, Artificial Sequence
  Description of Artificial Sequence: Synthetic oligonucleotide
aauccuugcugugagccgc

SEQ ID NO: 1679059 - RNA, 19 nt, Artificial Sequence
  Description of Artificial Sequence: Synthetic oligonucleotide
ucauguguaacauguacac

SEQ ID NO: 1679060 - RNA, 19 nt, Artificial Sequence
  Description of Artificial Sequence: Synthetic oligonucleotide
agcaggucgauguagcugg

SEQ ID NO: 1679061 - RNA, 19 nt, Artificial Sequence
  Description of Artificial Sequence: Synthetic oligonucleotide
aucguccacauuuugacag

SEQ ID NO: 1679062 - RNA, 19 nt, Artificial Sequence
  Description of Artificial Sequence: Synthetic oligonucleotide
auguguaacauguacacau

SEQ ID NO: 1679063 - RNA, 19 nt, Artificial Sequence
  Description of Artificial Sequence: Synthetic oligonucleotide
augacguuagggcaacagc

SEQ ID NO: 1679064 - RNA, 19 nt, Artificial Sequence
  Description of Artificial Sequence: Synthetic oligonucleotide
ugacguuagggcaacagcu

SEQ ID NO: 1679065 - RNA, 19 nt, Artificial Sequence
  Description of Artificial Sequence: Synthetic oligonucleotide
agaacugauggagagcggc

SEQ ID NO: 1679066 - RNA, 19 nt, Artificial Sequence
  Description of Artificial Sequence: Synthetic oligonucleotide
cuuacuguaaggcuugaug

SEQ ID NO: 1679067 - RNA, 19 nt, Artificial Sequence
  Description of Artificial Sequence: Synthetic oligonucleotide
gaacaccucaucuccaggg

SEQ ID NO: 1679068 - RNA, 19 nt, Artificial Sequence
  Description of Artificial Sequence: Synthetic oligonucleotide
agcucuucgucuucaaugg

SEQ ID NO: 1679069 - RNA, 19 nt, Artificial Sequence
  Description of Artificial Sequence: Synthetic oligonucleotide
cuugcugugagccgcaccg

SEQ ID NO: 1679070 - RNA, 19 nt, Artificial Sequence
  Description of Artificial Sequence: Synthetic oligonucleotide
ugaucucggagauguaugg

SEQ ID NO: 1679071 - RNA, 19 nt, Artificial Sequence
  Description of Artificial Sequence: Synthetic oligonucleotide
uauagcaggucgauguagc

SEQ ID NO: 1679072 - RNA, 19 nt, Artificial Sequence
  Description of Artificial Sequence: Synthetic oligonucleotide
agggcaacagcugugauuc

SEQ ID NO: 1679073 - RNA, 19 nt, Artificial Sequence
  Description of Artificial Sequence: Synthetic oligonucleotide
gaggaggucgcccacgugg

SEQ ID NO: 1679074 - RNA, 19 nt, Artificial Sequence
  Description of Artificial Sequence: Synthetic oligonucleotide
gucacgaugacguuagggc

SEQ ID NO: 1679075 - RNA, 19 nt, Artificial Sequence
  Description of Artificial Sequence: Synthetic oligonucleotide
cuugaugaucuucugcccg

SEQ ID NO: 1679076 - RNA, 19 nt, Artificial Sequence
  Description of Artificial Sequence: Synthetic oligonucleotide
agguaaagaaauaggaguc

SEQ ID NO: 1679077 - RNA, 19 nt, Artificial Sequence
  Description of Artificial Sequence: Synthetic oligonucleotide
acagccaacaguuucucug

SEQ ID NO: 1679078 - RNA, 19 nt, Artificial Sequence
  Description of Artificial Sequence: Synthetic oligonucleotide
gaguagaacugauggagag

SEQ ID NO: 1679079 - RNA, 19 nt, Artificial Sequence
  Description of Artificial Sequence: Synthetic oligonucleotide
aaaugagagagcucuucgu

SEQ ID NO: 1679080 - RNA, 19 nt, Artificial Sequence
  Description of Artificial Sequence: Synthetic oligonucleotide
aauaucgccgaccccaaau

SEQ ID NO: 1679081 - RNA, 19 nt, Artificial Sequence
  Description of Artificial Sequence: Synthetic oligonucleotide
uccuguacagcucugacuu

SEQ ID NO: 1679082 - RNA, 19 nt, Artificial Sequence
  Description of Artificial Sequence: Synthetic oligonucleotide
caaaugagagagcucuucg

SEQ ID NO: 1679083 - RNA, 19 nt, Artificial Sequence
  Description of Artificial Sequence: Synthetic oligonucleotide
ucuucgucuucaaugguga

SEQ ID NO: 1679084 - RNA, 19 nt, Artificial Sequence
  Description of Artificial Sequence: Synthetic oligonucleotide
ucgucuucaauggugaagc

SEQ ID NO: 1679085 - RNA, 19 nt, Artificial Sequence
  Description of Artificial Sequence: Synthetic oligonucleotide
uaggucacgaugacguuag

SEQ ID NO: 1679086 - RNA, 19 nt, Artificial Sequence
  Description of Artificial Sequence: Synthetic oligonucleotide
cugaccaugucucggacgg

SEQ ID NO: 1679087 - RNA, 19 nt, Artificial Sequence
  Description of Artificial Sequence: Synthetic oligonucleotide
ucugacuuccgccaggguc

SEQ ID NO: 1679088 - RNA, 19 nt, Artificial Sequence
  Description of Artificial Sequence: Synthetic oligonucleotide
uugaucucggagauguaug

SEQ ID NO: 1679089 - RNA, 19 nt, Artificial Sequence
  Description of Artificial Sequence: Synthetic oligonucleotide
ugggauucaaacuccuuca

SEQ ID NO: 1679090 - RNA, 19 nt, Artificial Sequence
  Description of Artificial Sequence: Synthetic oligonucleotide
gaaggauuccaguucuccc

SEQ ID NO: 1679091 - RNA, 19 nt, Artificial Sequence
  Description of Artificial Sequence: Synthetic oligonucleotide
ugacauuccacaccgcagu

SEQ ID NO: 1679092 - RNA, 19 nt, Artificial Sequence
  Description of Artificial Sequence: Synthetic oligonucleotide
ugagggaguacacagggua

SEQ ID NO: 1679093 - RNA, 19 nt, Artificial Sequence
  Description of Artificial Sequence: Synthetic oligonucleotide
gaauuccucaaugacguug

SEQ ID NO: 1679094 - RNA, 19 nt, Artificial Sequence
  Description of Artificial Sequence: Synthetic oligonucleotide
acaaccauggaugagcacu

SEQ ID NO: 1679095 - RNA, 19 nt, Artificial Sequence
  Description of Artificial Sequence: Synthetic oligonucleotide
caucauguguaacauguac

SEQ ID NO: 1679096 - RNA, 19 nt, Artificial Sequence
  Description of Artificial Sequence: Synthetic oligonucleotide
cugacuuccgccagggucc

SEQ ID NO: 1679097 - RNA, 19 nt, Artificial Sequence
  Description of Artificial Sequence: Synthetic oligonucleotide
uuuguaggucacgaugacg

SEQ ID NO: 1679098 - RNA, 19 nt, Artificial Sequence
  Description of Artificial Sequence: Synthetic oligonucleotide
cucggagauguauggaugg

SEQ ID NO: 1679099 - RNA, 19 nt, Artificial Sequence
  Description of Artificial Sequence: Synthetic oligonucleotide
gcaacaucagggaauaucg

SEQ ID NO: 1679100 - RNA, 19 nt, Artificial Sequence
  Description of Artificial Sequence: Synthetic oligonucleotide
uugcgugcguaucugacca

SEQ ID NO: 1679101 - RNA, 19 nt, Artificial Sequence
  Description of Artificial Sequence: Synthetic oligonucleotide
uaaccggucauuccugucu

SEQ ID NO: 1679102 - RNA, 19 nt, Artificial Sequence
  Description of Artificial Sequence: Synthetic oligonucleotide
ugaacaccucaucuccagg

SEQ ID NO: 1679103 - RNA, 19 nt, Artificial Sequence
  Description of Artificial Sequence: Synthetic oligonucleotide
ucucggagauguauggaug

SEQ ID NO: 1679104 - RNA, 19 nt, Artificial Sequence
  Description of Artificial Sequence: Synthetic oligonucleotide
ucacgaugacguuagggca

SEQ ID NO: 1679105 - RNA, 19 nt, Artificial Sequence
  Description of Artificial Sequence: Synthetic oligonucleotide
uggaugguccuuaccauga

SEQ ID NO: 1679106 - RNA, 19 nt, Artificial Sequence
  Description of Artificial Sequence: Synthetic oligonucleotide
ugcaucguccacauuuuga

SEQ ID NO: 1679107 - RNA, 19 nt, Artificial Sequence
  Description of Artificial Sequence: Synthetic oligonucleotide
uucugcccguauuucaggg

SEQ ID NO: 1679108 - RNA, 19 nt, Artificial Sequence
  Description of Artificial Sequence: Synthetic oligonucleotide
aacaaccauggaugagcac

SEQ ID NO: 1679109 - RNA, 19 nt, Artificial Sequence
  Description of Artificial Sequence: Synthetic oligonucleotide
uccgaaggauuccaguucu

SEQ ID NO: 1679110 - RNA, 19 nt, Artificial Sequence
  Description of Artificial Sequence: Synthetic oligonucleotide
ucuuaaccggucauuccug

SEQ ID NO: 1679111 - RNA, 19 nt, Artificial Sequence
  Description of Artificial Sequence: Synthetic oligonucleotide
gaagccauugcaguucacc

SEQ ID NO: 1679112 - RNA, 19 nt, Artificial Sequence
  Description of Artificial Sequence: Synthetic oligonucleotide
gaauccuugcugugagccg

SEQ ID NO: 1679113 - RNA, 19 nt, Artificial Sequence
  Description of Artificial Sequence: Synthetic oligonucleotide
augagcuacuuccaugaug

SEQ ID NO: 1679114 - RNA, 19 nt, Artificial Sequence
  Description of Artificial Sequence: Synthetic oligonucleotide
uuccggaucuccaccuugg

SEQ ID NO: 1679115 - RNA, 19 nt, Artificial Sequence
  Description of Artificial Sequence: Synthetic oligonucleotide
ugucuucuguuggauauag

SEQ ID NO: 1679116 - RNA, 19 nt, Artificial Sequence
  Description of Artificial Sequence: Synthetic oligonucleotide
aacgccugcuugcaucguc

SEQ ID NO: 1679117 - RNA, 19 nt, Artificial Sequence
  Description of Artificial Sequence: Synthetic oligonucleotide
aacaccucaucuccagggu

SEQ ID NO: 1679118 - RNA, 19 nt, Artificial Sequence
  Description of Artificial Sequence: Synthetic oligonucleotide
cauguacaggcacacgccc

SEQ ID NO: 1679119 - RNA, 19 nt, Artificial Sequence
  Description of Artificial Sequence: Synthetic oligonucleotide
aaugacguugcgugcguau

SEQ ID NO: 1679120 - RNA, 19 nt, Artificial Sequence
  Description of Artificial Sequence: Synthetic oligonucleotide
gaugacguuagggcaacag

SEQ ID NO: 1679121 - RNA, 19 nt, Artificial Sequence
  Description of Artificial Sequence: Synthetic oligonucleotide
cucaaugacguugcgugcg

SEQ ID NO: 1679122 - RNA, 19 nt, Artificial Sequence
  Description of Artificial Sequence: Synthetic oligonucleotide
agcacgcaggcguaggccg

SEQ ID NO: 1679123 - RNA, 19 nt, Artificial Sequence
  Description of Artificial Sequence: Synthetic oligonucleotide
ugcaacaucagggaauauc

SEQ ID NO: 1679124 - RNA, 19 nt, Artificial Sequence
  Description of Artificial Sequence: Synthetic oligonucleotide
ucucuuaaccggucauucc

SEQ ID NO: 1679125 - RNA, 19 nt, Artificial Sequence
  Description of Artificial Sequence: Synthetic oligonucleotide
uaucugaccaugucucgga

SEQ ID NO: 1679126 - RNA, 19 nt, Artificial Sequence
  Description of Artificial Sequence: Synthetic oligonucleotide
cauggaugagcacuccagc

SEQ ID NO: 1679127 - RNA, 19 nt, Artificial Sequence
  Description of Artificial Sequence: Synthetic oligonucleotide
caacaguuucucugaaggc

SEQ ID NO: 1679128 - RNA, 19 nt, Artificial Sequence
  Description of Artificial Sequence: Synthetic oligonucleotide
gagcacuccagcuugugca

SEQ ID NO: 1679129 - RNA, 19 nt, Artificial Sequence
  Description of Artificial Sequence: Synthetic oligonucleotide
auaucgccgaccccaaaug

SEQ ID NO: 1679130 - RNA, 19 nt, Artificial Sequence
  Description of Artificial Sequence: Synthetic oligonucleotide
uccaggguggaucuccugu

SEQ ID NO: 1679131 - RNA, 19 nt, Artificial Sequence
  Description of Artificial Sequence: Synthetic oligonucleotide
auggaugagcacuccagcu

SEQ ID NO: 1679132 - RNA, 19 nt, Artificial Sequence
  Description of Artificial Sequence: Synthetic oligonucleotide
uagugcuuacuguaaggcu

SEQ ID NO: 1679133 - RNA, 19 nt, Artificial Sequence
  Description of Artificial Sequence: Synthetic oligonucleotide
aguccuucuuuccuggcga

SEQ ID NO: 1679134 - RNA, 19 nt, Artificial Sequence
  Description of Artificial Sequence: Synthetic oligonucleotide
ucaucuccaggguggaucu

SEQ ID NO: 1679135 - RNA, 19 nt, Artificial Sequence
  Description of Artificial Sequence: Synthetic oligonucleotide
aaacaaccauggaugagca

SEQ ID NO: 1679136 - RNA, 19 nt, Artificial Sequence
  Description of Artificial Sequence: Synthetic oligonucleotide
aggucgauguagcugguga

SEQ ID NO: 1679137 - RNA, 19 nt, Artificial Sequence
  Description of Artificial Sequence: Synthetic oligonucleotide
aagcgcuccaggccaccgc

SEQ ID NO: 1679138 - RNA, 19 nt, Artificial Sequence
  Description of Artificial Sequence: Synthetic oligonucleotide
gaacugauggagagcggcg

SEQ ID NO: 1679139 - RNA, 19 nt, Artificial Sequence
  Description of Artificial Sequence: Synthetic oligonucleotide
cuugguggugcacucccgg

SEQ ID NO: 1679140 - RNA, 19 nt, Artificial Sequence
  Description of Artificial Sequence: Synthetic oligonucleotide
auguacacauugcuguccu

SEQ ID NO: 1679141 - RNA, 19 nt, Artificial Sequence
  Description of Artificial Sequence: Synthetic oligonucleotide
uaucgccgaccccaaauga

SEQ ID NO: 1679142 - RNA, 19 nt, Artificial Sequence
  Description of Artificial Sequence: Synthetic oligonucleotide
cuccuggcuaaguucacag

SEQ ID NO: 1679143 - RNA, 19 nt, Artificial Sequence
  Description of Artificial Sequence: Synthetic oligonucleotide
uggagagcggcgaugucac

SEQ ID NO: 1679144 - RNA, 19 nt, Artificial Sequence
  Description of Artificial Sequence: Synthetic oligonucleotide
aaccauggaugagcacucc

SEQ ID NO: 1679145 - RNA, 19 nt, Artificial Sequence
  Description of Artificial Sequence: Synthetic oligonucleotide
uacuguaaggcuugaugau

SEQ ID NO: 1679146 - RNA, 19 nt, Artificial Sequence
  Description of Artificial Sequence: Synthetic oligonucleotide
uugcccgcgcugcagaagc

SEQ ID NO: 1679147 - RNA, 19 nt, Artificial Sequence
  Description of Artificial Sequence: Synthetic oligonucleotide
ucuccgaaggauuccaguu

SEQ ID NO: 1679148 - RNA, 19 nt, Artificial Sequence
  Description of Artificial Sequence: Synthetic oligonucleotide
cacaggguagugcuuacug

SEQ ID NO: 1679149 - RNA, 19 nt, Artificial Sequence
  Description of Artificial Sequence: Synthetic oligonucleotide
augguccuuaccaugagcu

SEQ ID NO: 1679150 - RNA, 19 nt, Artificial Sequence
  Description of Artificial Sequence: Synthetic oligonucleotide
caacaucagggaauaucgc

SEQ ID NO: 1679151 - RNA, 19 nt, Artificial Sequence
  Description of Artificial Sequence: Synthetic oligonucleotide
agugcuuggcccuucggaa

SEQ ID NO: 1679152 - RNA, 19 nt, Artificial Sequence
  Description of Artificial Sequence: Synthetic oligonucleotide
aucugaccaugucucggac

SEQ ID NO: 1679153 - RNA, 19 nt, Artificial Sequence
  Description of Artificial Sequence: Synthetic oligonucleotide
uguguaacauguacacauu

SEQ ID NO: 1679154 - RNA, 19 nt, Artificial Sequence
  Description of Artificial Sequence: Synthetic oligonucleotide
ggauuuucuguuuggccag

SEQ ID NO: 1679155 - RNA, 19 nt, Artificial Sequence
  Description of Artificial Sequence: Synthetic oligonucleotide
cuacauugagggaguacac

SEQ ID NO: 1679156 - RNA, 19 nt, Artificial Sequence
  Description of Artificial Sequence: Synthetic oligonucleotide
cuguacagcucugacuucc

SEQ ID NO: 1679157 - RNA, 19 nt, Artificial Sequence
  Description of Artificial Sequence: Synthetic oligonucleotide
guugcgugcguaucugacc

SEQ ID NO: 1679158 - RNA, 19 nt, Artificial Sequence
  Description of Artificial Sequence: Synthetic oligonucleotide
ggagauguauggauggucc

SEQ ID NO: 1679159 - RNA, 19 nt, Artificial Sequence
  Description of Artificial Sequence: Synthetic oligonucleotide
ugacguugcgugcguaucu

SEQ ID NO: 1679160 - RNA, 19 nt, Artificial Sequence
  Description of Artificial Sequence: Synthetic oligonucleotide
cuucugcccguauuucagg

SEQ ID NO: 1679161 - RNA, 19 nt, Artificial Sequence
  Description of Artificial Sequence: Synthetic oligonucleotide
ggauauagcaggucgaugu

SEQ ID NO: 1679162 - RNA, 19 nt, Artificial Sequence
  Description of Artificial Sequence: Synthetic oligonucleotide
ucgccgaccccaaaugaga

SEQ ID NO: 1679163 - RNA, 19 nt, Artificial Sequence
  Description of Artificial Sequence: Synthetic oligonucleotide
guagcuggugaacaccuca

SEQ ID NO: 1679164 - RNA, 19 nt, Artificial Sequence
  Description of Artificial Sequence: Synthetic oligonucleotide
agugcuuacuguaaggcuu

SEQ ID NO: 1679165 - RNA, 19 nt, Artificial Sequence
  Description of Artificial Sequence: Synthetic oligonucleotide
gucggggaacuccaggugc

SEQ ID NO: 1679166 - RNA, 19 nt, Artificial Sequence
  Description of Artificial Sequence: Synthetic oligonucleotide
aacacggagcucaucuucu

SEQ ID NO: 1679167 - RNA, 19 nt, Artificial Sequence
  Description of Artificial Sequence: Synthetic oligonucleotide
gaguacacaggguagugcu

SEQ ID NO: 1679168 - RNA, 19 nt, Artificial Sequence
  Description of Artificial Sequence: Synthetic oligonucleotide
ugauggagagcggcgaugu

SEQ ID NO: 1679169 - RNA, 19 nt, Artificial Sequence
  Description of Artificial Sequence: Synthetic oligonucleotide
aucagggaauaucgccgac

SEQ ID NO: 1679170 - RNA, 19 nt, Artificial Sequence
  Description of Artificial Sequence: Synthetic oligonucleotide
ugagcacgcaggcguaggc

SEQ ID NO: 1679171 - RNA, 19 nt, Artificial Sequence
  Description of Artificial Sequence: Synthetic oligonucleotide
aacugauggagagcggcga

SEQ ID NO: 1679172 - RNA, 19 nt, Artificial Sequence
  Description of Artificial Sequence: Synthetic oligonucleotide
auguacagucuucccagcu

SEQ ID NO: 1679173 - RNA, 19 nt, Artificial Sequence
  Description of Artificial Sequence: Synthetic oligonucleotide
ucucggacggcuucugccu

SEQ ID NO: 1679174 - RNA, 19 nt, Artificial Sequence
  Description of Artificial Sequence: Synthetic oligonucleotide
gagggaguacacaggguag

SEQ ID NO: 1679175 - RNA, 19 nt, Artificial Sequence
  Description of Artificial Sequence: Synthetic oligonucleotide
caauggugaagccauugca

SEQ ID NO: 1679176 - RNA, 19 nt, Artificial Sequence
  Description of Artificial Sequence: Synthetic oligonucleotide
acauuuugacaguccuucu

SEQ ID NO: 1679177 - RNA, 19 nt, Artificial Sequence
  Description of Artificial Sequence: Synthetic oligonucleotide
ucggcgcgcaugcuggcgg

SEQ ID NO: 1679178 - RNA, 19 nt, Artificial Sequence
  Description of Artificial Sequence: Synthetic oligonucleotide
acguuagggcaacagcugu

SEQ ID NO: 1679179 - RNA, 19 nt, Artificial Sequence
  Description of Artificial Sequence: Synthetic oligonucleotide
uccuucccaguccugcaug

SEQ ID NO: 1679180 - RNA, 19 nt, Artificial Sequence
  Description of Artificial Sequence: Synthetic oligonucleotide
agcuacuuccaugauggca

SEQ ID NO: 1679181 - RNA, 19 nt, Artificial Sequence
  Description of Artificial Sequence: Synthetic oligonucleotide
cauguacagucuucccagc

SEQ ID NO: 1679182 - RNA, 19 nt, Artificial Sequence
  Description of Artificial Sequence: Synthetic oligonucleotide
gucucggacggcuucugcc

SEQ ID NO: 1679183 - RNA, 19 nt, Artificial Sequence
  Description of Artificial Sequence: Synthetic oligonucleotide
uggauauagcaggucgaug

SEQ ID NO: 1679184 - RNA, 19 nt, Artificial Sequence
  Description of Artificial Sequence: Synthetic oligonucleotide
ucucuggguggauuuucug

SEQ ID NO: 1679185 - RNA, 19 nt, Artificial Sequence
  Description of Artificial Sequence: Synthetic oligonucleotide
cagcugugauucaucaaug

SEQ ID NO: 1679186 - RNA, 19 nt, Artificial Sequence
  Description of Artificial Sequence: Synthetic oligonucleotide
uggcgaagcagcacucgca

SEQ ID NO: 1679187 - RNA, 19 nt, Artificial Sequence
  Description of Artificial Sequence: Synthetic oligonucleotide
agucaguggcucucgauuu

SEQ ID NO: 1679188 - RNA, 19 nt, Artificial Sequence
  Description of Artificial Sequence: Synthetic oligonucleotide
caaccauggaugagcacuc

SEQ ID NO: 1679189 - RNA, 19 nt, Artificial Sequence
  Description of Artificial Sequence: Synthetic oligonucleotide
gcuacauugagggaguaca

SEQ ID NO: 1679190 - RNA, 19 nt, Artificial Sequence
  Description of Artificial Sequence: Synthetic oligonucleotide
agagcggcgaugucacucu

SEQ ID NO: 1679191 - RNA, 19 nt, Artificial Sequence
  Description of Artificial Sequence: Synthetic oligonucleotide
uuguccuugguggugcacu

SEQ ID NO: 1679192 - RNA, 19 nt, Artificial Sequence
  Description of Artificial Sequence: Synthetic oligonucleotide
cauugcaguucaccugggc

SEQ ID NO: 1679193 - RNA, 19 nt, Artificial Sequence
  Description of Artificial Sequence: Synthetic oligonucleotide
ggucacgaugacguuaggg

SEQ ID NO: 1679194 - RNA, 19 nt, Artificial Sequence
  Description of Artificial Sequence: Synthetic oligonucleotide
augacguugcgugcguauc

SEQ ID NO: 1679195 - RNA, 19 nt, Artificial Sequence
  Description of Artificial Sequence: Synthetic oligonucleotide
acacggagcucaucuucuc

SEQ ID NO: 1679196 - RNA, 19 nt, Artificial Sequence
  Description of Artificial Sequence: Synthetic oligonucleotide
ggguggaucuccuguacag

SEQ ID NO: 1679197 - RNA, 19 nt, Artificial Sequence
  Description of Artificial Sequence: Synthetic oligonucleotide
cuccgaaggauuccaguuc

SEQ ID NO: 1679198 - RNA, 19 nt, Artificial Sequence
  Description of Artificial Sequence: Synthetic oligonucleotide
auugucuagcuuguccaga

SEQ ID NO: 1679199 - RNA, 19 nt, Artificial Sequence
  Description of Artificial Sequence: Synthetic oligonucleotide
guggucggggaacuccagg

SEQ ID NO: 1679200 - RNA, 19 nt, Artificial Sequence
  Description of Artificial Sequence: Synthetic oligonucleotide
uuaaccggucauuccuguc

SEQ ID NO: 1679201 - RNA, 19 nt, Artificial Sequence
  Description of Artificial Sequence: Synthetic oligonucleotide
aaccggucauuccugucuu

SEQ ID NO: 1679202 - RNA, 19 nt, Artificial Sequence
  Description of Artificial Sequence: Synthetic oligonucleotide
acgaugacguuagggcaac

SEQ ID NO: 1679203 - RNA, 19 nt, Artificial Sequence
  Description of Artificial Sequence: Synthetic oligonucleotide
cuggcgaagcagcacucgc

SEQ ID NO: 1679204 - RNA, 19 nt, Artificial Sequence
  Description of Artificial Sequence: Synthetic oligonucleotide
accgucuccgaaggauucc

SEQ ID NO: 1679205 - RNA, 19 nt, Artificial Sequence
  Description of Artificial Sequence: Synthetic oligonucleotide
gucucuuaaccggucauuc

SEQ ID NO: 1679206 - RNA, 19 nt, Artificial Sequence
  Description of Artificial Sequence: Synthetic oligonucleotide
gcugugauucaucaaugca

SEQ ID NO: 1679207 - RNA, 19 nt, Artificial Sequence
  Description of Artificial Sequence: Synthetic oligonucleotide
guuggauauagcaggucga

SEQ ID NO: 1679208 - RNA, 19 nt, Artificial Sequence
  Description of Artificial Sequence: Synthetic oligonucleotide
ugucucggacggcuucugc

SEQ ID NO: 1679209 - RNA, 19 nt, Artificial Sequence
  Description of Artificial Sequence: Synthetic oligonucleotide
acgccugcuugcaucgucc

SEQ ID NO: 1679210 - RNA, 19 nt, Artificial Sequence
  Description of Artificial Sequence: Synthetic oligonucleotide
uccuggcuaaguucacaga

SEQ ID NO: 1679211 - RNA, 19 nt, Artificial Sequence
  Description of Artificial Sequence: Synthetic oligonucleotide
uggugaagccauugcaguu

SEQ ID NO: 1679212 - RNA, 19 nt, Artificial Sequence
  Description of Artificial Sequence: Synthetic oligonucleotide
augaucuucugcccguauu

SEQ ID NO: 1679213 - RNA, 19 nt, Artificial Sequence
  Description of Artificial Sequence: Synthetic oligonucleotide
agccgcaccgucuccgaag

SEQ ID NO: 1679214 - RNA, 19 nt, Artificial Sequence
  Description of Artificial Sequence: Synthetic oligonucleotide
ucguccacauuuugacagu

SEQ ID NO: 1679215 - RNA, 19 nt, Artificial Sequence
  Description of Artificial Sequence: Synthetic oligonucleotide
gcuacuuccaugauggcaa

SEQ ID NO: 1679216 - RNA, 19 nt, Artificial Sequence
  Description of Artificial Sequence: Synthetic oligonucleotide
guuagggcaacagcuguga

SEQ ID NO: 1679217 - RNA, 19 nt, Artificial Sequence
  Description of Artificial Sequence: Synthetic oligonucleotide
ucgcccacguggaaggguc

SEQ ID NO: 1679218 - RNA, 19 nt, Artificial Sequence
  Description of Artificial Sequence: Synthetic oligonucleotide
guagugcuuggcccuucgg

SEQ ID NO: 1679219 - RNA, 19 nt, Artificial Sequence
  Description of Artificial Sequence: Synthetic oligonucleotide
gaagggucgcagcgcgcgg

SEQ ID NO: 1679220 - RNA, 19 nt, Artificial Sequence
  Description of Artificial Sequence: Synthetic oligonucleotide
gguccuuaccaugagcuac

SEQ ID NO: 1679221 - RNA, 19 nt, Artificial Sequence
  Description of Artificial Sequence: Synthetic oligonucleotide
aucgccgaccccaaaugag

SEQ ID NO: 1679222 - RNA, 19 nt, Artificial Sequence
  Description of Artificial Sequence: Synthetic oligonucleotide
gagagcggcgaugucacuc

SEQ ID NO: 1679223 - RNA, 19 nt, Artificial Sequence
  Description of Artificial Sequence: Synthetic oligonucleotide
gguggauuuucuguuuggc

SEQ ID NO: 1679224 - RNA, 19 nt, Artificial Sequence
  Description of Artificial Sequence: Synthetic oligonucleotide
cuggaguagaacugaugga

SEQ ID NO: 1679225 - RNA, 19 nt, Artificial Sequence
  Description of Artificial Sequence: Synthetic oligonucleotide
uccggaucuccaccuuggc

SEQ ID NO: 1679226 - RNA, 19 nt, Artificial Sequence
  Description of Artificial Sequence: Synthetic oligonucleotide
aggguggaucuccuguaca

SEQ ID NO: 1679227 - RNA, 19 nt, Artificial Sequence
  Description of Artificial Sequence: Synthetic oligonucleotide
ggguggauuuucuguuugg

SEQ ID NO: 1679228 - RNA, 19 nt, Artificial Sequence
  Description of Artificial Sequence: Synthetic oligonucleotide
caucagggaauaucgccga

SEQ ID NO: 1679229 - RNA, 19 nt, Artificial Sequence
  Description of Artificial Sequence: Synthetic oligonucleotide
ggguagugcuuacuguaag

SEQ ID NO: 1679230 - RNA, 19 nt, Artificial Sequence
  Description of Artificial Sequence: Synthetic oligonucleotide
cucuuaaccggucauuccu

SEQ ID NO: 1679231 - RNA, 19 nt, Artificial Sequence
  Description of Artificial Sequence: Synthetic oligonucleotide
augucacucuggaugaggu

SEQ ID NO: 1679232 - RNA, 19 nt, Artificial Sequence
  Description of Artificial Sequence: Synthetic oligonucleotide
gugcuuacuguaaggcuug

SEQ ID NO: 1679233 - RNA, 19 nt, Artificial Sequence
  Description of Artificial Sequence: Synthetic oligonucleotide
gaagcgcuccaggccaccg

SEQ ID NO: 1679234 - RNA, 19 nt, Artificial Sequence
  Description of Artificial Sequence: Synthetic oligonucleotide
gacguugcgugcguaucug

SEQ ID NO: 1679235 - RNA, 19 nt, Artificial Sequence
  Description of Artificial Sequence: Synthetic oligonucleotide
acugauggagagcggcgau

SEQ ID NO: 1679236 - RNA, 19 nt, Artificial Sequence
  Description of Artificial Sequence: Synthetic oligonucleotide
guacagcucugacuuccgc

SEQ ID NO: 1679237 - RNA, 19 nt, Artificial Sequence
  Description of Artificial Sequence: Synthetic oligonucleotide
ggaagggucgcagcgcgcg

SEQ ID NO: 1679238 - RNA, 19 nt, Artificial Sequence
  Description of Artificial Sequence: Synthetic oligonucleotide
guggaucuccuguacagcu

SEQ ID NO: 1679239 - RNA, 19 nt, Artificial Sequence
  Description of Artificial Sequence: Synthetic oligonucleotide
cccacggugagcacgcagg

SEQ ID NO: 1679240 - RNA, 19 nt, Artificial Sequence
  Description of Artificial Sequence: Synthetic oligonucleotide
caggguagugcuuacugua

SEQ ID NO: 1679241 - RNA, 19 nt, Artificial Sequence
  Description of Artificial Sequence: Synthetic oligonucleotide
uccagcggccuuguucucc

SEQ ID NO: 1679242 - RNA, 19 nt, Artificial Sequence
  Description of Artificial Sequence: Synthetic oligonucleotide
cacgaugacguuagggcaa

SEQ ID NO: 1679243 - RNA, 19 nt, Artificial Sequence
  Description of Artificial Sequence: Synthetic oligonucleotide
caucguccacauuuugaca

SEQ ID NO: 1679244 - RNA, 19 nt, Artificial Sequence
  Description of Artificial Sequence: Synthetic oligonucleotide
uccugucuucuguuggaua

SEQ ID NO: 1679245 - RNA, 19 nt, Artificial Sequence
  Description of Artificial Sequence: Synthetic oligonucleotide
ucccggcacucacagguaa

SEQ ID NO: 1679246 - RNA, 19 nt, Artificial Sequence
  Description of Artificial Sequence: Synthetic oligonucleotide
uggaggcuacauugaggga

SEQ ID NO: 1679247 - RNA, 19 nt, Artificial Sequence
  Description of Artificial Sequence: Synthetic oligonucleotide
agagagcucuucgucuuca

SEQ ID NO: 1679248 - RNA, 19 nt, Artificial Sequence
  Description of Artificial Sequence: Synthetic oligonucleotide
ccgaccccaaaugagagag

SEQ ID NO: 1679249 - RNA, 19 nt, Artificial Sequence
  Description of Artificial Sequence: Synthetic oligonucleotide
cuagcuuguccagauggga

SEQ ID NO: 1679250 - RNA, 19 nt, Artificial Sequence
  Description of Artificial Sequence: Synthetic oligonucleotide
gagcacgcaggcguaggcc

SEQ ID NO: 1679251 - RNA, 19 nt, Artificial Sequence
  Description of Artificial Sequence: Synthetic oligonucleotide
cauguguaacauguacaca

SEQ ID NO: 1679252 - RNA, 19 nt, Artificial Sequence
  Description of Artificial Sequence: Synthetic oligonucleotide
gggauucaaacuccuucac

SEQ ID NO: 1679253 - RNA, 19 nt, Artificial Sequence
  Description of Artificial Sequence: Synthetic oligonucleotide
ucggagauguauggauggu

SEQ ID NO: 1679254 - RNA, 19 nt, Artificial Sequence
  Description of Artificial Sequence: Synthetic oligonucleotide
accggucauuccugucuuc

SEQ ID NO: 1679255 - RNA, 19 nt, Artificial Sequence
  Description of Artificial Sequence: Synthetic oligonucleotide
ugcaguucaccugggcgaa

SEQ ID NO: 1679256 - RNA, 19 nt, Artificial Sequence
  Description of Artificial Sequence: Synthetic oligonucleotide
uggaagggucgcagcgcgc

SEQ ID NO: 1679257 - RNA, 19 nt, Artificial Sequence
  Description of Artificial Sequence: Synthetic oligonucleotide
caccgucuccgaaggauuc

SEQ ID NO: 1679258 - RNA, 19 nt, Artificial Sequence
  Description of Artificial Sequence: Synthetic oligonucleotide
aggcacacgcccauggccu

SEQ ID NO: 1679259 - RNA, 19 nt, Artificial Sequence
  Description of Artificial Sequence: Synthetic oligonucleotide
ugccuggaguagaacugau

SEQ ID NO: 1679260 - RNA, 19 nt, Artificial Sequence
  Description of Artificial Sequence: Synthetic oligonucleotide
ugaagccauugcaguucac

SEQ ID NO: 1679261 - RNA, 19 nt, Artificial Sequence
  Description of Artificial Sequence: Synthetic oligonucleotide
cuucuguccagcggccuug

SEQ ID NO: 1679262 - RNA, 19 nt, Artificial Sequence
  Description of Artificial Sequence: Synthetic oligonucleotide
gacauuccacaccgcagua

SEQ ID NO: 1679263 - RNA, 19 nt, Artificial Sequence
  Description of Artificial Sequence: Synthetic oligonucleotide
uuguccagaugggauucaa

SEQ ID NO: 1679264 - RNA, 19 nt, Artificial Sequence
  Description of Artificial Sequence: Synthetic oligonucleotide
ggcccuucggaauuccuca

SEQ ID NO: 1679265 - RNA, 19 nt, Artificial Sequence
  Description of Artificial Sequence: Synthetic oligonucleotide
cugauggagagcggcgaug

SEQ ID NO: 1679266 - RNA, 19 nt, Artificial Sequence
  Description of Artificial Sequence: Synthetic oligonucleotide
ggaugguccuuaccaugag

SEQ ID NO: 1679267 - RNA, 19 nt, Artificial Sequence
  Description of Artificial Sequence: Synthetic oligonucleotide
aggcccauguacagucuuc

SEQ ID NO: 1679268 - RNA, 19 nt, Artificial Sequence
  Description of Artificial Sequence: Synthetic oligonucleotide
aagggucgcagcgcgcgga

SEQ ID NO: 1679269 - RNA, 19 nt, Artificial Sequence
  Description of Artificial Sequence: Synthetic oligonucleotide
gugcguaucugaccauguc

SEQ ID NO: 1679270 - RNA, 19 nt, Artificial Sequence
  Description of Artificial Sequence: Synthetic oligonucleotide
ugcccguauuucagggcuc

SEQ ID NO: 1679271 - RNA, 19 nt, Artificial Sequence
  Description of Artificial Sequence: Synthetic oligonucleotide
ggaguagaacugauggaga

SEQ ID NO: 1679272 - RNA, 19 nt, Artificial Sequence
  Description of Artificial Sequence: Synthetic oligonucleotide
auguacaggcacacgccca

SEQ ID NO: 1679273 - RNA, 19 nt, Artificial Sequence
  Description of Artificial Sequence: Synthetic oligonucleotide
cugcauguacaggcacacg

SEQ ID NO: 1679274 - RNA, 19 nt, Artificial Sequence
  Description of Artificial Sequence: Synthetic oligonucleotide
gguggaucuccuguacagc

SEQ ID NO: 1679275 - RNA, 19 nt, Artificial Sequence
  Description of Artificial Sequence: Synthetic oligonucleotide
cguaucugaccaugucucg

SEQ ID NO: 1679276 - RNA, 19 nt, Artificial Sequence
  Description of Artificial Sequence: Synthetic oligonucleotide
agucucuuaaccggucauu

SEQ ID NO: 1679277 - RNA, 19 nt, Artificial Sequence
  Description of Artificial Sequence: Synthetic oligonucleotide
cugguacaucauguguaac

SEQ ID NO: 1679278 - RNA, 19 nt, Artificial Sequence
  Description of Artificial Sequence: Synthetic oligonucleotide
acguugcgugcguaucuga

SEQ ID NO: 1679279 - RNA, 19 nt, Artificial Sequence
  Description of Artificial Sequence: Synthetic oligonucleotide
cuuggcccuucggaauucc

SEQ ID NO: 1679280 - RNA, 19 nt, Artificial Sequence
  Description of Artificial Sequence: Synthetic oligonucleotide
aggucacgaugacguuagg

SEQ ID NO: 1679281 - RNA, 19 nt, Artificial Sequence
  Description of Artificial Sequence: Synthetic oligonucleotide
agcggcgaugucacucugg

SEQ ID NO: 1679282 - RNA, 19 nt, Artificial Sequence
  Description of Artificial Sequence: Synthetic oligonucleotide
gccgcaccgucuccgaagg

SEQ ID NO: 1679283 - RNA, 19 nt, Artificial Sequence
  Description of Artificial Sequence: Synthetic oligonucleotide
caggcguaggccgggcagg

SEQ ID NO: 1679284 - RNA, 19 nt, Artificial Sequence
  Description of Artificial Sequence: Synthetic oligonucleotide
gauggagagcggcgauguc

SEQ ID NO: 1679285 - RNA, 19 nt, Artificial Sequence
  Description of Artificial Sequence: Synthetic oligonucleotide
cuuaaccggucauuccugu

SEQ ID NO: 1679286 - RNA, 19 nt, Artificial Sequence
  Description of Artificial Sequence: Synthetic oligonucleotide
cagcacucgcagugguggc

SEQ ID NO: 1679287 - RNA, 19 nt, Artificial Sequence
  Description of Artificial Sequence: Synthetic oligonucleotide
cuugaucucggagauguau

SEQ ID NO: 1679288 - RNA, 19 nt, Artificial Sequence
  Description of Artificial Sequence: Synthetic oligonucleotide
ucggacggcuucugccugu

SEQ ID NO: 1679289 - RNA, 19 nt, Artificial Sequence
  Description of Artificial Sequence: Synthetic oligonucleotide
accccaaaugagagagcuc

SEQ ID NO: 1679290 - RNA, 19 nt, Artificial Sequence
  Description of Artificial Sequence: Synthetic oligonucleotide
ggucggggaacuccaggug

SEQ ID NO: 1679291 - RNA, 19 nt, Artificial Sequence
  Description of Artificial Sequence: Synthetic oligonucleotide
uuccgccagggucccuuug

SEQ ID NO: 1679292 - RNA, 19 nt, Artificial Sequence
  Description of Artificial Sequence: Synthetic oligonucleotide
ggcccauguacagucuucc

SEQ ID NO: 1679293 - RNA, 19 nt, Artificial Sequence
  Description of Artificial Sequence: Synthetic oligonucleotide
aggguagugcuuacuguaa

SEQ ID NO: 1679294 - RNA, 19 nt, Artificial Sequence
  Description of Artificial Sequence: Synthetic oligonucleotide
ugagguccuucuucucauu

SEQ ID NO: 1679295 - RNA, 19 nt, Artificial Sequence
  Description of Artificial Sequence: Synthetic oligonucleotide
agccacauggaggcuacau

SEQ ID NO: 1679296 - RNA, 19 nt, Artificial Sequence
  Description of Artificial Sequence: Synthetic oligonucleotide
gcaggcguaggccgggcag

SEQ ID NO: 1679297 - RNA, 19 nt, Artificial Sequence
  Description of Artificial Sequence: Synthetic oligonucleotide
cucggacggcuucugccug

SEQ ID NO: 1679298 - RNA, 19 nt, Artificial Sequence
  Description of Artificial Sequence: Synthetic oligonucleotide
gguacaucauguguaacau

SEQ ID NO: 1679299 - RNA, 19 nt, Artificial Sequence
  Description of Artificial Sequence: Synthetic oligonucleotide
ugcuuacuguaaggcuuga

SEQ ID NO: 1679300 - RNA, 19 nt, Artificial Sequence
  Description of Artificial Sequence: Synthetic oligonucleotide
cauuuugacaguccuucuu

SEQ ID NO: 1679301 - RNA, 19 nt, Artificial Sequence
  Description of Artificial Sequence: Synthetic oligonucleotide
gugccuggaguagaacuga

SEQ ID NO: 1679302 - RNA, 19 nt, Artificial Sequence
  Description of Artificial Sequence: Synthetic oligonucleotide
cugcccguauuucagggcu

SEQ ID NO: 1679303 - RNA, 19 nt, Artificial Sequence
  Description of Artificial Sequence: Synthetic oligonucleotide
acucgcagugguggccccg

SEQ ID NO: 1679304 - RNA, 19 nt, Artificial Sequence
  Description of Artificial Sequence: Synthetic oligonucleotide
ugaccaugucucggacggc

SEQ ID NO: 1679305 - RNA, 19 nt, Artificial Sequence
  Description of Artificial Sequence: Synthetic oligonucleotide
cuugcccgcgcugcagaag

SEQ ID NO: 1679306 - RNA, 19 nt, Artificial Sequence
  Description of Artificial Sequence: Synthetic oligonucleotide
gaggcuacauugagggagu

SEQ ID NO: 1679307 - RNA, 19 nt, Artificial Sequence
  Description of Artificial Sequence: Synthetic oligonucleotide
gcacucacagguaaagaaa

SEQ ID NO: 1679308 - RNA, 19 nt, Artificial Sequence
  Description of Artificial Sequence: Synthetic oligonucleotide
aaacgccugcuugcaucgu

SEQ ID NO: 1679309 - RNA, 19 nt, Artificial Sequence
  Description of Artificial Sequence: Synthetic oligonucleotide
gugcacucccggcacucac

SEQ ID NO: 1679310 - RNA, 19 nt, Artificial Sequence
  Description of Artificial Sequence: Synthetic oligonucleotide
cuccuguacagcucugacu

SEQ ID NO: 1679311 - RNA, 19 nt, Artificial Sequence
  Description of Artificial Sequence: Synthetic oligonucleotide
gagcggcgaugucacucug

SEQ ID NO: 1679312 - RNA, 19 nt, Artificial Sequence
  Description of Artificial Sequence: Synthetic oligonucleotide
cucgcagugguggccccgc

SEQ ID NO: 1679313 - RNA, 19 nt, Artificial Sequence
  Description of Artificial Sequence: Synthetic oligonucleotide
aguacacaggguagugcuu

SEQ ID NO: 1679314 - RNA, 19 nt, Artificial Sequence
  Description of Artificial Sequence: Synthetic oligonucleotide
aggaggucgcccacgugga

SEQ ID NO: 1679315 - RNA, 19 nt, Artificial Sequence
  Description of Artificial Sequence: Synthetic oligonucleotide
cucggcgcgcaugcuggcg

SEQ ID NO: 1679316 - RNA, 19 nt, Artificial Sequence
  Description of Artificial Sequence: Synthetic oligonucleotide
cuucgucuucaauggugaa

SEQ ID NO: 1679317 - RNA, 19 nt, Artificial Sequence
  Description of Artificial Sequence: Synthetic oligonucleotide
gcaacagcugugauucauc

SEQ ID NO: 1679318 - RNA, 19 nt, Artificial Sequence
  Description of Artificial Sequence: Synthetic oligonucleotide
acuuccgccagggucccuu

SEQ ID NO: 1679319 - RNA, 19 nt, Artificial Sequence
  Description of Artificial Sequence: Synthetic oligonucleotide
gcggcgaugucacucugga

SEQ ID NO: 1679320 - RNA, 19 nt, Artificial Sequence
  Description of Artificial Sequence: Synthetic oligonucleotide
cacgcaggcguaggccggg

SEQ ID NO: 1679321 - RNA, 19 nt, Artificial Sequence
  Description of Artificial Sequence: Synthetic oligonucleotide
gcccauguacagucuuccc

SEQ ID NO: 1679322 - RNA, 19 nt, Artificial Sequence
  Description of Artificial Sequence: Synthetic oligonucleotide
gccucggcgcgcaugcugg

SEQ ID NO: 1679323 - RNA, 19 nt, Artificial Sequence
  Description of Artificial Sequence: Synthetic oligonucleotide
ugcgugcguaucugaccau

SEQ ID NO: 1679324 - RNA, 19 nt, Artificial Sequence
  Description of Artificial Sequence: Synthetic oligonucleotide
uugcugugagccgcaccgu

SEQ ID NO: 1679325 - RNA, 19 nt, Artificial Sequence
  Description of Artificial Sequence: Synthetic oligonucleotide
augucucggacggcuucug

SEQ ID NO: 1679326 - RNA, 19 nt, Artificial Sequence
  Description of Artificial Sequence: Synthetic oligonucleotide
cagucaguggcucucgauu

SEQ ID NO: 1679327 - RNA, 19 nt, Artificial Sequence
  Description of Artificial Sequence: Synthetic oligonucleotide
caggucgauguagcuggug

SEQ ID NO: 1679328 - RNA, 19 nt, Artificial Sequence
  Description of Artificial Sequence: Synthetic oligonucleotide
guaaaacgccugcuugcau

SEQ ID NO: 1679329 - RNA, 19 nt, Artificial Sequence
  Description of Artificial Sequence: Synthetic oligonucleotide
cguugcgugcguaucugac

SEQ ID NO: 1679330 - RNA, 19 nt, Artificial Sequence
  Description of Artificial Sequence: Synthetic oligonucleotide
ggcuacauugagggaguac

SEQ ID NO: 1679331 - RNA, 19 nt, Artificial Sequence
  Description of Artificial Sequence: Synthetic oligonucleotide
cagggucccuuuguagguc

SEQ ID NO: 1679332 - RNA, 19 nt, Artificial Sequence
  Description of Artificial Sequence: Synthetic oligonucleotide
cguuagggcaacagcugug

SEQ ID NO: 1679333 - RNA, 19 nt, Artificial Sequence
  Description of Artificial Sequence: Synthetic oligonucleotide
gcguaggccgggcaggaga

SEQ ID NO: 1679334 - RNA, 19 nt, Artificial Sequence
  Description of Artificial Sequence: Synthetic oligonucleotide
ccugucuucuguuggauau

SEQ ID NO: 1679335 - RNA, 19 nt, Artificial Sequence
  Description of Artificial Sequence: Synthetic oligonucleotide
uccuuaccaugagcuacuu

SEQ ID NO: 1679336 - RNA, 19 nt, Artificial Sequence
  Description of Artificial Sequence: Synthetic oligonucleotide
guccuuaccaugagcuacu

SEQ ID NO: 1679337 - RNA, 19 nt, Artificial Sequence
  Description of Artificial Sequence: Synthetic oligonucleotide
acgcaggcguaggccgggc

SEQ ID NO: 1679338 - RNA, 19 nt, Artificial Sequence
  Description of Artificial Sequence: Synthetic oligonucleotide
ccacggugagcacgcaggc

SEQ ID NO: 1679339 - RNA, 19 nt, Artificial Sequence
  Description of Artificial Sequence: Synthetic oligonucleotide
ccuggcgaagcagcacucg

SEQ ID NO: 1679340 - RNA, 19 nt, Artificial Sequence
  Description of Artificial Sequence: Synthetic oligonucleotide
gcacucgcagugguggccc

SEQ ID NO: 1679341 - RNA, 19 nt, Artificial Sequence
  Description of Artificial Sequence: Synthetic oligonucleotide
gaugggauucaaacuccuu

SEQ ID NO: 1679342 - RNA, 19 nt, Artificial Sequence
  Description of Artificial Sequence: Synthetic oligonucleotide
caccgcgggccucggcgcg

SEQ ID NO: 1679343 - RNA, 19 nt, Artificial Sequence
  Description of Artificial Sequence: Synthetic oligonucleotide
gcgugcguaucugaccaug

SEQ ID NO: 1679344 - RNA, 19 nt, Artificial Sequence
  Description of Artificial Sequence: Synthetic oligonucleotide
gccuggaguagaacugaug

SEQ ID NO: 1679345 - RNA, 19 nt, Artificial Sequence
  Description of Artificial Sequence: Synthetic oligonucleotide
gcccguauuucagggcucc

SEQ ID NO: 1679346 - RNA, 19 nt, Artificial Sequence
  Description of Artificial Sequence: Synthetic oligonucleotide
ccaguccugcauguacagg

SEQ ID NO: 1679347 - RNA, 19 nt, Artificial Sequence
  Description of Artificial Sequence: Synthetic oligonucleotide
cugcuugaucucggagaug

SEQ ID NO: 1679348 - RNA, 19 nt, Artificial Sequence
  Description of Artificial Sequence: Synthetic oligonucleotide
ggccucggcgcgcaugcug

SEQ ID NO: 1679349 - RNA, 19 nt, Artificial Sequence
  Description of Artificial Sequence: Synthetic oligonucleotide
ucgcagugguggccccgcu

SEQ ID NO: 1679350 - RNA, 19 nt, Artificial Sequence
  Description of Artificial Sequence: Synthetic oligonucleotide
ccuuaccaugagcuacuuc

SEQ ID NO: 1679351 - RNA, 19 nt, Artificial Sequence
  Description of Artificial Sequence: Synthetic oligonucleotide
cgccgaccccaaaugagag

SEQ ID NO: 1679352 - RNA, 19 nt, Artificial Sequence
  Description of Artificial Sequence: Synthetic oligonucleotide
gcccacggugagcacgcag

SEQ ID NO: 1679353 - RNA, 19 nt, Artificial Sequence
  Description of Artificial Sequence: Synthetic oligonucleotide
gugcuuggcccuucggaau

SEQ ID NO: 1679354 - RNA, 19 nt, Artificial Sequence
  Description of Artificial Sequence: Synthetic oligonucleotide
aggcguaggccgggcagga

SEQ ID NO: 1679355 - RNA, 19 nt, Artificial Sequence
  Description of Artificial Sequence: Synthetic oligonucleotide
gccccgcucgcccacggug

SEQ ID NO: 1679356 - RNA, 19 nt, Artificial Sequence
  Description of Artificial Sequence: Synthetic oligonucleotide
ugcuguggucggggaacuc

SEQ ID NO: 1679357 - RNA, 19 nt, Artificial Sequence
  Description of Artificial Sequence: Synthetic oligonucleotide
ggaacuccaggugccugga

SEQ ID NO: 1679358 - RNA, 19 nt, Artificial Sequence
  Description of Artificial Sequence: Synthetic oligonucleotide
gcacgcaggcguaggccgg

SEQ ID NO: 1679359 - RNA, 19 nt, Artificial Sequence
  Description of Artificial Sequence: Synthetic oligonucleotide
gccgaccccaaaugagaga

SEQ ID NO: 1679360 - RNA, 19 nt, Artificial Sequence
  Description of Artificial Sequence: Synthetic oligonucleotide
gagcaccacgaggcugcug

SEQ ID NO: 1679361 - RNA, 19 nt, Artificial Sequence
  Description of Artificial Sequence: Synthetic oligonucleotide
caugucucggacggcuucu

SEQ ID NO: 1679362 - RNA, 19 nt, Artificial Sequence
  Description of Artificial Sequence: Synthetic oligonucleotide
gagccgcaccgucuccgaa

SEQ ID NO: 1679363 - RNA, 19 nt, Artificial Sequence
  Description of Artificial Sequence: Synthetic oligonucleotide
cuggguggauuuucuguuu

SEQ ID NO: 1679364 - RNA, 19 nt, Artificial Sequence
  Description of Artificial Sequence: Synthetic oligonucleotide
ggucgcccacguggaaggg

SEQ ID NO: 1679365 - RNA, 19 nt, Artificial Sequence
  Description of Artificial Sequence: Synthetic oligonucleotide
cggagauguauggaugguc

SEQ ID NO: 1679366 - RNA, 19 nt, Artificial Sequence
  Description of Artificial Sequence: Synthetic oligonucleotide
cagcggccuuguucuccag

SEQ ID NO: 1679367 - RNA, 19 nt, Artificial Sequence
  Description of Artificial Sequence: Synthetic oligonucleotide
accaugucucggacggcuu

SEQ ID NO: 1679368 - RNA, 19 nt, Artificial Sequence
  Description of Artificial Sequence: Synthetic oligonucleotide
ccgaaggauuccaguucuc

SEQ ID NO: 1679369 - RNA, 19 nt, Artificial Sequence
  Description of Artificial Sequence: Synthetic oligonucleotide
ggcaacagcugugauucau

SEQ ID NO: 1679370 - RNA, 19 nt, Artificial Sequence
  Description of Artificial Sequence: Synthetic oligonucleotide
ccagcggccuuguucucca

SEQ ID NO: 1679371 - RNA, 19 nt, Artificial Sequence
  Description of Artificial Sequence: Synthetic oligonucleotide
gcaccacgaggcugcugug

SEQ ID NO: 1679372 - RNA, 19 nt, Artificial Sequence
  Description of Artificial Sequence: Synthetic oligonucleotide
gcccacguggaagggucgc

SEQ ID NO: 1679373 - RNA, 19 nt, Artificial Sequence
  Description of Artificial Sequence: Synthetic oligonucleotide
caaugacguugcgugcgua

SEQ ID NO: 1679374 - RNA, 19 nt, Artificial Sequence
  Description of Artificial Sequence: Synthetic oligonucleotide
gcaguucaccugggcgaag

SEQ ID NO: 1679375 - RNA, 19 nt, Artificial Sequence
  Description of Artificial Sequence: Synthetic oligonucleotide
cgggccucggcgcgcaugc

SEQ ID NO: 1679376 - RNA, 19 nt, Artificial Sequence
  Description of Artificial Sequence: Synthetic oligonucleotide
gcucuucgucuucaauggu

SEQ ID NO: 1679377 - RNA, 19 nt, Artificial Sequence
  Description of Artificial Sequence: Synthetic oligonucleotide
ccagggucccuuuguaggu

SEQ ID NO: 1679378 - RNA, 19 nt, Artificial Sequence
  Description of Artificial Sequence: Synthetic oligonucleotide
gcccuucggaauuccucaa

SEQ ID NO: 1679379 - RNA, 19 nt, Artificial Sequence
  Description of Artificial Sequence: Synthetic oligonucleotide
cggccuuguucuccaggcc

SEQ ID NO: 1679380 - RNA, 19 nt, Artificial Sequence
  Description of Artificial Sequence: Synthetic oligonucleotide
caggcccauguacagucuu

SEQ ID NO: 1679381 - RNA, 19 nt, Artificial Sequence
  Description of Artificial Sequence: Synthetic oligonucleotide
gucgcccacguggaagggu

SEQ ID NO: 1679382 - RNA, 19 nt, Artificial Sequence
  Description of Artificial Sequence: Synthetic oligonucleotide
ggcguaggccgggcaggag

SEQ ID NO: 1679383 - RNA, 19 nt, Artificial Sequence
  Description of Artificial Sequence: Synthetic oligonucleotide
gggcaacagcugugauuca

SEQ ID NO: 1679384 - RNA, 19 nt, Artificial Sequence
  Description of Artificial Sequence: Synthetic oligonucleotide
cguaggccgggcaggagaa

SEQ ID NO: 1679385 - RNA, 19 nt, Artificial Sequence
  Description of Artificial Sequence: Synthetic oligonucleotide
ccucggcgcgcaugcuggc

SEQ ID NO: 1679386 - RNA, 19 nt, Artificial Sequence
  Description of Artificial Sequence: Synthetic oligonucleotide
ccgucuccgaaggauucca

SEQ ID NO: 1679387 - RNA, 19 nt, Artificial Sequence
  Description of Artificial Sequence: Synthetic oligonucleotide
gcgcuccaggccaccgcgg

SEQ ID NO: 1679388 - RNA, 19 nt, Artificial Sequence
  Description of Artificial Sequence: Synthetic oligonucleotide
ccuucccaguccugcaugu

SEQ ID NO: 1679389 - RNA, 19 nt, Artificial Sequence
  Description of Artificial Sequence: Synthetic oligonucleotide
cccgcucgcccacggugag

SEQ ID NO: 1679390 - RNA, 19 nt, Artificial Sequence
  Description of Artificial Sequence: Synthetic oligonucleotide
ccgcgcugcagaagcgcuc

SEQ ID NO: 1679391 - RNA, 19 nt, Artificial Sequence
  Description of Artificial Sequence: Synthetic oligonucleotide
gcgaagcagcacucgcagu

SEQ ID NO: 1679392 - RNA, 19 nt, Artificial Sequence
  Description of Artificial Sequence: Synthetic oligonucleotide
gggucgcagcgcgcggagc

SEQ ID NO: 1679393 - RNA, 19 nt, Artificial Sequence
  Description of Artificial Sequence: Synthetic oligonucleotide
gcuuacuguaaggcuugau

SEQ ID NO: 1679394 - RNA, 19 nt, Artificial Sequence
  Description of Artificial Sequence: Synthetic oligonucleotide
cgugcguaucugaccaugu

SEQ ID NO: 1679395 - RNA, 19 nt, Artificial Sequence
  Description of Artificial Sequence: Synthetic oligonucleotide
cgcaguaaaacgccugcuu

SEQ ID NO: 1679396 - RNA, 19 nt, Artificial Sequence
  Description of Artificial Sequence: Synthetic oligonucleotide
ccuugcccgcgcugcagaa

SEQ ID NO: 1679397 - RNA, 19 nt, Artificial Sequence
  Description of Artificial Sequence: Synthetic oligonucleotide
cagccacauggaggcuaca

SEQ ID NO: 1679398 - RNA, 19 nt, Artificial Sequence
  Description of Artificial Sequence: Synthetic oligonucleotide
gcaccgucuccgaaggauu

SEQ ID NO: 1679399 - RNA, 19 nt, Artificial Sequence
  Description of Artificial Sequence: Synthetic oligonucleotide
gcuugaucucggagaugua

SEQ ID NO: 1679400 - RNA, 19 nt, Artificial Sequence
  Description of Artificial Sequence: Synthetic oligonucleotide
ccggcccuugcccgcgcug

SEQ ID NO: 1679401 - RNA, 19 nt, Artificial Sequence
  Description of Artificial Sequence: Synthetic oligonucleotide
cccuucggaauuccucaau

SEQ ID NO: 1679402 - RNA, 19 nt, Artificial Sequence
  Description of Artificial Sequence: Synthetic oligonucleotide
ccgccagggucccuuugua

SEQ ID NO: 1679403 - RNA, 19 nt, Artificial Sequence
  Description of Artificial Sequence: Synthetic oligonucleotide
ccguauuucagggcuccuu

SEQ ID NO: 1679404 - RNA, 19 nt, Artificial Sequence
  Description of Artificial Sequence: Synthetic oligonucleotide
gacuuccgccagggucccu

SEQ ID NO: 1679405 - RNA, 19 nt, Artificial Sequence
  Description of Artificial Sequence: Synthetic oligonucleotide
ccaggccaccgcgggccuc

SEQ ID NO: 1679406 - RNA, 19 nt, Artificial Sequence
  Description of Artificial Sequence: Synthetic oligonucleotide
ccgcaccgucuccgaagga

SEQ ID NO: 1679407 - RNA, 19 nt, Artificial Sequence
  Description of Artificial Sequence: Synthetic oligonucleotide
cgaugacguuagggcaaca

SEQ ID NO: 1679408 - RNA, 19 nt, Artificial Sequence
  Description of Artificial Sequence: Synthetic oligonucleotide
cccguauuucagggcuccu

SEQ ID NO: 1679409 - RNA, 19 nt, Artificial Sequence
  Description of Artificial Sequence: Synthetic oligonucleotide
cggcgaugucacucuggau

SEQ ID NO: 1679410 - RNA, 19 nt, Artificial Sequence
  Description of Artificial Sequence: Synthetic oligonucleotide
cggggaacuccaggugccu

SEQ ID NO: 1679411 - RNA, 19 nt, Artificial Sequence
  Description of Artificial Sequence: Synthetic oligonucleotide
gcguccucucuggguggau

SEQ ID NO: 1679412 - RNA, 19 nt, Artificial Sequence
  Description of Artificial Sequence: Synthetic oligonucleotide
gggccucggcgcgcaugcu

SEQ ID NO: 1679413 - RNA, 19 nt, Artificial Sequence
  Description of Artificial Sequence: Synthetic oligonucleotide
uagauuaacaccaacaucc

SEQ ID NO: 1679414 - RNA, 19 nt, Artificial Sequence
  Description of Artificial Sequence: Synthetic oligonucleotide
aaagcauauuccuaggggc

SEQ ID NO: 1679415 - RNA, 19 nt, Artificial Sequence
  Description of Artificial Sequence: Synthetic oligonucleotide
aaaccgucgauucucaucc

SEQ ID NO: 1679416 - RNA, 19 nt, Artificial Sequence
  Description of Artificial Sequence: Synthetic oligonucleotide
uuuacugugaccaauaaau

SEQ ID NO: 1679417 - RNA, 19 nt, Artificial Sequence
  Description of Artificial Sequence: Synthetic oligonucleotide
uuugcuguguucuaaaggg

SEQ ID NO: 1679418 - RNA, 19 nt, Artificial Sequence
  Description of Artificial Sequence: Synthetic oligonucleotide
ugaacuugacacaauaggg

SEQ ID NO: 1679419 - RNA, 19 nt, Artificial Sequence
  Description of Artificial Sequence: Synthetic oligonucleotide
aaaauuaagauuugguuau

SEQ ID NO: 1679420 - RNA, 19 nt, Artificial Sequence
  Description of Artificial Sequence: Synthetic oligonucleotide
aacauaaagucauugauau

SEQ ID NO: 1679421 - RNA, 19 nt, Artificial Sequence
  Description of Artificial Sequence: Synthetic oligonucleotide
uuaauuuuacaguccaugg

SEQ ID NO: 1679422 - RNA, 19 nt, Artificial Sequence
  Description of Artificial Sequence: Synthetic oligonucleotide
ucuuauuuaaucugaaucu

SEQ ID NO: 1679423 - RNA, 19 nt, Artificial Sequence
  Description of Artificial Sequence: Synthetic oligonucleotide
ucaggauugaacuugacac

SEQ ID NO: 1679424 - RNA, 19 nt, Artificial Sequence
  Description of Artificial Sequence: Synthetic oligonucleotide
ugcuauguacuuaaaaucc

SEQ ID NO: 1679425 - RNA, 19 nt, Artificial Sequence
  Description of Artificial Sequence: Synthetic oligonucleotide
uaaauguucucagacagcg

SEQ ID NO: 1679426 - RNA, 19 nt, Artificial Sequence
  Description of Artificial Sequence: Synthetic oligonucleotide
guauuuagcagacacuugg

SEQ ID NO: 1679427 - RNA, 19 nt, Artificial Sequence
  Description of Artificial Sequence: Synthetic oligonucleotide
aagcagaugucucuuacgg

SEQ ID NO: 1679428 - RNA, 19 nt, Artificial Sequence
  Description of Artificial Sequence: Synthetic oligonucleotide
auugauaugugcuggcucg

SEQ ID NO: 1679429 - RNA, 19 nt, Artificial Sequence
  Description of Artificial Sequence: Synthetic oligonucleotide
uccaaaucuuccuuaaccg

SEQ ID NO: 1679430 - RNA, 19 nt, Artificial Sequence
  Description of Artificial Sequence: Synthetic oligonucleotide
gaaagcauauuccuagggg

SEQ ID NO: 1679431 - RNA, 19 nt, Artificial Sequence
  Description of Artificial Sequence: Synthetic oligonucleotide
auacgaagcagcuagagcu

SEQ ID NO: 1679432 - RNA, 19 nt, Artificial Sequence
  Description of Artificial Sequence: Synthetic oligonucleotide
aacaaaugucccgaaagcg

SEQ ID NO: 1679433 - RNA, 19 nt, Artificial Sequence
  Description of Artificial Sequence: Synthetic oligonucleotide
ugcugcucaaaacauaaag

SEQ ID NO: 1679434 - RNA, 19 nt, Artificial Sequence
  Description of Artificial Sequence: Synthetic oligonucleotide
uuaacauguaagauugucu

SEQ ID NO: 1679435 - RNA, 19 nt, Artificial Sequence
  Description of Artificial Sequence: Synthetic oligonucleotide
aacucguaggcucuuauca

SEQ ID NO: 1679436 - RNA, 19 nt, Artificial Sequence
  Description of Artificial Sequence: Synthetic oligonucleotide
acgaccguagauuaacacc

SEQ ID NO: 1679437 - RNA, 19 nt, Artificial Sequence
  Description of Artificial Sequence: Synthetic oligonucleotide
agcggaaacagucugacug

SEQ ID NO: 1679438 - RNA, 19 nt, Artificial Sequence
  Description of Artificial Sequence: Synthetic oligonucleotide
uuugcuugucuucaucagg

SEQ ID NO: 1679439 - RNA, 19 nt, Artificial Sequence
  Description of Artificial Sequence: Synthetic oligonucleotide
uguaagauugucuucuccu

SEQ ID NO: 1679440 - RNA, 19 nt, Artificial Sequence
  Description of Artificial Sequence: Synthetic oligonucleotide
acagggauuaucccauucc

SEQ ID NO: 1679441 - RNA, 19 nt, Artificial Sequence
  Description of Artificial Sequence: Synthetic oligonucleotide
aucagacguacucacaaac

SEQ ID NO: 1679442 - RNA, 19 nt, Artificial Sequence
  Description of Artificial Sequence: Synthetic oligonucleotide
ucuaaagggauuuucuggu

SEQ ID NO: 1679443 - RNA, 19 nt, Artificial Sequence
  Description of Artificial Sequence: Synthetic oligonucleotide
uuggugauuaucuagugaa

SEQ ID NO: 1679444 - RNA, 19 nt, Artificial Sequence
  Description of Artificial Sequence: Synthetic oligonucleotide
agugcauagccguaugugg

SEQ ID NO: 1679445 - RNA, 19 nt, Artificial Sequence
  Description of Artificial Sequence: Synthetic oligonucleotide
caauguauuuagcagacac

SEQ ID NO: 1679446 - RNA, 19 nt, Artificial Sequence
  Description of Artificial Sequence: Synthetic oligonucleotide
ucgauucucauccacaaaa

SEQ ID NO: 1679447 - RNA, 19 nt, Artificial Sequence
  Description of Artificial Sequence: Synthetic oligonucleotide
uuauuuaaucugaaucugu

SEQ ID NO: 1679448 - RNA, 19 nt, Artificial Sequence
  Description of Artificial Sequence: Synthetic oligonucleotide
aggcgauuuggucaggugc

SEQ ID NO: 1679449 - RNA, 19 nt, Artificial Sequence
  Description of Artificial Sequence: Synthetic oligonucleotide
uuugcugcucaaaacauaa

SEQ ID NO: 1679450 - RNA, 19 nt, Artificial Sequence
  Description of Artificial Sequence: Synthetic oligonucleotide
cacaauagggcacuuuucg

SEQ ID NO: 1679451 - RNA, 19 nt, Artificial Sequence
  Description of Artificial Sequence: Synthetic oligonucleotide
ucuaccgccacugucagag

SEQ ID NO: 1679452 - RNA, 19 nt, Artificial Sequence
  Description of Artificial Sequence: Synthetic oligonucleotide
gugauuaucuagugaaggg

SEQ ID NO: 1679453 - RNA, 19 nt, Artificial Sequence
  Description of Artificial Sequence: Synthetic oligonucleotide
cauggaacaagacagcaac

SEQ ID NO: 1679454 - RNA, 19 nt, Artificial Sequence
  Description of Artificial Sequence: Synthetic oligonucleotide
uuuccauuuggagacaaag

SEQ ID NO: 1679455 - RNA, 19 nt, Artificial Sequence
  Description of Artificial Sequence: Synthetic oligonucleotide
agaaagcauauuccuaggg

SEQ ID NO: 1679456 - RNA, 19 nt, Artificial Sequence
  Description of Artificial Sequence: Synthetic oligonucleotide
agccauacgaagcagcuag

SEQ ID NO: 1679457 - RNA, 19 nt, Artificial Sequence
  Description of Artificial Sequence: Synthetic oligonucleotide
uauguacuuaaaauccaca

SEQ ID NO: 1679458 - RNA, 19 nt, Artificial Sequence
  Description of Artificial Sequence: Synthetic oligonucleotide
auaggcugcacugaggaac

SEQ ID NO: 1679459 - RNA, 19 nt, Artificial Sequence
  Description of Artificial Sequence: Synthetic oligonucleotide
auguaagauugucuucucc

SEQ ID NO: 1679460 - RNA, 19 nt, Artificial Sequence
  Description of Artificial Sequence: Synthetic oligonucleotide
cuuaucaucagacguacuc

SEQ ID NO: 1679461 - RNA, 19 nt, Artificial Sequence
  Description of Artificial Sequence: Synthetic oligonucleotide
gacagcaacaaaugucccg

SEQ ID NO: 1679462 - RNA, 19 nt, Artificial Sequence
  Description of Artificial Sequence: Synthetic oligonucleotide
ugaccaauaaauguucuca

SEQ ID NO: 1679463 - RNA, 19 nt, Artificial Sequence
  Description of Artificial Sequence: Synthetic oligonucleotide
uuaaccgccaccuccggag

SEQ ID NO: 1679464 - RNA, 19 nt, Artificial Sequence
  Description of Artificial Sequence: Synthetic oligonucleotide
ucucuuacggcuuuacugu

SEQ ID NO: 1679465 - RNA, 19 nt, Artificial Sequence
  Description of Artificial Sequence: Synthetic oligonucleotide
uaagauuugguuauccauu

SEQ ID NO: 1679466 - RNA, 19 nt, Artificial Sequence
  Description of Artificial Sequence: Synthetic oligonucleotide
uauccauugacuggcaugc

SEQ ID NO: 1679467 - RNA, 19 nt, Artificial Sequence
  Description of Artificial Sequence: Synthetic oligonucleotide
auuaacaccaacauccuga

SEQ ID NO: 1679468 - RNA, 19 nt, Artificial Sequence
  Description of Artificial Sequence: Synthetic oligonucleotide
uuuucaggcggcacagacg

SEQ ID NO: 1679469 - RNA, 19 nt, Artificial Sequence
  Description of Artificial Sequence: Synthetic oligonucleotide
uaacauguaagauugucuu

SEQ ID NO: 1679470 - RNA, 19 nt, Artificial Sequence
  Description of Artificial Sequence: Synthetic oligonucleotide
acucacaaaccgucgauuc

SEQ ID NO: 1679471 - RNA, 19 nt, Artificial Sequence
  Description of Artificial Sequence: Synthetic oligonucleotide
uuaacaccaacauccugag

SEQ ID NO: 1679472 - RNA, 19 nt, Artificial Sequence
  Description of Artificial Sequence: Synthetic oligonucleotide
cagacguacucacaaaccg

SEQ ID NO: 1679473 - RNA, 19 nt, Artificial Sequence
  Description of Artificial Sequence: Synthetic oligonucleotide
uaggcucuuaucaucagac

SEQ ID NO: 1679474 - RNA, 19 nt, Artificial Sequence
  Description of Artificial Sequence: Synthetic oligonucleotide
uuauccauugacuggcaug

SEQ ID NO: 1679475 - RNA, 19 nt, Artificial Sequence
  Description of Artificial Sequence: Synthetic oligonucleotide
ucagacguacucacaaacc

SEQ ID NO: 1679476 - RNA, 19 nt, Artificial Sequence
  Description of Artificial Sequence: Synthetic oligonucleotide
uuuaacauguaagauuguc

SEQ ID NO: 1679477 - RNA, 19 nt, Artificial Sequence
  Description of Artificial Sequence: Synthetic oligonucleotide
ucaucagacguacucacaa

SEQ ID NO: 1679478 - RNA, 19 nt, Artificial Sequence
  Description of Artificial Sequence: Synthetic oligonucleotide
uuugaucgcagggucaagg

SEQ ID NO: 1679479 - RNA, 19 nt, Artificial Sequence
  Description of Artificial Sequence: Synthetic oligonucleotide
gucucuuacggcuuuacug

SEQ ID NO: 1679480 - RNA, 19 nt, Artificial Sequence
  Description of Artificial Sequence: Synthetic oligonucleotide
uacggcuuuacugugacca

SEQ ID NO: 1679481 - RNA, 19 nt, Artificial Sequence
  Description of Artificial Sequence: Synthetic oligonucleotide
uuccuuaaccgccaccucc

SEQ ID NO: 1679482 - RNA, 19 nt, Artificial Sequence
  Description of Artificial Sequence: Synthetic oligonucleotide
gaagcagaugucucuuacg

SEQ ID NO: 1679483 - RNA, 19 nt, Artificial Sequence
  Description of Artificial Sequence: Synthetic oligonucleotide
uccuuaaccgccaccuccg

SEQ ID NO: 1679484 - RNA, 19 nt, Artificial Sequence
  Description of Artificial Sequence: Synthetic oligonucleotide
acaaaugucccgaaagcgg

SEQ ID NO: 1679485 - RNA, 19 nt, Artificial Sequence
  Description of Artificial Sequence: Synthetic oligonucleotide
ugaagguaggaccugcccu

SEQ ID NO: 1679486 - RNA, 19 nt, Artificial Sequence
  Description of Artificial Sequence: Synthetic oligonucleotide
cuauguacuuaaaauccac

SEQ ID NO: 1679487 - RNA, 19 nt, Artificial Sequence
  Description of Artificial Sequence: Synthetic oligonucleotide
ugauuaucuagugaagggu

SEQ ID NO: 1679488 - RNA, 19 nt, Artificial Sequence
  Description of Artificial Sequence: Synthetic oligonucleotide
agcagaugucucuuacggc

SEQ ID NO: 1679489 - RNA, 19 nt, Artificial Sequence
  Description of Artificial Sequence: Synthetic oligonucleotide
ugaggaacuguguuccugc

SEQ ID NO: 1679490 - RNA, 19 nt, Artificial Sequence
  Description of Artificial Sequence: Synthetic oligonucleotide
cugagguaugugaagguag

SEQ ID NO: 1679491 - RNA, 19 nt, Artificial Sequence
  Description of Artificial Sequence: Synthetic oligonucleotide
ugaagcagaugucucuuac

SEQ ID NO: 1679492 - RNA, 19 nt, Artificial Sequence
  Description of Artificial Sequence: Synthetic oligonucleotide
aaucuaccgccacugucag

SEQ ID NO: 1679493 - RNA, 19 nt, Artificial Sequence
  Description of Artificial Sequence: Synthetic oligonucleotide
aggugcaugagagagucgg

SEQ ID NO: 1679494 - RNA, 19 nt, Artificial Sequence
  Description of Artificial Sequence: Synthetic oligonucleotide
ugguuauccauugacuggc

SEQ ID NO: 1679495 - RNA, 19 nt, Artificial Sequence
  Description of Artificial Sequence: Synthetic oligonucleotide
auugacuggcaugcuagcc

SEQ ID NO: 1679496 - RNA, 19 nt, Artificial Sequence
  Description of Artificial Sequence: Synthetic oligonucleotide
uaggauuauacugaacuuc

SEQ ID NO: 1679497 - RNA, 19 nt, Artificial Sequence
  Description of Artificial Sequence: Synthetic oligonucleotide
aaggugaacuccagucucc

SEQ ID NO: 1679498 - RNA, 19 nt, Artificial Sequence
  Description of Artificial Sequence: Synthetic oligonucleotide
accaauguauuuagcagac

SEQ ID NO: 1679499 - RNA, 19 nt, Artificial Sequence
  Description of Artificial Sequence: Synthetic oligonucleotide
uuccauuuggagacaaagu

SEQ ID NO: 1679500 - RNA, 19 nt, Artificial Sequence
  Description of Artificial Sequence: Synthetic oligonucleotide
gauuaucuagugaaggguc

SEQ ID NO: 1679501 - RNA, 19 nt, Artificial Sequence
  Description of Artificial Sequence: Synthetic oligonucleotide
ggugauuaucuagugaagg

SEQ ID NO: 1679502 - RNA, 19 nt, Artificial Sequence
  Description of Artificial Sequence: Synthetic oligonucleotide
gcaacaaaugucccgaaag

SEQ ID NO: 1679503 - RNA, 19 nt, Artificial Sequence
  Description of Artificial Sequence: Synthetic oligonucleotide
acaagacagcaacaaaugu

SEQ ID NO: 1679504 - RNA, 19 nt, Artificial Sequence
  Description of Artificial Sequence: Synthetic oligonucleotide
cuucugaugguuuggcuac

SEQ ID NO: 1679505 - RNA, 19 nt, Artificial Sequence
  Description of Artificial Sequence: Synthetic oligonucleotide
ugugaccaauaaauguucu

SEQ ID NO: 1679506 - RNA, 19 nt, Artificial Sequence
  Description of Artificial Sequence: Synthetic oligonucleotide
ugcccugauagucauacau

SEQ ID NO: 1679507 - RNA, 19 nt, Artificial Sequence
  Description of Artificial Sequence: Synthetic oligonucleotide
uucugcuauguacuuaaaa

SEQ ID NO: 1679508 - RNA, 19 nt, Artificial Sequence
  Description of Artificial Sequence: Synthetic oligonucleotide
ugaaucuguuuugugcucc

SEQ ID NO: 1679509 - RNA, 19 nt, Artificial Sequence
  Description of Artificial Sequence: Synthetic oligonucleotide
cauacgaagcagcuagagc

SEQ ID NO: 1679510 - RNA, 19 nt, Artificial Sequence
  Description of Artificial Sequence: Synthetic oligonucleotide
gaacccgagccauacgaag

SEQ ID NO: 1679511 - RNA, 19 nt, Artificial Sequence
  Description of Artificial Sequence: Synthetic oligonucleotide
ucccauagcuuaauuuuac

SEQ ID NO: 1679512 - RNA, 19 nt, Artificial Sequence
  Description of Artificial Sequence: Synthetic oligonucleotide
gauucggacccugaacccg

SEQ ID NO: 1679513 - RNA, 19 nt, Artificial Sequence
  Description of Artificial Sequence: Synthetic oligonucleotide
cugaaggcgauuuggucag

SEQ ID NO: 1679514 - RNA, 19 nt, Artificial Sequence
  Description of Artificial Sequence: Synthetic oligonucleotide
gaaucuaccgccacuguca

SEQ ID NO: 1679515 - RNA, 19 nt, Artificial Sequence
  Description of Artificial Sequence: Synthetic oligonucleotide
agccguauguggcaaaugu

SEQ ID NO: 1679516 - RNA, 19 nt, Artificial Sequence
  Description of Artificial Sequence: Synthetic oligonucleotide
auguauuuagcagacacuu

SEQ ID NO: 1679517 - RNA, 19 nt, Artificial Sequence
  Description of Artificial Sequence: Synthetic oligonucleotide
accguagauuaacaccaac

SEQ ID NO: 1679518 - RNA, 19 nt, Artificial Sequence
  Description of Artificial Sequence: Synthetic oligonucleotide
aggcauugagugcauacug

SEQ ID NO: 1679519 - RNA, 19 nt, Artificial Sequence
  Description of Artificial Sequence: Synthetic oligonucleotide
uucccaaacucguaggcuc

SEQ ID NO: 1679520 - RNA, 19 nt, Artificial Sequence
  Description of Artificial Sequence: Synthetic oligonucleotide
uuaucccauucccaaacuc

SEQ ID NO: 1679521 - RNA, 19 nt, Artificial Sequence
  Description of Artificial Sequence: Synthetic oligonucleotide
cagggauuaucccauuccc

SEQ ID NO: 1679522 - RNA, 19 nt, Artificial Sequence
  Description of Artificial Sequence: Synthetic oligonucleotide
cauucccaaacucguaggc

SEQ ID NO: 1679523 - RNA, 19 nt, Artificial Sequence
  Description of Artificial Sequence: Synthetic oligonucleotide
gaacuucuuugaucgcagg

SEQ ID NO: 1679524 - RNA, 19 nt, Artificial Sequence
  Description of Artificial Sequence: Synthetic oligonucleotide
uggaacaagacagcaacaa

SEQ ID NO: 1679525 - RNA, 19 nt, Artificial Sequence
  Description of Artificial Sequence: Synthetic oligonucleotide
uacgaagcagcuagagcug

SEQ ID NO: 1679526 - RNA, 19 nt, Artificial Sequence
  Description of Artificial Sequence: Synthetic oligonucleotide
ugaucgcagggucaaggug

SEQ ID NO: 1679527 - RNA, 19 nt, Artificial Sequence
  Description of Artificial Sequence: Synthetic oligonucleotide
acagcaacaaaugucccga

SEQ ID NO: 1679528 - RNA, 19 nt, Artificial Sequence
  Description of Artificial Sequence: Synthetic oligonucleotide
ugaacuccagucuccaaau

SEQ ID NO: 1679529 - RNA, 19 nt, Artificial Sequence
  Description of Artificial Sequence: Synthetic oligonucleotide
uaccgccacugucagagag

SEQ ID NO: 1679530 - RNA, 19 nt, Artificial Sequence
  Description of Artificial Sequence: Synthetic oligonucleotide
ucuuacggcuuuacuguga

SEQ ID NO: 1679531 - RNA, 19 nt, Artificial Sequence
  Description of Artificial Sequence: Synthetic oligonucleotide
agcgccggucuccauaaac

SEQ ID NO: 1679532 - RNA, 19 nt, Artificial Sequence
  Description of Artificial Sequence: Synthetic oligonucleotide
acaauagggcacuuuucga

SEQ ID NO: 1679533 - RNA, 19 nt, Artificial Sequence
  Description of Artificial Sequence: Synthetic oligonucleotide
uggcaugcuagccauuuuc

SEQ ID NO: 1679534 - RNA, 19 nt, Artificial Sequence
  Description of Artificial Sequence: Synthetic oligonucleotide
gaaacagucugacugcacu

SEQ ID NO: 1679535 - RNA, 19 nt, Artificial Sequence
  Description of Artificial Sequence: Synthetic oligonucleotide
acauaaagucauugauaug

SEQ ID NO: 1679536 - RNA, 19 nt, Artificial Sequence
  Description of Artificial Sequence: Synthetic oligonucleotide
agguaccugucauaggcug

SEQ ID NO: 1679537 - RNA, 19 nt, Artificial Sequence
  Description of Artificial Sequence: Synthetic oligonucleotide
cuuacggcuuuacugugac

SEQ ID NO: 1679538 - RNA, 19 nt, Artificial Sequence
  Description of Artificial Sequence: Synthetic oligonucleotide
aggaccugcccugauaguc

SEQ ID NO: 1679539 - RNA, 19 nt, Artificial Sequence
  Description of Artificial Sequence: Synthetic oligonucleotide
gacgaccguagauuaacac

SEQ ID NO: 1679540 - RNA, 19 nt, Artificial Sequence
  Description of Artificial Sequence: Synthetic oligonucleotide
cuucuuugaucgcaggguc

SEQ ID NO: 1679541 - RNA, 19 nt, Artificial Sequence
  Description of Artificial Sequence: Synthetic oligonucleotide
aggcucuuaucaucagacg

SEQ ID NO: 1679542 - RNA, 19 nt, Artificial Sequence
  Description of Artificial Sequence: Synthetic oligonucleotide
caaaugucccgaaagcgga

SEQ ID NO: 1679543 - RNA, 19 nt, Artificial Sequence
  Description of Artificial Sequence: Synthetic oligonucleotide
uuaucuagugaagggucca

SEQ ID NO: 1679544 - RNA, 19 nt, Artificial Sequence
  Description of Artificial Sequence: Synthetic oligonucleotide
ucgauuuguaaaucuugau

SEQ ID NO: 1679545 - RNA, 19 nt, Artificial Sequence
  Description of Artificial Sequence: Synthetic oligonucleotide
ucggcauauccagaaagca

SEQ ID NO: 1679546 - RNA, 19 nt, Artificial Sequence
  Description of Artificial Sequence: Synthetic oligonucleotide
uccgauucggacccugaac

SEQ ID NO: 1679547 - RNA, 19 nt, Artificial Sequence
  Description of Artificial Sequence: Synthetic oligonucleotide
caaaccgucgauucucauc

SEQ ID NO: 1679548 - RNA, 19 nt, Artificial Sequence
  Description of Artificial Sequence: Synthetic oligonucleotide
acugucccgucucuguguc

SEQ ID NO: 1679549 - RNA, 19 nt, Artificial Sequence
  Description of Artificial Sequence: Synthetic oligonucleotide
ucacaaaccgucgauucuc

SEQ ID NO: 1679550 - RNA, 19 nt, Artificial Sequence
  Description of Artificial Sequence: Synthetic oligonucleotide
uuguguguccagaccacac

SEQ ID NO: 1679551 - RNA, 19 nt, Artificial Sequence
  Description of Artificial Sequence: Synthetic oligonucleotide
acccuuuguguguccagac

SEQ ID NO: 1679552 - RNA, 19 nt, Artificial Sequence
  Description of Artificial Sequence: Synthetic oligonucleotide
ugauauacacugucccguc

SEQ ID NO: 1679553 - RNA, 19 nt, Artificial Sequence
  Description of Artificial Sequence: Synthetic oligonucleotide
augucccgaaagcggaaac

SEQ ID NO: 1679554 - RNA, 19 nt, Artificial Sequence
  Description of Artificial Sequence: Synthetic oligonucleotide
ucauccaauuccuuuuguu

SEQ ID NO: 1679555 - RNA, 19 nt, Artificial Sequence
  Description of Artificial Sequence: Synthetic oligonucleotide
gcagcuagagcugcaaucg

SEQ ID NO: 1679556 - RNA, 19 nt, Artificial Sequence
  Description of Artificial Sequence: Synthetic oligonucleotide
cauccugagguaugugaag

SEQ ID NO: 1679557 - RNA, 19 nt, Artificial Sequence
  Description of Artificial Sequence: Synthetic oligonucleotide
auuuucugguccaaacuca

SEQ ID NO: 1679558 - RNA, 19 nt, Artificial Sequence
  Description of Artificial Sequence: Synthetic oligonucleotide
uugaucgcagggucaaggu

SEQ ID NO: 1679559 - RNA, 19 nt, Artificial Sequence
  Description of Artificial Sequence: Synthetic oligonucleotide
cuaaagggauuuucugguc

SEQ ID NO: 1679560 - RNA, 19 nt, Artificial Sequence
  Description of Artificial Sequence: Synthetic oligonucleotide
gucccagaguuucagguac

SEQ ID NO: 1679561 - RNA, 19 nt, Artificial Sequence
  Description of Artificial Sequence: Synthetic oligonucleotide
gacguacucacaaaccguc

SEQ ID NO: 1679562 - RNA, 19 nt, Artificial Sequence
  Description of Artificial Sequence: Synthetic oligonucleotide
gauaugugcuggcucggca

SEQ ID NO: 1679563 - RNA, 19 nt, Artificial Sequence
  Description of Artificial Sequence: Synthetic oligonucleotide
uugauaugugcuggcucgg

SEQ ID NO: 1679564 - RNA, 19 nt, Artificial Sequence
  Description of Artificial Sequence: Synthetic oligonucleotide
gaacuguguuccugcagug

SEQ ID NO: 1679565 - RNA, 19 nt, Artificial Sequence
  Description of Artificial Sequence: Synthetic oligonucleotide
aggauugaacuugacacaa

SEQ ID NO: 1679566 - RNA, 19 nt, Artificial Sequence
  Description of Artificial Sequence: Synthetic oligonucleotide
ggucaggugcaugagagag

SEQ ID NO: 1679567 - RNA, 19 nt, Artificial Sequence
  Description of Artificial Sequence: Synthetic oligonucleotide
ugucccgucucuguguccc

SEQ ID NO: 1679568 - RNA, 19 nt, Artificial Sequence
  Description of Artificial Sequence: Synthetic oligonucleotide
uaucuagugaaggguccag

SEQ ID NO: 1679569 - RNA, 19 nt, Artificial Sequence
  Description of Artificial Sequence: Synthetic oligonucleotide
cauugacuggcaugcuagc

SEQ ID NO: 1679570 - RNA, 19 nt, Artificial Sequence
  Description of Artificial Sequence: Synthetic oligonucleotide
uugagugcauacuggguuu

SEQ ID NO: 1679571 - RNA, 19 nt, Artificial Sequence
  Description of Artificial Sequence: Synthetic oligonucleotide
uuuuccauuuggagacaaa

SEQ ID NO: 1679572 - RNA, 19 nt, Artificial Sequence
  Description of Artificial Sequence: Synthetic oligonucleotide
ugaacccgagccauacgaa

SEQ ID NO: 1679573 - RNA, 19 nt, Artificial Sequence
  Description of Artificial Sequence: Synthetic oligonucleotide
gugaccaauaaauguucuc

SEQ ID NO: 1679574 - RNA, 19 nt, Artificial Sequence
  Description of Artificial Sequence: Synthetic oligonucleotide
ccauugacuggcaugcuag

SEQ ID NO: 1679575 - RNA, 19 nt, Artificial Sequence
  Description of Artificial Sequence: Synthetic oligonucleotide
cagaguuucagguaccugu

SEQ ID NO: 1679576 - RNA, 19 nt, Artificial Sequence
  Description of Artificial Sequence: Synthetic oligonucleotide
ccgauucggacccugaacc

SEQ ID NO: 1679577 - RNA, 19 nt, Artificial Sequence
  Description of Artificial Sequence: Synthetic oligonucleotide
gugaacuccagucuccaaa

SEQ ID NO: 1679578 - RNA, 19 nt, Artificial Sequence
  Description of Artificial Sequence: Synthetic oligonucleotide
cugaacccgagccauacga

SEQ ID NO: 1679579 - RNA, 19 nt, Artificial Sequence
  Description of Artificial Sequence: Synthetic oligonucleotide
cagacgaccguagauuaac

SEQ ID NO: 1679580 - RNA, 19 nt, Artificial Sequence
  Description of Artificial Sequence: Synthetic oligonucleotide
gcucggcauauccagaaag

SEQ ID NO: 1679581 - RNA, 19 nt, Artificial Sequence
  Description of Artificial Sequence: Synthetic oligonucleotide
ggcauugagugcauacugg

SEQ ID NO: 1679582 - RNA, 19 nt, Artificial Sequence
  Description of Artificial Sequence: Synthetic oligonucleotide
auagggcacuuuucgauuu

SEQ ID NO: 1679583 - RNA, 19 nt, Artificial Sequence
  Description of Artificial Sequence: Synthetic oligonucleotide
agcaacaaaugucccgaaa

SEQ ID NO: 1679584 - RNA, 19 nt, Artificial Sequence
  Description of Artificial Sequence: Synthetic oligonucleotide
aaugucccgaaagcggaaa

SEQ ID NO: 1679585 - RNA, 19 nt, Artificial Sequence
  Description of Artificial Sequence: Synthetic oligonucleotide
uagggcacuuuucgauuug

SEQ ID NO: 1679586 - RNA, 19 nt, Artificial Sequence
  Description of Artificial Sequence: Synthetic oligonucleotide
auucccaaacucguaggcu

SEQ ID NO: 1679587 - RNA, 19 nt, Artificial Sequence
  Description of Artificial Sequence: Synthetic oligonucleotide
gggauuuucugguccaaac

SEQ ID NO: 1679588 - RNA, 19 nt, Artificial Sequence
  Description of Artificial Sequence: Synthetic oligonucleotide
gcuggcucggcauauccag

SEQ ID NO: 1679589 - RNA, 19 nt, Artificial Sequence
  Description of Artificial Sequence: Synthetic oligonucleotide
caggcggcacagacgaccg

SEQ ID NO: 1679590 - RNA, 19 nt, Artificial Sequence
  Description of Artificial Sequence: Synthetic oligonucleotide
ucccgaaagcggaaacagu

SEQ ID NO: 1679591 - RNA, 19 nt, Artificial Sequence
  Description of Artificial Sequence: Synthetic oligonucleotide
ucagacaucccggccacaa

SEQ ID NO: 1679592 - RNA, 19 nt, Artificial Sequence
  Description of Artificial Sequence: Synthetic oligonucleotide
agauuaacaccaacauccu

SEQ ID NO: 1679593 - RNA, 19 nt, Artificial Sequence
  Description of Artificial Sequence: Synthetic oligonucleotide
cccgaaagcggaaacaguc

SEQ ID NO: 1679594 - RNA, 19 nt, Artificial Sequence
  Description of Artificial Sequence: Synthetic oligonucleotide
cacugcaggcauugagugc

SEQ ID NO: 1679595 - RNA, 19 nt, Artificial Sequence
  Description of Artificial Sequence: Synthetic oligonucleotide
cugaacuucuuugaucgca

SEQ ID NO: 1679596 - RNA, 19 nt, Artificial Sequence
  Description of Artificial Sequence: Synthetic oligonucleotide
cagugcauagccguaugug

SEQ ID NO: 1679597 - RNA, 19 nt, Artificial Sequence
  Description of Artificial Sequence: Synthetic oligonucleotide
cucuuacggcuuuacugug

SEQ ID NO: 1679598 - RNA, 19 nt, Artificial Sequence
  Description of Artificial Sequence: Synthetic oligonucleotide
uggcucggcauauccagaa

SEQ ID NO: 1679599 - RNA, 19 nt, Artificial Sequence
  Description of Artificial Sequence: Synthetic oligonucleotide
guaaaucuugauauacacu

SEQ ID NO: 1679600 - RNA, 19 nt, Artificial Sequence
  Description of Artificial Sequence: Synthetic oligonucleotide
uacuggguuucugcuaugu

SEQ ID NO: 1679601 - RNA, 19 nt, Artificial Sequence
  Description of Artificial Sequence: Synthetic oligonucleotide
uaaccgccaccuccggagc

SEQ ID NO: 1679602 - RNA, 19 nt, Artificial Sequence
  Description of Artificial Sequence: Synthetic oligonucleotide
acguacucacaaaccgucg

SEQ ID NO: 1679603 - RNA, 19 nt, Artificial Sequence
  Description of Artificial Sequence: Synthetic oligonucleotide
cacuuuucgauuuguaaau

SEQ ID NO: 1679604 - RNA, 19 nt, Artificial Sequence
  Description of Artificial Sequence: Synthetic oligonucleotide
agacguacucacaaaccgu

SEQ ID NO: 1679605 - RNA, 19 nt, Artificial Sequence
  Description of Artificial Sequence: Synthetic oligonucleotide
gcagaugucucuuacggcu

SEQ ID NO: 1679606 - RNA, 19 nt, Artificial Sequence
  Description of Artificial Sequence: Synthetic oligonucleotide
gauauacacugucccgucu

SEQ ID NO: 1679607 - RNA, 19 nt, Artificial Sequence
  Description of Artificial Sequence: Synthetic oligonucleotide
cacagggauuaucccauuc

SEQ ID NO: 1679608 - RNA, 19 nt, Artificial Sequence
  Description of Artificial Sequence: Synthetic oligonucleotide
uuacggcuuuacugugacc

SEQ ID NO: 1679609 - RNA, 19 nt, Artificial Sequence
  Description of Artificial Sequence: Synthetic oligonucleotide
cccauucccaaacucguag

SEQ ID NO: 1679610 - RNA, 19 nt, Artificial Sequence
  Description of Artificial Sequence: Synthetic oligonucleotide
ccauucccaaacucguagg

SEQ ID NO: 1679611 - RNA, 19 nt, Artificial Sequence
  Description of Artificial Sequence: Synthetic oligonucleotide
cugaggaacuguguuccug

SEQ ID NO: 1679612 - RNA, 19 nt, Artificial Sequence
  Description of Artificial Sequence: Synthetic oligonucleotide
ggcucuuaucaucagacgu

SEQ ID NO: 1679613 - RNA, 19 nt, Artificial Sequence
  Description of Artificial Sequence: Synthetic oligonucleotide
agggauuaucccauuccca

SEQ ID NO: 1679614 - RNA, 19 nt, Artificial Sequence
  Description of Artificial Sequence: Synthetic oligonucleotide
ggcauauccagaaagcaua

SEQ ID NO: 1679615 - RNA, 19 nt, Artificial Sequence
  Description of Artificial Sequence: Synthetic oligonucleotide
uacucacaaaccgucgauu

SEQ ID NO: 1679616 - RNA, 19 nt, Artificial Sequence
  Description of Artificial Sequence: Synthetic oligonucleotide
gcaugagagagucggcggc

SEQ ID NO: 1679617 - RNA, 19 nt, Artificial Sequence
  Description of Artificial Sequence: Synthetic oligonucleotide
caauagggcacuuuucgau

SEQ ID NO: 1679618 - RNA, 19 nt, Artificial Sequence
  Description of Artificial Sequence: Synthetic oligonucleotide
ccguagauuaacaccaaca

SEQ ID NO: 1679619 - RNA, 19 nt, Artificial Sequence
  Description of Artificial Sequence: Synthetic oligonucleotide
ccuuuguguguccagacca

SEQ ID NO: 1679620 - RNA, 19 nt, Artificial Sequence
  Description of Artificial Sequence: Synthetic oligonucleotide
cuuugcugcucaaaacaua

SEQ ID NO: 1679621 - RNA, 19 nt, Artificial Sequence
  Description of Artificial Sequence: Synthetic oligonucleotide
gaggaacuguguuccugca

SEQ ID NO: 1679622 - RNA, 19 nt, Artificial Sequence
  Description of Artificial Sequence: Synthetic oligonucleotide
cagcuagagcugcaaucgc

SEQ ID NO: 1679623 - RNA, 19 nt, Artificial Sequence
  Description of Artificial Sequence: Synthetic oligonucleotide
uucggacccugaacccgag

SEQ ID NO: 1679624 - RNA, 19 nt, Artificial Sequence
  Description of Artificial Sequence: Synthetic oligonucleotide
gcuauguacuuaaaaucca

SEQ ID NO: 1679625 - RNA, 19 nt, Artificial Sequence
  Description of Artificial Sequence: Synthetic oligonucleotide
guaggauuauacugaacuu

SEQ ID NO: 1679626 - RNA, 19 nt, Artificial Sequence
  Description of Artificial Sequence: Synthetic oligonucleotide
ggcaugcuagccauuuucc

SEQ ID NO: 1679627 - RNA, 19 nt, Artificial Sequence
  Description of Artificial Sequence: Synthetic oligonucleotide
ugagugcauacuggguuuc

SEQ ID NO: 1679628 - RNA, 19 nt, Artificial Sequence
  Description of Artificial Sequence: Synthetic oligonucleotide
cacagacgaccguagauua

SEQ ID NO: 1679629 - RNA, 19 nt, Artificial Sequence
  Description of Artificial Sequence: Synthetic oligonucleotide
auggaacaagacagcaaca

SEQ ID NO: 1679630 - RNA, 19 nt, Artificial Sequence
  Description of Artificial Sequence: Synthetic oligonucleotide
aaccgucgauucucaucca

SEQ ID NO: 1679631 - RNA, 19 nt, Artificial Sequence
  Description of Artificial Sequence: Synthetic oligonucleotide
aagguaggaccugcccuga

SEQ ID NO: 1679632 - RNA, 19 nt, Artificial Sequence
  Description of Artificial Sequence: Synthetic oligonucleotide
caugcuagccauuuuccau

SEQ ID NO: 1679633 - RNA, 19 nt, Artificial Sequence
  Description of Artificial Sequence: Synthetic oligonucleotide
gacaucccggccacaaaga

SEQ ID NO: 1679634 - RNA, 19 nt, Artificial Sequence
  Description of Artificial Sequence: Synthetic oligonucleotide
auagccguauguggcaaau

SEQ ID NO: 1679635 - RNA, 19 nt, Artificial Sequence
  Description of Artificial Sequence: Synthetic oligonucleotide
cgaccguagauuaacacca

SEQ ID NO: 1679636 - RNA, 19 nt, Artificial Sequence
  Description of Artificial Sequence: Synthetic oligonucleotide
cacaaaccgucgauucuca

SEQ ID NO: 1679637 - RNA, 19 nt, Artificial Sequence
  Description of Artificial Sequence: Synthetic oligonucleotide
guaccugucauaggcugca

SEQ ID NO: 1679638 - RNA, 19 nt, Artificial Sequence
  Description of Artificial Sequence: Synthetic oligonucleotide
ggucucauagguaggauua

SEQ ID NO: 1679639 - RNA, 19 nt, Artificial Sequence
  Description of Artificial Sequence: Synthetic oligonucleotide
ccgaguccgauucggaccc

SEQ ID NO: 1679640 - RNA, 19 nt, Artificial Sequence
  Description of Artificial Sequence: Synthetic oligonucleotide
ccugauagucauacauuuc

SEQ ID NO: 1679641 - RNA, 19 nt, Artificial Sequence
  Description of Artificial Sequence: Synthetic oligonucleotide
ugaaggcgauuuggucagg

SEQ ID NO: 1679642 - RNA, 19 nt, Artificial Sequence
  Description of Artificial Sequence: Synthetic oligonucleotide
cuuccuuaaccgccaccuc

SEQ ID NO: 1679643 - RNA, 19 nt, Artificial Sequence
  Description of Artificial Sequence: Synthetic oligonucleotide
acaaaccgucgauucucau

SEQ ID NO: 1679644 - RNA, 19 nt, Artificial Sequence
  Description of Artificial Sequence: Synthetic oligonucleotide
caggugcaugagagagucg

SEQ ID NO: 1679645 - RNA, 19 nt, Artificial Sequence
  Description of Artificial Sequence: Synthetic oligonucleotide
uucugaugguuuggcuaca

SEQ ID NO: 1679646 - RNA, 19 nt, Artificial Sequence
  Description of Artificial Sequence: Synthetic oligonucleotide
ucggacccugaacccgagc

SEQ ID NO: 1679647 - RNA, 19 nt, Artificial Sequence
  Description of Artificial Sequence: Synthetic oligonucleotide
gacagcgccggucuccaua

SEQ ID NO: 1679648 - RNA, 19 nt, Artificial Sequence
  Description of Artificial Sequence: Synthetic oligonucleotide
uagccguauguggcaaaug

SEQ ID NO: 1679649 - RNA, 19 nt, Artificial Sequence
  Description of Artificial Sequence: Synthetic oligonucleotide
auucggacccugaacccga

SEQ ID NO: 1679650 - RNA, 19 nt, Artificial Sequence
  Description of Artificial Sequence: Synthetic oligonucleotide
aggugaacuccagucucca

SEQ ID NO: 1679651 - RNA, 19 nt, Artificial Sequence
  Description of Artificial Sequence: Synthetic oligonucleotide
caucagacguacucacaaa

SEQ ID NO: 1679652 - RNA, 19 nt, Artificial Sequence
  Description of Artificial Sequence: Synthetic oligonucleotide
cauugagugcauacugggu

SEQ ID NO: 1679653 - RNA, 19 nt, Artificial Sequence
  Description of Artificial Sequence: Synthetic oligonucleotide
uaggaccugcccugauagu

SEQ ID NO: 1679654 - RNA, 19 nt, Artificial Sequence
  Description of Artificial Sequence: Synthetic oligonucleotide
gguaccugucauaggcugc

SEQ ID NO: 1679655 - RNA, 19 nt, Artificial Sequence
  Description of Artificial Sequence: Synthetic oligonucleotide
agcggacaccgacugcccu

SEQ ID NO: 1679656 - RNA, 19 nt, Artificial Sequence
  Description of Artificial Sequence: Synthetic oligonucleotide
ugacacaauagggcacuuu

SEQ ID NO: 1679657 - RNA, 19 nt, Artificial Sequence
  Description of Artificial Sequence: Synthetic oligonucleotide
cgaaagcggaaacagucug

SEQ ID NO: 1679658 - RNA, 19 nt, Artificial Sequence
  Description of Artificial Sequence: Synthetic oligonucleotide
cuuugaucgcagggucaag

SEQ ID NO: 1679659 - RNA, 19 nt, Artificial Sequence
  Description of Artificial Sequence: Synthetic oligonucleotide
gccgaaucuaccgccacug

SEQ ID NO: 1679660 - RNA, 19 nt, Artificial Sequence
  Description of Artificial Sequence: Synthetic oligonucleotide
ccauacgaagcagcuagag

SEQ ID NO: 1679661 - RNA, 19 nt, Artificial Sequence
  Description of Artificial Sequence: Synthetic oligonucleotide
ggcgauuuggucaggugca

SEQ ID NO: 1679662 - RNA, 19 nt, Artificial Sequence
  Description of Artificial Sequence: Synthetic oligonucleotide
agggcacuuuucgauuugu

SEQ ID NO: 1679663 - RNA, 19 nt, Artificial Sequence
  Description of Artificial Sequence: Synthetic oligonucleotide
gcaugcuagccauuuucca

SEQ ID NO: 1679664 - RNA, 19 nt, Artificial Sequence
  Description of Artificial Sequence: Synthetic oligonucleotide
agacgaccguagauuaaca

SEQ ID NO: 1679665 - RNA, 19 nt, Artificial Sequence
  Description of Artificial Sequence: Synthetic oligonucleotide
gaguccgauucggacccug

SEQ ID NO: 1679666 - RNA, 19 nt, Artificial Sequence
  Description of Artificial Sequence: Synthetic oligonucleotide
agggauuuucugguccaaa

SEQ ID NO: 1679667 - RNA, 19 nt, Artificial Sequence
  Description of Artificial Sequence: Synthetic oligonucleotide
cucacaaaccgucgauucu

SEQ ID NO: 1679668 - RNA, 19 nt, Artificial Sequence
  Description of Artificial Sequence: Synthetic oligonucleotide
guuauccauugacuggcau

SEQ ID NO: 1679669 - RNA, 19 nt, Artificial Sequence
  Description of Artificial Sequence: Synthetic oligonucleotide
guacucacaaaccgucgau

SEQ ID NO: 1679670 - RNA, 19 nt, Artificial Sequence
  Description of Artificial Sequence: Synthetic oligonucleotide
caacauccugagguaugug

SEQ ID NO: 1679671 - RNA, 19 nt, Artificial Sequence
  Description of Artificial Sequence: Synthetic oligonucleotide
agccauuugcuguguucua

SEQ ID NO: 1679672 - RNA, 19 nt, Artificial Sequence
  Description of Artificial Sequence: Synthetic oligonucleotide
guauguggcaaauguucuu

SEQ ID NO: 1679673 - RNA, 19 nt, Artificial Sequence
  Description of Artificial Sequence: Synthetic oligonucleotide
uucaggcggcacagacgac

SEQ ID NO: 1679674 - RNA, 19 nt, Artificial Sequence
  Description of Artificial Sequence: Synthetic oligonucleotide
cugucccgucucugugucc

SEQ ID NO: 1679675 - RNA, 19 nt, Artificial Sequence
  Description of Artificial Sequence: Synthetic oligonucleotide
gaaggcgauuuggucaggu

SEQ ID NO: 1679676 - RNA, 19 nt, Artificial Sequence
  Description of Artificial Sequence: Synthetic oligonucleotide
cuggcucggcauauccaga

SEQ ID NO: 1679677 - RNA, 19 nt, Artificial Sequence
  Description of Artificial Sequence: Synthetic oligonucleotide
ggaaacagucugacugcac

SEQ ID NO: 1679678 - RNA, 19 nt, Artificial Sequence
  Description of Artificial Sequence: Synthetic oligonucleotide
cacccuuuguguguccaga

SEQ ID NO: 1679679 - RNA, 19 nt, Artificial Sequence
  Description of Artificial Sequence: Synthetic oligonucleotide
cgauucggacccugaaccc

SEQ ID NO: 1679680 - RNA, 19 nt, Artificial Sequence
  Description of Artificial Sequence: Synthetic oligonucleotide
cgaaucuaccgccacuguc

SEQ ID NO: 1679681 - RNA, 19 nt, Artificial Sequence
  Description of Artificial Sequence: Synthetic oligonucleotide
acagacgaccguagauuaa

SEQ ID NO: 1679682 - RNA, 19 nt, Artificial Sequence
  Description of Artificial Sequence: Synthetic oligonucleotide
cauagccguauguggcaaa

SEQ ID NO: 1679683 - RNA, 19 nt, Artificial Sequence
  Description of Artificial Sequence: Synthetic oligonucleotide
gaccguagauuaacaccaa

SEQ ID NO: 1679684 - RNA, 19 nt, Artificial Sequence
  Description of Artificial Sequence: Synthetic oligonucleotide
ggacccugaacccgagcca

SEQ ID NO: 1679685 - RNA, 19 nt, Artificial Sequence
  Description of Artificial Sequence: Synthetic oligonucleotide
gacaccgacugcccucacu

SEQ ID NO: 1679686 - RNA, 19 nt, Artificial Sequence
  Description of Artificial Sequence: Synthetic oligonucleotide
gaugucucuuacggcuuua

SEQ ID NO: 1679687 - RNA, 19 nt, Artificial Sequence
  Description of Artificial Sequence: Synthetic oligonucleotide
aguccgauucggacccuga

SEQ ID NO: 1679688 - RNA, 19 nt, Artificial Sequence
  Description of Artificial Sequence: Synthetic oligonucleotide
cuguguucuaaagggauuu

SEQ ID NO: 1679689 - RNA, 19 nt, Artificial Sequence
  Description of Artificial Sequence: Synthetic oligonucleotide
uugacacaauagggcacuu

SEQ ID NO: 1679690 - RNA, 19 nt, Artificial Sequence
  Description of Artificial Sequence: Synthetic oligonucleotide
ccugaacccgagccauacg

SEQ ID NO: 1679691 - RNA, 19 nt, Artificial Sequence
  Description of Artificial Sequence: Synthetic oligonucleotide
cguagauuaacaccaacau

SEQ ID NO: 1679692 - RNA, 19 nt, Artificial Sequence
  Description of Artificial Sequence: Synthetic oligonucleotide
caaacucguaggcucuuau

SEQ ID NO: 1679693 - RNA, 19 nt, Artificial Sequence
  Description of Artificial Sequence: Synthetic oligonucleotide
uaccugucauaggcugcac

SEQ ID NO: 1679694 - RNA, 19 nt, Artificial Sequence
  Description of Artificial Sequence: Synthetic oligonucleotide
ggaccugcccugauaguca

SEQ ID NO: 1679695 - RNA, 19 nt, Artificial Sequence
  Description of Artificial Sequence: Synthetic oligonucleotide
gacccugaacccgagccau

SEQ ID NO: 1679696 - RNA, 19 nt, Artificial Sequence
  Description of Artificial Sequence: Synthetic oligonucleotide
aucgcagggucaaggugaa

SEQ ID NO: 1679697 - RNA, 19 nt, Artificial Sequence
  Description of Artificial Sequence: Synthetic oligonucleotide
gagccauacgaagcagcua

SEQ ID NO: 1679698 - RNA, 19 nt, Artificial Sequence
  Description of Artificial Sequence: Synthetic oligonucleotide
cguacucacaaaccgucga

SEQ ID NO: 1679699 - RNA, 19 nt, Artificial Sequence
  Description of Artificial Sequence: Synthetic oligonucleotide
ggcacagacgaccguagau

SEQ ID NO: 1679700 - RNA, 19 nt, Artificial Sequence
  Description of Artificial Sequence: Synthetic oligonucleotide
gguuauccauugacuggca

SEQ ID NO: 1679701 - RNA, 19 nt, Artificial Sequence
  Description of Artificial Sequence: Synthetic oligonucleotide
cccugaacccgagccauac

SEQ ID NO: 1679702 - RNA, 19 nt, Artificial Sequence
  Description of Artificial Sequence: Synthetic oligonucleotide
gcggacaccgacugcccuc

SEQ ID NO: 1679703 - RNA, 19 nt, Artificial Sequence
  Description of Artificial Sequence: Synthetic oligonucleotide
cguauguggcaaauguucu

SEQ ID NO: 1679704 - RNA, 19 nt, Artificial Sequence
  Description of Artificial Sequence: Synthetic oligonucleotide
cugcccugauagucauaca

SEQ ID NO: 1679705 - RNA, 19 nt, Artificial Sequence
  Description of Artificial Sequence: Synthetic oligonucleotide
gcggcacagacgaccguag

SEQ ID NO: 1679706 - RNA, 19 nt, Artificial Sequence
  Description of Artificial Sequence: Synthetic oligonucleotide
cagacaucccggccacaaa

SEQ ID NO: 1679707 - RNA, 19 nt, Artificial Sequence
  Description of Artificial Sequence: Synthetic oligonucleotide
cgucgauucucauccacaa

SEQ ID NO: 1679708 - RNA, 19 nt, Artificial Sequence
  Description of Artificial Sequence: Synthetic oligonucleotide
gucucauagguaggauuau

SEQ ID NO: 1679709 - RNA, 19 nt, Artificial Sequence
  Description of Artificial Sequence: Synthetic oligonucleotide
cuaccgccacugucagaga

SEQ ID NO: 1679710 - RNA, 19 nt, Artificial Sequence
  Description of Artificial Sequence: Synthetic oligonucleotide
ccgaaagcggaaacagucu

SEQ ID NO: 1679711 - RNA, 19 nt, Artificial Sequence
  Description of Artificial Sequence: Synthetic oligonucleotide
ccugagguaugugaaggua

SEQ ID NO: 1679712 - RNA, 19 nt, Artificial Sequence
  Description of Artificial Sequence: Synthetic oligonucleotide
ggcucggcauauccagaaa

SEQ ID NO: 1679713 - RNA, 19 nt, Artificial Sequence
  Description of Artificial Sequence: Synthetic oligonucleotide
gcauagccguauguggcaa

SEQ ID NO: 1679714 - RNA, 19 nt, Artificial Sequence
  Description of Artificial Sequence: Synthetic oligonucleotide
guucucagacagcgccggu

SEQ ID NO: 1679715 - RNA, 19 nt, Artificial Sequence
  Description of Artificial Sequence: Synthetic oligonucleotide
gcacagacgaccguagauu

SEQ ID NO: 1679716 - RNA, 19 nt, Artificial Sequence
  Description of Artificial Sequence: Synthetic oligonucleotide
ggcggcacagacgaccgua

SEQ ID NO: 1679717 - RNA, 19 nt, Artificial Sequence
  Description of Artificial Sequence: Synthetic oligonucleotide
ccaauguauuuagcagaca

SEQ ID NO: 1679718 - RNA, 19 nt, Artificial Sequence
  Description of Artificial Sequence: Synthetic oligonucleotide
ucgcagggucaaggugaac

SEQ ID NO: 1679719 - RNA, 19 nt, Artificial Sequence
  Description of Artificial Sequence: Synthetic oligonucleotide
gcggcuggcagcggacacc

SEQ ID NO: 1679720 - RNA, 19 nt, Artificial Sequence
  Description of Artificial Sequence: Synthetic oligonucleotide
gucccgucucuguguccca

SEQ ID NO: 1679721 - RNA, 19 nt, Artificial Sequence
  Description of Artificial Sequence: Synthetic oligonucleotide
guccagugcauagccguau

SEQ ID NO: 1679722 - RNA, 19 nt, Artificial Sequence
  Description of Artificial Sequence: Synthetic oligonucleotide
gccauacgaagcagcuaga

SEQ ID NO: 1679723 - RNA, 19 nt, Artificial Sequence
  Description of Artificial Sequence: Synthetic oligonucleotide
agucggcggcuggcagcgg

SEQ ID NO: 1679724 - RNA, 19 nt, Artificial Sequence
  Description of Artificial Sequence: Synthetic oligonucleotide
ccaacauccugagguaugu

SEQ ID NO: 1679725 - RNA, 19 nt, Artificial Sequence
  Description of Artificial Sequence: Synthetic oligonucleotide
gcgccggucuccauaaacu

SEQ ID NO: 1679726 - RNA, 19 nt, Artificial Sequence
  Description of Artificial Sequence: Synthetic oligonucleotide
ggauugaacuugacacaau

SEQ ID NO: 1679727 - RNA, 19 nt, Artificial Sequence
  Description of Artificial Sequence: Synthetic oligonucleotide
gggcacuuuucgauuugua

SEQ ID NO: 1679728 - RNA, 19 nt, Artificial Sequence
  Description of Artificial Sequence: Synthetic oligonucleotide
ccagugcauagccguaugu

SEQ ID NO: 1679729 - RNA, 19 nt, Artificial Sequence
  Description of Artificial Sequence: Synthetic oligonucleotide
acccugaacccgagccaua

SEQ ID NO: 1679730 - RNA, 19 nt, Artificial Sequence
  Description of Artificial Sequence: Synthetic oligonucleotide
cggaaacagucugacugca

SEQ ID NO: 1679731 - RNA, 19 nt, Artificial Sequence
  Description of Artificial Sequence: Synthetic oligonucleotide
gccguauguggcaaauguu

SEQ ID NO: 1679732 - RNA, 19 nt, Artificial Sequence
  Description of Artificial Sequence: Synthetic oligonucleotide
cccgucucugugucccaga

SEQ ID NO: 1679733 - RNA, 19 nt, Artificial Sequence
  Description of Artificial Sequence: Synthetic oligonucleotide
ccaaacucguaggcucuua

SEQ ID NO: 1679734 - RNA, 19 nt, Artificial Sequence
  Description of Artificial Sequence: Synthetic oligonucleotide
gcgauuuggucaggugcau

SEQ ID NO: 1679735 - RNA, 19 nt, Artificial Sequence
  Description of Artificial Sequence: Synthetic oligonucleotide
ccgaaucuaccgccacugu

SEQ ID NO: 1679736 - RNA, 19 nt, Artificial Sequence
  Description of Artificial Sequence: Synthetic oligonucleotide
cggcacagacgaccguaga

SEQ ID NO: 1679737 - RNA, 19 nt, Artificial Sequence
  Description of Artificial Sequence: Synthetic oligonucleotide
cccggccacaaagagguuu

SEQ ID NO: 1679738 - RNA, 19 nt, Artificial Sequence
  Description of Artificial Sequence: Synthetic oligonucleotide
uaaaugaugucgaagaaga

SEQ ID NO: 1679739 - RNA, 19 nt, Artificial Sequence
  Description of Artificial Sequence: Synthetic oligonucleotide
aaacaucucaaccaucuuc

SEQ ID NO: 1679740 - RNA, 19 nt, Artificial Sequence
  Description of Artificial Sequence: Synthetic oligonucleotide
gaagaaugaauuuacagca

SEQ ID NO: 1679741 - RNA, 19 nt, Artificial Sequence
  Description of Artificial Sequence: Synthetic oligonucleotide
gaauuuacagcagacacag

SEQ ID NO: 1679742 - RNA, 19 nt, Artificial Sequence
  Description of Artificial Sequence: Synthetic oligonucleotide
ucgauguccgaccacaacg

SEQ ID NO: 1679743 - RNA, 19 nt, Artificial Sequence
  Description of Artificial Sequence: Synthetic oligonucleotide
aggccuuccagauugaacg

SEQ ID NO: 1679744 - RNA, 19 nt, Artificial Sequence
  Description of Artificial Sequence: Synthetic oligonucleotide
ugaacguggaacaggaugc

SEQ ID NO: 1679745 - RNA, 19 nt, Artificial Sequence
  Description of Artificial Sequence: Synthetic oligonucleotide
uugaacguggaacaggaug

SEQ ID NO: 1679746 - RNA, 19 nt, Artificial Sequence
  Description of Artificial Sequence: Synthetic oligonucleotide
uuguggauguaaaugaugu

SEQ ID NO: 1679747 - RNA, 19 nt, Artificial Sequence
  Description of Artificial Sequence: Synthetic oligonucleotide
aaccagugcaaacucgugg

SEQ ID NO: 1679748 - RNA, 19 nt, Artificial Sequence
  Description of Artificial Sequence: Synthetic oligonucleotide
uguagaccaggauagugcg

SEQ ID NO: 1679749 - RNA, 19 nt, Artificial Sequence
  Description of Artificial Sequence: Synthetic oligonucleotide
gaagaggccuuccagauug

SEQ ID NO: 1679750 - RNA, 19 nt, Artificial Sequence
  Description of Artificial Sequence: Synthetic oligonucleotide
ugguguucgaaucuggacc

SEQ ID NO: 1679751 - RNA, 19 nt, Artificial Sequence
  Description of Artificial Sequence: Synthetic oligonucleotide
caaucuugugcuuugugcg

SEQ ID NO: 1679752 - RNA, 19 nt, Artificial Sequence
  Description of Artificial Sequence: Synthetic oligonucleotide
aucucaaccaucuucugag

SEQ ID NO: 1679753 - RNA, 19 nt, Artificial Sequence
  Description of Artificial Sequence: Synthetic oligonucleotide
gaaguagggacauuggaac

SEQ ID NO: 1679754 - RNA, 19 nt, Artificial Sequence
  Description of Artificial Sequence: Synthetic oligonucleotide
ggaagaaugaauuuacagc

SEQ ID NO: 1679755 - RNA, 19 nt, Artificial Sequence
  Description of Artificial Sequence: Synthetic oligonucleotide
aaaagcucgcacgagauca

SEQ ID NO: 1679756 - RNA, 19 nt, Artificial Sequence
  Description of Artificial Sequence: Synthetic oligonucleotide
ucaaucacaggguucuagg

SEQ ID NO: 1679757 - RNA, 19 nt, Artificial Sequence
  Description of Artificial Sequence: Synthetic oligonucleotide
ucugaaagauccaaacaga

SEQ ID NO: 1679758 - RNA, 19 nt, Artificial Sequence
  Description of Artificial Sequence: Synthetic oligonucleotide
ucauacuuguagcuggugc

SEQ ID NO: 1679759 - RNA, 19 nt, Artificial Sequence
  Description of Artificial Sequence: Synthetic oligonucleotide
ugaauuuacagcagacaca

SEQ ID NO: 1679760 - RNA, 19 nt, Artificial Sequence
  Description of Artificial Sequence: Synthetic oligonucleotide
gauagugcgcacgacauag

SEQ ID NO: 1679761 - RNA, 19 nt, Artificial Sequence
  Description of Artificial Sequence: Synthetic oligonucleotide
aggucguacaggcagcugc

SEQ ID NO: 1679762 - RNA, 19 nt, Artificial Sequence
  Description of Artificial Sequence: Synthetic oligonucleotide
aaacucguggcucuuguca

SEQ ID NO: 1679763 - RNA, 19 nt, Artificial Sequence
  Description of Artificial Sequence: Synthetic oligonucleotide
ugaaagauccaaacagaug

SEQ ID NO: 1679764 - RNA, 19 nt, Artificial Sequence
  Description of Artificial Sequence: Synthetic oligonucleotide
accacagccagucaaucac

SEQ ID NO: 1679765 - RNA, 19 nt, Artificial Sequence
  Description of Artificial Sequence: Synthetic oligonucleotide
cacucugcaaccuaggaac

SEQ ID NO: 1679766 - RNA, 19 nt, Artificial Sequence
  Description of Artificial Sequence: Synthetic oligonucleotide
acaaaguggucccaggaag

SEQ ID NO: 1679767 - RNA, 19 nt, Artificial Sequence
  Description of Artificial Sequence: Synthetic oligonucleotide
agggcguucguccuggagc

SEQ ID NO: 1679768 - RNA, 19 nt, Artificial Sequence
  Description of Artificial Sequence: Synthetic oligonucleotide
caugaaggagaacaugucc

SEQ ID NO: 1679769 - RNA, 19 nt, Artificial Sequence
  Description of Artificial Sequence: Synthetic oligonucleotide
cauacuuguagcuggugcc

SEQ ID NO: 1679770 - RNA, 19 nt, Artificial Sequence
  Description of Artificial Sequence: Synthetic oligonucleotide
aucacaggguucuaggaag

SEQ ID NO: 1679771 - RNA, 19 nt, Artificial Sequence
  Description of Artificial Sequence: Synthetic oligonucleotide
ucgucguucacuacaacca

SEQ ID NO: 1679772 - RNA, 19 nt, Artificial Sequence
  Description of Artificial Sequence: Synthetic oligonucleotide
uuuuggcacagacaucucc

SEQ ID NO: 1679773 - RNA, 19 nt, Artificial Sequence
  Description of Artificial Sequence: Synthetic oligonucleotide
uucacuacaaccagugcaa

SEQ ID NO: 1679774 - RNA, 19 nt, Artificial Sequence
  Description of Artificial Sequence: Synthetic oligonucleotide
uggauguaaaugaugucga

SEQ ID NO: 1679775 - RNA, 19 nt, Artificial Sequence
  Description of Artificial Sequence: Synthetic oligonucleotide
agaaugaauuuacagcaga

SEQ ID NO: 1679776 - RNA, 19 nt, Artificial Sequence
  Description of Artificial Sequence: Synthetic oligonucleotide
aacugcagcaagccggauc

SEQ ID NO: 1679777 - RNA, 19 nt, Artificial Sequence
  Description of Artificial Sequence: Synthetic oligonucleotide
ugcuaccucauacuuguag

SEQ ID NO: 1679778 - RNA, 19 nt, Artificial Sequence
  Description of Artificial Sequence: Synthetic oligonucleotide
uguccgaccacaacgacaa

SEQ ID NO: 1679779 - RNA, 19 nt, Artificial Sequence
  Description of Artificial Sequence: Synthetic oligonucleotide
uacaaccagugcaaacucg

SEQ ID NO: 1679780 - RNA, 19 nt, Artificial Sequence
  Description of Artificial Sequence: Synthetic oligonucleotide
ucguucacuacaaccagug

SEQ ID NO: 1679781 - RNA, 19 nt, Artificial Sequence
  Description of Artificial Sequence: Synthetic oligonucleotide
aaucacaggguucuaggaa

SEQ ID NO: 1679782 - RNA, 19 nt, Artificial Sequence
  Description of Artificial Sequence: Synthetic oligonucleotide
uccagauugaacguggaac

SEQ ID NO: 1679783 - RNA, 19 nt, Artificial Sequence
  Description of Artificial Sequence: Synthetic oligonucleotide
uagugcgcacgacauaggg

SEQ ID NO: 1679784 - RNA, 19 nt, Artificial Sequence
  Description of Artificial Sequence: Synthetic oligonucleotide
uguaaaugaugucgaagaa

SEQ ID NO: 1679785 - RNA, 19 nt, Artificial Sequence
  Description of Artificial Sequence: Synthetic oligonucleotide
guuggagcgagugugaggc

SEQ ID NO: 1679786 - RNA, 19 nt, Artificial Sequence
  Description of Artificial Sequence: Synthetic oligonucleotide
ugcacguucucugugacug

SEQ ID NO: 1679787 - RNA, 19 nt, Artificial Sequence
  Description of Artificial Sequence: Synthetic oligonucleotide
guucacuacaaccagugca

SEQ ID NO: 1679788 - RNA, 19 nt, Artificial Sequence
  Description of Artificial Sequence: Synthetic oligonucleotide
ugugcgcacaaacaucuca

SEQ ID NO: 1679789 - RNA, 19 nt, Artificial Sequence
  Description of Artificial Sequence: Synthetic oligonucleotide
ggugcuuggauggagaggg

SEQ ID NO: 1679790 - RNA, 19 nt, Artificial Sequence
  Description of Artificial Sequence: Synthetic oligonucleotide
agaucacaccgccagguuc

SEQ ID NO: 1679791 - RNA, 19 nt, Artificial Sequence
  Description of Artificial Sequence: Synthetic oligonucleotide
cugagacacguucagggcg

SEQ ID NO: 1679792 - RNA, 19 nt, Artificial Sequence
  Description of Artificial Sequence: Synthetic oligonucleotide
uuggccugagcucccaggg

SEQ ID NO: 1679793 - RNA, 19 nt, Artificial Sequence
  Description of Artificial Sequence: Synthetic oligonucleotide
aaguagggacauuggaaca

SEQ ID NO: 1679794 - RNA, 19 nt, Artificial Sequence
  Description of Artificial Sequence: Synthetic oligonucleotide
agagucgucguucacuaca

SEQ ID NO: 1679795 - RNA, 19 nt, Artificial Sequence
  Description of Artificial Sequence: Synthetic oligonucleotide
gucgucguucacuacaacc

SEQ ID NO: 1679796 - RNA, 19 nt, Artificial Sequence
  Description of Artificial Sequence: Synthetic oligonucleotide
uucgaaucuggaccucggg

SEQ ID NO: 1679797 - RNA, 19 nt, Artificial Sequence
  Description of Artificial Sequence: Synthetic oligonucleotide
aucgcggaagccaggaucc

SEQ ID NO: 1679798 - RNA, 19 nt, Artificial Sequence
  Description of Artificial Sequence: Synthetic oligonucleotide
gacacguucagggcguucg

SEQ ID NO: 1679799 - RNA, 19 nt, Artificial Sequence
  Description of Artificial Sequence: Synthetic oligonucleotide
agauccaaacagaugauca

SEQ ID NO: 1679800 - RNA, 19 nt, Artificial Sequence
  Description of Artificial Sequence: Synthetic oligonucleotide
gauugaacguggaacagga

SEQ ID NO: 1679801 - RNA, 19 nt, Artificial Sequence
  Description of Artificial Sequence: Synthetic oligonucleotide
gaaucuggaccucgggugc

SEQ ID NO: 1679802 - RNA, 19 nt, Artificial Sequence
  Description of Artificial Sequence: Synthetic oligonucleotide
ucugugacuggcagcucgg

SEQ ID NO: 1679803 - RNA, 19 nt, Artificial Sequence
  Description of Artificial Sequence: Synthetic oligonucleotide
uguucgaaucuggaccucg

SEQ ID NO: 1679804 - RNA, 19 nt, Artificial Sequence
  Description of Artificial Sequence: Synthetic oligonucleotide
cacgagaucacaccgccag

SEQ ID NO: 1679805 - RNA, 19 nt, Artificial Sequence
  Description of Artificial Sequence: Synthetic oligonucleotide
gacugaagaggccuuccag

SEQ ID NO: 1679806 - RNA, 19 nt, Artificial Sequence
  Description of Artificial Sequence: Synthetic oligonucleotide
ucgaaucuggaccucgggu

SEQ ID NO: 1679807 - RNA, 19 nt, Artificial Sequence
  Description of Artificial Sequence: Synthetic oligonucleotide
caggguucuaggaagccgc

SEQ ID NO: 1679808 - RNA, 19 nt, Artificial Sequence
  Description of Artificial Sequence: Synthetic oligonucleotide
cucgcacgagaucacaccg

SEQ ID NO: 1679809 - RNA, 19 nt, Artificial Sequence
  Description of Artificial Sequence: Synthetic oligonucleotide
ucacacgguggcuucaccc

SEQ ID NO: 1679810 - RNA, 19 nt, Artificial Sequence
  Description of Artificial Sequence: Synthetic oligonucleotide
uagcggaugggccaacagc

SEQ ID NO: 1679811 - RNA, 19 nt, Artificial Sequence
  Description of Artificial Sequence: Synthetic oligonucleotide
aguggucccaggaagaaug

SEQ ID NO: 1679812 - RNA, 19 nt, Artificial Sequence
  Description of Artificial Sequence: Synthetic oligonucleotide
aaucuggaccucgggugcc

SEQ ID NO: 1679813 - RNA, 19 nt, Artificial Sequence
  Description of Artificial Sequence: Synthetic oligonucleotide
ugagacacguucagggcgu

SEQ ID NO: 1679814 - RNA, 19 nt, Artificial Sequence
  Description of Artificial Sequence: Synthetic oligonucleotide
gauggagaggggaucgcgg

SEQ ID NO: 1679815 - RNA, 19 nt, Artificial Sequence
  Description of Artificial Sequence: Synthetic oligonucleotide
aucgauguccgaccacaac

SEQ ID NO: 1679816 - RNA, 19 nt, Artificial Sequence
  Description of Artificial Sequence: Synthetic oligonucleotide
accuaggaaccacagccag

SEQ ID NO: 1679817 - RNA, 19 nt, Artificial Sequence
  Description of Artificial Sequence: Synthetic oligonucleotide
gaucgcggaagccaggauc

SEQ ID NO: 1679818 - RNA, 19 nt, Artificial Sequence
  Description of Artificial Sequence: Synthetic oligonucleotide
uuugcacguucucugugac

SEQ ID NO: 1679819 - RNA, 19 nt, Artificial Sequence
  Description of Artificial Sequence: Synthetic oligonucleotide
uguagcucgcgugagucug

SEQ ID NO: 1679820 - RNA, 19 nt, Artificial Sequence
  Description of Artificial Sequence: Synthetic oligonucleotide
cuaggaaccacagccaguc

SEQ ID NO: 1679821 - RNA, 19 nt, Artificial Sequence
  Description of Artificial Sequence: Synthetic oligonucleotide
cagcagacacaguaggagc

SEQ ID NO: 1679822 - RNA, 19 nt, Artificial Sequence
  Description of Artificial Sequence: Synthetic oligonucleotide
aacucguggcucuugucaa

SEQ ID NO: 1679823 - RNA, 19 nt, Artificial Sequence
  Description of Artificial Sequence: Synthetic oligonucleotide
gcugcgacugcccacauug

SEQ ID NO: 1679824 - RNA, 19 nt, Artificial Sequence
  Description of Artificial Sequence: Synthetic oligonucleotide
agggaugguuugcacguuc

SEQ ID NO: 1679825 - RNA, 19 nt, Artificial Sequence
  Description of Artificial Sequence: Synthetic oligonucleotide
caagccggaucgauguccg

SEQ ID NO: 1679826 - RNA, 19 nt, Artificial Sequence
  Description of Artificial Sequence: Synthetic oligonucleotide
guccuggagccauuaaaag

SEQ ID NO: 1679827 - RNA, 19 nt, Artificial Sequence
  Description of Artificial Sequence: Synthetic oligonucleotide
aaagcucgcacgagaucac

SEQ ID NO: 1679828 - RNA, 19 nt, Artificial Sequence
  Description of Artificial Sequence: Synthetic oligonucleotide
gugacaaaguggucccagg

SEQ ID NO: 1679829 - RNA, 19 nt, Artificial Sequence
  Description of Artificial Sequence: Synthetic oligonucleotide
gaugaucaccuucucugga

SEQ ID NO: 1679830 - RNA, 19 nt, Artificial Sequence
  Description of Artificial Sequence: Synthetic oligonucleotide
ucguccuggagccauuaaa

SEQ ID NO: 1679831 - RNA, 19 nt, Artificial Sequence
  Description of Artificial Sequence: Synthetic oligonucleotide
cuaggaagccgccaucuuc

SEQ ID NO: 1679832 - RNA, 19 nt, Artificial Sequence
  Description of Artificial Sequence: Synthetic oligonucleotide
acaggguucuaggaagccg

SEQ ID NO: 1679833 - RNA, 19 nt, Artificial Sequence
  Description of Artificial Sequence: Synthetic oligonucleotide
gagccauuaaaagacucca

SEQ ID NO: 1679834 - RNA, 19 nt, Artificial Sequence
  Description of Artificial Sequence: Synthetic oligonucleotide
cagccaagcagagucgucg

SEQ ID NO: 1679835 - RNA, 19 nt, Artificial Sequence
  Description of Artificial Sequence: Synthetic oligonucleotide
ucucgugggucagagguca

SEQ ID NO: 1679836 - RNA, 19 nt, Artificial Sequence
  Description of Artificial Sequence: Synthetic oligonucleotide
aagcagagucgucguucac

SEQ ID NO: 1679837 - RNA, 19 nt, Artificial Sequence
  Description of Artificial Sequence: Synthetic oligonucleotide
uagggacauuggaacaucu

SEQ ID NO: 1679838 - RNA, 19 nt, Artificial Sequence
  Description of Artificial Sequence: Synthetic oligonucleotide
gacaaaguggucccaggaa

SEQ ID NO: 1679839 - RNA, 19 nt, Artificial Sequence
  Description of Artificial Sequence: Synthetic oligonucleotide
aggaaccacagccagucaa

SEQ ID NO: 1679840 - RNA, 19 nt, Artificial Sequence
  Description of Artificial Sequence: Synthetic oligonucleotide
ucugcaaccuaggaaccac

SEQ ID NO: 1679841 - RNA, 19 nt, Artificial Sequence
  Description of Artificial Sequence: Synthetic oligonucleotide
uguagcuggugcccuuggc

SEQ ID NO: 1679842 - RNA, 19 nt, Artificial Sequence
  Description of Artificial Sequence: Synthetic oligonucleotide
aguugacccgugguguucg

SEQ ID NO: 1679843 - RNA, 19 nt, Artificial Sequence
  Description of Artificial Sequence: Synthetic oligonucleotide
acucugcaaccuaggaacc

SEQ ID NO: 1679844 - RNA, 19 nt, Artificial Sequence
  Description of Artificial Sequence: Synthetic oligonucleotide
cacuacaaccagugcaaac

SEQ ID NO: 1679845 - RNA, 19 nt, Artificial Sequence
  Description of Artificial Sequence: Synthetic oligonucleotide
accaggauagugcgcacga

SEQ ID NO: 1679846 - RNA, 19 nt, Artificial Sequence
  Description of Artificial Sequence: Synthetic oligonucleotide
aaaguggucccaggaagaa

SEQ ID NO: 1679847 - RNA, 19 nt, Artificial Sequence
  Description of Artificial Sequence: Synthetic oligonucleotide
gggagggaugguuugcacg

SEQ ID NO: 1679848 - RNA, 19 nt, Artificial Sequence
  Description of Artificial Sequence: Synthetic oligonucleotide
gucaaucacaggguucuag

SEQ ID NO: 1679849 - RNA, 19 nt, Artificial Sequence
  Description of Artificial Sequence: Synthetic oligonucleotide
uccgaccacaacgacaaaa

SEQ ID NO: 1679850 - RNA, 19 nt, Artificial Sequence
  Description of Artificial Sequence: Synthetic oligonucleotide
ccagguuccacucugcaac

SEQ ID NO: 1679851 - RNA, 19 nt, Artificial Sequence
  Description of Artificial Sequence: Synthetic oligonucleotide
gccauuguggauguaaaug

SEQ ID NO: 1679852 - RNA, 19 nt, Artificial Sequence
  Description of Artificial Sequence: Synthetic oligonucleotide
uccaggucguacaggcagc

SEQ ID NO: 1679853 - RNA, 19 nt, Artificial Sequence
  Description of Artificial Sequence: Synthetic oligonucleotide
uuccagauugaacguggaa

SEQ ID NO: 1679854 - RNA, 19 nt, Artificial Sequence
  Description of Artificial Sequence: Synthetic oligonucleotide
guuugcacguucucuguga

SEQ ID NO: 1679855 - RNA, 19 nt, Artificial Sequence
  Description of Artificial Sequence: Synthetic oligonucleotide
ucaggguuggagcgagugu

SEQ ID NO: 1679856 - RNA, 19 nt, Artificial Sequence
  Description of Artificial Sequence: Synthetic oligonucleotide
agcggaugggccaacagcu

SEQ ID NO: 1679857 - RNA, 19 nt, Artificial Sequence
  Description of Artificial Sequence: Synthetic oligonucleotide
cucgcgugagucuggcagg

SEQ ID NO: 1679858 - RNA, 19 nt, Artificial Sequence
  Description of Artificial Sequence: Synthetic oligonucleotide
gugguguucgaaucuggac

SEQ ID NO: 1679859 - RNA, 19 nt, Artificial Sequence
  Description of Artificial Sequence: Synthetic oligonucleotide
agccggaucgauguccgac

SEQ ID NO: 1679860 - RNA, 19 nt, Artificial Sequence
  Description of Artificial Sequence: Synthetic oligonucleotide
caaaguggucccaggaaga

SEQ ID NO: 1679861 - RNA, 19 nt, Artificial Sequence
  Description of Artificial Sequence: Synthetic oligonucleotide
agugcgcacgacauagggg

SEQ ID NO: 1679862 - RNA, 19 nt, Artificial Sequence
  Description of Artificial Sequence: Synthetic oligonucleotide
ucccaugaaggagaacaug

SEQ ID NO: 1679863 - RNA, 19 nt, Artificial Sequence
  Description of Artificial Sequence: Synthetic oligonucleotide
aguagggacauuggaacau

SEQ ID NO: 1679864 - RNA, 19 nt, Artificial Sequence
  Description of Artificial Sequence: Synthetic oligonucleotide
ggggcuguuggccucagcc

SEQ ID NO: 1679865 - RNA, 19 nt, Artificial Sequence
  Description of Artificial Sequence: Synthetic oligonucleotide
ucgcacgagaucacaccgc

SEQ ID NO: 1679866 - RNA, 19 nt, Artificial Sequence
  Description of Artificial Sequence: Synthetic oligonucleotide
aacguggaacaggaugcug

SEQ ID NO: 1679867 - RNA, 19 nt, Artificial Sequence
  Description of Artificial Sequence: Synthetic oligonucleotide
auggagaggggaucgcgga

SEQ ID NO: 1679868 - RNA, 19 nt, Artificial Sequence
  Description of Artificial Sequence: Synthetic oligonucleotide
acgagaucacaccgccagg

SEQ ID NO: 1679869 - RNA, 19 nt, Artificial Sequence
  Description of Artificial Sequence: Synthetic oligonucleotide
agucgucguucacuacaac

SEQ ID NO: 1679870 - RNA, 19 nt, Artificial Sequence
  Description of Artificial Sequence: Synthetic oligonucleotide
ugcuuggauggagagggga

SEQ ID NO: 1679871 - RNA, 19 nt, Artificial Sequence
  Description of Artificial Sequence: Synthetic oligonucleotide
uggcagcucggucuucugc

SEQ ID NO: 1679872 - RNA, 19 nt, Artificial Sequence
  Description of Artificial Sequence: Synthetic oligonucleotide
agacacaguaggagcgggc

SEQ ID NO: 1679873 - RNA, 19 nt, Artificial Sequence
  Description of Artificial Sequence: Synthetic oligonucleotide
ugcgcacaaacaucucaac

SEQ ID NO: 1679874 - RNA, 19 nt, Artificial Sequence
  Description of Artificial Sequence: Synthetic oligonucleotide
gcucgcgugagucuggcag

SEQ ID NO: 1679875 - RNA, 19 nt, Artificial Sequence
  Description of Artificial Sequence: Synthetic oligonucleotide
guuccacucugcaaccuag

SEQ ID NO: 1679876 - RNA, 19 nt, Artificial Sequence
  Description of Artificial Sequence: Synthetic oligonucleotide
agacugaagaggccuucca

SEQ ID NO: 1679877 - RNA, 19 nt, Artificial Sequence
  Description of Artificial Sequence: Synthetic oligonucleotide
ccauuguggauguaaauga

SEQ ID NO: 1679878 - RNA, 19 nt, Artificial Sequence
  Description of Artificial Sequence: Synthetic oligonucleotide
gacacaguaggagcgggca

SEQ ID NO: 1679879 - RNA, 19 nt, Artificial Sequence
  Description of Artificial Sequence: Synthetic oligonucleotide
ugguuugcacguucucugu

SEQ ID NO: 1679880 - RNA, 19 nt, Artificial Sequence
  Description of Artificial Sequence: Synthetic oligonucleotide
gauguccgaccacaacgac

SEQ ID NO: 1679881 - RNA, 19 nt, Artificial Sequence
  Description of Artificial Sequence: Synthetic oligonucleotide
caucgucugcacuggcugc

SEQ ID NO: 1679882 - RNA, 19 nt, Artificial Sequence
  Description of Artificial Sequence: Synthetic oligonucleotide
caaucacaggguucuagga

SEQ ID NO: 1679883 - RNA, 19 nt, Artificial Sequence
  Description of Artificial Sequence: Synthetic oligonucleotide
guagcggaugggccaacag

SEQ ID NO: 1679884 - RNA, 19 nt, Artificial Sequence
  Description of Artificial Sequence: Synthetic oligonucleotide
agcagagucgucguucacu

SEQ ID NO: 1679885 - RNA, 19 nt, Artificial Sequence
  Description of Artificial Sequence: Synthetic oligonucleotide
accgccagguuccacucug

SEQ ID NO: 1679886 - RNA, 19 nt, Artificial Sequence
  Description of Artificial Sequence: Synthetic oligonucleotide
ugacccgugguguucgaau

SEQ ID NO: 1679887 - RNA, 19 nt, Artificial Sequence
  Description of Artificial Sequence: Synthetic oligonucleotide
ggagaacuggggcuggcag

SEQ ID NO: 1679888 - RNA, 19 nt, Artificial Sequence
  Description of Artificial Sequence: Synthetic oligonucleotide
cagguuccacucugcaacc

SEQ ID NO: 1679889 - RNA, 19 nt, Artificial Sequence
  Description of Artificial Sequence: Synthetic oligonucleotide
cucggcgccauuguggaug

SEQ ID NO: 1679890 - RNA, 19 nt, Artificial Sequence
  Description of Artificial Sequence: Synthetic oligonucleotide
agaccaggauagugcgcac

SEQ ID NO: 1679891 - RNA, 19 nt, Artificial Sequence
  Description of Artificial Sequence: Synthetic oligonucleotide
cuggacaguugacccgugg

SEQ ID NO: 1679892 - RNA, 19 nt, Artificial Sequence
  Description of Artificial Sequence: Synthetic oligonucleotide
gcgcacaaacaucucaacc

SEQ ID NO: 1679893 - RNA, 19 nt, Artificial Sequence
  Description of Artificial Sequence: Synthetic oligonucleotide
agaggggaucgcggaagcc

SEQ ID NO: 1679894 - RNA, 19 nt, Artificial Sequence
  Description of Artificial Sequence: Synthetic oligonucleotide
gugacuggcagcucggucu

SEQ ID NO: 1679895 - RNA, 19 nt, Artificial Sequence
  Description of Artificial Sequence: Synthetic oligonucleotide
cugaaagauccaaacagau

SEQ ID NO: 1679896 - RNA, 19 nt, Artificial Sequence
  Description of Artificial Sequence: Synthetic oligonucleotide
caggauagugcgcacgaca

SEQ ID NO: 1679897 - RNA, 19 nt, Artificial Sequence
  Description of Artificial Sequence: Synthetic oligonucleotide
agccauuaaaagacuccag

SEQ ID NO: 1679898 - RNA, 19 nt, Artificial Sequence
  Description of Artificial Sequence: Synthetic oligonucleotide
ugaagaggccuuccagauu

SEQ ID NO: 1679899 - RNA, 19 nt, Artificial Sequence
  Description of Artificial Sequence: Synthetic oligonucleotide
caaccagugcaaacucgug

SEQ ID NO: 1679900 - RNA, 19 nt, Artificial Sequence
  Description of Artificial Sequence: Synthetic oligonucleotide
gguuggagcgagugugagg

SEQ ID NO: 1679901 - RNA, 19 nt, Artificial Sequence
  Description of Artificial Sequence: Synthetic oligonucleotide
gacccgugguguucgaauc

SEQ ID NO: 1679902 - RNA, 19 nt, Artificial Sequence
  Description of Artificial Sequence: Synthetic oligonucleotide
agcucgcacgagaucacac

SEQ ID NO: 1679903 - RNA, 19 nt, Artificial Sequence
  Description of Artificial Sequence: Synthetic oligonucleotide
cuuggauggagaggggauc

SEQ ID NO: 1679904 - RNA, 19 nt, Artificial Sequence
  Description of Artificial Sequence: Synthetic oligonucleotide
agcaagccggaucgauguc

SEQ ID NO: 1679905 - RNA, 19 nt, Artificial Sequence
  Description of Artificial Sequence: Synthetic oligonucleotide
gaggggaucgcggaagcca

SEQ ID NO: 1679906 - RNA, 19 nt, Artificial Sequence
  Description of Artificial Sequence: Synthetic oligonucleotide
gaggccuuccagauugaac

SEQ ID NO: 1679907 - RNA, 19 nt, Artificial Sequence
  Description of Artificial Sequence: Synthetic oligonucleotide
ucccaggaagaaugaauuu

SEQ ID NO: 1679908 - RNA, 19 nt, Artificial Sequence
  Description of Artificial Sequence: Synthetic oligonucleotide
caagcagagucgucguuca

SEQ ID NO: 1679909 - RNA, 19 nt, Artificial Sequence
  Description of Artificial Sequence: Synthetic oligonucleotide
ugguacuugccagggcuug

SEQ ID NO: 1679910 - RNA, 19 nt, Artificial Sequence
  Description of Artificial Sequence: Synthetic oligonucleotide
ucgcgugagucuggcaggg

SEQ ID NO: 1679911 - RNA, 19 nt, Artificial Sequence
  Description of Artificial Sequence: Synthetic oligonucleotide
agacagccaagcagagucg

SEQ ID NO: 1679912 - RNA, 19 nt, Artificial Sequence
  Description of Artificial Sequence: Synthetic oligonucleotide
cuuggccaugcaguugugc

SEQ ID NO: 1679913 - RNA, 19 nt, Artificial Sequence
  Description of Artificial Sequence: Synthetic oligonucleotide
aggauagugcgcacgacau

SEQ ID NO: 1679914 - RNA, 19 nt, Artificial Sequence
  Description of Artificial Sequence: Synthetic oligonucleotide
cguacaggcagcugcagag

SEQ ID NO: 1679915 - RNA, 19 nt, Artificial Sequence
  Description of Artificial Sequence: Synthetic oligonucleotide
cacguucucugugacuggc

SEQ ID NO: 1679916 - RNA, 19 nt, Artificial Sequence
  Description of Artificial Sequence: Synthetic oligonucleotide
cagacacaguaggagcggg

SEQ ID NO: 1679917 - RNA, 19 nt, Artificial Sequence
  Description of Artificial Sequence: Synthetic oligonucleotide
caggagucggcuccucccc

SEQ ID NO: 1679918 - RNA, 19 nt, Artificial Sequence
  Description of Artificial Sequence: Synthetic oligonucleotide
ucuaggaagccgccaucuu

SEQ ID NO: 1679919 - RNA, 19 nt, Artificial Sequence
  Description of Artificial Sequence: Synthetic oligonucleotide
ugggacacuggcugcccca

SEQ ID NO: 1679920 - RNA, 19 nt, Artificial Sequence
  Description of Artificial Sequence: Synthetic oligonucleotide
ugagacugaagaggccuuc

SEQ ID NO: 1679921 - RNA, 19 nt, Artificial Sequence
  Description of Artificial Sequence: Synthetic oligonucleotide
uggagaggggaucgcggaa

SEQ ID NO: 1679922 - RNA, 19 nt, Artificial Sequence
  Description of Artificial Sequence: Synthetic oligonucleotide
gacaguugacccguggugu

SEQ ID NO: 1679923 - RNA, 19 nt, Artificial Sequence
  Description of Artificial Sequence: Synthetic oligonucleotide
uaggagcgggcaugggaug

SEQ ID NO: 1679924 - RNA, 19 nt, Artificial Sequence
  Description of Artificial Sequence: Synthetic oligonucleotide
auagugcgcacgacauagg

SEQ ID NO: 1679925 - RNA, 19 nt, Artificial Sequence
  Description of Artificial Sequence: Synthetic oligonucleotide
caaacucguggcucuuguc

SEQ ID NO: 1679926 - RNA, 19 nt, Artificial Sequence
  Description of Artificial Sequence: Synthetic oligonucleotide
gccauuaaaagacuccagu

SEQ ID NO: 1679927 - RNA, 19 nt, Artificial Sequence
  Description of Artificial Sequence: Synthetic oligonucleotide
gagcucucgugggucagag

SEQ ID NO: 1679928 - RNA, 19 nt, Artificial Sequence
  Description of Artificial Sequence: Synthetic oligonucleotide
agccaagcagagucgucgu

SEQ ID NO: 1679929 - RNA, 19 nt, Artificial Sequence
  Description of Artificial Sequence: Synthetic oligonucleotide
acccgugguguucgaaucu

SEQ ID NO: 1679930 - RNA, 19 nt, Artificial Sequence
  Description of Artificial Sequence: Synthetic oligonucleotide
gugcugguacuugccaggg

SEQ ID NO: 1679931 - RNA, 19 nt, Artificial Sequence
  Description of Artificial Sequence: Synthetic oligonucleotide
cgaaucuggaccucgggug

SEQ ID NO: 1679932 - RNA, 19 nt, Artificial Sequence
  Description of Artificial Sequence: Synthetic oligonucleotide
gaaccacagccagucaauc

SEQ ID NO: 1679933 - RNA, 19 nt, Artificial Sequence
  Description of Artificial Sequence: Synthetic oligonucleotide
auguccgaccacaacgaca

SEQ ID NO: 1679934 - RNA, 19 nt, Artificial Sequence
  Description of Artificial Sequence: Synthetic oligonucleotide
gcagcucaagggcaggccc

SEQ ID NO: 1679935 - RNA, 19 nt, Artificial Sequence
  Description of Artificial Sequence: Synthetic oligonucleotide
ggauggagaggggaucgcg

SEQ ID NO: 1679936 - RNA, 19 nt, Artificial Sequence
  Description of Artificial Sequence: Synthetic oligonucleotide
gcaaccuaggaaccacagc

SEQ ID NO: 1679937 - RNA, 19 nt, Artificial Sequence
  Description of Artificial Sequence: Synthetic oligonucleotide
gggcguucguccuggagcc

SEQ ID NO: 1679938 - RNA, 19 nt, Artificial Sequence
  Description of Artificial Sequence: Synthetic oligonucleotide
uguagcggaugggccaaca

SEQ ID NO: 1679939 - RNA, 19 nt, Artificial Sequence
  Description of Artificial Sequence: Synthetic oligonucleotide
acaguugacccgugguguu

SEQ ID NO: 1679940 - RNA, 19 nt, Artificial Sequence
  Description of Artificial Sequence: Synthetic oligonucleotide
cacaggguucuaggaagcc

SEQ ID NO: 1679941 - RNA, 19 nt, Artificial Sequence
  Description of Artificial Sequence: Synthetic oligonucleotide
cagugcaaacucguggcuc

SEQ ID NO: 1679942 - RNA, 19 nt, Artificial Sequence
  Description of Artificial Sequence: Synthetic oligonucleotide
agcucucgugggucagagg

SEQ ID NO: 1679943 - RNA, 19 nt, Artificial Sequence
  Description of Artificial Sequence: Synthetic oligonucleotide
aagcucgcacgagaucaca

SEQ ID NO: 1679944 - RNA, 19 nt, Artificial Sequence
  Description of Artificial Sequence: Synthetic oligonucleotide
gcgagugugaggccggggc

SEQ ID NO: 1679945 - RNA, 19 nt, Artificial Sequence
  Description of Artificial Sequence: Synthetic oligonucleotide
guucuaggaagccgccauc

SEQ ID NO: 1679946 - RNA, 19 nt, Artificial Sequence
  Description of Artificial Sequence: Synthetic oligonucleotide
ccacauuggccugagcucc

SEQ ID NO: 1679947 - RNA, 19 nt, Artificial Sequence
  Description of Artificial Sequence: Synthetic oligonucleotide
gguguucgaaucuggaccu

SEQ ID NO: 1679948 - RNA, 19 nt, Artificial Sequence
  Description of Artificial Sequence: Synthetic oligonucleotide
gcucgcacgagaucacacc

SEQ ID NO: 1679949 - RNA, 19 nt, Artificial Sequence
  Description of Artificial Sequence: Synthetic oligonucleotide
caggcuguagcucgcguga

SEQ ID NO: 1679950 - RNA, 19 nt, Artificial Sequence
  Description of Artificial Sequence: Synthetic oligonucleotide
aggggaucgcggaagccag

SEQ ID NO: 1679951 - RNA, 19 nt, Artificial Sequence
  Description of Artificial Sequence: Synthetic oligonucleotide
ggucaggccagacagccaa

SEQ ID NO: 1679952 - RNA, 19 nt, Artificial Sequence
  Description of Artificial Sequence: Synthetic oligonucleotide
ucuggaccucgggugccgg

SEQ ID NO: 1679953 - RNA, 19 nt, Artificial Sequence
  Description of Artificial Sequence: Synthetic oligonucleotide
guagaccaggauagugcgc

SEQ ID NO: 1679954 - RNA, 19 nt, Artificial Sequence
  Description of Artificial Sequence: Synthetic oligonucleotide
cuuccagauugaacgugga

SEQ ID NO: 1679955 - RNA, 19 nt, Artificial Sequence
  Description of Artificial Sequence: Synthetic oligonucleotide
ggaucgauguccgaccaca

SEQ ID NO: 1679956 - RNA, 19 nt, Artificial Sequence
  Description of Artificial Sequence: Synthetic oligonucleotide
ucacccucgcugcgacugc

SEQ ID NO: 1679957 - RNA, 19 nt, Artificial Sequence
  Description of Artificial Sequence: Synthetic oligonucleotide
uucguccuggagccauuaa

SEQ ID NO: 1679958 - RNA, 19 nt, Artificial Sequence
  Description of Artificial Sequence: Synthetic oligonucleotide
gggcaugggaugucacagg

SEQ ID NO: 1679959 - RNA, 19 nt, Artificial Sequence
  Description of Artificial Sequence: Synthetic oligonucleotide
guagggacauuggaacauc

SEQ ID NO: 1679960 - RNA, 19 nt, Artificial Sequence
  Description of Artificial Sequence: Synthetic oligonucleotide
cuucuccucggcgccauug

SEQ ID NO: 1679961 - RNA, 19 nt, Artificial Sequence
  Description of Artificial Sequence: Synthetic oligonucleotide
gcucucgugggucagaggu

SEQ ID NO: 1679962 - RNA, 19 nt, Artificial Sequence
  Description of Artificial Sequence: Synthetic oligonucleotide
uugugcgcacaaacaucuc

SEQ ID NO: 1679963 - RNA, 19 nt, Artificial Sequence
  Description of Artificial Sequence: Synthetic oligonucleotide
cgaagaagaaguagggaca

SEQ ID NO: 1679964 - RNA, 19 nt, Artificial Sequence
  Description of Artificial Sequence: Synthetic oligonucleotide
cucucgugggucagagguc

SEQ ID NO: 1679965 - RNA, 19 nt, Artificial Sequence
  Description of Artificial Sequence: Synthetic oligonucleotide
agccagucaaucacagggu

SEQ ID NO: 1679966 - RNA, 19 nt, Artificial Sequence
  Description of Artificial Sequence: Synthetic oligonucleotide
gcagacacaguaggagcgg

SEQ ID NO: 1679967 - RNA, 19 nt, Artificial Sequence
  Description of Artificial Sequence: Synthetic oligonucleotide
ggagggaugguuugcacgu

SEQ ID NO: 1679968 - RNA, 19 nt, Artificial Sequence
  Description of Artificial Sequence: Synthetic oligonucleotide
aagaagaaguagggacauu

SEQ ID NO: 1679969 - RNA, 19 nt, Artificial Sequence
  Description of Artificial Sequence: Synthetic oligonucleotide
guagcucgcgugagucugg

SEQ ID NO: 1679970 - RNA, 19 nt, Artificial Sequence
  Description of Artificial Sequence: Synthetic oligonucleotide
gcaagccggaucgaugucc

SEQ ID NO: 1679971 - RNA, 19 nt, Artificial Sequence
  Description of Artificial Sequence: Synthetic oligonucleotide
cucguggcucuugucaauc

SEQ ID NO: 1679972 - RNA, 19 nt, Artificial Sequence
  Description of Artificial Sequence: Synthetic oligonucleotide
aucuggaccucgggugccg

SEQ ID NO: 1679973 - RNA, 19 nt, Artificial Sequence
  Description of Artificial Sequence: Synthetic oligonucleotide
gagucgucguucacuacaa

SEQ ID NO: 1679974 - RNA, 19 nt, Artificial Sequence
  Description of Artificial Sequence: Synthetic oligonucleotide
gguacuugccagggcuugg

SEQ ID NO: 1679975 - RNA, 19 nt, Artificial Sequence
  Description of Artificial Sequence: Synthetic oligonucleotide
ggauguaaaugaugucgaa

SEQ ID NO: 1679976 - RNA, 19 nt, Artificial Sequence
  Description of Artificial Sequence: Synthetic oligonucleotide
cauuggccugagcucccag

SEQ ID NO: 1679977 - RNA, 19 nt, Artificial Sequence
  Description of Artificial Sequence: Synthetic oligonucleotide
gccucuguagcggaugggc

SEQ ID NO: 1679978 - RNA, 19 nt, Artificial Sequence
  Description of Artificial Sequence: Synthetic oligonucleotide
cagcaagccggaucgaugu

SEQ ID NO: 1679979 - RNA, 19 nt, Artificial Sequence
  Description of Artificial Sequence: Synthetic oligonucleotide
gggccucuguagcggaugg

SEQ ID NO: 1679980 - RNA, 19 nt, Artificial Sequence
  Description of Artificial Sequence: Synthetic oligonucleotide
acacguucagggcguucgu

SEQ ID NO: 1679981 - RNA, 19 nt, Artificial Sequence
  Description of Artificial Sequence: Synthetic oligonucleotide
gccggaucgauguccgacc

SEQ ID NO: 1679982 - RNA, 19 nt, Artificial Sequence
  Description of Artificial Sequence: Synthetic oligonucleotide
acucguggcucuugucaau

SEQ ID NO: 1679983 - RNA, 19 nt, Artificial Sequence
  Description of Artificial Sequence: Synthetic oligonucleotide
gucugcacuggcugccuca

SEQ ID NO: 1679984 - RNA, 19 nt, Artificial Sequence
  Description of Artificial Sequence: Synthetic oligonucleotide
ccagucaaucacaggguuc

SEQ ID NO: 1679985 - RNA, 19 nt, Artificial Sequence
  Description of Artificial Sequence: Synthetic oligonucleotide
aggagucggcuccuccccu

SEQ ID NO: 1679986 - RNA, 19 nt, Artificial Sequence
  Description of Artificial Sequence: Synthetic oligonucleotide
ccucugaaagauccaaaca

SEQ ID NO: 1679987 - RNA, 19 nt, Artificial Sequence
  Description of Artificial Sequence: Synthetic oligonucleotide
aagccggaucgauguccga

SEQ ID NO: 1679988 - RNA, 19 nt, Artificial Sequence
  Description of Artificial Sequence: Synthetic oligonucleotide
gcuuugugcgcacaaacau

SEQ ID NO: 1679989 - RNA, 19 nt, Artificial Sequence
  Description of Artificial Sequence: Synthetic oligonucleotide
cccacauuggccugagcuc

SEQ ID NO: 1679990 - RNA, 19 nt, Artificial Sequence
  Description of Artificial Sequence: Synthetic oligonucleotide
cagagucgucguucacuac

SEQ ID NO: 1679991 - RNA, 19 nt, Artificial Sequence
  Description of Artificial Sequence: Synthetic oligonucleotide
agacacguucagggcguuc

SEQ ID NO: 1679992 - RNA, 19 nt, Artificial Sequence
  Description of Artificial Sequence: Synthetic oligonucleotide
cagggcguucguccuggag

SEQ ID NO: 1679993 - RNA, 19 nt, Artificial Sequence
  Description of Artificial Sequence: Synthetic oligonucleotide
cagggcuugggcccagcuc

SEQ ID NO: 1679994 - RNA, 19 nt, Artificial Sequence
  Description of Artificial Sequence: Synthetic oligonucleotide
gggugcuuggauggagagg

SEQ ID NO: 1679995 - RNA, 19 nt, Artificial Sequence
  Description of Artificial Sequence: Synthetic oligonucleotide
gcagagucgucguucacua

SEQ ID NO: 1679996 - RNA, 19 nt, Artificial Sequence
  Description of Artificial Sequence: Synthetic oligonucleotide
gucguacaggcagcugcag

SEQ ID NO: 1679997 - RNA, 19 nt, Artificial Sequence
  Description of Artificial Sequence: Synthetic oligonucleotide
ccaagcagagucgucguuc

SEQ ID NO: 1679998 - RNA, 19 nt, Artificial Sequence
  Description of Artificial Sequence: Synthetic oligonucleotide
agcgagugugaggccgggg

SEQ ID NO: 1679999 - RNA, 19 nt, Artificial Sequence
  Description of Artificial Sequence: Synthetic oligonucleotide
gagcgagugugaggccggg

SEQ ID NO: 1680000 - RNA, 19 nt, Artificial Sequence
  Description of Artificial Sequence: Synthetic oligonucleotide
gucccaggaagaaugaauu

SEQ ID NO: 1680001 - RNA, 19 nt, Artificial Sequence
  Description of Artificial Sequence: Synthetic oligonucleotide
ccuucucuggacaguugac

SEQ ID NO: 1680002 - RNA, 19 nt, Artificial Sequence
  Description of Artificial Sequence: Synthetic oligonucleotide
ggagcgagugugaggccgg

SEQ ID NO: 1680003 - RNA, 19 nt, Artificial Sequence
  Description of Artificial Sequence: Synthetic oligonucleotide
agcgggcaugggaugucac

SEQ ID NO: 1680004 - RNA, 19 nt, Artificial Sequence
  Description of Artificial Sequence: Synthetic oligonucleotide
gcacguucucugugacugg

SEQ ID NO: 1680005 - RNA, 19 nt, Artificial Sequence
  Description of Artificial Sequence: Synthetic oligonucleotide
ggcaugggaugucacaggu

SEQ ID NO: 1680006 - RNA, 19 nt, Artificial Sequence
  Description of Artificial Sequence: Synthetic oligonucleotide
cucgugggucagaggucag

SEQ ID NO: 1680007 - RNA, 19 nt, Artificial Sequence
  Description of Artificial Sequence: Synthetic oligonucleotide
gaucgauguccgaccacaa

SEQ ID NO: 1680008 - RNA, 19 nt, Artificial Sequence
  Description of Artificial Sequence: Synthetic oligonucleotide
cgcacgagaucacaccgcc

SEQ ID NO: 1680009 - RNA, 19 nt, Artificial Sequence
  Description of Artificial Sequence: Synthetic oligonucleotide
cucugcaaccuaggaacca

SEQ ID NO: 1680010 - RNA, 19 nt, Artificial Sequence
  Description of Artificial Sequence: Synthetic oligonucleotide
gcagcaagccggaucgaug

SEQ ID NO: 1680011 - RNA, 19 nt, Artificial Sequence
  Description of Artificial Sequence: Synthetic oligonucleotide
aggcuguagcucgcgugag

SEQ ID NO: 1680012 - RNA, 19 nt, Artificial Sequence
  Description of Artificial Sequence: Synthetic oligonucleotide
auugaacguggaacaggau

SEQ ID NO: 1680013 - RNA, 19 nt, Artificial Sequence
  Description of Artificial Sequence: Synthetic oligonucleotide
gguucuaggaagccgccau

SEQ ID NO: 1680014 - RNA, 19 nt, Artificial Sequence
  Description of Artificial Sequence: Synthetic oligonucleotide
cacacgguggcuucacccu

SEQ ID NO: 1680015 - RNA, 19 nt, Artificial Sequence
  Description of Artificial Sequence: Synthetic oligonucleotide
ccgugguguucgaaucugg

SEQ ID NO: 1680016 - RNA, 19 nt, Artificial Sequence
  Description of Artificial Sequence: Synthetic oligonucleotide
uugacccgugguguucgaa

SEQ ID NO: 1680017 - RNA, 19 nt, Artificial Sequence
  Description of Artificial Sequence: Synthetic oligonucleotide
aggguuggagcgaguguga

SEQ ID NO: 1680018 - RNA, 19 nt, Artificial Sequence
  Description of Artificial Sequence: Synthetic oligonucleotide
caguugacccgugguguuc

SEQ ID NO: 1680019 - RNA, 19 nt, Artificial Sequence
  Description of Artificial Sequence: Synthetic oligonucleotide
cacguucagggcguucguc

SEQ ID NO: 1680020 - RNA, 19 nt, Artificial Sequence
  Description of Artificial Sequence: Synthetic oligonucleotide
gaacguggaacaggaugcu

SEQ ID NO: 1680021 - RNA, 19 nt, Artificial Sequence
  Description of Artificial Sequence: Synthetic oligonucleotide
agggacauuggaacaucuu

SEQ ID NO: 1680022 - RNA, 19 nt, Artificial Sequence
  Description of Artificial Sequence: Synthetic oligonucleotide
augagacugaagaggccuu

SEQ ID NO: 1680023 - RNA, 19 nt, Artificial Sequence
  Description of Artificial Sequence: Synthetic oligonucleotide
cuggagccauuaaaagacu

SEQ ID NO: 1680024 - RNA, 19 nt, Artificial Sequence
  Description of Artificial Sequence: Synthetic oligonucleotide
ggguuggagcgagugugag

SEQ ID NO: 1680025 - RNA, 19 nt, Artificial Sequence
  Description of Artificial Sequence: Synthetic oligonucleotide
gccuuccagauugaacgug

SEQ ID NO: 1680026 - RNA, 19 nt, Artificial Sequence
  Description of Artificial Sequence: Synthetic oligonucleotide
gucaggccagacagccaag

SEQ ID NO: 1680027 - RNA, 19 nt, Artificial Sequence
  Description of Artificial Sequence: Synthetic oligonucleotide
acauuggccugagcuccca

SEQ ID NO: 1680028 - RNA, 19 nt, Artificial Sequence
  Description of Artificial Sequence: Synthetic oligonucleotide
cagcaggcuguagcucgcg

SEQ ID NO: 1680029 - RNA, 19 nt, Artificial Sequence
  Description of Artificial Sequence: Synthetic oligonucleotide
cguucacuacaaccagugc

SEQ ID NO: 1680030 - RNA, 19 nt, Artificial Sequence
  Description of Artificial Sequence: Synthetic oligonucleotide
gguuccacucugcaaccua

SEQ ID NO: 1680031 - RNA, 19 nt, Artificial Sequence
  Description of Artificial Sequence: Synthetic oligonucleotide
gugagucuggcagggccuc

SEQ ID NO: 1680032 - RNA, 19 nt, Artificial Sequence
  Description of Artificial Sequence: Synthetic oligonucleotide
gaacuggggcuggcagggc

SEQ ID NO: 1680033 - RNA, 19 nt, Artificial Sequence
  Description of Artificial Sequence: Synthetic oligonucleotide
ggucguacaggcagcugca

SEQ ID NO: 1680034 - RNA, 19 nt, Artificial Sequence
  Description of Artificial Sequence: Synthetic oligonucleotide
ggaccucgggugccggugc

SEQ ID NO: 1680035 - RNA, 19 nt, Artificial Sequence
  Description of Artificial Sequence: Synthetic oligonucleotide
cguccuggagccauuaaaa

SEQ ID NO: 1680036 - RNA, 19 nt, Artificial Sequence
  Description of Artificial Sequence: Synthetic oligonucleotide
cacccucgcugcgacugcc

SEQ ID NO: 1680037 - RNA, 19 nt, Artificial Sequence
  Description of Artificial Sequence: Synthetic oligonucleotide
gucguucacuacaaccagu

SEQ ID NO: 1680038 - RNA, 19 nt, Artificial Sequence
  Description of Artificial Sequence: Synthetic oligonucleotide
gagcgggcaugggauguca

SEQ ID NO: 1680039 - RNA, 19 nt, Artificial Sequence
  Description of Artificial Sequence: Synthetic oligonucleotide
gcagagcucucguggguca

SEQ ID NO: 1680040 - RNA, 19 nt, Artificial Sequence
  Description of Artificial Sequence: Synthetic oligonucleotide
caguaggagcgggcauggg

SEQ ID NO: 1680041 - RNA, 19 nt, Artificial Sequence
  Description of Artificial Sequence: Synthetic oligonucleotide
ccagcaggcuguagcucgc

SEQ ID NO: 1680042 - RNA, 19 nt, Artificial Sequence
  Description of Artificial Sequence: Synthetic oligonucleotide
cugagcucccagggcccgg

SEQ ID NO: 1680043 - RNA, 19 nt, Artificial Sequence
  Description of Artificial Sequence: Synthetic oligonucleotide
gcuggugcccuuggcgucc

SEQ ID NO: 1680044 - RNA, 19 nt, Artificial Sequence
  Description of Artificial Sequence: Synthetic oligonucleotide
cgauguccgaccacaacga

SEQ ID NO: 1680045 - RNA, 19 nt, Artificial Sequence
  Description of Artificial Sequence: Synthetic oligonucleotide
aggucacacgguggcuuca

SEQ ID NO: 1680046 - RNA, 19 nt, Artificial Sequence
  Description of Artificial Sequence: Synthetic oligonucleotide
acauguccuuccaccucgu

SEQ ID NO: 1680047 - RNA, 19 nt, Artificial Sequence
  Description of Artificial Sequence: Synthetic oligonucleotide
gcaaacucguggcucuugu

SEQ ID NO: 1680048 - RNA, 19 nt, Artificial Sequence
  Description of Artificial Sequence: Synthetic oligonucleotide
cggaugggccaacagcuug

SEQ ID NO: 1680049 - RNA, 19 nt, Artificial Sequence
  Description of Artificial Sequence: Synthetic oligonucleotide
ccacucugcaaccuaggaa

SEQ ID NO: 1680050 - RNA, 19 nt, Artificial Sequence
  Description of Artificial Sequence: Synthetic oligonucleotide
guugacccgugguguucga

SEQ ID NO: 1680051 - RNA, 19 nt, Artificial Sequence
  Description of Artificial Sequence: Synthetic oligonucleotide
ggucccaggaagaaugaau

SEQ ID NO: 1680052 - RNA, 19 nt, Artificial Sequence
  Description of Artificial Sequence: Synthetic oligonucleotide
ggcgggcggcuguagacca

SEQ ID NO: 1680053 - RNA, 19 nt, Artificial Sequence
  Description of Artificial Sequence: Synthetic oligonucleotide
gggaucgcggaagccagga

SEQ ID NO: 1680054 - RNA, 19 nt, Artificial Sequence
  Description of Artificial Sequence: Synthetic oligonucleotide
ggauagugcgcacgacaua

SEQ ID NO: 1680055 - RNA, 19 nt, Artificial Sequence
  Description of Artificial Sequence: Synthetic oligonucleotide
ucgcggaagccaggauccu

SEQ ID NO: 1680056 - RNA, 19 nt, Artificial Sequence
  Description of Artificial Sequence: Synthetic oligonucleotide
guguucgaaucuggaccuc

SEQ ID NO: 1680057 - RNA, 19 nt, Artificial Sequence
  Description of Artificial Sequence: Synthetic oligonucleotide
cuguagcucgcgugagucu

SEQ ID NO: 1680058 - RNA, 19 nt, Artificial Sequence
  Description of Artificial Sequence: Synthetic oligonucleotide
ucacaccgccagguuccac

SEQ ID NO: 1680059 - RNA, 19 nt, Artificial Sequence
  Description of Artificial Sequence: Synthetic oligonucleotide
ggucacacgguggcuucac

SEQ ID NO: 1680060 - RNA, 19 nt, Artificial Sequence
  Description of Artificial Sequence: Synthetic oligonucleotide
cgugguguucgaaucugga

SEQ ID NO: 1680061 - RNA, 19 nt, Artificial Sequence
  Description of Artificial Sequence: Synthetic oligonucleotide
gccggugcugguacuugcc

SEQ ID NO: 1680062 - RNA, 19 nt, Artificial Sequence
  Description of Artificial Sequence: Synthetic oligonucleotide
guucguccuggagccauua

SEQ ID NO: 1680063 - RNA, 19 nt, Artificial Sequence
  Description of Artificial Sequence: Synthetic oligonucleotide
ccaccucgucuccuccucc

SEQ ID NO: 1680064 - RNA, 19 nt, Artificial Sequence
  Description of Artificial Sequence: Synthetic oligonucleotide
cccgugguguucgaaucug

SEQ ID NO: 1680065 - RNA, 19 nt, Artificial Sequence
  Description of Artificial Sequence: Synthetic oligonucleotide
ggggaucgcggaagccagg

SEQ ID NO: 1680066 - RNA, 19 nt, Artificial Sequence
  Description of Artificial Sequence: Synthetic oligonucleotide
gggcgggcggcuguagacc

SEQ ID NO: 1680067 - RNA, 19 nt, Artificial Sequence
  Description of Artificial Sequence: Synthetic oligonucleotide
ucgcugcgacugcccacau

SEQ ID NO: 1680068 - RNA, 19 nt, Artificial Sequence
  Description of Artificial Sequence: Synthetic oligonucleotide
ggccuuccagauugaacgu

SEQ ID NO: 1680069 - RNA, 19 nt, Artificial Sequence
  Description of Artificial Sequence: Synthetic oligonucleotide
cccuuggcguccaggcuuc

SEQ ID NO: 1680070 - RNA, 19 nt, Artificial Sequence
  Description of Artificial Sequence: Synthetic oligonucleotide
cuguagcggaugggccaac

SEQ ID NO: 1680071 - RNA, 19 nt, Artificial Sequence
  Description of Artificial Sequence: Synthetic oligonucleotide
gccggggcucaggagucgg

SEQ ID NO: 1680072 - RNA, 19 nt, Artificial Sequence
  Description of Artificial Sequence: Synthetic oligonucleotide
caccucgucuccuccuccu

SEQ ID NO: 1680073 - RNA, 19 nt, Artificial Sequence
  Description of Artificial Sequence: Synthetic oligonucleotide
ccucgcugcgacugcccac

SEQ ID NO: 1680074 - RNA, 19 nt, Artificial Sequence
  Description of Artificial Sequence: Synthetic oligonucleotide
gggaugguuugcacguucu

SEQ ID NO: 1680075 - RNA, 19 nt, Artificial Sequence
  Description of Artificial Sequence: Synthetic oligonucleotide
ccaggauagugcgcacgac

SEQ ID NO: 1680076 - RNA, 19 nt, Artificial Sequence
  Description of Artificial Sequence: Synthetic oligonucleotide
cccucacccucgcugcgac

SEQ ID NO: 1680077 - RNA, 19 nt, Artificial Sequence
  Description of Artificial Sequence: Synthetic oligonucleotide
ccgccagguuccacucugc

SEQ ID NO: 1680078 - RNA, 19 nt, Artificial Sequence
  Description of Artificial Sequence: Synthetic oligonucleotide
ccggaucgauguccgacca

SEQ ID NO: 1680079 - RNA, 19 nt, Artificial Sequence
  Description of Artificial Sequence: Synthetic oligonucleotide
gcgccauuguggauguaaa

SEQ ID NO: 1680080 - RNA, 19 nt, Artificial Sequence
  Description of Artificial Sequence: Synthetic oligonucleotide
gcuuggauggagaggggau

SEQ ID NO: 1680081 - RNA, 19 nt, Artificial Sequence
  Description of Artificial Sequence: Synthetic oligonucleotide
ccuaggaaccacagccagu

SEQ ID NO: 1680082 - RNA, 19 nt, Artificial Sequence
  Description of Artificial Sequence: Synthetic oligonucleotide
ccggugcugguacuugcca

SEQ ID NO: 1680083 - RNA, 19 nt, Artificial Sequence
  Description of Artificial Sequence: Synthetic oligonucleotide
gcccuuggcguccaggcuu

SEQ ID NO: 1680084 - RNA, 19 nt, Artificial Sequence
  Description of Artificial Sequence: Synthetic oligonucleotide
ccagugcuaccucauacuu

SEQ ID NO: 1680085 - RNA, 19 nt, Artificial Sequence
  Description of Artificial Sequence: Synthetic oligonucleotide
ggcuguagcucgcgugagu

SEQ ID NO: 1680086 - RNA, 19 nt, Artificial Sequence
  Description of Artificial Sequence: Synthetic oligonucleotide
ggccggggcucaggagucg

SEQ ID NO: 1680087 - RNA, 19 nt, Artificial Sequence
  Description of Artificial Sequence: Synthetic oligonucleotide
gcacgagaucacaccgcca

SEQ ID NO: 1680088 - RNA, 19 nt, Artificial Sequence
  Description of Artificial Sequence: Synthetic oligonucleotide
gagggaugguuugcacguu

SEQ ID NO: 1680089 - RNA, 19 nt, Artificial Sequence
  Description of Artificial Sequence: Synthetic oligonucleotide
cgggugccggugcugguac

SEQ ID NO: 1680090 - RNA, 19 nt, Artificial Sequence
  Description of Artificial Sequence: Synthetic oligonucleotide
cggaucgauguccgaccac

SEQ ID NO: 1680091 - RNA, 19 nt, Artificial Sequence
  Description of Artificial Sequence: Synthetic oligonucleotide
guccgaccacaacgacaaa

SEQ ID NO: 1680092 - RNA, 19 nt, Artificial Sequence
  Description of Artificial Sequence: Synthetic oligonucleotide
cugccccaucgucugcacu

SEQ ID NO: 1680093 - RNA, 19 nt, Artificial Sequence
  Description of Artificial Sequence: Synthetic oligonucleotide
cuggaccucgggugccggu

SEQ ID NO: 1680094 - RNA, 19 nt, Artificial Sequence
  Description of Artificial Sequence: Synthetic oligonucleotide
cugugacuggcagcucggu

SEQ ID NO: 1680095 - RNA, 19 nt, Artificial Sequence
  Description of Artificial Sequence: Synthetic oligonucleotide
cugcagcaagccggaucga

SEQ ID NO: 1680096 - RNA, 19 nt, Artificial Sequence
  Description of Artificial Sequence: Synthetic oligonucleotide
cgagaucacaccgccaggu

SEQ ID NO: 1680097 - RNA, 19 nt, Artificial Sequence
  Description of Artificial Sequence: Synthetic oligonucleotide
cccucgcugcgacugccca

SEQ ID NO: 1680098 - RNA, 19 nt, Artificial Sequence
  Description of Artificial Sequence: Synthetic oligonucleotide
ggcuguagaccaggauagu

SEQ ID NO: 1680099 - RNA, 19 nt, Artificial Sequence
  Description of Artificial Sequence: Synthetic oligonucleotide
ggaucgcggaagccaggau

SEQ ID NO: 1680100 - RNA, 19 nt, Artificial Sequence
  Description of Artificial Sequence: Synthetic oligonucleotide
gagacacguucagggcguu

SEQ ID NO: 1680101 - RNA, 19 nt, Artificial Sequence
  Description of Artificial Sequence: Synthetic oligonucleotide
gcgggcggcuguagaccag

SEQ ID NO: 1680102 - RNA, 19 nt, Artificial Sequence
  Description of Artificial Sequence: Synthetic oligonucleotide
cagggccucuguagcggau

SEQ ID NO: 1680103 - RNA, 19 nt, Artificial Sequence
  Description of Artificial Sequence: Synthetic oligonucleotide
cgccagguuccacucugca

SEQ ID NO: 1680104 - RNA, 19 nt, Artificial Sequence
  Description of Artificial Sequence: Synthetic oligonucleotide
ggugccggugcugguacuu

SEQ ID NO: 1680105 - RNA, 19 nt, Artificial Sequence
  Description of Artificial Sequence: Synthetic oligonucleotide
gccaagcagagucgucguu

SEQ ID NO: 1680106 - RNA, 19 nt, Artificial Sequence
  Description of Artificial Sequence: Synthetic oligonucleotide
gcguucguccuggagccau

SEQ ID NO: 1680107 - RNA, 19 nt, Artificial Sequence
  Description of Artificial Sequence: Synthetic oligonucleotide
ggcguucguccuggagcca

SEQ ID NO: 1680108 - RNA, 19 nt, Artificial Sequence
  Description of Artificial Sequence: Synthetic oligonucleotide
ccuuggcguccaggcuucc

SEQ ID NO: 1680109 - RNA, 19 nt, Artificial Sequence
  Description of Artificial Sequence: Synthetic oligonucleotide
cgccauuguggauguaaau

SEQ ID NO: 1680110 - RNA, 19 nt, Artificial Sequence
  Description of Artificial Sequence: Synthetic oligonucleotide
cgcgugagucuggcagggc

SEQ ID NO: 1680111 - RNA, 19 nt, Artificial Sequence
  Description of Artificial Sequence: Synthetic oligonucleotide
cguggcucuugucaaucuu

SEQ ID NO: 1680112 - RNA, 19 nt, Artificial Sequence
  Description of Artificial Sequence: Synthetic oligonucleotide
gcggaugggccaacagcuu

SEQ ID NO: 1680113 - RNA, 19 nt, Artificial Sequence
  Description of Artificial Sequence: Synthetic oligonucleotide
cguucguccuggagccauu

SEQ ID NO: 1680114 - RNA, 19 nt, Artificial Sequence
  Description of Artificial Sequence: Synthetic oligonucleotide
ccucggcgccauuguggau

SEQ ID NO: 1680115 - RNA, 19 nt, Artificial Sequence
  Description of Artificial Sequence: Synthetic oligonucleotide
cgcugcgacugcccacauu

SEQ ID NO: 1680116 - RNA, 19 nt, Artificial Sequence
  Description of Artificial Sequence: Synthetic oligonucleotide
cggcgccauuguggaugua

SEQ ID NO: 1680117 - RNA, 19 nt, Artificial Sequence
  Description of Artificial Sequence: Synthetic oligonucleotide
aaagcguuuguauauggcc

SEQ ID NO: 1680118 - RNA, 19 nt, Artificial Sequence
  Description of Artificial Sequence: Synthetic oligonucleotide
cauguuaccacucucaucc

SEQ ID NO: 1680119 - RNA, 19 nt, Artificial Sequence
  Description of Artificial Sequence: Synthetic oligonucleotide
aaguggagaguuuauuuac

SEQ ID NO: 1680120 - RNA, 19 nt, Artificial Sequence
  Description of Artificial Sequence: Synthetic oligonucleotide
uggauguucacuucgaucu

SEQ ID NO: 1680121 - RNA, 19 nt, Artificial Sequence
  Description of Artificial Sequence: Synthetic oligonucleotide
aaugagugcauaacggggc

SEQ ID NO: 1680122 - RNA, 19 nt, Artificial Sequence
  Description of Artificial Sequence: Synthetic oligonucleotide
ugaaugagugcauaacggg

SEQ ID NO: 1680123 - RNA, 19 nt, Artificial Sequence
  Description of Artificial Sequence: Synthetic oligonucleotide
guuuauuuacuccugggcc

SEQ ID NO: 1680124 - RNA, 19 nt, Artificial Sequence
  Description of Artificial Sequence: Synthetic oligonucleotide
uuuguauauggccugccag

SEQ ID NO: 1680125 - RNA, 19 nt, Artificial Sequence
  Description of Artificial Sequence: Synthetic oligonucleotide
uuaucgaaguccauguuac

SEQ ID NO: 1680126 - RNA, 19 nt, Artificial Sequence
  Description of Artificial Sequence: Synthetic oligonucleotide
cucaguguuagagaaaugg

SEQ ID NO: 1680127 - RNA, 19 nt, Artificial Sequence
  Description of Artificial Sequence: Synthetic oligonucleotide
aaguuaucgaaguccaugu

SEQ ID NO: 1680128 - RNA, 19 nt, Artificial Sequence
  Description of Artificial Sequence: Synthetic oligonucleotide
uguucguucagguggaacc

SEQ ID NO: 1680129 - RNA, 19 nt, Artificial Sequence
  Description of Artificial Sequence: Synthetic oligonucleotide
ugggguacaagacaggaga

SEQ ID NO: 1680130 - RNA, 19 nt, Artificial Sequence
  Description of Artificial Sequence: Synthetic oligonucleotide
cugaaugagugcauaacgg

SEQ ID NO: 1680131 - RNA, 19 nt, Artificial Sequence
  Description of Artificial Sequence: Synthetic oligonucleotide
gucgcuauccaucacagcc

SEQ ID NO: 1680132 - RNA, 19 nt, Artificial Sequence
  Description of Artificial Sequence: Synthetic oligonucleotide
uuuuaauguuguuccagag

SEQ ID NO: 1680133 - RNA, 19 nt, Artificial Sequence
  Description of Artificial Sequence: Synthetic oligonucleotide
uuuauuuacuccugggccu

SEQ ID NO: 1680134 - RNA, 19 nt, Artificial Sequence
  Description of Artificial Sequence: Synthetic oligonucleotide
ucgacaagugucaaggcca

SEQ ID NO: 1680135 - RNA, 19 nt, Artificial Sequence
  Description of Artificial Sequence: Synthetic oligonucleotide
aguucguugccagugaugg

SEQ ID NO: 1680136 - RNA, 19 nt, Artificial Sequence
  Description of Artificial Sequence: Synthetic oligonucleotide
cauggaagcaacaggagug

SEQ ID NO: 1680137 - RNA, 19 nt, Artificial Sequence
  Description of Artificial Sequence: Synthetic oligonucleotide
ucaguguuagagaaauggc

SEQ ID NO: 1680138 - RNA, 19 nt, Artificial Sequence
  Description of Artificial Sequence: Synthetic oligonucleotide
uucgacaagugucaaggcc

SEQ ID NO: 1680139 - RNA, 19 nt, Artificial Sequence
  Description of Artificial Sequence: Synthetic oligonucleotide
auagugaacugugaggagg

SEQ ID NO: 1680140 - RNA, 19 nt, Artificial Sequence
  Description of Artificial Sequence: Synthetic oligonucleotide
aagagauuugaaagcacgg

SEQ ID NO: 1680141 - RNA, 19 nt, Artificial Sequence
  Description of Artificial Sequence: Synthetic oligonucleotide
aauacauugucagcugcag

SEQ ID NO: 1680142 - RNA, 19 nt, Artificial Sequence
  Description of Artificial Sequence: Synthetic oligonucleotide
ucggucaacaucaaagcgu

SEQ ID NO: 1680143 - RNA, 19 nt, Artificial Sequence
  Description of Artificial Sequence: Synthetic oligonucleotide
gaucggucaacaucaaagc

SEQ ID NO: 1680144 - RNA, 19 nt, Artificial Sequence
  Description of Artificial Sequence: Synthetic oligonucleotide
uuacuccugggccugacag

SEQ ID NO: 1680145 - RNA, 19 nt, Artificial Sequence
  Description of Artificial Sequence: Synthetic oligonucleotide
guagggacaggcaugaucc

SEQ ID NO: 1680146 - RNA, 19 nt, Artificial Sequence
  Description of Artificial Sequence: Synthetic oligonucleotide
aucggucaacaucaaagcg

SEQ ID NO: 1680147 - RNA, 19 nt, Artificial Sequence
  Description of Artificial Sequence: Synthetic oligonucleotide
agcaacaggagugcuaggc

SEQ ID NO: 1680148 - RNA, 19 nt, Artificial Sequence
  Description of Artificial Sequence: Synthetic oligonucleotide
cuaggcuuggcacacagac

SEQ ID NO: 1680149 - RNA, 19 nt, Artificial Sequence
  Description of Artificial Sequence: Synthetic oligonucleotide
auacauugucagcugcagc

SEQ ID NO: 1680150 - RNA, 19 nt, Artificial Sequence
  Description of Artificial Sequence: Synthetic oligonucleotide
uacaagacaggagacagga

SEQ ID NO: 1680151 - RNA, 19 nt, Artificial Sequence
  Description of Artificial Sequence: Synthetic oligonucleotide
uucacuucgaucugcccag

SEQ ID NO: 1680152 - RNA, 19 nt, Artificial Sequence
  Description of Artificial Sequence: Synthetic oligonucleotide
aguucauuuggcugccugg

SEQ ID NO: 1680153 - RNA, 19 nt, Artificial Sequence
  Description of Artificial Sequence: Synthetic oligonucleotide
uggagaguuuauuuacucc

SEQ ID NO: 1680154 - RNA, 19 nt, Artificial Sequence
  Description of Artificial Sequence: Synthetic oligonucleotide
cugauggcgcuaaugaccc

SEQ ID NO: 1680155 - RNA, 19 nt, Artificial Sequence
  Description of Artificial Sequence: Synthetic oligonucleotide
ucuuagucuugucuucgag

SEQ ID NO: 1680156 - RNA, 19 nt, Artificial Sequence
  Description of Artificial Sequence: Synthetic oligonucleotide
guacuugaacuccucaaag

SEQ ID NO: 1680157 - RNA, 19 nt, Artificial Sequence
  Description of Artificial Sequence: Synthetic oligonucleotide
cucucauccgaguagcgcc

SEQ ID NO: 1680158 - RNA, 19 nt, Artificial Sequence
  Description of Artificial Sequence: Synthetic oligonucleotide
ucggguauggcaagcuggg

SEQ ID NO: 1680159 - RNA, 19 nt, Artificial Sequence
  Description of Artificial Sequence: Synthetic oligonucleotide
ucaacaucaaagcguuugu

SEQ ID NO: 1680160 - RNA, 19 nt, Artificial Sequence
  Description of Artificial Sequence: Synthetic oligonucleotide
gauauucaugaguucugug

SEQ ID NO: 1680161 - RNA, 19 nt, Artificial Sequence
  Description of Artificial Sequence: Synthetic oligonucleotide
uguguguagggacaggcau

SEQ ID NO: 1680162 - RNA, 19 nt, Artificial Sequence
  Description of Artificial Sequence: Synthetic oligonucleotide
gagguaacggagugugugg

SEQ ID NO: 1680163 - RNA, 19 nt, Artificial Sequence
  Description of Artificial Sequence: Synthetic oligonucleotide
aaggccaaaaccaucaguu

SEQ ID NO: 1680164 - RNA, 19 nt, Artificial Sequence
  Description of Artificial Sequence: Synthetic oligonucleotide
uguagggacaggcaugauc

SEQ ID NO: 1680165 - RNA, 19 nt, Artificial Sequence
  Description of Artificial Sequence: Synthetic oligonucleotide
uuguauauggccugccagu

SEQ ID NO: 1680166 - RNA, 19 nt, Artificial Sequence
  Description of Artificial Sequence: Synthetic oligonucleotide
ucgcugauggcgcuaauga

SEQ ID NO: 1680167 - RNA, 19 nt, Artificial Sequence
  Description of Artificial Sequence: Synthetic oligonucleotide
ucaagagauuugaaagcac

SEQ ID NO: 1680168 - RNA, 19 nt, Artificial Sequence
  Description of Artificial Sequence: Synthetic oligonucleotide
uugucuucgagcccggggu

SEQ ID NO: 1680169 - RNA, 19 nt, Artificial Sequence
  Description of Artificial Sequence: Synthetic oligonucleotide
gauggcgcuaaugaccccg

SEQ ID NO: 1680170 - RNA, 19 nt, Artificial Sequence
  Description of Artificial Sequence: Synthetic oligonucleotide
cucggguauggcaagcugg

SEQ ID NO: 1680171 - RNA, 19 nt, Artificial Sequence
  Description of Artificial Sequence: Synthetic oligonucleotide
gucaacaucaaagcguuug

SEQ ID NO: 1680172 - RNA, 19 nt, Artificial Sequence
  Description of Artificial Sequence: Synthetic oligonucleotide
gaguaggcgaggcacuagg

SEQ ID NO: 1680173 - RNA, 19 nt, Artificial Sequence
  Description of Artificial Sequence: Synthetic oligonucleotide
ucucauccgaguagcgccg

SEQ ID NO: 1680174 - RNA, 19 nt, Artificial Sequence
  Description of Artificial Sequence: Synthetic oligonucleotide
uaggcgaggcacuagggug

SEQ ID NO: 1680175 - RNA, 19 nt, Artificial Sequence
  Description of Artificial Sequence: Synthetic oligonucleotide
agagagcuagucuuagucu

SEQ ID NO: 1680176 - RNA, 19 nt, Artificial Sequence
  Description of Artificial Sequence: Synthetic oligonucleotide
gguauggcaagcuggggcg

SEQ ID NO: 1680177 - RNA, 19 nt, Artificial Sequence
  Description of Artificial Sequence: Synthetic oligonucleotide
gcuucgacaagugucaagg

SEQ ID NO: 1680178 - RNA, 19 nt, Artificial Sequence
  Description of Artificial Sequence: Synthetic oligonucleotide
gguacaagacaggagacag

SEQ ID NO: 1680179 - RNA, 19 nt, Artificial Sequence
  Description of Artificial Sequence: Synthetic oligonucleotide
agagauguucguucaggug

SEQ ID NO: 1680180 - RNA, 19 nt, Artificial Sequence
  Description of Artificial Sequence: Synthetic oligonucleotide
gucacgaccuuguugagga

SEQ ID NO: 1680181 - RNA, 19 nt, Artificial Sequence
  Description of Artificial Sequence: Synthetic oligonucleotide
acucucauccgaguagcgc

SEQ ID NO: 1680182 - RNA, 19 nt, Artificial Sequence
  Description of Artificial Sequence: Synthetic oligonucleotide
aggaauacauugucagcug

SEQ ID NO: 1680183 - RNA, 19 nt, Artificial Sequence
  Description of Artificial Sequence: Synthetic oligonucleotide
uguuaccacucucauccga

SEQ ID NO: 1680184 - RNA, 19 nt, Artificial Sequence
  Description of Artificial Sequence: Synthetic oligonucleotide
agcugaugaaguuaucgaa

SEQ ID NO: 1680185 - RNA, 19 nt, Artificial Sequence
  Description of Artificial Sequence: Synthetic oligonucleotide
ugacccuucagcagagaga

SEQ ID NO: 1680186 - RNA, 19 nt, Artificial Sequence
  Description of Artificial Sequence: Synthetic oligonucleotide
aacggaguguguggggugg

SEQ ID NO: 1680187 - RNA, 19 nt, Artificial Sequence
  Description of Artificial Sequence: Synthetic oligonucleotide
uguguagggacaggcauga

SEQ ID NO: 1680188 - RNA, 19 nt, Artificial Sequence
  Description of Artificial Sequence: Synthetic oligonucleotide
caugcuucgacaaguguca

SEQ ID NO: 1680189 - RNA, 19 nt, Artificial Sequence
  Description of Artificial Sequence: Synthetic oligonucleotide
uucguugccagugaugguc

SEQ ID NO: 1680190 - RNA, 19 nt, Artificial Sequence
  Description of Artificial Sequence: Synthetic oligonucleotide
ugcuaggcuuggcacacag

SEQ ID NO: 1680191 - RNA, 19 nt, Artificial Sequence
  Description of Artificial Sequence: Synthetic oligonucleotide
uuuugucaagagauuugaa

SEQ ID NO: 1680192 - RNA, 19 nt, Artificial Sequence
  Description of Artificial Sequence: Synthetic oligonucleotide
guguuagagaaauggcuac

SEQ ID NO: 1680193 - RNA, 19 nt, Artificial Sequence
  Description of Artificial Sequence: Synthetic oligonucleotide
guuaucgaaguccauguua

SEQ ID NO: 1680194 - RNA, 19 nt, Artificial Sequence
  Description of Artificial Sequence: Synthetic oligonucleotide
uuauuuacuccugggccug

SEQ ID NO: 1680195 - RNA, 19 nt, Artificial Sequence
  Description of Artificial Sequence: Synthetic oligonucleotide
ggaacaggauucgaggugg

SEQ ID NO: 1680196 - RNA, 19 nt, Artificial Sequence
  Description of Artificial Sequence: Synthetic oligonucleotide
gguuguacugcgcagcagc

SEQ ID NO: 1680197 - RNA, 19 nt, Artificial Sequence
  Description of Artificial Sequence: Synthetic oligonucleotide
agagauuugaaagcacgga

SEQ ID NO: 1680198 - RNA, 19 nt, Artificial Sequence
  Description of Artificial Sequence: Synthetic oligonucleotide
ucgcuauccaucacagcca

SEQ ID NO: 1680199 - RNA, 19 nt, Artificial Sequence
  Description of Artificial Sequence: Synthetic oligonucleotide
cuucgaucugcccaguguc

SEQ ID NO: 1680200 - RNA, 19 nt, Artificial Sequence
  Description of Artificial Sequence: Synthetic oligonucleotide
acuucgaucugcccagugu

SEQ ID NO: 1680201 - RNA, 19 nt, Artificial Sequence
  Description of Artificial Sequence: Synthetic oligonucleotide
agcacauugcccaggccgc

SEQ ID NO: 1680202 - RNA, 19 nt, Artificial Sequence
  Description of Artificial Sequence: Synthetic oligonucleotide
aguguuagagaaauggcua

SEQ ID NO: 1680203 - RNA, 19 nt, Artificial Sequence
  Description of Artificial Sequence: Synthetic oligonucleotide
uuuccuguggugucgcuau

SEQ ID NO: 1680204 - RNA, 19 nt, Artificial Sequence
  Description of Artificial Sequence: Synthetic oligonucleotide
auacgcauggcaguuccuc

SEQ ID NO: 1680205 - RNA, 19 nt, Artificial Sequence
  Description of Artificial Sequence: Synthetic oligonucleotide
ugcauaacggggcguggug

SEQ ID NO: 1680206 - RNA, 19 nt, Artificial Sequence
  Description of Artificial Sequence: Synthetic oligonucleotide
uccauguuaccacucucau

SEQ ID NO: 1680207 - RNA, 19 nt, Artificial Sequence
  Description of Artificial Sequence: Synthetic oligonucleotide
ucguugccagugauggucc

SEQ ID NO: 1680208 - RNA, 19 nt, Artificial Sequence
  Description of Artificial Sequence: Synthetic oligonucleotide
uacgcauggcaguuccucc

SEQ ID NO: 1680209 - RNA, 19 nt, Artificial Sequence
  Description of Artificial Sequence: Synthetic oligonucleotide
acgcauggcaguuccuccg

SEQ ID NO: 1680210 - RNA, 19 nt, Artificial Sequence
  Description of Artificial Sequence: Synthetic oligonucleotide
caucaguuuucagauccgg

SEQ ID NO: 1680211 - RNA, 19 nt, Artificial Sequence
  Description of Artificial Sequence: Synthetic oligonucleotide
ggaauacauugucagcugc

SEQ ID NO: 1680212 - RNA, 19 nt, Artificial Sequence
  Description of Artificial Sequence: Synthetic oligonucleotide
uccccgaucggucaacauc

SEQ ID NO: 1680213 - RNA, 19 nt, Artificial Sequence
  Description of Artificial Sequence: Synthetic oligonucleotide
guaacucggguauggcaag

SEQ ID NO: 1680214 - RNA, 19 nt, Artificial Sequence
  Description of Artificial Sequence: Synthetic oligonucleotide
uaucgaaguccauguuacc

SEQ ID NO: 1680215 - RNA, 19 nt, Artificial Sequence
  Description of Artificial Sequence: Synthetic oligonucleotide
uucgagguggcuccauagu

SEQ ID NO: 1680216 - RNA, 19 nt, Artificial Sequence
  Description of Artificial Sequence: Synthetic oligonucleotide
gaugaggccgccgagcaca

SEQ ID NO: 1680217 - RNA, 19 nt, Artificial Sequence
  Description of Artificial Sequence: Synthetic oligonucleotide
uuuacuccugggccugaca

SEQ ID NO: 1680218 - RNA, 19 nt, Artificial Sequence
  Description of Artificial Sequence: Synthetic oligonucleotide
ugcuucgacaagugucaag

SEQ ID NO: 1680219 - RNA, 19 nt, Artificial Sequence
  Description of Artificial Sequence: Synthetic oligonucleotide
ugaggauauucaugaguuc

SEQ ID NO: 1680220 - RNA, 19 nt, Artificial Sequence
  Description of Artificial Sequence: Synthetic oligonucleotide
agcuccgcugaugaggccg

SEQ ID NO: 1680221 - RNA, 19 nt, Artificial Sequence
  Description of Artificial Sequence: Synthetic oligonucleotide
uagucuuagucuugucuuc

SEQ ID NO: 1680222 - RNA, 19 nt, Artificial Sequence
  Description of Artificial Sequence: Synthetic oligonucleotide
aucaaagcguuuguauaug

SEQ ID NO: 1680223 - RNA, 19 nt, Artificial Sequence
  Description of Artificial Sequence: Synthetic oligonucleotide
agguaacggaguguguggg

SEQ ID NO: 1680224 - RNA, 19 nt, Artificial Sequence
  Description of Artificial Sequence: Synthetic oligonucleotide
uguucacuucgaucugccc

SEQ ID NO: 1680225 - RNA, 19 nt, Artificial Sequence
  Description of Artificial Sequence: Synthetic oligonucleotide
cuucgacaagugucaaggc

SEQ ID NO: 1680226 - RNA, 19 nt, Artificial Sequence
  Description of Artificial Sequence: Synthetic oligonucleotide
auguuguagagauguucgu

SEQ ID NO: 1680227 - RNA, 19 nt, Artificial Sequence
  Description of Artificial Sequence: Synthetic oligonucleotide
gguggggugacccuucagc

SEQ ID NO: 1680228 - RNA, 19 nt, Artificial Sequence
  Description of Artificial Sequence: Synthetic oligonucleotide
caugucgucuccagccagc

SEQ ID NO: 1680229 - RNA, 19 nt, Artificial Sequence
  Description of Artificial Sequence: Synthetic oligonucleotide
aagcuggggcguguugagc

SEQ ID NO: 1680230 - RNA, 19 nt, Artificial Sequence
  Description of Artificial Sequence: Synthetic oligonucleotide
ggagaguuuauuuacuccu

SEQ ID NO: 1680231 - RNA, 19 nt, Artificial Sequence
  Description of Artificial Sequence: Synthetic oligonucleotide
ucguucagguggaacccug

SEQ ID NO: 1680232 - RNA, 19 nt, Artificial Sequence
  Description of Artificial Sequence: Synthetic oligonucleotide
auguucguucagguggaac

SEQ ID NO: 1680233 - RNA, 19 nt, Artificial Sequence
  Description of Artificial Sequence: Synthetic oligonucleotide
auguuaccacucucauccg

SEQ ID NO: 1680234 - RNA, 19 nt, Artificial Sequence
  Description of Artificial Sequence: Synthetic oligonucleotide
guagcuccgcugaugaggc

SEQ ID NO: 1680235 - RNA, 19 nt, Artificial Sequence
  Description of Artificial Sequence: Synthetic oligonucleotide
cauaacggggcguggugug

SEQ ID NO: 1680236 - RNA, 19 nt, Artificial Sequence
  Description of Artificial Sequence: Synthetic oligonucleotide
ggauacgcauggcaguucc

SEQ ID NO: 1680237 - RNA, 19 nt, Artificial Sequence
  Description of Artificial Sequence: Synthetic oligonucleotide
aagcagcugaugaaguuau

SEQ ID NO: 1680238 - RNA, 19 nt, Artificial Sequence
  Description of Artificial Sequence: Synthetic oligonucleotide
caugauccucccagaacug

SEQ ID NO: 1680239 - RNA, 19 nt, Artificial Sequence
  Description of Artificial Sequence: Synthetic oligonucleotide
ugaugguccccgaucgguc

SEQ ID NO: 1680240 - RNA, 19 nt, Artificial Sequence
  Description of Artificial Sequence: Synthetic oligonucleotide
uguauauggccugccaguu

SEQ ID NO: 1680241 - RNA, 19 nt, Artificial Sequence
  Description of Artificial Sequence: Synthetic oligonucleotide
guacaagacaggagacagg

SEQ ID NO: 1680242 - RNA, 19 nt, Artificial Sequence
  Description of Artificial Sequence: Synthetic oligonucleotide
uaacggaguguguggggug

SEQ ID NO: 1680243 - RNA, 19 nt, Artificial Sequence
  Description of Artificial Sequence: Synthetic oligonucleotide
aggcacuaggguguguggg

SEQ ID NO: 1680244 - RNA, 19 nt, Artificial Sequence
  Description of Artificial Sequence: Synthetic oligonucleotide
guucguucagguggaaccc

SEQ ID NO: 1680245 - RNA, 19 nt, Artificial Sequence
  Description of Artificial Sequence: Synthetic oligonucleotide
ggagguaacggagugugug

SEQ ID NO: 1680246 - RNA, 19 nt, Artificial Sequence
  Description of Artificial Sequence: Synthetic oligonucleotide
gagugcauaacggggcgug

SEQ ID NO: 1680247 - RNA, 19 nt, Artificial Sequence
  Description of Artificial Sequence: Synthetic oligonucleotide
agcacggaacauggcgucc

SEQ ID NO: 1680248 - RNA, 19 nt, Artificial Sequence
  Description of Artificial Sequence: Synthetic oligonucleotide
uccggguuguacugcgcag

SEQ ID NO: 1680249 - RNA, 19 nt, Artificial Sequence
  Description of Artificial Sequence: Synthetic oligonucleotide
ucaugaguucuguggcgcu

SEQ ID NO: 1680250 - RNA, 19 nt, Artificial Sequence
  Description of Artificial Sequence: Synthetic oligonucleotide
uccuguggugucgcuaucc

SEQ ID NO: 1680251 - RNA, 19 nt, Artificial Sequence
  Description of Artificial Sequence: Synthetic oligonucleotide
cugaugaaguuaucgaagu

SEQ ID NO: 1680252 - RNA, 19 nt, Artificial Sequence
  Description of Artificial Sequence: Synthetic oligonucleotide
gguaacggagugugugggg

SEQ ID NO: 1680253 - RNA, 19 nt, Artificial Sequence
  Description of Artificial Sequence: Synthetic oligonucleotide
cuaaugaccccgcccagga

SEQ ID NO: 1680254 - RNA, 19 nt, Artificial Sequence
  Description of Artificial Sequence: Synthetic oligonucleotide
uacuccugggccugacagc

SEQ ID NO: 1680255 - RNA, 19 nt, Artificial Sequence
  Description of Artificial Sequence: Synthetic oligonucleotide
agcaggacaugacuauaaa

SEQ ID NO: 1680256 - RNA, 19 nt, Artificial Sequence
  Description of Artificial Sequence: Synthetic oligonucleotide
cauugucagcugcagccac

SEQ ID NO: 1680257 - RNA, 19 nt, Artificial Sequence
  Description of Artificial Sequence: Synthetic oligonucleotide
gugucgcuauccaucacag

SEQ ID NO: 1680258 - RNA, 19 nt, Artificial Sequence
  Description of Artificial Sequence: Synthetic oligonucleotide
ucuccggaacugccggacc

SEQ ID NO: 1680259 - RNA, 19 nt, Artificial Sequence
  Description of Artificial Sequence: Synthetic oligonucleotide
acucggguauggcaagcug

SEQ ID NO: 1680260 - RNA, 19 nt, Artificial Sequence
  Description of Artificial Sequence: Synthetic oligonucleotide
gguacuugaacuccucaaa

SEQ ID NO: 1680261 - RNA, 19 nt, Artificial Sequence
  Description of Artificial Sequence: Synthetic oligonucleotide
aacaggauucgagguggcu

SEQ ID NO: 1680262 - RNA, 19 nt, Artificial Sequence
  Description of Artificial Sequence: Synthetic oligonucleotide
accaugcuucgacaagugu

SEQ ID NO: 1680263 - RNA, 19 nt, Artificial Sequence
  Description of Artificial Sequence: Synthetic oligonucleotide
aacucggguauggcaagcu

SEQ ID NO: 1680264 - RNA, 19 nt, Artificial Sequence
  Description of Artificial Sequence: Synthetic oligonucleotide
ugucgcuauccaucacagc

SEQ ID NO: 1680265 - RNA, 19 nt, Artificial Sequence
  Description of Artificial Sequence: Synthetic oligonucleotide
augaccccgcccaggauac

SEQ ID NO: 1680266 - RNA, 19 nt, Artificial Sequence
  Description of Artificial Sequence: Synthetic oligonucleotide
aguuaucgaaguccauguu

SEQ ID NO: 1680267 - RNA, 19 nt, Artificial Sequence
  Description of Artificial Sequence: Synthetic oligonucleotide
ucagauccgggugucgggu

SEQ ID NO: 1680268 - RNA, 19 nt, Artificial Sequence
  Description of Artificial Sequence: Synthetic oligonucleotide
caagcuggggcguguugag

SEQ ID NO: 1680269 - RNA, 19 nt, Artificial Sequence
  Description of Artificial Sequence: Synthetic oligonucleotide
guuguacugcgcagcagcc

SEQ ID NO: 1680270 - RNA, 19 nt, Artificial Sequence
  Description of Artificial Sequence: Synthetic oligonucleotide
ggugucgcuauccaucaca

SEQ ID NO: 1680271 - RNA, 19 nt, Artificial Sequence
  Description of Artificial Sequence: Synthetic oligonucleotide
uggaguucauuuggcugcc

SEQ ID NO: 1680272 - RNA, 19 nt, Artificial Sequence
  Description of Artificial Sequence: Synthetic oligonucleotide
cacucucauccgaguagcg

SEQ ID NO: 1680273 - RNA, 19 nt, Artificial Sequence
  Description of Artificial Sequence: Synthetic oligonucleotide
gagagcuagucuuagucuu

SEQ ID NO: 1680274 - RNA, 19 nt, Artificial Sequence
  Description of Artificial Sequence: Synthetic oligonucleotide
agugcauaacggggcgugg

SEQ ID NO: 1680275 - RNA, 19 nt, Artificial Sequence
  Description of Artificial Sequence: Synthetic oligonucleotide
caucaaagcguuuguauau

SEQ ID NO: 1680276 - RNA, 19 nt, Artificial Sequence
  Description of Artificial Sequence: Synthetic oligonucleotide
gcccuugggacauggaagc

SEQ ID NO: 1680277 - RNA, 19 nt, Artificial Sequence
  Description of Artificial Sequence: Synthetic oligonucleotide
agauccgggugucggguca

SEQ ID NO: 1680278 - RNA, 19 nt, Artificial Sequence
  Description of Artificial Sequence: Synthetic oligonucleotide
gguaacucggguauggcaa

SEQ ID NO: 1680279 - RNA, 19 nt, Artificial Sequence
  Description of Artificial Sequence: Synthetic oligonucleotide
gaguucguugccagugaug

SEQ ID NO: 1680280 - RNA, 19 nt, Artificial Sequence
  Description of Artificial Sequence: Synthetic oligonucleotide
agagcuagucuuagucuug

SEQ ID NO: 1680281 - RNA, 19 nt, Artificial Sequence
  Description of Artificial Sequence: Synthetic oligonucleotide
uaacucggguauggcaagc

SEQ ID NO: 1680282 - RNA, 19 nt, Artificial Sequence
  Description of Artificial Sequence: Synthetic oligonucleotide
ccauagugaacugugagga

SEQ ID NO: 1680283 - RNA, 19 nt, Artificial Sequence
  Description of Artificial Sequence: Synthetic oligonucleotide
aagaguaggcgaggcacua

SEQ ID NO: 1680284 - RNA, 19 nt, Artificial Sequence
  Description of Artificial Sequence: Synthetic oligonucleotide
caccaugcuucgacaagug

SEQ ID NO: 1680285 - RNA, 19 nt, Artificial Sequence
  Description of Artificial Sequence: Synthetic oligonucleotide
uggggcguguugagcuccg

SEQ ID NO: 1680286 - RNA, 19 nt, Artificial Sequence
  Description of Artificial Sequence: Synthetic oligonucleotide
agauguucguucaggugga

SEQ ID NO: 1680287 - RNA, 19 nt, Artificial Sequence
  Description of Artificial Sequence: Synthetic oligonucleotide
uggagguaacggagugugu

SEQ ID NO: 1680288 - RNA, 19 nt, Artificial Sequence
  Description of Artificial Sequence: Synthetic oligonucleotide
uucguucagguggaacccu

SEQ ID NO: 1680289 - RNA, 19 nt, Artificial Sequence
  Description of Artificial Sequence: Synthetic oligonucleotide
aggauacgcauggcaguuc

SEQ ID NO: 1680290 - RNA, 19 nt, Artificial Sequence
  Description of Artificial Sequence: Synthetic oligonucleotide
auggcgcuaaugaccccgc

SEQ ID NO: 1680291 - RNA, 19 nt, Artificial Sequence
  Description of Artificial Sequence: Synthetic oligonucleotide
ggcgcuaaugaccccgccc

SEQ ID NO: 1680292 - RNA, 19 nt, Artificial Sequence
  Description of Artificial Sequence: Synthetic oligonucleotide
uccgcugaugaggccgccg

SEQ ID NO: 1680293 - RNA, 19 nt, Artificial Sequence
  Description of Artificial Sequence: Synthetic oligonucleotide
auuuggcugccugggaggu

SEQ ID NO: 1680294 - RNA, 19 nt, Artificial Sequence
  Description of Artificial Sequence: Synthetic oligonucleotide
cucgcugauggcgcuaaug

SEQ ID NO: 1680295 - RNA, 19 nt, Artificial Sequence
  Description of Artificial Sequence: Synthetic oligonucleotide
ugucuucgagcccggggua

SEQ ID NO: 1680296 - RNA, 19 nt, Artificial Sequence
  Description of Artificial Sequence: Synthetic oligonucleotide
gcuagucuuagucuugucu

SEQ ID NO: 1680297 - RNA, 19 nt, Artificial Sequence
  Description of Artificial Sequence: Synthetic oligonucleotide
agaguaggcgaggcacuag

SEQ ID NO: 1680298 - RNA, 19 nt, Artificial Sequence
  Description of Artificial Sequence: Synthetic oligonucleotide
gguggcuccauagugaacu

SEQ ID NO: 1680299 - RNA, 19 nt, Artificial Sequence
  Description of Artificial Sequence: Synthetic oligonucleotide
ccagagguacuugaacucc

SEQ ID NO: 1680300 - RNA, 19 nt, Artificial Sequence
  Description of Artificial Sequence: Synthetic oligonucleotide
uaacggggcguggugugug

SEQ ID NO: 1680301 - RNA, 19 nt, Artificial Sequence
  Description of Artificial Sequence: Synthetic oligonucleotide
ugagugcauaacggggcgu

SEQ ID NO: 1680302 - RNA, 19 nt, Artificial Sequence
  Description of Artificial Sequence: Synthetic oligonucleotide
agcucuguucaggaauaca

SEQ ID NO: 1680303 - RNA, 19 nt, Artificial Sequence
  Description of Artificial Sequence: Synthetic oligonucleotide
agcaaguggagaguuuauu

SEQ ID NO: 1680304 - RNA, 19 nt, Artificial Sequence
  Description of Artificial Sequence: Synthetic oligonucleotide
gcuaaugaccccgcccagg

SEQ ID NO: 1680305 - RNA, 19 nt, Artificial Sequence
  Description of Artificial Sequence: Synthetic oligonucleotide
acgaccuuguugaggauau

SEQ ID NO: 1680306 - RNA, 19 nt, Artificial Sequence
  Description of Artificial Sequence: Synthetic oligonucleotide
ucauccgaguagcgccgga

SEQ ID NO: 1680307 - RNA, 19 nt, Artificial Sequence
  Description of Artificial Sequence: Synthetic oligonucleotide
gauucgagguggcuccaua

SEQ ID NO: 1680308 - RNA, 19 nt, Artificial Sequence
  Description of Artificial Sequence: Synthetic oligonucleotide
acuagggugugugggccug

SEQ ID NO: 1680309 - RNA, 19 nt, Artificial Sequence
  Description of Artificial Sequence: Synthetic oligonucleotide
guugccagugauggucccc

SEQ ID NO: 1680310 - RNA, 19 nt, Artificial Sequence
  Description of Artificial Sequence: Synthetic oligonucleotide
gguggaacccugcugccuc

SEQ ID NO: 1680311 - RNA, 19 nt, Artificial Sequence
  Description of Artificial Sequence: Synthetic oligonucleotide
guagcgccggaugaucaug

SEQ ID NO: 1680312 - RNA, 19 nt, Artificial Sequence
  Description of Artificial Sequence: Synthetic oligonucleotide
ggggugacccuucagcaga

SEQ ID NO: 1680313 - RNA, 19 nt, Artificial Sequence
  Description of Artificial Sequence: Synthetic oligonucleotide
gaccccgcccaggauacgc

SEQ ID NO: 1680314 - RNA, 19 nt, Artificial Sequence
  Description of Artificial Sequence: Synthetic oligonucleotide
uaaugaccccgcccaggau

SEQ ID NO: 1680315 - RNA, 19 nt, Artificial Sequence
  Description of Artificial Sequence: Synthetic oligonucleotide
uauuuacuccugggccuga

SEQ ID NO: 1680316 - RNA, 19 nt, Artificial Sequence
  Description of Artificial Sequence: Synthetic oligonucleotide
gaaggccuguggguagcag

SEQ ID NO: 1680317 - RNA, 19 nt, Artificial Sequence
  Description of Artificial Sequence: Synthetic oligonucleotide
ggguaacucggguauggca

SEQ ID NO: 1680318 - RNA, 19 nt, Artificial Sequence
  Description of Artificial Sequence: Synthetic oligonucleotide
uggcgcuaaugaccccgcc

SEQ ID NO: 1680319 - RNA, 19 nt, Artificial Sequence
  Description of Artificial Sequence: Synthetic oligonucleotide
guaggcgaggcacuagggu

SEQ ID NO: 1680320 - RNA, 19 nt, Artificial Sequence
  Description of Artificial Sequence: Synthetic oligonucleotide
gcgcuaaugaccccgccca

SEQ ID NO: 1680321 - RNA, 19 nt, Artificial Sequence
  Description of Artificial Sequence: Synthetic oligonucleotide
ucuucgagcccgggguaac

SEQ ID NO: 1680322 - RNA, 19 nt, Artificial Sequence
  Description of Artificial Sequence: Synthetic oligonucleotide
guacugcgcagcagccucg

SEQ ID NO: 1680323 - RNA, 19 nt, Artificial Sequence
  Description of Artificial Sequence: Synthetic oligonucleotide
cauucccaggccgccgccg

SEQ ID NO: 1680324 - RNA, 19 nt, Artificial Sequence
  Description of Artificial Sequence: Synthetic oligonucleotide
ucccguagcuccgcugaug

SEQ ID NO: 1680325 - RNA, 19 nt, Artificial Sequence
  Description of Artificial Sequence: Synthetic oligonucleotide
guaacggaguguguggggu

SEQ ID NO: 1680326 - RNA, 19 nt, Artificial Sequence
  Description of Artificial Sequence: Synthetic oligonucleotide
cacuucgaucugcccagug

SEQ ID NO: 1680327 - RNA, 19 nt, Artificial Sequence
  Description of Artificial Sequence: Synthetic oligonucleotide
cuggggcguguugagcucc

SEQ ID NO: 1680328 - RNA, 19 nt, Artificial Sequence
  Description of Artificial Sequence: Synthetic oligonucleotide
auguuguuccagagguacu

SEQ ID NO: 1680329 - RNA, 19 nt, Artificial Sequence
  Description of Artificial Sequence: Synthetic oligonucleotide
gcguguugagcuccggcug

SEQ ID NO: 1680330 - RNA, 19 nt, Artificial Sequence
  Description of Artificial Sequence: Synthetic oligonucleotide
ccccgaucggucaacauca

SEQ ID NO: 1680331 - RNA, 19 nt, Artificial Sequence
  Description of Artificial Sequence: Synthetic oligonucleotide
cucauccgaguagcgccgg

SEQ ID NO: 1680332 - RNA, 19 nt, Artificial Sequence
  Description of Artificial Sequence: Synthetic oligonucleotide
ccgcccaggauacgcaugg

SEQ ID NO: 1680333 - RNA, 19 nt, Artificial Sequence
  Description of Artificial Sequence: Synthetic oligonucleotide
auaacggggcguggugugu

SEQ ID NO: 1680334 - RNA, 19 nt, Artificial Sequence
  Description of Artificial Sequence: Synthetic oligonucleotide
agcagcugaugaaguuauc

SEQ ID NO: 1680335 - RNA, 19 nt, Artificial Sequence
  Description of Artificial Sequence: Synthetic oligonucleotide
cuccggguuguacugcgca

SEQ ID NO: 1680336 - RNA, 19 nt, Artificial Sequence
  Description of Artificial Sequence: Synthetic oligonucleotide
gauggagguaacggagugu

SEQ ID NO: 1680337 - RNA, 19 nt, Artificial Sequence
  Description of Artificial Sequence: Synthetic oligonucleotide
gagcccgggguaacucggg

SEQ ID NO: 1680338 - RNA, 19 nt, Artificial Sequence
  Description of Artificial Sequence: Synthetic oligonucleotide
aggccgccgagcacauugc

SEQ ID NO: 1680339 - RNA, 19 nt, Artificial Sequence
  Description of Artificial Sequence: Synthetic oligonucleotide
guagcaggacaugacuaua

SEQ ID NO: 1680340 - RNA, 19 nt, Artificial Sequence
  Description of Artificial Sequence: Synthetic oligonucleotide
ccauguuaccacucucauc

SEQ ID NO: 1680341 - RNA, 19 nt, Artificial Sequence
  Description of Artificial Sequence: Synthetic oligonucleotide
gcgccggaugaucauguug

SEQ ID NO: 1680342 - RNA, 19 nt, Artificial Sequence
  Description of Artificial Sequence: Synthetic oligonucleotide
gggcgugguguguguaggg

SEQ ID NO: 1680343 - RNA, 19 nt, Artificial Sequence
  Description of Artificial Sequence: Synthetic oligonucleotide
gcgugguguguguagggac

SEQ ID NO: 1680344 - RNA, 19 nt, Artificial Sequence
  Description of Artificial Sequence: Synthetic oligonucleotide
uuccuguggugucgcuauc

SEQ ID NO: 1680345 - RNA, 19 nt, Artificial Sequence
  Description of Artificial Sequence: Synthetic oligonucleotide
agcccgggguaacucgggu

SEQ ID NO: 1680346 - RNA, 19 nt, Artificial Sequence
  Description of Artificial Sequence: Synthetic oligonucleotide
gcacacagacaggauggag

SEQ ID NO: 1680347 - RNA, 19 nt, Artificial Sequence
  Description of Artificial Sequence: Synthetic oligonucleotide
ggacaggcaugauccuccc

SEQ ID NO: 1680348 - RNA, 19 nt, Artificial Sequence
  Description of Artificial Sequence: Synthetic oligonucleotide
gggguacaagacaggagac

SEQ ID NO: 1680349 - RNA, 19 nt, Artificial Sequence
  Description of Artificial Sequence: Synthetic oligonucleotide
acggagugugugggguggg

SEQ ID NO: 1680350 - RNA, 19 nt, Artificial Sequence
  Description of Artificial Sequence: Synthetic oligonucleotide
ggguacaagacaggagaca

SEQ ID NO: 1680351 - RNA, 19 nt, Artificial Sequence
  Description of Artificial Sequence: Synthetic oligonucleotide
gagcuagucuuagucuugu

SEQ ID NO: 1680352 - RNA, 19 nt, Artificial Sequence
  Description of Artificial Sequence: Synthetic oligonucleotide
ggccccugggaguucguug

SEQ ID NO: 1680353 - RNA, 19 nt, Artificial Sequence
  Description of Artificial Sequence: Synthetic oligonucleotide
caacaggagugcuaggcuu

SEQ ID NO: 1680354 - RNA, 19 nt, Artificial Sequence
  Description of Artificial Sequence: Synthetic oligonucleotide
augguccccgaucggucaa

SEQ ID NO: 1680355 - RNA, 19 nt, Artificial Sequence
  Description of Artificial Sequence: Synthetic oligonucleotide
ggauauucaugaguucugu

SEQ ID NO: 1680356 - RNA, 19 nt, Artificial Sequence
  Description of Artificial Sequence: Synthetic oligonucleotide
gugucgggucacgaccuug

SEQ ID NO: 1680357 - RNA, 19 nt, Artificial Sequence
  Description of Artificial Sequence: Synthetic oligonucleotide
gcucuguucaggaauacau

SEQ ID NO: 1680358 - RNA, 19 nt, Artificial Sequence
  Description of Artificial Sequence: Synthetic oligonucleotide
ccgagcacauugcccaggc

SEQ ID NO: 1680359 - RNA, 19 nt, Artificial Sequence
  Description of Artificial Sequence: Synthetic oligonucleotide
uccgggugucgggucacga

SEQ ID NO: 1680360 - RNA, 19 nt, Artificial Sequence
  Description of Artificial Sequence: Synthetic oligonucleotide
gggcguguugagcuccggc

SEQ ID NO: 1680361 - RNA, 19 nt, Artificial Sequence
  Description of Artificial Sequence: Synthetic oligonucleotide
cuagggugugugggccugc

SEQ ID NO: 1680362 - RNA, 19 nt, Artificial Sequence
  Description of Artificial Sequence: Synthetic oligonucleotide
ucacgaccuuguugaggau

SEQ ID NO: 1680363 - RNA, 19 nt, Artificial Sequence
  Description of Artificial Sequence: Synthetic oligonucleotide
ggcguguugagcuccggcu

SEQ ID NO: 1680364 - RNA, 19 nt, Artificial Sequence
  Description of Artificial Sequence: Synthetic oligonucleotide
gugaugguccccgaucggu

SEQ ID NO: 1680365 - RNA, 19 nt, Artificial Sequence
  Description of Artificial Sequence: Synthetic oligonucleotide
gggaguucguugccaguga

SEQ ID NO: 1680366 - RNA, 19 nt, Artificial Sequence
  Description of Artificial Sequence: Synthetic oligonucleotide
aucauguuguagagauguu

SEQ ID NO: 1680367 - RNA, 19 nt, Artificial Sequence
  Description of Artificial Sequence: Synthetic oligonucleotide
ugggguggguggggugggg

SEQ ID NO: 1680368 - RNA, 19 nt, Artificial Sequence
  Description of Artificial Sequence: Synthetic oligonucleotide
cgggugucgggucacgacc

SEQ ID NO: 1680369 - RNA, 19 nt, Artificial Sequence
  Description of Artificial Sequence: Synthetic oligonucleotide
gcaacaggagugcuaggcu

SEQ ID NO: 1680370 - RNA, 19 nt, Artificial Sequence
  Description of Artificial Sequence: Synthetic oligonucleotide
cacgaccuuguugaggaua

SEQ ID NO: 1680371 - RNA, 19 nt, Artificial Sequence
  Description of Artificial Sequence: Synthetic oligonucleotide
gcguuuguauauggccugc

SEQ ID NO: 1680372 - RNA, 19 nt, Artificial Sequence
  Description of Artificial Sequence: Synthetic oligonucleotide
ugaccccgcccaggauacg

SEQ ID NO: 1680373 - RNA, 19 nt, Artificial Sequence
  Description of Artificial Sequence: Synthetic oligonucleotide
acugcgcagcagccucgcu

SEQ ID NO: 1680374 - RNA, 19 nt, Artificial Sequence
  Description of Artificial Sequence: Synthetic oligonucleotide
cguucagguggaacccugc

SEQ ID NO: 1680375 - RNA, 19 nt, Artificial Sequence
  Description of Artificial Sequence: Synthetic oligonucleotide
gggguaacucggguauggc

SEQ ID NO: 1680376 - RNA, 19 nt, Artificial Sequence
  Description of Artificial Sequence: Synthetic oligonucleotide
gauguucguucagguggaa

SEQ ID NO: 1680377 - RNA, 19 nt, Artificial Sequence
  Description of Artificial Sequence: Synthetic oligonucleotide
aggauucgagguggcucca

SEQ ID NO: 1680378 - RNA, 19 nt, Artificial Sequence
  Description of Artificial Sequence: Synthetic oligonucleotide
gaucugcccagugucguuu

SEQ ID NO: 1680379 - RNA, 19 nt, Artificial Sequence
  Description of Artificial Sequence: Synthetic oligonucleotide
auccgggugucgggucacg

SEQ ID NO: 1680380 - RNA, 19 nt, Artificial Sequence
  Description of Artificial Sequence: Synthetic oligonucleotide
ugguccccgaucggucaac

SEQ ID NO: 1680381 - RNA, 19 nt, Artificial Sequence
  Description of Artificial Sequence: Synthetic oligonucleotide
ccggguuguacugcgcagc

SEQ ID NO: 1680382 - RNA, 19 nt, Artificial Sequence
  Description of Artificial Sequence: Synthetic oligonucleotide
uuuggcugccugggaggua

SEQ ID NO: 1680383 - RNA, 19 nt, Artificial Sequence
  Description of Artificial Sequence: Synthetic oligonucleotide
augcuucgacaagugucaa

SEQ ID NO: 1680384 - RNA, 19 nt, Artificial Sequence
  Description of Artificial Sequence: Synthetic oligonucleotide
cccguagcuccgcugauga

SEQ ID NO: 1680385 - RNA, 19 nt, Artificial Sequence
  Description of Artificial Sequence: Synthetic oligonucleotide
cagccugaccaagcagcug

SEQ ID NO: 1680386 - RNA, 19 nt, Artificial Sequence
  Description of Artificial Sequence: Synthetic oligonucleotide
gauacgcauggcaguuccu

SEQ ID NO: 1680387 - RNA, 19 nt, Artificial Sequence
  Description of Artificial Sequence: Synthetic oligonucleotide
agcgccggaugaucauguu

SEQ ID NO: 1680388 - RNA, 19 nt, Artificial Sequence
  Description of Artificial Sequence: Synthetic oligonucleotide
aggccgccgccgccgccgc

SEQ ID NO: 1680389 - RNA, 19 nt, Artificial Sequence
  Description of Artificial Sequence: Synthetic oligonucleotide
gggugacccuucagcagag

SEQ ID NO: 1680390 - RNA, 19 nt, Artificial Sequence
  Description of Artificial Sequence: Synthetic oligonucleotide
gcagagcccauaggaagca

SEQ ID NO: 1680391 - RNA, 19 nt, Artificial Sequence
  Description of Artificial Sequence: Synthetic oligonucleotide
gccgagcacauugcccagg

SEQ ID NO: 1680392 - RNA, 19 nt, Artificial Sequence
  Description of Artificial Sequence: Synthetic oligonucleotide
cgggguaacucggguaugg

SEQ ID NO: 1680393 - RNA, 19 nt, Artificial Sequence
  Description of Artificial Sequence: Synthetic oligonucleotide
guucguugccagugauggu

SEQ ID NO: 1680394 - RNA, 19 nt, Artificial Sequence
  Description of Artificial Sequence: Synthetic oligonucleotide
cguuuguauauggccugcc

SEQ ID NO: 1680395 - RNA, 19 nt, Artificial Sequence
  Description of Artificial Sequence: Synthetic oligonucleotide
gucuucgagcccgggguaa

SEQ ID NO: 1680396 - RNA, 19 nt, Artificial Sequence
  Description of Artificial Sequence: Synthetic oligonucleotide
gcguccagccugaccaagc

SEQ ID NO: 1680397 - RNA, 19 nt, Artificial Sequence
  Description of Artificial Sequence: Synthetic oligonucleotide
gugcauaacggggcguggu

SEQ ID NO: 1680398 - RNA, 19 nt, Artificial Sequence
  Description of Artificial Sequence: Synthetic oligonucleotide
gcacggaacauggcgucca

SEQ ID NO: 1680399 - RNA, 19 nt, Artificial Sequence
  Description of Artificial Sequence: Synthetic oligonucleotide
gccuggaguucauuuggcu

SEQ ID NO: 1680400 - RNA, 19 nt, Artificial Sequence
  Description of Artificial Sequence: Synthetic oligonucleotide
ccgggugucgggucacgac

SEQ ID NO: 1680401 - RNA, 19 nt, Artificial Sequence
  Description of Artificial Sequence: Synthetic oligonucleotide
gcuggggcguguugagcuc

SEQ ID NO: 1680402 - RNA, 19 nt, Artificial Sequence
  Description of Artificial Sequence: Synthetic oligonucleotide
ccaggauacgcauggcagu

SEQ ID NO: 1680403 - RNA, 19 nt, Artificial Sequence
  Description of Artificial Sequence: Synthetic oligonucleotide
caggauacgcauggcaguu

SEQ ID NO: 1680404 - RNA, 19 nt, Artificial Sequence
  Description of Artificial Sequence: Synthetic oligonucleotide
accccgcccaggauacgca

SEQ ID NO: 1680405 - RNA, 19 nt, Artificial Sequence
  Description of Artificial Sequence: Synthetic oligonucleotide
cuguggugucgcuauccau

SEQ ID NO: 1680406 - RNA, 19 nt, Artificial Sequence
  Description of Artificial Sequence: Synthetic oligonucleotide
cauuggccucaguguuaga

SEQ ID NO: 1680407 - RNA, 19 nt, Artificial Sequence
  Description of Artificial Sequence: Synthetic oligonucleotide
guauggcaagcuggggcgu

SEQ ID NO: 1680408 - RNA, 19 nt, Artificial Sequence
  Description of Artificial Sequence: Synthetic oligonucleotide
aaggccccugggaguucgu

SEQ ID NO: 1680409 - RNA, 19 nt, Artificial Sequence
  Description of Artificial Sequence: Synthetic oligonucleotide
cuccgcugaugaggccgcc

SEQ ID NO: 1680410 - RNA, 19 nt, Artificial Sequence
  Description of Artificial Sequence: Synthetic oligonucleotide
cccgcccaggauacgcaug

SEQ ID NO: 1680411 - RNA, 19 nt, Artificial Sequence
  Description of Artificial Sequence: Synthetic oligonucleotide
gcauaacggggcguggugu

SEQ ID NO: 1680412 - RNA, 19 nt, Artificial Sequence
  Description of Artificial Sequence: Synthetic oligonucleotide
gccucccguagcuccgcug

SEQ ID NO: 1680413 - RNA, 19 nt, Artificial Sequence
  Description of Artificial Sequence: Synthetic oligonucleotide
cguugccagugaugguccc

SEQ ID NO: 1680414 - RNA, 19 nt, Artificial Sequence
  Description of Artificial Sequence: Synthetic oligonucleotide
ggccugacagcuggggaaa

SEQ ID NO: 1680415 - RNA, 19 nt, Artificial Sequence
  Description of Artificial Sequence: Synthetic oligonucleotide
ccguagcuccgcugaugag

SEQ ID NO: 1680416 - RNA, 19 nt, Artificial Sequence
  Description of Artificial Sequence: Synthetic oligonucleotide
augaggccgccgagcacau

SEQ ID NO: 1680417 - RNA, 19 nt, Artificial Sequence
  Description of Artificial Sequence: Synthetic oligonucleotide
cgcuaaugaccccgcccag

SEQ ID NO: 1680418 - RNA, 19 nt, Artificial Sequence
  Description of Artificial Sequence: Synthetic oligonucleotide
gguccccgaucggucaaca

SEQ ID NO: 1680419 - RNA, 19 nt, Artificial Sequence
  Description of Artificial Sequence: Synthetic oligonucleotide
cauccgaguagcgccggau

SEQ ID NO: 1680420 - RNA, 19 nt, Artificial Sequence
  Description of Artificial Sequence: Synthetic oligonucleotide
cccagcuuuccuguggugu

SEQ ID NO: 1680421 - RNA, 19 nt, Artificial Sequence
  Description of Artificial Sequence: Synthetic oligonucleotide
aggccccugggaguucguu

SEQ ID NO: 1680422 - RNA, 19 nt, Artificial Sequence
  Description of Artificial Sequence: Synthetic oligonucleotide
gggugucgggucacgaccu

SEQ ID NO: 1680423 - RNA, 19 nt, Artificial Sequence
  Description of Artificial Sequence: Synthetic oligonucleotide
ggugacccuucagcagaga

SEQ ID NO: 1680424 - RNA, 19 nt, Artificial Sequence
  Description of Artificial Sequence: Synthetic oligonucleotide
gugcuaggcuuggcacaca

SEQ ID NO: 1680425 - RNA, 19 nt, Artificial Sequence
  Description of Artificial Sequence: Synthetic oligonucleotide
gcgcugaccuccaugucgu

SEQ ID NO: 1680426 - RNA, 19 nt, Artificial Sequence
  Description of Artificial Sequence: Synthetic oligonucleotide
acggggcguggugugugua

SEQ ID NO: 1680427 - RNA, 19 nt, Artificial Sequence
  Description of Artificial Sequence: Synthetic oligonucleotide
cuucgagcccgggguaacu

SEQ ID NO: 1680428 - RNA, 19 nt, Artificial Sequence
  Description of Artificial Sequence: Synthetic oligonucleotide
ccgaucggucaacaucaaa

SEQ ID NO: 1680429 - RNA, 19 nt, Artificial Sequence
  Description of Artificial Sequence: Synthetic oligonucleotide
guccccgaucggucaacau

SEQ ID NO: 1680430 - RNA, 19 nt, Artificial Sequence
  Description of Artificial Sequence: Synthetic oligonucleotide
cggguuguacugcgcagca

SEQ ID NO: 1680431 - RNA, 19 nt, Artificial Sequence
  Description of Artificial Sequence: Synthetic oligonucleotide
gcccgggguaacucgggua

SEQ ID NO: 1680432 - RNA, 19 nt, Artificial Sequence
  Description of Artificial Sequence: Synthetic oligonucleotide
ugaggccgccgagcacauu

SEQ ID NO: 1680433 - RNA, 19 nt, Artificial Sequence
  Description of Artificial Sequence: Synthetic oligonucleotide
gaacugacacagggcccuu

SEQ ID NO: 1680434 - RNA, 19 nt, Artificial Sequence
  Description of Artificial Sequence: Synthetic oligonucleotide
cgccgagcacauugcccag

SEQ ID NO: 1680435 - RNA, 19 nt, Artificial Sequence
  Description of Artificial Sequence: Synthetic oligonucleotide
cucccguagcuccgcugau

SEQ ID NO: 1680436 - RNA, 19 nt, Artificial Sequence
  Description of Artificial Sequence: Synthetic oligonucleotide
cccgaucggucaacaucaa

SEQ ID NO: 1680437 - RNA, 19 nt, Artificial Sequence
  Description of Artificial Sequence: Synthetic oligonucleotide
ggcugccugggagguaacu

SEQ ID NO: 1680438 - RNA, 19 nt, Artificial Sequence
  Description of Artificial Sequence: Synthetic oligonucleotide
ggugucgggucacgaccuu

SEQ ID NO: 1680439 - RNA, 19 nt, Artificial Sequence
  Description of Artificial Sequence: Synthetic oligonucleotide
ccgccaccucccauuccca

SEQ ID NO: 1680440 - RNA, 19 nt, Artificial Sequence
  Description of Artificial Sequence: Synthetic oligonucleotide
ggauucgagguggcuccau

SEQ ID NO: 1680441 - RNA, 19 nt, Artificial Sequence
  Description of Artificial Sequence: Synthetic oligonucleotide
ggggugggugggguggggu

SEQ ID NO: 1680442 - RNA, 19 nt, Artificial Sequence
  Description of Artificial Sequence: Synthetic oligonucleotide
ccgaguagcgccggaugau

SEQ ID NO: 1680443 - RNA, 19 nt, Artificial Sequence
  Description of Artificial Sequence: Synthetic oligonucleotide
gccugaccaagcagcugau

SEQ ID NO: 1680444 - RNA, 19 nt, Artificial Sequence
  Description of Artificial Sequence: Synthetic oligonucleotide
ggccgccgccgccgccgcc

SEQ ID NO: 1680445 - RNA, 19 nt, Artificial Sequence
  Description of Artificial Sequence: Synthetic oligonucleotide
ccccgcccaggauacgcau

SEQ ID NO: 1680446 - RNA, 19 nt, Artificial Sequence
  Description of Artificial Sequence: Synthetic oligonucleotide
gccgccgccgccgccgccu

SEQ ID NO: 1680447 - RNA, 19 nt, Artificial Sequence
  Description of Artificial Sequence: Synthetic oligonucleotide
gcgaggcacuagggugugu

SEQ ID NO: 1680448 - RNA, 19 nt, Artificial Sequence
  Description of Artificial Sequence: Synthetic oligonucleotide
ccgccgccgccgccgccuc

SEQ ID NO: 1680449 - RNA, 19 nt, Artificial Sequence
  Description of Artificial Sequence: Synthetic oligonucleotide
ccucgcugauggcgcuaau

SEQ ID NO: 1680450 - RNA, 19 nt, Artificial Sequence
  Description of Artificial Sequence: Synthetic oligonucleotide
cgccucccguagcuccgcu

SEQ ID NO: 1680451 - RNA, 19 nt, Artificial Sequence
  Description of Artificial Sequence: Synthetic oligonucleotide
auagguauagguuagcugc

SEQ ID NO: 1680452 - RNA, 19 nt, Artificial Sequence
  Description of Artificial Sequence: Synthetic oligonucleotide
aaucuugagaaacugggcg

SEQ ID NO: 1680453 - RNA, 19 nt, Artificial Sequence
  Description of Artificial Sequence: Synthetic oligonucleotide
uauaccacgaaccagucca

SEQ ID NO: 1680454 - RNA, 19 nt, Artificial Sequence
  Description of Artificial Sequence: Synthetic oligonucleotide
uauuacacuacuauuccag

SEQ ID NO: 1680455 - RNA, 19 nt, Artificial Sequence
  Description of Artificial Sequence: Synthetic oligonucleotide
uaucuugugaguucgaggc

SEQ ID NO: 1680456 - RNA, 19 nt, Artificial Sequence
  Description of Artificial Sequence: Synthetic oligonucleotide
uuaagaaucugaugggucc

SEQ ID NO: 1680457 - RNA, 19 nt, Artificial Sequence
  Description of Artificial Sequence: Synthetic oligonucleotide
uuauacuucaaacccuucc

SEQ ID NO: 1680458 - RNA, 19 nt, Artificial Sequence
  Description of Artificial Sequence: Synthetic oligonucleotide
uuuguuccgauucauguca

SEQ ID NO: 1680459 - RNA, 19 nt, Artificial Sequence
  Description of Artificial Sequence: Synthetic oligonucleotide
cugauucacauuaagaauc

SEQ ID NO: 1680460 - RNA, 19 nt, Artificial Sequence
  Description of Artificial Sequence: Synthetic oligonucleotide
guugauguaccccacgccg

SEQ ID NO: 1680461 - RNA, 19 nt, Artificial Sequence
  Description of Artificial Sequence: Synthetic oligonucleotide
uuguauaccacgaaccagu

SEQ ID NO: 1680462 - RNA, 19 nt, Artificial Sequence
  Description of Artificial Sequence: Synthetic oligonucleotide
aucugauucacauuaagaa

SEQ ID NO: 1680463 - RNA, 19 nt, Artificial Sequence
  Description of Artificial Sequence: Synthetic oligonucleotide
uacacuacuauuccagggc

SEQ ID NO: 1680464 - RNA, 19 nt, Artificial Sequence
  Description of Artificial Sequence: Synthetic oligonucleotide
cuguggaucagccagaaac

SEQ ID NO: 1680465 - RNA, 19 nt, Artificial Sequence
  Description of Artificial Sequence: Synthetic oligonucleotide
acauuaagaaucugauggg

SEQ ID NO: 1680466 - RNA, 19 nt, Artificial Sequence
  Description of Artificial Sequence: Synthetic oligonucleotide
uuacacuacuauuccaggg

SEQ ID NO: 1680467 - RNA, 19 nt, Artificial Sequence
  Description of Artificial Sequence: Synthetic oligonucleotide
ucucgaaacucuuuacagg

SEQ ID NO: 1680468 - RNA, 19 nt, Artificial Sequence
  Description of Artificial Sequence: Synthetic oligonucleotide
agggaagccuaucugauuc

SEQ ID NO: 1680469 - RNA, 19 nt, Artificial Sequence
  Description of Artificial Sequence: Synthetic oligonucleotide
auuacacuacuauuccagg

SEQ ID NO: 1680470 - RNA, 19 nt, Artificial Sequence
  Description of Artificial Sequence: Synthetic oligonucleotide
uggauggauaucuugugag

SEQ ID NO: 1680471 - RNA, 19 nt, Artificial Sequence
  Description of Artificial Sequence: Synthetic oligonucleotide
acuauuccagggcucaugg

SEQ ID NO: 1680472 - RNA, 19 nt, Artificial Sequence
  Description of Artificial Sequence: Synthetic oligonucleotide
ggauuuaggaggcuggucg

SEQ ID NO: 1680473 - RNA, 19 nt, Artificial Sequence
  Description of Artificial Sequence: Synthetic oligonucleotide
gauagguauagguuagcug

SEQ ID NO: 1680474 - RNA, 19 nt, Artificial Sequence
  Description of Artificial Sequence: Synthetic oligonucleotide
aggugugagcauuaggagg

SEQ ID NO: 1680475 - RNA, 19 nt, Artificial Sequence
  Description of Artificial Sequence: Synthetic oligonucleotide
gucguuguagaguaggaag

SEQ ID NO: 1680476 - RNA, 19 nt, Artificial Sequence
  Description of Artificial Sequence: Synthetic oligonucleotide
uuuguaugcccacggcugg

SEQ ID NO: 1680477 - RNA, 19 nt, Artificial Sequence
  Description of Artificial Sequence: Synthetic oligonucleotide
guagucauagaccagggga

SEQ ID NO: 1680478 - RNA, 19 nt, Artificial Sequence
  Description of Artificial Sequence: Synthetic oligonucleotide
uggauaucuugugaguucg

SEQ ID NO: 1680479 - RNA, 19 nt, Artificial Sequence
  Description of Artificial Sequence: Synthetic oligonucleotide
uguggcauuaaaaguuggc

SEQ ID NO: 1680480 - RNA, 19 nt, Artificial Sequence
  Description of Artificial Sequence: Synthetic oligonucleotide
gaguugucccgguacaacg

SEQ ID NO: 1680481 - RNA, 19 nt, Artificial Sequence
  Description of Artificial Sequence: Synthetic oligonucleotide
ucaugucacccacacaggc

SEQ ID NO: 1680482 - RNA, 19 nt, Artificial Sequence
  Description of Artificial Sequence: Synthetic oligonucleotide
aagugaguauuacacuacu

SEQ ID NO: 1680483 - RNA, 19 nt, Artificial Sequence
  Description of Artificial Sequence: Synthetic oligonucleotide
auuaagaaucugauggguc

SEQ ID NO: 1680484 - RNA, 19 nt, Artificial Sequence
  Description of Artificial Sequence: Synthetic oligonucleotide
gucucgaaacucuuuacag

SEQ ID NO: 1680485 - RNA, 19 nt, Artificial Sequence
  Description of Artificial Sequence: Synthetic oligonucleotide
aauuggaccuguagguugg

SEQ ID NO: 1680486 - RNA, 19 nt, Artificial Sequence
  Description of Artificial Sequence: Synthetic oligonucleotide
uguagguuggugucaagga

SEQ ID NO: 1680487 - RNA, 19 nt, Artificial Sequence
  Description of Artificial Sequence: Synthetic oligonucleotide
uagaccaggggauagguau

SEQ ID NO: 1680488 - RNA, 19 nt, Artificial Sequence
  Description of Artificial Sequence: Synthetic oligonucleotide
ccaaucuugagaaacuggg

SEQ ID NO: 1680489 - RNA, 19 nt, Artificial Sequence
  Description of Artificial Sequence: Synthetic oligonucleotide
caucuggguacacagagug

SEQ ID NO: 1680490 - RNA, 19 nt, Artificial Sequence
  Description of Artificial Sequence: Synthetic oligonucleotide
uuguaggucagguaauuuc

SEQ ID NO: 1680491 - RNA, 19 nt, Artificial Sequence
  Description of Artificial Sequence: Synthetic oligonucleotide
cacuucucccuaaaguccg

SEQ ID NO: 1680492 - RNA, 19 nt, Artificial Sequence
  Description of Artificial Sequence: Synthetic oligonucleotide
ugaguauuacacuacuauu

SEQ ID NO: 1680493 - RNA, 19 nt, Artificial Sequence
  Description of Artificial Sequence: Synthetic oligonucleotide
acccucggagcucuggucc

SEQ ID NO: 1680494 - RNA, 19 nt, Artificial Sequence
  Description of Artificial Sequence: Synthetic oligonucleotide
ucucccuaaaguccgcuga

SEQ ID NO: 1680495 - RNA, 19 nt, Artificial Sequence
  Description of Artificial Sequence: Synthetic oligonucleotide
aucuugugaguucgaggcc

SEQ ID NO: 1680496 - RNA, 19 nt, Artificial Sequence
  Description of Artificial Sequence: Synthetic oligonucleotide
augccuuccagcuuguagu

SEQ ID NO: 1680497 - RNA, 19 nt, Artificial Sequence
  Description of Artificial Sequence: Synthetic oligonucleotide
uuuacagggcucccaggcc

SEQ ID NO: 1680498 - RNA, 19 nt, Artificial Sequence
  Description of Artificial Sequence: Synthetic oligonucleotide
uagucauagaccaggggau

SEQ ID NO: 1680499 - RNA, 19 nt, Artificial Sequence
  Description of Artificial Sequence: Synthetic oligonucleotide
uauagguuagcugccugcc

SEQ ID NO: 1680500 - RNA, 19 nt, Artificial Sequence
  Description of Artificial Sequence: Synthetic oligonucleotide
acuaucuccagacccgcug

SEQ ID NO: 1680501 - RNA, 19 nt, Artificial Sequence
  Description of Artificial Sequence: Synthetic oligonucleotide
aucuugagaaacugggcga

SEQ ID NO: 1680502 - RNA, 19 nt, Artificial Sequence
  Description of Artificial Sequence: Synthetic oligonucleotide
ucggaaggcagagaggcag

SEQ ID NO: 1680503 - RNA, 19 nt, Artificial Sequence
  Description of Artificial Sequence: Synthetic oligonucleotide
uuacagggcucccaggccu

SEQ ID NO: 1680504 - RNA, 19 nt, Artificial Sequence
  Description of Artificial Sequence: Synthetic oligonucleotide
ugagcuguugauguacccc

SEQ ID NO: 1680505 - RNA, 19 nt, Artificial Sequence
  Description of Artificial Sequence: Synthetic oligonucleotide
guauagguuagcugccugc

SEQ ID NO: 1680506 - RNA, 19 nt, Artificial Sequence
  Description of Artificial Sequence: Synthetic oligonucleotide
ccagaauuggaccuguagg

SEQ ID NO: 1680507 - RNA, 19 nt, Artificial Sequence
  Description of Artificial Sequence: Synthetic oligonucleotide
auuuggaguggucuucugu

SEQ ID NO: 1680508 - RNA, 19 nt, Artificial Sequence
  Description of Artificial Sequence: Synthetic oligonucleotide
cuuuguuccgauucauguc

SEQ ID NO: 1680509 - RNA, 19 nt, Artificial Sequence
  Description of Artificial Sequence: Synthetic oligonucleotide
cacgaaccaguccacaggc

SEQ ID NO: 1680510 - RNA, 19 nt, Artificial Sequence
  Description of Artificial Sequence: Synthetic oligonucleotide
ugucccgguacaacggcag

SEQ ID NO: 1680511 - RNA, 19 nt, Artificial Sequence
  Description of Artificial Sequence: Synthetic oligonucleotide
ugggaagcguggcacacug

SEQ ID NO: 1680512 - RNA, 19 nt, Artificial Sequence
  Description of Artificial Sequence: Synthetic oligonucleotide
gaagugaguauuacacuac

SEQ ID NO: 1680513 - RNA, 19 nt, Artificial Sequence
  Description of Artificial Sequence: Synthetic oligonucleotide
aggguaggcuccuccaagg

SEQ ID NO: 1680514 - RNA, 19 nt, Artificial Sequence
  Description of Artificial Sequence: Synthetic oligonucleotide
acacuacuauuccagggcu

SEQ ID NO: 1680515 - RNA, 19 nt, Artificial Sequence
  Description of Artificial Sequence: Synthetic oligonucleotide
ucauagaccaggggauagg

SEQ ID NO: 1680516 - RNA, 19 nt, Artificial Sequence
  Description of Artificial Sequence: Synthetic oligonucleotide
uggugucaaggacugcugc

SEQ ID NO: 1680517 - RNA, 19 nt, Artificial Sequence
  Description of Artificial Sequence: Synthetic oligonucleotide
aaggacacgcagaguaggg

SEQ ID NO: 1680518 - RNA, 19 nt, Artificial Sequence
  Description of Artificial Sequence: Synthetic oligonucleotide
uguauaccacgaaccaguc

SEQ ID NO: 1680519 - RNA, 19 nt, Artificial Sequence
  Description of Artificial Sequence: Synthetic oligonucleotide
uggcagcuuguauaccacg

SEQ ID NO: 1680520 - RNA, 19 nt, Artificial Sequence
  Description of Artificial Sequence: Synthetic oligonucleotide
uugauguaccccacgccgu

SEQ ID NO: 1680521 - RNA, 19 nt, Artificial Sequence
  Description of Artificial Sequence: Synthetic oligonucleotide
cuaaaguccgcugagaccu

SEQ ID NO: 1680522 - RNA, 19 nt, Artificial Sequence
  Description of Artificial Sequence: Synthetic oligonucleotide
acuacuauuccagggcuca

SEQ ID NO: 1680523 - RNA, 19 nt, Artificial Sequence
  Description of Artificial Sequence: Synthetic oligonucleotide
auguaccccacgccgucgc

SEQ ID NO: 1680524 - RNA, 19 nt, Artificial Sequence
  Description of Artificial Sequence: Synthetic oligonucleotide
uuccgauucaugucaccca

SEQ ID NO: 1680525 - RNA, 19 nt, Artificial Sequence
  Description of Artificial Sequence: Synthetic oligonucleotide
cugguccauguauuuauac

SEQ ID NO: 1680526 - RNA, 19 nt, Artificial Sequence
  Description of Artificial Sequence: Synthetic oligonucleotide
cuguggcauuaaaaguugg

SEQ ID NO: 1680527 - RNA, 19 nt, Artificial Sequence
  Description of Artificial Sequence: Synthetic oligonucleotide
uguaugcaccagaggacac

SEQ ID NO: 1680528 - RNA, 19 nt, Artificial Sequence
  Description of Artificial Sequence: Synthetic oligonucleotide
guauuacacuacuauucca

SEQ ID NO: 1680529 - RNA, 19 nt, Artificial Sequence
  Description of Artificial Sequence: Synthetic oligonucleotide
cuugugaagugaguauuac

SEQ ID NO: 1680530 - RNA, 19 nt, Artificial Sequence
  Description of Artificial Sequence: Synthetic oligonucleotide
cagcuuguauaccacgaac

SEQ ID NO: 1680531 - RNA, 19 nt, Artificial Sequence
  Description of Artificial Sequence: Synthetic oligonucleotide
acgagguccagacucacuu

SEQ ID NO: 1680532 - RNA, 19 nt, Artificial Sequence
  Description of Artificial Sequence: Synthetic oligonucleotide
aguugucccgguacaacgg

SEQ ID NO: 1680533 - RNA, 19 nt, Artificial Sequence
  Description of Artificial Sequence: Synthetic oligonucleotide
agaaacugggcgaagggaa

SEQ ID NO: 1680534 - RNA, 19 nt, Artificial Sequence
  Description of Artificial Sequence: Synthetic oligonucleotide
ggaagcguggcacacugug

SEQ ID NO: 1680535 - RNA, 19 nt, Artificial Sequence
  Description of Artificial Sequence: Synthetic oligonucleotide
guauaccacgaaccagucc

SEQ ID NO: 1680536 - RNA, 19 nt, Artificial Sequence
  Description of Artificial Sequence: Synthetic oligonucleotide
ccgaacuaucuccagaccc

SEQ ID NO: 1680537 - RNA, 19 nt, Artificial Sequence
  Description of Artificial Sequence: Synthetic oligonucleotide
uccccgaacuaucuccaga

SEQ ID NO: 1680538 - RNA, 19 nt, Artificial Sequence
  Description of Artificial Sequence: Synthetic oligonucleotide
ggucacgagguccagacuc

SEQ ID NO: 1680539 - RNA, 19 nt, Artificial Sequence
  Description of Artificial Sequence: Synthetic oligonucleotide
gaaccaguccacaggcugc

SEQ ID NO: 1680540 - RNA, 19 nt, Artificial Sequence
  Description of Artificial Sequence: Synthetic oligonucleotide
gaacuaucuccagacccgc

SEQ ID NO: 1680541 - RNA, 19 nt, Artificial Sequence
  Description of Artificial Sequence: Synthetic oligonucleotide
uacuauuccagggcucaug

SEQ ID NO: 1680542 - RNA, 19 nt, Artificial Sequence
  Description of Artificial Sequence: Synthetic oligonucleotide
guugucccgguacaacggc

SEQ ID NO: 1680543 - RNA, 19 nt, Artificial Sequence
  Description of Artificial Sequence: Synthetic oligonucleotide
gaacacccuuuguaugccc

SEQ ID NO: 1680544 - RNA, 19 nt, Artificial Sequence
  Description of Artificial Sequence: Synthetic oligonucleotide
ugagcauuaggaggccagc

SEQ ID NO: 1680545 - RNA, 19 nt, Artificial Sequence
  Description of Artificial Sequence: Synthetic oligonucleotide
ugauguaccccacgccguc

SEQ ID NO: 1680546 - RNA, 19 nt, Artificial Sequence
  Description of Artificial Sequence: Synthetic oligonucleotide
uggguacacagagugcccc

SEQ ID NO: 1680547 - RNA, 19 nt, Artificial Sequence
  Description of Artificial Sequence: Synthetic oligonucleotide
cagaauuggaccuguaggu

SEQ ID NO: 1680548 - RNA, 19 nt, Artificial Sequence
  Description of Artificial Sequence: Synthetic oligonucleotide
uucaaacccuuccccgaac

SEQ ID NO: 1680549 - RNA, 19 nt, Artificial Sequence
  Description of Artificial Sequence: Synthetic oligonucleotide
cauggugacccuugaucac

SEQ ID NO: 1680550 - RNA, 19 nt, Artificial Sequence
  Description of Artificial Sequence: Synthetic oligonucleotide
cugucucgaaacucuuuac

SEQ ID NO: 1680551 - RNA, 19 nt, Artificial Sequence
  Description of Artificial Sequence: Synthetic oligonucleotide
cugcaaggccuuccaaagg

SEQ ID NO: 1680552 - RNA, 19 nt, Artificial Sequence
  Description of Artificial Sequence: Synthetic oligonucleotide
gauguaccccacgccgucg

SEQ ID NO: 1680553 - RNA, 19 nt, Artificial Sequence
  Description of Artificial Sequence: Synthetic oligonucleotide
uguaccccacgccgucgcg

SEQ ID NO: 1680554 - RNA, 19 nt, Artificial Sequence
  Description of Artificial Sequence: Synthetic oligonucleotide
cucugagcuguugauguac

SEQ ID NO: 1680555 - RNA, 19 nt, Artificial Sequence
  Description of Artificial Sequence: Synthetic oligonucleotide
gaccaggggauagguauag

SEQ ID NO: 1680556 - RNA, 19 nt, Artificial Sequence
  Description of Artificial Sequence: Synthetic oligonucleotide
accucggugcauuucuccu

SEQ ID NO: 1680557 - RNA, 19 nt, Artificial Sequence
  Description of Artificial Sequence: Synthetic oligonucleotide
guagggucugcccauaggu

SEQ ID NO: 1680558 - RNA, 19 nt, Artificial Sequence
  Description of Artificial Sequence: Synthetic oligonucleotide
uugucccgguacaacggca

SEQ ID NO: 1680559 - RNA, 19 nt, Artificial Sequence
  Description of Artificial Sequence: Synthetic oligonucleotide
cugcccauaggugugagca

SEQ ID NO: 1680560 - RNA, 19 nt, Artificial Sequence
  Description of Artificial Sequence: Synthetic oligonucleotide
cgaacuaucuccagacccg

SEQ ID NO: 1680561 - RNA, 19 nt, Artificial Sequence
  Description of Artificial Sequence: Synthetic oligonucleotide
cacucggaaggcagagagg

SEQ ID NO: 1680562 - RNA, 19 nt, Artificial Sequence
  Description of Artificial Sequence: Synthetic oligonucleotide
gcuuguauaccacgaacca

SEQ ID NO: 1680563 - RNA, 19 nt, Artificial Sequence
  Description of Artificial Sequence: Synthetic oligonucleotide
ccuaaaguccgcugagacc

SEQ ID NO: 1680564 - RNA, 19 nt, Artificial Sequence
  Description of Artificial Sequence: Synthetic oligonucleotide
gucgcgccaacccucggag

SEQ ID NO: 1680565 - RNA, 19 nt, Artificial Sequence
  Description of Artificial Sequence: Synthetic oligonucleotide
aguacaggucaucuccaua

SEQ ID NO: 1680566 - RNA, 19 nt, Artificial Sequence
  Description of Artificial Sequence: Synthetic oligonucleotide
gaguagggucugcccauag

SEQ ID NO: 1680567 - RNA, 19 nt, Artificial Sequence
  Description of Artificial Sequence: Synthetic oligonucleotide
cugcccggagucuccauag

SEQ ID NO: 1680568 - RNA, 19 nt, Artificial Sequence
  Description of Artificial Sequence: Synthetic oligonucleotide
agcggaaucugagcaaaca

SEQ ID NO: 1680569 - RNA, 19 nt, Artificial Sequence
  Description of Artificial Sequence: Synthetic oligonucleotide
gguccagacucacuucucc

SEQ ID NO: 1680570 - RNA, 19 nt, Artificial Sequence
  Description of Artificial Sequence: Synthetic oligonucleotide
gcagaacacccuuuguaug

SEQ ID NO: 1680571 - RNA, 19 nt, Artificial Sequence
  Description of Artificial Sequence: Synthetic oligonucleotide
ccagcuguaugcaccagag

SEQ ID NO: 1680572 - RNA, 19 nt, Artificial Sequence
  Description of Artificial Sequence: Synthetic oligonucleotide
cugggcgaagggaaaggac

SEQ ID NO: 1680573 - RNA, 19 nt, Artificial Sequence
  Description of Artificial Sequence: Synthetic oligonucleotide
cggaaucugagcaaacacc

SEQ ID NO: 1680574 - RNA, 19 nt, Artificial Sequence
  Description of Artificial Sequence: Synthetic oligonucleotide
ucuuguaggucagguaauu

SEQ ID NO: 1680575 - RNA, 19 nt, Artificial Sequence
  Description of Artificial Sequence: Synthetic oligonucleotide
gguauagguuagcugccug

SEQ ID NO: 1680576 - RNA, 19 nt, Artificial Sequence
  Description of Artificial Sequence: Synthetic oligonucleotide
cuggcagcuuguauaccac

SEQ ID NO: 1680577 - RNA, 19 nt, Artificial Sequence
  Description of Artificial Sequence: Synthetic oligonucleotide
cacgccgucgcgccaaccc

SEQ ID NO: 1680578 - RNA, 19 nt, Artificial Sequence
  Description of Artificial Sequence: Synthetic oligonucleotide
ugugagcauuaggaggcca

SEQ ID NO: 1680579 - RNA, 19 nt, Artificial Sequence
  Description of Artificial Sequence: Synthetic oligonucleotide
gccaaucuugagaaacugg

SEQ ID NO: 1680580 - RNA, 19 nt, Artificial Sequence
  Description of Artificial Sequence: Synthetic oligonucleotide
guccgcugagaccugggug

SEQ ID NO: 1680581 - RNA, 19 nt, Artificial Sequence
  Description of Artificial Sequence: Synthetic oligonucleotide
agcuugugaagugaguauu

SEQ ID NO: 1680582 - RNA, 19 nt, Artificial Sequence
  Description of Artificial Sequence: Synthetic oligonucleotide
gaaucugagcaaacaccca

SEQ ID NO: 1680583 - RNA, 19 nt, Artificial Sequence
  Description of Artificial Sequence: Synthetic oligonucleotide
cacuacuauuccagggcuc

SEQ ID NO: 1680584 - RNA, 19 nt, Artificial Sequence
  Description of Artificial Sequence: Synthetic oligonucleotide
uuccccgaacuaucuccag

SEQ ID NO: 1680585 - RNA, 19 nt, Artificial Sequence
  Description of Artificial Sequence: Synthetic oligonucleotide
gcggaaucugagcaaacac

SEQ ID NO: 1680586 - RNA, 19 nt, Artificial Sequence
  Description of Artificial Sequence: Synthetic oligonucleotide
guacaacggcagcaggcug

SEQ ID NO: 1680587 - RNA, 19 nt, Artificial Sequence
  Description of Artificial Sequence: Synthetic oligonucleotide
cagcuguaugcaccagagg

SEQ ID NO: 1680588 - RNA, 19 nt, Artificial Sequence
  Description of Artificial Sequence: Synthetic oligonucleotide
uaccccacgccgucgcgcc

SEQ ID NO: 1680589 - RNA, 19 nt, Artificial Sequence
  Description of Artificial Sequence: Synthetic oligonucleotide
ggacacgcagaguaggguc

SEQ ID NO: 1680590 - RNA, 19 nt, Artificial Sequence
  Description of Artificial Sequence: Synthetic oligonucleotide
uggcacacuguggaucagc

SEQ ID NO: 1680591 - RNA, 19 nt, Artificial Sequence
  Description of Artificial Sequence: Synthetic oligonucleotide
ucccgguacaacggcagca

SEQ ID NO: 1680592 - RNA, 19 nt, Artificial Sequence
  Description of Artificial Sequence: Synthetic oligonucleotide
guaugcccacggcuggaag

SEQ ID NO: 1680593 - RNA, 19 nt, Artificial Sequence
  Description of Artificial Sequence: Synthetic oligonucleotide
ggggauagguauagguuag

SEQ ID NO: 1680594 - RNA, 19 nt, Artificial Sequence
  Description of Artificial Sequence: Synthetic oligonucleotide
uccggagcugagcuggauu

SEQ ID NO: 1680595 - RNA, 19 nt, Artificial Sequence
  Description of Artificial Sequence: Synthetic oligonucleotide
cauuuggaguggucuucug

SEQ ID NO: 1680596 - RNA, 19 nt, Artificial Sequence
  Description of Artificial Sequence: Synthetic oligonucleotide
gguccauguauuuauacuu

SEQ ID NO: 1680597 - RNA, 19 nt, Artificial Sequence
  Description of Artificial Sequence: Synthetic oligonucleotide
cauuaagaaucugaugggu

SEQ ID NO: 1680598 - RNA, 19 nt, Artificial Sequence
  Description of Artificial Sequence: Synthetic oligonucleotide
cacccuuuguaugcccacg

SEQ ID NO: 1680599 - RNA, 19 nt, Artificial Sequence
  Description of Artificial Sequence: Synthetic oligonucleotide
aguccgcugagaccugggu

SEQ ID NO: 1680600 - RNA, 19 nt, Artificial Sequence
  Description of Artificial Sequence: Synthetic oligonucleotide
aucaccucuuguaggucag

SEQ ID NO: 1680601 - RNA, 19 nt, Artificial Sequence
  Description of Artificial Sequence: Synthetic oligonucleotide
caugaggcggccgagcgga

SEQ ID NO: 1680602 - RNA, 19 nt, Artificial Sequence
  Description of Artificial Sequence: Synthetic oligonucleotide
cacaccauuuggagugguc

SEQ ID NO: 1680603 - RNA, 19 nt, Artificial Sequence
  Description of Artificial Sequence: Synthetic oligonucleotide
acacaggcggugggaagcg

SEQ ID NO: 1680604 - RNA, 19 nt, Artificial Sequence
  Description of Artificial Sequence: Synthetic oligonucleotide
ucggagcucugguccaugu

SEQ ID NO: 1680605 - RNA, 19 nt, Artificial Sequence
  Description of Artificial Sequence: Synthetic oligonucleotide
gccaugaggcggccgagcg

SEQ ID NO: 1680606 - RNA, 19 nt, Artificial Sequence
  Description of Artificial Sequence: Synthetic oligonucleotide
acugggcgaagggaaagga

SEQ ID NO: 1680607 - RNA, 19 nt, Artificial Sequence
  Description of Artificial Sequence: Synthetic oligonucleotide
gcgaagggaaaggacacgc

SEQ ID NO: 1680608 - RNA, 19 nt, Artificial Sequence
  Description of Artificial Sequence: Synthetic oligonucleotide
agugaguauuacacuacua

SEQ ID NO: 1680609 - RNA, 19 nt, Artificial Sequence
  Description of Artificial Sequence: Synthetic oligonucleotide
aggacggccgggucacgag

SEQ ID NO: 1680610 - RNA, 19 nt, Artificial Sequence
  Description of Artificial Sequence: Synthetic oligonucleotide
ggaccuguagguugguguc

SEQ ID NO: 1680611 - RNA, 19 nt, Artificial Sequence
  Description of Artificial Sequence: Synthetic oligonucleotide
gaggcggccgagcggaauc

SEQ ID NO: 1680612 - RNA, 19 nt, Artificial Sequence
  Description of Artificial Sequence: Synthetic oligonucleotide
aggggccacacaccauuug

SEQ ID NO: 1680613 - RNA, 19 nt, Artificial Sequence
  Description of Artificial Sequence: Synthetic oligonucleotide
agguauagguuagcugccu

SEQ ID NO: 1680614 - RNA, 19 nt, Artificial Sequence
  Description of Artificial Sequence: Synthetic oligonucleotide
agacucacuucucccuaaa

SEQ ID NO: 1680615 - RNA, 19 nt, Artificial Sequence
  Description of Artificial Sequence: Synthetic oligonucleotide
ugcccggagucuccauagc

SEQ ID NO: 1680616 - RNA, 19 nt, Artificial Sequence
  Description of Artificial Sequence: Synthetic oligonucleotide
gcucauggagggcauggug

SEQ ID NO: 1680617 - RNA, 19 nt, Artificial Sequence
  Description of Artificial Sequence: Synthetic oligonucleotide
uguaugcccacggcuggaa

SEQ ID NO: 1680618 - RNA, 19 nt, Artificial Sequence
  Description of Artificial Sequence: Synthetic oligonucleotide
aggacacgcagaguagggu

SEQ ID NO: 1680619 - RNA, 19 nt, Artificial Sequence
  Description of Artificial Sequence: Synthetic oligonucleotide
ccccgaacuaucuccagac

SEQ ID NO: 1680620 - RNA, 19 nt, Artificial Sequence
  Description of Artificial Sequence: Synthetic oligonucleotide
uuguaugcccacggcugga

SEQ ID NO: 1680621 - RNA, 19 nt, Artificial Sequence
  Description of Artificial Sequence: Synthetic oligonucleotide
cuucaaacccuuccccgaa

SEQ ID NO: 1680622 - RNA, 19 nt, Artificial Sequence
  Description of Artificial Sequence: Synthetic oligonucleotide
guuagcugccugccaaucu

SEQ ID NO: 1680623 - RNA, 19 nt, Artificial Sequence
  Description of Artificial Sequence: Synthetic oligonucleotide
gccgagcggaaucugagca

SEQ ID NO: 1680624 - RNA, 19 nt, Artificial Sequence
  Description of Artificial Sequence: Synthetic oligonucleotide
cuggaguugucccgguaca

SEQ ID NO: 1680625 - RNA, 19 nt, Artificial Sequence
  Description of Artificial Sequence: Synthetic oligonucleotide
uggaguugucccgguacaa

SEQ ID NO: 1680626 - RNA, 19 nt, Artificial Sequence
  Description of Artificial Sequence: Synthetic oligonucleotide
accaggggauagguauagg

SEQ ID NO: 1680627 - RNA, 19 nt, Artificial Sequence
  Description of Artificial Sequence: Synthetic oligonucleotide
agucauagaccaggggaua

SEQ ID NO: 1680628 - RNA, 19 nt, Artificial Sequence
  Description of Artificial Sequence: Synthetic oligonucleotide
agguuagcugccugccaau

SEQ ID NO: 1680629 - RNA, 19 nt, Artificial Sequence
  Description of Artificial Sequence: Synthetic oligonucleotide
cgauucaugucacccacac

SEQ ID NO: 1680630 - RNA, 19 nt, Artificial Sequence
  Description of Artificial Sequence: Synthetic oligonucleotide
ucggugcauuucuccuuug

SEQ ID NO: 1680631 - RNA, 19 nt, Artificial Sequence
  Description of Artificial Sequence: Synthetic oligonucleotide
cauuaaaaguuggcccaga

SEQ ID NO: 1680632 - RNA, 19 nt, Artificial Sequence
  Description of Artificial Sequence: Synthetic oligonucleotide
cgaaccaguccacaggcug

SEQ ID NO: 1680633 - RNA, 19 nt, Artificial Sequence
  Description of Artificial Sequence: Synthetic oligonucleotide
ucacgagguccagacucac

SEQ ID NO: 1680634 - RNA, 19 nt, Artificial Sequence
  Description of Artificial Sequence: Synthetic oligonucleotide
ugcccauaggugugagcau

SEQ ID NO: 1680635 - RNA, 19 nt, Artificial Sequence
  Description of Artificial Sequence: Synthetic oligonucleotide
cuauuccagggcucaugga

SEQ ID NO: 1680636 - RNA, 19 nt, Artificial Sequence
  Description of Artificial Sequence: Synthetic oligonucleotide
ggacggccgggucacgagg

SEQ ID NO: 1680637 - RNA, 19 nt, Artificial Sequence
  Description of Artificial Sequence: Synthetic oligonucleotide
gcauuaggaggccagcugu

SEQ ID NO: 1680638 - RNA, 19 nt, Artificial Sequence
  Description of Artificial Sequence: Synthetic oligonucleotide
auuuaggaggcuggucguu

SEQ ID NO: 1680639 - RNA, 19 nt, Artificial Sequence
  Description of Artificial Sequence: Synthetic oligonucleotide
gucccgguacaacggcagc

SEQ ID NO: 1680640 - RNA, 19 nt, Artificial Sequence
  Description of Artificial Sequence: Synthetic oligonucleotide
ggaagccuaucugauucac

SEQ ID NO: 1680641 - RNA, 19 nt, Artificial Sequence
  Description of Artificial Sequence: Synthetic oligonucleotide
ggcgaagggaaaggacacg

SEQ ID NO: 1680642 - RNA, 19 nt, Artificial Sequence
  Description of Artificial Sequence: Synthetic oligonucleotide
gaccuguagguugguguca

SEQ ID NO: 1680643 - RNA, 19 nt, Artificial Sequence
  Description of Artificial Sequence: Synthetic oligonucleotide
ggaguugucccgguacaac

SEQ ID NO: 1680644 - RNA, 19 nt, Artificial Sequence
  Description of Artificial Sequence: Synthetic oligonucleotide
acggccgggucacgagguc

SEQ ID NO: 1680645 - RNA, 19 nt, Artificial Sequence
  Description of Artificial Sequence: Synthetic oligonucleotide
ggcagcuuguauaccacga

SEQ ID NO: 1680646 - RNA, 19 nt, Artificial Sequence
  Description of Artificial Sequence: Synthetic oligonucleotide
agacccgcugugagcuggc

SEQ ID NO: 1680647 - RNA, 19 nt, Artificial Sequence
  Description of Artificial Sequence: Synthetic oligonucleotide
acgccgucgcgccaacccu

SEQ ID NO: 1680648 - RNA, 19 nt, Artificial Sequence
  Description of Artificial Sequence: Synthetic oligonucleotide
ucgcgccaacccucggagc

SEQ ID NO: 1680649 - RNA, 19 nt, Artificial Sequence
  Description of Artificial Sequence: Synthetic oligonucleotide
gucacgagguccagacuca

SEQ ID NO: 1680650 - RNA, 19 nt, Artificial Sequence
  Description of Artificial Sequence: Synthetic oligonucleotide
gcugccaugaggcggccga

SEQ ID NO: 1680651 - RNA, 19 nt, Artificial Sequence
  Description of Artificial Sequence: Synthetic oligonucleotide
ccagccggaguacagguca

SEQ ID NO: 1680652 - RNA, 19 nt, Artificial Sequence
  Description of Artificial Sequence: Synthetic oligonucleotide
aguggucuucuguggcauu

SEQ ID NO: 1680653 - RNA, 19 nt, Artificial Sequence
  Description of Artificial Sequence: Synthetic oligonucleotide
gugugagcauuaggaggcc

SEQ ID NO: 1680654 - RNA, 19 nt, Artificial Sequence
  Description of Artificial Sequence: Synthetic oligonucleotide
gagcggaaucugagcaaac

SEQ ID NO: 1680655 - RNA, 19 nt, Artificial Sequence
  Description of Artificial Sequence: Synthetic oligonucleotide
gagcauuaggaggccagcu

SEQ ID NO: 1680656 - RNA, 19 nt, Artificial Sequence
  Description of Artificial Sequence: Synthetic oligonucleotide
guaccccacgccgucgcgc

SEQ ID NO: 1680657 - RNA, 19 nt, Artificial Sequence
  Description of Artificial Sequence: Synthetic oligonucleotide
cauagaccaggggauaggu

SEQ ID NO: 1680658 - RNA, 19 nt, Artificial Sequence
  Description of Artificial Sequence: Synthetic oligonucleotide
agggugccuggagaauuug

SEQ ID NO: 1680659 - RNA, 19 nt, Artificial Sequence
  Description of Artificial Sequence: Synthetic oligonucleotide
agcgagcucagcgcugcca

SEQ ID NO: 1680660 - RNA, 19 nt, Artificial Sequence
  Description of Artificial Sequence: Synthetic oligonucleotide
ggauagguauagguuagcu

SEQ ID NO: 1680661 - RNA, 19 nt, Artificial Sequence
  Description of Artificial Sequence: Synthetic oligonucleotide
gggauagguauagguuagc

SEQ ID NO: 1680662 - RNA, 19 nt, Artificial Sequence
  Description of Artificial Sequence: Synthetic oligonucleotide
cagacucacuucucccuaa

SEQ ID NO: 1680663 - RNA, 19 nt, Artificial Sequence
  Description of Artificial Sequence: Synthetic oligonucleotide
ggccgagcggaaucugagc

SEQ ID NO: 1680664 - RNA, 19 nt, Artificial Sequence
  Description of Artificial Sequence: Synthetic oligonucleotide
gggaagccuaucugauuca

SEQ ID NO: 1680665 - RNA, 19 nt, Artificial Sequence
  Description of Artificial Sequence: Synthetic oligonucleotide
gcagcuuguauaccacgaa

SEQ ID NO: 1680666 - RNA, 19 nt, Artificial Sequence
  Description of Artificial Sequence: Synthetic oligonucleotide
auagaccaggggauaggua

SEQ ID NO: 1680667 - RNA, 19 nt, Artificial Sequence
  Description of Artificial Sequence: Synthetic oligonucleotide
acacaccauuuggaguggu

SEQ ID NO: 1680668 - RNA, 19 nt, Artificial Sequence
  Description of Artificial Sequence: Synthetic oligonucleotide
cccgaacuaucuccagacc

SEQ ID NO: 1680669 - RNA, 19 nt, Artificial Sequence
  Description of Artificial Sequence: Synthetic oligonucleotide
ggacugcugccaaccagcc

SEQ ID NO: 1680670 - RNA, 19 nt, Artificial Sequence
  Description of Artificial Sequence: Synthetic oligonucleotide
cagcuugugaagugaguau

SEQ ID NO: 1680671 - RNA, 19 nt, Artificial Sequence
  Description of Artificial Sequence: Synthetic oligonucleotide
ugcugccaaccagccggag

SEQ ID NO: 1680672 - RNA, 19 nt, Artificial Sequence
  Description of Artificial Sequence: Synthetic oligonucleotide
acgaaccaguccacaggcu

SEQ ID NO: 1680673 - RNA, 19 nt, Artificial Sequence
  Description of Artificial Sequence: Synthetic oligonucleotide
agaccaggggauagguaua

SEQ ID NO: 1680674 - RNA, 19 nt, Artificial Sequence
  Description of Artificial Sequence: Synthetic oligonucleotide
gguuagcugccugccaauc

SEQ ID NO: 1680675 - RNA, 19 nt, Artificial Sequence
  Description of Artificial Sequence: Synthetic oligonucleotide
ccacggcuggaagaguccg

SEQ ID NO: 1680676 - RNA, 19 nt, Artificial Sequence
  Description of Artificial Sequence: Synthetic oligonucleotide
gccacacaccauuuggagu

SEQ ID NO: 1680677 - RNA, 19 nt, Artificial Sequence
  Description of Artificial Sequence: Synthetic oligonucleotide
gcuugugaagugaguauua

SEQ ID NO: 1680678 - RNA, 19 nt, Artificial Sequence
  Description of Artificial Sequence: Synthetic oligonucleotide
agaguagggucugcccaua

SEQ ID NO: 1680679 - RNA, 19 nt, Artificial Sequence
  Description of Artificial Sequence: Synthetic oligonucleotide
ccagcuugugaagugagua

SEQ ID NO: 1680680 - RNA, 19 nt, Artificial Sequence
  Description of Artificial Sequence: Synthetic oligonucleotide
cccgguacaacggcagcag

SEQ ID NO: 1680681 - RNA, 19 nt, Artificial Sequence
  Description of Artificial Sequence: Synthetic oligonucleotide
cugccaugaggcggccgag

SEQ ID NO: 1680682 - RNA, 19 nt, Artificial Sequence
  Description of Artificial Sequence: Synthetic oligonucleotide
ccaacccucggagcucugg

SEQ ID NO: 1680683 - RNA, 19 nt, Artificial Sequence
  Description of Artificial Sequence: Synthetic oligonucleotide
ggagcagaacacccuuugu

SEQ ID NO: 1680684 - RNA, 19 nt, Artificial Sequence
  Description of Artificial Sequence: Synthetic oligonucleotide
gugagcuggcagcuuguau

SEQ ID NO: 1680685 - RNA, 19 nt, Artificial Sequence
  Description of Artificial Sequence: Synthetic oligonucleotide
cuuguaggucagguaauuu

SEQ ID NO: 1680686 - RNA, 19 nt, Artificial Sequence
  Description of Artificial Sequence: Synthetic oligonucleotide
cuggauuuaggaggcuggu

SEQ ID NO: 1680687 - RNA, 19 nt, Artificial Sequence
  Description of Artificial Sequence: Synthetic oligonucleotide
ggauaucuugugaguucga

SEQ ID NO: 1680688 - RNA, 19 nt, Artificial Sequence
  Description of Artificial Sequence: Synthetic oligonucleotide
ccuguagguuggugucaag

SEQ ID NO: 1680689 - RNA, 19 nt, Artificial Sequence
  Description of Artificial Sequence: Synthetic oligonucleotide
caacccucggagcucuggu

SEQ ID NO: 1680690 - RNA, 19 nt, Artificial Sequence
  Description of Artificial Sequence: Synthetic oligonucleotide
gcguggcacacuguggauc

SEQ ID NO: 1680691 - RNA, 19 nt, Artificial Sequence
  Description of Artificial Sequence: Synthetic oligonucleotide
ugcccacggcuggaagagu

SEQ ID NO: 1680692 - RNA, 19 nt, Artificial Sequence
  Description of Artificial Sequence: Synthetic oligonucleotide
gcuggucguuguagaguag

SEQ ID NO: 1680693 - RNA, 19 nt, Artificial Sequence
  Description of Artificial Sequence: Synthetic oligonucleotide
gacggccgggucacgaggu

SEQ ID NO: 1680694 - RNA, 19 nt, Artificial Sequence
  Description of Artificial Sequence: Synthetic oligonucleotide
gccgucgcgccaacccucg

SEQ ID NO: 1680695 - RNA, 19 nt, Artificial Sequence
  Description of Artificial Sequence: Synthetic oligonucleotide
gcccacggcuggaagaguc

SEQ ID NO: 1680696 - RNA, 19 nt, Artificial Sequence
  Description of Artificial Sequence: Synthetic oligonucleotide
cggccgagcggaaucugag

SEQ ID NO: 1680697 - RNA, 19 nt, Artificial Sequence
  Description of Artificial Sequence: Synthetic oligonucleotide
ccgauucaugucacccaca

SEQ ID NO: 1680698 - RNA, 19 nt, Artificial Sequence
  Description of Artificial Sequence: Synthetic oligonucleotide
gacccgcugugagcuggca

SEQ ID NO: 1680699 - RNA, 19 nt, Artificial Sequence
  Description of Artificial Sequence: Synthetic oligonucleotide
cuccuuuguuccgauucau

SEQ ID NO: 1680700 - RNA, 19 nt, Artificial Sequence
  Description of Artificial Sequence: Synthetic oligonucleotide
cccauaggugugagcauua

SEQ ID NO: 1680701 - RNA, 19 nt, Artificial Sequence
  Description of Artificial Sequence: Synthetic oligonucleotide
ggccgggucacgaggucca

SEQ ID NO: 1680702 - RNA, 19 nt, Artificial Sequence
  Description of Artificial Sequence: Synthetic oligonucleotide
ccgagcggaaucugagcaa

SEQ ID NO: 1680703 - RNA, 19 nt, Artificial Sequence
  Description of Artificial Sequence: Synthetic oligonucleotide
gugggaagcguggcacacu

SEQ ID NO: 1680704 - RNA, 19 nt, Artificial Sequence
  Description of Artificial Sequence: Synthetic oligonucleotide
ccagacccgcugugagcug

SEQ ID NO: 1680705 - RNA, 19 nt, Artificial Sequence
  Description of Artificial Sequence: Synthetic oligonucleotide
ccauuuggaguggucuucu

SEQ ID NO: 1680706 - RNA, 19 nt, Artificial Sequence
  Description of Artificial Sequence: Synthetic oligonucleotide
gcggccgagcggaaucuga

SEQ ID NO: 1680707 - RNA, 19 nt, Artificial Sequence
  Description of Artificial Sequence: Synthetic oligonucleotide
ccggagcugagcuggauuu

SEQ ID NO: 1680708 - RNA, 19 nt, Artificial Sequence
  Description of Artificial Sequence: Synthetic oligonucleotide
gcccauaggugugagcauu

SEQ ID NO: 1680709 - RNA, 19 nt, Artificial Sequence
  Description of Artificial Sequence: Synthetic oligonucleotide
gggucacgagguccagacu

SEQ ID NO: 1680710 - RNA, 19 nt, Artificial Sequence
  Description of Artificial Sequence: Synthetic oligonucleotide
cggccgggucacgaggucc

SEQ ID NO: 1680711 - RNA, 19 nt, Artificial Sequence
  Description of Artificial Sequence: Synthetic oligonucleotide
cccagcuugugaagugagu

SEQ ID NO: 1680712 - RNA, 19 nt, Artificial Sequence
  Description of Artificial Sequence: Synthetic oligonucleotide
augaggcggccgagcggaa

SEQ ID NO: 1680713 - RNA, 19 nt, Artificial Sequence
  Description of Artificial Sequence: Synthetic oligonucleotide
cgucgcgccaacccucgga

SEQ ID NO: 1680714 - RNA, 19 nt, Artificial Sequence
  Description of Artificial Sequence: Synthetic oligonucleotide
gcgccaacccucggagcuc

SEQ ID NO: 1680715 - RNA, 19 nt, Artificial Sequence
  Description of Artificial Sequence: Synthetic oligonucleotide
ccgucgcgccaacccucgg

SEQ ID NO: 1680716 - RNA, 19 nt, Artificial Sequence
  Description of Artificial Sequence: Synthetic oligonucleotide
gcagguggauggauaucuu

SEQ ID NO: 1680717 - RNA, 19 nt, Artificial Sequence
  Description of Artificial Sequence: Synthetic oligonucleotide
ccaggacggccgggucacg

SEQ ID NO: 1680718 - RNA, 19 nt, Artificial Sequence
  Description of Artificial Sequence: Synthetic oligonucleotide
cggugcauuucuccuuugu

SEQ ID NO: 1680719 - RNA, 19 nt, Artificial Sequence
  Description of Artificial Sequence: Synthetic oligonucleotide
gggaagcguggcacacugu

SEQ ID NO: 1680720 - RNA, 19 nt, Artificial Sequence
  Description of Artificial Sequence: Synthetic oligonucleotide
ccacgccgucgcgccaacc

SEQ ID NO: 1680721 - RNA, 19 nt, Artificial Sequence
  Description of Artificial Sequence: Synthetic oligonucleotide
ggccucggcaggggcccac

SEQ ID NO: 1680722 - RNA, 19 nt, Artificial Sequence
  Description of Artificial Sequence: Synthetic oligonucleotide
cgcugccaugaggcggccg

SEQ ID NO: 1680723 - RNA, 19 nt, Artificial Sequence
  Description of Artificial Sequence: Synthetic oligonucleotide
ggagggcauggugacccuu

SEQ ID NO: 1680724 - RNA, 19 nt, Artificial Sequence
  Description of Artificial Sequence: Synthetic oligonucleotide
gcgcugccaugaggcggcc

SEQ ID NO: 1680725 - RNA, 19 nt, Artificial Sequence
  Description of Artificial Sequence: Synthetic oligonucleotide
ccucggagcucugguccau

SEQ ID NO: 1680726 - RNA, 19 nt, Artificial Sequence
  Description of Artificial Sequence: Synthetic oligonucleotide
aauuauagaaaauguaugu

SEQ ID NO: 1680727 - RNA, 19 nt, Artificial Sequence
  Description of Artificial Sequence: Synthetic oligonucleotide
ugauaaauaaaauuauugc

SEQ ID NO: 1680728 - RNA, 19 nt, Artificial Sequence
  Description of Artificial Sequence: Synthetic oligonucleotide
uaauuaugcacaaugaaug

SEQ ID NO: 1680729 - RNA, 19 nt, Artificial Sequence
  Description of Artificial Sequence: Synthetic oligonucleotide
aaauuauugcauuuaaugu

SEQ ID NO: 1680730 - RNA, 19 nt, Artificial Sequence
  Description of Artificial Sequence: Synthetic oligonucleotide
uuuaauuuaugucaaguga

SEQ ID NO: 1680731 - RNA, 19 nt, Artificial Sequence
  Description of Artificial Sequence: Synthetic oligonucleotide
aauguuguaccacacaaug

SEQ ID NO: 1680732 - RNA, 19 nt, Artificial Sequence
  Description of Artificial Sequence: Synthetic oligonucleotide
uuaaauaaccgaaacugag

SEQ ID NO: 1680733 - RNA, 19 nt, Artificial Sequence
  Description of Artificial Sequence: Synthetic oligonucleotide
aaauaaccgaaacugagug

SEQ ID NO: 1680734 - RNA, 19 nt, Artificial Sequence
  Description of Artificial Sequence: Synthetic oligonucleotide
ugauauuuggaacauguug

SEQ ID NO: 1680735 - RNA, 19 nt, Artificial Sequence
  Description of Artificial Sequence: Synthetic oligonucleotide
uccacuugaaguaacuucg

SEQ ID NO: 1680736 - RNA, 19 nt, Artificial Sequence
  Description of Artificial Sequence: Synthetic oligonucleotide
uuaaggaggguauaaagcc

SEQ ID NO: 1680737 - RNA, 19 nt, Artificial Sequence
  Description of Artificial Sequence: Synthetic oligonucleotide
ugauugaugaaugaaaggc

SEQ ID NO: 1680738 - RNA, 19 nt, Artificial Sequence
  Description of Artificial Sequence: Synthetic oligonucleotide
augagaguguaauagauag

SEQ ID NO: 1680739 - RNA, 19 nt, Artificial Sequence
  Description of Artificial Sequence: Synthetic oligonucleotide
uucuugagaauccaaauca

SEQ ID NO: 1680740 - RNA, 19 nt, Artificial Sequence
  Description of Artificial Sequence: Synthetic oligonucleotide
uguaauagauagcagagaa

SEQ ID NO: 1680741 - RNA, 19 nt, Artificial Sequence
  Description of Artificial Sequence: Synthetic oligonucleotide
uaauagauagcagagaacu

SEQ ID NO: 1680742 - RNA, 19 nt, Artificial Sequence
  Description of Artificial Sequence: Synthetic oligonucleotide
uuaauuuaugucaagugau

SEQ ID NO: 1680743 - RNA, 19 nt, Artificial Sequence
  Description of Artificial Sequence: Synthetic oligonucleotide
aaaggcaugucuugugugg

SEQ ID NO: 1680744 - RNA, 19 nt, Artificial Sequence
  Description of Artificial Sequence: Synthetic oligonucleotide
ucuucuaccauaaaauuau

SEQ ID NO: 1680745 - RNA, 19 nt, Artificial Sequence
  Description of Artificial Sequence: Synthetic oligonucleotide
ugaaguaacuucgauacag

SEQ ID NO: 1680746 - RNA, 19 nt, Artificial Sequence
  Description of Artificial Sequence: Synthetic oligonucleotide
uuaugucaagugaucaugg

SEQ ID NO: 1680747 - RNA, 19 nt, Artificial Sequence
  Description of Artificial Sequence: Synthetic oligonucleotide
acuguugcuaggcagguac

SEQ ID NO: 1680748 - RNA, 19 nt, Artificial Sequence
  Description of Artificial Sequence: Synthetic oligonucleotide
aaacacuugugguguaggc

SEQ ID NO: 1680749 - RNA, 19 nt, Artificial Sequence
  Description of Artificial Sequence: Synthetic oligonucleotide
gaugauugaugaaugaaag

SEQ ID NO: 1680750 - RNA, 19 nt, Artificial Sequence
  Description of Artificial Sequence: Synthetic oligonucleotide
uuaugcacaaugaaugaga

SEQ ID NO: 1680751 - RNA, 19 nt, Artificial Sequence
  Description of Artificial Sequence: Synthetic oligonucleotide
augaauaaucaacugaggu

SEQ ID NO: 1680752 - RNA, 19 nt, Artificial Sequence
  Description of Artificial Sequence: Synthetic oligonucleotide
uguaugucaacacuaccug

SEQ ID NO: 1680753 - RNA, 19 nt, Artificial Sequence
  Description of Artificial Sequence: Synthetic oligonucleotide
augaagaucaagcaggcgu

SEQ ID NO: 1680754 - RNA, 19 nt, Artificial Sequence
  Description of Artificial Sequence: Synthetic oligonucleotide
acaaacuuuaaauaaccga

SEQ ID NO: 1680755 - RNA, 19 nt, Artificial Sequence
  Description of Artificial Sequence: Synthetic oligonucleotide
uuauuuacacccaauuuau

SEQ ID NO: 1680756 - RNA, 19 nt, Artificial Sequence
  Description of Artificial Sequence: Synthetic oligonucleotide
cuuaaugacaauuuucuga

SEQ ID NO: 1680757 - RNA, 19 nt, Artificial Sequence
  Description of Artificial Sequence: Synthetic oligonucleotide
uaauucugaugauugauga

SEQ ID NO: 1680758 - RNA, 19 nt, Artificial Sequence
  Description of Artificial Sequence: Synthetic oligonucleotide
ugucaagugaucauggaaa

SEQ ID NO: 1680759 - RNA, 19 nt, Artificial Sequence
  Description of Artificial Sequence: Synthetic oligonucleotide
acccaauuuauucagcuag

SEQ ID NO: 1680760 - RNA, 19 nt, Artificial Sequence
  Description of Artificial Sequence: Synthetic oligonucleotide
aacacuugugguguaggcc

SEQ ID NO: 1680761 - RNA, 19 nt, Artificial Sequence
  Description of Artificial Sequence: Synthetic oligonucleotide
aacaaaggcuauuaaaauu

SEQ ID NO: 1680762 - RNA, 19 nt, Artificial Sequence
  Description of Artificial Sequence: Synthetic oligonucleotide
acacuugugguguaggccg

SEQ ID NO: 1680763 - RNA, 19 nt, Artificial Sequence
  Description of Artificial Sequence: Synthetic oligonucleotide
aagguauugugggagaauc

SEQ ID NO: 1680764 - RNA, 19 nt, Artificial Sequence
  Description of Artificial Sequence: Synthetic oligonucleotide
aaccgaaacugagugaugg

SEQ ID NO: 1680765 - RNA, 19 nt, Artificial Sequence
  Description of Artificial Sequence: Synthetic oligonucleotide
aauuuaugucaagugauca

SEQ ID NO: 1680766 - RNA, 19 nt, Artificial Sequence
  Description of Artificial Sequence: Synthetic oligonucleotide
aaauaguugucucacugau

SEQ ID NO: 1680767 - RNA, 19 nt, Artificial Sequence
  Description of Artificial Sequence: Synthetic oligonucleotide
aaggaggguauaaagcccc

SEQ ID NO: 1680768 - RNA, 19 nt, Artificial Sequence
  Description of Artificial Sequence: Synthetic oligonucleotide
uuuaugucaagugaucaug

SEQ ID NO: 1680769 - RNA, 19 nt, Artificial Sequence
  Description of Artificial Sequence: Synthetic oligonucleotide
uuacgagaguuucacaccc

SEQ ID NO: 1680770 - RNA, 19 nt, Artificial Sequence
  Description of Artificial Sequence: Synthetic oligonucleotide
ugcauauuagucucuuuag

SEQ ID NO: 1680771 - RNA, 19 nt, Artificial Sequence
  Description of Artificial Sequence: Synthetic oligonucleotide
caaacuuuaaauaaccgaa

SEQ ID NO: 1680772 - RNA, 19 nt, Artificial Sequence
  Description of Artificial Sequence: Synthetic oligonucleotide
auaguugucucacugauuu

SEQ ID NO: 1680773 - RNA, 19 nt, Artificial Sequence
  Description of Artificial Sequence: Synthetic oligonucleotide
augaaugaaaggcaugucu

SEQ ID NO: 1680774 - RNA, 19 nt, Artificial Sequence
  Description of Artificial Sequence: Synthetic oligonucleotide
ucuaagucuccuaauucug

SEQ ID NO: 1680775 - RNA, 19 nt, Artificial Sequence
  Description of Artificial Sequence: Synthetic oligonucleotide
uguuuaauuuaugucaagu

SEQ ID NO: 1680776 - RNA, 19 nt, Artificial Sequence
  Description of Artificial Sequence: Synthetic oligonucleotide
caguacaagguauuguggg

SEQ ID NO: 1680777 - RNA, 19 nt, Artificial Sequence
  Description of Artificial Sequence: Synthetic oligonucleotide
uugaagaaaauaguugucu

SEQ ID NO: 1680778 - RNA, 19 nt, Artificial Sequence
  Description of Artificial Sequence: Synthetic oligonucleotide
aauagucagguuccaguug

SEQ ID NO: 1680779 - RNA, 19 nt, Artificial Sequence
  Description of Artificial Sequence: Synthetic oligonucleotide
uguccuugaaauagucagg

SEQ ID NO: 1680780 - RNA, 19 nt, Artificial Sequence
  Description of Artificial Sequence: Synthetic oligonucleotide
gagaguguaauagauagca

SEQ ID NO: 1680781 - RNA, 19 nt, Artificial Sequence
  Description of Artificial Sequence: Synthetic oligonucleotide
aaguaacuucgauacagca

SEQ ID NO: 1680782 - RNA, 19 nt, Artificial Sequence
  Description of Artificial Sequence: Synthetic oligonucleotide
aauccugguguccuggaug

SEQ ID NO: 1680783 - RNA, 19 nt, Artificial Sequence
  Description of Artificial Sequence: Synthetic oligonucleotide
uuuuccuuaugguuggugu

SEQ ID NO: 1680784 - RNA, 19 nt, Artificial Sequence
  Description of Artificial Sequence: Synthetic oligonucleotide
agcagagaacucuucuacc

SEQ ID NO: 1680785 - RNA, 19 nt, Artificial Sequence
  Description of Artificial Sequence: Synthetic oligonucleotide
cuaauucugaugauugaug

SEQ ID NO: 1680786 - RNA, 19 nt, Artificial Sequence
  Description of Artificial Sequence: Synthetic oligonucleotide
gaagaaaauaguugucuca

SEQ ID NO: 1680787 - RNA, 19 nt, Artificial Sequence
  Description of Artificial Sequence: Synthetic oligonucleotide
aguguaauagauagcagag

SEQ ID NO: 1680788 - RNA, 19 nt, Artificial Sequence
  Description of Artificial Sequence: Synthetic oligonucleotide
aauaaccgaaacugaguga

SEQ ID NO: 1680789 - RNA, 19 nt, Artificial Sequence
  Description of Artificial Sequence: Synthetic oligonucleotide
uucugaugauugaugaaug

SEQ ID NO: 1680790 - RNA, 19 nt, Artificial Sequence
  Description of Artificial Sequence: Synthetic oligonucleotide
aaucaacugaggugggcag

SEQ ID NO: 1680791 - RNA, 19 nt, Artificial Sequence
  Description of Artificial Sequence: Synthetic oligonucleotide
guaacuucgauacagcaaa

SEQ ID NO: 1680792 - RNA, 19 nt, Artificial Sequence
  Description of Artificial Sequence: Synthetic oligonucleotide
aaauagucagguuccaguu

SEQ ID NO: 1680793 - RNA, 19 nt, Artificial Sequence
  Description of Artificial Sequence: Synthetic oligonucleotide
agguacaaacuuuaaauaa

SEQ ID NO: 1680794 - RNA, 19 nt, Artificial Sequence
  Description of Artificial Sequence: Synthetic oligonucleotide
aacucuucuaccauaaaau

SEQ ID NO: 1680795 - RNA, 19 nt, Artificial Sequence
  Description of Artificial Sequence: Synthetic oligonucleotide
cauauuagucucuuuagga

SEQ ID NO: 1680796 - RNA, 19 nt, Artificial Sequence
  Description of Artificial Sequence: Synthetic oligonucleotide
uggcucaauaagcacauga

SEQ ID NO: 1680797 - RNA, 19 nt, Artificial Sequence
  Description of Artificial Sequence: Synthetic oligonucleotide
uaucuaagucuccuaauuc

SEQ ID NO: 1680798 - RNA, 19 nt, Artificial Sequence
  Description of Artificial Sequence: Synthetic oligonucleotide
ugaaugaaaggcaugucuu

SEQ ID NO: 1680799 - RNA, 19 nt, Artificial Sequence
  Description of Artificial Sequence: Synthetic oligonucleotide
guacaaacuuuaaauaacc

SEQ ID NO: 1680800 - RNA, 19 nt, Artificial Sequence
  Description of Artificial Sequence: Synthetic oligonucleotide
aacacuguugcuaggcagg

SEQ ID NO: 1680801 - RNA, 19 nt, Artificial Sequence
  Description of Artificial Sequence: Synthetic oligonucleotide
auaauuaugcacaaugaau

SEQ ID NO: 1680802 - RNA, 19 nt, Artificial Sequence
  Description of Artificial Sequence: Synthetic oligonucleotide
gaguuucacacccauuuug

SEQ ID NO: 1680803 - RNA, 19 nt, Artificial Sequence
  Description of Artificial Sequence: Synthetic oligonucleotide
gugaucauggaaacaaagg

SEQ ID NO: 1680804 - RNA, 19 nt, Artificial Sequence
  Description of Artificial Sequence: Synthetic oligonucleotide
uguuguguugccacgcccc

SEQ ID NO: 1680805 - RNA, 19 nt, Artificial Sequence
  Description of Artificial Sequence: Synthetic oligonucleotide
auauuccuuaauguuguac

SEQ ID NO: 1680806 - RNA, 19 nt, Artificial Sequence
  Description of Artificial Sequence: Synthetic oligonucleotide
aaucuucacacuugugggu

SEQ ID NO: 1680807 - RNA, 19 nt, Artificial Sequence
  Description of Artificial Sequence: Synthetic oligonucleotide
ugugguguaggccgcaggc

SEQ ID NO: 1680808 - RNA, 19 nt, Artificial Sequence
  Description of Artificial Sequence: Synthetic oligonucleotide
ugaaaggcaugucuugugu

SEQ ID NO: 1680809 - RNA, 19 nt, Artificial Sequence
  Description of Artificial Sequence: Synthetic oligonucleotide
aggagaacacuguugcuag

SEQ ID NO: 1680810 - RNA, 19 nt, Artificial Sequence
  Description of Artificial Sequence: Synthetic oligonucleotide
aacugucuccaguccacac

SEQ ID NO: 1680811 - RNA, 19 nt, Artificial Sequence
  Description of Artificial Sequence: Synthetic oligonucleotide
aaggcaugucuuguguggc

SEQ ID NO: 1680812 - RNA, 19 nt, Artificial Sequence
  Description of Artificial Sequence: Synthetic oligonucleotide
ggaaggagaacacuguugc

SEQ ID NO: 1680813 - RNA, 19 nt, Artificial Sequence
  Description of Artificial Sequence: Synthetic oligonucleotide
agaguuauuuggucuccac

SEQ ID NO: 1680814 - RNA, 19 nt, Artificial Sequence
  Description of Artificial Sequence: Synthetic oligonucleotide
uccuuaauguuguaccaca

SEQ ID NO: 1680815 - RNA, 19 nt, Artificial Sequence
  Description of Artificial Sequence: Synthetic oligonucleotide
uguguggccgccaaucuac

SEQ ID NO: 1680816 - RNA, 19 nt, Artificial Sequence
  Description of Artificial Sequence: Synthetic oligonucleotide
uuacuaucaguacaaggua

SEQ ID NO: 1680817 - RNA, 19 nt, Artificial Sequence
  Description of Artificial Sequence: Synthetic oligonucleotide
auuaugcacaaugaaugag

SEQ ID NO: 1680818 - RNA, 19 nt, Artificial Sequence
  Description of Artificial Sequence: Synthetic oligonucleotide
ucugaugauugaugaauga

SEQ ID NO: 1680819 - RNA, 19 nt, Artificial Sequence
  Description of Artificial Sequence: Synthetic oligonucleotide
ucggggauaccaaaauuca

SEQ ID NO: 1680820 - RNA, 19 nt, Artificial Sequence
  Description of Artificial Sequence: Synthetic oligonucleotide
aucaagcaggcguuuguac

SEQ ID NO: 1680821 - RNA, 19 nt, Artificial Sequence
  Description of Artificial Sequence: Synthetic oligonucleotide
uugguauuuucuugccagg

SEQ ID NO: 1680822 - RNA, 19 nt, Artificial Sequence
  Description of Artificial Sequence: Synthetic oligonucleotide
acuucgauacagcaaacaa

SEQ ID NO: 1680823 - RNA, 19 nt, Artificial Sequence
  Description of Artificial Sequence: Synthetic oligonucleotide
cuccaguccacacaaacac

SEQ ID NO: 1680824 - RNA, 19 nt, Artificial Sequence
  Description of Artificial Sequence: Synthetic oligonucleotide
uuccacuugaaguaacuuc

SEQ ID NO: 1680825 - RNA, 19 nt, Artificial Sequence
  Description of Artificial Sequence: Synthetic oligonucleotide
uacuaucaguacaagguau

SEQ ID NO: 1680826 - RNA, 19 nt, Artificial Sequence
  Description of Artificial Sequence: Synthetic oligonucleotide
ugagaguguaauagauagc

SEQ ID NO: 1680827 - RNA, 19 nt, Artificial Sequence
  Description of Artificial Sequence: Synthetic oligonucleotide
auguugaagaaaauaguug

SEQ ID NO: 1680828 - RNA, 19 nt, Artificial Sequence
  Description of Artificial Sequence: Synthetic oligonucleotide
auaaccgaaacugagugau

SEQ ID NO: 1680829 - RNA, 19 nt, Artificial Sequence
  Description of Artificial Sequence: Synthetic oligonucleotide
auaaucaacugaggugggc

SEQ ID NO: 1680830 - RNA, 19 nt, Artificial Sequence
  Description of Artificial Sequence: Synthetic oligonucleotide
gaacucuucuaccauaaaa

SEQ ID NO: 1680831 - RNA, 19 nt, Artificial Sequence
  Description of Artificial Sequence: Synthetic oligonucleotide
aauaaucaacugagguggg

SEQ ID NO: 1680832 - RNA, 19 nt, Artificial Sequence
  Description of Artificial Sequence: Synthetic oligonucleotide
uuguuuaauuuaugucaag

SEQ ID NO: 1680833 - RNA, 19 nt, Artificial Sequence
  Description of Artificial Sequence: Synthetic oligonucleotide
auuuaugucaagugaucau

SEQ ID NO: 1680834 - RNA, 19 nt, Artificial Sequence
  Description of Artificial Sequence: Synthetic oligonucleotide
auucugaugauugaugaau

SEQ ID NO: 1680835 - RNA, 19 nt, Artificial Sequence
  Description of Artificial Sequence: Synthetic oligonucleotide
agugaucauggaaacaaag

SEQ ID NO: 1680836 - RNA, 19 nt, Artificial Sequence
  Description of Artificial Sequence: Synthetic oligonucleotide
gaaauagucagguuccagu

SEQ ID NO: 1680837 - RNA, 19 nt, Artificial Sequence
  Description of Artificial Sequence: Synthetic oligonucleotide
auguaugucaacacuaccu

SEQ ID NO: 1680838 - RNA, 19 nt, Artificial Sequence
  Description of Artificial Sequence: Synthetic oligonucleotide
auguuguaccacacaaugc

SEQ ID NO: 1680839 - RNA, 19 nt, Artificial Sequence
  Description of Artificial Sequence: Synthetic oligonucleotide
gcauauuagucucuuuagg

SEQ ID NO: 1680840 - RNA, 19 nt, Artificial Sequence
  Description of Artificial Sequence: Synthetic oligonucleotide
uuuuguuguguugccacgc

SEQ ID NO: 1680841 - RNA, 19 nt, Artificial Sequence
  Description of Artificial Sequence: Synthetic oligonucleotide
guuaccaucggggauacca

SEQ ID NO: 1680842 - RNA, 19 nt, Artificial Sequence
  Description of Artificial Sequence: Synthetic oligonucleotide
accgaaacugagugauggc

SEQ ID NO: 1680843 - RNA, 19 nt, Artificial Sequence
  Description of Artificial Sequence: Synthetic oligonucleotide
aacccguguuaccaucggg

SEQ ID NO: 1680844 - RNA, 19 nt, Artificial Sequence
  Description of Artificial Sequence: Synthetic oligonucleotide
aguugucucacugauuugu

SEQ ID NO: 1680845 - RNA, 19 nt, Artificial Sequence
  Description of Artificial Sequence: Synthetic oligonucleotide
aaggagaacacuguugcua

SEQ ID NO: 1680846 - RNA, 19 nt, Artificial Sequence
  Description of Artificial Sequence: Synthetic oligonucleotide
uaugucaagugaucaugga

SEQ ID NO: 1680847 - RNA, 19 nt, Artificial Sequence
  Description of Artificial Sequence: Synthetic oligonucleotide
uaauguuguaccacacaau

SEQ ID NO: 1680848 - RNA, 19 nt, Artificial Sequence
  Description of Artificial Sequence: Synthetic oligonucleotide
gagaacacuguugcuaggc

SEQ ID NO: 1680849 - RNA, 19 nt, Artificial Sequence
  Description of Artificial Sequence: Synthetic oligonucleotide
acacuagcuggagagguac

SEQ ID NO: 1680850 - RNA, 19 nt, Artificial Sequence
  Description of Artificial Sequence: Synthetic oligonucleotide
gaaguaacuucgauacagc

SEQ ID NO: 1680851 - RNA, 19 nt, Artificial Sequence
  Description of Artificial Sequence: Synthetic oligonucleotide
guacaagguauugugggag

SEQ ID NO: 1680852 - RNA, 19 nt, Artificial Sequence
  Description of Artificial Sequence: Synthetic oligonucleotide
agucuugauuacuaucagu

SEQ ID NO: 1680853 - RNA, 19 nt, Artificial Sequence
  Description of Artificial Sequence: Synthetic oligonucleotide
uccuucaaucuucacacuu

SEQ ID NO: 1680854 - RNA, 19 nt, Artificial Sequence
  Description of Artificial Sequence: Synthetic oligonucleotide
aacuucgauacagcaaaca

SEQ ID NO: 1680855 - RNA, 19 nt, Artificial Sequence
  Description of Artificial Sequence: Synthetic oligonucleotide
gggauaccaaaauucaaug

SEQ ID NO: 1680856 - RNA, 19 nt, Artificial Sequence
  Description of Artificial Sequence: Synthetic oligonucleotide
gguacaaacuuuaaauaac

SEQ ID NO: 1680857 - RNA, 19 nt, Artificial Sequence
  Description of Artificial Sequence: Synthetic oligonucleotide
augaaaggcaugucuugug

SEQ ID NO: 1680858 - RNA, 19 nt, Artificial Sequence
  Description of Artificial Sequence: Synthetic oligonucleotide
gcucaauaagcacaugaag

SEQ ID NO: 1680859 - RNA, 19 nt, Artificial Sequence
  Description of Artificial Sequence: Synthetic oligonucleotide
ucaacugaggugggcagag

SEQ ID NO: 1680860 - RNA, 19 nt, Artificial Sequence
  Description of Artificial Sequence: Synthetic oligonucleotide
uaucaguacaagguauugu

SEQ ID NO: 1680861 - RNA, 19 nt, Artificial Sequence
  Description of Artificial Sequence: Synthetic oligonucleotide
uacacccaauuuauucagc

SEQ ID NO: 1680862 - RNA, 19 nt, Artificial Sequence
  Description of Artificial Sequence: Synthetic oligonucleotide
uuuccuuaugguugguguc

SEQ ID NO: 1680863 - RNA, 19 nt, Artificial Sequence
  Description of Artificial Sequence: Synthetic oligonucleotide
uuguuguguugccacgccc

SEQ ID NO: 1680864 - RNA, 19 nt, Artificial Sequence
  Description of Artificial Sequence: Synthetic oligonucleotide
uccuaauucugaugauuga

SEQ ID NO: 1680865 - RNA, 19 nt, Artificial Sequence
  Description of Artificial Sequence: Synthetic oligonucleotide
ccuuacgagaguuucacac

SEQ ID NO: 1680866 - RNA, 19 nt, Artificial Sequence
  Description of Artificial Sequence: Synthetic oligonucleotide
ugauuacuaucaguacaag

SEQ ID NO: 1680867 - RNA, 19 nt, Artificial Sequence
  Description of Artificial Sequence: Synthetic oligonucleotide
caagugaucauggaaacaa

SEQ ID NO: 1680868 - RNA, 19 nt, Artificial Sequence
  Description of Artificial Sequence: Synthetic oligonucleotide
ugacaauuuucugaguuuu

SEQ ID NO: 1680869 - RNA, 19 nt, Artificial Sequence
  Description of Artificial Sequence: Synthetic oligonucleotide
agguaucuaagucuccuaa

SEQ ID NO: 1680870 - RNA, 19 nt, Artificial Sequence
  Description of Artificial Sequence: Synthetic oligonucleotide
ucgauacagcaaacaacug

SEQ ID NO: 1680871 - RNA, 19 nt, Artificial Sequence
  Description of Artificial Sequence: Synthetic oligonucleotide
guacucugaaaacugucuc

SEQ ID NO: 1680872 - RNA, 19 nt, Artificial Sequence
  Description of Artificial Sequence: Synthetic oligonucleotide
gguucucucuucuuaauga

SEQ ID NO: 1680873 - RNA, 19 nt, Artificial Sequence
  Description of Artificial Sequence: Synthetic oligonucleotide
aguuguuccagagaauuuu

SEQ ID NO: 1680874 - RNA, 19 nt, Artificial Sequence
  Description of Artificial Sequence: Synthetic oligonucleotide
caaacacuugugguguagg

SEQ ID NO: 1680875 - RNA, 19 nt, Artificial Sequence
  Description of Artificial Sequence: Synthetic oligonucleotide
auagcagagaacucuucua

SEQ ID NO: 1680876 - RNA, 19 nt, Artificial Sequence
  Description of Artificial Sequence: Synthetic oligonucleotide
ucaagugaucauggaaaca

SEQ ID NO: 1680877 - RNA, 19 nt, Artificial Sequence
  Description of Artificial Sequence: Synthetic oligonucleotide
uggauggcucaauaagcac

SEQ ID NO: 1680878 - RNA, 19 nt, Artificial Sequence
  Description of Artificial Sequence: Synthetic oligonucleotide
augacaauuuucugaguuu

SEQ ID NO: 1680879 - RNA, 19 nt, Artificial Sequence
  Description of Artificial Sequence: Synthetic oligonucleotide
cuggauggcucaauaagca

SEQ ID NO: 1680880 - RNA, 19 nt, Artificial Sequence
  Description of Artificial Sequence: Synthetic oligonucleotide
ucuuguguggccgccaauc

SEQ ID NO: 1680881 - RNA, 19 nt, Artificial Sequence
  Description of Artificial Sequence: Synthetic oligonucleotide
uaccugccaacaaaauuaa

SEQ ID NO: 1680882 - RNA, 19 nt, Artificial Sequence
  Description of Artificial Sequence: Synthetic oligonucleotide
uuauucagcuaggaacacu

SEQ ID NO: 1680883 - RNA, 19 nt, Artificial Sequence
  Description of Artificial Sequence: Synthetic oligonucleotide
acccguguuaccaucgggg

SEQ ID NO: 1680884 - RNA, 19 nt, Artificial Sequence
  Description of Artificial Sequence: Synthetic oligonucleotide
uuccuuaauguuguaccac

SEQ ID NO: 1680885 - RNA, 19 nt, Artificial Sequence
  Description of Artificial Sequence: Synthetic oligonucleotide
uuaccaucggggauaccaa

SEQ ID NO: 1680886 - RNA, 19 nt, Artificial Sequence
  Description of Artificial Sequence: Synthetic oligonucleotide
uauuuacacccaauuuauu

SEQ ID NO: 1680887 - RNA, 19 nt, Artificial Sequence
  Description of Artificial Sequence: Synthetic oligonucleotide
cauguugaagaaaauaguu

SEQ ID NO: 1680888 - RNA, 19 nt, Artificial Sequence
  Description of Artificial Sequence: Synthetic oligonucleotide
ggcguuuguacucugaaaa

SEQ ID NO: 1680889 - RNA, 19 nt, Artificial Sequence
  Description of Artificial Sequence: Synthetic oligonucleotide
aguaacuucgauacagcaa

SEQ ID NO: 1680890 - RNA, 19 nt, Artificial Sequence
  Description of Artificial Sequence: Synthetic oligonucleotide
uaaccgaaacugagugaug

SEQ ID NO: 1680891 - RNA, 19 nt, Artificial Sequence
  Description of Artificial Sequence: Synthetic oligonucleotide
uaacuucgauacagcaaac

SEQ ID NO: 1680892 - RNA, 19 nt, Artificial Sequence
  Description of Artificial Sequence: Synthetic oligonucleotide
auguuauuuucuugagaau

SEQ ID NO: 1680893 - RNA, 19 nt, Artificial Sequence
  Description of Artificial Sequence: Synthetic oligonucleotide
acaaacacuugugguguag

SEQ ID NO: 1680894 - RNA, 19 nt, Artificial Sequence
  Description of Artificial Sequence: Synthetic oligonucleotide
ugggcagaguuauuugguc

SEQ ID NO: 1680895 - RNA, 19 nt, Artificial Sequence
  Description of Artificial Sequence: Synthetic oligonucleotide
caauuuauucagcuaggaa

SEQ ID NO: 1680896 - RNA, 19 nt, Artificial Sequence
  Description of Artificial Sequence: Synthetic oligonucleotide
auugugggagaauccuggu

SEQ ID NO: 1680897 - RNA, 19 nt, Artificial Sequence
  Description of Artificial Sequence: Synthetic oligonucleotide
cacacggcaggcgagcgcg

SEQ ID NO: 1680898 - RNA, 19 nt, Artificial Sequence
  Description of Artificial Sequence: Synthetic oligonucleotide
acuagcuggagagguacug

SEQ ID NO: 1680899 - RNA, 19 nt, Artificial Sequence
  Description of Artificial Sequence: Synthetic oligonucleotide
acgcguugguauuuucuug

SEQ ID NO: 1680900 - RNA, 19 nt, Artificial Sequence
  Description of Artificial Sequence: Synthetic oligonucleotide
uacgagaguuucacaccca

SEQ ID NO: 1680901 - RNA, 19 nt, Artificial Sequence
  Description of Artificial Sequence: Synthetic oligonucleotide
uugaaauagucagguucca

SEQ ID NO: 1680902 - RNA, 19 nt, Artificial Sequence
  Description of Artificial Sequence: Synthetic oligonucleotide
uucgggacagaugaauaau

SEQ ID NO: 1680903 - RNA, 19 nt, Artificial Sequence
  Description of Artificial Sequence: Synthetic oligonucleotide
guauugugggagaauccug

SEQ ID NO: 1680904 - RNA, 19 nt, Artificial Sequence
  Description of Artificial Sequence: Synthetic oligonucleotide
gucucuuuaggaaggagaa

SEQ ID NO: 1680905 - RNA, 19 nt, Artificial Sequence
  Description of Artificial Sequence: Synthetic oligonucleotide
aauaguugucucacugauu

SEQ ID NO: 1680906 - RNA, 19 nt, Artificial Sequence
  Description of Artificial Sequence: Synthetic oligonucleotide
cuaggaacacuagcuggag

SEQ ID NO: 1680907 - RNA, 19 nt, Artificial Sequence
  Description of Artificial Sequence: Synthetic oligonucleotide
gcagagaacucuucuacca

SEQ ID NO: 1680908 - RNA, 19 nt, Artificial Sequence
  Description of Artificial Sequence: Synthetic oligonucleotide
cccaauuuauucagcuagg

SEQ ID NO: 1680909 - RNA, 19 nt, Artificial Sequence
  Description of Artificial Sequence: Synthetic oligonucleotide
acgagaguuucacacccau

SEQ ID NO: 1680910 - RNA, 19 nt, Artificial Sequence
  Description of Artificial Sequence: Synthetic oligonucleotide
uguugcuaggcagguacaa

SEQ ID NO: 1680911 - RNA, 19 nt, Artificial Sequence
  Description of Artificial Sequence: Synthetic oligonucleotide
uuggaacauguugaagaaa

SEQ ID NO: 1680912 - RNA, 19 nt, Artificial Sequence
  Description of Artificial Sequence: Synthetic oligonucleotide
guaucuaagucuccuaauu

SEQ ID NO: 1680913 - RNA, 19 nt, Artificial Sequence
  Description of Artificial Sequence: Synthetic oligonucleotide
cucacugauuuguguuuug

SEQ ID NO: 1680914 - RNA, 19 nt, Artificial Sequence
  Description of Artificial Sequence: Synthetic oligonucleotide
ugucuuguguggccgccaa

SEQ ID NO: 1680915 - RNA, 19 nt, Artificial Sequence
  Description of Artificial Sequence: Synthetic oligonucleotide
cugaugauugaugaaugaa

SEQ ID NO: 1680916 - RNA, 19 nt, Artificial Sequence
  Description of Artificial Sequence: Synthetic oligonucleotide
cuucgggacagaugaauaa

SEQ ID NO: 1680917 - RNA, 19 nt, Artificial Sequence
  Description of Artificial Sequence: Synthetic oligonucleotide
aagugaucauggaaacaaa

SEQ ID NO: 1680918 - RNA, 19 nt, Artificial Sequence
  Description of Artificial Sequence: Synthetic oligonucleotide
acuaucaguacaagguauu

SEQ ID NO: 1680919 - RNA, 19 nt, Artificial Sequence
  Description of Artificial Sequence: Synthetic oligonucleotide
ggcagaguuauuuggucuc

SEQ ID NO: 1680920 - RNA, 19 nt, Artificial Sequence
  Description of Artificial Sequence: Synthetic oligonucleotide
uguggccgccaaucuacug

SEQ ID NO: 1680921 - RNA, 19 nt, Artificial Sequence
  Description of Artificial Sequence: Synthetic oligonucleotide
uuguguggccgccaaucua

SEQ ID NO: 1680922 - RNA, 19 nt, Artificial Sequence
  Description of Artificial Sequence: Synthetic oligonucleotide
ugggagaauccuggugucc

SEQ ID NO: 1680923 - RNA, 19 nt, Artificial Sequence
  Description of Artificial Sequence: Synthetic oligonucleotide
aagcaggcguuuguacucu

SEQ ID NO: 1680924 - RNA, 19 nt, Artificial Sequence
  Description of Artificial Sequence: Synthetic oligonucleotide
guguaauagauagcagaga

SEQ ID NO: 1680925 - RNA, 19 nt, Artificial Sequence
  Description of Artificial Sequence: Synthetic oligonucleotide
cuaacacuuuguuuaauuu

SEQ ID NO: 1680926 - RNA, 19 nt, Artificial Sequence
  Description of Artificial Sequence: Synthetic oligonucleotide
ucucacugauuuguguuuu

SEQ ID NO: 1680927 - RNA, 19 nt, Artificial Sequence
  Description of Artificial Sequence: Synthetic oligonucleotide
ggauggcucaauaagcaca

SEQ ID NO: 1680928 - RNA, 19 nt, Artificial Sequence
  Description of Artificial Sequence: Synthetic oligonucleotide
gugggugcgucuucauccc

SEQ ID NO: 1680929 - RNA, 19 nt, Artificial Sequence
  Description of Artificial Sequence: Synthetic oligonucleotide
uaccaucggggauaccaaa

SEQ ID NO: 1680930 - RNA, 19 nt, Artificial Sequence
  Description of Artificial Sequence: Synthetic oligonucleotide
ggaacacuagcuggagagg

SEQ ID NO: 1680931 - RNA, 19 nt, Artificial Sequence
  Description of Artificial Sequence: Synthetic oligonucleotide
gaaacugagugauggccau

SEQ ID NO: 1680932 - RNA, 19 nt, Artificial Sequence
  Description of Artificial Sequence: Synthetic oligonucleotide
cacuugugguguaggccgc

SEQ ID NO: 1680933 - RNA, 19 nt, Artificial Sequence
  Description of Artificial Sequence: Synthetic oligonucleotide
ccuuaauguuguaccacac

SEQ ID NO: 1680934 - RNA, 19 nt, Artificial Sequence
  Description of Artificial Sequence: Synthetic oligonucleotide
ggugcgucuucaucccagg

SEQ ID NO: 1680935 - RNA, 19 nt, Artificial Sequence
  Description of Artificial Sequence: Synthetic oligonucleotide
auucagcuaggaacacuag

SEQ ID NO: 1680936 - RNA, 19 nt, Artificial Sequence
  Description of Artificial Sequence: Synthetic oligonucleotide
acaaugaaugagaguguaa

SEQ ID NO: 1680937 - RNA, 19 nt, Artificial Sequence
  Description of Artificial Sequence: Synthetic oligonucleotide
gauggcucaauaagcacau

SEQ ID NO: 1680938 - RNA, 19 nt, Artificial Sequence
  Description of Artificial Sequence: Synthetic oligonucleotide
gcguuuguacucugaaaac

SEQ ID NO: 1680939 - RNA, 19 nt, Artificial Sequence
  Description of Artificial Sequence: Synthetic oligonucleotide
gaauccaaaucaucauauu

SEQ ID NO: 1680940 - RNA, 19 nt, Artificial Sequence
  Description of Artificial Sequence: Synthetic oligonucleotide
cgcguugguauuuucuugc

SEQ ID NO: 1680941 - RNA, 19 nt, Artificial Sequence
  Description of Artificial Sequence: Synthetic oligonucleotide
ggcagguacaaacuuuaaa

SEQ ID NO: 1680942 - RNA, 19 nt, Artificial Sequence
  Description of Artificial Sequence: Synthetic oligonucleotide
cucuucuuaaugacaauuu

SEQ ID NO: 1680943 - RNA, 19 nt, Artificial Sequence
  Description of Artificial Sequence: Synthetic oligonucleotide
gggacagaugaauaaucaa

SEQ ID NO: 1680944 - RNA, 19 nt, Artificial Sequence
  Description of Artificial Sequence: Synthetic oligonucleotide
caggcgagcgcgccuuacg

SEQ ID NO: 1680945 - RNA, 19 nt, Artificial Sequence
  Description of Artificial Sequence: Synthetic oligonucleotide
aucaacugaggugggcaga

SEQ ID NO: 1680946 - RNA, 19 nt, Artificial Sequence
  Description of Artificial Sequence: Synthetic oligonucleotide
gcauuuaauguuauuuucu

SEQ ID NO: 1680947 - RNA, 19 nt, Artificial Sequence
  Description of Artificial Sequence: Synthetic oligonucleotide
gaaggagaacacuguugcu

SEQ ID NO: 1680948 - RNA, 19 nt, Artificial Sequence
  Description of Artificial Sequence: Synthetic oligonucleotide
aacacuagcuggagaggua

SEQ ID NO: 1680949 - RNA, 19 nt, Artificial Sequence
  Description of Artificial Sequence: Synthetic oligonucleotide
cacgucugucugcuucggg

SEQ ID NO: 1680950 - RNA, 19 nt, Artificial Sequence
  Description of Artificial Sequence: Synthetic oligonucleotide
cuccuuuguugcucugcug

SEQ ID NO: 1680951 - RNA, 19 nt, Artificial Sequence
  Description of Artificial Sequence: Synthetic oligonucleotide
ugggugcgucuucauccca

SEQ ID NO: 1680952 - RNA, 19 nt, Artificial Sequence
  Description of Artificial Sequence: Synthetic oligonucleotide
gguauugugggagaauccu

SEQ ID NO: 1680953 - RNA, 19 nt, Artificial Sequence
  Description of Artificial Sequence: Synthetic oligonucleotide
gcuaggaacacuagcugga

SEQ ID NO: 1680954 - RNA, 19 nt, Artificial Sequence
  Description of Artificial Sequence: Synthetic oligonucleotide
uccuuaugguuggugucau

SEQ ID NO: 1680955 - RNA, 19 nt, Artificial Sequence
  Description of Artificial Sequence: Synthetic oligonucleotide
ccaguucaaauuauagaaa

SEQ ID NO: 1680956 - RNA, 19 nt, Artificial Sequence
  Description of Artificial Sequence: Synthetic oligonucleotide
gcguugguauuuucuugcc

SEQ ID NO: 1680957 - RNA, 19 nt, Artificial Sequence
  Description of Artificial Sequence: Synthetic oligonucleotide
ggcucaauaagcacaugaa

SEQ ID NO: 1680958 - RNA, 19 nt, Artificial Sequence
  Description of Artificial Sequence: Synthetic oligonucleotide
accaucggggauaccaaaa

SEQ ID NO: 1680959 - RNA, 19 nt, Artificial Sequence
  Description of Artificial Sequence: Synthetic oligonucleotide
agcaggcguuuguacucug

SEQ ID NO: 1680960 - RNA, 19 nt, Artificial Sequence
  Description of Artificial Sequence: Synthetic oligonucleotide
guugcuaggcagguacaaa

SEQ ID NO: 1680961 - RNA, 19 nt, Artificial Sequence
  Description of Artificial Sequence: Synthetic oligonucleotide
gcagaguuauuuggucucc

SEQ ID NO: 1680962 - RNA, 19 nt, Artificial Sequence
  Description of Artificial Sequence: Synthetic oligonucleotide
agcaaacaacugucugaua

SEQ ID NO: 1680963 - RNA, 19 nt, Artificial Sequence
  Description of Artificial Sequence: Synthetic oligonucleotide
agguacuggucuggaauau

SEQ ID NO: 1680964 - RNA, 19 nt, Artificial Sequence
  Description of Artificial Sequence: Synthetic oligonucleotide
caggcguuuguacucugaa

SEQ ID NO: 1680965 - RNA, 19 nt, Artificial Sequence
  Description of Artificial Sequence: Synthetic oligonucleotide
cacccaauuuauucagcua

SEQ ID NO: 1680966 - RNA, 19 nt, Artificial Sequence
  Description of Artificial Sequence: Synthetic oligonucleotide
gaggugggcagaguuauuu

SEQ ID NO: 1680967 - RNA, 19 nt, Artificial Sequence
  Description of Artificial Sequence: Synthetic oligonucleotide
ggggauaccaaaauucaau

SEQ ID NO: 1680968 - RNA, 19 nt, Artificial Sequence
  Description of Artificial Sequence: Synthetic oligonucleotide
ggcgagcgcgccuuacgag

SEQ ID NO: 1680969 - RNA, 19 nt, Artificial Sequence
  Description of Artificial Sequence: Synthetic oligonucleotide
gccagaucugcauauuagu

SEQ ID NO: 1680970 - RNA, 19 nt, Artificial Sequence
  Description of Artificial Sequence: Synthetic oligonucleotide
gguaucuaagucuccuaau

SEQ ID NO: 1680971 - RNA, 19 nt, Artificial Sequence
  Description of Artificial Sequence: Synthetic oligonucleotide
aguuuuccuuaugguuggu

SEQ ID NO: 1680972 - RNA, 19 nt, Artificial Sequence
  Description of Artificial Sequence: Synthetic oligonucleotide
cagguaucuaagucuccua

SEQ ID NO: 1680973 - RNA, 19 nt, Artificial Sequence
  Description of Artificial Sequence: Synthetic oligonucleotide
ccaauuuauucagcuagga

SEQ ID NO: 1680974 - RNA, 19 nt, Artificial Sequence
  Description of Artificial Sequence: Synthetic oligonucleotide
cuuguguggccgccaaucu

SEQ ID NO: 1680975 - RNA, 19 nt, Artificial Sequence
  Description of Artificial Sequence: Synthetic oligonucleotide
cagaguuauuuggucucca

SEQ ID NO: 1680976 - RNA, 19 nt, Artificial Sequence
  Description of Artificial Sequence: Synthetic oligonucleotide
gugcgucuucaucccagga

SEQ ID NO: 1680977 - RNA, 19 nt, Artificial Sequence
  Description of Artificial Sequence: Synthetic oligonucleotide
gcgagcgcgccuuacgaga

SEQ ID NO: 1680978 - RNA, 19 nt, Artificial Sequence
  Description of Artificial Sequence: Synthetic oligonucleotide
gugggcagaguuauuuggu

SEQ ID NO: 1680979 - RNA, 19 nt, Artificial Sequence
  Description of Artificial Sequence: Synthetic oligonucleotide
cacuugugggugcgucuuc

SEQ ID NO: 1680980 - RNA, 19 nt, Artificial Sequence
  Description of Artificial Sequence: Synthetic oligonucleotide
agcgcgccuuacgagaguu

SEQ ID NO: 1680981 - RNA, 19 nt, Artificial Sequence
  Description of Artificial Sequence: Synthetic oligonucleotide
cacuugaaguaacuucgau

SEQ ID NO: 1680982 - RNA, 19 nt, Artificial Sequence
  Description of Artificial Sequence: Synthetic oligonucleotide
cacgcguugguauuuucuu

SEQ ID NO: 1680983 - RNA, 19 nt, Artificial Sequence
  Description of Artificial Sequence: Synthetic oligonucleotide
cucagaacuucuuccgcuu

SEQ ID NO: 1680984 - RNA, 19 nt, Artificial Sequence
  Description of Artificial Sequence: Synthetic oligonucleotide
uguuaccaucggggauacc

SEQ ID NO: 1680985 - RNA, 19 nt, Artificial Sequence
  Description of Artificial Sequence: Synthetic oligonucleotide
ccgccaaucuacuggaaaa

SEQ ID NO: 1680986 - RNA, 19 nt, Artificial Sequence
  Description of Artificial Sequence: Synthetic oligonucleotide
uucccacgcguugguauuu

SEQ ID NO: 1680987 - RNA, 19 nt, Artificial Sequence
  Description of Artificial Sequence: Synthetic oligonucleotide
cacggcaggcgagcgcgcc

SEQ ID NO: 1680988 - RNA, 19 nt, Artificial Sequence
  Description of Artificial Sequence: Synthetic oligonucleotide
ccuaacacuuuguuuaauu

SEQ ID NO: 1680989 - RNA, 19 nt, Artificial Sequence
  Description of Artificial Sequence: Synthetic oligonucleotide
cacacuugugggugcgucu

SEQ ID NO: 1680990 - RNA, 19 nt, Artificial Sequence
  Description of Artificial Sequence: Synthetic oligonucleotide
caucggggauaccaaaauu

SEQ ID NO: 1680991 - RNA, 19 nt, Artificial Sequence
  Description of Artificial Sequence: Synthetic oligonucleotide
ccacuugaaguaacuucga

SEQ ID NO: 1680992 - RNA, 19 nt, Artificial Sequence
  Description of Artificial Sequence: Synthetic oligonucleotide
ggagagguacuggucugga

SEQ ID NO: 1680993 - RNA, 19 nt, Artificial Sequence
  Description of Artificial Sequence: Synthetic oligonucleotide
cccguguuaccaucgggga

SEQ ID NO: 1680994 - RNA, 19 nt, Artificial Sequence
  Description of Artificial Sequence: Synthetic oligonucleotide
ccuuaugguuggugucaug

SEQ ID NO: 1680995 - RNA, 19 nt, Artificial Sequence
  Description of Artificial Sequence: Synthetic oligonucleotide
gcuucgggacagaugaaua

SEQ ID NO: 1680996 - RNA, 19 nt, Artificial Sequence
  Description of Artificial Sequence: Synthetic oligonucleotide
cgccuuacgagaguuucac

SEQ ID NO: 1680997 - RNA, 19 nt, Artificial Sequence
  Description of Artificial Sequence: Synthetic oligonucleotide
gccuuacgagaguuucaca

SEQ ID NO: 1680998 - RNA, 19 nt, Artificial Sequence
  Description of Artificial Sequence: Synthetic oligonucleotide
guaccacacaaugccaguu

SEQ ID NO: 1680999 - RNA, 19 nt, Artificial Sequence
  Description of Artificial Sequence: Synthetic oligonucleotide
cgagcgcgccuuacgagag

SEQ ID NO: 1681000 - RNA, 19 nt, Artificial Sequence
  Description of Artificial Sequence: Synthetic oligonucleotide
ucccacgcguugguauuuu

SEQ ID NO: 1681001 - RNA, 19 nt, Artificial Sequence
  Description of Artificial Sequence: Synthetic oligonucleotide
cguugguauuuucuugcca

SEQ ID NO: 1681002 - RNA, 19 nt, Artificial Sequence
  Description of Artificial Sequence: Synthetic oligonucleotide
cuccuucaaucuucacacu

SEQ ID NO: 1681003 - RNA, 19 nt, Artificial Sequence
  Description of Artificial Sequence: Synthetic oligonucleotide
cacuagcuggagagguacu

SEQ ID NO: 1681004 - RNA, 19 nt, Artificial Sequence
  Description of Artificial Sequence: Synthetic oligonucleotide
ccagguaucuaagucuccu

SEQ ID NO: 1681005 - RNA, 19 nt, Artificial Sequence
  Description of Artificial Sequence: Synthetic oligonucleotide
cgcgccuuacgagaguuuc

SEQ ID NO: 1681006 - RNA, 19 nt, Artificial Sequence
  Description of Artificial Sequence: Synthetic oligonucleotide
cugcuucgggacagaugaa

SEQ ID NO: 1681007 - RNA, 19 nt, Artificial Sequence
  Description of Artificial Sequence: Synthetic oligonucleotide
gcaggcguuuguacucuga

SEQ ID NO: 1681008 - RNA, 19 nt, Artificial Sequence
  Description of Artificial Sequence: Synthetic oligonucleotide
aucagacgcugggcuuccu

SEQ ID NO: 1681009 - RNA, 19 nt, Artificial Sequence
  Description of Artificial Sequence: Synthetic oligonucleotide
ccacgcguugguauuuucu

SEQ ID NO: 1681010 - RNA, 19 nt, Artificial Sequence
  Description of Artificial Sequence: Synthetic oligonucleotide
gagcgcgccuuacgagagu

SEQ ID NO: 1681011 - RNA, 19 nt, Artificial Sequence
  Description of Artificial Sequence: Synthetic oligonucleotide
cccacgcguugguauuuuc

SEQ ID NO: 1681012 - RNA, 19 nt, Artificial Sequence
  Description of Artificial Sequence: Synthetic oligonucleotide
gcgccuuacgagaguuuca

SEQ ID NO: 1681013 - RNA, 19 nt, Artificial Sequence
  Description of Artificial Sequence: Synthetic oligonucleotide
ccaucggggauaccaaaau

SEQ ID NO: 1681014 - RNA, 19 nt, Artificial Sequence
  Description of Artificial Sequence: Synthetic oligonucleotide
gucuuguguggccgccaau

SEQ ID NO: 1681015 - RNA, 19 nt, Artificial Sequence
  Description of Artificial Sequence: Synthetic oligonucleotide
guguggccgccaaucuacu

SEQ ID NO: 1681016 - RNA, 19 nt, Artificial Sequence
  Description of Artificial Sequence: Synthetic oligonucleotide
gcaggcgagcgcgccuuac

SEQ ID NO: 1681017 - RNA, 19 nt, Artificial Sequence
  Description of Artificial Sequence: Synthetic oligonucleotide
caacugaggugggcagagu

SEQ ID NO: 1681018 - RNA, 19 nt, Artificial Sequence
  Description of Artificial Sequence: Synthetic oligonucleotide
ccguguuaccaucggggau

SEQ ID NO: 1681019 - RNA, 19 nt, Artificial Sequence
  Description of Artificial Sequence: Synthetic oligonucleotide
ccgcaggcccagacuucuc

SEQ ID NO: 1681020 - RNA, 19 nt, Artificial Sequence
  Description of Artificial Sequence: Synthetic oligonucleotide
ggccgccaaucuacuggaa

SEQ ID NO: 1681021 - RNA, 19 nt, Artificial Sequence
  Description of Artificial Sequence: Synthetic oligonucleotide
cgagaguuucacacccauu

SEQ ID NO: 1681022 - RNA, 19 nt, Artificial Sequence
  Description of Artificial Sequence: Synthetic oligonucleotide
cccuaacacuuuguuuaau

SEQ ID NO: 1681023 - RNA, 19 nt, Artificial Sequence
  Description of Artificial Sequence: Synthetic oligonucleotide
gcgcgccuuacgagaguuu

SEQ ID NO: 1681024 - RNA, 19 nt, Artificial Sequence
  Description of Artificial Sequence: Synthetic oligonucleotide
cggcaggcgagcgcgccuu

SEQ ID NO: 1681025 - RNA, 19 nt, Artificial Sequence
  Description of Artificial Sequence: Synthetic oligonucleotide
aaugcauaaagccagcaga

SEQ ID NO: 1681026 - RNA, 19 nt, Artificial Sequence
  Description of Artificial Sequence: Synthetic oligonucleotide
aaggaaucaacgcaguauc

SEQ ID NO: 1681027 - RNA, 19 nt, Artificial Sequence
  Description of Artificial Sequence: Synthetic oligonucleotide
ugucucuauacuuagaaca

SEQ ID NO: 1681028 - RNA, 19 nt, Artificial Sequence
  Description of Artificial Sequence: Synthetic oligonucleotide
cuauacuuagaacagcuag

SEQ ID NO: 1681029 - RNA, 19 nt, Artificial Sequence
  Description of Artificial Sequence: Synthetic oligonucleotide
uguaaacagcgccagggcg

SEQ ID NO: 1681030 - RNA, 19 nt, Artificial Sequence
  Description of Artificial Sequence: Synthetic oligonucleotide
uagaacgaggugaaggagg

SEQ ID NO: 1681031 - RNA, 19 nt, Artificial Sequence
  Description of Artificial Sequence: Synthetic oligonucleotide
aacgaggugaaggaggugg

SEQ ID NO: 1681032 - RNA, 19 nt, Artificial Sequence
  Description of Artificial Sequence: Synthetic oligonucleotide
cagaccaaugcauaaagcc

SEQ ID NO: 1681033 - RNA, 19 nt, Artificial Sequence
  Description of Artificial Sequence: Synthetic oligonucleotide
gacggcuuccuguagaacg

SEQ ID NO: 1681034 - RNA, 19 nt, Artificial Sequence
  Description of Artificial Sequence: Synthetic oligonucleotide
acaagaaugucugcgaagg

SEQ ID NO: 1681035 - RNA, 19 nt, Artificial Sequence
  Description of Artificial Sequence: Synthetic oligonucleotide
uguagaacgaggugaagga

SEQ ID NO: 1681036 - RNA, 19 nt, Artificial Sequence
  Description of Artificial Sequence: Synthetic oligonucleotide
gaaucaacgcaguauccag

SEQ ID NO: 1681037 - RNA, 19 nt, Artificial Sequence
  Description of Artificial Sequence: Synthetic oligonucleotide
aaucaacgcaguauccagc

SEQ ID NO: 1681038 - RNA, 19 nt, Artificial Sequence
  Description of Artificial Sequence: Synthetic oligonucleotide
auugucucuauacuuagaa

SEQ ID NO: 1681039 - RNA, 19 nt, Artificial Sequence
  Description of Artificial Sequence: Synthetic oligonucleotide
ugcaugcguguaaacagcg

SEQ ID NO: 1681040 - RNA, 19 nt, Artificial Sequence
  Description of Artificial Sequence: Synthetic oligonucleotide
gacaccugacgauagcggg

SEQ ID NO: 1681041 - RNA, 19 nt, Artificial Sequence
  Description of Artificial Sequence: Synthetic oligonucleotide
aaaggaaucaacgcaguau

SEQ ID NO: 1681042 - RNA, 19 nt, Artificial Sequence
  Description of Artificial Sequence: Synthetic oligonucleotide
agaggcucgccauaggcgg

SEQ ID NO: 1681043 - RNA, 19 nt, Artificial Sequence
  Description of Artificial Sequence: Synthetic oligonucleotide
ucugcgaaggcacccagug

SEQ ID NO: 1681044 - RNA, 19 nt, Artificial Sequence
  Description of Artificial Sequence: Synthetic oligonucleotide
caugcguguaaacagcgcc

SEQ ID NO: 1681045 - RNA, 19 nt, Artificial Sequence
  Description of Artificial Sequence: Synthetic oligonucleotide
uagaggcucgccauaggcg

SEQ ID NO: 1681046 - RNA, 19 nt, Artificial Sequence
  Description of Artificial Sequence: Synthetic oligonucleotide
ucgaaagccucccaggagu

SEQ ID NO: 1681047 - RNA, 19 nt, Artificial Sequence
  Description of Artificial Sequence: Synthetic oligonucleotide
gaccaaugcauaaagccag

SEQ ID NO: 1681048 - RNA, 19 nt, Artificial Sequence
  Description of Artificial Sequence: Synthetic oligonucleotide
ucgggcagcagcuuugcgg

SEQ ID NO: 1681049 - RNA, 19 nt, Artificial Sequence
  Description of Artificial Sequence: Synthetic oligonucleotide
gacaagaaugucugcgaag

SEQ ID NO: 1681050 - RNA, 19 nt, Artificial Sequence
  Description of Artificial Sequence: Synthetic oligonucleotide
cagauuguuacacagugga

SEQ ID NO: 1681051 - RNA, 19 nt, Artificial Sequence
  Description of Artificial Sequence: Synthetic oligonucleotide
ugaaggcaguggcagcucg

SEQ ID NO: 1681052 - RNA, 19 nt, Artificial Sequence
  Description of Artificial Sequence: Synthetic oligonucleotide
acagcuagggaaaggaauc

SEQ ID NO: 1681053 - RNA, 19 nt, Artificial Sequence
  Description of Artificial Sequence: Synthetic oligonucleotide
uuccuguagaacgagguga

SEQ ID NO: 1681054 - RNA, 19 nt, Artificial Sequence
  Description of Artificial Sequence: Synthetic oligonucleotide
acgauagcgggccaagaag

SEQ ID NO: 1681055 - RNA, 19 nt, Artificial Sequence
  Description of Artificial Sequence: Synthetic oligonucleotide
uguccucccguguuuauug

SEQ ID NO: 1681056 - RNA, 19 nt, Artificial Sequence
  Description of Artificial Sequence: Synthetic oligonucleotide
ugcgaaggcacccagugua

SEQ ID NO: 1681057 - RNA, 19 nt, Artificial Sequence
  Description of Artificial Sequence: Synthetic oligonucleotide
gucucuauacuuagaacag

SEQ ID NO: 1681058 - RNA, 19 nt, Artificial Sequence
  Description of Artificial Sequence: Synthetic oligonucleotide
ugugcgaacugcuccccgg

SEQ ID NO: 1681059 - RNA, 19 nt, Artificial Sequence
  Description of Artificial Sequence: Synthetic oligonucleotide
agaacagcuagggaaagga

SEQ ID NO: 1681060 - RNA, 19 nt, Artificial Sequence
  Description of Artificial Sequence: Synthetic oligonucleotide
ucgccgaacgccugcagcg

SEQ ID NO: 1681061 - RNA, 19 nt, Artificial Sequence
  Description of Artificial Sequence: Synthetic oligonucleotide
acagaccaaugcauaaagc

SEQ ID NO: 1681062 - RNA, 19 nt, Artificial Sequence
  Description of Artificial Sequence: Synthetic oligonucleotide
cucgcaccugacaagaaug

SEQ ID NO: 1681063 - RNA, 19 nt, Artificial Sequence
  Description of Artificial Sequence: Synthetic oligonucleotide
aacagcuagggaaaggaau

SEQ ID NO: 1681064 - RNA, 19 nt, Artificial Sequence
  Description of Artificial Sequence: Synthetic oligonucleotide
ugacaagaaugucugcgaa

SEQ ID NO: 1681065 - RNA, 19 nt, Artificial Sequence
  Description of Artificial Sequence: Synthetic oligonucleotide
caaaggaacaucuguccuc

SEQ ID NO: 1681066 - RNA, 19 nt, Artificial Sequence
  Description of Artificial Sequence: Synthetic oligonucleotide
cuuagaacagcuagggaaa

SEQ ID NO: 1681067 - RNA, 19 nt, Artificial Sequence
  Description of Artificial Sequence: Synthetic oligonucleotide
aagucgggcggcuucggug

SEQ ID NO: 1681068 - RNA, 19 nt, Artificial Sequence
  Description of Artificial Sequence: Synthetic oligonucleotide
aaggaacaucuguccuccc

SEQ ID NO: 1681069 - RNA, 19 nt, Artificial Sequence
  Description of Artificial Sequence: Synthetic oligonucleotide
ucucuauacuuagaacagc

SEQ ID NO: 1681070 - RNA, 19 nt, Artificial Sequence
  Description of Artificial Sequence: Synthetic oligonucleotide
gaggcagcgucgccgaacg

SEQ ID NO: 1681071 - RNA, 19 nt, Artificial Sequence
  Description of Artificial Sequence: Synthetic oligonucleotide
cuuguuggacaccugacga

SEQ ID NO: 1681072 - RNA, 19 nt, Artificial Sequence
  Description of Artificial Sequence: Synthetic oligonucleotide
cagggucugggcaugcucg

SEQ ID NO: 1681073 - RNA, 19 nt, Artificial Sequence
  Description of Artificial Sequence: Synthetic oligonucleotide
uacuuagaacagcuaggga

SEQ ID NO: 1681074 - RNA, 19 nt, Artificial Sequence
  Description of Artificial Sequence: Synthetic oligonucleotide
aggaaucaacgcaguaucc

SEQ ID NO: 1681075 - RNA, 19 nt, Artificial Sequence
  Description of Artificial Sequence: Synthetic oligonucleotide
agaccaaugcauaaagcca

SEQ ID NO: 1681076 - RNA, 19 nt, Artificial Sequence
  Description of Artificial Sequence: Synthetic oligonucleotide
uccgcgagcagcgggaggg

SEQ ID NO: 1681077 - RNA, 19 nt, Artificial Sequence
  Description of Artificial Sequence: Synthetic oligonucleotide
caacgcaguauccagccac

SEQ ID NO: 1681078 - RNA, 19 nt, Artificial Sequence
  Description of Artificial Sequence: Synthetic oligonucleotide
uuagaacagcuagggaaag

SEQ ID NO: 1681079 - RNA, 19 nt, Artificial Sequence
  Description of Artificial Sequence: Synthetic oligonucleotide
guaaacagcgccagggcgc

SEQ ID NO: 1681080 - RNA, 19 nt, Artificial Sequence
  Description of Artificial Sequence: Synthetic oligonucleotide
ucggcuuccgcaggaagcg

SEQ ID NO: 1681081 - RNA, 19 nt, Artificial Sequence
  Description of Artificial Sequence: Synthetic oligonucleotide
aacaucuguccucccgugu

SEQ ID NO: 1681082 - RNA, 19 nt, Artificial Sequence
  Description of Artificial Sequence: Synthetic oligonucleotide
aucgaaagccucccaggag

SEQ ID NO: 1681083 - RNA, 19 nt, Artificial Sequence
  Description of Artificial Sequence: Synthetic oligonucleotide
gauuguuacacaguggaau

SEQ ID NO: 1681084 - RNA, 19 nt, Artificial Sequence
  Description of Artificial Sequence: Synthetic oligonucleotide
guagucgcgcgccaggagc

SEQ ID NO: 1681085 - RNA, 19 nt, Artificial Sequence
  Description of Artificial Sequence: Synthetic oligonucleotide
acagccaguuggcaccacg

SEQ ID NO: 1681086 - RNA, 19 nt, Artificial Sequence
  Description of Artificial Sequence: Synthetic oligonucleotide
cucggagugcuguaccggg

SEQ ID NO: 1681087 - RNA, 19 nt, Artificial Sequence
  Description of Artificial Sequence: Synthetic oligonucleotide
uggccgugggcaucgaaag

SEQ ID NO: 1681088 - RNA, 19 nt, Artificial Sequence
  Description of Artificial Sequence: Synthetic oligonucleotide
uguuacacaguggaaucuc

SEQ ID NO: 1681089 - RNA, 19 nt, Artificial Sequence
  Description of Artificial Sequence: Synthetic oligonucleotide
accugacaagaaugucugc

SEQ ID NO: 1681090 - RNA, 19 nt, Artificial Sequence
  Description of Artificial Sequence: Synthetic oligonucleotide
ggugcagcugagcagcgcg

SEQ ID NO: 1681091 - RNA, 19 nt, Artificial Sequence
  Description of Artificial Sequence: Synthetic oligonucleotide
agcucggagugcuguaccg

SEQ ID NO: 1681092 - RNA, 19 nt, Artificial Sequence
  Description of Artificial Sequence: Synthetic oligonucleotide
agggcgccgguguagucgc

SEQ ID NO: 1681093 - RNA, 19 nt, Artificial Sequence
  Description of Artificial Sequence: Synthetic oligonucleotide
uguagucgcgcgccaggag

SEQ ID NO: 1681094 - RNA, 19 nt, Artificial Sequence
  Description of Artificial Sequence: Synthetic oligonucleotide
ucgcaccugacaagaaugu

SEQ ID NO: 1681095 - RNA, 19 nt, Artificial Sequence
  Description of Artificial Sequence: Synthetic oligonucleotide
acaccugacgauagcgggc

SEQ ID NO: 1681096 - RNA, 19 nt, Artificial Sequence
  Description of Artificial Sequence: Synthetic oligonucleotide
gaccagggacugcaaaagc

SEQ ID NO: 1681097 - RNA, 19 nt, Artificial Sequence
  Description of Artificial Sequence: Synthetic oligonucleotide
cucuauacuuagaacagcu

SEQ ID NO: 1681098 - RNA, 19 nt, Artificial Sequence
  Description of Artificial Sequence: Synthetic oligonucleotide
aggaguacuuuuccagggu

SEQ ID NO: 1681099 - RNA, 19 nt, Artificial Sequence
  Description of Artificial Sequence: Synthetic oligonucleotide
ucggggccgagccaggucu

SEQ ID NO: 1681100 - RNA, 19 nt, Artificial Sequence
  Description of Artificial Sequence: Synthetic oligonucleotide
ucagccuuaagaggugacu

SEQ ID NO: 1681101 - RNA, 19 nt, Artificial Sequence
  Description of Artificial Sequence: Synthetic oligonucleotide
guagaacgaggugaaggag

SEQ ID NO: 1681102 - RNA, 19 nt, Artificial Sequence
  Description of Artificial Sequence: Synthetic oligonucleotide
uaaacagcgccagggcgcc

SEQ ID NO: 1681103 - RNA, 19 nt, Artificial Sequence
  Description of Artificial Sequence: Synthetic oligonucleotide
cugacaagaaugucugcga

SEQ ID NO: 1681104 - RNA, 19 nt, Artificial Sequence
  Description of Artificial Sequence: Synthetic oligonucleotide
ugucugcgaaggcacccag

SEQ ID NO: 1681105 - RNA, 19 nt, Artificial Sequence
  Description of Artificial Sequence: Synthetic oligonucleotide
aagaaguccccagccucag

SEQ ID NO: 1681106 - RNA, 19 nt, Artificial Sequence
  Description of Artificial Sequence: Synthetic oligonucleotide
agcgucgccgaacgccugc

SEQ ID NO: 1681107 - RNA, 19 nt, Artificial Sequence
  Description of Artificial Sequence: Synthetic oligonucleotide
gcaucgaaagccucccagg

SEQ ID NO: 1681108 - RNA, 19 nt, Artificial Sequence
  Description of Artificial Sequence: Synthetic oligonucleotide
uguuggacaccugacgaua

SEQ ID NO: 1681109 - RNA, 19 nt, Artificial Sequence
  Description of Artificial Sequence: Synthetic oligonucleotide
gaaaggaaucaacgcagua

SEQ ID NO: 1681110 - RNA, 19 nt, Artificial Sequence
  Description of Artificial Sequence: Synthetic oligonucleotide
ucaacgcaguauccagcca

SEQ ID NO: 1681111 - RNA, 19 nt, Artificial Sequence
  Description of Artificial Sequence: Synthetic oligonucleotide
gccgcugguauccuggccg

SEQ ID NO: 1681112 - RNA, 19 nt, Artificial Sequence
  Description of Artificial Sequence: Synthetic oligonucleotide
agcuuguuggacaccugac

SEQ ID NO: 1681113 - RNA, 19 nt, Artificial Sequence
  Description of Artificial Sequence: Synthetic oligonucleotide
acccaguguaccaagagaa

SEQ ID NO: 1681114 - RNA, 19 nt, Artificial Sequence
  Description of Artificial Sequence: Synthetic oligonucleotide
gacgauagcgggccaagaa

SEQ ID NO: 1681115 - RNA, 19 nt, Artificial Sequence
  Description of Artificial Sequence: Synthetic oligonucleotide
agagcccgccgccauguuc

SEQ ID NO: 1681116 - RNA, 19 nt, Artificial Sequence
  Description of Artificial Sequence: Synthetic oligonucleotide
agcgcgcugaaagugaccu

SEQ ID NO: 1681117 - RNA, 19 nt, Artificial Sequence
  Description of Artificial Sequence: Synthetic oligonucleotide
uuguuggacaccugacgau

SEQ ID NO: 1681118 - RNA, 19 nt, Artificial Sequence
  Description of Artificial Sequence: Synthetic oligonucleotide
ggcaucgaaagccucccag

SEQ ID NO: 1681119 - RNA, 19 nt, Artificial Sequence
  Description of Artificial Sequence: Synthetic oligonucleotide
guguaccaagagaaggugc

SEQ ID NO: 1681120 - RNA, 19 nt, Artificial Sequence
  Description of Artificial Sequence: Synthetic oligonucleotide
gaggacgcagagcccgccg

SEQ ID NO: 1681121 - RNA, 19 nt, Artificial Sequence
  Description of Artificial Sequence: Synthetic oligonucleotide
gaggugguucugcucagca

SEQ ID NO: 1681122 - RNA, 19 nt, Artificial Sequence
  Description of Artificial Sequence: Synthetic oligonucleotide
cauaaagccagcagauugu

SEQ ID NO: 1681123 - RNA, 19 nt, Artificial Sequence
  Description of Artificial Sequence: Synthetic oligonucleotide
gcgguuggagcccaggaag

SEQ ID NO: 1681124 - RNA, 19 nt, Artificial Sequence
  Description of Artificial Sequence: Synthetic oligonucleotide
accagggacugcaaaagca

SEQ ID NO: 1681125 - RNA, 19 nt, Artificial Sequence
  Description of Artificial Sequence: Synthetic oligonucleotide
acguugcaugcguguaaac

SEQ ID NO: 1681126 - RNA, 19 nt, Artificial Sequence
  Description of Artificial Sequence: Synthetic oligonucleotide
augcauaaagccagcagau

SEQ ID NO: 1681127 - RNA, 19 nt, Artificial Sequence
  Description of Artificial Sequence: Synthetic oligonucleotide
acaccucgcaccugacaag

SEQ ID NO: 1681128 - RNA, 19 nt, Artificial Sequence
  Description of Artificial Sequence: Synthetic oligonucleotide
acuggcggcggccuguaga

SEQ ID NO: 1681129 - RNA, 19 nt, Artificial Sequence
  Description of Artificial Sequence: Synthetic oligonucleotide
caucgaaagccucccagga

SEQ ID NO: 1681130 - RNA, 19 nt, Artificial Sequence
  Description of Artificial Sequence: Synthetic oligonucleotide
caugcucccgugccagacg

SEQ ID NO: 1681131 - RNA, 19 nt, Artificial Sequence
  Description of Artificial Sequence: Synthetic oligonucleotide
uagucgcgcgccaggagcu

SEQ ID NO: 1681132 - RNA, 19 nt, Artificial Sequence
  Description of Artificial Sequence: Synthetic oligonucleotide
caccugacgauagcgggcc

SEQ ID NO: 1681133 - RNA, 19 nt, Artificial Sequence
  Description of Artificial Sequence: Synthetic oligonucleotide
gccaguuggcaccacgcgg

SEQ ID NO: 1681134 - RNA, 19 nt, Artificial Sequence
  Description of Artificial Sequence: Synthetic oligonucleotide
aacgcaguauccagccaca

SEQ ID NO: 1681135 - RNA, 19 nt, Artificial Sequence
  Description of Artificial Sequence: Synthetic oligonucleotide
gagagacggcuuccuguag

SEQ ID NO: 1681136 - RNA, 19 nt, Artificial Sequence
  Description of Artificial Sequence: Synthetic oligonucleotide
caccacgcggcauagggca

SEQ ID NO: 1681137 - RNA, 19 nt, Artificial Sequence
  Description of Artificial Sequence: Synthetic oligonucleotide
cacgucgcacuccugccgc

SEQ ID NO: 1681138 - RNA, 19 nt, Artificial Sequence
  Description of Artificial Sequence: Synthetic oligonucleotide
ugguccgcgagcagcggga

SEQ ID NO: 1681139 - RNA, 19 nt, Artificial Sequence
  Description of Artificial Sequence: Synthetic oligonucleotide
ggaaucaacgcaguaucca

SEQ ID NO: 1681140 - RNA, 19 nt, Artificial Sequence
  Description of Artificial Sequence: Synthetic oligonucleotide
gauagcgggccaagaaguc

SEQ ID NO: 1681141 - RNA, 19 nt, Artificial Sequence
  Description of Artificial Sequence: Synthetic oligonucleotide
ucccgugccagacguugca

SEQ ID NO: 1681142 - RNA, 19 nt, Artificial Sequence
  Description of Artificial Sequence: Synthetic oligonucleotide
guaccaagagaaggugcag

SEQ ID NO: 1681143 - RNA, 19 nt, Artificial Sequence
  Description of Artificial Sequence: Synthetic oligonucleotide
gucgccgaacgccugcagc

SEQ ID NO: 1681144 - RNA, 19 nt, Artificial Sequence
  Description of Artificial Sequence: Synthetic oligonucleotide
ucccguguuuauugucucu

SEQ ID NO: 1681145 - RNA, 19 nt, Artificial Sequence
  Description of Artificial Sequence: Synthetic oligonucleotide
uaccggguggccgccaugc

SEQ ID NO: 1681146 - RNA, 19 nt, Artificial Sequence
  Description of Artificial Sequence: Synthetic oligonucleotide
agccuuaagaggugacuua

SEQ ID NO: 1681147 - RNA, 19 nt, Artificial Sequence
  Description of Artificial Sequence: Synthetic oligonucleotide
aaggcacccaguguaccaa

SEQ ID NO: 1681148 - RNA, 19 nt, Artificial Sequence
  Description of Artificial Sequence: Synthetic oligonucleotide
agaaggugcagcagagccu

SEQ ID NO: 1681149 - RNA, 19 nt, Artificial Sequence
  Description of Artificial Sequence: Synthetic oligonucleotide
ggaaaagucgggcggcuuc

SEQ ID NO: 1681150 - RNA, 19 nt, Artificial Sequence
  Description of Artificial Sequence: Synthetic oligonucleotide
uggggcgugguccgcgagc

SEQ ID NO: 1681151 - RNA, 19 nt, Artificial Sequence
  Description of Artificial Sequence: Synthetic oligonucleotide
auaaagccagcagauuguu

SEQ ID NO: 1681152 - RNA, 19 nt, Artificial Sequence
  Description of Artificial Sequence: Synthetic oligonucleotide
gugguccgcgagcagcggg

SEQ ID NO: 1681153 - RNA, 19 nt, Artificial Sequence
  Description of Artificial Sequence: Synthetic oligonucleotide
ucggagugcuguaccgggu

SEQ ID NO: 1681154 - RNA, 19 nt, Artificial Sequence
  Description of Artificial Sequence: Synthetic oligonucleotide
cagggcgccgguguagucg

SEQ ID NO: 1681155 - RNA, 19 nt, Artificial Sequence
  Description of Artificial Sequence: Synthetic oligonucleotide
cuuugcgggcggugguugc

SEQ ID NO: 1681156 - RNA, 19 nt, Artificial Sequence
  Description of Artificial Sequence: Synthetic oligonucleotide
cucgcgggccagcugugcg

SEQ ID NO: 1681157 - RNA, 19 nt, Artificial Sequence
  Description of Artificial Sequence: Synthetic oligonucleotide
cauaggcggccggacagcc

SEQ ID NO: 1681158 - RNA, 19 nt, Artificial Sequence
  Description of Artificial Sequence: Synthetic oligonucleotide
cuggccugagggagagacg

SEQ ID NO: 1681159 - RNA, 19 nt, Artificial Sequence
  Description of Artificial Sequence: Synthetic oligonucleotide
ugcauaaagccagcagauu

SEQ ID NO: 1681160 - RNA, 19 nt, Artificial Sequence
  Description of Artificial Sequence: Synthetic oligonucleotide
gaaggcgcacagcggcgcc

SEQ ID NO: 1681161 - RNA, 19 nt, Artificial Sequence
  Description of Artificial Sequence: Synthetic oligonucleotide
cugugcgaacugcuccccg

SEQ ID NO: 1681162 - RNA, 19 nt, Artificial Sequence
  Description of Artificial Sequence: Synthetic oligonucleotide
uccucccguguuuauuguc

SEQ ID NO: 1681163 - RNA, 19 nt, Artificial Sequence
  Description of Artificial Sequence: Synthetic oligonucleotide
gcuagggaaaggaaucaac

SEQ ID NO: 1681164 - RNA, 19 nt, Artificial Sequence
  Description of Artificial Sequence: Synthetic oligonucleotide
gagcccgccgccauguuca

SEQ ID NO: 1681165 - RNA, 19 nt, Artificial Sequence
  Description of Artificial Sequence: Synthetic oligonucleotide
gacguugcaugcguguaaa

SEQ ID NO: 1681166 - RNA, 19 nt, Artificial Sequence
  Description of Artificial Sequence: Synthetic oligonucleotide
cucccguguuuauugucuc

SEQ ID NO: 1681167 - RNA, 19 nt, Artificial Sequence
  Description of Artificial Sequence: Synthetic oligonucleotide
uugaugccuuccguguccu

SEQ ID NO: 1681168 - RNA, 19 nt, Artificial Sequence
  Description of Artificial Sequence: Synthetic oligonucleotide
gugcgaacugcuccccggc

SEQ ID NO: 1681169 - RNA, 19 nt, Artificial Sequence
  Description of Artificial Sequence: Synthetic oligonucleotide
agauuguuacacaguggaa

SEQ ID NO: 1681170 - RNA, 19 nt, Artificial Sequence
  Description of Artificial Sequence: Synthetic oligonucleotide
aggugaaggcgcacagcgg

SEQ ID NO: 1681171 - RNA, 19 nt, Artificial Sequence
  Description of Artificial Sequence: Synthetic oligonucleotide
auccuggccgugggcaucg

SEQ ID NO: 1681172 - RNA, 19 nt, Artificial Sequence
  Description of Artificial Sequence: Synthetic oligonucleotide
cacguucggcuuccgcagg

SEQ ID NO: 1681173 - RNA, 19 nt, Artificial Sequence
  Description of Artificial Sequence: Synthetic oligonucleotide
cacagagcggcggcggcgg

SEQ ID NO: 1681174 - RNA, 19 nt, Artificial Sequence
  Description of Artificial Sequence: Synthetic oligonucleotide
gugccagacguugcaugcg

SEQ ID NO: 1681175 - RNA, 19 nt, Artificial Sequence
  Description of Artificial Sequence: Synthetic oligonucleotide
uuugcgggcggugguugca

SEQ ID NO: 1681176 - RNA, 19 nt, Artificial Sequence
  Description of Artificial Sequence: Synthetic oligonucleotide
gaacgccugcagcgcagcc

SEQ ID NO: 1681177 - RNA, 19 nt, Artificial Sequence
  Description of Artificial Sequence: Synthetic oligonucleotide
cgcaggaaaagucgggcgg

SEQ ID NO: 1681178 - RNA, 19 nt, Artificial Sequence
  Description of Artificial Sequence: Synthetic oligonucleotide
ugacgauagcgggccaaga

SEQ ID NO: 1681179 - RNA, 19 nt, Artificial Sequence
  Description of Artificial Sequence: Synthetic oligonucleotide
uguaccggguggccgccau

SEQ ID NO: 1681180 - RNA, 19 nt, Artificial Sequence
  Description of Artificial Sequence: Synthetic oligonucleotide
ggccggcuggcccagggcg

SEQ ID NO: 1681181 - RNA, 19 nt, Artificial Sequence
  Description of Artificial Sequence: Synthetic oligonucleotide
gguauccuggccgugggca

SEQ ID NO: 1681182 - RNA, 19 nt, Artificial Sequence
  Description of Artificial Sequence: Synthetic oligonucleotide
auaggcggccggacagccc

SEQ ID NO: 1681183 - RNA, 19 nt, Artificial Sequence
  Description of Artificial Sequence: Synthetic oligonucleotide
gcgccgagggcacuggcgg

SEQ ID NO: 1681184 - RNA, 19 nt, Artificial Sequence
  Description of Artificial Sequence: Synthetic oligonucleotide
uccgccacguucggcuucc

SEQ ID NO: 1681185 - RNA, 19 nt, Artificial Sequence
  Description of Artificial Sequence: Synthetic oligonucleotide
acguucggcuuccgcagga

SEQ ID NO: 1681186 - RNA, 19 nt, Artificial Sequence
  Description of Artificial Sequence: Synthetic oligonucleotide
ccacaucuccaccugcagc

SEQ ID NO: 1681187 - RNA, 19 nt, Artificial Sequence
  Description of Artificial Sequence: Synthetic oligonucleotide
gcgcgccacagccaguugg

SEQ ID NO: 1681188 - RNA, 19 nt, Artificial Sequence
  Description of Artificial Sequence: Synthetic oligonucleotide
cugggcaugcucgggcagc

SEQ ID NO: 1681189 - RNA, 19 nt, Artificial Sequence
  Description of Artificial Sequence: Synthetic oligonucleotide
gcacgucgcacuccugccg

SEQ ID NO: 1681190 - RNA, 19 nt, Artificial Sequence
  Description of Artificial Sequence: Synthetic oligonucleotide
ucgcgggccagcugugcga

SEQ ID NO: 1681191 - RNA, 19 nt, Artificial Sequence
  Description of Artificial Sequence: Synthetic oligonucleotide
gcaggaaaagucgggcggc

SEQ ID NO: 1681192 - RNA, 19 nt, Artificial Sequence
  Description of Artificial Sequence: Synthetic oligonucleotide
cugggcgcgcagcucgcgg

SEQ ID NO: 1681193 - RNA, 19 nt, Artificial Sequence
  Description of Artificial Sequence: Synthetic oligonucleotide
caugggcagccaugaccag

SEQ ID NO: 1681194 - RNA, 19 nt, Artificial Sequence
  Description of Artificial Sequence: Synthetic oligonucleotide
uugcgggcggugguugcag

SEQ ID NO: 1681195 - RNA, 19 nt, Artificial Sequence
  Description of Artificial Sequence: Synthetic oligonucleotide
aggcagcgucgccgaacgc

SEQ ID NO: 1681196 - RNA, 19 nt, Artificial Sequence
  Description of Artificial Sequence: Synthetic oligonucleotide
cucgggcagcagcuuugcg

SEQ ID NO: 1681197 - RNA, 19 nt, Artificial Sequence
  Description of Artificial Sequence: Synthetic oligonucleotide
uuccgccacguucggcuuc

SEQ ID NO: 1681198 - RNA, 19 nt, Artificial Sequence
  Description of Artificial Sequence: Synthetic oligonucleotide
cagcgcgcugaaagugacc

SEQ ID NO: 1681199 - RNA, 19 nt, Artificial Sequence
  Description of Artificial Sequence: Synthetic oligonucleotide
gcgcacgucgcacuccugc

SEQ ID NO: 1681200 - RNA, 19 nt, Artificial Sequence
  Description of Artificial Sequence: Synthetic oligonucleotide
cagcuagggaaaggaauca

SEQ ID NO: 1681201 - RNA, 19 nt, Artificial Sequence
  Description of Artificial Sequence: Synthetic oligonucleotide
aaacagcgccagggcgccg

SEQ ID NO: 1681202 - RNA, 19 nt, Artificial Sequence
  Description of Artificial Sequence: Synthetic oligonucleotide
aagcgcuucuugagcuugu

SEQ ID NO: 1681203 - RNA, 19 nt, Artificial Sequence
  Description of Artificial Sequence: Synthetic oligonucleotide
ccagcucgaggugaaggcg

SEQ ID NO: 1681204 - RNA, 19 nt, Artificial Sequence
  Description of Artificial Sequence: Synthetic oligonucleotide
ccuuaagaggugacuuauc

SEQ ID NO: 1681205 - RNA, 19 nt, Artificial Sequence
  Description of Artificial Sequence: Synthetic oligonucleotide
gccgcaggaaaagucgggc

SEQ ID NO: 1681206 - RNA, 19 nt, Artificial Sequence
  Description of Artificial Sequence: Synthetic oligonucleotide
cgcgcugaaagugaccugc

SEQ ID NO: 1681207 - RNA, 19 nt, Artificial Sequence
  Description of Artificial Sequence: Synthetic oligonucleotide
cacuccugccgcaggaaaa

SEQ ID NO: 1681208 - RNA, 19 nt, Artificial Sequence
  Description of Artificial Sequence: Synthetic oligonucleotide
cucgaggugaaggcgcaca

SEQ ID NO: 1681209 - RNA, 19 nt, Artificial Sequence
  Description of Artificial Sequence: Synthetic oligonucleotide
gcguguaaacagcgccagg

SEQ ID NO: 1681210 - RNA, 19 nt, Artificial Sequence
  Description of Artificial Sequence: Synthetic oligonucleotide
gcucggagugcuguaccgg

SEQ ID NO: 1681211 - RNA, 19 nt, Artificial Sequence
  Description of Artificial Sequence: Synthetic oligonucleotide
caccucgcaccugacaaga

SEQ ID NO: 1681212 - RNA, 19 nt, Artificial Sequence
  Description of Artificial Sequence: Synthetic oligonucleotide
gcaccugacaagaaugucu

SEQ ID NO: 1681213 - RNA, 19 nt, Artificial Sequence
  Description of Artificial Sequence: Synthetic oligonucleotide
ggcgugguccgcgagcagc

SEQ ID NO: 1681214 - RNA, 19 nt, Artificial Sequence
  Description of Artificial Sequence: Synthetic oligonucleotide
guccgcgagcagcgggagg

SEQ ID NO: 1681215 - RNA, 19 nt, Artificial Sequence
  Description of Artificial Sequence: Synthetic oligonucleotide
gucgcgcgccaggagcugg

SEQ ID NO: 1681216 - RNA, 19 nt, Artificial Sequence
  Description of Artificial Sequence: Synthetic oligonucleotide
gcuuccgccacguucggcu

SEQ ID NO: 1681217 - RNA, 19 nt, Artificial Sequence
  Description of Artificial Sequence: Synthetic oligonucleotide
gggagagacggcuuccugu

SEQ ID NO: 1681218 - RNA, 19 nt, Artificial Sequence
  Description of Artificial Sequence: Synthetic oligonucleotide
gcucccgugccagacguug

SEQ ID NO: 1681219 - RNA, 19 nt, Artificial Sequence
  Description of Artificial Sequence: Synthetic oligonucleotide
gugaccugcggcggcggcc

SEQ ID NO: 1681220 - RNA, 19 nt, Artificial Sequence
  Description of Artificial Sequence: Synthetic oligonucleotide
ccugcagcgcagccagugg

SEQ ID NO: 1681221 - RNA, 19 nt, Artificial Sequence
  Description of Artificial Sequence: Synthetic oligonucleotide
agcccgccgccauguucac

SEQ ID NO: 1681222 - RNA, 19 nt, Artificial Sequence
  Description of Artificial Sequence: Synthetic oligonucleotide
cagcagauuguuacacagu

SEQ ID NO: 1681223 - RNA, 19 nt, Artificial Sequence
  Description of Artificial Sequence: Synthetic oligonucleotide
ggccuguagaggcucgcca

SEQ ID NO: 1681224 - RNA, 19 nt, Artificial Sequence
  Description of Artificial Sequence: Synthetic oligonucleotide
gcaugcguguaaacagcgc

SEQ ID NO: 1681225 - RNA, 19 nt, Artificial Sequence
  Description of Artificial Sequence: Synthetic oligonucleotide
guguagucgcgcgccagga

SEQ ID NO: 1681226 - RNA, 19 nt, Artificial Sequence
  Description of Artificial Sequence: Synthetic oligonucleotide
ucgccauaggcggccggac

SEQ ID NO: 1681227 - RNA, 19 nt, Artificial Sequence
  Description of Artificial Sequence: Synthetic oligonucleotide
cgcggcauagggcaggcac

SEQ ID NO: 1681228 - RNA, 19 nt, Artificial Sequence
  Description of Artificial Sequence: Synthetic oligonucleotide
aucuguccucccguguuua

SEQ ID NO: 1681229 - RNA, 19 nt, Artificial Sequence
  Description of Artificial Sequence: Synthetic oligonucleotide
ggccgugggcaucgaaagc

SEQ ID NO: 1681230 - RNA, 19 nt, Artificial Sequence
  Description of Artificial Sequence: Synthetic oligonucleotide
cacgcggcauagggcaggc

SEQ ID NO: 1681231 - RNA, 19 nt, Artificial Sequence
  Description of Artificial Sequence: Synthetic oligonucleotide
ggcgccgagggcacuggcg

SEQ ID NO: 1681232 - RNA, 19 nt, Artificial Sequence
  Description of Artificial Sequence: Synthetic oligonucleotide
gcgugguccgcgagcagcg

SEQ ID NO: 1681233 - RNA, 19 nt, Artificial Sequence
  Description of Artificial Sequence: Synthetic oligonucleotide
gccgguguagucgcgcgcc

SEQ ID NO: 1681234 - RNA, 19 nt, Artificial Sequence
  Description of Artificial Sequence: Synthetic oligonucleotide
cggcccauggaagagugcc

SEQ ID NO: 1681235 - RNA, 19 nt, Artificial Sequence
  Description of Artificial Sequence: Synthetic oligonucleotide
aggaaaagucgggcggcuu

SEQ ID NO: 1681236 - RNA, 19 nt, Artificial Sequence
  Description of Artificial Sequence: Synthetic oligonucleotide
cuggcgcacgucgcacucc

SEQ ID NO: 1681237 - RNA, 19 nt, Artificial Sequence
  Description of Artificial Sequence: Synthetic oligonucleotide
cguugcaugcguguaaaca

SEQ ID NO: 1681238 - RNA, 19 nt, Artificial Sequence
  Description of Artificial Sequence: Synthetic oligonucleotide
agcgcgccacagccaguug

SEQ ID NO: 1681239 - RNA, 19 nt, Artificial Sequence
  Description of Artificial Sequence: Synthetic oligonucleotide
guaccggguggccgccaug

SEQ ID NO: 1681240 - RNA, 19 nt, Artificial Sequence
  Description of Artificial Sequence: Synthetic oligonucleotide
acgucgcacuccugccgca

SEQ ID NO: 1681241 - RNA, 19 nt, Artificial Sequence
  Description of Artificial Sequence: Synthetic oligonucleotide
accugacgauagcgggcca

SEQ ID NO: 1681242 - RNA, 19 nt, Artificial Sequence
  Description of Artificial Sequence: Synthetic oligonucleotide
ggcgguuggagcccaggaa

SEQ ID NO: 1681243 - RNA, 19 nt, Artificial Sequence
  Description of Artificial Sequence: Synthetic oligonucleotide
ggaaaggaaucaacgcagu

SEQ ID NO: 1681244 - RNA, 19 nt, Artificial Sequence
  Description of Artificial Sequence: Synthetic oligonucleotide
ccgugccagacguugcaug

SEQ ID NO: 1681245 - RNA, 19 nt, Artificial Sequence
  Description of Artificial Sequence: Synthetic oligonucleotide
accacgcggcauagggcag

SEQ ID NO: 1681246 - RNA, 19 nt, Artificial Sequence
  Description of Artificial Sequence: Synthetic oligonucleotide
gcgcugaaagugaccugcg

SEQ ID NO: 1681247 - RNA, 19 nt, Artificial Sequence
  Description of Artificial Sequence: Synthetic oligonucleotide
gcacagagcggcggcggcg

SEQ ID NO: 1681248 - RNA, 19 nt, Artificial Sequence
  Description of Artificial Sequence: Synthetic oligonucleotide
gcauagggcaggcacuccu

SEQ ID NO: 1681249 - RNA, 19 nt, Artificial Sequence
  Description of Artificial Sequence: Synthetic oligonucleotide
gucgggcggcuucggugag

SEQ ID NO: 1681250 - RNA, 19 nt, Artificial Sequence
  Description of Artificial Sequence: Synthetic oligonucleotide
gcuuugcgggcggugguug

SEQ ID NO: 1681251 - RNA, 19 nt, Artificial Sequence
  Description of Artificial Sequence: Synthetic oligonucleotide
cuggggcgugguccgcgag

SEQ ID NO: 1681252 - RNA, 19 nt, Artificial Sequence
  Description of Artificial Sequence: Synthetic oligonucleotide
cagacguugcaugcgugua

SEQ ID NO: 1681253 - RNA, 19 nt, Artificial Sequence
  Description of Artificial Sequence: Synthetic oligonucleotide
agcuuugcgggcggugguu

SEQ ID NO: 1681254 - RNA, 19 nt, Artificial Sequence
  Description of Artificial Sequence: Synthetic oligonucleotide
gucggggccgagccagguc

SEQ ID NO: 1681255 - RNA, 19 nt, Artificial Sequence
  Description of Artificial Sequence: Synthetic oligonucleotide
uggccgccaugcucccgug

SEQ ID NO: 1681256 - RNA, 19 nt, Artificial Sequence
  Description of Artificial Sequence: Synthetic oligonucleotide
cagccuuaagaggugacuu

SEQ ID NO: 1681257 - RNA, 19 nt, Artificial Sequence
  Description of Artificial Sequence: Synthetic oligonucleotide
ccaaugcauaaagccagca

SEQ ID NO: 1681258 - RNA, 19 nt, Artificial Sequence
  Description of Artificial Sequence: Synthetic oligonucleotide
cgcgccacagccaguuggc

SEQ ID NO: 1681259 - RNA, 19 nt, Artificial Sequence
  Description of Artificial Sequence: Synthetic oligonucleotide
ccgaacgccugcagcgcag

SEQ ID NO: 1681260 - RNA, 19 nt, Artificial Sequence
  Description of Artificial Sequence: Synthetic oligonucleotide
gggccgagccaggucuugg

SEQ ID NO: 1681261 - RNA, 19 nt, Artificial Sequence
  Description of Artificial Sequence: Synthetic oligonucleotide
ggccgcugguauccuggcc

SEQ ID NO: 1681262 - RNA, 19 nt, Artificial Sequence
  Description of Artificial Sequence: Synthetic oligonucleotide
gggcgguuggagcccagga

SEQ ID NO: 1681263 - RNA, 19 nt, Artificial Sequence
  Description of Artificial Sequence: Synthetic oligonucleotide
gcuggcgcacgucgcacuc

SEQ ID NO: 1681264 - RNA, 19 nt, Artificial Sequence
  Description of Artificial Sequence: Synthetic oligonucleotide
cagcgucgccgaacgccug

SEQ ID NO: 1681265 - RNA, 19 nt, Artificial Sequence
  Description of Artificial Sequence: Synthetic oligonucleotide
cgcacgucgcacuccugcc

SEQ ID NO: 1681266 - RNA, 19 nt, Artificial Sequence
  Description of Artificial Sequence: Synthetic oligonucleotide
gcgaaggcacccaguguac

SEQ ID NO: 1681267 - RNA, 19 nt, Artificial Sequence
  Description of Artificial Sequence: Synthetic oligonucleotide
ggcauagggcaggcacucc

SEQ ID NO: 1681268 - RNA, 19 nt, Artificial Sequence
  Description of Artificial Sequence: Synthetic oligonucleotide
guccucccguguuuauugu

SEQ ID NO: 1681269 - RNA, 19 nt, Artificial Sequence
  Description of Artificial Sequence: Synthetic oligonucleotide
ccaugcucccgugccagac

SEQ ID NO: 1681270 - RNA, 19 nt, Artificial Sequence
  Description of Artificial Sequence: Synthetic oligonucleotide
cgauagcgggccaagaagu

SEQ ID NO: 1681271 - RNA, 19 nt, Artificial Sequence
  Description of Artificial Sequence: Synthetic oligonucleotide
ggcgcgaagggcggcggcc

SEQ ID NO: 1681272 - RNA, 19 nt, Artificial Sequence
  Description of Artificial Sequence: Synthetic oligonucleotide
aggcgcacagcggcgccga

SEQ ID NO: 1681273 - RNA, 19 nt, Artificial Sequence
  Description of Artificial Sequence: Synthetic oligonucleotide
ugcucccgugccagacguu

SEQ ID NO: 1681274 - RNA, 19 nt, Artificial Sequence
  Description of Artificial Sequence: Synthetic oligonucleotide
gccuuaagaggugacuuau

SEQ ID NO: 1681275 - RNA, 19 nt, Artificial Sequence
  Description of Artificial Sequence: Synthetic oligonucleotide
ggcgcuggcgcacgucgca

SEQ ID NO: 1681276 - RNA, 19 nt, Artificial Sequence
  Description of Artificial Sequence: Synthetic oligonucleotide
cgaaggcacccaguguacc

SEQ ID NO: 1681277 - RNA, 19 nt, Artificial Sequence
  Description of Artificial Sequence: Synthetic oligonucleotide
gccagacguugcaugcgug

SEQ ID NO: 1681278 - RNA, 19 nt, Artificial Sequence
  Description of Artificial Sequence: Synthetic oligonucleotide
ggcgccgguguagucgcgc

SEQ ID NO: 1681279 - RNA, 19 nt, Artificial Sequence
  Description of Artificial Sequence: Synthetic oligonucleotide
ccauaggcggccggacagc

SEQ ID NO: 1681280 - RNA, 19 nt, Artificial Sequence
  Description of Artificial Sequence: Synthetic oligonucleotide
ccacgcggcauagggcagg

SEQ ID NO: 1681281 - RNA, 19 nt, Artificial Sequence
  Description of Artificial Sequence: Synthetic oligonucleotide
ggggcgugguccgcgagca

SEQ ID NO: 1681282 - RNA, 19 nt, Artificial Sequence
  Description of Artificial Sequence: Synthetic oligonucleotide
gccgaacgccugcagcgca

SEQ ID NO: 1681283 - RNA, 19 nt, Artificial Sequence
  Description of Artificial Sequence: Synthetic oligonucleotide
cugcgaaggcacccagugu

SEQ ID NO: 1681284 - RNA, 19 nt, Artificial Sequence
  Description of Artificial Sequence: Synthetic oligonucleotide
cguguuuauugucucuaua

SEQ ID NO: 1681285 - RNA, 19 nt, Artificial Sequence
  Description of Artificial Sequence: Synthetic oligonucleotide
gcacgcgggacaccucgca

SEQ ID NO: 1681286 - RNA, 19 nt, Artificial Sequence
  Description of Artificial Sequence: Synthetic oligonucleotide
gcgcgcugaaagugaccug

SEQ ID NO: 1681287 - RNA, 19 nt, Artificial Sequence
  Description of Artificial Sequence: Synthetic oligonucleotide
ccagacguugcaugcgugu

SEQ ID NO: 1681288 - RNA, 19 nt, Artificial Sequence
  Description of Artificial Sequence: Synthetic oligonucleotide
ccggguggccgccaugcuc

SEQ ID NO: 1681289 - RNA, 19 nt, Artificial Sequence
  Description of Artificial Sequence: Synthetic oligonucleotide
gcggccggacagcccaggc

SEQ ID NO: 1681290 - RNA, 19 nt, Artificial Sequence
  Description of Artificial Sequence: Synthetic oligonucleotide
gcggcuucggugagggcca

SEQ ID NO: 1681291 - RNA, 19 nt, Artificial Sequence
  Description of Artificial Sequence: Synthetic oligonucleotide
gggcaucgaaagccuccca

SEQ ID NO: 1681292 - RNA, 19 nt, Artificial Sequence
  Description of Artificial Sequence: Synthetic oligonucleotide
cccguguuuauugucucua

SEQ ID NO: 1681293 - RNA, 19 nt, Artificial Sequence
  Description of Artificial Sequence: Synthetic oligonucleotide
ggcagcucggagugcugua

SEQ ID NO: 1681294 - RNA, 19 nt, Artificial Sequence
  Description of Artificial Sequence: Synthetic oligonucleotide
gucugcgaaggcacccagu

SEQ ID NO: 1681295 - RNA, 19 nt, Artificial Sequence
  Description of Artificial Sequence: Synthetic oligonucleotide
ccuguagaggcucgccaua

SEQ ID NO: 1681296 - RNA, 19 nt, Artificial Sequence
  Description of Artificial Sequence: Synthetic oligonucleotide
ggcggccggacagcccagg

SEQ ID NO: 1681297 - RNA, 19 nt, Artificial Sequence
  Description of Artificial Sequence: Synthetic oligonucleotide
cgcaccugacaagaauguc

SEQ ID NO: 1681298 - RNA, 19 nt, Artificial Sequence
  Description of Artificial Sequence: Synthetic oligonucleotide
ggcuuccgcaggaagcgcu

SEQ ID NO: 1681299 - RNA, 19 nt, Artificial Sequence
  Description of Artificial Sequence: Synthetic oligonucleotide
gcagcgucgccgaacgccu

SEQ ID NO: 1681300 - RNA, 19 nt, Artificial Sequence
  Description of Artificial Sequence: Synthetic oligonucleotide
cggacagcccaggcgcugg

SEQ ID NO: 1681301 - RNA, 19 nt, Artificial Sequence
  Description of Artificial Sequence: Synthetic oligonucleotide
gggcgugguccgcgagcag

SEQ ID NO: 1681302 - RNA, 19 nt, Artificial Sequence
  Description of Artificial Sequence: Synthetic oligonucleotide
gcggccuguagaggcucgc

SEQ ID NO: 1681303 - RNA, 19 nt, Artificial Sequence
  Description of Artificial Sequence: Synthetic oligonucleotide
ccgagggcacuggcggcgg

SEQ ID NO: 1681304 - RNA, 19 nt, Artificial Sequence
  Description of Artificial Sequence: Synthetic oligonucleotide
gcucgcgggccagcugugc

SEQ ID NO: 1681305 - RNA, 19 nt, Artificial Sequence
  Description of Artificial Sequence: Synthetic oligonucleotide
cuuccgccacguucggcuu

SEQ ID NO: 1681306 - RNA, 19 nt, Artificial Sequence
  Description of Artificial Sequence: Synthetic oligonucleotide
gcggcgccgcccagggagg

SEQ ID NO: 1681307 - RNA, 19 nt, Artificial Sequence
  Description of Artificial Sequence: Synthetic oligonucleotide
ccugacgauagcgggccaa

SEQ ID NO: 1681308 - RNA, 19 nt, Artificial Sequence
  Description of Artificial Sequence: Synthetic oligonucleotide
ccucgcaccugacaagaau

SEQ ID NO: 1681309 - RNA, 19 nt, Artificial Sequence
  Description of Artificial Sequence: Synthetic oligonucleotide
acgcggcauagggcaggca

SEQ ID NO: 1681310 - RNA, 19 nt, Artificial Sequence
  Description of Artificial Sequence: Synthetic oligonucleotide
gcggcgccgagggcacugg

SEQ ID NO: 1681311 - RNA, 19 nt, Artificial Sequence
  Description of Artificial Sequence: Synthetic oligonucleotide
ccguguuuauugucucuau

SEQ ID NO: 1681312 - RNA, 19 nt, Artificial Sequence
  Description of Artificial Sequence: Synthetic oligonucleotide
ggcuucggugagggccagc

SEQ ID NO: 1681313 - RNA, 19 nt, Artificial Sequence
  Description of Artificial Sequence: Synthetic oligonucleotide
ccacgcggcgccgcccagg

SEQ ID NO: 1681314 - RNA, 19 nt, Artificial Sequence
  Description of Artificial Sequence: Synthetic oligonucleotide
gcggccagcucgaggcaca

SEQ ID NO: 1681315 - RNA, 19 nt, Artificial Sequence
  Description of Artificial Sequence: Synthetic oligonucleotide
cgccgguguagucgcgcgc

SEQ ID NO: 1681316 - RNA, 19 nt, Artificial Sequence
  Description of Artificial Sequence: Synthetic oligonucleotide
cgccgaacgccugcagcgc

SEQ ID NO: 1681317 - RNA, 19 nt, Artificial Sequence
  Description of Artificial Sequence: Synthetic oligonucleotide
gcgcuggcgcacgucgcac

SEQ ID NO: 1681318 - RNA, 19 nt, Artificial Sequence
  Description of Artificial Sequence: Synthetic oligonucleotide
cgucgccgaacgccugcag

SEQ ID NO: 1681319 - RNA, 19 nt, Artificial Sequence
  Description of Artificial Sequence: Synthetic oligonucleotide
cgugguccgcgagcagcgg

SEQ ID NO: 1681320 - RNA, 19 nt, Artificial Sequence
  Description of Artificial Sequence: Synthetic oligonucleotide
gcgcgaagggcggcggcca

SEQ ID NO: 1681321 - RNA, 19 nt, Artificial Sequence
  Description of Artificial Sequence: Synthetic oligonucleotide
cagcgcgccacagccaguu

SEQ ID NO: 1681322 - RNA, 19 nt, Artificial Sequence
  Description of Artificial Sequence: Synthetic oligonucleotide
ccuggggcgugguccgcga

SEQ ID NO: 1681323 - RNA, 19 nt, Artificial Sequence
  Description of Artificial Sequence: Synthetic oligonucleotide
gcgccacagccaguuggca

SEQ ID NO: 1681324 - RNA, 19 nt, Artificial Sequence
  Description of Artificial Sequence: Synthetic oligonucleotide
ggcgcacgucgcacuccug

SEQ ID NO: 1681325 - RNA, 19 nt, Artificial Sequence
  Description of Artificial Sequence: Synthetic oligonucleotide
gcgucgccgaacgccugca

SEQ ID NO: 1681326 - RNA, 19 nt, Artificial Sequence
  Description of Artificial Sequence: Synthetic oligonucleotide
cgccauaggcggccggaca

SEQ ID NO: 1681327 - RNA, 19 nt, Artificial Sequence
  Description of Artificial Sequence: Synthetic oligonucleotide
gggcgccgguguagucgcg

SEQ ID NO: 1681328 - RNA, 19 nt, Artificial Sequence
  Description of Artificial Sequence: Synthetic oligonucleotide
cgcgaagggcggcggccag

SEQ ID NO: 1681329 - RNA, 19 nt, Artificial Sequence
  Description of Artificial Sequence: Synthetic oligonucleotide
ccgguguagucgcgcgcca

SEQ ID NO: 1681330 - RNA, 19 nt, Artificial Sequence
  Description of Artificial Sequence: Synthetic oligonucleotide
cggcuuccgcaggaagcgc

SEQ ID NO: 1681331 - RNA, 19 nt, Artificial Sequence
  Description of Artificial Sequence: Synthetic oligonucleotide
ccgcugguauccuggccgu

SEQ ID NO: 1681332 - RNA, 19 nt, Artificial Sequence
  Description of Artificial Sequence: Synthetic oligonucleotide
cgcgggacaccucgcaccu

SEQ ID NO: 1681333 - RNA, 19 nt, Artificial Sequence
  Description of Artificial Sequence: Synthetic oligonucleotide
cgcugguauccuggccgug

SEQ ID NO: 1681334 - RNA, 19 nt, Artificial Sequence
  Description of Artificial Sequence: Synthetic oligonucleotide
ggcggccggcuggcccagg

SEQ ID NO: 1681335 - RNA, 19 nt, Artificial Sequence
  Description of Artificial Sequence: Synthetic oligonucleotide
cggugagggccagcgucuc

SEQ ID NO: 1681336 - RNA, 19 nt, Artificial Sequence
  Description of Artificial Sequence: Synthetic oligonucleotide
cguucggcuuccgcaggaa

SEQ ID NO: 1681337 - RNA, 19 nt, Artificial Sequence
  Description of Artificial Sequence: Synthetic oligonucleotide
ccgccacguucggcuuccg

SEQ ID NO: 1681338 - RNA, 19 nt, Artificial Sequence
  Description of Artificial Sequence: Synthetic oligonucleotide
cggcuucggugagggccag

SEQ ID NO: 1681339 - RNA, 19 nt, Artificial Sequence
  Description of Artificial Sequence: Synthetic oligonucleotide
gcagcgcgccacagccagu

SEQ ID NO: 1681340 - RNA, 19 nt, Artificial Sequence
  Description of Artificial Sequence: Synthetic oligonucleotide
ccccggcccauggaagagu

SEQ ID NO: 1681341 - RNA, 19 nt, Artificial Sequence
  Description of Artificial Sequence: Synthetic oligonucleotide
cggcgccgcccagggagga

SEQ ID NO: 1681342 - RNA, 19 nt, Artificial Sequence
  Description of Artificial Sequence: Synthetic oligonucleotide
ucuaacaagagcuaguucc

SEQ ID NO: 1681343 - RNA, 19 nt, Artificial Sequence
  Description of Artificial Sequence: Synthetic oligonucleotide
auuucuuugucccauaugg

SEQ ID NO: 1681344 - RNA, 19 nt, Artificial Sequence
  Description of Artificial Sequence: Synthetic oligonucleotide
aaacuuaagacccugagaa

SEQ ID NO: 1681345 - RNA, 19 nt, Artificial Sequence
  Description of Artificial Sequence: Synthetic oligonucleotide
ugauguuuaauucaggaga

SEQ ID NO: 1681346 - RNA, 19 nt, Artificial Sequence
  Description of Artificial Sequence: Synthetic oligonucleotide
aaucccuacacucauaucu

SEQ ID NO: 1681347 - RNA, 19 nt, Artificial Sequence
  Description of Artificial Sequence: Synthetic oligonucleotide
acccauuacauucaaaggc

SEQ ID NO: 1681348 - RNA, 19 nt, Artificial Sequence
  Description of Artificial Sequence: Synthetic oligonucleotide
ugaaguucgauuaaaacuc

SEQ ID NO: 1681349 - RNA, 19 nt, Artificial Sequence
  Description of Artificial Sequence: Synthetic oligonucleotide
aaaauggauucucugaugu

SEQ ID NO: 1681350 - RNA, 19 nt, Artificial Sequence
  Description of Artificial Sequence: Synthetic oligonucleotide
uucuccaaacuuaagaccc

SEQ ID NO: 1681351 - RNA, 19 nt, Artificial Sequence
  Description of Artificial Sequence: Synthetic oligonucleotide
aacacauucccauaauucu

SEQ ID NO: 1681352 - RNA, 19 nt, Artificial Sequence
  Description of Artificial Sequence: Synthetic oligonucleotide
aguaucaucucaugugacc

SEQ ID NO: 1681353 - RNA, 19 nt, Artificial Sequence
  Description of Artificial Sequence: Synthetic oligonucleotide
uguauuuuccuauucaguc

SEQ ID NO: 1681354 - RNA, 19 nt, Artificial Sequence
  Description of Artificial Sequence: Synthetic oligonucleotide
ucuuugucccauaugggcg

SEQ ID NO: 1681355 - RNA, 19 nt, Artificial Sequence
  Description of Artificial Sequence: Synthetic oligonucleotide
auucguaggguuuucuccc

SEQ ID NO: 1681356 - RNA, 19 nt, Artificial Sequence
  Description of Artificial Sequence: Synthetic oligonucleotide
acaacugaaggucuucccc

SEQ ID NO: 1681357 - RNA, 19 nt, Artificial Sequence
  Description of Artificial Sequence: Synthetic oligonucleotide
ucagucuuccaacagagga

SEQ ID NO: 1681358 - RNA, 19 nt, Artificial Sequence
  Description of Artificial Sequence: Synthetic oligonucleotide
aagcauagggcuucucgcc

SEQ ID NO: 1681359 - RNA, 19 nt, Artificial Sequence
  Description of Artificial Sequence: Synthetic oligonucleotide
agauuacuuggucauuucc

SEQ ID NO: 1681360 - RNA, 19 nt, Artificial Sequence
  Description of Artificial Sequence: Synthetic oligonucleotide
acuuaagacccugagaaac

SEQ ID NO: 1681361 - RNA, 19 nt, Artificial Sequence
  Description of Artificial Sequence: Synthetic oligonucleotide
uaauucaggagaaacucug

SEQ ID NO: 1681362 - RNA, 19 nt, Artificial Sequence
  Description of Artificial Sequence: Synthetic oligonucleotide
uaugguuuuccccagugug

SEQ ID NO: 1681363 - RNA, 19 nt, Artificial Sequence
  Description of Artificial Sequence: Synthetic oligonucleotide
ugaauaaguguugagcucc

SEQ ID NO: 1681364 - RNA, 19 nt, Artificial Sequence
  Description of Artificial Sequence: Synthetic oligonucleotide
cuggaauucacagugaagc

SEQ ID NO: 1681365 - RNA, 19 nt, Artificial Sequence
  Description of Artificial Sequence: Synthetic oligonucleotide
ugaugaauaaguguugagc

SEQ ID NO: 1681366 - RNA, 19 nt, Artificial Sequence
  Description of Artificial Sequence: Synthetic oligonucleotide
ugucuauucagacugacuu

SEQ ID NO: 1681367 - RNA, 19 nt, Artificial Sequence
  Description of Artificial Sequence: Synthetic oligonucleotide
auaaguguugagcuccuac

SEQ ID NO: 1681368 - RNA, 19 nt, Artificial Sequence
  Description of Artificial Sequence: Synthetic oligonucleotide
ugaaacuccuguauuuucc

SEQ ID NO: 1681369 - RNA, 19 nt, Artificial Sequence
  Description of Artificial Sequence: Synthetic oligonucleotide
ucgauuaaaacucuugcua

SEQ ID NO: 1681370 - RNA, 19 nt, Artificial Sequence
  Description of Artificial Sequence: Synthetic oligonucleotide
agaaugagagcagagcuac

SEQ ID NO: 1681371 - RNA, 19 nt, Artificial Sequence
  Description of Artificial Sequence: Synthetic oligonucleotide
ucugccuacacccauuaca

SEQ ID NO: 1681372 - RNA, 19 nt, Artificial Sequence
  Description of Artificial Sequence: Synthetic oligonucleotide
ucugauggcgaacaagagc

SEQ ID NO: 1681373 - RNA, 19 nt, Artificial Sequence
  Description of Artificial Sequence: Synthetic oligonucleotide
ugaugaugaguaagggugg

SEQ ID NO: 1681374 - RNA, 19 nt, Artificial Sequence
  Description of Artificial Sequence: Synthetic oligonucleotide
aagaugugcgcucuggcug

SEQ ID NO: 1681375 - RNA, 19 nt, Artificial Sequence
  Description of Artificial Sequence: Synthetic oligonucleotide
uucuuugucccauaugggc

SEQ ID NO: 1681376 - RNA, 19 nt, Artificial Sequence
  Description of Artificial Sequence: Synthetic oligonucleotide
ugagcuauaccugaaggcc

SEQ ID NO: 1681377 - RNA, 19 nt, Artificial Sequence
  Description of Artificial Sequence: Synthetic oligonucleotide
auucagacugacuucaugu

SEQ ID NO: 1681378 - RNA, 19 nt, Artificial Sequence
  Description of Artificial Sequence: Synthetic oligonucleotide
uguuuaauucaggagaaac

SEQ ID NO: 1681379 - RNA, 19 nt, Artificial Sequence
  Description of Artificial Sequence: Synthetic oligonucleotide
cugagaaacaucaguuugg

SEQ ID NO: 1681380 - RNA, 19 nt, Artificial Sequence
  Description of Artificial Sequence: Synthetic oligonucleotide
uuucuuugucccauauggg

SEQ ID NO: 1681381 - RNA, 19 nt, Artificial Sequence
  Description of Artificial Sequence: Synthetic oligonucleotide
ucugaaguucgauuaaaac

SEQ ID NO: 1681382 - RNA, 19 nt, Artificial Sequence
  Description of Artificial Sequence: Synthetic oligonucleotide
cuguagguaaacuuccucc

SEQ ID NO: 1681383 - RNA, 19 nt, Artificial Sequence
  Description of Artificial Sequence: Synthetic oligonucleotide
aacagaggaguuccccagc

SEQ ID NO: 1681384 - RNA, 19 nt, Artificial Sequence
  Description of Artificial Sequence: Synthetic oligonucleotide
gauccucuggugcugauag

SEQ ID NO: 1681385 - RNA, 19 nt, Artificial Sequence
  Description of Artificial Sequence: Synthetic oligonucleotide
guucgauuaaaacucuugc

SEQ ID NO: 1681386 - RNA, 19 nt, Artificial Sequence
  Description of Artificial Sequence: Synthetic oligonucleotide
uuaauucaggagaaacucu

SEQ ID NO: 1681387 - RNA, 19 nt, Artificial Sequence
  Description of Artificial Sequence: Synthetic oligonucleotide
ugugaagugaggcuggaau

SEQ ID NO: 1681388 - RNA, 19 nt, Artificial Sequence
  Description of Artificial Sequence: Synthetic oligonucleotide
uucagagauuacuugguca

SEQ ID NO: 1681389 - RNA, 19 nt, Artificial Sequence
  Description of Artificial Sequence: Synthetic oligonucleotide
augaauaaguguugagcuc

SEQ ID NO: 1681390 - RNA, 19 nt, Artificial Sequence
  Description of Artificial Sequence: Synthetic oligonucleotide
agguaaacuuccuccacac

SEQ ID NO: 1681391 - RNA, 19 nt, Artificial Sequence
  Description of Artificial Sequence: Synthetic oligonucleotide
auucuugucauuucuuugu

SEQ ID NO: 1681392 - RNA, 19 nt, Artificial Sequence
  Description of Artificial Sequence: Synthetic oligonucleotide
guugagcuccuacugaagg

SEQ ID NO: 1681393 - RNA, 19 nt, Artificial Sequence
  Description of Artificial Sequence: Synthetic oligonucleotide
guaaacuuccuccacacuc

SEQ ID NO: 1681394 - RNA, 19 nt, Artificial Sequence
  Description of Artificial Sequence: Synthetic oligonucleotide
uucgauuaaaacucuugcu

SEQ ID NO: 1681395 - RNA, 19 nt, Artificial Sequence
  Description of Artificial Sequence: Synthetic oligonucleotide
aacugaaggucuuccccac

SEQ ID NO: 1681396 - RNA, 19 nt, Artificial Sequence
  Description of Artificial Sequence: Synthetic oligonucleotide
uuuauaggcuucuccaaac

SEQ ID NO: 1681397 - RNA, 19 nt, Artificial Sequence
  Description of Artificial Sequence: Synthetic oligonucleotide
uguagguaaacuuccucca

SEQ ID NO: 1681398 - RNA, 19 nt, Artificial Sequence
  Description of Artificial Sequence: Synthetic oligonucleotide
aaggucugaaguucgauua

SEQ ID NO: 1681399 - RNA, 19 nt, Artificial Sequence
  Description of Artificial Sequence: Synthetic oligonucleotide
ggauucaccauccagugag

SEQ ID NO: 1681400 - RNA, 19 nt, Artificial Sequence
  Description of Artificial Sequence: Synthetic oligonucleotide
ugucccaugggaaaucucu

SEQ ID NO: 1681401 - RNA, 19 nt, Artificial Sequence
  Description of Artificial Sequence: Synthetic oligonucleotide
uguugaguaagaugugcgc

SEQ ID NO: 1681402 - RNA, 19 nt, Artificial Sequence
  Description of Artificial Sequence: Synthetic oligonucleotide
gaauaaggucugaaguucg

SEQ ID NO: 1681403 - RNA, 19 nt, Artificial Sequence
  Description of Artificial Sequence: Synthetic oligonucleotide
agugagaacacauucccau

SEQ ID NO: 1681404 - RNA, 19 nt, Artificial Sequence
  Description of Artificial Sequence: Synthetic oligonucleotide
cugauguuuaauucaggag

SEQ ID NO: 1681405 - RNA, 19 nt, Artificial Sequence
  Description of Artificial Sequence: Synthetic oligonucleotide
ugaauaaggccugagcugu

SEQ ID NO: 1681406 - RNA, 19 nt, Artificial Sequence
  Description of Artificial Sequence: Synthetic oligonucleotide
acacucauaucucuggugu

SEQ ID NO: 1681407 - RNA, 19 nt, Artificial Sequence
  Description of Artificial Sequence: Synthetic oligonucleotide
aauucaggagaaacucugg

SEQ ID NO: 1681408 - RNA, 19 nt, Artificial Sequence
  Description of Artificial Sequence: Synthetic oligonucleotide
aaucgucccaguaucaucu

SEQ ID NO: 1681409 - RNA, 19 nt, Artificial Sequence
  Description of Artificial Sequence: Synthetic oligonucleotide
aacuccuguauuuuccuau

SEQ ID NO: 1681410 - RNA, 19 nt, Artificial Sequence
  Description of Artificial Sequence: Synthetic oligonucleotide
ugaugaguaaggguggagc

SEQ ID NO: 1681411 - RNA, 19 nt, Artificial Sequence
  Description of Artificial Sequence: Synthetic oligonucleotide
ggucuauggagcuaguucc

SEQ ID NO: 1681412 - RNA, 19 nt, Artificial Sequence
  Description of Artificial Sequence: Synthetic oligonucleotide
ugaguaaggguggagcucc

SEQ ID NO: 1681413 - RNA, 19 nt, Artificial Sequence
  Description of Artificial Sequence: Synthetic oligonucleotide
cugagcuauaccugaaggc

SEQ ID NO: 1681414 - RNA, 19 nt, Artificial Sequence
  Description of Artificial Sequence: Synthetic oligonucleotide
aaacaucaguuuggaaucg

SEQ ID NO: 1681415 - RNA, 19 nt, Artificial Sequence
  Description of Artificial Sequence: Synthetic oligonucleotide
uagguaaacuuccuccaca

SEQ ID NO: 1681416 - RNA, 19 nt, Artificial Sequence
  Description of Artificial Sequence: Synthetic oligonucleotide
auugcaagcauagggcuuc

SEQ ID NO: 1681417 - RNA, 19 nt, Artificial Sequence
  Description of Artificial Sequence: Synthetic oligonucleotide
uuccuauucagucuuccaa

SEQ ID NO: 1681418 - RNA, 19 nt, Artificial Sequence
  Description of Artificial Sequence: Synthetic oligonucleotide
uucaggagaaacucuggga

SEQ ID NO: 1681419 - RNA, 19 nt, Artificial Sequence
  Description of Artificial Sequence: Synthetic oligonucleotide
caagcauagggcuucucgc

SEQ ID NO: 1681420 - RNA, 19 nt, Artificial Sequence
  Description of Artificial Sequence: Synthetic oligonucleotide
uggucuauggagcuaguuc

SEQ ID NO: 1681421 - RNA, 19 nt, Artificial Sequence
  Description of Artificial Sequence: Synthetic oligonucleotide
uccuauucagucuuccaac

SEQ ID NO: 1681422 - RNA, 19 nt, Artificial Sequence
  Description of Artificial Sequence: Synthetic oligonucleotide
ucuugucauuucuuugucc

SEQ ID NO: 1681423 - RNA, 19 nt, Artificial Sequence
  Description of Artificial Sequence: Synthetic oligonucleotide
cugaauaaggccugagcug

SEQ ID NO: 1681424 - RNA, 19 nt, Artificial Sequence
  Description of Artificial Sequence: Synthetic oligonucleotide
aaugagagcagagcuacaa

SEQ ID NO: 1681425 - RNA, 19 nt, Artificial Sequence
  Description of Artificial Sequence: Synthetic oligonucleotide
guaucaucucaugugaccc

SEQ ID NO: 1681426 - RNA, 19 nt, Artificial Sequence
  Description of Artificial Sequence: Synthetic oligonucleotide
auaucucugguguugagua

SEQ ID NO: 1681427 - RNA, 19 nt, Artificial Sequence
  Description of Artificial Sequence: Synthetic oligonucleotide
acauucguaggguuuucuc

SEQ ID NO: 1681428 - RNA, 19 nt, Artificial Sequence
  Description of Artificial Sequence: Synthetic oligonucleotide
ucugggagaauuucugccu

SEQ ID NO: 1681429 - RNA, 19 nt, Artificial Sequence
  Description of Artificial Sequence: Synthetic oligonucleotide
cuuccaacagaggaguucc

SEQ ID NO: 1681430 - RNA, 19 nt, Artificial Sequence
  Description of Artificial Sequence: Synthetic oligonucleotide
ugaugcagaaugagagcag

SEQ ID NO: 1681431 - RNA, 19 nt, Artificial Sequence
  Description of Artificial Sequence: Synthetic oligonucleotide
cugaaguucgauuaaaacu

SEQ ID NO: 1681432 - RNA, 19 nt, Artificial Sequence
  Description of Artificial Sequence: Synthetic oligonucleotide
augagagcagagcuacaac

SEQ ID NO: 1681433 - RNA, 19 nt, Artificial Sequence
  Description of Artificial Sequence: Synthetic oligonucleotide
gauuacuuggucauuucca

SEQ ID NO: 1681434 - RNA, 19 nt, Artificial Sequence
  Description of Artificial Sequence: Synthetic oligonucleotide
aauaaggccugagcuguag

SEQ ID NO: 1681435 - RNA, 19 nt, Artificial Sequence
  Description of Artificial Sequence: Synthetic oligonucleotide
agagcugagcuauaccuga

SEQ ID NO: 1681436 - RNA, 19 nt, Artificial Sequence
  Description of Artificial Sequence: Synthetic oligonucleotide
aguaagaugugcgcucugg

SEQ ID NO: 1681437 - RNA, 19 nt, Artificial Sequence
  Description of Artificial Sequence: Synthetic oligonucleotide
auucagucuuccaacagag

SEQ ID NO: 1681438 - RNA, 19 nt, Artificial Sequence
  Description of Artificial Sequence: Synthetic oligonucleotide
uucauaugguuuuccccag

SEQ ID NO: 1681439 - RNA, 19 nt, Artificial Sequence
  Description of Artificial Sequence: Synthetic oligonucleotide
uucagucuuccaacagagg

SEQ ID NO: 1681440 - RNA, 19 nt, Artificial Sequence
  Description of Artificial Sequence: Synthetic oligonucleotide
uggugaugaauaaguguug

SEQ ID NO: 1681441 - RNA, 19 nt, Artificial Sequence
  Description of Artificial Sequence: Synthetic oligonucleotide
uacuuggucauuuccaguu

SEQ ID NO: 1681442 - RNA, 19 nt, Artificial Sequence
  Description of Artificial Sequence: Synthetic oligonucleotide
uacacucauaucucuggug

SEQ ID NO: 1681443 - RNA, 19 nt, Artificial Sequence
  Description of Artificial Sequence: Synthetic oligonucleotide
ugauagaggugugagcucu

SEQ ID NO: 1681444 - RNA, 19 nt, Artificial Sequence
  Description of Artificial Sequence: Synthetic oligonucleotide
uuuuccuauucagucuucc

SEQ ID NO: 1681445 - RNA, 19 nt, Artificial Sequence
  Description of Artificial Sequence: Synthetic oligonucleotide
uguugagcuccuacugaag

SEQ ID NO: 1681446 - RNA, 19 nt, Artificial Sequence
  Description of Artificial Sequence: Synthetic oligonucleotide
guguugaguaagaugugcg

SEQ ID NO: 1681447 - RNA, 19 nt, Artificial Sequence
  Description of Artificial Sequence: Synthetic oligonucleotide
auaugggcgagcuuucccu

SEQ ID NO: 1681448 - RNA, 19 nt, Artificial Sequence
  Description of Artificial Sequence: Synthetic oligonucleotide
aacucugggagaauuucug

SEQ ID NO: 1681449 - RNA, 19 nt, Artificial Sequence
  Description of Artificial Sequence: Synthetic oligonucleotide
uggucauuuccaguuuugg

SEQ ID NO: 1681450 - RNA, 19 nt, Artificial Sequence
  Description of Artificial Sequence: Synthetic oligonucleotide
uggaauucacagugaagcu

SEQ ID NO: 1681451 - RNA, 19 nt, Artificial Sequence
  Description of Artificial Sequence: Synthetic oligonucleotide
uucccauaauucuccagca

SEQ ID NO: 1681452 - RNA, 19 nt, Artificial Sequence
  Description of Artificial Sequence: Synthetic oligonucleotide
cuauggagcuaguuccagg

SEQ ID NO: 1681453 - RNA, 19 nt, Artificial Sequence
  Description of Artificial Sequence: Synthetic oligonucleotide
cagucuuccaacagaggag

SEQ ID NO: 1681454 - RNA, 19 nt, Artificial Sequence
  Description of Artificial Sequence: Synthetic oligonucleotide
cugugcagguuccaaacgc

SEQ ID NO: 1681455 - RNA, 19 nt, Artificial Sequence
  Description of Artificial Sequence: Synthetic oligonucleotide
uaucaucucaugugacccc

SEQ ID NO: 1681456 - RNA, 19 nt, Artificial Sequence
  Description of Artificial Sequence: Synthetic oligonucleotide
aguucgauuaaaacucuug

SEQ ID NO: 1681457 - RNA, 19 nt, Artificial Sequence
  Description of Artificial Sequence: Synthetic oligonucleotide
cugauggcgaacaagagcu

SEQ ID NO: 1681458 - RNA, 19 nt, Artificial Sequence
  Description of Artificial Sequence: Synthetic oligonucleotide
aacuuaagacccugagaaa

SEQ ID NO: 1681459 - RNA, 19 nt, Artificial Sequence
  Description of Artificial Sequence: Synthetic oligonucleotide
ugaccccaugccuucagag

SEQ ID NO: 1681460 - RNA, 19 nt, Artificial Sequence
  Description of Artificial Sequence: Synthetic oligonucleotide
uuuccuauucagucuucca

SEQ ID NO: 1681461 - RNA, 19 nt, Artificial Sequence
  Description of Artificial Sequence: Synthetic oligonucleotide
ucagacugacuucauguuu

SEQ ID NO: 1681462 - RNA, 19 nt, Artificial Sequence
  Description of Artificial Sequence: Synthetic oligonucleotide
cauaugguuuuccccagug

SEQ ID NO: 1681463 - RNA, 19 nt, Artificial Sequence
  Description of Artificial Sequence: Synthetic oligonucleotide
gugaugaauaaguguugag

SEQ ID NO: 1681464 - RNA, 19 nt, Artificial Sequence
  Description of Artificial Sequence: Synthetic oligonucleotide
uggucuaacaagagcuagu

SEQ ID NO: 1681465 - RNA, 19 nt, Artificial Sequence
  Description of Artificial Sequence: Synthetic oligonucleotide
gaaaucucugaugugaagu

SEQ ID NO: 1681466 - RNA, 19 nt, Artificial Sequence
  Description of Artificial Sequence: Synthetic oligonucleotide
auuaaaacucuugcuacau

SEQ ID NO: 1681467 - RNA, 19 nt, Artificial Sequence
  Description of Artificial Sequence: Synthetic oligonucleotide
uuucccucaacugucacuu

SEQ ID NO: 1681468 - RNA, 19 nt, Artificial Sequence
  Description of Artificial Sequence: Synthetic oligonucleotide
gaaacucugggagaauuuc

SEQ ID NO: 1681469 - RNA, 19 nt, Artificial Sequence
  Description of Artificial Sequence: Synthetic oligonucleotide
uucuugucauuucuuuguc

SEQ ID NO: 1681470 - RNA, 19 nt, Artificial Sequence
  Description of Artificial Sequence: Synthetic oligonucleotide
uaaggucugaaguucgauu

SEQ ID NO: 1681471 - RNA, 19 nt, Artificial Sequence
  Description of Artificial Sequence: Synthetic oligonucleotide
cuucauguuuauaggcuuc

SEQ ID NO: 1681472 - RNA, 19 nt, Artificial Sequence
  Description of Artificial Sequence: Synthetic oligonucleotide
ugccuucagagauuacuug

SEQ ID NO: 1681473 - RNA, 19 nt, Artificial Sequence
  Description of Artificial Sequence: Synthetic oligonucleotide
cuaacaagagcuaguucca

SEQ ID NO: 1681474 - RNA, 19 nt, Artificial Sequence
  Description of Artificial Sequence: Synthetic oligonucleotide
ucaugugaccccaugccuu

SEQ ID NO: 1681475 - RNA, 19 nt, Artificial Sequence
  Description of Artificial Sequence: Synthetic oligonucleotide
cuuaagacccugagaaaca

SEQ ID NO: 1681476 - RNA, 19 nt, Artificial Sequence
  Description of Artificial Sequence: Synthetic oligonucleotide
uuaaaacucuugcuacauu

SEQ ID NO: 1681477 - RNA, 19 nt, Artificial Sequence
  Description of Artificial Sequence: Synthetic oligonucleotide
aaacucugggagaauuucu

SEQ ID NO: 1681478 - RNA, 19 nt, Artificial Sequence
  Description of Artificial Sequence: Synthetic oligonucleotide
ucuauggagcuaguuccag

SEQ ID NO: 1681479 - RNA, 19 nt, Artificial Sequence
  Description of Artificial Sequence: Synthetic oligonucleotide
uuggugaaacuccuguauu

SEQ ID NO: 1681480 - RNA, 19 nt, Artificial Sequence
  Description of Artificial Sequence: Synthetic oligonucleotide
guucccaaacucauuauuc

SEQ ID NO: 1681481 - RNA, 19 nt, Artificial Sequence
  Description of Artificial Sequence: Synthetic oligonucleotide
cauaugggcgagcuuuccc

SEQ ID NO: 1681482 - RNA, 19 nt, Artificial Sequence
  Description of Artificial Sequence: Synthetic oligonucleotide
ugcugauagaggugugagc

SEQ ID NO: 1681483 - RNA, 19 nt, Artificial Sequence
  Description of Artificial Sequence: Synthetic oligonucleotide
gaaucgucccaguaucauc

SEQ ID NO: 1681484 - RNA, 19 nt, Artificial Sequence
  Description of Artificial Sequence: Synthetic oligonucleotide
augguuuuccccagugugg

SEQ ID NO: 1681485 - RNA, 19 nt, Artificial Sequence
  Description of Artificial Sequence: Synthetic oligonucleotide
caugggaaaucucugaugu

SEQ ID NO: 1681486 - RNA, 19 nt, Artificial Sequence
  Description of Artificial Sequence: Synthetic oligonucleotide
aauaaggucugaaguucga

SEQ ID NO: 1681487 - RNA, 19 nt, Artificial Sequence
  Description of Artificial Sequence: Synthetic oligonucleotide
gacacgggcaugguggugc

SEQ ID NO: 1681488 - RNA, 19 nt, Artificial Sequence
  Description of Artificial Sequence: Synthetic oligonucleotide
acucauaucucugguguug

SEQ ID NO: 1681489 - RNA, 19 nt, Artificial Sequence
  Description of Artificial Sequence: Synthetic oligonucleotide
guuuauaggcuucuccaaa

SEQ ID NO: 1681490 - RNA, 19 nt, Artificial Sequence
  Description of Artificial Sequence: Synthetic oligonucleotide
auaugguuuuccccagugu

SEQ ID NO: 1681491 - RNA, 19 nt, Artificial Sequence
  Description of Artificial Sequence: Synthetic oligonucleotide
uucauguuuauaggcuucu

SEQ ID NO: 1681492 - RNA, 19 nt, Artificial Sequence
  Description of Artificial Sequence: Synthetic oligonucleotide
gaugaguaaggguggagcu

SEQ ID NO: 1681493 - RNA, 19 nt, Artificial Sequence
  Description of Artificial Sequence: Synthetic oligonucleotide
gaauucacagugaagcugu

SEQ ID NO: 1681494 - RNA, 19 nt, Artificial Sequence
  Description of Artificial Sequence: Synthetic oligonucleotide
uccaacagaggaguucccc

SEQ ID NO: 1681495 - RNA, 19 nt, Artificial Sequence
  Description of Artificial Sequence: Synthetic oligonucleotide
uggugaaacuccuguauuu

SEQ ID NO: 1681496 - RNA, 19 nt, Artificial Sequence
  Description of Artificial Sequence: Synthetic oligonucleotide
cuuguguggucuguguccc

SEQ ID NO: 1681497 - RNA, 19 nt, Artificial Sequence
  Description of Artificial Sequence: Synthetic oligonucleotide
agcugagcuauaccugaag

SEQ ID NO: 1681498 - RNA, 19 nt, Artificial Sequence
  Description of Artificial Sequence: Synthetic oligonucleotide
ucacugcacucauaggggu

SEQ ID NO: 1681499 - RNA, 19 nt, Artificial Sequence
  Description of Artificial Sequence: Synthetic oligonucleotide
cauuucuuugucccauaug

SEQ ID NO: 1681500 - RNA, 19 nt, Artificial Sequence
  Description of Artificial Sequence: Synthetic oligonucleotide
uggaaucgucccaguauca

SEQ ID NO: 1681501 - RNA, 19 nt, Artificial Sequence
  Description of Artificial Sequence: Synthetic oligonucleotide
cuacaacugaaggucuucc

SEQ ID NO: 1681502 - RNA, 19 nt, Artificial Sequence
  Description of Artificial Sequence: Synthetic oligonucleotide
ucccaugggaaaucucuga

SEQ ID NO: 1681503 - RNA, 19 nt, Artificial Sequence
  Description of Artificial Sequence: Synthetic oligonucleotide
ucccauaugggcgagcuuu

SEQ ID NO: 1681504 - RNA, 19 nt, Artificial Sequence
  Description of Artificial Sequence: Synthetic oligonucleotide
guagguaaacuuccuccac

SEQ ID NO: 1681505 - RNA, 19 nt, Artificial Sequence
  Description of Artificial Sequence: Synthetic oligonucleotide
cucaacugucacuugguga

SEQ ID NO: 1681506 - RNA, 19 nt, Artificial Sequence
  Description of Artificial Sequence: Synthetic oligonucleotide
uuaagacccugagaaacau

SEQ ID NO: 1681507 - RNA, 19 nt, Artificial Sequence
  Description of Artificial Sequence: Synthetic oligonucleotide
accccaugccuucagagau

SEQ ID NO: 1681508 - RNA, 19 nt, Artificial Sequence
  Description of Artificial Sequence: Synthetic oligonucleotide
ugugaccccaugccuucag

SEQ ID NO: 1681509 - RNA, 19 nt, Artificial Sequence
  Description of Artificial Sequence: Synthetic oligonucleotide
uggauucaccauccaguga

SEQ ID NO: 1681510 - RNA, 19 nt, Artificial Sequence
  Description of Artificial Sequence: Synthetic oligonucleotide
ggaauucacagugaagcug

SEQ ID NO: 1681511 - RNA, 19 nt, Artificial Sequence
  Description of Artificial Sequence: Synthetic oligonucleotide
uucagacugacuucauguu

SEQ ID NO: 1681512 - RNA, 19 nt, Artificial Sequence
  Description of Artificial Sequence: Synthetic oligonucleotide
ugguuuuccccagugugga

SEQ ID NO: 1681513 - RNA, 19 nt, Artificial Sequence
  Description of Artificial Sequence: Synthetic oligonucleotide
ucauaugguuuuccccagu

SEQ ID NO: 1681514 - RNA, 19 nt, Artificial Sequence
  Description of Artificial Sequence: Synthetic oligonucleotide
uucguaggguuuucucccc

SEQ ID NO: 1681515 - RNA, 19 nt, Artificial Sequence
  Description of Artificial Sequence: Synthetic oligonucleotide
cucugauggcgaacaagag

SEQ ID NO: 1681516 - RNA, 19 nt, Artificial Sequence
  Description of Artificial Sequence: Synthetic oligonucleotide
aacaucaguuuggaaucgu

SEQ ID NO: 1681517 - RNA, 19 nt, Artificial Sequence
  Description of Artificial Sequence: Synthetic oligonucleotide
acaucaguuuggaaucguc

SEQ ID NO: 1681518 - RNA, 19 nt, Artificial Sequence
  Description of Artificial Sequence: Synthetic oligonucleotide
gucuauucagacugacuuc

SEQ ID NO: 1681519 - RNA, 19 nt, Artificial Sequence
  Description of Artificial Sequence: Synthetic oligonucleotide
uuucugccuacacccauua

SEQ ID NO: 1681520 - RNA, 19 nt, Artificial Sequence
  Description of Artificial Sequence: Synthetic oligonucleotide
ggcuucuccaaacuuaaga

SEQ ID NO: 1681521 - RNA, 19 nt, Artificial Sequence
  Description of Artificial Sequence: Synthetic oligonucleotide
aucccuacacucauaucuc

SEQ ID NO: 1681522 - RNA, 19 nt, Artificial Sequence
  Description of Artificial Sequence: Synthetic oligonucleotide
guaaggguggagcuccaac

SEQ ID NO: 1681523 - RNA, 19 nt, Artificial Sequence
  Description of Artificial Sequence: Synthetic oligonucleotide
gugaaacuccuguauuuuc

SEQ ID NO: 1681524 - RNA, 19 nt, Artificial Sequence
  Description of Artificial Sequence: Synthetic oligonucleotide
agaugugcgcucuggcuga

SEQ ID NO: 1681525 - RNA, 19 nt, Artificial Sequence
  Description of Artificial Sequence: Synthetic oligonucleotide
cccaguaucaucucaugug

SEQ ID NO: 1681526 - RNA, 19 nt, Artificial Sequence
  Description of Artificial Sequence: Synthetic oligonucleotide
cgauuaaaacucuugcuac

SEQ ID NO: 1681527 - RNA, 19 nt, Artificial Sequence
  Description of Artificial Sequence: Synthetic oligonucleotide
cuggugaugaauaaguguu

SEQ ID NO: 1681528 - RNA, 19 nt, Artificial Sequence
  Description of Artificial Sequence: Synthetic oligonucleotide
cccaaacucauuauucuug

SEQ ID NO: 1681529 - RNA, 19 nt, Artificial Sequence
  Description of Artificial Sequence: Synthetic oligonucleotide
ucccaaacucauuauucuu

SEQ ID NO: 1681530 - RNA, 19 nt, Artificial Sequence
  Description of Artificial Sequence: Synthetic oligonucleotide
caguaucaucucaugugac

SEQ ID NO: 1681531 - RNA, 19 nt, Artificial Sequence
  Description of Artificial Sequence: Synthetic oligonucleotide
ggaaaucucugaugugaag

SEQ ID NO: 1681532 - RNA, 19 nt, Artificial Sequence
  Description of Artificial Sequence: Synthetic oligonucleotide
gaaacuccuguauuuuccu

SEQ ID NO: 1681533 - RNA, 19 nt, Artificial Sequence
  Description of Artificial Sequence: Synthetic oligonucleotide
ugucccauaugggcgagcu

SEQ ID NO: 1681534 - RNA, 19 nt, Artificial Sequence
  Description of Artificial Sequence: Synthetic oligonucleotide
ucgucccaguaucaucuca

SEQ ID NO: 1681535 - RNA, 19 nt, Artificial Sequence
  Description of Artificial Sequence: Synthetic oligonucleotide
cuuugucccauaugggcga

SEQ ID NO: 1681536 - RNA, 19 nt, Artificial Sequence
  Description of Artificial Sequence: Synthetic oligonucleotide
ccaaacuuaagacccugag

SEQ ID NO: 1681537 - RNA, 19 nt, Artificial Sequence
  Description of Artificial Sequence: Synthetic oligonucleotide
ucccauaauucuccagcau

SEQ ID NO: 1681538 - RNA, 19 nt, Artificial Sequence
  Description of Artificial Sequence: Synthetic oligonucleotide
ugguauucuuucuggugau

SEQ ID NO: 1681539 - RNA, 19 nt, Artificial Sequence
  Description of Artificial Sequence: Synthetic oligonucleotide
gacuucauguuuauaggcu

SEQ ID NO: 1681540 - RNA, 19 nt, Artificial Sequence
  Description of Artificial Sequence: Synthetic oligonucleotide
caaacucauuauucuuguc

SEQ ID NO: 1681541 - RNA, 19 nt, Artificial Sequence
  Description of Artificial Sequence: Synthetic oligonucleotide
gugcugauagaggugugag

SEQ ID NO: 1681542 - RNA, 19 nt, Artificial Sequence
  Description of Artificial Sequence: Synthetic oligonucleotide
auuauucuugucauuucuu

SEQ ID NO: 1681543 - RNA, 19 nt, Artificial Sequence
  Description of Artificial Sequence: Synthetic oligonucleotide
acagugaagcuguucccaa

SEQ ID NO: 1681544 - RNA, 19 nt, Artificial Sequence
  Description of Artificial Sequence: Synthetic oligonucleotide
cagacugacuucauguuua

SEQ ID NO: 1681545 - RNA, 19 nt, Artificial Sequence
  Description of Artificial Sequence: Synthetic oligonucleotide
gacccugagaaacaucagu

SEQ ID NO: 1681546 - RNA, 19 nt, Artificial Sequence
  Description of Artificial Sequence: Synthetic oligonucleotide
ugaauccucugauggcgaa

SEQ ID NO: 1681547 - RNA, 19 nt, Artificial Sequence
  Description of Artificial Sequence: Synthetic oligonucleotide
ucugugucccaugggaaau

SEQ ID NO: 1681548 - RNA, 19 nt, Artificial Sequence
  Description of Artificial Sequence: Synthetic oligonucleotide
aucaucucaugugacccca

SEQ ID NO: 1681549 - RNA, 19 nt, Artificial Sequence
  Description of Artificial Sequence: Synthetic oligonucleotide
uaucucugguguugaguaa

SEQ ID NO: 1681550 - RNA, 19 nt, Artificial Sequence
  Description of Artificial Sequence: Synthetic oligonucleotide
gcagguuccaaacgcuucc

SEQ ID NO: 1681551 - RNA, 19 nt, Artificial Sequence
  Description of Artificial Sequence: Synthetic oligonucleotide
ucguaggguuuucucccca

SEQ ID NO: 1681552 - RNA, 19 nt, Artificial Sequence
  Description of Artificial Sequence: Synthetic oligonucleotide
gaccccaugccuucagaga

SEQ ID NO: 1681553 - RNA, 19 nt, Artificial Sequence
  Description of Artificial Sequence: Synthetic oligonucleotide
uaugggcgagcuuucccuc

SEQ ID NO: 1681554 - RNA, 19 nt, Artificial Sequence
  Description of Artificial Sequence: Synthetic oligonucleotide
ggucauuuccaguuuugga

SEQ ID NO: 1681555 - RNA, 19 nt, Artificial Sequence
  Description of Artificial Sequence: Synthetic oligonucleotide
gcuaguuccaggacacggg

SEQ ID NO: 1681556 - RNA, 19 nt, Artificial Sequence
  Description of Artificial Sequence: Synthetic oligonucleotide
guguugagcuccuacugaa

SEQ ID NO: 1681557 - RNA, 19 nt, Artificial Sequence
  Description of Artificial Sequence: Synthetic oligonucleotide
gucuaacaagagcuaguuc

SEQ ID NO: 1681558 - RNA, 19 nt, Artificial Sequence
  Description of Artificial Sequence: Synthetic oligonucleotide
cugauagaggugugagcuc

SEQ ID NO: 1681559 - RNA, 19 nt, Artificial Sequence
  Description of Artificial Sequence: Synthetic oligonucleotide
ggugaugaauaaguguuga

SEQ ID NO: 1681560 - RNA, 19 nt, Artificial Sequence
  Description of Artificial Sequence: Synthetic oligonucleotide
auaaggucugaaguucgau

SEQ ID NO: 1681561 - RNA, 19 nt, Artificial Sequence
  Description of Artificial Sequence: Synthetic oligonucleotide
uuugucccauaugggcgag

SEQ ID NO: 1681562 - RNA, 19 nt, Artificial Sequence
  Description of Artificial Sequence: Synthetic oligonucleotide
cuguauuuuccuauucagu

SEQ ID NO: 1681563 - RNA, 19 nt, Artificial Sequence
  Description of Artificial Sequence: Synthetic oligonucleotide
acucauuauucuugucauu

SEQ ID NO: 1681564 - RNA, 19 nt, Artificial Sequence
  Description of Artificial Sequence: Synthetic oligonucleotide
ucccuguagaggucccucu

SEQ ID NO: 1681565 - RNA, 19 nt, Artificial Sequence
  Description of Artificial Sequence: Synthetic oligonucleotide
cagagcuacaacugaaggu

SEQ ID NO: 1681566 - RNA, 19 nt, Artificial Sequence
  Description of Artificial Sequence: Synthetic oligonucleotide
gaauccucugauggcgaac

SEQ ID NO: 1681567 - RNA, 19 nt, Artificial Sequence
  Description of Artificial Sequence: Synthetic oligonucleotide
agugaggcuggaauucaca

SEQ ID NO: 1681568 - RNA, 19 nt, Artificial Sequence
  Description of Artificial Sequence: Synthetic oligonucleotide
caggagaaacucugggaga

SEQ ID NO: 1681569 - RNA, 19 nt, Artificial Sequence
  Description of Artificial Sequence: Synthetic oligonucleotide
agacugacuucauguuuau

SEQ ID NO: 1681570 - RNA, 19 nt, Artificial Sequence
  Description of Artificial Sequence: Synthetic oligonucleotide
ucauguuuauaggcuucuc

SEQ ID NO: 1681571 - RNA, 19 nt, Artificial Sequence
  Description of Artificial Sequence: Synthetic oligonucleotide
gauagaggugugagcucug

SEQ ID NO: 1681572 - RNA, 19 nt, Artificial Sequence
  Description of Artificial Sequence: Synthetic oligonucleotide
uguguggucugugucccau

SEQ ID NO: 1681573 - RNA, 19 nt, Artificial Sequence
  Description of Artificial Sequence: Synthetic oligonucleotide
uucugccuacacccauuac

SEQ ID NO: 1681574 - RNA, 19 nt, Artificial Sequence
  Description of Artificial Sequence: Synthetic oligonucleotide
cagaaugagagcagagcua

SEQ ID NO: 1681575 - RNA, 19 nt, Artificial Sequence
  Description of Artificial Sequence: Synthetic oligonucleotide
aaguucgauuaaaacucuu

SEQ ID NO: 1681576 - RNA, 19 nt, Artificial Sequence
  Description of Artificial Sequence: Synthetic oligonucleotide
caugccuucagagauuacu

SEQ ID NO: 1681577 - RNA, 19 nt, Artificial Sequence
  Description of Artificial Sequence: Synthetic oligonucleotide
gaaguucgauuaaaacucu

SEQ ID NO: 1681578 - RNA, 19 nt, Artificial Sequence
  Description of Artificial Sequence: Synthetic oligonucleotide
uggugcugauagaggugug

SEQ ID NO: 1681579 - RNA, 19 nt, Artificial Sequence
  Description of Artificial Sequence: Synthetic oligonucleotide
ccaguaucaucucauguga

SEQ ID NO: 1681580 - RNA, 19 nt, Artificial Sequence
  Description of Artificial Sequence: Synthetic oligonucleotide
aauaaguguugagcuccua

SEQ ID NO: 1681581 - RNA, 19 nt, Artificial Sequence
  Description of Artificial Sequence: Synthetic oligonucleotide
caaucccuacacucauauc

SEQ ID NO: 1681582 - RNA, 19 nt, Artificial Sequence
  Description of Artificial Sequence: Synthetic oligonucleotide
aggaguuccccagcugucu

SEQ ID NO: 1681583 - RNA, 19 nt, Artificial Sequence
  Description of Artificial Sequence: Synthetic oligonucleotide
augggcgagcuuucccuca

SEQ ID NO: 1681584 - RNA, 19 nt, Artificial Sequence
  Description of Artificial Sequence: Synthetic oligonucleotide
gucugaaguucgauuaaaa

SEQ ID NO: 1681585 - RNA, 19 nt, Artificial Sequence
  Description of Artificial Sequence: Synthetic oligonucleotide
gcgagcuuucccucaacug

SEQ ID NO: 1681586 - RNA, 19 nt, Artificial Sequence
  Description of Artificial Sequence: Synthetic oligonucleotide
cacuuggugaaacuccugu

SEQ ID NO: 1681587 - RNA, 19 nt, Artificial Sequence
  Description of Artificial Sequence: Synthetic oligonucleotide
gaugugaagugaggcugga

SEQ ID NO: 1681588 - RNA, 19 nt, Artificial Sequence
  Description of Artificial Sequence: Synthetic oligonucleotide
cugccuacacccauuacau

SEQ ID NO: 1681589 - RNA, 19 nt, Artificial Sequence
  Description of Artificial Sequence: Synthetic oligonucleotide
ucaucucaugugaccccau

SEQ ID NO: 1681590 - RNA, 19 nt, Artificial Sequence
  Description of Artificial Sequence: Synthetic oligonucleotide
uucccucaacugucacuug

SEQ ID NO: 1681591 - RNA, 19 nt, Artificial Sequence
  Description of Artificial Sequence: Synthetic oligonucleotide
gauucaccauccagugaga

SEQ ID NO: 1681592 - RNA, 19 nt, Artificial Sequence
  Description of Artificial Sequence: Synthetic oligonucleotide
ccaacugaaggucuuccca

SEQ ID NO: 1681593 - RNA, 19 nt, Artificial Sequence
  Description of Artificial Sequence: Synthetic oligonucleotide
gaggaguuccccagcuguc

SEQ ID NO: 1681594 - RNA, 19 nt, Artificial Sequence
  Description of Artificial Sequence: Synthetic oligonucleotide
cugagcuguagguaaacuu

SEQ ID NO: 1681595 - RNA, 19 nt, Artificial Sequence
  Description of Artificial Sequence: Synthetic oligonucleotide
cccauuacauucaaaggcu

SEQ ID NO: 1681596 - RNA, 19 nt, Artificial Sequence
  Description of Artificial Sequence: Synthetic oligonucleotide
ggcuggaauucacagugaa

SEQ ID NO: 1681597 - RNA, 19 nt, Artificial Sequence
  Description of Artificial Sequence: Synthetic oligonucleotide
ccuacacccauuacauuca

SEQ ID NO: 1681598 - RNA, 19 nt, Artificial Sequence
  Description of Artificial Sequence: Synthetic oligonucleotide
uuguguggucuguguccca

SEQ ID NO: 1681599 - RNA, 19 nt, Artificial Sequence
  Description of Artificial Sequence: Synthetic oligonucleotide
cucaugugaccccaugccu

SEQ ID NO: 1681600 - RNA, 19 nt, Artificial Sequence
  Description of Artificial Sequence: Synthetic oligonucleotide
gguauucuuucuggugaug

SEQ ID NO: 1681601 - RNA, 19 nt, Artificial Sequence
  Description of Artificial Sequence: Synthetic oligonucleotide
cccacaaucccuacacuca

SEQ ID NO: 1681602 - RNA, 19 nt, Artificial Sequence
  Description of Artificial Sequence: Synthetic oligonucleotide
gaaugagagcagagcuaca

SEQ ID NO: 1681603 - RNA, 19 nt, Artificial Sequence
  Description of Artificial Sequence: Synthetic oligonucleotide
cauaucucugguguugagu

SEQ ID NO: 1681604 - RNA, 19 nt, Artificial Sequence
  Description of Artificial Sequence: Synthetic oligonucleotide
cccuacacucauaucucug

SEQ ID NO: 1681605 - RNA, 19 nt, Artificial Sequence
  Description of Artificial Sequence: Synthetic oligonucleotide
gaauaaguguugagcuccu

SEQ ID NO: 1681606 - RNA, 19 nt, Artificial Sequence
  Description of Artificial Sequence: Synthetic oligonucleotide
agcuauaccugaaggccuu

SEQ ID NO: 1681607 - RNA, 19 nt, Artificial Sequence
  Description of Artificial Sequence: Synthetic oligonucleotide
gugugguauucuuucuggu

SEQ ID NO: 1681608 - RNA, 19 nt, Artificial Sequence
  Description of Artificial Sequence: Synthetic oligonucleotide
ugccuacacccauuacauu

SEQ ID NO: 1681609 - RNA, 19 nt, Artificial Sequence
  Description of Artificial Sequence: Synthetic oligonucleotide
ggugcugauagagguguga

SEQ ID NO: 1681610 - RNA, 19 nt, Artificial Sequence
  Description of Artificial Sequence: Synthetic oligonucleotide
gcuacaacugaaggucuuc

SEQ ID NO: 1681611 - RNA, 19 nt, Artificial Sequence
  Description of Artificial Sequence: Synthetic oligonucleotide
ggcgaacaagagcugagcu

SEQ ID NO: 1681612 - RNA, 19 nt, Artificial Sequence
  Description of Artificial Sequence: Synthetic oligonucleotide
gcgaacaagagcugagcua

SEQ ID NO: 1681613 - RNA, 19 nt, Artificial Sequence
  Description of Artificial Sequence: Synthetic oligonucleotide
cugugucccaugggaaauc

SEQ ID NO: 1681614 - RNA, 19 nt, Artificial Sequence
  Description of Artificial Sequence: Synthetic oligonucleotide
uugucccauaugggcgagc

SEQ ID NO: 1681615 - RNA, 19 nt, Artificial Sequence
  Description of Artificial Sequence: Synthetic oligonucleotide
ccaaacucauuauucuugu

SEQ ID NO: 1681616 - RNA, 19 nt, Artificial Sequence
  Description of Artificial Sequence: Synthetic oligonucleotide
aguuccccagcugucuauu

SEQ ID NO: 1681617 - RNA, 19 nt, Artificial Sequence
  Description of Artificial Sequence: Synthetic oligonucleotide
gugaccccaugccuucaga

SEQ ID NO: 1681618 - RNA, 19 nt, Artificial Sequence
  Description of Artificial Sequence: Synthetic oligonucleotide
aguaaggguggagcuccaa

SEQ ID NO: 1681619 - RNA, 19 nt, Artificial Sequence
  Description of Artificial Sequence: Synthetic oligonucleotide
agcuacaacugaaggucuu

SEQ ID NO: 1681620 - RNA, 19 nt, Artificial Sequence
  Description of Artificial Sequence: Synthetic oligonucleotide
agcugucuauucagacuga

SEQ ID NO: 1681621 - RNA, 19 nt, Artificial Sequence
  Description of Artificial Sequence: Synthetic oligonucleotide
gggagaauuucugccuaca

SEQ ID NO: 1681622 - RNA, 19 nt, Artificial Sequence
  Description of Artificial Sequence: Synthetic oligonucleotide
gggaaaucucugaugugaa

SEQ ID NO: 1681623 - RNA, 19 nt, Artificial Sequence
  Description of Artificial Sequence: Synthetic oligonucleotide
augugaagugaggcuggaa

SEQ ID NO: 1681624 - RNA, 19 nt, Artificial Sequence
  Description of Artificial Sequence: Synthetic oligonucleotide
cacaaucccuacacucaua

SEQ ID NO: 1681625 - RNA, 19 nt, Artificial Sequence
  Description of Artificial Sequence: Synthetic oligonucleotide
gaauaaggccugagcugua

SEQ ID NO: 1681626 - RNA, 19 nt, Artificial Sequence
  Description of Artificial Sequence: Synthetic oligonucleotide
aggcuggaauucacaguga

SEQ ID NO: 1681627 - RNA, 19 nt, Artificial Sequence
  Description of Artificial Sequence: Synthetic oligonucleotide
gagcugagcuauaccugaa

SEQ ID NO: 1681628 - RNA, 19 nt, Artificial Sequence
  Description of Artificial Sequence: Synthetic oligonucleotide
gguaaacuuccuccacacu

SEQ ID NO: 1681629 - RNA, 19 nt, Artificial Sequence
  Description of Artificial Sequence: Synthetic oligonucleotide
ggucuaacaagagcuaguu

SEQ ID NO: 1681630 - RNA, 19 nt, Artificial Sequence
  Description of Artificial Sequence: Synthetic oligonucleotide
gucuuccccacaaucccua

SEQ ID NO: 1681631 - RNA, 19 nt, Artificial Sequence
  Description of Artificial Sequence: Synthetic oligonucleotide
cagguuccaaacgcuucca

SEQ ID NO: 1681632 - RNA, 19 nt, Artificial Sequence
  Description of Artificial Sequence: Synthetic oligonucleotide
gaguuccccagcugucuau

SEQ ID NO: 1681633 - RNA, 19 nt, Artificial Sequence
  Description of Artificial Sequence: Synthetic oligonucleotide
cccuguagaggucccucug

SEQ ID NO: 1681634 - RNA, 19 nt, Artificial Sequence
  Description of Artificial Sequence: Synthetic oligonucleotide
agcuguucccaaacucauu

SEQ ID NO: 1681635 - RNA, 19 nt, Artificial Sequence
  Description of Artificial Sequence: Synthetic oligonucleotide
ccauaugggcgagcuuucc

SEQ ID NO: 1681636 - RNA, 19 nt, Artificial Sequence
  Description of Artificial Sequence: Synthetic oligonucleotide
cccauaugggcgagcuuuc

SEQ ID NO: 1681637 - RNA, 19 nt, Artificial Sequence
  Description of Artificial Sequence: Synthetic oligonucleotide
augugcgcucuggcugaag

SEQ ID NO: 1681638 - RNA, 19 nt, Artificial Sequence
  Description of Artificial Sequence: Synthetic oligonucleotide
ggcgagcuuucccucaacu

SEQ ID NO: 1681639 - RNA, 19 nt, Artificial Sequence
  Description of Artificial Sequence: Synthetic oligonucleotide
ccauccagugagaacacau

SEQ ID NO: 1681640 - RNA, 19 nt, Artificial Sequence
  Description of Artificial Sequence: Synthetic oligonucleotide
ggaguuccccagcugucua

SEQ ID NO: 1681641 - RNA, 19 nt, Artificial Sequence
  Description of Artificial Sequence: Synthetic oligonucleotide
ccuggucuaacaagagcua

SEQ ID NO: 1681642 - RNA, 19 nt, Artificial Sequence
  Description of Artificial Sequence: Synthetic oligonucleotide
cgaacaagagcugagcuau

SEQ ID NO: 1681643 - RNA, 19 nt, Artificial Sequence
  Description of Artificial Sequence: Synthetic oligonucleotide
cacucauaucucugguguu

SEQ ID NO: 1681644 - RNA, 19 nt, Artificial Sequence
  Description of Artificial Sequence: Synthetic oligonucleotide
ggaaucgucccaguaucau

SEQ ID NO: 1681645 - RNA, 19 nt, Artificial Sequence
  Description of Artificial Sequence: Synthetic oligonucleotide
gccugagcuguagguaaac

SEQ ID NO: 1681646 - RNA, 19 nt, Artificial Sequence
  Description of Artificial Sequence: Synthetic oligonucleotide
caacugucacuuggugaaa

SEQ ID NO: 1681647 - RNA, 19 nt, Artificial Sequence
  Description of Artificial Sequence: Synthetic oligonucleotide
gaugugcgcucuggcugaa

SEQ ID NO: 1681648 - RNA, 19 nt, Artificial Sequence
  Description of Artificial Sequence: Synthetic oligonucleotide
cacugcacucauagggguu

SEQ ID NO: 1681649 - RNA, 19 nt, Artificial Sequence
  Description of Artificial Sequence: Synthetic oligonucleotide
gcuauaccugaaggccuuc

SEQ ID NO: 1681650 - RNA, 19 nt, Artificial Sequence
  Description of Artificial Sequence: Synthetic oligonucleotide
gagcuccuacugaaggcuu

SEQ ID NO: 1681651 - RNA, 19 nt, Artificial Sequence
  Description of Artificial Sequence: Synthetic oligonucleotide
gugcagguuccaaacgcuu

SEQ ID NO: 1681652 - RNA, 19 nt, Artificial Sequence
  Description of Artificial Sequence: Synthetic oligonucleotide
ccaugccuucagagauuac

SEQ ID NO: 1681653 - RNA, 19 nt, Artificial Sequence
  Description of Artificial Sequence: Synthetic oligonucleotide
gggcgagcuuucccucaac

SEQ ID NO: 1681654 - RNA, 19 nt, Artificial Sequence
  Description of Artificial Sequence: Synthetic oligonucleotide
cccaugccuucagagauua

SEQ ID NO: 1681655 - RNA, 19 nt, Artificial Sequence
  Description of Artificial Sequence: Synthetic oligonucleotide
cccucaacugucacuuggu

SEQ ID NO: 1681656 - RNA, 19 nt, Artificial Sequence
  Description of Artificial Sequence: Synthetic oligonucleotide
cagagauuacuuggucauu

SEQ ID NO: 1681657 - RNA, 19 nt, Artificial Sequence
  Description of Artificial Sequence: Synthetic oligonucleotide
ggccugagcuguagguaaa

SEQ ID NO: 1681658 - RNA, 19 nt, Artificial Sequence
  Description of Artificial Sequence: Synthetic oligonucleotide
gucccauaugggcgagcuu

SEQ ID NO: 1681659 - RNA, 19 nt, Artificial Sequence
  Description of Artificial Sequence: Synthetic oligonucleotide
ccccaugccuucagagauu

SEQ ID NO: 1681660 - RNA, 19 nt, Artificial Sequence
  Description of Artificial Sequence: Synthetic oligonucleotide
aacuauauacaguuugucc

SEQ ID NO: 1681661 - RNA, 19 nt, Artificial Sequence
  Description of Artificial Sequence: Synthetic oligonucleotide
uauucugaaacucaggccc

SEQ ID NO: 1681662 - RNA, 19 nt, Artificial Sequence
  Description of Artificial Sequence: Synthetic oligonucleotide
acuauaaauagccuggagg

SEQ ID NO: 1681663 - RNA, 19 nt, Artificial Sequence
  Description of Artificial Sequence: Synthetic oligonucleotide
agugaaaguaguuuuauug

SEQ ID NO: 1681664 - RNA, 19 nt, Artificial Sequence
  Description of Artificial Sequence: Synthetic oligonucleotide
aagucaaucuuguagauau

SEQ ID NO: 1681665 - RNA, 19 nt, Artificial Sequence
  Description of Artificial Sequence: Synthetic oligonucleotide
uuauugugcaucacgagcc

SEQ ID NO: 1681666 - RNA, 19 nt, Artificial Sequence
  Description of Artificial Sequence: Synthetic oligonucleotide
accugaucuagucacagcc

SEQ ID NO: 1681667 - RNA, 19 nt, Artificial Sequence
  Description of Artificial Sequence: Synthetic oligonucleotide
ugggugacgaaucaucucg

SEQ ID NO: 1681668 - RNA, 19 nt, Artificial Sequence
  Description of Artificial Sequence: Synthetic oligonucleotide
gacgaagucaaucuuguag

SEQ ID NO: 1681669 - RNA, 19 nt, Artificial Sequence
  Description of Artificial Sequence: Synthetic oligonucleotide
aauagucugcuuuauugug

SEQ ID NO: 1681670 - RNA, 19 nt, Artificial Sequence
  Description of Artificial Sequence: Synthetic oligonucleotide
caaguugagaugauguugg

SEQ ID NO: 1681671 - RNA, 19 nt, Artificial Sequence
  Description of Artificial Sequence: Synthetic oligonucleotide
ugcuuuauugugcaucacg

SEQ ID NO: 1681672 - RNA, 19 nt, Artificial Sequence
  Description of Artificial Sequence: Synthetic oligonucleotide
aaucugacgaagucaaucu

SEQ ID NO: 1681673 - RNA, 19 nt, Artificial Sequence
  Description of Artificial Sequence: Synthetic oligonucleotide
uguagauauuuucuuccgg

SEQ ID NO: 1681674 - RNA, 19 nt, Artificial Sequence
  Description of Artificial Sequence: Synthetic oligonucleotide
acaacuauaaauagccugg

SEQ ID NO: 1681675 - RNA, 19 nt, Artificial Sequence
  Description of Artificial Sequence: Synthetic oligonucleotide
agaacauaguggcaaacag

SEQ ID NO: 1681676 - RNA, 19 nt, Artificial Sequence
  Description of Artificial Sequence: Synthetic oligonucleotide
ugggcaaccguucugagac

SEQ ID NO: 1681677 - RNA, 19 nt, Artificial Sequence
  Description of Artificial Sequence: Synthetic oligonucleotide
aguguuuugguccuugaug

SEQ ID NO: 1681678 - RNA, 19 nt, Artificial Sequence
  Description of Artificial Sequence: Synthetic oligonucleotide
uucgucuauaaacugacaa

SEQ ID NO: 1681679 - RNA, 19 nt, Artificial Sequence
  Description of Artificial Sequence: Synthetic oligonucleotide
acugacaacuauaaauagc

SEQ ID NO: 1681680 - RNA, 19 nt, Artificial Sequence
  Description of Artificial Sequence: Synthetic oligonucleotide
ucugacgaagucaaucuug

SEQ ID NO: 1681681 - RNA, 19 nt, Artificial Sequence
  Description of Artificial Sequence: Synthetic oligonucleotide
guugagaugauguuggaga

SEQ ID NO: 1681682 - RNA, 19 nt, Artificial Sequence
  Description of Artificial Sequence: Synthetic oligonucleotide
ugacgaaucaucucgcuga

SEQ ID NO: 1681683 - RNA, 19 nt, Artificial Sequence
  Description of Artificial Sequence: Synthetic oligonucleotide
aacuauaaauagccuggag

SEQ ID NO: 1681684 - RNA, 19 nt, Artificial Sequence
  Description of Artificial Sequence: Synthetic oligonucleotide
gaagucgaagcuuuugagc

SEQ ID NO: 1681685 - RNA, 19 nt, Artificial Sequence
  Description of Artificial Sequence: Synthetic oligonucleotide
ucauagauguguucacagg

SEQ ID NO: 1681686 - RNA, 19 nt, Artificial Sequence
  Description of Artificial Sequence: Synthetic oligonucleotide
ucuucgucuauaaacugac

SEQ ID NO: 1681687 - RNA, 19 nt, Artificial Sequence
  Description of Artificial Sequence: Synthetic oligonucleotide
acgaaguagaagcugucgg

SEQ ID NO: 1681688 - RNA, 19 nt, Artificial Sequence
  Description of Artificial Sequence: Synthetic oligonucleotide
aaaacuauauacaguuugu

SEQ ID NO: 1681689 - RNA, 19 nt, Artificial Sequence
  Description of Artificial Sequence: Synthetic oligonucleotide
aaacugacaacuauaaaua

SEQ ID NO: 1681690 - RNA, 19 nt, Artificial Sequence
  Description of Artificial Sequence: Synthetic oligonucleotide
aauaggacccgucccucuc

SEQ ID NO: 1681691 - RNA, 19 nt, Artificial Sequence
  Description of Artificial Sequence: Synthetic oligonucleotide
aaguagugccucucgauca

SEQ ID NO: 1681692 - RNA, 19 nt, Artificial Sequence
  Description of Artificial Sequence: Synthetic oligonucleotide
aacauaguggcaaacaguu

SEQ ID NO: 1681693 - RNA, 19 nt, Artificial Sequence
  Description of Artificial Sequence: Synthetic oligonucleotide
cugguagcgaacaaagcgc

SEQ ID NO: 1681694 - RNA, 19 nt, Artificial Sequence
  Description of Artificial Sequence: Synthetic oligonucleotide
uggaucccuaaccugaucu

SEQ ID NO: 1681695 - RNA, 19 nt, Artificial Sequence
  Description of Artificial Sequence: Synthetic oligonucleotide
agcggucccacccugggcc

SEQ ID NO: 1681696 - RNA, 19 nt, Artificial Sequence
  Description of Artificial Sequence: Synthetic oligonucleotide
auuagcuccucagacagag

SEQ ID NO: 1681697 - RNA, 19 nt, Artificial Sequence
  Description of Artificial Sequence: Synthetic oligonucleotide
uauugugcaucacgagccg

SEQ ID NO: 1681698 - RNA, 19 nt, Artificial Sequence
  Description of Artificial Sequence: Synthetic oligonucleotide
ucccaaguugagaugaugu

SEQ ID NO: 1681699 - RNA, 19 nt, Artificial Sequence
  Description of Artificial Sequence: Synthetic oligonucleotide
uaugggugacgaaucaucu

SEQ ID NO: 1681700 - RNA, 19 nt, Artificial Sequence
  Description of Artificial Sequence: Synthetic oligonucleotide
gugaaaguaguuuuauuga

SEQ ID NO: 1681701 - RNA, 19 nt, Artificial Sequence
  Description of Artificial Sequence: Synthetic oligonucleotide
cuauaaauagccuggaggu

SEQ ID NO: 1681702 - RNA, 19 nt, Artificial Sequence
  Description of Artificial Sequence: Synthetic oligonucleotide
gaucuugaaucugacgaag

SEQ ID NO: 1681703 - RNA, 19 nt, Artificial Sequence
  Description of Artificial Sequence: Synthetic oligonucleotide
uuaggcgaaggaaggcagg

SEQ ID NO: 1681704 - RNA, 19 nt, Artificial Sequence
  Description of Artificial Sequence: Synthetic oligonucleotide
ucaagaagggaacacuauu

SEQ ID NO: 1681705 - RNA, 19 nt, Artificial Sequence
  Description of Artificial Sequence: Synthetic oligonucleotide
agguagucgcccguaaucc

SEQ ID NO: 1681706 - RNA, 19 nt, Artificial Sequence
  Description of Artificial Sequence: Synthetic oligonucleotide
ugguagcgaacaaagcgcc

SEQ ID NO: 1681707 - RNA, 19 nt, Artificial Sequence
  Description of Artificial Sequence: Synthetic oligonucleotide
ugcaauaggacccgucccu

SEQ ID NO: 1681708 - RNA, 19 nt, Artificial Sequence
  Description of Artificial Sequence: Synthetic oligonucleotide
gaaucugacgaagucaauc

SEQ ID NO: 1681709 - RNA, 19 nt, Artificial Sequence
  Description of Artificial Sequence: Synthetic oligonucleotide
gaaguagugccucucgauc

SEQ ID NO: 1681710 - RNA, 19 nt, Artificial Sequence
  Description of Artificial Sequence: Synthetic oligonucleotide
auaugggugacgaaucauc

SEQ ID NO: 1681711 - RNA, 19 nt, Artificial Sequence
  Description of Artificial Sequence: Synthetic oligonucleotide
ucuggcuccgacucggacc

SEQ ID NO: 1681712 - RNA, 19 nt, Artificial Sequence
  Description of Artificial Sequence: Synthetic oligonucleotide
uauacaguuuguccagguc

SEQ ID NO: 1681713 - RNA, 19 nt, Artificial Sequence
  Description of Artificial Sequence: Synthetic oligonucleotide
gaauggaucccuaaccuga

SEQ ID NO: 1681714 - RNA, 19 nt, Artificial Sequence
  Description of Artificial Sequence: Synthetic oligonucleotide
aaggagguauccagaaguc

SEQ ID NO: 1681715 - RNA, 19 nt, Artificial Sequence
  Description of Artificial Sequence: Synthetic oligonucleotide
auagccuggaggugguggg

SEQ ID NO: 1681716 - RNA, 19 nt, Artificial Sequence
  Description of Artificial Sequence: Synthetic oligonucleotide
ucuuccggggagcacaggu

SEQ ID NO: 1681717 - RNA, 19 nt, Artificial Sequence
  Description of Artificial Sequence: Synthetic oligonucleotide
gaucaugcggaaguuguug

SEQ ID NO: 1681718 - RNA, 19 nt, Artificial Sequence
  Description of Artificial Sequence: Synthetic oligonucleotide
aggagguauccagaagucc

SEQ ID NO: 1681719 - RNA, 19 nt, Artificial Sequence
  Description of Artificial Sequence: Synthetic oligonucleotide
ggggauagggaauggaucc

SEQ ID NO: 1681720 - RNA, 19 nt, Artificial Sequence
  Description of Artificial Sequence: Synthetic oligonucleotide
uguugacuggcuugucucc

SEQ ID NO: 1681721 - RNA, 19 nt, Artificial Sequence
  Description of Artificial Sequence: Synthetic oligonucleotide
augcggaaguuguugacug

SEQ ID NO: 1681722 - RNA, 19 nt, Artificial Sequence
  Description of Artificial Sequence: Synthetic oligonucleotide
caaccguucugagacaggg

SEQ ID NO: 1681723 - RNA, 19 nt, Artificial Sequence
  Description of Artificial Sequence: Synthetic oligonucleotide
ugaaaacuauauacaguuu

SEQ ID NO: 1681724 - RNA, 19 nt, Artificial Sequence
  Description of Artificial Sequence: Synthetic oligonucleotide
aguuuagugaaaguaguuu

SEQ ID NO: 1681725 - RNA, 19 nt, Artificial Sequence
  Description of Artificial Sequence: Synthetic oligonucleotide
gaucccuaaccugaucuag

SEQ ID NO: 1681726 - RNA, 19 nt, Artificial Sequence
  Description of Artificial Sequence: Synthetic oligonucleotide
cauaguggcaaacaguucu

SEQ ID NO: 1681727 - RNA, 19 nt, Artificial Sequence
  Description of Artificial Sequence: Synthetic oligonucleotide
ucucccacugugaacucca

SEQ ID NO: 1681728 - RNA, 19 nt, Artificial Sequence
  Description of Artificial Sequence: Synthetic oligonucleotide
uccgguucgaggccccugg

SEQ ID NO: 1681729 - RNA, 19 nt, Artificial Sequence
  Description of Artificial Sequence: Synthetic oligonucleotide
uaguuuagugaaaguaguu

SEQ ID NO: 1681730 - RNA, 19 nt, Artificial Sequence
  Description of Artificial Sequence: Synthetic oligonucleotide
ugaacugguagcgaacaaa

SEQ ID NO: 1681731 - RNA, 19 nt, Artificial Sequence
  Description of Artificial Sequence: Synthetic oligonucleotide
ccaaaguggaagucgaagc

SEQ ID NO: 1681732 - RNA, 19 nt, Artificial Sequence
  Description of Artificial Sequence: Synthetic oligonucleotide
gaggacagugccugagucc

SEQ ID NO: 1681733 - RNA, 19 nt, Artificial Sequence
  Description of Artificial Sequence: Synthetic oligonucleotide
augggugacgaaucaucuc

SEQ ID NO: 1681734 - RNA, 19 nt, Artificial Sequence
  Description of Artificial Sequence: Synthetic oligonucleotide
ucgcugauuagcuccucag

SEQ ID NO: 1681735 - RNA, 19 nt, Artificial Sequence
  Description of Artificial Sequence: Synthetic oligonucleotide
gugccucucgaucaugcgg

SEQ ID NO: 1681736 - RNA, 19 nt, Artificial Sequence
  Description of Artificial Sequence: Synthetic oligonucleotide
aucaugcggaaguuguuga

SEQ ID NO: 1681737 - RNA, 19 nt, Artificial Sequence
  Description of Artificial Sequence: Synthetic oligonucleotide
cuagucacagccucaagaa

SEQ ID NO: 1681738 - RNA, 19 nt, Artificial Sequence
  Description of Artificial Sequence: Synthetic oligonucleotide
uugaugggcaaccguucug

SEQ ID NO: 1681739 - RNA, 19 nt, Artificial Sequence
  Description of Artificial Sequence: Synthetic oligonucleotide
ggaagucgaagcuuuugag

SEQ ID NO: 1681740 - RNA, 19 nt, Artificial Sequence
  Description of Artificial Sequence: Synthetic oligonucleotide
cuggcuccgacucggaccc

SEQ ID NO: 1681741 - RNA, 19 nt, Artificial Sequence
  Description of Artificial Sequence: Synthetic oligonucleotide
ugcaucacgagccggucau

SEQ ID NO: 1681742 - RNA, 19 nt, Artificial Sequence
  Description of Artificial Sequence: Synthetic oligonucleotide
uugugcaucacgagccggu

SEQ ID NO: 1681743 - RNA, 19 nt, Artificial Sequence
  Description of Artificial Sequence: Synthetic oligonucleotide
gcugauuagcuccucagac

SEQ ID NO: 1681744 - RNA, 19 nt, Artificial Sequence
  Description of Artificial Sequence: Synthetic oligonucleotide
ucacgagccggucauccac

SEQ ID NO: 1681745 - RNA, 19 nt, Artificial Sequence
  Description of Artificial Sequence: Synthetic oligonucleotide
cacgaaguagaagcugucg

SEQ ID NO: 1681746 - RNA, 19 nt, Artificial Sequence
  Description of Artificial Sequence: Synthetic oligonucleotide
aggggauagggaauggauc

SEQ ID NO: 1681747 - RNA, 19 nt, Artificial Sequence
  Description of Artificial Sequence: Synthetic oligonucleotide
aaguugagaugauguugga

SEQ ID NO: 1681748 - RNA, 19 nt, Artificial Sequence
  Description of Artificial Sequence: Synthetic oligonucleotide
gugacgaaucaucucgcug

SEQ ID NO: 1681749 - RNA, 19 nt, Artificial Sequence
  Description of Artificial Sequence: Synthetic oligonucleotide
ucugcccuaggcucccgcg

SEQ ID NO: 1681750 - RNA, 19 nt, Artificial Sequence
  Description of Artificial Sequence: Synthetic oligonucleotide
ucagacagaggcgggaagu

SEQ ID NO: 1681751 - RNA, 19 nt, Artificial Sequence
  Description of Artificial Sequence: Synthetic oligonucleotide
agugccucucgaucaugcg

SEQ ID NO: 1681752 - RNA, 19 nt, Artificial Sequence
  Description of Artificial Sequence: Synthetic oligonucleotide
cauagauguguucacaggu

SEQ ID NO: 1681753 - RNA, 19 nt, Artificial Sequence
  Description of Artificial Sequence: Synthetic oligonucleotide
caggugugaacugguagcg

SEQ ID NO: 1681754 - RNA, 19 nt, Artificial Sequence
  Description of Artificial Sequence: Synthetic oligonucleotide
uguuuugguccuugaugga

SEQ ID NO: 1681755 - RNA, 19 nt, Artificial Sequence
  Description of Artificial Sequence: Synthetic oligonucleotide
auaguggcaaacaguucuc

SEQ ID NO: 1681756 - RNA, 19 nt, Artificial Sequence
  Description of Artificial Sequence: Synthetic oligonucleotide
gguuccacacuccgguucg

SEQ ID NO: 1681757 - RNA, 19 nt, Artificial Sequence
  Description of Artificial Sequence: Synthetic oligonucleotide
gcugcaauaggacccgucc

SEQ ID NO: 1681758 - RNA, 19 nt, Artificial Sequence
  Description of Artificial Sequence: Synthetic oligonucleotide
ucccuaaccugaucuaguc

SEQ ID NO: 1681759 - RNA, 19 nt, Artificial Sequence
  Description of Artificial Sequence: Synthetic oligonucleotide
cugcaauaggacccguccc

SEQ ID NO: 1681760 - RNA, 19 nt, Artificial Sequence
  Description of Artificial Sequence: Synthetic oligonucleotide
agggcuaggccagagccuc

SEQ ID NO: 1681761 - RNA, 19 nt, Artificial Sequence
  Description of Artificial Sequence: Synthetic oligonucleotide
ucccgcuguaggaauaguc

SEQ ID NO: 1681762 - RNA, 19 nt, Artificial Sequence
  Description of Artificial Sequence: Synthetic oligonucleotide
gagcacagguagucgcccg

SEQ ID NO: 1681763 - RNA, 19 nt, Artificial Sequence
  Description of Artificial Sequence: Synthetic oligonucleotide
guaggaauagucugcuuua

SEQ ID NO: 1681764 - RNA, 19 nt, Artificial Sequence
  Description of Artificial Sequence: Synthetic oligonucleotide
auccucgccugcucgcuac

SEQ ID NO: 1681765 - RNA, 19 nt, Artificial Sequence
  Description of Artificial Sequence: Synthetic oligonucleotide
agccucaagaagggaacac

SEQ ID NO: 1681766 - RNA, 19 nt, Artificial Sequence
  Description of Artificial Sequence: Synthetic oligonucleotide
gaugggcaaccguucugag

SEQ ID NO: 1681767 - RNA, 19 nt, Artificial Sequence
  Description of Artificial Sequence: Synthetic oligonucleotide
ggaauggaucccuaaccug

SEQ ID NO: 1681768 - RNA, 19 nt, Artificial Sequence
  Description of Artificial Sequence: Synthetic oligonucleotide
uagugaaaguaguuuuauu

SEQ ID NO: 1681769 - RNA, 19 nt, Artificial Sequence
  Description of Artificial Sequence: Synthetic oligonucleotide
uccagaacauaguggcaaa

SEQ ID NO: 1681770 - RNA, 19 nt, Artificial Sequence
  Description of Artificial Sequence: Synthetic oligonucleotide
agcgaacaaagcgcccugc

SEQ ID NO: 1681771 - RNA, 19 nt, Artificial Sequence
  Description of Artificial Sequence: Synthetic oligonucleotide
aucaucucgcugauuagcu

SEQ ID NO: 1681772 - RNA, 19 nt, Artificial Sequence
  Description of Artificial Sequence: Synthetic oligonucleotide
cagguagucgcccguaauc

SEQ ID NO: 1681773 - RNA, 19 nt, Artificial Sequence
  Description of Artificial Sequence: Synthetic oligonucleotide
auggaucccuaaccugauc

SEQ ID NO: 1681774 - RNA, 19 nt, Artificial Sequence
  Description of Artificial Sequence: Synthetic oligonucleotide
caucacgagccggucaucc

SEQ ID NO: 1681775 - RNA, 19 nt, Artificial Sequence
  Description of Artificial Sequence: Synthetic oligonucleotide
agcugucggacugugucuc

SEQ ID NO: 1681776 - RNA, 19 nt, Artificial Sequence
  Description of Artificial Sequence: Synthetic oligonucleotide
aagcgcccugcauuggggu

SEQ ID NO: 1681777 - RNA, 19 nt, Artificial Sequence
  Description of Artificial Sequence: Synthetic oligonucleotide
ucaucucgcugauuagcuc

SEQ ID NO: 1681778 - RNA, 19 nt, Artificial Sequence
  Description of Artificial Sequence: Synthetic oligonucleotide
uucugaaacucaggcccag

SEQ ID NO: 1681779 - RNA, 19 nt, Artificial Sequence
  Description of Artificial Sequence: Synthetic oligonucleotide
ucauggaucuucgucuaua

SEQ ID NO: 1681780 - RNA, 19 nt, Artificial Sequence
  Description of Artificial Sequence: Synthetic oligonucleotide
ugcagcggucccacccugg

SEQ ID NO: 1681781 - RNA, 19 nt, Artificial Sequence
  Description of Artificial Sequence: Synthetic oligonucleotide
gaacaaagcgcccugcauu

SEQ ID NO: 1681782 - RNA, 19 nt, Artificial Sequence
  Description of Artificial Sequence: Synthetic oligonucleotide
ugucccgcuguaggaauag

SEQ ID NO: 1681783 - RNA, 19 nt, Artificial Sequence
  Description of Artificial Sequence: Synthetic oligonucleotide
guagucgcccguaauccgc

SEQ ID NO: 1681784 - RNA, 19 nt, Artificial Sequence
  Description of Artificial Sequence: Synthetic oligonucleotide
gaacauaguggcaaacagu

SEQ ID NO: 1681785 - RNA, 19 nt, Artificial Sequence
  Description of Artificial Sequence: Synthetic oligonucleotide
gaggcgggaagucauagau

SEQ ID NO: 1681786 - RNA, 19 nt, Artificial Sequence
  Description of Artificial Sequence: Synthetic oligonucleotide
gcuuuauugugcaucacga

SEQ ID NO: 1681787 - RNA, 19 nt, Artificial Sequence
  Description of Artificial Sequence: Synthetic oligonucleotide
ucggacugugucucauaug

SEQ ID NO: 1681788 - RNA, 19 nt, Artificial Sequence
  Description of Artificial Sequence: Synthetic oligonucleotide
ugcccuaggcucccgcgug

SEQ ID NO: 1681789 - RNA, 19 nt, Artificial Sequence
  Description of Artificial Sequence: Synthetic oligonucleotide
acacuccgguucgaggccc

SEQ ID NO: 1681790 - RNA, 19 nt, Artificial Sequence
  Description of Artificial Sequence: Synthetic oligonucleotide
guugacuggcuugucuccc

SEQ ID NO: 1681791 - RNA, 19 nt, Artificial Sequence
  Description of Artificial Sequence: Synthetic oligonucleotide
augggcaaccguucugaga

SEQ ID NO: 1681792 - RNA, 19 nt, Artificial Sequence
  Description of Artificial Sequence: Synthetic oligonucleotide
aggaauagucugcuuuauu

SEQ ID NO: 1681793 - RNA, 19 nt, Artificial Sequence
  Description of Artificial Sequence: Synthetic oligonucleotide
cagaacauaguggcaaaca

SEQ ID NO: 1681794 - RNA, 19 nt, Artificial Sequence
  Description of Artificial Sequence: Synthetic oligonucleotide
ucgcccguaauccgcugca

SEQ ID NO: 1681795 - RNA, 19 nt, Artificial Sequence
  Description of Artificial Sequence: Synthetic oligonucleotide
ggcgggaagucauagaugu

SEQ ID NO: 1681796 - RNA, 19 nt, Artificial Sequence
  Description of Artificial Sequence: Synthetic oligonucleotide
uagucgcccguaauccgcu

SEQ ID NO: 1681797 - RNA, 19 nt, Artificial Sequence
  Description of Artificial Sequence: Synthetic oligonucleotide
auaggacccgucccucuca

SEQ ID NO: 1681798 - RNA, 19 nt, Artificial Sequence
  Description of Artificial Sequence: Synthetic oligonucleotide
cucagacagaggcgggaag

SEQ ID NO: 1681799 - RNA, 19 nt, Artificial Sequence
  Description of Artificial Sequence: Synthetic oligonucleotide
acccgucccucucacaccu

SEQ ID NO: 1681800 - RNA, 19 nt, Artificial Sequence
  Description of Artificial Sequence: Synthetic oligonucleotide
cauggaucuucgucuauaa

SEQ ID NO: 1681801 - RNA, 19 nt, Artificial Sequence
  Description of Artificial Sequence: Synthetic oligonucleotide
gccaaaguggaagucgaag

SEQ ID NO: 1681802 - RNA, 19 nt, Artificial Sequence
  Description of Artificial Sequence: Synthetic oligonucleotide
ucccgcguggguuccacac

SEQ ID NO: 1681803 - RNA, 19 nt, Artificial Sequence
  Description of Artificial Sequence: Synthetic oligonucleotide
gaucuagucacagccucaa

SEQ ID NO: 1681804 - RNA, 19 nt, Artificial Sequence
  Description of Artificial Sequence: Synthetic oligonucleotide
agcgcccugcauugggguc

SEQ ID NO: 1681805 - RNA, 19 nt, Artificial Sequence
  Description of Artificial Sequence: Synthetic oligonucleotide
cacacuccgguucgaggcc

SEQ ID NO: 1681806 - RNA, 19 nt, Artificial Sequence
  Description of Artificial Sequence: Synthetic oligonucleotide
uggggaugcagaagccaaa

SEQ ID NO: 1681807 - RNA, 19 nt, Artificial Sequence
  Description of Artificial Sequence: Synthetic oligonucleotide
cccguaauccgcugcagcc

SEQ ID NO: 1681808 - RNA, 19 nt, Artificial Sequence
  Description of Artificial Sequence: Synthetic oligonucleotide
agaggcgggaagucauaga

SEQ ID NO: 1681809 - RNA, 19 nt, Artificial Sequence
  Description of Artificial Sequence: Synthetic oligonucleotide
ucguccggcccgaugggcu

SEQ ID NO: 1681810 - RNA, 19 nt, Artificial Sequence
  Description of Artificial Sequence: Synthetic oligonucleotide
cucucgaucaugcggaagu

SEQ ID NO: 1681811 - RNA, 19 nt, Artificial Sequence
  Description of Artificial Sequence: Synthetic oligonucleotide
uaggaauagucugcuuuau

SEQ ID NO: 1681812 - RNA, 19 nt, Artificial Sequence
  Description of Artificial Sequence: Synthetic oligonucleotide
acagguagucgcccguaau

SEQ ID NO: 1681813 - RNA, 19 nt, Artificial Sequence
  Description of Artificial Sequence: Synthetic oligonucleotide
uucugcccuaggcucccgc

SEQ ID NO: 1681814 - RNA, 19 nt, Artificial Sequence
  Description of Artificial Sequence: Synthetic oligonucleotide
cagcacgucguccggcccg

SEQ ID NO: 1681815 - RNA, 19 nt, Artificial Sequence
  Description of Artificial Sequence: Synthetic oligonucleotide
auucugaaacucaggccca

SEQ ID NO: 1681816 - RNA, 19 nt, Artificial Sequence
  Description of Artificial Sequence: Synthetic oligonucleotide
aaauagccuggagguggug

SEQ ID NO: 1681817 - RNA, 19 nt, Artificial Sequence
  Description of Artificial Sequence: Synthetic oligonucleotide
ggaucuucgucuauaaacu

SEQ ID NO: 1681818 - RNA, 19 nt, Artificial Sequence
  Description of Artificial Sequence: Synthetic oligonucleotide
gacccgucccucucacacc

SEQ ID NO: 1681819 - RNA, 19 nt, Artificial Sequence
  Description of Artificial Sequence: Synthetic oligonucleotide
uaggacccgucccucucac

SEQ ID NO: 1681820 - RNA, 19 nt, Artificial Sequence
  Description of Artificial Sequence: Synthetic oligonucleotide
aucacgagccggucaucca

SEQ ID NO: 1681821 - RNA, 19 nt, Artificial Sequence
  Description of Artificial Sequence: Synthetic oligonucleotide
aacuccaccguggcuccca

SEQ ID NO: 1681822 - RNA, 19 nt, Artificial Sequence
  Description of Artificial Sequence: Synthetic oligonucleotide
acaaagcgcccugcauugg

SEQ ID NO: 1681823 - RNA, 19 nt, Artificial Sequence
  Description of Artificial Sequence: Synthetic oligonucleotide
cagaggcgggaagucauag

SEQ ID NO: 1681824 - RNA, 19 nt, Artificial Sequence
  Description of Artificial Sequence: Synthetic oligonucleotide
ugacgaagucaaucuugua

SEQ ID NO: 1681825 - RNA, 19 nt, Artificial Sequence
  Description of Artificial Sequence: Synthetic oligonucleotide
ggcaaccguucugagacag

SEQ ID NO: 1681826 - RNA, 19 nt, Artificial Sequence
  Description of Artificial Sequence: Synthetic oligonucleotide
guugaugggcaaccguucu

SEQ ID NO: 1681827 - RNA, 19 nt, Artificial Sequence
  Description of Artificial Sequence: Synthetic oligonucleotide
gucccaaguugagaugaug

SEQ ID NO: 1681828 - RNA, 19 nt, Artificial Sequence
  Description of Artificial Sequence: Synthetic oligonucleotide
aucccuaaccugaucuagu

SEQ ID NO: 1681829 - RNA, 19 nt, Artificial Sequence
  Description of Artificial Sequence: Synthetic oligonucleotide
gucgcccguaauccgcugc

SEQ ID NO: 1681830 - RNA, 19 nt, Artificial Sequence
  Description of Artificial Sequence: Synthetic oligonucleotide
cucccacaggcugcaauag

SEQ ID NO: 1681831 - RNA, 19 nt, Artificial Sequence
  Description of Artificial Sequence: Synthetic oligonucleotide
guagcgaacaaagcgcccu

SEQ ID NO: 1681832 - RNA, 19 nt, Artificial Sequence
  Description of Artificial Sequence: Synthetic oligonucleotide
cucgccugcucgcuaccgc

SEQ ID NO: 1681833 - RNA, 19 nt, Artificial Sequence
  Description of Artificial Sequence: Synthetic oligonucleotide
gugucucauaugggugacg

SEQ ID NO: 1681834 - RNA, 19 nt, Artificial Sequence
  Description of Artificial Sequence: Synthetic oligonucleotide
acccggacucggauucugc

SEQ ID NO: 1681835 - RNA, 19 nt, Artificial Sequence
  Description of Artificial Sequence: Synthetic oligonucleotide
gcggaaguuguugacuggc

SEQ ID NO: 1681836 - RNA, 19 nt, Artificial Sequence
  Description of Artificial Sequence: Synthetic oligonucleotide
ccggaucuugaaucugacg

SEQ ID NO: 1681837 - RNA, 19 nt, Artificial Sequence
  Description of Artificial Sequence: Synthetic oligonucleotide
cuugcccugcagcgguccc

SEQ ID NO: 1681838 - RNA, 19 nt, Artificial Sequence
  Description of Artificial Sequence: Synthetic oligonucleotide
ggucccgccgguugauggg

SEQ ID NO: 1681839 - RNA, 19 nt, Artificial Sequence
  Description of Artificial Sequence: Synthetic oligonucleotide
ccgcuguaggaauagucug

SEQ ID NO: 1681840 - RNA, 19 nt, Artificial Sequence
  Description of Artificial Sequence: Synthetic oligonucleotide
gcacccaucauggaucuuc

SEQ ID NO: 1681841 - RNA, 19 nt, Artificial Sequence
  Description of Artificial Sequence: Synthetic oligonucleotide
gucucccacugugaacucc

SEQ ID NO: 1681842 - RNA, 19 nt, Artificial Sequence
  Description of Artificial Sequence: Synthetic oligonucleotide
ggaaggcaggugugaacug

SEQ ID NO: 1681843 - RNA, 19 nt, Artificial Sequence
  Description of Artificial Sequence: Synthetic oligonucleotide
ggacugugucucauauggg

SEQ ID NO: 1681844 - RNA, 19 nt, Artificial Sequence
  Description of Artificial Sequence: Synthetic oligonucleotide
ccggucauccacgaaguag

SEQ ID NO: 1681845 - RNA, 19 nt, Artificial Sequence
  Description of Artificial Sequence: Synthetic oligonucleotide
cucgcggggcggcggaucc

SEQ ID NO: 1681846 - RNA, 19 nt, Artificial Sequence
  Description of Artificial Sequence: Synthetic oligonucleotide
aggccuuccagaacauagu

SEQ ID NO: 1681847 - RNA, 19 nt, Artificial Sequence
  Description of Artificial Sequence: Synthetic oligonucleotide
ggcgaaggaaggcaggugu

SEQ ID NO: 1681848 - RNA, 19 nt, Artificial Sequence
  Description of Artificial Sequence: Synthetic oligonucleotide
uccucgccugcucgcuacc

SEQ ID NO: 1681849 - RNA, 19 nt, Artificial Sequence
  Description of Artificial Sequence: Synthetic oligonucleotide
gcggauccucgccugcucg

SEQ ID NO: 1681850 - RNA, 19 nt, Artificial Sequence
  Description of Artificial Sequence: Synthetic oligonucleotide
aggcgggaagucauagaug

SEQ ID NO: 1681851 - RNA, 19 nt, Artificial Sequence
  Description of Artificial Sequence: Synthetic oligonucleotide
ccggaaguagugccucucg

SEQ ID NO: 1681852 - RNA, 19 nt, Artificial Sequence
  Description of Artificial Sequence: Synthetic oligonucleotide
acgagccggucauccacga

SEQ ID NO: 1681853 - RNA, 19 nt, Artificial Sequence
  Description of Artificial Sequence: Synthetic oligonucleotide
ugucucccacugugaacuc

SEQ ID NO: 1681854 - RNA, 19 nt, Artificial Sequence
  Description of Artificial Sequence: Synthetic oligonucleotide
gggauagggaauggauccc

SEQ ID NO: 1681855 - RNA, 19 nt, Artificial Sequence
  Description of Artificial Sequence: Synthetic oligonucleotide
gcagcggucccacccuggg

SEQ ID NO: 1681856 - RNA, 19 nt, Artificial Sequence
  Description of Artificial Sequence: Synthetic oligonucleotide
gagccggucccaaguugag

SEQ ID NO: 1681857 - RNA, 19 nt, Artificial Sequence
  Description of Artificial Sequence: Synthetic oligonucleotide
ccggacucggauucugccc

SEQ ID NO: 1681858 - RNA, 19 nt, Artificial Sequence
  Description of Artificial Sequence: Synthetic oligonucleotide
gugcaucacgagccgguca

SEQ ID NO: 1681859 - RNA, 19 nt, Artificial Sequence
  Description of Artificial Sequence: Synthetic oligonucleotide
gacgaaucaucucgcugau

SEQ ID NO: 1681860 - RNA, 19 nt, Artificial Sequence
  Description of Artificial Sequence: Synthetic oligonucleotide
gguagcgaacaaagcgccc

SEQ ID NO: 1681861 - RNA, 19 nt, Artificial Sequence
  Description of Artificial Sequence: Synthetic oligonucleotide
ucggacccggacucggauu

SEQ ID NO: 1681862 - RNA, 19 nt, Artificial Sequence
  Description of Artificial Sequence: Synthetic oligonucleotide
agucgcccguaauccgcug

SEQ ID NO: 1681863 - RNA, 19 nt, Artificial Sequence
  Description of Artificial Sequence: Synthetic oligonucleotide
gucggacugugucucauau

SEQ ID NO: 1681864 - RNA, 19 nt, Artificial Sequence
  Description of Artificial Sequence: Synthetic oligonucleotide
caggggauagggaauggau

SEQ ID NO: 1681865 - RNA, 19 nt, Artificial Sequence
  Description of Artificial Sequence: Synthetic oligonucleotide
gccugaguccaugucccgg

SEQ ID NO: 1681866 - RNA, 19 nt, Artificial Sequence
  Description of Artificial Sequence: Synthetic oligonucleotide
ucccgccgguugaugggca

SEQ ID NO: 1681867 - RNA, 19 nt, Artificial Sequence
  Description of Artificial Sequence: Synthetic oligonucleotide
gcccguaauccgcugcagc

SEQ ID NO: 1681868 - RNA, 19 nt, Artificial Sequence
  Description of Artificial Sequence: Synthetic oligonucleotide
cacuccgguucgaggcccc

SEQ ID NO: 1681869 - RNA, 19 nt, Artificial Sequence
  Description of Artificial Sequence: Synthetic oligonucleotide
cccggacucggauucugcc

SEQ ID NO: 1681870 - RNA, 19 nt, Artificial Sequence
  Description of Artificial Sequence: Synthetic oligonucleotide
caguggaccaaggagguau

SEQ ID NO: 1681871 - RNA, 19 nt, Artificial Sequence
  Description of Artificial Sequence: Synthetic oligonucleotide
gggugacgaaucaucucgc

SEQ ID NO: 1681872 - RNA, 19 nt, Artificial Sequence
  Description of Artificial Sequence: Synthetic oligonucleotide
cucccacugugaacuccac

SEQ ID NO: 1681873 - RNA, 19 nt, Artificial Sequence
  Description of Artificial Sequence: Synthetic oligonucleotide
ccucaagaagggaacacua

SEQ ID NO: 1681874 - RNA, 19 nt, Artificial Sequence
  Description of Artificial Sequence: Synthetic oligonucleotide
gucucauaugggugacgaa

SEQ ID NO: 1681875 - RNA, 19 nt, Artificial Sequence
  Description of Artificial Sequence: Synthetic oligonucleotide
cguggguuccacacuccgg

SEQ ID NO: 1681876 - RNA, 19 nt, Artificial Sequence
  Description of Artificial Sequence: Synthetic oligonucleotide
cagcggucccacccugggc

SEQ ID NO: 1681877 - RNA, 19 nt, Artificial Sequence
  Description of Artificial Sequence: Synthetic oligonucleotide
gcgaacaaagcgcccugca

SEQ ID NO: 1681878 - RNA, 19 nt, Artificial Sequence
  Description of Artificial Sequence: Synthetic oligonucleotide
gucccgccgguugaugggc

SEQ ID NO: 1681879 - RNA, 19 nt, Artificial Sequence
  Description of Artificial Sequence: Synthetic oligonucleotide
cagaaguccucugcuucca

SEQ ID NO: 1681880 - RNA, 19 nt, Artificial Sequence
  Description of Artificial Sequence: Synthetic oligonucleotide
ggucacagcacaagggcua

SEQ ID NO: 1681881 - RNA, 19 nt, Artificial Sequence
  Description of Artificial Sequence: Synthetic oligonucleotide
auucugcccuaggcucccg

SEQ ID NO: 1681882 - RNA, 19 nt, Artificial Sequence
  Description of Artificial Sequence: Synthetic oligonucleotide
ccguaauccgcugcagccc

SEQ ID NO: 1681883 - RNA, 19 nt, Artificial Sequence
  Description of Artificial Sequence: Synthetic oligonucleotide
gcaaccguucugagacagg

SEQ ID NO: 1681884 - RNA, 19 nt, Artificial Sequence
  Description of Artificial Sequence: Synthetic oligonucleotide
ccuuaggcgaaggaaggca

SEQ ID NO: 1681885 - RNA, 19 nt, Artificial Sequence
  Description of Artificial Sequence: Synthetic oligonucleotide
ggaucccuaaccugaucua

SEQ ID NO: 1681886 - RNA, 19 nt, Artificial Sequence
  Description of Artificial Sequence: Synthetic oligonucleotide
caauaggacccgucccucu

SEQ ID NO: 1681887 - RNA, 19 nt, Artificial Sequence
  Description of Artificial Sequence: Synthetic oligonucleotide
aggacccgucccucucaca

SEQ ID NO: 1681888 - RNA, 19 nt, Artificial Sequence
  Description of Artificial Sequence: Synthetic oligonucleotide
ggugacgaaucaucucgcu

SEQ ID NO: 1681889 - RNA, 19 nt, Artificial Sequence
  Description of Artificial Sequence: Synthetic oligonucleotide
ggcacccuuccucccaaca

SEQ ID NO: 1681890 - RNA, 19 nt, Artificial Sequence
  Description of Artificial Sequence: Synthetic oligonucleotide
ggcuccgacucggacccgg

SEQ ID NO: 1681891 - RNA, 19 nt, Artificial Sequence
  Description of Artificial Sequence: Synthetic oligonucleotide
cagccucaagaagggaaca

SEQ ID NO: 1681892 - RNA, 19 nt, Artificial Sequence
  Description of Artificial Sequence: Synthetic oligonucleotide
gcaauaggacccgucccuc

SEQ ID NO: 1681893 - RNA, 19 nt, Artificial Sequence
  Description of Artificial Sequence: Synthetic oligonucleotide
cacagguagucgcccguaa

SEQ ID NO: 1681894 - RNA, 19 nt, Artificial Sequence
  Description of Artificial Sequence: Synthetic oligonucleotide
gaacuccaccguggcuccc

SEQ ID NO: 1681895 - RNA, 19 nt, Artificial Sequence
  Description of Artificial Sequence: Synthetic oligonucleotide
cauaugggugacgaaucau

SEQ ID NO: 1681896 - RNA, 19 nt, Artificial Sequence
  Description of Artificial Sequence: Synthetic oligonucleotide
gccgguugaugggcaaccg

SEQ ID NO: 1681897 - RNA, 19 nt, Artificial Sequence
  Description of Artificial Sequence: Synthetic oligonucleotide
gccggucccaaguugagau

SEQ ID NO: 1681898 - RNA, 19 nt, Artificial Sequence
  Description of Artificial Sequence: Synthetic oligonucleotide
gcccuaggcucccgcgugg

SEQ ID NO: 1681899 - RNA, 19 nt, Artificial Sequence
  Description of Artificial Sequence: Synthetic oligonucleotide
ggggcggcggauccucgcc

SEQ ID NO: 1681900 - RNA, 19 nt, Artificial Sequence
  Description of Artificial Sequence: Synthetic oligonucleotide
ggauagggaauggaucccu

SEQ ID NO: 1681901 - RNA, 19 nt, Artificial Sequence
  Description of Artificial Sequence: Synthetic oligonucleotide
gucagggugucccgcugua

SEQ ID NO: 1681902 - RNA, 19 nt, Artificial Sequence
  Description of Artificial Sequence: Synthetic oligonucleotide
agcacgucguccggcccga

SEQ ID NO: 1681903 - RNA, 19 nt, Artificial Sequence
  Description of Artificial Sequence: Synthetic oligonucleotide
caguguuuugguccuugau

SEQ ID NO: 1681904 - RNA, 19 nt, Artificial Sequence
  Description of Artificial Sequence: Synthetic oligonucleotide
gcugagaccagggcaccca

SEQ ID NO: 1681905 - RNA, 19 nt, Artificial Sequence
  Description of Artificial Sequence: Synthetic oligonucleotide
gccuagggaugcugggcac

SEQ ID NO: 1681906 - RNA, 19 nt, Artificial Sequence
  Description of Artificial Sequence: Synthetic oligonucleotide
acgaaucaucucgcugauu

SEQ ID NO: 1681907 - RNA, 19 nt, Artificial Sequence
  Description of Artificial Sequence: Synthetic oligonucleotide
ggcugagaccagggcaccc

SEQ ID NO: 1681908 - RNA, 19 nt, Artificial Sequence
  Description of Artificial Sequence: Synthetic oligonucleotide
ccggucccaaguugagaug

SEQ ID NO: 1681909 - RNA, 19 nt, Artificial Sequence
  Description of Artificial Sequence: Synthetic oligonucleotide
cuccgguucgaggccccug

SEQ ID NO: 1681910 - RNA, 19 nt, Artificial Sequence
  Description of Artificial Sequence: Synthetic oligonucleotide
ggcugcaauaggacccguc

SEQ ID NO: 1681911 - RNA, 19 nt, Artificial Sequence
  Description of Artificial Sequence: Synthetic oligonucleotide
ccucccacaggcugcaaua

SEQ ID NO: 1681912 - RNA, 19 nt, Artificial Sequence
  Description of Artificial Sequence: Synthetic oligonucleotide
gccgcccuucuucaccuuc

SEQ ID NO: 1681913 - RNA, 19 nt, Artificial Sequence
  Description of Artificial Sequence: Synthetic oligonucleotide
ggugucccgcuguaggaau

SEQ ID NO: 1681914 - RNA, 19 nt, Artificial Sequence
  Description of Artificial Sequence: Synthetic oligonucleotide
ccucucgaucaugcggaag

SEQ ID NO: 1681915 - RNA, 19 nt, Artificial Sequence
  Description of Artificial Sequence: Synthetic oligonucleotide
aggaggccuuccagaacau

SEQ ID NO: 1681916 - RNA, 19 nt, Artificial Sequence
  Description of Artificial Sequence: Synthetic oligonucleotide
ccggggagcacagguaguc

SEQ ID NO: 1681917 - RNA, 19 nt, Artificial Sequence
  Description of Artificial Sequence: Synthetic oligonucleotide
ggucccacccugggccccg

SEQ ID NO: 1681918 - RNA, 19 nt, Artificial Sequence
  Description of Artificial Sequence: Synthetic oligonucleotide
gcugucggacugugucuca

SEQ ID NO: 1681919 - RNA, 19 nt, Artificial Sequence
  Description of Artificial Sequence: Synthetic oligonucleotide
ccagcacgucguccggccc

SEQ ID NO: 1681920 - RNA, 19 nt, Artificial Sequence
  Description of Artificial Sequence: Synthetic oligonucleotide
caggucccgccgguugaug

SEQ ID NO: 1681921 - RNA, 19 nt, Artificial Sequence
  Description of Artificial Sequence: Synthetic oligonucleotide
cccaacacugacucagggu

SEQ ID NO: 1681922 - RNA, 19 nt, Artificial Sequence
  Description of Artificial Sequence: Synthetic oligonucleotide
gcgggaagucauagaugug

SEQ ID NO: 1681923 - RNA, 19 nt, Artificial Sequence
  Description of Artificial Sequence: Synthetic oligonucleotide
acuccgguucgaggccccu

SEQ ID NO: 1681924 - RNA, 19 nt, Artificial Sequence
  Description of Artificial Sequence: Synthetic oligonucleotide
aguccaugucccggaucuu

SEQ ID NO: 1681925 - RNA, 19 nt, Artificial Sequence
  Description of Artificial Sequence: Synthetic oligonucleotide
gcggucccacccugggccc

SEQ ID NO: 1681926 - RNA, 19 nt, Artificial Sequence
  Description of Artificial Sequence: Synthetic oligonucleotide
cggucccaaguugagauga

SEQ ID NO: 1681927 - RNA, 19 nt, Artificial Sequence
  Description of Artificial Sequence: Synthetic oligonucleotide
ggucagggugucccgcugu

SEQ ID NO: 1681928 - RNA, 19 nt, Artificial Sequence
  Description of Artificial Sequence: Synthetic oligonucleotide
cuaggcucccgcguggguu

SEQ ID NO: 1681929 - RNA, 19 nt, Artificial Sequence
  Description of Artificial Sequence: Synthetic oligonucleotide
gugucccgcuguaggaaua

SEQ ID NO: 1681930 - RNA, 19 nt, Artificial Sequence
  Description of Artificial Sequence: Synthetic oligonucleotide
gggugucccgcuguaggaa

SEQ ID NO: 1681931 - RNA, 19 nt, Artificial Sequence
  Description of Artificial Sequence: Synthetic oligonucleotide
cugcccuaggcucccgcgu

SEQ ID NO: 1681932 - RNA, 19 nt, Artificial Sequence
  Description of Artificial Sequence: Synthetic oligonucleotide
gcggcggauccucgccugc

SEQ ID NO: 1681933 - RNA, 19 nt, Artificial Sequence
  Description of Artificial Sequence: Synthetic oligonucleotide
cccuaggcucccgcguggg

SEQ ID NO: 1681934 - RNA, 19 nt, Artificial Sequence
  Description of Artificial Sequence: Synthetic oligonucleotide
gcccgaugggcugcuugcc

SEQ ID NO: 1681935 - RNA, 19 nt, Artificial Sequence
  Description of Artificial Sequence: Synthetic oligonucleotide
cccaaguugagaugauguu

SEQ ID NO: 1681936 - RNA, 19 nt, Artificial Sequence
  Description of Artificial Sequence: Synthetic oligonucleotide
cucccgcguggguuccaca

SEQ ID NO: 1681937 - RNA, 19 nt, Artificial Sequence
  Description of Artificial Sequence: Synthetic oligonucleotide
cgccgguugaugggcaacc

SEQ ID NO: 1681938 - RNA, 19 nt, Artificial Sequence
  Description of Artificial Sequence: Synthetic oligonucleotide
cguccggcccgaugggcug

SEQ ID NO: 1681939 - RNA, 19 nt, Artificial Sequence
  Description of Artificial Sequence: Synthetic oligonucleotide
ggaggccuuccagaacaua

SEQ ID NO: 1681940 - RNA, 19 nt, Artificial Sequence
  Description of Artificial Sequence: Synthetic oligonucleotide
gccucucgaucaugcggaa

SEQ ID NO: 1681941 - RNA, 19 nt, Artificial Sequence
  Description of Artificial Sequence: Synthetic oligonucleotide
cugucggacugugucucau

SEQ ID NO: 1681942 - RNA, 19 nt, Artificial Sequence
  Description of Artificial Sequence: Synthetic oligonucleotide
cggacucggauucugcccu

SEQ ID NO: 1681943 - RNA, 19 nt, Artificial Sequence
  Description of Artificial Sequence: Synthetic oligonucleotide
ccacugugaacuccaccgu

SEQ ID NO: 1681944 - RNA, 19 nt, Artificial Sequence
  Description of Artificial Sequence: Synthetic oligonucleotide
gcaucacgagccggucauc

SEQ ID NO: 1681945 - RNA, 19 nt, Artificial Sequence
  Description of Artificial Sequence: Synthetic oligonucleotide
ccccagcacgucguccggc

SEQ ID NO: 1681946 - RNA, 19 nt, Artificial Sequence
  Description of Artificial Sequence: Synthetic oligonucleotide
cgguugaugggcaaccguu

SEQ ID NO: 1681947 - RNA, 19 nt, Artificial Sequence
  Description of Artificial Sequence: Synthetic oligonucleotide
gccggucauccacgaagua

SEQ ID NO: 1681948 - RNA, 19 nt, Artificial Sequence
  Description of Artificial Sequence: Synthetic oligonucleotide
ccccagcuucagaggcuug

SEQ ID NO: 1681949 - RNA, 19 nt, Artificial Sequence
  Description of Artificial Sequence: Synthetic oligonucleotide
gcucccgcguggguuccac

SEQ ID NO: 1681950 - RNA, 19 nt, Artificial Sequence
  Description of Artificial Sequence: Synthetic oligonucleotide
ccgccgguugaugggcaac

SEQ ID NO: 1681951 - RNA, 19 nt, Artificial Sequence
  Description of Artificial Sequence: Synthetic oligonucleotide
gcggggcggcggauccucg

SEQ ID NO: 1681952 - RNA, 19 nt, Artificial Sequence
  Description of Artificial Sequence: Synthetic oligonucleotide
ccgguugaugggcaaccgu

SEQ ID NO: 1681953 - RNA, 19 nt, Artificial Sequence
  Description of Artificial Sequence: Synthetic oligonucleotide
cucacaccuugggcagugu

SEQ ID NO: 1681954 - RNA, 19 nt, Artificial Sequence
  Description of Artificial Sequence: Synthetic oligonucleotide
ggucccaaguugagaugau

SEQ ID NO: 1681955 - RNA, 19 nt, Artificial Sequence
  Description of Artificial Sequence: Synthetic oligonucleotide
cgcccguaauccgcugcag

SEQ ID NO: 1681956 - RNA, 19 nt, Artificial Sequence
  Description of Artificial Sequence: Synthetic oligonucleotide
ccgguucgaggccccugga

SEQ ID NO: 1681957 - RNA, 19 nt, Artificial Sequence
  Description of Artificial Sequence: Synthetic oligonucleotide
ccucgcggggcggcggauc

SEQ ID NO: 1681958 - RNA, 19 nt, Artificial Sequence
  Description of Artificial Sequence: Synthetic oligonucleotide
cccgccgguugaugggcaa

SEQ ID NO: 1681959 - RNA, 19 nt, Artificial Sequence
  Description of Artificial Sequence: Synthetic oligonucleotide
ccuaggcucccgcgugggu

SEQ ID NO: 1681960 - RNA, 19 nt, Artificial Sequence
  Description of Artificial Sequence: Synthetic oligonucleotide
cgagccggucauccacgaa

SEQ ID NO: 1681961 - RNA, 19 nt, Artificial Sequence
  Description of Artificial Sequence: Synthetic oligonucleotide
ccguggcucccaccugccu

SEQ ID NO: 1681962 - RNA, 19 nt, Artificial Sequence
  Description of Artificial Sequence: Synthetic oligonucleotide
ggcacccaucauggaucuu

SEQ ID NO: 1681963 - RNA, 19 nt, Artificial Sequence
  Description of Artificial Sequence: Synthetic oligonucleotide
cggcggauccucgccugcu

SEQ ID NO: 1681964 - RNA, 19 nt, Artificial Sequence
  Description of Artificial Sequence: Synthetic oligonucleotide
cccgucccucucacaccuu

SEQ ID NO: 1681965 - RNA, 19 nt, Artificial Sequence
  Description of Artificial Sequence: Synthetic oligonucleotide
gcacgucguccggcccgau

SEQ ID NO: 1681966 - RNA, 19 nt, Artificial Sequence
  Description of Artificial Sequence: Synthetic oligonucleotide
uuaaaguuucauaaguuag

SEQ ID NO: 1681967 - RNA, 19 nt, Artificial Sequence
  Description of Artificial Sequence: Synthetic oligonucleotide
uuuugguuaacuuuguuca

SEQ ID NO: 1681968 - RNA, 19 nt, Artificial Sequence
  Description of Artificial Sequence: Synthetic oligonucleotide
aguucgguaucucugauac

SEQ ID NO: 1681969 - RNA, 19 nt, Artificial Sequence
  Description of Artificial Sequence: Synthetic oligonucleotide
aagacgaggauuccaauag

SEQ ID NO: 1681970 - RNA, 19 nt, Artificial Sequence
  Description of Artificial Sequence: Synthetic oligonucleotide
auuguauucagauaacugu

SEQ ID NO: 1681971 - RNA, 19 nt, Artificial Sequence
  Description of Artificial Sequence: Synthetic oligonucleotide
uucaugacaauguggauag

SEQ ID NO: 1681972 - RNA, 19 nt, Artificial Sequence
  Description of Artificial Sequence: Synthetic oligonucleotide
uggguugacaucaaguucc

SEQ ID NO: 1681973 - RNA, 19 nt, Artificial Sequence
  Description of Artificial Sequence: Synthetic oligonucleotide
uguauucagauaacugugg

SEQ ID NO: 1681974 - RNA, 19 nt, Artificial Sequence
  Description of Artificial Sequence: Synthetic oligonucleotide
aaugagucaacggugagca

SEQ ID NO: 1681975 - RNA, 19 nt, Artificial Sequence
  Description of Artificial Sequence: Synthetic oligonucleotide
uuuucucgaaccuugguca

SEQ ID NO: 1681976 - RNA, 19 nt, Artificial Sequence
  Description of Artificial Sequence: Synthetic oligonucleotide
aaaugagucaacggugagc

SEQ ID NO: 1681977 - RNA, 19 nt, Artificial Sequence
  Description of Artificial Sequence: Synthetic oligonucleotide
ugugcaauauguccaaccc

SEQ ID NO: 1681978 - RNA, 19 nt, Artificial Sequence
  Description of Artificial Sequence: Synthetic oligonucleotide
ugugggaaggcacucauug

SEQ ID NO: 1681979 - RNA, 19 nt, Artificial Sequence
  Description of Artificial Sequence: Synthetic oligonucleotide
ugucauuccucgaacauca

SEQ ID NO: 1681980 - RNA, 19 nt, Artificial Sequence
  Description of Artificial Sequence: Synthetic oligonucleotide
aaugacucgcuuuacgccu

SEQ ID NO: 1681981 - RNA, 19 nt, Artificial Sequence
  Description of Artificial Sequence: Synthetic oligonucleotide
uguagagaguugcagcagg

SEQ ID NO: 1681982 - RNA, 19 nt, Artificial Sequence
  Description of Artificial Sequence: Synthetic oligonucleotide
auaaugagucuacuauccc

SEQ ID NO: 1681983 - RNA, 19 nt, Artificial Sequence
  Description of Artificial Sequence: Synthetic oligonucleotide
aauaguucgguaucucuga

SEQ ID NO: 1681984 - RNA, 19 nt, Artificial Sequence
  Description of Artificial Sequence: Synthetic oligonucleotide
uuccucgaacaucagaggg

SEQ ID NO: 1681985 - RNA, 19 nt, Artificial Sequence
  Description of Artificial Sequence: Synthetic oligonucleotide
ugugcaacagccauuuaug

SEQ ID NO: 1681986 - RNA, 19 nt, Artificial Sequence
  Description of Artificial Sequence: Synthetic oligonucleotide
acuuuaagcaccgggaugg

SEQ ID NO: 1681987 - RNA, 19 nt, Artificial Sequence
  Description of Artificial Sequence: Synthetic oligonucleotide
uaaaguuucauaaguuagu

SEQ ID NO: 1681988 - RNA, 19 nt, Artificial Sequence
  Description of Artificial Sequence: Synthetic oligonucleotide
ucucacuuuaagcaccggg

SEQ ID NO: 1681989 - RNA, 19 nt, Artificial Sequence
  Description of Artificial Sequence: Synthetic oligonucleotide
aacucauauguguaguugu

SEQ ID NO: 1681990 - RNA, 19 nt, Artificial Sequence
  Description of Artificial Sequence: Synthetic oligonucleotide
gaaauuucgguauguguug

SEQ ID NO: 1681991 - RNA, 19 nt, Artificial Sequence
  Description of Artificial Sequence: Synthetic oligonucleotide
ucaacggugagcauuuugu

SEQ ID NO: 1681992 - RNA, 19 nt, Artificial Sequence
  Description of Artificial Sequence: Synthetic oligonucleotide
ugaacuacuugccuccaag

SEQ ID NO: 1681993 - RNA, 19 nt, Artificial Sequence
  Description of Artificial Sequence: Synthetic oligonucleotide
ugauuugaaaacacugaga

SEQ ID NO: 1681994 - RNA, 19 nt, Artificial Sequence
  Description of Artificial Sequence: Synthetic oligonucleotide
aguagcagugcacuguggg

SEQ ID NO: 1681995 - RNA, 19 nt, Artificial Sequence
  Description of Artificial Sequence: Synthetic oligonucleotide
gugauuugaaaacacugag

SEQ ID NO: 1681996 - RNA, 19 nt, Artificial Sequence
  Description of Artificial Sequence: Synthetic oligonucleotide
uguccaacccugcugaacc

SEQ ID NO: 1681997 - RNA, 19 nt, Artificial Sequence
  Description of Artificial Sequence: Synthetic oligonucleotide
agcauaaugagucuacuau

SEQ ID NO: 1681998 - RNA, 19 nt, Artificial Sequence
  Description of Artificial Sequence: Synthetic oligonucleotide
guauguguugucaauauug

SEQ ID NO: 1681999 - RNA, 19 nt, Artificial Sequence
  Description of Artificial Sequence: Synthetic oligonucleotide
ugacuuaaaguuucauaag

SEQ ID NO: 1682000 - RNA, 19 nt, Artificial Sequence
  Description of Artificial Sequence: Synthetic oligonucleotide
auaacuguggguugacauc

SEQ ID NO: 1682001 - RNA, 19 nt, Artificial Sequence
  Description of Artificial Sequence: Synthetic oligonucleotide
aaauuguauucagauaacu

SEQ ID NO: 1682002 - RNA, 19 nt, Artificial Sequence
  Description of Artificial Sequence: Synthetic oligonucleotide
uuucucacuuuaagcaccg

SEQ ID NO: 1682003 - RNA, 19 nt, Artificial Sequence
  Description of Artificial Sequence: Synthetic oligonucleotide
uuuacugcagaggugauuc

SEQ ID NO: 1682004 - RNA, 19 nt, Artificial Sequence
  Description of Artificial Sequence: Synthetic oligonucleotide
auuccaauagacuuuggaa

SEQ ID NO: 1682005 - RNA, 19 nt, Artificial Sequence
  Description of Artificial Sequence: Synthetic oligonucleotide
uuaguuccaaauuguauuc

SEQ ID NO: 1682006 - RNA, 19 nt, Artificial Sequence
  Description of Artificial Sequence: Synthetic oligonucleotide
ugucuaucauaacuuggcc

SEQ ID NO: 1682007 - RNA, 19 nt, Artificial Sequence
  Description of Artificial Sequence: Synthetic oligonucleotide
aucucggagauucaggugu

SEQ ID NO: 1682008 - RNA, 19 nt, Artificial Sequence
  Description of Artificial Sequence: Synthetic oligonucleotide
uuagccgaagcauuaacuc

SEQ ID NO: 1682009 - RNA, 19 nt, Artificial Sequence
  Description of Artificial Sequence: Synthetic oligonucleotide
aacuacuugccuccaagga

SEQ ID NO: 1682010 - RNA, 19 nt, Artificial Sequence
  Description of Artificial Sequence: Synthetic oligonucleotide
aaacucauauguguaguug

SEQ ID NO: 1682011 - RNA, 19 nt, Artificial Sequence
  Description of Artificial Sequence: Synthetic oligonucleotide
ugaacugaacuacuugccu

SEQ ID NO: 1682012 - RNA, 19 nt, Artificial Sequence
  Description of Artificial Sequence: Synthetic oligonucleotide
aauuucgguauguguuguc

SEQ ID NO: 1682013 - RNA, 19 nt, Artificial Sequence
  Description of Artificial Sequence: Synthetic oligonucleotide
uguucagcuuacaauugug

SEQ ID NO: 1682014 - RNA, 19 nt, Artificial Sequence
  Description of Artificial Sequence: Synthetic oligonucleotide
gaacuacuugccuccaagg

SEQ ID NO: 1682015 - RNA, 19 nt, Artificial Sequence
  Description of Artificial Sequence: Synthetic oligonucleotide
uucuguggaaagacgagga

SEQ ID NO: 1682016 - RNA, 19 nt, Artificial Sequence
  Description of Artificial Sequence: Synthetic oligonucleotide
aaagacgaggauuccaaua

SEQ ID NO: 1682017 - RNA, 19 nt, Artificial Sequence
  Description of Artificial Sequence: Synthetic oligonucleotide
uuggccaauuaaaugcuug

SEQ ID NO: 1682018 - RNA, 19 nt, Artificial Sequence
  Description of Artificial Sequence: Synthetic oligonucleotide
cagaggguggugaaaauag

SEQ ID NO: 1682019 - RNA, 19 nt, Artificial Sequence
  Description of Artificial Sequence: Synthetic oligonucleotide
cucgcuuuacgccuggacg

SEQ ID NO: 1682020 - RNA, 19 nt, Artificial Sequence
  Description of Artificial Sequence: Synthetic oligonucleotide
uuugguuaacuuuguucag

SEQ ID NO: 1682021 - RNA, 19 nt, Artificial Sequence
  Description of Artificial Sequence: Synthetic oligonucleotide
gauuccaauagacuuugga

SEQ ID NO: 1682022 - RNA, 19 nt, Artificial Sequence
  Description of Artificial Sequence: Synthetic oligonucleotide
agaaguucagugauccggc

SEQ ID NO: 1682023 - RNA, 19 nt, Artificial Sequence
  Description of Artificial Sequence: Synthetic oligonucleotide
uugugcaacagccauuuau

SEQ ID NO: 1682024 - RNA, 19 nt, Artificial Sequence
  Description of Artificial Sequence: Synthetic oligonucleotide
uugaccacuucuuuucuca

SEQ ID NO: 1682025 - RNA, 19 nt, Artificial Sequence
  Description of Artificial Sequence: Synthetic oligonucleotide
cuaacauggcuccagcuug

SEQ ID NO: 1682026 - RNA, 19 nt, Artificial Sequence
  Description of Artificial Sequence: Synthetic oligonucleotide
uauugcugguuuuauuuac

SEQ ID NO: 1682027 - RNA, 19 nt, Artificial Sequence
  Description of Artificial Sequence: Synthetic oligonucleotide
uucgggauccucaaugacu

SEQ ID NO: 1682028 - RNA, 19 nt, Artificial Sequence
  Description of Artificial Sequence: Synthetic oligonucleotide
guagggauccagcauaaug

SEQ ID NO: 1682029 - RNA, 19 nt, Artificial Sequence
  Description of Artificial Sequence: Synthetic oligonucleotide
uuucucacgaggugaacug

SEQ ID NO: 1682030 - RNA, 19 nt, Artificial Sequence
  Description of Artificial Sequence: Synthetic oligonucleotide
acaauugugcaacagccau

SEQ ID NO: 1682031 - RNA, 19 nt, Artificial Sequence
  Description of Artificial Sequence: Synthetic oligonucleotide
ggugaacugaacuacuugc

SEQ ID NO: 1682032 - RNA, 19 nt, Artificial Sequence
  Description of Artificial Sequence: Synthetic oligonucleotide
uuuaugggacucaggguug

SEQ ID NO: 1682033 - RNA, 19 nt, Artificial Sequence
  Description of Artificial Sequence: Synthetic oligonucleotide
cuaggugcuuuacuaagcc

SEQ ID NO: 1682034 - RNA, 19 nt, Artificial Sequence
  Description of Artificial Sequence: Synthetic oligonucleotide
uauucagauaacugugggu

SEQ ID NO: 1682035 - RNA, 19 nt, Artificial Sequence
  Description of Artificial Sequence: Synthetic oligonucleotide
uggaaauuucgguaugugu

SEQ ID NO: 1682036 - RNA, 19 nt, Artificial Sequence
  Description of Artificial Sequence: Synthetic oligonucleotide
aucuucgggauccucaaug

SEQ ID NO: 1682037 - RNA, 19 nt, Artificial Sequence
  Description of Artificial Sequence: Synthetic oligonucleotide
ggguggugaaaauaguucg

SEQ ID NO: 1682038 - RNA, 19 nt, Artificial Sequence
  Description of Artificial Sequence: Synthetic oligonucleotide
ugagaucauuggcaaauac

SEQ ID NO: 1682039 - RNA, 19 nt, Artificial Sequence
  Description of Artificial Sequence: Synthetic oligonucleotide
uugucaauauugcugguuu

SEQ ID NO: 1682040 - RNA, 19 nt, Artificial Sequence
  Description of Artificial Sequence: Synthetic oligonucleotide
aacagcgaauucugcuuuc

SEQ ID NO: 1682041 - RNA, 19 nt, Artificial Sequence
  Description of Artificial Sequence: Synthetic oligonucleotide
uuugucauuccucgaacau

SEQ ID NO: 1682042 - RNA, 19 nt, Artificial Sequence
  Description of Artificial Sequence: Synthetic oligonucleotide
aauugugcaacagccauuu

SEQ ID NO: 1682043 - RNA, 19 nt, Artificial Sequence
  Description of Artificial Sequence: Synthetic oligonucleotide
agcauuaacucuucucuga

SEQ ID NO: 1682044 - RNA, 19 nt, Artificial Sequence
  Description of Artificial Sequence: Synthetic oligonucleotide
gacuuaaaguuucauaagu

SEQ ID NO: 1682045 - RNA, 19 nt, Artificial Sequence
  Description of Artificial Sequence: Synthetic oligonucleotide
uguggguugacaucaaguu

SEQ ID NO: 1682046 - RNA, 19 nt, Artificial Sequence
  Description of Artificial Sequence: Synthetic oligonucleotide
ugguuaacuuuguucagcu

SEQ ID NO: 1682047 - RNA, 19 nt, Artificial Sequence
  Description of Artificial Sequence: Synthetic oligonucleotide
aacaagacaucuccaggau

SEQ ID NO: 1682048 - RNA, 19 nt, Artificial Sequence
  Description of Artificial Sequence: Synthetic oligonucleotide
ucacgaggugaacugaacu

SEQ ID NO: 1682049 - RNA, 19 nt, Artificial Sequence
  Description of Artificial Sequence: Synthetic oligonucleotide
ucgcuuuacgccuggacgc

SEQ ID NO: 1682050 - RNA, 19 nt, Artificial Sequence
  Description of Artificial Sequence: Synthetic oligonucleotide
ugaaugguagcugaugauc

SEQ ID NO: 1682051 - RNA, 19 nt, Artificial Sequence
  Description of Artificial Sequence: Synthetic oligonucleotide
aguugcagcaggaaucugg

SEQ ID NO: 1682052 - RNA, 19 nt, Artificial Sequence
  Description of Artificial Sequence: Synthetic oligonucleotide
acuaggugcuuuacuaagc

SEQ ID NO: 1682053 - RNA, 19 nt, Artificial Sequence
  Description of Artificial Sequence: Synthetic oligonucleotide
uuuuguagggauccagcau

SEQ ID NO: 1682054 - RNA, 19 nt, Artificial Sequence
  Description of Artificial Sequence: Synthetic oligonucleotide
ucgggauccucaaugacuc

SEQ ID NO: 1682055 - RNA, 19 nt, Artificial Sequence
  Description of Artificial Sequence: Synthetic oligonucleotide
aaacaguagcagugcacug

SEQ ID NO: 1682056 - RNA, 19 nt, Artificial Sequence
  Description of Artificial Sequence: Synthetic oligonucleotide
agucuguuugaccacuucu

SEQ ID NO: 1682057 - RNA, 19 nt, Artificial Sequence
  Description of Artificial Sequence: Synthetic oligonucleotide
acgaggugaacugaacuac

SEQ ID NO: 1682058 - RNA, 19 nt, Artificial Sequence
  Description of Artificial Sequence: Synthetic oligonucleotide
ugaggucaacaucuugacc

SEQ ID NO: 1682059 - RNA, 19 nt, Artificial Sequence
  Description of Artificial Sequence: Synthetic oligonucleotide
uucgguaucucugauacuu

SEQ ID NO: 1682060 - RNA, 19 nt, Artificial Sequence
  Description of Artificial Sequence: Synthetic oligonucleotide
auauguguaguuguuuucu

SEQ ID NO: 1682061 - RNA, 19 nt, Artificial Sequence
  Description of Artificial Sequence: Synthetic oligonucleotide
acuauccccaucuucggga

SEQ ID NO: 1682062 - RNA, 19 nt, Artificial Sequence
  Description of Artificial Sequence: Synthetic oligonucleotide
uccagcauaaugagucuac

SEQ ID NO: 1682063 - RNA, 19 nt, Artificial Sequence
  Description of Artificial Sequence: Synthetic oligonucleotide
uguuaggggccacauuucu

SEQ ID NO: 1682064 - RNA, 19 nt, Artificial Sequence
  Description of Artificial Sequence: Synthetic oligonucleotide
acuacuugccuccaaggaa

SEQ ID NO: 1682065 - RNA, 19 nt, Artificial Sequence
  Description of Artificial Sequence: Synthetic oligonucleotide
aaggcacucauugcugcac

SEQ ID NO: 1682066 - RNA, 19 nt, Artificial Sequence
  Description of Artificial Sequence: Synthetic oligonucleotide
uucuauuucuggcaugguu

SEQ ID NO: 1682067 - RNA, 19 nt, Artificial Sequence
  Description of Artificial Sequence: Synthetic oligonucleotide
uugcugacaaacauccuua

SEQ ID NO: 1682068 - RNA, 19 nt, Artificial Sequence
  Description of Artificial Sequence: Synthetic oligonucleotide
ucuuagccgaagcauuaac

SEQ ID NO: 1682069 - RNA, 19 nt, Artificial Sequence
  Description of Artificial Sequence: Synthetic oligonucleotide
ugucuuugacccaaccaaa

SEQ ID NO: 1682070 - RNA, 19 nt, Artificial Sequence
  Description of Artificial Sequence: Synthetic oligonucleotide
uggagaaagucuuuuccau

SEQ ID NO: 1682071 - RNA, 19 nt, Artificial Sequence
  Description of Artificial Sequence: Synthetic oligonucleotide
gucuaucauaacuuggcca

SEQ ID NO: 1682072 - RNA, 19 nt, Artificial Sequence
  Description of Artificial Sequence: Synthetic oligonucleotide
ucagauaacuguggguuga

SEQ ID NO: 1682073 - RNA, 19 nt, Artificial Sequence
  Description of Artificial Sequence: Synthetic oligonucleotide
ugagcauuuuguagggauc

SEQ ID NO: 1682074 - RNA, 19 nt, Artificial Sequence
  Description of Artificial Sequence: Synthetic oligonucleotide
caucuuuggagaaacagua

SEQ ID NO: 1682075 - RNA, 19 nt, Artificial Sequence
  Description of Artificial Sequence: Synthetic oligonucleotide
uggccaauuaaaugcuuga

SEQ ID NO: 1682076 - RNA, 19 nt, Artificial Sequence
  Description of Artificial Sequence: Synthetic oligonucleotide
cucacuuuaagcaccggga

SEQ ID NO: 1682077 - RNA, 19 nt, Artificial Sequence
  Description of Artificial Sequence: Synthetic oligonucleotide
uuucucgaaccuuggucag

SEQ ID NO: 1682078 - RNA, 19 nt, Artificial Sequence
  Description of Artificial Sequence: Synthetic oligonucleotide
uagccgaagcauuaacucu

SEQ ID NO: 1682079 - RNA, 19 nt, Artificial Sequence
  Description of Artificial Sequence: Synthetic oligonucleotide
gauccggccauguucugug

SEQ ID NO: 1682080 - RNA, 19 nt, Artificial Sequence
  Description of Artificial Sequence: Synthetic oligonucleotide
gagucuacuauccccaucu

SEQ ID NO: 1682081 - RNA, 19 nt, Artificial Sequence
  Description of Artificial Sequence: Synthetic oligonucleotide
acucgcuuuacgccuggac

SEQ ID NO: 1682082 - RNA, 19 nt, Artificial Sequence
  Description of Artificial Sequence: Synthetic oligonucleotide
auuucucacgaggugaacu

SEQ ID NO: 1682083 - RNA, 19 nt, Artificial Sequence
  Description of Artificial Sequence: Synthetic oligonucleotide
aucuagaagugauuugaaa

SEQ ID NO: 1682084 - RNA, 19 nt, Artificial Sequence
  Description of Artificial Sequence: Synthetic oligonucleotide
gcaggauuagcaucuuugg

SEQ ID NO: 1682085 - RNA, 19 nt, Artificial Sequence
  Description of Artificial Sequence: Synthetic oligonucleotide
gacgaggauuccaauagac

SEQ ID NO: 1682086 - RNA, 19 nt, Artificial Sequence
  Description of Artificial Sequence: Synthetic oligonucleotide
gauaacuguggguugacau

SEQ ID NO: 1682087 - RNA, 19 nt, Artificial Sequence
  Description of Artificial Sequence: Synthetic oligonucleotide
gcucgcaucagucuguuug

SEQ ID NO: 1682088 - RNA, 19 nt, Artificial Sequence
  Description of Artificial Sequence: Synthetic oligonucleotide
uauguguaguuguuuucuc

SEQ ID NO: 1682089 - RNA, 19 nt, Artificial Sequence
  Description of Artificial Sequence: Synthetic oligonucleotide
cuuuguucagcuuacaauu

SEQ ID NO: 1682090 - RNA, 19 nt, Artificial Sequence
  Description of Artificial Sequence: Synthetic oligonucleotide
cuuagcaggauuagcaucu

SEQ ID NO: 1682091 - RNA, 19 nt, Artificial Sequence
  Description of Artificial Sequence: Synthetic oligonucleotide
ucgaacaucagaggguggu

SEQ ID NO: 1682092 - RNA, 19 nt, Artificial Sequence
  Description of Artificial Sequence: Synthetic oligonucleotide
uccucuagaacagcgaauu

SEQ ID NO: 1682093 - RNA, 19 nt, Artificial Sequence
  Description of Artificial Sequence: Synthetic oligonucleotide
gcuucuauuucuggcaugg

SEQ ID NO: 1682094 - RNA, 19 nt, Artificial Sequence
  Description of Artificial Sequence: Synthetic oligonucleotide
gaaguucagugauccggcc

SEQ ID NO: 1682095 - RNA, 19 nt, Artificial Sequence
  Description of Artificial Sequence: Synthetic oligonucleotide
augcuugaaugguagcuga

SEQ ID NO: 1682096 - RNA, 19 nt, Artificial Sequence
  Description of Artificial Sequence: Synthetic oligonucleotide
gaaacaguagcagugcacu

SEQ ID NO: 1682097 - RNA, 19 nt, Artificial Sequence
  Description of Artificial Sequence: Synthetic oligonucleotide
auacuaggugcuuuacuaa

SEQ ID NO: 1682098 - RNA, 19 nt, Artificial Sequence
  Description of Artificial Sequence: Synthetic oligonucleotide
auauugcugguuuuauuua

SEQ ID NO: 1682099 - RNA, 19 nt, Artificial Sequence
  Description of Artificial Sequence: Synthetic oligonucleotide
ucaauauugcugguuuuau

SEQ ID NO: 1682100 - RNA, 19 nt, Artificial Sequence
  Description of Artificial Sequence: Synthetic oligonucleotide
ucucgaaccuuggucagca

SEQ ID NO: 1682101 - RNA, 19 nt, Artificial Sequence
  Description of Artificial Sequence: Synthetic oligonucleotide
gagggcucgcaucagucug

SEQ ID NO: 1682102 - RNA, 19 nt, Artificial Sequence
  Description of Artificial Sequence: Synthetic oligonucleotide
gugaacugaacuacuugcc

SEQ ID NO: 1682103 - RNA, 19 nt, Artificial Sequence
  Description of Artificial Sequence: Synthetic oligonucleotide
ucgguaucucugauacuug

SEQ ID NO: 1682104 - RNA, 19 nt, Artificial Sequence
  Description of Artificial Sequence: Synthetic oligonucleotide
ggauuagcaucuuuggaga

SEQ ID NO: 1682105 - RNA, 19 nt, Artificial Sequence
  Description of Artificial Sequence: Synthetic oligonucleotide
auugcugcacggcugccca

SEQ ID NO: 1682106 - RNA, 19 nt, Artificial Sequence
  Description of Artificial Sequence: Synthetic oligonucleotide
acuuaaaguuucauaaguu

SEQ ID NO: 1682107 - RNA, 19 nt, Artificial Sequence
  Description of Artificial Sequence: Synthetic oligonucleotide
aguuaguuccaaauuguau

SEQ ID NO: 1682108 - RNA, 19 nt, Artificial Sequence
  Description of Artificial Sequence: Synthetic oligonucleotide
uuguagagaguugcagcag

SEQ ID NO: 1682109 - RNA, 19 nt, Artificial Sequence
  Description of Artificial Sequence: Synthetic oligonucleotide
ucucacgaggugaacugaa

SEQ ID NO: 1682110 - RNA, 19 nt, Artificial Sequence
  Description of Artificial Sequence: Synthetic oligonucleotide
caaaugagucaacggugag

SEQ ID NO: 1682111 - RNA, 19 nt, Artificial Sequence
  Description of Artificial Sequence: Synthetic oligonucleotide
cuuuacgccuggacgcugc

SEQ ID NO: 1682112 - RNA, 19 nt, Artificial Sequence
  Description of Artificial Sequence: Synthetic oligonucleotide
cuacuugccuccaaggaaa

SEQ ID NO: 1682113 - RNA, 19 nt, Artificial Sequence
  Description of Artificial Sequence: Synthetic oligonucleotide
agugauccggccauguucu

SEQ ID NO: 1682114 - RNA, 19 nt, Artificial Sequence
  Description of Artificial Sequence: Synthetic oligonucleotide
uugagggcucgcaucaguc

SEQ ID NO: 1682115 - RNA, 19 nt, Artificial Sequence
  Description of Artificial Sequence: Synthetic oligonucleotide
cacuuuaagcaccgggaug

SEQ ID NO: 1682116 - RNA, 19 nt, Artificial Sequence
  Description of Artificial Sequence: Synthetic oligonucleotide
uuguagggauccagcauaa

SEQ ID NO: 1682117 - RNA, 19 nt, Artificial Sequence
  Description of Artificial Sequence: Synthetic oligonucleotide
ucgaaccuuggucagcaua

SEQ ID NO: 1682118 - RNA, 19 nt, Artificial Sequence
  Description of Artificial Sequence: Synthetic oligonucleotide
cagugauccggccauguuc

SEQ ID NO: 1682119 - RNA, 19 nt, Artificial Sequence
  Description of Artificial Sequence: Synthetic oligonucleotide
uggugaaaauaguucggua

SEQ ID NO: 1682120 - RNA, 19 nt, Artificial Sequence
  Description of Artificial Sequence: Synthetic oligonucleotide
ugccuaacauggcuccagc

SEQ ID NO: 1682121 - RNA, 19 nt, Artificial Sequence
  Description of Artificial Sequence: Synthetic oligonucleotide
aucauaacuuggccaauua

SEQ ID NO: 1682122 - RNA, 19 nt, Artificial Sequence
  Description of Artificial Sequence: Synthetic oligonucleotide
uuguuaggggccacauuuc

SEQ ID NO: 1682123 - RNA, 19 nt, Artificial Sequence
  Description of Artificial Sequence: Synthetic oligonucleotide
aacagccauuuaugggacu

SEQ ID NO: 1682124 - RNA, 19 nt, Artificial Sequence
  Description of Artificial Sequence: Synthetic oligonucleotide
gucaacggugagcauuuug

SEQ ID NO: 1682125 - RNA, 19 nt, Artificial Sequence
  Description of Artificial Sequence: Synthetic oligonucleotide
uagcagugcacugugggaa

SEQ ID NO: 1682126 - RNA, 19 nt, Artificial Sequence
  Description of Artificial Sequence: Synthetic oligonucleotide
cuuguuaggggccacauuu

SEQ ID NO: 1682127 - RNA, 19 nt, Artificial Sequence
  Description of Artificial Sequence: Synthetic oligonucleotide
ugagucuacuauccccauc

SEQ ID NO: 1682128 - RNA, 19 nt, Artificial Sequence
  Description of Artificial Sequence: Synthetic oligonucleotide
gagaucauuggcaaauacu

SEQ ID NO: 1682129 - RNA, 19 nt, Artificial Sequence
  Description of Artificial Sequence: Synthetic oligonucleotide
acauccuuagcaggauuag

SEQ ID NO: 1682130 - RNA, 19 nt, Artificial Sequence
  Description of Artificial Sequence: Synthetic oligonucleotide
gaaugguagcugaugaucu

SEQ ID NO: 1682131 - RNA, 19 nt, Artificial Sequence
  Description of Artificial Sequence: Synthetic oligonucleotide
aggggccacauuucucacg

SEQ ID NO: 1682132 - RNA, 19 nt, Artificial Sequence
  Description of Artificial Sequence: Synthetic oligonucleotide
aauguggauagaggguuuu

SEQ ID NO: 1682133 - RNA, 19 nt, Artificial Sequence
  Description of Artificial Sequence: Synthetic oligonucleotide
auguccaacccugcugaac

SEQ ID NO: 1682134 - RNA, 19 nt, Artificial Sequence
  Description of Artificial Sequence: Synthetic oligonucleotide
agcaccgggauggacacug

SEQ ID NO: 1682135 - RNA, 19 nt, Artificial Sequence
  Description of Artificial Sequence: Synthetic oligonucleotide
ugagggcucgcaucagucu

SEQ ID NO: 1682136 - RNA, 19 nt, Artificial Sequence
  Description of Artificial Sequence: Synthetic oligonucleotide
ggugcuuuacuaagccucg

SEQ ID NO: 1682137 - RNA, 19 nt, Artificial Sequence
  Description of Artificial Sequence: Synthetic oligonucleotide
ggugaaaauaguucgguau

SEQ ID NO: 1682138 - RNA, 19 nt, Artificial Sequence
  Description of Artificial Sequence: Synthetic oligonucleotide
uuacugcagaggugauucc

SEQ ID NO: 1682139 - RNA, 19 nt, Artificial Sequence
  Description of Artificial Sequence: Synthetic oligonucleotide
cacauuucucacgagguga

SEQ ID NO: 1682140 - RNA, 19 nt, Artificial Sequence
  Description of Artificial Sequence: Synthetic oligonucleotide
ugacucgcuuuacgccugg

SEQ ID NO: 1682141 - RNA, 19 nt, Artificial Sequence
  Description of Artificial Sequence: Synthetic oligonucleotide
agacgaggauuccaauaga

SEQ ID NO: 1682142 - RNA, 19 nt, Artificial Sequence
  Description of Artificial Sequence: Synthetic oligonucleotide
ugucaauauugcugguuuu

SEQ ID NO: 1682143 - RNA, 19 nt, Artificial Sequence
  Description of Artificial Sequence: Synthetic oligonucleotide
gucuacuauccccaucuuc

SEQ ID NO: 1682144 - RNA, 19 nt, Artificial Sequence
  Description of Artificial Sequence: Synthetic oligonucleotide
acaagacaucuccaggauu

SEQ ID NO: 1682145 - RNA, 19 nt, Artificial Sequence
  Description of Artificial Sequence: Synthetic oligonucleotide
uuuaagcaccgggauggac

SEQ ID NO: 1682146 - RNA, 19 nt, Artificial Sequence
  Description of Artificial Sequence: Synthetic oligonucleotide
cuuagccgaagcauuaacu

SEQ ID NO: 1682147 - RNA, 19 nt, Artificial Sequence
  Description of Artificial Sequence: Synthetic oligonucleotide
uuggcagucuuagccgaag

SEQ ID NO: 1682148 - RNA, 19 nt, Artificial Sequence
  Description of Artificial Sequence: Synthetic oligonucleotide
ucggagauucaggugugca

SEQ ID NO: 1682149 - RNA, 19 nt, Artificial Sequence
  Description of Artificial Sequence: Synthetic oligonucleotide
auuuccuuguuaggggcca

SEQ ID NO: 1682150 - RNA, 19 nt, Artificial Sequence
  Description of Artificial Sequence: Synthetic oligonucleotide
auaguucgguaucucugau

SEQ ID NO: 1682151 - RNA, 19 nt, Artificial Sequence
  Description of Artificial Sequence: Synthetic oligonucleotide
acccugcugaacccugagg

SEQ ID NO: 1682152 - RNA, 19 nt, Artificial Sequence
  Description of Artificial Sequence: Synthetic oligonucleotide
agccauuuaugggacucag

SEQ ID NO: 1682153 - RNA, 19 nt, Artificial Sequence
  Description of Artificial Sequence: Synthetic oligonucleotide
cuucgggauccucaaugac

SEQ ID NO: 1682154 - RNA, 19 nt, Artificial Sequence
  Description of Artificial Sequence: Synthetic oligonucleotide
uuaugggacucaggguuga

SEQ ID NO: 1682155 - RNA, 19 nt, Artificial Sequence
  Description of Artificial Sequence: Synthetic oligonucleotide
uuuacgccuggacgcugca

SEQ ID NO: 1682156 - RNA, 19 nt, Artificial Sequence
  Description of Artificial Sequence: Synthetic oligonucleotide
ggaaaugccuaacauggcu

SEQ ID NO: 1682157 - RNA, 19 nt, Artificial Sequence
  Description of Artificial Sequence: Synthetic oligonucleotide
uucucacgaggugaacuga

SEQ ID NO: 1682158 - RNA, 19 nt, Artificial Sequence
  Description of Artificial Sequence: Synthetic oligonucleotide
ugcauagcauuuccuuguu

SEQ ID NO: 1682159 - RNA, 19 nt, Artificial Sequence
  Description of Artificial Sequence: Synthetic oligonucleotide
agcuguucugucaaguuuu

SEQ ID NO: 1682160 - RNA, 19 nt, Artificial Sequence
  Description of Artificial Sequence: Synthetic oligonucleotide
uucagugauccggccaugu

SEQ ID NO: 1682161 - RNA, 19 nt, Artificial Sequence
  Description of Artificial Sequence: Synthetic oligonucleotide
augccuaacauggcuccag

SEQ ID NO: 1682162 - RNA, 19 nt, Artificial Sequence
  Description of Artificial Sequence: Synthetic oligonucleotide
acgccuggacgcugcaggg

SEQ ID NO: 1682163 - RNA, 19 nt, Artificial Sequence
  Description of Artificial Sequence: Synthetic oligonucleotide
uaguucgguaucucugaua

SEQ ID NO: 1682164 - RNA, 19 nt, Artificial Sequence
  Description of Artificial Sequence: Synthetic oligonucleotide
aggugugcaauauguccaa

SEQ ID NO: 1682165 - RNA, 19 nt, Artificial Sequence
  Description of Artificial Sequence: Synthetic oligonucleotide
ccaggauugagaaguucag

SEQ ID NO: 1682166 - RNA, 19 nt, Artificial Sequence
  Description of Artificial Sequence: Synthetic oligonucleotide
cacgaggugaacugaacua

SEQ ID NO: 1682167 - RNA, 19 nt, Artificial Sequence
  Description of Artificial Sequence: Synthetic oligonucleotide
ugcugaacccugaggucaa

SEQ ID NO: 1682168 - RNA, 19 nt, Artificial Sequence
  Description of Artificial Sequence: Synthetic oligonucleotide
gugagcauuuuguagggau

SEQ ID NO: 1682169 - RNA, 19 nt, Artificial Sequence
  Description of Artificial Sequence: Synthetic oligonucleotide
uagagaguugcagcaggaa

SEQ ID NO: 1682170 - RNA, 19 nt, Artificial Sequence
  Description of Artificial Sequence: Synthetic oligonucleotide
cuugcugacaaacauccuu

SEQ ID NO: 1682171 - RNA, 19 nt, Artificial Sequence
  Description of Artificial Sequence: Synthetic oligonucleotide
agcuuacaauugugcaaca

SEQ ID NO: 1682172 - RNA, 19 nt, Artificial Sequence
  Description of Artificial Sequence: Synthetic oligonucleotide
agcaggaaucuggaaggug

SEQ ID NO: 1682173 - RNA, 19 nt, Artificial Sequence
  Description of Artificial Sequence: Synthetic oligonucleotide
gucaauauugcugguuuua

SEQ ID NO: 1682174 - RNA, 19 nt, Artificial Sequence
  Description of Artificial Sequence: Synthetic oligonucleotide
gcuuacaauugugcaacag

SEQ ID NO: 1682175 - RNA, 19 nt, Artificial Sequence
  Description of Artificial Sequence: Synthetic oligonucleotide
ucagugauccggccauguu

SEQ ID NO: 1682176 - RNA, 19 nt, Artificial Sequence
  Description of Artificial Sequence: Synthetic oligonucleotide
ucuugacccucaggaagca

SEQ ID NO: 1682177 - RNA, 19 nt, Artificial Sequence
  Description of Artificial Sequence: Synthetic oligonucleotide
ggaaauuucgguauguguu

SEQ ID NO: 1682178 - RNA, 19 nt, Artificial Sequence
  Description of Artificial Sequence: Synthetic oligonucleotide
ggcacucauugcugcacgg

SEQ ID NO: 1682179 - RNA, 19 nt, Artificial Sequence
  Description of Artificial Sequence: Synthetic oligonucleotide
uacuugccuccaaggaaau

SEQ ID NO: 1682180 - RNA, 19 nt, Artificial Sequence
  Description of Artificial Sequence: Synthetic oligonucleotide
gggauccucaaugacucgc

SEQ ID NO: 1682181 - RNA, 19 nt, Artificial Sequence
  Description of Artificial Sequence: Synthetic oligonucleotide
uccaacccugcugaacccu

SEQ ID NO: 1682182 - RNA, 19 nt, Artificial Sequence
  Description of Artificial Sequence: Synthetic oligonucleotide
gcccucaaaacuucuucug

SEQ ID NO: 1682183 - RNA, 19 nt, Artificial Sequence
  Description of Artificial Sequence: Synthetic oligonucleotide
cauuuaugggacucagggu

SEQ ID NO: 1682184 - RNA, 19 nt, Artificial Sequence
  Description of Artificial Sequence: Synthetic oligonucleotide
gcuugaaugguagcugaug

SEQ ID NO: 1682185 - RNA, 19 nt, Artificial Sequence
  Description of Artificial Sequence: Synthetic oligonucleotide
ugcccaucuagaagugauu

SEQ ID NO: 1682186 - RNA, 19 nt, Artificial Sequence
  Description of Artificial Sequence: Synthetic oligonucleotide
auccggccauguucugugg

SEQ ID NO: 1682187 - RNA, 19 nt, Artificial Sequence
  Description of Artificial Sequence: Synthetic oligonucleotide
agccgaagcauuaacucuu

SEQ ID NO: 1682188 - RNA, 19 nt, Artificial Sequence
  Description of Artificial Sequence: Synthetic oligonucleotide
auuuacugcagaggugauu

SEQ ID NO: 1682189 - RNA, 19 nt, Artificial Sequence
  Description of Artificial Sequence: Synthetic oligonucleotide
guagagaguugcagcagga

SEQ ID NO: 1682190 - RNA, 19 nt, Artificial Sequence
  Description of Artificial Sequence: Synthetic oligonucleotide
augagucuacuauccccau

SEQ ID NO: 1682191 - RNA, 19 nt, Artificial Sequence
  Description of Artificial Sequence: Synthetic oligonucleotide
guccaacccugcugaaccc

SEQ ID NO: 1682192 - RNA, 19 nt, Artificial Sequence
  Description of Artificial Sequence: Synthetic oligonucleotide
gaaagacgaggauuccaau

SEQ ID NO: 1682193 - RNA, 19 nt, Artificial Sequence
  Description of Artificial Sequence: Synthetic oligonucleotide
guuaggggccacauuucuc

SEQ ID NO: 1682194 - RNA, 19 nt, Artificial Sequence
  Description of Artificial Sequence: Synthetic oligonucleotide
caugguugagaauccuugu

SEQ ID NO: 1682195 - RNA, 19 nt, Artificial Sequence
  Description of Artificial Sequence: Synthetic oligonucleotide
gaacagcgaauucugcuuu

SEQ ID NO: 1682196 - RNA, 19 nt, Artificial Sequence
  Description of Artificial Sequence: Synthetic oligonucleotide
uuacgccuggacgcugcag

SEQ ID NO: 1682197 - RNA, 19 nt, Artificial Sequence
  Description of Artificial Sequence: Synthetic oligonucleotide
agucuuagccgaagcauua

SEQ ID NO: 1682198 - RNA, 19 nt, Artificial Sequence
  Description of Artificial Sequence: Synthetic oligonucleotide
acucauauguguaguuguu

SEQ ID NO: 1682199 - RNA, 19 nt, Artificial Sequence
  Description of Artificial Sequence: Synthetic oligonucleotide
cuccaaggaaaugccuaac

SEQ ID NO: 1682200 - RNA, 19 nt, Artificial Sequence
  Description of Artificial Sequence: Synthetic oligonucleotide
uccuuguuaggggccacau

SEQ ID NO: 1682201 - RNA, 19 nt, Artificial Sequence
  Description of Artificial Sequence: Synthetic oligonucleotide
cauuaacucuucucugacu

SEQ ID NO: 1682202 - RNA, 19 nt, Artificial Sequence
  Description of Artificial Sequence: Synthetic oligonucleotide
uauccccaucuucgggauc

SEQ ID NO: 1682203 - RNA, 19 nt, Artificial Sequence
  Description of Artificial Sequence: Synthetic oligonucleotide
cagauaacuguggguugac

SEQ ID NO: 1682204 - RNA, 19 nt, Artificial Sequence
  Description of Artificial Sequence: Synthetic oligonucleotide
cagcgaauucugcuuucuc

SEQ ID NO: 1682205 - RNA, 19 nt, Artificial Sequence
  Description of Artificial Sequence: Synthetic oligonucleotide
cauuucucacgaggugaac

SEQ ID NO: 1682206 - RNA, 19 nt, Artificial Sequence
  Description of Artificial Sequence: Synthetic oligonucleotide
uggcaugguugagaauccu

SEQ ID NO: 1682207 - RNA, 19 nt, Artificial Sequence
  Description of Artificial Sequence: Synthetic oligonucleotide
augacucgcuuuacgccug

SEQ ID NO: 1682208 - RNA, 19 nt, Artificial Sequence
  Description of Artificial Sequence: Synthetic oligonucleotide
agggcccaaccccagcaaa

SEQ ID NO: 1682209 - RNA, 19 nt, Artificial Sequence
  Description of Artificial Sequence: Synthetic oligonucleotide
cucggagauucaggugugc

SEQ ID NO: 1682210 - RNA, 19 nt, Artificial Sequence
  Description of Artificial Sequence: Synthetic oligonucleotide
caacggugagcauuuugua

SEQ ID NO: 1682211 - RNA, 19 nt, Artificial Sequence
  Description of Artificial Sequence: Synthetic oligonucleotide
ccacauuucucacgaggug

SEQ ID NO: 1682212 - RNA, 19 nt, Artificial Sequence
  Description of Artificial Sequence: Synthetic oligonucleotide
agucuacuauccccaucuu

SEQ ID NO: 1682213 - RNA, 19 nt, Artificial Sequence
  Description of Artificial Sequence: Synthetic oligonucleotide
uguagggauccagcauaau

SEQ ID NO: 1682214 - RNA, 19 nt, Artificial Sequence
  Description of Artificial Sequence: Synthetic oligonucleotide
cuugacccucaggaagcac

SEQ ID NO: 1682215 - RNA, 19 nt, Artificial Sequence
  Description of Artificial Sequence: Synthetic oligonucleotide
ugacuggucccuggagaaa

SEQ ID NO: 1682216 - RNA, 19 nt, Artificial Sequence
  Description of Artificial Sequence: Synthetic oligonucleotide
uuagcaggauuagcaucuu

SEQ ID NO: 1682217 - RNA, 19 nt, Artificial Sequence
  Description of Artificial Sequence: Synthetic oligonucleotide
caccgggauggacacuguc

SEQ ID NO: 1682218 - RNA, 19 nt, Artificial Sequence
  Description of Artificial Sequence: Synthetic oligonucleotide
gagucaacggugagcauuu

SEQ ID NO: 1682219 - RNA, 19 nt, Artificial Sequence
  Description of Artificial Sequence: Synthetic oligonucleotide
ggccaauuaaaugcuugaa

SEQ ID NO: 1682220 - RNA, 19 nt, Artificial Sequence
  Description of Artificial Sequence: Synthetic oligonucleotide
gucuuagccgaagcauuaa

SEQ ID NO: 1682221 - RNA, 19 nt, Artificial Sequence
  Description of Artificial Sequence: Synthetic oligonucleotide
cuugagggcucgcaucagu

SEQ ID NO: 1682222 - RNA, 19 nt, Artificial Sequence
  Description of Artificial Sequence: Synthetic oligonucleotide
agggcucgcaucagucugu

SEQ ID NO: 1682223 - RNA, 19 nt, Artificial Sequence
  Description of Artificial Sequence: Synthetic oligonucleotide
cugaacuacuugccuccaa

SEQ ID NO: 1682224 - RNA, 19 nt, Artificial Sequence
  Description of Artificial Sequence: Synthetic oligonucleotide
acccucuugagggcucgca

SEQ ID NO: 1682225 - RNA, 19 nt, Artificial Sequence
  Description of Artificial Sequence: Synthetic oligonucleotide
caauugugcaacagccauu

SEQ ID NO: 1682226 - RNA, 19 nt, Artificial Sequence
  Description of Artificial Sequence: Synthetic oligonucleotide
caggauugagaaguucagu

SEQ ID NO: 1682227 - RNA, 19 nt, Artificial Sequence
  Description of Artificial Sequence: Synthetic oligonucleotide
gguaucucugauacuugcu

SEQ ID NO: 1682228 - RNA, 19 nt, Artificial Sequence
  Description of Artificial Sequence: Synthetic oligonucleotide
cuggacgcugcagggccac

SEQ ID NO: 1682229 - RNA, 19 nt, Artificial Sequence
  Description of Artificial Sequence: Synthetic oligonucleotide
gguauguguugucaauauu

SEQ ID NO: 1682230 - RNA, 19 nt, Artificial Sequence
  Description of Artificial Sequence: Synthetic oligonucleotide
cucauauguguaguuguuu

SEQ ID NO: 1682231 - RNA, 19 nt, Artificial Sequence
  Description of Artificial Sequence: Synthetic oligonucleotide
cuuggccaauuaaaugcuu

SEQ ID NO: 1682232 - RNA, 19 nt, Artificial Sequence
  Description of Artificial Sequence: Synthetic oligonucleotide
cagccauuuaugggacuca

SEQ ID NO: 1682233 - RNA, 19 nt, Artificial Sequence
  Description of Artificial Sequence: Synthetic oligonucleotide
cuauccccaucuucgggau

SEQ ID NO: 1682234 - RNA, 19 nt, Artificial Sequence
  Description of Artificial Sequence: Synthetic oligonucleotide
aagcaccgggauggacacu

SEQ ID NO: 1682235 - RNA, 19 nt, Artificial Sequence
  Description of Artificial Sequence: Synthetic oligonucleotide
guucgguaucucugauacu

SEQ ID NO: 1682236 - RNA, 19 nt, Artificial Sequence
  Description of Artificial Sequence: Synthetic oligonucleotide
gcagucuuagccgaagcau

SEQ ID NO: 1682237 - RNA, 19 nt, Artificial Sequence
  Description of Artificial Sequence: Synthetic oligonucleotide
ggugagcauuuuguaggga

SEQ ID NO: 1682238 - RNA, 19 nt, Artificial Sequence
  Description of Artificial Sequence: Synthetic oligonucleotide
gccuccaaggaaaugccua

SEQ ID NO: 1682239 - RNA, 19 nt, Artificial Sequence
  Description of Artificial Sequence: Synthetic oligonucleotide
cagaggugauuccuggauu

SEQ ID NO: 1682240 - RNA, 19 nt, Artificial Sequence
  Description of Artificial Sequence: Synthetic oligonucleotide
caauguggauagaggguuu

SEQ ID NO: 1682241 - RNA, 19 nt, Artificial Sequence
  Description of Artificial Sequence: Synthetic oligonucleotide
uggacgcugcagggccacc

SEQ ID NO: 1682242 - RNA, 19 nt, Artificial Sequence
  Description of Artificial Sequence: Synthetic oligonucleotide
gcuuuacgccuggacgcug

SEQ ID NO: 1682243 - RNA, 19 nt, Artificial Sequence
  Description of Artificial Sequence: Synthetic oligonucleotide
ggauccucaaugacucgcu

SEQ ID NO: 1682244 - RNA, 19 nt, Artificial Sequence
  Description of Artificial Sequence: Synthetic oligonucleotide
ccucaaugacucgcuuuac

SEQ ID NO: 1682245 - RNA, 19 nt, Artificial Sequence
  Description of Artificial Sequence: Synthetic oligonucleotide
gaggugauuccuggauuuu

SEQ ID NO: 1682246 - RNA, 19 nt, Artificial Sequence
  Description of Artificial Sequence: Synthetic oligonucleotide
gccgaagcauuaacucuuc

SEQ ID NO: 1682247 - RNA, 19 nt, Artificial Sequence
  Description of Artificial Sequence: Synthetic oligonucleotide
cacccucuugagggcucgc

SEQ ID NO: 1682248 - RNA, 19 nt, Artificial Sequence
  Description of Artificial Sequence: Synthetic oligonucleotide
gggauccagcauaaugagu

SEQ ID NO: 1682249 - RNA, 19 nt, Artificial Sequence
  Description of Artificial Sequence: Synthetic oligonucleotide
agucaacggugagcauuuu

SEQ ID NO: 1682250 - RNA, 19 nt, Artificial Sequence
  Description of Artificial Sequence: Synthetic oligonucleotide
cgaggugaacugaacuacu

SEQ ID NO: 1682251 - RNA, 19 nt, Artificial Sequence
  Description of Artificial Sequence: Synthetic oligonucleotide
ccagcauaaugagucuacu

SEQ ID NO: 1682252 - RNA, 19 nt, Artificial Sequence
  Description of Artificial Sequence: Synthetic oligonucleotide
cucgaaccuuggucagcau

SEQ ID NO: 1682253 - RNA, 19 nt, Artificial Sequence
  Description of Artificial Sequence: Synthetic oligonucleotide
cugcacggcugcccaucua

SEQ ID NO: 1682254 - RNA, 19 nt, Artificial Sequence
  Description of Artificial Sequence: Synthetic oligonucleotide
ccgaagcauuaacucuucu

SEQ ID NO: 1682255 - RNA, 19 nt, Artificial Sequence
  Description of Artificial Sequence: Synthetic oligonucleotide
caccuccauuuggaaauuu

SEQ ID NO: 1682256 - RNA, 19 nt, Artificial Sequence
  Description of Artificial Sequence: Synthetic oligonucleotide
ggcucgcaucagucuguuu

SEQ ID NO: 1682257 - RNA, 19 nt, Artificial Sequence
  Description of Artificial Sequence: Synthetic oligonucleotide
gggcucgcaucagucuguu

SEQ ID NO: 1682258 - RNA, 19 nt, Artificial Sequence
  Description of Artificial Sequence: Synthetic oligonucleotide
cgcuuuacgccuggacgcu

SEQ ID NO: 1682259 - RNA, 19 nt, Artificial Sequence
  Description of Artificial Sequence: Synthetic oligonucleotide
gcaccgggauggacacugu

SEQ ID NO: 1682260 - RNA, 19 nt, Artificial Sequence
  Description of Artificial Sequence: Synthetic oligonucleotide
ucaaauuaaaguaagaaga

SEQ ID NO: 1682261 - RNA, 19 nt, Artificial Sequence
  Description of Artificial Sequence: Synthetic oligonucleotide
aguaagaagaaccaggacg

SEQ ID NO: 1682262 - RNA, 19 nt, Artificial Sequence
  Description of Artificial Sequence: Synthetic oligonucleotide
uuuauuauacguaaaagaa

SEQ ID NO: 1682263 - RNA, 19 nt, Artificial Sequence
  Description of Artificial Sequence: Synthetic oligonucleotide
uaaaguaagaagaaccagg

SEQ ID NO: 1682264 - RNA, 19 nt, Artificial Sequence
  Description of Artificial Sequence: Synthetic oligonucleotide
guacaaauuacuuugauug

SEQ ID NO: 1682265 - RNA, 19 nt, Artificial Sequence
  Description of Artificial Sequence: Synthetic oligonucleotide
uucaaauuaaaguaagaag

SEQ ID NO: 1682266 - RNA, 19 nt, Artificial Sequence
  Description of Artificial Sequence: Synthetic oligonucleotide
ucugaagaaccucaaacgg

SEQ ID NO: 1682267 - RNA, 19 nt, Artificial Sequence
  Description of Artificial Sequence: Synthetic oligonucleotide
auuuauuauacguaaaaga

SEQ ID NO: 1682268 - RNA, 19 nt, Artificial Sequence
  Description of Artificial Sequence: Synthetic oligonucleotide
aaagugaacagguuuaagu

SEQ ID NO: 1682269 - RNA, 19 nt, Artificial Sequence
  Description of Artificial Sequence: Synthetic oligonucleotide
aauauuaccacuaaugaau

SEQ ID NO: 1682270 - RNA, 19 nt, Artificial Sequence
  Description of Artificial Sequence: Synthetic oligonucleotide
uauuauacguaaaagaaua

SEQ ID NO: 1682271 - RNA, 19 nt, Artificial Sequence
  Description of Artificial Sequence: Synthetic oligonucleotide
uuaaauuguauugaaaaca

SEQ ID NO: 1682272 - RNA, 19 nt, Artificial Sequence
  Description of Artificial Sequence: Synthetic oligonucleotide
aacauuaaguuacagcugu

SEQ ID NO: 1682273 - RNA, 19 nt, Artificial Sequence
  Description of Artificial Sequence: Synthetic oligonucleotide
aauuuauuauacguaaaag

SEQ ID NO: 1682274 - RNA, 19 nt, Artificial Sequence
  Description of Artificial Sequence: Synthetic oligonucleotide
cuauacaugaccuucgagc

SEQ ID NO: 1682275 - RNA, 19 nt, Artificial Sequence
  Description of Artificial Sequence: Synthetic oligonucleotide
cugaauuacauccagggcc

SEQ ID NO: 1682276 - RNA, 19 nt, Artificial Sequence
  Description of Artificial Sequence: Synthetic oligonucleotide
uguagaaggucauaaacgc

SEQ ID NO: 1682277 - RNA, 19 nt, Artificial Sequence
  Description of Artificial Sequence: Synthetic oligonucleotide
aaugaaugcagacaagcga

SEQ ID NO: 1682278 - RNA, 19 nt, Artificial Sequence
  Description of Artificial Sequence: Synthetic oligonucleotide
uauacguaaaagaauauua

SEQ ID NO: 1682279 - RNA, 19 nt, Artificial Sequence
  Description of Artificial Sequence: Synthetic oligonucleotide
aagcaagacguuuaauugg

SEQ ID NO: 1682280 - RNA, 19 nt, Artificial Sequence
  Description of Artificial Sequence: Synthetic oligonucleotide
aacggguucaaauuaaagu

SEQ ID NO: 1682281 - RNA, 19 nt, Artificial Sequence
  Description of Artificial Sequence: Synthetic oligonucleotide
uccaguagcaacuuguaag

SEQ ID NO: 1682282 - RNA, 19 nt, Artificial Sequence
  Description of Artificial Sequence: Synthetic oligonucleotide
uaaugaaugcagacaagcg

SEQ ID NO: 1682283 - RNA, 19 nt, Artificial Sequence
  Description of Artificial Sequence: Synthetic oligonucleotide
accaauauagacaacuggc

SEQ ID NO: 1682284 - RNA, 19 nt, Artificial Sequence
  Description of Artificial Sequence: Synthetic oligonucleotide
aucugaagaaccucaaacg

SEQ ID NO: 1682285 - RNA, 19 nt, Artificial Sequence
  Description of Artificial Sequence: Synthetic oligonucleotide
uugauugauauuaaauugu

SEQ ID NO: 1682286 - RNA, 19 nt, Artificial Sequence
  Description of Artificial Sequence: Synthetic oligonucleotide
aauauagacaacuggcgaa

SEQ ID NO: 1682287 - RNA, 19 nt, Artificial Sequence
  Description of Artificial Sequence: Synthetic oligonucleotide
uuuaacaguguguuccacg

SEQ ID NO: 1682288 - RNA, 19 nt, Artificial Sequence
  Description of Artificial Sequence: Synthetic oligonucleotide
uucaccucgcuguagaagg

SEQ ID NO: 1682289 - RNA, 19 nt, Artificial Sequence
  Description of Artificial Sequence: Synthetic oligonucleotide
auuuguuucaccucgcugu

SEQ ID NO: 1682290 - RNA, 19 nt, Artificial Sequence
  Description of Artificial Sequence: Synthetic oligonucleotide
ugaauuacauccagggccc

SEQ ID NO: 1682291 - RNA, 19 nt, Artificial Sequence
  Description of Artificial Sequence: Synthetic oligonucleotide
uaaaagaauauuaccacua

SEQ ID NO: 1682292 - RNA, 19 nt, Artificial Sequence
  Description of Artificial Sequence: Synthetic oligonucleotide
gaagguuagaccaagcccc

SEQ ID NO: 1682293 - RNA, 19 nt, Artificial Sequence
  Description of Artificial Sequence: Synthetic oligonucleotide
aaugcagacaagcgaggac

SEQ ID NO: 1682294 - RNA, 19 nt, Artificial Sequence
  Description of Artificial Sequence: Synthetic oligonucleotide
uagaaggucauaaacgccu

SEQ ID NO: 1682295 - RNA, 19 nt, Artificial Sequence
  Description of Artificial Sequence: Synthetic oligonucleotide
uucucuauuuguuucaccu

SEQ ID NO: 1682296 - RNA, 19 nt, Artificial Sequence
  Description of Artificial Sequence: Synthetic oligonucleotide
ugauauuaaauuguauuga

SEQ ID NO: 1682297 - RNA, 19 nt, Artificial Sequence
  Description of Artificial Sequence: Synthetic oligonucleotide
uuccuuuuaauuuccagcu

SEQ ID NO: 1682298 - RNA, 19 nt, Artificial Sequence
  Description of Artificial Sequence: Synthetic oligonucleotide
cucuauuuguuucaccucg

SEQ ID NO: 1682299 - RNA, 19 nt, Artificial Sequence
  Description of Artificial Sequence: Synthetic oligonucleotide
auaaacgccuccuccgugc

SEQ ID NO: 1682300 - RNA, 19 nt, Artificial Sequence
  Description of Artificial Sequence: Synthetic oligonucleotide
cuaaugaaugcagacaagc

SEQ ID NO: 1682301 - RNA, 19 nt, Artificial Sequence
  Description of Artificial Sequence: Synthetic oligonucleotide
uuugccuggaaauuucgcc

SEQ ID NO: 1682302 - RNA, 19 nt, Artificial Sequence
  Description of Artificial Sequence: Synthetic oligonucleotide
uucaaaagccuucugugcu

SEQ ID NO: 1682303 - RNA, 19 nt, Artificial Sequence
  Description of Artificial Sequence: Synthetic oligonucleotide
auagacaacuggcgaaacc

SEQ ID NO: 1682304 - RNA, 19 nt, Artificial Sequence
  Description of Artificial Sequence: Synthetic oligonucleotide
uggacguuagaacugaauc

SEQ ID NO: 1682305 - RNA, 19 nt, Artificial Sequence
  Description of Artificial Sequence: Synthetic oligonucleotide
uuaccacuaaugaaugcag

SEQ ID NO: 1682306 - RNA, 19 nt, Artificial Sequence
  Description of Artificial Sequence: Synthetic oligonucleotide
gaugcaccaauauagacaa

SEQ ID NO: 1682307 - RNA, 19 nt, Artificial Sequence
  Description of Artificial Sequence: Synthetic oligonucleotide
agaaugaguccuugaagcg

SEQ ID NO: 1682308 - RNA, 19 nt, Artificial Sequence
  Description of Artificial Sequence: Synthetic oligonucleotide
aaaguaagaagaaccagga

SEQ ID NO: 1682309 - RNA, 19 nt, Artificial Sequence
  Description of Artificial Sequence: Synthetic oligonucleotide
caagacguuuaauuggagg

SEQ ID NO: 1682310 - RNA, 19 nt, Artificial Sequence
  Description of Artificial Sequence: Synthetic oligonucleotide
aacaguguguuccacguau

SEQ ID NO: 1682311 - RNA, 19 nt, Artificial Sequence
  Description of Artificial Sequence: Synthetic oligonucleotide
agaagaaccaggacgaguc

SEQ ID NO: 1682312 - RNA, 19 nt, Artificial Sequence
  Description of Artificial Sequence: Synthetic oligonucleotide
ugauccaguagcaacuugu

SEQ ID NO: 1682313 - RNA, 19 nt, Artificial Sequence
  Description of Artificial Sequence: Synthetic oligonucleotide
accacuguaagcaagacgu

SEQ ID NO: 1682314 - RNA, 19 nt, Artificial Sequence
  Description of Artificial Sequence: Synthetic oligonucleotide
uuucaugcauuucuuuggc

SEQ ID NO: 1682315 - RNA, 19 nt, Artificial Sequence
  Description of Artificial Sequence: Synthetic oligonucleotide
caaacgcuacucuaugucg

SEQ ID NO: 1682316 - RNA, 19 nt, Artificial Sequence
  Description of Artificial Sequence: Synthetic oligonucleotide
aaacuauacaugaccuucg

SEQ ID NO: 1682317 - RNA, 19 nt, Artificial Sequence
  Description of Artificial Sequence: Synthetic oligonucleotide
uggaaauuucgccagcugu

SEQ ID NO: 1682318 - RNA, 19 nt, Artificial Sequence
  Description of Artificial Sequence: Synthetic oligonucleotide
aauuggaggguuuccacaa

SEQ ID NO: 1682319 - RNA, 19 nt, Artificial Sequence
  Description of Artificial Sequence: Synthetic oligonucleotide
aaaagcaaacgcuacucua

SEQ ID NO: 1682320 - RNA, 19 nt, Artificial Sequence
  Description of Artificial Sequence: Synthetic oligonucleotide
uauuuguuucaccucgcug

SEQ ID NO: 1682321 - RNA, 19 nt, Artificial Sequence
  Description of Artificial Sequence: Synthetic oligonucleotide
ugcaccaauauagacaacu

SEQ ID NO: 1682322 - RNA, 19 nt, Artificial Sequence
  Description of Artificial Sequence: Synthetic oligonucleotide
aggaucuaucugaagaacc

SEQ ID NO: 1682323 - RNA, 19 nt, Artificial Sequence
  Description of Artificial Sequence: Synthetic oligonucleotide
aaucucucuucucuauuug

SEQ ID NO: 1682324 - RNA, 19 nt, Artificial Sequence
  Description of Artificial Sequence: Synthetic oligonucleotide
ugauugauauuaaauugua

SEQ ID NO: 1682325 - RNA, 19 nt, Artificial Sequence
  Description of Artificial Sequence: Synthetic oligonucleotide
cugucguuuccuuucaugc

SEQ ID NO: 1682326 - RNA, 19 nt, Artificial Sequence
  Description of Artificial Sequence: Synthetic oligonucleotide
auuaccacuaaugaaugca

SEQ ID NO: 1682327 - RNA, 19 nt, Artificial Sequence
  Description of Artificial Sequence: Synthetic oligonucleotide
aggaugcaccaauauagac

SEQ ID NO: 1682328 - RNA, 19 nt, Artificial Sequence
  Description of Artificial Sequence: Synthetic oligonucleotide
uaauuuccagcucagcaaa

SEQ ID NO: 1682329 - RNA, 19 nt, Artificial Sequence
  Description of Artificial Sequence: Synthetic oligonucleotide
gaaugaguccuugaagcgg

SEQ ID NO: 1682330 - RNA, 19 nt, Artificial Sequence
  Description of Artificial Sequence: Synthetic oligonucleotide
ugaccuucgagccaccaca

SEQ ID NO: 1682331 - RNA, 19 nt, Artificial Sequence
  Description of Artificial Sequence: Synthetic oligonucleotide
aacagguuuaaguggcugu

SEQ ID NO: 1682332 - RNA, 19 nt, Artificial Sequence
  Description of Artificial Sequence: Synthetic oligonucleotide
uucauggucuguuuguaga

SEQ ID NO: 1682333 - RNA, 19 nt, Artificial Sequence
  Description of Artificial Sequence: Synthetic oligonucleotide
acggguucaaauuaaagua

SEQ ID NO: 1682334 - RNA, 19 nt, Artificial Sequence
  Description of Artificial Sequence: Synthetic oligonucleotide
uuaaguggcuguucccacg

SEQ ID NO: 1682335 - RNA, 19 nt, Artificial Sequence
  Description of Artificial Sequence: Synthetic oligonucleotide
aacgcuacucuaugucggg

SEQ ID NO: 1682336 - RNA, 19 nt, Artificial Sequence
  Description of Artificial Sequence: Synthetic oligonucleotide
uacaaauuacuuugauuga

SEQ ID NO: 1682337 - RNA, 19 nt, Artificial Sequence
  Description of Artificial Sequence: Synthetic oligonucleotide
aaacgcuacucuaugucgg

SEQ ID NO: 1682338 - RNA, 19 nt, Artificial Sequence
  Description of Artificial Sequence: Synthetic oligonucleotide
gaaagaaugaguccuugaa

SEQ ID NO: 1682339 - RNA, 19 nt, Artificial Sequence
  Description of Artificial Sequence: Synthetic oligonucleotide
uguccacucgcccaucccg

SEQ ID NO: 1682340 - RNA, 19 nt, Artificial Sequence
  Description of Artificial Sequence: Synthetic oligonucleotide
acgagucaaucuuucaauc

SEQ ID NO: 1682341 - RNA, 19 nt, Artificial Sequence
  Description of Artificial Sequence: Synthetic oligonucleotide
uaacucuuuggaaagugaa

SEQ ID NO: 1682342 - RNA, 19 nt, Artificial Sequence
  Description of Artificial Sequence: Synthetic oligonucleotide
caccaauauagacaacugg

SEQ ID NO: 1682343 - RNA, 19 nt, Artificial Sequence
  Description of Artificial Sequence: Synthetic oligonucleotide
uacuuuuggcggccgaagg

SEQ ID NO: 1682344 - RNA, 19 nt, Artificial Sequence
  Description of Artificial Sequence: Synthetic oligonucleotide
uagacaacuggcgaaaccu

SEQ ID NO: 1682345 - RNA, 19 nt, Artificial Sequence
  Description of Artificial Sequence: Synthetic oligonucleotide
aaacauuaaguuacagcug

SEQ ID NO: 1682346 - RNA, 19 nt, Artificial Sequence
  Description of Artificial Sequence: Synthetic oligonucleotide
uuuguuccugauccaguag

SEQ ID NO: 1682347 - RNA, 19 nt, Artificial Sequence
  Description of Artificial Sequence: Synthetic oligonucleotide
agagaaggcagcacgaguc

SEQ ID NO: 1682348 - RNA, 19 nt, Artificial Sequence
  Description of Artificial Sequence: Synthetic oligonucleotide
aaguacaaauuacuuugau

SEQ ID NO: 1682349 - RNA, 19 nt, Artificial Sequence
  Description of Artificial Sequence: Synthetic oligonucleotide
agcaaacaguuucaugguc

SEQ ID NO: 1682350 - RNA, 19 nt, Artificial Sequence
  Description of Artificial Sequence: Synthetic oligonucleotide
aagcaaacgcuacucuaug

SEQ ID NO: 1682351 - RNA, 19 nt, Artificial Sequence
  Description of Artificial Sequence: Synthetic oligonucleotide
uuuggcggccgaaggaagg

SEQ ID NO: 1682352 - RNA, 19 nt, Artificial Sequence
  Description of Artificial Sequence: Synthetic oligonucleotide
guaagaagaaccaggacga

SEQ ID NO: 1682353 - RNA, 19 nt, Artificial Sequence
  Description of Artificial Sequence: Synthetic oligonucleotide
ucuauuuguuucaccucgc

SEQ ID NO: 1682354 - RNA, 19 nt, Artificial Sequence
  Description of Artificial Sequence: Synthetic oligonucleotide
cauuuguaggcuuuccuuc

SEQ ID NO: 1682355 - RNA, 19 nt, Artificial Sequence
  Description of Artificial Sequence: Synthetic oligonucleotide
aacuauacaugaccuucga

SEQ ID NO: 1682356 - RNA, 19 nt, Artificial Sequence
  Description of Artificial Sequence: Synthetic oligonucleotide
ucaaacggguucaaauuaa

SEQ ID NO: 1682357 - RNA, 19 nt, Artificial Sequence
  Description of Artificial Sequence: Synthetic oligonucleotide
uccccuuuguauuugccug

SEQ ID NO: 1682358 - RNA, 19 nt, Artificial Sequence
  Description of Artificial Sequence: Synthetic oligonucleotide
gccugaauuacauccaggg

SEQ ID NO: 1682359 - RNA, 19 nt, Artificial Sequence
  Description of Artificial Sequence: Synthetic oligonucleotide
aaacggguucaaauuaaag

SEQ ID NO: 1682360 - RNA, 19 nt, Artificial Sequence
  Description of Artificial Sequence: Synthetic oligonucleotide
cauuuucccggccagccgg

SEQ ID NO: 1682361 - RNA, 19 nt, Artificial Sequence
  Description of Artificial Sequence: Synthetic oligonucleotide
uucgcucuuuaacagugug

SEQ ID NO: 1682362 - RNA, 19 nt, Artificial Sequence
  Description of Artificial Sequence: Synthetic oligonucleotide
ccaauauagacaacuggcg

SEQ ID NO: 1682363 - RNA, 19 nt, Artificial Sequence
  Description of Artificial Sequence: Synthetic oligonucleotide
uggcuaacucuuuggaaag

SEQ ID NO: 1682364 - RNA, 19 nt, Artificial Sequence
  Description of Artificial Sequence: Synthetic oligonucleotide
acuauacaugaccuucgag

SEQ ID NO: 1682365 - RNA, 19 nt, Artificial Sequence
  Description of Artificial Sequence: Synthetic oligonucleotide
ggaagguuagaccaagccc

SEQ ID NO: 1682366 - RNA, 19 nt, Artificial Sequence
  Description of Artificial Sequence: Synthetic oligonucleotide
aaugaguccuugaagcgga

SEQ ID NO: 1682367 - RNA, 19 nt, Artificial Sequence
  Description of Artificial Sequence: Synthetic oligonucleotide
ugucacuucaggaucuauc

SEQ ID NO: 1682368 - RNA, 19 nt, Artificial Sequence
  Description of Artificial Sequence: Synthetic oligonucleotide
uuauacguaaaagaauauu

SEQ ID NO: 1682369 - RNA, 19 nt, Artificial Sequence
  Description of Artificial Sequence: Synthetic oligonucleotide
gggaagagaaggcagcacg

SEQ ID NO: 1682370 - RNA, 19 nt, Artificial Sequence
  Description of Artificial Sequence: Synthetic oligonucleotide
gacguuagaacugaaucuc

SEQ ID NO: 1682371 - RNA, 19 nt, Artificial Sequence
  Description of Artificial Sequence: Synthetic oligonucleotide
cuucgagccaccacaauuc

SEQ ID NO: 1682372 - RNA, 19 nt, Artificial Sequence
  Description of Artificial Sequence: Synthetic oligonucleotide
gaaauuucgccagcugucc

SEQ ID NO: 1682373 - RNA, 19 nt, Artificial Sequence
  Description of Artificial Sequence: Synthetic oligonucleotide
aaagcaaacgcuacucuau

SEQ ID NO: 1682374 - RNA, 19 nt, Artificial Sequence
  Description of Artificial Sequence: Synthetic oligonucleotide
agcgaggacacagugggac

SEQ ID NO: 1682375 - RNA, 19 nt, Artificial Sequence
  Description of Artificial Sequence: Synthetic oligonucleotide
ugccugaauuacauccagg

SEQ ID NO: 1682376 - RNA, 19 nt, Artificial Sequence
  Description of Artificial Sequence: Synthetic oligonucleotide
acggcaacaccacuguaag

SEQ ID NO: 1682377 - RNA, 19 nt, Artificial Sequence
  Description of Artificial Sequence: Synthetic oligonucleotide
aaccaggacgagucaaucu

SEQ ID NO: 1682378 - RNA, 19 nt, Artificial Sequence
  Description of Artificial Sequence: Synthetic oligonucleotide
ucuaucugaagaaccucaa

SEQ ID NO: 1682379 - RNA, 19 nt, Artificial Sequence
  Description of Artificial Sequence: Synthetic oligonucleotide
uuuuggacguuagaacuga

SEQ ID NO: 1682380 - RNA, 19 nt, Artificial Sequence
  Description of Artificial Sequence: Synthetic oligonucleotide
uuccugauccaguagcaac

SEQ ID NO: 1682381 - RNA, 19 nt, Artificial Sequence
  Description of Artificial Sequence: Synthetic oligonucleotide
gacaagcgaggacacagug

SEQ ID NO: 1682382 - RNA, 19 nt, Artificial Sequence
  Description of Artificial Sequence: Synthetic oligonucleotide
aaauuucgccagcugucca

SEQ ID NO: 1682383 - RNA, 19 nt, Artificial Sequence
  Description of Artificial Sequence: Synthetic oligonucleotide
ucauaaacgccuccuccgu

SEQ ID NO: 1682384 - RNA, 19 nt, Artificial Sequence
  Description of Artificial Sequence: Synthetic oligonucleotide
gagaggggaagguuagacc

SEQ ID NO: 1682385 - RNA, 19 nt, Artificial Sequence
  Description of Artificial Sequence: Synthetic oligonucleotide
caauauagacaacuggcga

SEQ ID NO: 1682386 - RNA, 19 nt, Artificial Sequence
  Description of Artificial Sequence: Synthetic oligonucleotide
aauuuccagcucagcaaac

SEQ ID NO: 1682387 - RNA, 19 nt, Artificial Sequence
  Description of Artificial Sequence: Synthetic oligonucleotide
gaagguccgauucuucuuc

SEQ ID NO: 1682388 - RNA, 19 nt, Artificial Sequence
  Description of Artificial Sequence: Synthetic oligonucleotide
auauuaccacuaaugaaug

SEQ ID NO: 1682389 - RNA, 19 nt, Artificial Sequence
  Description of Artificial Sequence: Synthetic oligonucleotide
guaagcuuuguccacagcu

SEQ ID NO: 1682390 - RNA, 19 nt, Artificial Sequence
  Description of Artificial Sequence: Synthetic oligonucleotide
uuggaggguuuccacaaac

SEQ ID NO: 1682391 - RNA, 19 nt, Artificial Sequence
  Description of Artificial Sequence: Synthetic oligonucleotide
accucaaacggguucaaau

SEQ ID NO: 1682392 - RNA, 19 nt, Artificial Sequence
  Description of Artificial Sequence: Synthetic oligonucleotide
aaggucauaaacgccuccu

SEQ ID NO: 1682393 - RNA, 19 nt, Artificial Sequence
  Description of Artificial Sequence: Synthetic oligonucleotide
cacguauucuuuuccugcc

SEQ ID NO: 1682394 - RNA, 19 nt, Artificial Sequence
  Description of Artificial Sequence: Synthetic oligonucleotide
acaaauuacuuugauugau

SEQ ID NO: 1682395 - RNA, 19 nt, Artificial Sequence
  Description of Artificial Sequence: Synthetic oligonucleotide
uucgccagcuguccacucg

SEQ ID NO: 1682396 - RNA, 19 nt, Artificial Sequence
  Description of Artificial Sequence: Synthetic oligonucleotide
agauggcuaacucuuugga

SEQ ID NO: 1682397 - RNA, 19 nt, Artificial Sequence
  Description of Artificial Sequence: Synthetic oligonucleotide
ggcagcacgagucaguggc

SEQ ID NO: 1682398 - RNA, 19 nt, Artificial Sequence
  Description of Artificial Sequence: Synthetic oligonucleotide
uuuuggcggccgaaggaag

SEQ ID NO: 1682399 - RNA, 19 nt, Artificial Sequence
  Description of Artificial Sequence: Synthetic oligonucleotide
cacuucaggaucuaucuga

SEQ ID NO: 1682400 - RNA, 19 nt, Artificial Sequence
  Description of Artificial Sequence: Synthetic oligonucleotide
aguagcaacuuguaagcuu

SEQ ID NO: 1682401 - RNA, 19 nt, Artificial Sequence
  Description of Artificial Sequence: Synthetic oligonucleotide
ucacuucaggaucuaucug

SEQ ID NO: 1682402 - RNA, 19 nt, Artificial Sequence
  Description of Artificial Sequence: Synthetic oligonucleotide
gagguggagaaagaaugag

SEQ ID NO: 1682403 - RNA, 19 nt, Artificial Sequence
  Description of Artificial Sequence: Synthetic oligonucleotide
uagaccaagccccuccccu

SEQ ID NO: 1682404 - RNA, 19 nt, Artificial Sequence
  Description of Artificial Sequence: Synthetic oligonucleotide
ccacaaacuauacaugacc

SEQ ID NO: 1682405 - RNA, 19 nt, Artificial Sequence
  Description of Artificial Sequence: Synthetic oligonucleotide
uguuccacguauucuuuuc

SEQ ID NO: 1682406 - RNA, 19 nt, Artificial Sequence
  Description of Artificial Sequence: Synthetic oligonucleotide
aacaccacuguaagcaaga

SEQ ID NO: 1682407 - RNA, 19 nt, Artificial Sequence
  Description of Artificial Sequence: Synthetic oligonucleotide
uccgugggcgaggagaggg

SEQ ID NO: 1682408 - RNA, 19 nt, Artificial Sequence
  Description of Artificial Sequence: Synthetic oligonucleotide
uuguagacugccuguuuga

SEQ ID NO: 1682409 - RNA, 19 nt, Artificial Sequence
  Description of Artificial Sequence: Synthetic oligonucleotide
aggucauaaacgccuccuc

SEQ ID NO: 1682410 - RNA, 19 nt, Artificial Sequence
  Description of Artificial Sequence: Synthetic oligonucleotide
guaagcaagacguuuaauu

SEQ ID NO: 1682411 - RNA, 19 nt, Artificial Sequence
  Description of Artificial Sequence: Synthetic oligonucleotide
uuuuacuuuuggcggccga

SEQ ID NO: 1682412 - RNA, 19 nt, Artificial Sequence
  Description of Artificial Sequence: Synthetic oligonucleotide
ucuggagucacggcaacac

SEQ ID NO: 1682413 - RNA, 19 nt, Artificial Sequence
  Description of Artificial Sequence: Synthetic oligonucleotide
ccaguagcaacuuguaagc

SEQ ID NO: 1682414 - RNA, 19 nt, Artificial Sequence
  Description of Artificial Sequence: Synthetic oligonucleotide
uuacuuuuggcggccgaag

SEQ ID NO: 1682415 - RNA, 19 nt, Artificial Sequence
  Description of Artificial Sequence: Synthetic oligonucleotide
gguggagaaagaaugaguc

SEQ ID NO: 1682416 - RNA, 19 nt, Artificial Sequence
  Description of Artificial Sequence: Synthetic oligonucleotide
aaauuguauugaaaacaaa

SEQ ID NO: 1682417 - RNA, 19 nt, Artificial Sequence
  Description of Artificial Sequence: Synthetic oligonucleotide
agcacgagucaguggcacc

SEQ ID NO: 1682418 - RNA, 19 nt, Artificial Sequence
  Description of Artificial Sequence: Synthetic oligonucleotide
uccuccgcccgaaaccccg

SEQ ID NO: 1682419 - RNA, 19 nt, Artificial Sequence
  Description of Artificial Sequence: Synthetic oligonucleotide
cuucucuauuuguuucacc

SEQ ID NO: 1682420 - RNA, 19 nt, Artificial Sequence
  Description of Artificial Sequence: Synthetic oligonucleotide
uggaggguuuccacaaacu

SEQ ID NO: 1682421 - RNA, 19 nt, Artificial Sequence
  Description of Artificial Sequence: Synthetic oligonucleotide
caccacuguaagcaagacg

SEQ ID NO: 1682422 - RNA, 19 nt, Artificial Sequence
  Description of Artificial Sequence: Synthetic oligonucleotide
gauggcuaacucuuuggaa

SEQ ID NO: 1682423 - RNA, 19 nt, Artificial Sequence
  Description of Artificial Sequence: Synthetic oligonucleotide
ggucauaaacgccuccucc

SEQ ID NO: 1682424 - RNA, 19 nt, Artificial Sequence
  Description of Artificial Sequence: Synthetic oligonucleotide
acuuuuggcggccgaagga

SEQ ID NO: 1682425 - RNA, 19 nt, Artificial Sequence
  Description of Artificial Sequence: Synthetic oligonucleotide
agaaccucaaacggguuca

SEQ ID NO: 1682426 - RNA, 19 nt, Artificial Sequence
  Description of Artificial Sequence: Synthetic oligonucleotide
uguaagcuuuguccacagc

SEQ ID NO: 1682427 - RNA, 19 nt, Artificial Sequence
  Description of Artificial Sequence: Synthetic oligonucleotide
guagaaggucauaaacgcc

SEQ ID NO: 1682428 - RNA, 19 nt, Artificial Sequence
  Description of Artificial Sequence: Synthetic oligonucleotide
guuuaauuggaggguuucc

SEQ ID NO: 1682429 - RNA, 19 nt, Artificial Sequence
  Description of Artificial Sequence: Synthetic oligonucleotide
ggcaacaccacuguaagca

SEQ ID NO: 1682430 - RNA, 19 nt, Artificial Sequence
  Description of Artificial Sequence: Synthetic oligonucleotide
uuggacguuagaacugaau

SEQ ID NO: 1682431 - RNA, 19 nt, Artificial Sequence
  Description of Artificial Sequence: Synthetic oligonucleotide
accaggacgagucaaucuu

SEQ ID NO: 1682432 - RNA, 19 nt, Artificial Sequence
  Description of Artificial Sequence: Synthetic oligonucleotide
uucgagccaccacaauuca

SEQ ID NO: 1682433 - RNA, 19 nt, Artificial Sequence
  Description of Artificial Sequence: Synthetic oligonucleotide
ucgcucuuuaacagugugu

SEQ ID NO: 1682434 - RNA, 19 nt, Artificial Sequence
  Description of Artificial Sequence: Synthetic oligonucleotide
uucccggccagccggcacg

SEQ ID NO: 1682435 - RNA, 19 nt, Artificial Sequence
  Description of Artificial Sequence: Synthetic oligonucleotide
gaacagguuuaaguggcug

SEQ ID NO: 1682436 - RNA, 19 nt, Artificial Sequence
  Description of Artificial Sequence: Synthetic oligonucleotide
gggaagguuagaccaagcc

SEQ ID NO: 1682437 - RNA, 19 nt, Artificial Sequence
  Description of Artificial Sequence: Synthetic oligonucleotide
cuaacucuuuggaaaguga

SEQ ID NO: 1682438 - RNA, 19 nt, Artificial Sequence
  Description of Artificial Sequence: Synthetic oligonucleotide
agcaagacguuuaauugga

SEQ ID NO: 1682439 - RNA, 19 nt, Artificial Sequence
  Description of Artificial Sequence: Synthetic oligonucleotide
agcaaacgcuacucuaugu

SEQ ID NO: 1682440 - RNA, 19 nt, Artificial Sequence
  Description of Artificial Sequence: Synthetic oligonucleotide
cuaugucggguggaggugg

SEQ ID NO: 1682441 - RNA, 19 nt, Artificial Sequence
  Description of Artificial Sequence: Synthetic oligonucleotide
ucgagccaccacaauucag

SEQ ID NO: 1682442 - RNA, 19 nt, Artificial Sequence
  Description of Artificial Sequence: Synthetic oligonucleotide
ucaaucuuucaaucugauu

SEQ ID NO: 1682443 - RNA, 19 nt, Artificial Sequence
  Description of Artificial Sequence: Synthetic oligonucleotide
uuuacuuuuggcggccgaa

SEQ ID NO: 1682444 - RNA, 19 nt, Artificial Sequence
  Description of Artificial Sequence: Synthetic oligonucleotide
guuagaccaagccccuccc

SEQ ID NO: 1682445 - RNA, 19 nt, Artificial Sequence
  Description of Artificial Sequence: Synthetic oligonucleotide
auuacauccagggcccucu

SEQ ID NO: 1682446 - RNA, 19 nt, Artificial Sequence
  Description of Artificial Sequence: Synthetic oligonucleotide
aaggaagguccgauucuuc

SEQ ID NO: 1682447 - RNA, 19 nt, Artificial Sequence
  Description of Artificial Sequence: Synthetic oligonucleotide
gguuagaccaagccccucc

SEQ ID NO: 1682448 - RNA, 19 nt, Artificial Sequence
  Description of Artificial Sequence: Synthetic oligonucleotide
acuaaugaaugcagacaag

SEQ ID NO: 1682449 - RNA, 19 nt, Artificial Sequence
  Description of Artificial Sequence: Synthetic oligonucleotide
uacucuaugucggguggag

SEQ ID NO: 1682450 - RNA, 19 nt, Artificial Sequence
  Description of Artificial Sequence: Synthetic oligonucleotide
ucuucucuauuuguuucac

SEQ ID NO: 1682451 - RNA, 19 nt, Artificial Sequence
  Description of Artificial Sequence: Synthetic oligonucleotide
agaccaagccccuccccuc

SEQ ID NO: 1682452 - RNA, 19 nt, Artificial Sequence
  Description of Artificial Sequence: Synthetic oligonucleotide
ugagggucacucucgcugu

SEQ ID NO: 1682453 - RNA, 19 nt, Artificial Sequence
  Description of Artificial Sequence: Synthetic oligonucleotide
uaagaagaaccaggacgag

SEQ ID NO: 1682454 - RNA, 19 nt, Artificial Sequence
  Description of Artificial Sequence: Synthetic oligonucleotide
gcuacucuaugucgggugg

SEQ ID NO: 1682455 - RNA, 19 nt, Artificial Sequence
  Description of Artificial Sequence: Synthetic oligonucleotide
guuagaacugaaucucucu

SEQ ID NO: 1682456 - RNA, 19 nt, Artificial Sequence
  Description of Artificial Sequence: Synthetic oligonucleotide
caaguacaaauuacuuuga

SEQ ID NO: 1682457 - RNA, 19 nt, Artificial Sequence
  Description of Artificial Sequence: Synthetic oligonucleotide
ucucgcuuggcuuucucuu

SEQ ID NO: 1682458 - RNA, 19 nt, Artificial Sequence
  Description of Artificial Sequence: Synthetic oligonucleotide
uuucgcucuuuaacagugu

SEQ ID NO: 1682459 - RNA, 19 nt, Artificial Sequence
  Description of Artificial Sequence: Synthetic oligonucleotide
auuauacguaaaagaauau

SEQ ID NO: 1682460 - RNA, 19 nt, Artificial Sequence
  Description of Artificial Sequence: Synthetic oligonucleotide
ucuaugucggguggaggug

SEQ ID NO: 1682461 - RNA, 19 nt, Artificial Sequence
  Description of Artificial Sequence: Synthetic oligonucleotide
gaucuaucugaagaaccuc

SEQ ID NO: 1682462 - RNA, 19 nt, Artificial Sequence
  Description of Artificial Sequence: Synthetic oligonucleotide
gaggagaggggaagguuag

SEQ ID NO: 1682463 - RNA, 19 nt, Artificial Sequence
  Description of Artificial Sequence: Synthetic oligonucleotide
agacguuuaauuggagggu

SEQ ID NO: 1682464 - RNA, 19 nt, Artificial Sequence
  Description of Artificial Sequence: Synthetic oligonucleotide
ucgcuuggcuuucucuuga

SEQ ID NO: 1682465 - RNA, 19 nt, Artificial Sequence
  Description of Artificial Sequence: Synthetic oligonucleotide
uggucuggagucacggcaa

SEQ ID NO: 1682466 - RNA, 19 nt, Artificial Sequence
  Description of Artificial Sequence: Synthetic oligonucleotide
ggaugcaccaauauagaca

SEQ ID NO: 1682467 - RNA, 19 nt, Artificial Sequence
  Description of Artificial Sequence: Synthetic oligonucleotide
ucgccagcuguccacucgc

SEQ ID NO: 1682468 - RNA, 19 nt, Artificial Sequence
  Description of Artificial Sequence: Synthetic oligonucleotide
gguccgauucuucuucucc

SEQ ID NO: 1682469 - RNA, 19 nt, Artificial Sequence
  Description of Artificial Sequence: Synthetic oligonucleotide
gaagcggaaggaggcagcc

SEQ ID NO: 1682470 - RNA, 19 nt, Artificial Sequence
  Description of Artificial Sequence: Synthetic oligonucleotide
ccacguauucuuuuccugc

SEQ ID NO: 1682471 - RNA, 19 nt, Artificial Sequence
  Description of Artificial Sequence: Synthetic oligonucleotide
cuuuuccugccugaauuac

SEQ ID NO: 1682472 - RNA, 19 nt, Artificial Sequence
  Description of Artificial Sequence: Synthetic oligonucleotide
gacgagucaaucuuucaau

SEQ ID NO: 1682473 - RNA, 19 nt, Artificial Sequence
  Description of Artificial Sequence: Synthetic oligonucleotide
aacuggcgaaaccucuuuu

SEQ ID NO: 1682474 - RNA, 19 nt, Artificial Sequence
  Description of Artificial Sequence: Synthetic oligonucleotide
cauaaacgccuccuccgug

SEQ ID NO: 1682475 - RNA, 19 nt, Artificial Sequence
  Description of Artificial Sequence: Synthetic oligonucleotide
ccuuuuaauuuccagcuca

SEQ ID NO: 1682476 - RNA, 19 nt, Artificial Sequence
  Description of Artificial Sequence: Synthetic oligonucleotide
cucaaacggguucaaauua

SEQ ID NO: 1682477 - RNA, 19 nt, Artificial Sequence
  Description of Artificial Sequence: Synthetic oligonucleotide
uaaacgccuccuccgugcu

SEQ ID NO: 1682478 - RNA, 19 nt, Artificial Sequence
  Description of Artificial Sequence: Synthetic oligonucleotide
agacaacuggcgaaaccuc

SEQ ID NO: 1682479 - RNA, 19 nt, Artificial Sequence
  Description of Artificial Sequence: Synthetic oligonucleotide
acguauucuuuuccugccu

SEQ ID NO: 1682480 - RNA, 19 nt, Artificial Sequence
  Description of Artificial Sequence: Synthetic oligonucleotide
gguuuaaguggcuguuccc

SEQ ID NO: 1682481 - RNA, 19 nt, Artificial Sequence
  Description of Artificial Sequence: Synthetic oligonucleotide
agucacggcaacaccacug

SEQ ID NO: 1682482 - RNA, 19 nt, Artificial Sequence
  Description of Artificial Sequence: Synthetic oligonucleotide
uugucaggaugcaccaaua

SEQ ID NO: 1682483 - RNA, 19 nt, Artificial Sequence
  Description of Artificial Sequence: Synthetic oligonucleotide
uguagacugccuguuugaa

SEQ ID NO: 1682484 - RNA, 19 nt, Artificial Sequence
  Description of Artificial Sequence: Synthetic oligonucleotide
gaacugaaucucucuucuc

SEQ ID NO: 1682485 - RNA, 19 nt, Artificial Sequence
  Description of Artificial Sequence: Synthetic oligonucleotide
gaagaaccaggacgaguca

SEQ ID NO: 1682486 - RNA, 19 nt, Artificial Sequence
  Description of Artificial Sequence: Synthetic oligonucleotide
cuggaaauuucgccagcug

SEQ ID NO: 1682487 - RNA, 19 nt, Artificial Sequence
  Description of Artificial Sequence: Synthetic oligonucleotide
uguaagcaagacguuuaau

SEQ ID NO: 1682488 - RNA, 19 nt, Artificial Sequence
  Description of Artificial Sequence: Synthetic oligonucleotide
caggaucuaucugaagaac

SEQ ID NO: 1682489 - RNA, 19 nt, Artificial Sequence
  Description of Artificial Sequence: Synthetic oligonucleotide
gcaaacgcuacucuauguc

SEQ ID NO: 1682490 - RNA, 19 nt, Artificial Sequence
  Description of Artificial Sequence: Synthetic oligonucleotide
auccaguagcaacuuguaa

SEQ ID NO: 1682491 - RNA, 19 nt, Artificial Sequence
  Description of Artificial Sequence: Synthetic oligonucleotide
agguggagaaagaaugagu

SEQ ID NO: 1682492 - RNA, 19 nt, Artificial Sequence
  Description of Artificial Sequence: Synthetic oligonucleotide
acaccacuguaagcaagac

SEQ ID NO: 1682493 - RNA, 19 nt, Artificial Sequence
  Description of Artificial Sequence: Synthetic oligonucleotide
caggacgagucaaucuuuc

SEQ ID NO: 1682494 - RNA, 19 nt, Artificial Sequence
  Description of Artificial Sequence: Synthetic oligonucleotide
agguccgauucuucuucuc

SEQ ID NO: 1682495 - RNA, 19 nt, Artificial Sequence
  Description of Artificial Sequence: Synthetic oligonucleotide
guccuugaagcggaaggag

SEQ ID NO: 1682496 - RNA, 19 nt, Artificial Sequence
  Description of Artificial Sequence: Synthetic oligonucleotide
acucuaugucggguggagg

SEQ ID NO: 1682497 - RNA, 19 nt, Artificial Sequence
  Description of Artificial Sequence: Synthetic oligonucleotide
gucaggaugcaccaauaua

SEQ ID NO: 1682498 - RNA, 19 nt, Artificial Sequence
  Description of Artificial Sequence: Synthetic oligonucleotide
aagguuagaccaagccccu

SEQ ID NO: 1682499 - RNA, 19 nt, Artificial Sequence
  Description of Artificial Sequence: Synthetic oligonucleotide
uggcaccuuccgauccugg

SEQ ID NO: 1682500 - RNA, 19 nt, Artificial Sequence
  Description of Artificial Sequence: Synthetic oligonucleotide
uaugucggguggaggugga

SEQ ID NO: 1682501 - RNA, 19 nt, Artificial Sequence
  Description of Artificial Sequence: Synthetic oligonucleotide
ggaaauuucgccagcuguc

SEQ ID NO: 1682502 - RNA, 19 nt, Artificial Sequence
  Description of Artificial Sequence: Synthetic oligonucleotide
ucucuugagcuucgaucuc

SEQ ID NO: 1682503 - RNA, 19 nt, Artificial Sequence
  Description of Artificial Sequence: Synthetic oligonucleotide
gcuaacucuuuggaaagug

SEQ ID NO: 1682504 - RNA, 19 nt, Artificial Sequence
  Description of Artificial Sequence: Synthetic oligonucleotide
auuuucccggccagccggc

SEQ ID NO: 1682505 - RNA, 19 nt, Artificial Sequence
  Description of Artificial Sequence: Synthetic oligonucleotide
cacggcaacaccacuguaa

SEQ ID NO: 1682506 - RNA, 19 nt, Artificial Sequence
  Description of Artificial Sequence: Synthetic oligonucleotide
cccgaagccgccauuuucc

SEQ ID NO: 1682507 - RNA, 19 nt, Artificial Sequence
  Description of Artificial Sequence: Synthetic oligonucleotide
ggacguuagaacugaaucu

SEQ ID NO: 1682508 - RNA, 19 nt, Artificial Sequence
  Description of Artificial Sequence: Synthetic oligonucleotide
aucccggcuuuccucgaag

SEQ ID NO: 1682509 - RNA, 19 nt, Artificial Sequence
  Description of Artificial Sequence: Synthetic oligonucleotide
gaaccaggacgagucaauc

SEQ ID NO: 1682510 - RNA, 19 nt, Artificial Sequence
  Description of Artificial Sequence: Synthetic oligonucleotide
caaacggguucaaauuaaa

SEQ ID NO: 1682511 - RNA, 19 nt, Artificial Sequence
  Description of Artificial Sequence: Synthetic oligonucleotide
agcaacuuguaagcuuugu

SEQ ID NO: 1682512 - RNA, 19 nt, Artificial Sequence
  Description of Artificial Sequence: Synthetic oligonucleotide
ggacgagucaaucuuucaa

SEQ ID NO: 1682513 - RNA, 19 nt, Artificial Sequence
  Description of Artificial Sequence: Synthetic oligonucleotide
cucuaugucggguggaggu

SEQ ID NO: 1682514 - RNA, 19 nt, Artificial Sequence
  Description of Artificial Sequence: Synthetic oligonucleotide
ggucuguuuguagacugcc

SEQ ID NO: 1682515 - RNA, 19 nt, Artificial Sequence
  Description of Artificial Sequence: Synthetic oligonucleotide
uuguaggcuuuccuuccuu

SEQ ID NO: 1682516 - RNA, 19 nt, Artificial Sequence
  Description of Artificial Sequence: Synthetic oligonucleotide
ccaaagcuggucuggaguc

SEQ ID NO: 1682517 - RNA, 19 nt, Artificial Sequence
  Description of Artificial Sequence: Synthetic oligonucleotide
acguuagaacugaaucucu

SEQ ID NO: 1682518 - RNA, 19 nt, Artificial Sequence
  Description of Artificial Sequence: Synthetic oligonucleotide
gucaguggcaccuuccgau

SEQ ID NO: 1682519 - RNA, 19 nt, Artificial Sequence
  Description of Artificial Sequence: Synthetic oligonucleotide
acgguggccaaagcugguc

SEQ ID NO: 1682520 - RNA, 19 nt, Artificial Sequence
  Description of Artificial Sequence: Synthetic oligonucleotide
aaguggcuguucccacggu

SEQ ID NO: 1682521 - RNA, 19 nt, Artificial Sequence
  Description of Artificial Sequence: Synthetic oligonucleotide
ugccuccuccgcccgaaac

SEQ ID NO: 1682522 - RNA, 19 nt, Artificial Sequence
  Description of Artificial Sequence: Synthetic oligonucleotide
gaggguuuccacaaacuau

SEQ ID NO: 1682523 - RNA, 19 nt, Artificial Sequence
  Description of Artificial Sequence: Synthetic oligonucleotide
guccacucgcccaucccgg

SEQ ID NO: 1682524 - RNA, 19 nt, Artificial Sequence
  Description of Artificial Sequence: Synthetic oligonucleotide
guagcaacuuguaagcuuu

SEQ ID NO: 1682525 - RNA, 19 nt, Artificial Sequence
  Description of Artificial Sequence: Synthetic oligonucleotide
ccacgguggccaaagcugg

SEQ ID NO: 1682526 - RNA, 19 nt, Artificial Sequence
  Description of Artificial Sequence: Synthetic oligonucleotide
ugucagcaucaucuugauu

SEQ ID NO: 1682527 - RNA, 19 nt, Artificial Sequence
  Description of Artificial Sequence: Synthetic oligonucleotide
cuuuuggcggccgaaggaa

SEQ ID NO: 1682528 - RNA, 19 nt, Artificial Sequence
  Description of Artificial Sequence: Synthetic oligonucleotide
agggucacucucgcuguuc

SEQ ID NO: 1682529 - RNA, 19 nt, Artificial Sequence
  Description of Artificial Sequence: Synthetic oligonucleotide
gcaccaauauagacaacug

SEQ ID NO: 1682530 - RNA, 19 nt, Artificial Sequence
  Description of Artificial Sequence: Synthetic oligonucleotide
gcuucgaucuccucuucuc

SEQ ID NO: 1682531 - RNA, 19 nt, Artificial Sequence
  Description of Artificial Sequence: Synthetic oligonucleotide
gacaacuggcgaaaccucu

SEQ ID NO: 1682532 - RNA, 19 nt, Artificial Sequence
  Description of Artificial Sequence: Synthetic oligonucleotide
cccaucccggcuuuccucg

SEQ ID NO: 1682533 - RNA, 19 nt, Artificial Sequence
  Description of Artificial Sequence: Synthetic oligonucleotide
uuggcggccgaaggaaggu

SEQ ID NO: 1682534 - RNA, 19 nt, Artificial Sequence
  Description of Artificial Sequence: Synthetic oligonucleotide
gaccaagccccuccccuca

SEQ ID NO: 1682535 - RNA, 19 nt, Artificial Sequence
  Description of Artificial Sequence: Synthetic oligonucleotide
ccgaaggaagguccgauuc

SEQ ID NO: 1682536 - RNA, 19 nt, Artificial Sequence
  Description of Artificial Sequence: Synthetic oligonucleotide
ucucccgaagccgccauuu

SEQ ID NO: 1682537 - RNA, 19 nt, Artificial Sequence
  Description of Artificial Sequence: Synthetic oligonucleotide
gucggguggagguggagaa

SEQ ID NO: 1682538 - RNA, 19 nt, Artificial Sequence
  Description of Artificial Sequence: Synthetic oligonucleotide
aaccucaaacggguucaaa

SEQ ID NO: 1682539 - RNA, 19 nt, Artificial Sequence
  Description of Artificial Sequence: Synthetic oligonucleotide
ccccucaaguacaaauuac

SEQ ID NO: 1682540 - RNA, 19 nt, Artificial Sequence
  Description of Artificial Sequence: Synthetic oligonucleotide
cagguuuaaguggcuguuc

SEQ ID NO: 1682541 - RNA, 19 nt, Artificial Sequence
  Description of Artificial Sequence: Synthetic oligonucleotide
ucacucucgcuguuccauu

SEQ ID NO: 1682542 - RNA, 19 nt, Artificial Sequence
  Description of Artificial Sequence: Synthetic oligonucleotide
uucccacgguggccaaagc

SEQ ID NO: 1682543 - RNA, 19 nt, Artificial Sequence
  Description of Artificial Sequence: Synthetic oligonucleotide
accucgcuguagaagguca

SEQ ID NO: 1682544 - RNA, 19 nt, Artificial Sequence
  Description of Artificial Sequence: Synthetic oligonucleotide
gccauuuucccggccagcc

SEQ ID NO: 1682545 - RNA, 19 nt, Artificial Sequence
  Description of Artificial Sequence: Synthetic oligonucleotide
uccgauccugguggcuccg

SEQ ID NO: 1682546 - RNA, 19 nt, Artificial Sequence
  Description of Artificial Sequence: Synthetic oligonucleotide
ggaucuaucugaagaaccu

SEQ ID NO: 1682547 - RNA, 19 nt, Artificial Sequence
  Description of Artificial Sequence: Synthetic oligonucleotide
ucacggcaacaccacugua

SEQ ID NO: 1682548 - RNA, 19 nt, Artificial Sequence
  Description of Artificial Sequence: Synthetic oligonucleotide
agguuagaccaagccccuc

SEQ ID NO: 1682549 - RNA, 19 nt, Artificial Sequence
  Description of Artificial Sequence: Synthetic oligonucleotide
guuucaccucgcuguagaa

SEQ ID NO: 1682550 - RNA, 19 nt, Artificial Sequence
  Description of Artificial Sequence: Synthetic oligonucleotide
agacaagcgaggacacagu

SEQ ID NO: 1682551 - RNA, 19 nt, Artificial Sequence
  Description of Artificial Sequence: Synthetic oligonucleotide
gacguuuaauuggaggguu

SEQ ID NO: 1682552 - RNA, 19 nt, Artificial Sequence
  Description of Artificial Sequence: Synthetic oligonucleotide
gucacggcaacaccacugu

SEQ ID NO: 1682553 - RNA, 19 nt, Artificial Sequence
  Description of Artificial Sequence: Synthetic oligonucleotide
uuucgccagcuguccacuc

SEQ ID NO: 1682554 - RNA, 19 nt, Artificial Sequence
  Description of Artificial Sequence: Synthetic oligonucleotide
cguuagaacugaaucucuc

SEQ ID NO: 1682555 - RNA, 19 nt, Artificial Sequence
  Description of Artificial Sequence: Synthetic oligonucleotide
cagcacgagucaguggcac

SEQ ID NO: 1682556 - RNA, 19 nt, Artificial Sequence
  Description of Artificial Sequence: Synthetic oligonucleotide
acucucgcuguuccauuuu

SEQ ID NO: 1682557 - RNA, 19 nt, Artificial Sequence
  Description of Artificial Sequence: Synthetic oligonucleotide
uuacauccagggcccucuu

SEQ ID NO: 1682558 - RNA, 19 nt, Artificial Sequence
  Description of Artificial Sequence: Synthetic oligonucleotide
ucgcccaucccggcuuucc

SEQ ID NO: 1682559 - RNA, 19 nt, Artificial Sequence
  Description of Artificial Sequence: Synthetic oligonucleotide
ggccaaagcuggucuggag

SEQ ID NO: 1682560 - RNA, 19 nt, Artificial Sequence
  Description of Artificial Sequence: Synthetic oligonucleotide
ggagucacggcaacaccac

SEQ ID NO: 1682561 - RNA, 19 nt, Artificial Sequence
  Description of Artificial Sequence: Synthetic oligonucleotide
uccgcccgaaaccccgcuc

SEQ ID NO: 1682562 - RNA, 19 nt, Artificial Sequence
  Description of Artificial Sequence: Synthetic oligonucleotide
gcaagacguuuaauuggag

SEQ ID NO: 1682563 - RNA, 19 nt, Artificial Sequence
  Description of Artificial Sequence: Synthetic oligonucleotide
gagcuucgaucuccucuuc

SEQ ID NO: 1682564 - RNA, 19 nt, Artificial Sequence
  Description of Artificial Sequence: Synthetic oligonucleotide
augcaccaauauagacaac

SEQ ID NO: 1682565 - RNA, 19 nt, Artificial Sequence
  Description of Artificial Sequence: Synthetic oligonucleotide
gaggggaagguuagaccaa

SEQ ID NO: 1682566 - RNA, 19 nt, Artificial Sequence
  Description of Artificial Sequence: Synthetic oligonucleotide
cuccuccgcccgaaacccc

SEQ ID NO: 1682567 - RNA, 19 nt, Artificial Sequence
  Description of Artificial Sequence: Synthetic oligonucleotide
acguuuaauuggaggguuu

SEQ ID NO: 1682568 - RNA, 19 nt, Artificial Sequence
  Description of Artificial Sequence: Synthetic oligonucleotide
acgcuacucuaugucgggu

SEQ ID NO: 1682569 - RNA, 19 nt, Artificial Sequence
  Description of Artificial Sequence: Synthetic oligonucleotide
gcuguucccacgguggcca

SEQ ID NO: 1682570 - RNA, 19 nt, Artificial Sequence
  Description of Artificial Sequence: Synthetic oligonucleotide
cccucaaguacaaauuacu

SEQ ID NO: 1682571 - RNA, 19 nt, Artificial Sequence
  Description of Artificial Sequence: Synthetic oligonucleotide
accuucgagccaccacaau

SEQ ID NO: 1682572 - RNA, 19 nt, Artificial Sequence
  Description of Artificial Sequence: Synthetic oligonucleotide
ggguuuccacaaacuauac

SEQ ID NO: 1682573 - RNA, 19 nt, Artificial Sequence
  Description of Artificial Sequence: Synthetic oligonucleotide
gaccuucgagccaccacaa

SEQ ID NO: 1682574 - RNA, 19 nt, Artificial Sequence
  Description of Artificial Sequence: Synthetic oligonucleotide
ggcuccgugggcgaggaga

SEQ ID NO: 1682575 - RNA, 19 nt, Artificial Sequence
  Description of Artificial Sequence: Synthetic oligonucleotide
cuacucuaugucgggugga

SEQ ID NO: 1682576 - RNA, 19 nt, Artificial Sequence
  Description of Artificial Sequence: Synthetic oligonucleotide
gagucacggcaacaccacu

SEQ ID NO: 1682577 - RNA, 19 nt, Artificial Sequence
  Description of Artificial Sequence: Synthetic oligonucleotide
ccgaagccgccauuuuccc

SEQ ID NO: 1682578 - RNA, 19 nt, Artificial Sequence
  Description of Artificial Sequence: Synthetic oligonucleotide
gcuccgugggcgaggagag

SEQ ID NO: 1682579 - RNA, 19 nt, Artificial Sequence
  Description of Artificial Sequence: Synthetic oligonucleotide
gccuggaaauuucgccagc

SEQ ID NO: 1682580 - RNA, 19 nt, Artificial Sequence
  Description of Artificial Sequence: Synthetic oligonucleotide
cguuuaauuggaggguuuc

SEQ ID NO: 1682581 - RNA, 19 nt, Artificial Sequence
  Description of Artificial Sequence: Synthetic oligonucleotide
ccuccuccgcccgaaaccc

SEQ ID NO: 1682582 - RNA, 19 nt, Artificial Sequence
  Description of Artificial Sequence: Synthetic oligonucleotide
cgcuacucuaugucgggug

SEQ ID NO: 1682583 - RNA, 19 nt, Artificial Sequence
  Description of Artificial Sequence: Synthetic oligonucleotide
cccgcucucucccgaagcc

SEQ ID NO: 1682584 - RNA, 19 nt, Artificial Sequence
  Description of Artificial Sequence: Synthetic oligonucleotide
gaaccucaaacggguucaa

SEQ ID NO: 1682585 - RNA, 19 nt, Artificial Sequence
  Description of Artificial Sequence: Synthetic oligonucleotide
ggggaagguuagaccaagc

SEQ ID NO: 1682586 - RNA, 19 nt, Artificial Sequence
  Description of Artificial Sequence: Synthetic oligonucleotide
gguggcuccgugggcgagg

SEQ ID NO: 1682587 - RNA, 19 nt, Artificial Sequence
  Description of Artificial Sequence: Synthetic oligonucleotide
cacuguaagcaagacguuu

SEQ ID NO: 1682588 - RNA, 19 nt, Artificial Sequence
  Description of Artificial Sequence: Synthetic oligonucleotide
gucacucucgcuguuccau

SEQ ID NO: 1682589 - RNA, 19 nt, Artificial Sequence
  Description of Artificial Sequence: Synthetic oligonucleotide
gacugccuguuugaacagu

SEQ ID NO: 1682590 - RNA, 19 nt, Artificial Sequence
  Description of Artificial Sequence: Synthetic oligonucleotide
gcggccgaaggaagguccg

SEQ ID NO: 1682591 - RNA, 19 nt, Artificial Sequence
  Description of Artificial Sequence: Synthetic oligonucleotide
cccgaaaccccgcucucuc

SEQ ID NO: 1682592 - RNA, 19 nt, Artificial Sequence
  Description of Artificial Sequence: Synthetic oligonucleotide
cgagccaccacaauucagu

SEQ ID NO: 1682593 - RNA, 19 nt, Artificial Sequence
  Description of Artificial Sequence: Synthetic oligonucleotide
cuccgugggcgaggagagg

SEQ ID NO: 1682594 - RNA, 19 nt, Artificial Sequence
  Description of Artificial Sequence: Synthetic oligonucleotide
caguagcaacuuguaagcu

SEQ ID NO: 1682595 - RNA, 19 nt, Artificial Sequence
  Description of Artificial Sequence: Synthetic oligonucleotide
uggcuccgugggcgaggag

SEQ ID NO: 1682596 - RNA, 19 nt, Artificial Sequence
  Description of Artificial Sequence: Synthetic oligonucleotide
ccgugggcgaggagagggg

SEQ ID NO: 1682597 - RNA, 19 nt, Artificial Sequence
  Description of Artificial Sequence: Synthetic oligonucleotide
acucgcccaucccggcuuu

SEQ ID NO: 1682598 - RNA, 19 nt, Artificial Sequence
  Description of Artificial Sequence: Synthetic oligonucleotide
ccgccauuuucccggccag

SEQ ID NO: 1682599 - RNA, 19 nt, Artificial Sequence
  Description of Artificial Sequence: Synthetic oligonucleotide
cucucucccgaagccgcca

SEQ ID NO: 1682600 - RNA, 19 nt, Artificial Sequence
  Description of Artificial Sequence: Synthetic oligonucleotide
ggcaccuuccgauccuggu

SEQ ID NO: 1682601 - RNA, 19 nt, Artificial Sequence
  Description of Artificial Sequence: Synthetic oligonucleotide
ccuccccucaaguacaaau

SEQ ID NO: 1682602 - RNA, 19 nt, Artificial Sequence
  Description of Artificial Sequence: Synthetic oligonucleotide
ccuccuccgugcugccucc

SEQ ID NO: 1682603 - RNA, 19 nt, Artificial Sequence
  Description of Artificial Sequence: Synthetic oligonucleotide
caacuggcgaaaccucuuu

SEQ ID NO: 1682604 - RNA, 19 nt, Artificial Sequence
  Description of Artificial Sequence: Synthetic oligonucleotide
ccgcucucucccgaagccg

SEQ ID NO: 1682605 - RNA, 19 nt, Artificial Sequence
  Description of Artificial Sequence: Synthetic oligonucleotide
guggcuccgugggcgagga

SEQ ID NO: 1682606 - RNA, 19 nt, Artificial Sequence
  Description of Artificial Sequence: Synthetic oligonucleotide
uguggcccugagggucacu

SEQ ID NO: 1682607 - RNA, 19 nt, Artificial Sequence
  Description of Artificial Sequence: Synthetic oligonucleotide
gcacgagucaguggcaccu

SEQ ID NO: 1682608 - RNA, 19 nt, Artificial Sequence
  Description of Artificial Sequence: Synthetic oligonucleotide
cacucucgcuguuccauuu

SEQ ID NO: 1682609 - RNA, 19 nt, Artificial Sequence
  Description of Artificial Sequence: Synthetic oligonucleotide
ucccggccagccggcacgu

SEQ ID NO: 1682610 - RNA, 19 nt, Artificial Sequence
  Description of Artificial Sequence: Synthetic oligonucleotide
gugggacuggcuggaagau

SEQ ID NO: 1682611 - RNA, 19 nt, Artificial Sequence
  Description of Artificial Sequence: Synthetic oligonucleotide
ggcuaacucuuuggaaagu

SEQ ID NO: 1682612 - RNA, 19 nt, Artificial Sequence
  Description of Artificial Sequence: Synthetic oligonucleotide
gcagcacgagucaguggca

SEQ ID NO: 1682613 - RNA, 19 nt, Artificial Sequence
  Description of Artificial Sequence: Synthetic oligonucleotide
cacgguggccaaagcuggu

SEQ ID NO: 1682614 - RNA, 19 nt, Artificial Sequence
  Description of Artificial Sequence: Synthetic oligonucleotide
gagggucacucucgcuguu

SEQ ID NO: 1682615 - RNA, 19 nt, Artificial Sequence
  Description of Artificial Sequence: Synthetic oligonucleotide
cccuuuguauuugccugga

SEQ ID NO: 1682616 - RNA, 19 nt, Artificial Sequence
  Description of Artificial Sequence: Synthetic oligonucleotide
cagcuguccacucgcccau

SEQ ID NO: 1682617 - RNA, 19 nt, Artificial Sequence
  Description of Artificial Sequence: Synthetic oligonucleotide
cuuucucgcuuggcuuucu

SEQ ID NO: 1682618 - RNA, 19 nt, Artificial Sequence
  Description of Artificial Sequence: Synthetic oligonucleotide
cacucgcccaucccggcuu

SEQ ID NO: 1682619 - RNA, 19 nt, Artificial Sequence
  Description of Artificial Sequence: Synthetic oligonucleotide
ccggccagccggcacguga

SEQ ID NO: 1682620 - RNA, 19 nt, Artificial Sequence
  Description of Artificial Sequence: Synthetic oligonucleotide
ggcgaggagaggggaaggu

SEQ ID NO: 1682621 - RNA, 19 nt, Artificial Sequence
  Description of Artificial Sequence: Synthetic oligonucleotide
gccgaaggaagguccgauu

SEQ ID NO: 1682622 - RNA, 19 nt, Artificial Sequence
  Description of Artificial Sequence: Synthetic oligonucleotide
ccaggacgagucaaucuuu

SEQ ID NO: 1682623 - RNA, 19 nt, Artificial Sequence
  Description of Artificial Sequence: Synthetic oligonucleotide
ccggcuuuccucgaaguuu

SEQ ID NO: 1682624 - RNA, 19 nt, Artificial Sequence
  Description of Artificial Sequence: Synthetic oligonucleotide
cucccgaagccgccauuuu

SEQ ID NO: 1682625 - RNA, 19 nt, Artificial Sequence
  Description of Artificial Sequence: Synthetic oligonucleotide
ccaucccggcuuuccucga

SEQ ID NO: 1682626 - RNA, 19 nt, Artificial Sequence
  Description of Artificial Sequence: Synthetic oligonucleotide
ccgcccgaaaccccgcucu

SEQ ID NO: 1682627 - RNA, 19 nt, Artificial Sequence
  Description of Artificial Sequence: Synthetic oligonucleotide
ccugagggucacucucgcu

SEQ ID NO: 1682628 - RNA, 19 nt, Artificial Sequence
  Description of Artificial Sequence: Synthetic oligonucleotide
cggcuuuccucgaaguuuu

SEQ ID NO: 1682629 - RNA, 19 nt, Artificial Sequence
  Description of Artificial Sequence: Synthetic oligonucleotide
gcgaggagaggggaagguu

SEQ ID NO: 1682630 - RNA, 19 nt, Artificial Sequence
  Description of Artificial Sequence: Synthetic oligonucleotide
ccucgcuguagaaggucau

SEQ ID NO: 1682631 - RNA, 19 nt, Artificial Sequence
  Description of Artificial Sequence: Synthetic oligonucleotide
ccacuguaagcaagacguu

SEQ ID NO: 1682632 - RNA, 19 nt, Artificial Sequence
  Description of Artificial Sequence: Synthetic oligonucleotide
gcccgaaaccccgcucucu

SEQ ID NO: 1682633 - RNA, 19 nt, Artificial Sequence
  Description of Artificial Sequence: Synthetic oligonucleotide
cgguggccaaagcuggucu

SEQ ID NO: 1682634 - RNA, 19 nt, Artificial Sequence
  Description of Artificial Sequence: Synthetic oligonucleotide
cgcccgaaaccccgcucuc

SEQ ID NO: 1682635 - RNA, 19 nt, Artificial Sequence
  Description of Artificial Sequence: Synthetic oligonucleotide
cacgagucaguggcaccuu

SEQ ID NO: 1682636 - RNA, 19 nt, Artificial Sequence
  Description of Artificial Sequence: Synthetic oligonucleotide
ccccuccccucaaguacaa

SEQ ID NO: 1682637 - RNA, 19 nt, Artificial Sequence
  Description of Artificial Sequence: Synthetic oligonucleotide
ccacucgcccaucccggcu

SEQ ID NO: 1682638 - RNA, 19 nt, Artificial Sequence
  Description of Artificial Sequence: Synthetic oligonucleotide
cccggcuuuccucgaaguu

SEQ ID NO: 1682639 - RNA, 19 nt, Artificial Sequence
  Description of Artificial Sequence: Synthetic oligonucleotide
ccuuccgauccugguggcu

SEQ ID NO: 1682640 - RNA, 19 nt, Artificial Sequence
  Description of Artificial Sequence: Synthetic oligonucleotide
cggccgaaggaagguccga

SEQ ID NO: 1682641 - RNA, 19 nt, Artificial Sequence
  Description of Artificial Sequence: Synthetic oligonucleotide
ccgauccugguggcuccgu

SEQ ID NO: 1682642 - RNA, 19 nt, Artificial Sequence
  Description of Artificial Sequence: Synthetic oligonucleotide
uuauuaagcacccagcugu

SEQ ID NO: 1682643 - RNA, 19 nt, Artificial Sequence
  Description of Artificial Sequence: Synthetic oligonucleotide
aaguuuauuaagcacccag

SEQ ID NO: 1682644 - RNA, 19 nt, Artificial Sequence
  Description of Artificial Sequence: Synthetic oligonucleotide
aacguuacugugcagccac

SEQ ID NO: 1682645 - RNA, 19 nt, Artificial Sequence
  Description of Artificial Sequence: Synthetic oligonucleotide
acucccuugacauaauugg

SEQ ID NO: 1682646 - RNA, 19 nt, Artificial Sequence
  Description of Artificial Sequence: Synthetic oligonucleotide
aaacaagcccaucuguccg

SEQ ID NO: 1682647 - RNA, 19 nt, Artificial Sequence
  Description of Artificial Sequence: Synthetic oligonucleotide
auaauuggcccauuguggg

SEQ ID NO: 1682648 - RNA, 19 nt, Artificial Sequence
  Description of Artificial Sequence: Synthetic oligonucleotide
aaccaauugguccagcuca

SEQ ID NO: 1682649 - RNA, 19 nt, Artificial Sequence
  Description of Artificial Sequence: Synthetic oligonucleotide
uguugaaucacucccuuga

SEQ ID NO: 1682650 - RNA, 19 nt, Artificial Sequence
  Description of Artificial Sequence: Synthetic oligonucleotide
uuuauuaagcacccagcug

SEQ ID NO: 1682651 - RNA, 19 nt, Artificial Sequence
  Description of Artificial Sequence: Synthetic oligonucleotide
acauaauuggcccauugug

SEQ ID NO: 1682652 - RNA, 19 nt, Artificial Sequence
  Description of Artificial Sequence: Synthetic oligonucleotide
aucggauacucacuggagc

SEQ ID NO: 1682653 - RNA, 19 nt, Artificial Sequence
  Description of Artificial Sequence: Synthetic oligonucleotide
guaguguugaaucacuccc

SEQ ID NO: 1682654 - RNA, 19 nt, Artificial Sequence
  Description of Artificial Sequence: Synthetic oligonucleotide
ugaaucacucccuugacau

SEQ ID NO: 1682655 - RNA, 19 nt, Artificial Sequence
  Description of Artificial Sequence: Synthetic oligonucleotide
acaaguuuauuaagcaccc

SEQ ID NO: 1682656 - RNA, 19 nt, Artificial Sequence
  Description of Artificial Sequence: Synthetic oligonucleotide
aguuuauuaagcacccagc

SEQ ID NO: 1682657 - RNA, 19 nt, Artificial Sequence
  Description of Artificial Sequence: Synthetic oligonucleotide
agcaacguuacugugcagc

SEQ ID NO: 1682658 - RNA, 19 nt, Artificial Sequence
  Description of Artificial Sequence: Synthetic oligonucleotide
uccgucggcagcuugagag

SEQ ID NO: 1682659 - RNA, 19 nt, Artificial Sequence
  Description of Artificial Sequence: Synthetic oligonucleotide
aaccgcaccucucgaaggc

SEQ ID NO: 1682660 - RNA, 19 nt, Artificial Sequence
  Description of Artificial Sequence: Synthetic oligonucleotide
uccaucaggcgcaggaacg

SEQ ID NO: 1682661 - RNA, 19 nt, Artificial Sequence
  Description of Artificial Sequence: Synthetic oligonucleotide
auagacuccaggcaccgag

SEQ ID NO: 1682662 - RNA, 19 nt, Artificial Sequence
  Description of Artificial Sequence: Synthetic oligonucleotide
ugucaugcgacugccauag

SEQ ID NO: 1682663 - RNA, 19 nt, Artificial Sequence
  Description of Artificial Sequence: Synthetic oligonucleotide
caaucaguagugcauggcc

SEQ ID NO: 1682664 - RNA, 19 nt, Artificial Sequence
  Description of Artificial Sequence: Synthetic oligonucleotide
uuaagcacccagcuguaga

SEQ ID NO: 1682665 - RNA, 19 nt, Artificial Sequence
  Description of Artificial Sequence: Synthetic oligonucleotide
ucggauacucacuggagcc

SEQ ID NO: 1682666 - RNA, 19 nt, Artificial Sequence
  Description of Artificial Sequence: Synthetic oligonucleotide
caagcagccaugacgcucg

SEQ ID NO: 1682667 - RNA, 19 nt, Artificial Sequence
  Description of Artificial Sequence: Synthetic oligonucleotide
agggcaacuuaccucaaag

SEQ ID NO: 1682668 - RNA, 19 nt, Artificial Sequence
  Description of Artificial Sequence: Synthetic oligonucleotide
aggaacgccucacaggcuc

SEQ ID NO: 1682669 - RNA, 19 nt, Artificial Sequence
  Description of Artificial Sequence: Synthetic oligonucleotide
ugacauaauuggcccauug

SEQ ID NO: 1682670 - RNA, 19 nt, Artificial Sequence
  Description of Artificial Sequence: Synthetic oligonucleotide
ugggaauugcagucgcugg

SEQ ID NO: 1682671 - RNA, 19 nt, Artificial Sequence
  Description of Artificial Sequence: Synthetic oligonucleotide
aaucacucccuugacauaa

SEQ ID NO: 1682672 - RNA, 19 nt, Artificial Sequence
  Description of Artificial Sequence: Synthetic oligonucleotide
gaaucggauacucacugga

SEQ ID NO: 1682673 - RNA, 19 nt, Artificial Sequence
  Description of Artificial Sequence: Synthetic oligonucleotide
augcgacugccauagacuc

SEQ ID NO: 1682674 - RNA, 19 nt, Artificial Sequence
  Description of Artificial Sequence: Synthetic oligonucleotide
ugccauagacuccaggcac

SEQ ID NO: 1682675 - RNA, 19 nt, Artificial Sequence
  Description of Artificial Sequence: Synthetic oligonucleotide
uaauuggcccauugugggg

SEQ ID NO: 1682676 - RNA, 19 nt, Artificial Sequence
  Description of Artificial Sequence: Synthetic oligonucleotide
uaugugauccauggcgagg

SEQ ID NO: 1682677 - RNA, 19 nt, Artificial Sequence
  Description of Artificial Sequence: Synthetic oligonucleotide
augagguugacgcggcccg

SEQ ID NO: 1682678 - RNA, 19 nt, Artificial Sequence
  Description of Artificial Sequence: Synthetic oligonucleotide
guaaugacucuccaccaug

SEQ ID NO: 1682679 - RNA, 19 nt, Artificial Sequence
  Description of Artificial Sequence: Synthetic oligonucleotide
uguagguggccacuuccag

SEQ ID NO: 1682680 - RNA, 19 nt, Artificial Sequence
  Description of Artificial Sequence: Synthetic oligonucleotide
gaucucgccuaccacgugc

SEQ ID NO: 1682681 - RNA, 19 nt, Artificial Sequence
  Description of Artificial Sequence: Synthetic oligonucleotide
aauuggcccauuguggggu

SEQ ID NO: 1682682 - RNA, 19 nt, Artificial Sequence
  Description of Artificial Sequence: Synthetic oligonucleotide
gaguuagugaugagcacag

SEQ ID NO: 1682683 - RNA, 19 nt, Artificial Sequence
  Description of Artificial Sequence: Synthetic oligonucleotide
ugcuuaucagcucccugcc

SEQ ID NO: 1682684 - RNA, 19 nt, Artificial Sequence
  Description of Artificial Sequence: Synthetic oligonucleotide
ucaaccaauugguccagcu

SEQ ID NO: 1682685 - RNA, 19 nt, Artificial Sequence
  Description of Artificial Sequence: Synthetic oligonucleotide
agccaugacgcucgucugc

SEQ ID NO: 1682686 - RNA, 19 nt, Artificial Sequence
  Description of Artificial Sequence: Synthetic oligonucleotide
aaucggauacucacuggag

SEQ ID NO: 1682687 - RNA, 19 nt, Artificial Sequence
  Description of Artificial Sequence: Synthetic oligonucleotide
ggcccuauagucuccacgg

SEQ ID NO: 1682688 - RNA, 19 nt, Artificial Sequence
  Description of Artificial Sequence: Synthetic oligonucleotide
gaaccgcaccucucgaagg

SEQ ID NO: 1682689 - RNA, 19 nt, Artificial Sequence
  Description of Artificial Sequence: Synthetic oligonucleotide
guuuauuaagcacccagcu

SEQ ID NO: 1682690 - RNA, 19 nt, Artificial Sequence
  Description of Artificial Sequence: Synthetic oligonucleotide
uccggcucagcuccgaacu

SEQ ID NO: 1682691 - RNA, 19 nt, Artificial Sequence
  Description of Artificial Sequence: Synthetic oligonucleotide
gguaguguugaaucacucc

SEQ ID NO: 1682692 - RNA, 19 nt, Artificial Sequence
  Description of Artificial Sequence: Synthetic oligonucleotide
agugaguaaugacucucca

SEQ ID NO: 1682693 - RNA, 19 nt, Artificial Sequence
  Description of Artificial Sequence: Synthetic oligonucleotide
aggcccuauagucuccacg

SEQ ID NO: 1682694 - RNA, 19 nt, Artificial Sequence
  Description of Artificial Sequence: Synthetic oligonucleotide
cagugcgaugagcugaucc

SEQ ID NO: 1682695 - RNA, 19 nt, Artificial Sequence
  Description of Artificial Sequence: Synthetic oligonucleotide
uggguaguguugaaucacu

SEQ ID NO: 1682696 - RNA, 19 nt, Artificial Sequence
  Description of Artificial Sequence: Synthetic oligonucleotide
agucaaucaguagugcaug

SEQ ID NO: 1682697 - RNA, 19 nt, Artificial Sequence
  Description of Artificial Sequence: Synthetic oligonucleotide
augagacgcccaaaggccc

SEQ ID NO: 1682698 - RNA, 19 nt, Artificial Sequence
  Description of Artificial Sequence: Synthetic oligonucleotide
ggcagcuugagagagguag

SEQ ID NO: 1682699 - RNA, 19 nt, Artificial Sequence
  Description of Artificial Sequence: Synthetic oligonucleotide
ucgccuaccacgugccggg

SEQ ID NO: 1682700 - RNA, 19 nt, Artificial Sequence
  Description of Artificial Sequence: Synthetic oligonucleotide
aguaaugacucuccaccau

SEQ ID NO: 1682701 - RNA, 19 nt, Artificial Sequence
  Description of Artificial Sequence: Synthetic oligonucleotide
gucgcuggggcucaucugc

SEQ ID NO: 1682702 - RNA, 19 nt, Artificial Sequence
  Description of Artificial Sequence: Synthetic oligonucleotide
ugggcuguucgccggaucu

SEQ ID NO: 1682703 - RNA, 19 nt, Artificial Sequence
  Description of Artificial Sequence: Synthetic oligonucleotide
gaauugcagucgcuggggc

SEQ ID NO: 1682704 - RNA, 19 nt, Artificial Sequence
  Description of Artificial Sequence: Synthetic oligonucleotide
aggaccgcagggcuguggg

SEQ ID NO: 1682705 - RNA, 19 nt, Artificial Sequence
  Description of Artificial Sequence: Synthetic oligonucleotide
guaugugauccauggcgag

SEQ ID NO: 1682706 - RNA, 19 nt, Artificial Sequence
  Description of Artificial Sequence: Synthetic oligonucleotide
acgcccaaaggcccuauag

SEQ ID NO: 1682707 - RNA, 19 nt, Artificial Sequence
  Description of Artificial Sequence: Synthetic oligonucleotide
ccaugagacgcccaaaggc

SEQ ID NO: 1682708 - RNA, 19 nt, Artificial Sequence
  Description of Artificial Sequence: Synthetic oligonucleotide
gacauuggaguuagugaug

SEQ ID NO: 1682709 - RNA, 19 nt, Artificial Sequence
  Description of Artificial Sequence: Synthetic oligonucleotide
guugacacaccugggcccg

SEQ ID NO: 1682710 - RNA, 19 nt, Artificial Sequence
  Description of Artificial Sequence: Synthetic oligonucleotide
caggcuuguuuccagggac

SEQ ID NO: 1682711 - RNA, 19 nt, Artificial Sequence
  Description of Artificial Sequence: Synthetic oligonucleotide
accuuaggcggucuccaag

SEQ ID NO: 1682712 - RNA, 19 nt, Artificial Sequence
  Description of Artificial Sequence: Synthetic oligonucleotide
cucuccaccaugagacgcc

SEQ ID NO: 1682713 - RNA, 19 nt, Artificial Sequence
  Description of Artificial Sequence: Synthetic oligonucleotide
ucaucccugagugaguaau

SEQ ID NO: 1682714 - RNA, 19 nt, Artificial Sequence
  Description of Artificial Sequence: Synthetic oligonucleotide
uguucgccggaucucgccu

SEQ ID NO: 1682715 - RNA, 19 nt, Artificial Sequence
  Description of Artificial Sequence: Synthetic oligonucleotide
uauuaagcacccagcugua

SEQ ID NO: 1682716 - RNA, 19 nt, Artificial Sequence
  Description of Artificial Sequence: Synthetic oligonucleotide
cagggcauggcggacauug

SEQ ID NO: 1682717 - RNA, 19 nt, Artificial Sequence
  Description of Artificial Sequence: Synthetic oligonucleotide
uuaucagcucccugcccgc

SEQ ID NO: 1682718 - RNA, 19 nt, Artificial Sequence
  Description of Artificial Sequence: Synthetic oligonucleotide
ugcagucaaucaguagugc

SEQ ID NO: 1682719 - RNA, 19 nt, Artificial Sequence
  Description of Artificial Sequence: Synthetic oligonucleotide
gaggcaccaggcuuguuuc

SEQ ID NO: 1682720 - RNA, 19 nt, Artificial Sequence
  Description of Artificial Sequence: Synthetic oligonucleotide
cgagagagcagccucaacc

SEQ ID NO: 1682721 - RNA, 19 nt, Artificial Sequence
  Description of Artificial Sequence: Synthetic oligonucleotide
gguguagguggccacuucc

SEQ ID NO: 1682722 - RNA, 19 nt, Artificial Sequence
  Description of Artificial Sequence: Synthetic oligonucleotide
ugcgacugccauagacucc

SEQ ID NO: 1682723 - RNA, 19 nt, Artificial Sequence
  Description of Artificial Sequence: Synthetic oligonucleotide
uuguaguccgugugcuccc

SEQ ID NO: 1682724 - RNA, 19 nt, Artificial Sequence
  Description of Artificial Sequence: Synthetic oligonucleotide
ucggcagcuugagagaggu

SEQ ID NO: 1682725 - RNA, 19 nt, Artificial Sequence
  Description of Artificial Sequence: Synthetic oligonucleotide
caaccaauugguccagcuc

SEQ ID NO: 1682726 - RNA, 19 nt, Artificial Sequence
  Description of Artificial Sequence: Synthetic oligonucleotide
accccugcgaagcugugcu

SEQ ID NO: 1682727 - RNA, 19 nt, Artificial Sequence
  Description of Artificial Sequence: Synthetic oligonucleotide
ugagacgcccaaaggcccu

SEQ ID NO: 1682728 - RNA, 19 nt, Artificial Sequence
  Description of Artificial Sequence: Synthetic oligonucleotide
gcaacuuaccucaaaguca

SEQ ID NO: 1682729 - RNA, 19 nt, Artificial Sequence
  Description of Artificial Sequence: Synthetic oligonucleotide
ggaauugcagucgcugggg

SEQ ID NO: 1682730 - RNA, 19 nt, Artificial Sequence
  Description of Artificial Sequence: Synthetic oligonucleotide
gugggaauugcagucgcug

SEQ ID NO: 1682731 - RNA, 19 nt, Artificial Sequence
  Description of Artificial Sequence: Synthetic oligonucleotide
acgucuguguguccaucag

SEQ ID NO: 1682732 - RNA, 19 nt, Artificial Sequence
  Description of Artificial Sequence: Synthetic oligonucleotide
acacuggcgccgccgaauc

SEQ ID NO: 1682733 - RNA, 19 nt, Artificial Sequence
  Description of Artificial Sequence: Synthetic oligonucleotide
aucucgccuaccacgugcc

SEQ ID NO: 1682734 - RNA, 19 nt, Artificial Sequence
  Description of Artificial Sequence: Synthetic oligonucleotide
aacgccucacaggcucagc

SEQ ID NO: 1682735 - RNA, 19 nt, Artificial Sequence
  Description of Artificial Sequence: Synthetic oligonucleotide
cacggcucagagcagccgc

SEQ ID NO: 1682736 - RNA, 19 nt, Artificial Sequence
  Description of Artificial Sequence: Synthetic oligonucleotide
uccgcccuacgucugugug

SEQ ID NO: 1682737 - RNA, 19 nt, Artificial Sequence
  Description of Artificial Sequence: Synthetic oligonucleotide
gacgcucgucugcagcggg

SEQ ID NO: 1682738 - RNA, 19 nt, Artificial Sequence
  Description of Artificial Sequence: Synthetic oligonucleotide
ucccugagugaguaaugac

SEQ ID NO: 1682739 - RNA, 19 nt, Artificial Sequence
  Description of Artificial Sequence: Synthetic oligonucleotide
guggugagaagagaaacaa

SEQ ID NO: 1682740 - RNA, 19 nt, Artificial Sequence
  Description of Artificial Sequence: Synthetic oligonucleotide
auuaagcacccagcuguag

SEQ ID NO: 1682741 - RNA, 19 nt, Artificial Sequence
  Description of Artificial Sequence: Synthetic oligonucleotide
accugcagucaaucaguag

SEQ ID NO: 1682742 - RNA, 19 nt, Artificial Sequence
  Description of Artificial Sequence: Synthetic oligonucleotide
ggaguuagugaugagcaca

SEQ ID NO: 1682743 - RNA, 19 nt, Artificial Sequence
  Description of Artificial Sequence: Synthetic oligonucleotide
gcaacguuacugugcagcc

SEQ ID NO: 1682744 - RNA, 19 nt, Artificial Sequence
  Description of Artificial Sequence: Synthetic oligonucleotide
caaaggcccuauagucucc

SEQ ID NO: 1682745 - RNA, 19 nt, Artificial Sequence
  Description of Artificial Sequence: Synthetic oligonucleotide
caucccugagugaguaaug

SEQ ID NO: 1682746 - RNA, 19 nt, Artificial Sequence
  Description of Artificial Sequence: Synthetic oligonucleotide
uccacggcucagagcagcc

SEQ ID NO: 1682747 - RNA, 19 nt, Artificial Sequence
  Description of Artificial Sequence: Synthetic oligonucleotide
caacuuaccucaaagucau

SEQ ID NO: 1682748 - RNA, 19 nt, Artificial Sequence
  Description of Artificial Sequence: Synthetic oligonucleotide
ucucgccuaccacgugccg

SEQ ID NO: 1682749 - RNA, 19 nt, Artificial Sequence
  Description of Artificial Sequence: Synthetic oligonucleotide
cucgaaggcucuccuugcc

SEQ ID NO: 1682750 - RNA, 19 nt, Artificial Sequence
  Description of Artificial Sequence: Synthetic oligonucleotide
agcuauggcucccgagucu

SEQ ID NO: 1682751 - RNA, 19 nt, Artificial Sequence
  Description of Artificial Sequence: Synthetic oligonucleotide
ccuuaggcggucuccaagc

SEQ ID NO: 1682752 - RNA, 19 nt, Artificial Sequence
  Description of Artificial Sequence: Synthetic oligonucleotide
cucgccuaccacgugccgg

SEQ ID NO: 1682753 - RNA, 19 nt, Artificial Sequence
  Description of Artificial Sequence: Synthetic oligonucleotide
ccuauagucuccacggcuc

SEQ ID NO: 1682754 - RNA, 19 nt, Artificial Sequence
  Description of Artificial Sequence: Synthetic oligonucleotide
cauuggaguuagugaugag

SEQ ID NO: 1682755 - RNA, 19 nt, Artificial Sequence
  Description of Artificial Sequence: Synthetic oligonucleotide
ggacauuggaguuagugau

SEQ ID NO: 1682756 - RNA, 19 nt, Artificial Sequence
  Description of Artificial Sequence: Synthetic oligonucleotide
caugcgacugccauagacu

SEQ ID NO: 1682757 - RNA, 19 nt, Artificial Sequence
  Description of Artificial Sequence: Synthetic oligonucleotide
gcagcguacaccugcugcc

SEQ ID NO: 1682758 - RNA, 19 nt, Artificial Sequence
  Description of Artificial Sequence: Synthetic oligonucleotide
agguugacgcggcccggcg

SEQ ID NO: 1682759 - RNA, 19 nt, Artificial Sequence
  Description of Artificial Sequence: Synthetic oligonucleotide
gcccaaaggcccuauaguc

SEQ ID NO: 1682760 - RNA, 19 nt, Artificial Sequence
  Description of Artificial Sequence: Synthetic oligonucleotide
gcagucaaucaguagugca

SEQ ID NO: 1682761 - RNA, 19 nt, Artificial Sequence
  Description of Artificial Sequence: Synthetic oligonucleotide
ugacgcucgucugcagcgg

SEQ ID NO: 1682762 - RNA, 19 nt, Artificial Sequence
  Description of Artificial Sequence: Synthetic oligonucleotide
aaccuuaggcggucuccaa

SEQ ID NO: 1682763 - RNA, 19 nt, Artificial Sequence
  Description of Artificial Sequence: Synthetic oligonucleotide
ucacucccuugacauaauu

SEQ ID NO: 1682764 - RNA, 19 nt, Artificial Sequence
  Description of Artificial Sequence: Synthetic oligonucleotide
cuauggcucccgagucugg

SEQ ID NO: 1682765 - RNA, 19 nt, Artificial Sequence
  Description of Artificial Sequence: Synthetic oligonucleotide
guacugcuccuguauguga

SEQ ID NO: 1682766 - RNA, 19 nt, Artificial Sequence
  Description of Artificial Sequence: Synthetic oligonucleotide
cugccauagacuccaggca

SEQ ID NO: 1682767 - RNA, 19 nt, Artificial Sequence
  Description of Artificial Sequence: Synthetic oligonucleotide
auagucuccacggcucaga

SEQ ID NO: 1682768 - RNA, 19 nt, Artificial Sequence
  Description of Artificial Sequence: Synthetic oligonucleotide
ugcucagcccguugacaca

SEQ ID NO: 1682769 - RNA, 19 nt, Artificial Sequence
  Description of Artificial Sequence: Synthetic oligonucleotide
ucgaaccgcaccucucgaa

SEQ ID NO: 1682770 - RNA, 19 nt, Artificial Sequence
  Description of Artificial Sequence: Synthetic oligonucleotide
cauggcgagggaagcagca

SEQ ID NO: 1682771 - RNA, 19 nt, Artificial Sequence
  Description of Artificial Sequence: Synthetic oligonucleotide
uaguccgugugcuccccga

SEQ ID NO: 1682772 - RNA, 19 nt, Artificial Sequence
  Description of Artificial Sequence: Synthetic oligonucleotide
ugagguugacgcggcccgg

SEQ ID NO: 1682773 - RNA, 19 nt, Artificial Sequence
  Description of Artificial Sequence: Synthetic oligonucleotide
guaguccgugugcuccccg

SEQ ID NO: 1682774 - RNA, 19 nt, Artificial Sequence
  Description of Artificial Sequence: Synthetic oligonucleotide
ccgaaucggauacucacug

SEQ ID NO: 1682775 - RNA, 19 nt, Artificial Sequence
  Description of Artificial Sequence: Synthetic oligonucleotide
gcggacauuggaguuagug

SEQ ID NO: 1682776 - RNA, 19 nt, Artificial Sequence
  Description of Artificial Sequence: Synthetic oligonucleotide
uguaguccgugugcucccc

SEQ ID NO: 1682777 - RNA, 19 nt, Artificial Sequence
  Description of Artificial Sequence: Synthetic oligonucleotide
accaccugucaugcgacug

SEQ ID NO: 1682778 - RNA, 19 nt, Artificial Sequence
  Description of Artificial Sequence: Synthetic oligonucleotide
guuacugugcagccaccaa

SEQ ID NO: 1682779 - RNA, 19 nt, Artificial Sequence
  Description of Artificial Sequence: Synthetic oligonucleotide
ccguugacacaccugggcc

SEQ ID NO: 1682780 - RNA, 19 nt, Artificial Sequence
  Description of Artificial Sequence: Synthetic oligonucleotide
cagaccgcagcguacaccu

SEQ ID NO: 1682781 - RNA, 19 nt, Artificial Sequence
  Description of Artificial Sequence: Synthetic oligonucleotide
uucgccggaucucgccuac

SEQ ID NO: 1682782 - RNA, 19 nt, Artificial Sequence
  Description of Artificial Sequence: Synthetic oligonucleotide
accucucgaaggcucuccu

SEQ ID NO: 1682783 - RNA, 19 nt, Artificial Sequence
  Description of Artificial Sequence: Synthetic oligonucleotide
gaaucacucccuugacaua

SEQ ID NO: 1682784 - RNA, 19 nt, Artificial Sequence
  Description of Artificial Sequence: Synthetic oligonucleotide
ccucgaaccgcaccucucg

SEQ ID NO: 1682785 - RNA, 19 nt, Artificial Sequence
  Description of Artificial Sequence: Synthetic oligonucleotide
ccugcagucaaucaguagu

SEQ ID NO: 1682786 - RNA, 19 nt, Artificial Sequence
  Description of Artificial Sequence: Synthetic oligonucleotide
augccagaggcagaccgca

SEQ ID NO: 1682787 - RNA, 19 nt, Artificial Sequence
  Description of Artificial Sequence: Synthetic oligonucleotide
uggcccauugugggguucc

SEQ ID NO: 1682788 - RNA, 19 nt, Artificial Sequence
  Description of Artificial Sequence: Synthetic oligonucleotide
ggcuguucgccggaucucg

SEQ ID NO: 1682789 - RNA, 19 nt, Artificial Sequence
  Description of Artificial Sequence: Synthetic oligonucleotide
acguuacugugcagccacc

SEQ ID NO: 1682790 - RNA, 19 nt, Artificial Sequence
  Description of Artificial Sequence: Synthetic oligonucleotide
cccguugacacaccugggc

SEQ ID NO: 1682791 - RNA, 19 nt, Artificial Sequence
  Description of Artificial Sequence: Synthetic oligonucleotide
caucaggcgcaggaacgcc

SEQ ID NO: 1682792 - RNA, 19 nt, Artificial Sequence
  Description of Artificial Sequence: Synthetic oligonucleotide
gaacgccucacaggcucag

SEQ ID NO: 1682793 - RNA, 19 nt, Artificial Sequence
  Description of Artificial Sequence: Synthetic oligonucleotide
gguggccacuuccagagaa

SEQ ID NO: 1682794 - RNA, 19 nt, Artificial Sequence
  Description of Artificial Sequence: Synthetic oligonucleotide
caccugucaugcgacugcc

SEQ ID NO: 1682795 - RNA, 19 nt, Artificial Sequence
  Description of Artificial Sequence: Synthetic oligonucleotide
gagguggugagaagagaaa

SEQ ID NO: 1682796 - RNA, 19 nt, Artificial Sequence
  Description of Artificial Sequence: Synthetic oligonucleotide
cucaaccuuaggcggucuc

SEQ ID NO: 1682797 - RNA, 19 nt, Artificial Sequence
  Description of Artificial Sequence: Synthetic oligonucleotide
acccagcuguagaaugagg

SEQ ID NO: 1682798 - RNA, 19 nt, Artificial Sequence
  Description of Artificial Sequence: Synthetic oligonucleotide
uguguccaucaggcgcagg

SEQ ID NO: 1682799 - RNA, 19 nt, Artificial Sequence
  Description of Artificial Sequence: Synthetic oligonucleotide
caagcccaucuguccgggg

SEQ ID NO: 1682800 - RNA, 19 nt, Artificial Sequence
  Description of Artificial Sequence: Synthetic oligonucleotide
ccuaccacgugccgggccc

SEQ ID NO: 1682801 - RNA, 19 nt, Artificial Sequence
  Description of Artificial Sequence: Synthetic oligonucleotide
gagguugacgcggcccggc

SEQ ID NO: 1682802 - RNA, 19 nt, Artificial Sequence
  Description of Artificial Sequence: Synthetic oligonucleotide
ucagggcaacuuaccucaa

SEQ ID NO: 1682803 - RNA, 19 nt, Artificial Sequence
  Description of Artificial Sequence: Synthetic oligonucleotide
caagcuccucgaaccgcac

SEQ ID NO: 1682804 - RNA, 19 nt, Artificial Sequence
  Description of Artificial Sequence: Synthetic oligonucleotide
gcuauggcucccgagucug

SEQ ID NO: 1682805 - RNA, 19 nt, Artificial Sequence
  Description of Artificial Sequence: Synthetic oligonucleotide
ggcgagggaagcagcagag

SEQ ID NO: 1682806 - RNA, 19 nt, Artificial Sequence
  Description of Artificial Sequence: Synthetic oligonucleotide
gcugccaaccagcacgguc

SEQ ID NO: 1682807 - RNA, 19 nt, Artificial Sequence
  Description of Artificial Sequence: Synthetic oligonucleotide
gaggcagaccgcagcguac

SEQ ID NO: 1682808 - RNA, 19 nt, Artificial Sequence
  Description of Artificial Sequence: Synthetic oligonucleotide
gcuuaucagcucccugccc

SEQ ID NO: 1682809 - RNA, 19 nt, Artificial Sequence
  Description of Artificial Sequence: Synthetic oligonucleotide
aucaggcgcaggaacgccu

SEQ ID NO: 1682810 - RNA, 19 nt, Artificial Sequence
  Description of Artificial Sequence: Synthetic oligonucleotide
aggcagaccgcagcguaca

SEQ ID NO: 1682811 - RNA, 19 nt, Artificial Sequence
  Description of Artificial Sequence: Synthetic oligonucleotide
cgaaucggauacucacugg

SEQ ID NO: 1682812 - RNA, 19 nt, Artificial Sequence
  Description of Artificial Sequence: Synthetic oligonucleotide
caccucucgaaggcucucc

SEQ ID NO: 1682813 - RNA, 19 nt, Artificial Sequence
  Description of Artificial Sequence: Synthetic oligonucleotide
ccaccugucaugcgacugc

SEQ ID NO: 1682814 - RNA, 19 nt, Artificial Sequence
  Description of Artificial Sequence: Synthetic oligonucleotide
cuugacauaauuggcccau

SEQ ID NO: 1682815 - RNA, 19 nt, Artificial Sequence
  Description of Artificial Sequence: Synthetic oligonucleotide
gucggcagcuugagagagg

SEQ ID NO: 1682816 - RNA, 19 nt, Artificial Sequence
  Description of Artificial Sequence: Synthetic oligonucleotide
caaccuuaggcggucucca

SEQ ID NO: 1682817 - RNA, 19 nt, Artificial Sequence
  Description of Artificial Sequence: Synthetic oligonucleotide
agugggaauugcagucgcu

SEQ ID NO: 1682818 - RNA, 19 nt, Artificial Sequence
  Description of Artificial Sequence: Synthetic oligonucleotide
gcugccuccgcccuacguc

SEQ ID NO: 1682819 - RNA, 19 nt, Artificial Sequence
  Description of Artificial Sequence: Synthetic oligonucleotide
cacuggcgccgccgaaucg

SEQ ID NO: 1682820 - RNA, 19 nt, Artificial Sequence
  Description of Artificial Sequence: Synthetic oligonucleotide
cagcccguugacacaccug

SEQ ID NO: 1682821 - RNA, 19 nt, Artificial Sequence
  Description of Artificial Sequence: Synthetic oligonucleotide
uugacauaauuggcccauu

SEQ ID NO: 1682822 - RNA, 19 nt, Artificial Sequence
  Description of Artificial Sequence: Synthetic oligonucleotide
ggauacucacuggagccca

SEQ ID NO: 1682823 - RNA, 19 nt, Artificial Sequence
  Description of Artificial Sequence: Synthetic oligonucleotide
caccgagagagcagccuca

SEQ ID NO: 1682824 - RNA, 19 nt, Artificial Sequence
  Description of Artificial Sequence: Synthetic oligonucleotide
cgccgaaucggauacucac

SEQ ID NO: 1682825 - RNA, 19 nt, Artificial Sequence
  Description of Artificial Sequence: Synthetic oligonucleotide
gccauagacuccaggcacc

SEQ ID NO: 1682826 - RNA, 19 nt, Artificial Sequence
  Description of Artificial Sequence: Synthetic oligonucleotide
cuacgucuguguguccauc

SEQ ID NO: 1682827 - RNA, 19 nt, Artificial Sequence
  Description of Artificial Sequence: Synthetic oligonucleotide
cgaaccgcaccucucgaag

SEQ ID NO: 1682828 - RNA, 19 nt, Artificial Sequence
  Description of Artificial Sequence: Synthetic oligonucleotide
auggcggacauuggaguua

SEQ ID NO: 1682829 - RNA, 19 nt, Artificial Sequence
  Description of Artificial Sequence: Synthetic oligonucleotide
ucacacuggcgccgccgaa

SEQ ID NO: 1682830 - RNA, 19 nt, Artificial Sequence
  Description of Artificial Sequence: Synthetic oligonucleotide
gguuguaguccgugugcuc

SEQ ID NO: 1682831 - RNA, 19 nt, Artificial Sequence
  Description of Artificial Sequence: Synthetic oligonucleotide
agcagugcgaugagcugau

SEQ ID NO: 1682832 - RNA, 19 nt, Artificial Sequence
  Description of Artificial Sequence: Synthetic oligonucleotide
gguugacgcggcccggcgc

SEQ ID NO: 1682833 - RNA, 19 nt, Artificial Sequence
  Description of Artificial Sequence: Synthetic oligonucleotide
cacgugccgggcccgccgg

SEQ ID NO: 1682834 - RNA, 19 nt, Artificial Sequence
  Description of Artificial Sequence: Synthetic oligonucleotide
caccccugcgaagcugugc

SEQ ID NO: 1682835 - RNA, 19 nt, Artificial Sequence
  Description of Artificial Sequence: Synthetic oligonucleotide
agggcaccccugcgaagcu

SEQ ID NO: 1682836 - RNA, 19 nt, Artificial Sequence
  Description of Artificial Sequence: Synthetic oligonucleotide
caacguuacugugcagcca

SEQ ID NO: 1682837 - RNA, 19 nt, Artificial Sequence
  Description of Artificial Sequence: Synthetic oligonucleotide
cuaccacgugccgggcccg

SEQ ID NO: 1682838 - RNA, 19 nt, Artificial Sequence
  Description of Artificial Sequence: Synthetic oligonucleotide
ggguaguguugaaucacuc

SEQ ID NO: 1682839 - RNA, 19 nt, Artificial Sequence
  Description of Artificial Sequence: Synthetic oligonucleotide
gcucagcccguugacacac

SEQ ID NO: 1682840 - RNA, 19 nt, Artificial Sequence
  Description of Artificial Sequence: Synthetic oligonucleotide
guacaccugcugccuccgc

SEQ ID NO: 1682841 - RNA, 19 nt, Artificial Sequence
  Description of Artificial Sequence: Synthetic oligonucleotide
cucgaaccgcaccucucga

SEQ ID NO: 1682842 - RNA, 19 nt, Artificial Sequence
  Description of Artificial Sequence: Synthetic oligonucleotide
ccaagcagccaugacgcuc

SEQ ID NO: 1682843 - RNA, 19 nt, Artificial Sequence
  Description of Artificial Sequence: Synthetic oligonucleotide
gcggacacggccagcuccg

SEQ ID NO: 1682844 - RNA, 19 nt, Artificial Sequence
  Description of Artificial Sequence: Synthetic oligonucleotide
gaccugcagucaaucagua

SEQ ID NO: 1682845 - RNA, 19 nt, Artificial Sequence
  Description of Artificial Sequence: Synthetic oligonucleotide
ccaucaggcgcaggaacgc

SEQ ID NO: 1682846 - RNA, 19 nt, Artificial Sequence
  Description of Artificial Sequence: Synthetic oligonucleotide
gggcaacuuaccucaaagu

SEQ ID NO: 1682847 - RNA, 19 nt, Artificial Sequence
  Description of Artificial Sequence: Synthetic oligonucleotide
uugacgcggcccggcgcgg

SEQ ID NO: 1682848 - RNA, 19 nt, Artificial Sequence
  Description of Artificial Sequence: Synthetic oligonucleotide
cugucaugcgacugccaua

SEQ ID NO: 1682849 - RNA, 19 nt, Artificial Sequence
  Description of Artificial Sequence: Synthetic oligonucleotide
ccaccaccugucaugcgac

SEQ ID NO: 1682850 - RNA, 19 nt, Artificial Sequence
  Description of Artificial Sequence: Synthetic oligonucleotide
gcccuauagucuccacggc

SEQ ID NO: 1682851 - RNA, 19 nt, Artificial Sequence
  Description of Artificial Sequence: Synthetic oligonucleotide
gcgaagcugugcucagccc

SEQ ID NO: 1682852 - RNA, 19 nt, Artificial Sequence
  Description of Artificial Sequence: Synthetic oligonucleotide
ucccgagucugggcagagc

SEQ ID NO: 1682853 - RNA, 19 nt, Artificial Sequence
  Description of Artificial Sequence: Synthetic oligonucleotide
accgcaccucucgaaggcu

SEQ ID NO: 1682854 - RNA, 19 nt, Artificial Sequence
  Description of Artificial Sequence: Synthetic oligonucleotide
accgagagagcagccucaa

SEQ ID NO: 1682855 - RNA, 19 nt, Artificial Sequence
  Description of Artificial Sequence: Synthetic oligonucleotide
gcagaccgcagcguacacc

SEQ ID NO: 1682856 - RNA, 19 nt, Artificial Sequence
  Description of Artificial Sequence: Synthetic oligonucleotide
accgcagcguacaccugcu

SEQ ID NO: 1682857 - RNA, 19 nt, Artificial Sequence
  Description of Artificial Sequence: Synthetic oligonucleotide
cauggcggacauuggaguu

SEQ ID NO: 1682858 - RNA, 19 nt, Artificial Sequence
  Description of Artificial Sequence: Synthetic oligonucleotide
ggaucucgccuaccacgug

SEQ ID NO: 1682859 - RNA, 19 nt, Artificial Sequence
  Description of Artificial Sequence: Synthetic oligonucleotide
ccccgaugagguugacgcg

SEQ ID NO: 1682860 - RNA, 19 nt, Artificial Sequence
  Description of Artificial Sequence: Synthetic oligonucleotide
gcgccgccgaaucggauac

SEQ ID NO: 1682861 - RNA, 19 nt, Artificial Sequence
  Description of Artificial Sequence: Synthetic oligonucleotide
guucgccggaucucgccua

SEQ ID NO: 1682862 - RNA, 19 nt, Artificial Sequence
  Description of Artificial Sequence: Synthetic oligonucleotide
cgcggacacggccagcucc

SEQ ID NO: 1682863 - RNA, 19 nt, Artificial Sequence
  Description of Artificial Sequence: Synthetic oligonucleotide
cagucgcuggggcucaucu

SEQ ID NO: 1682864 - RNA, 19 nt, Artificial Sequence
  Description of Artificial Sequence: Synthetic oligonucleotide
uuggcccauugugggguuc

SEQ ID NO: 1682865 - RNA, 19 nt, Artificial Sequence
  Description of Artificial Sequence: Synthetic oligonucleotide
ggcgcaggaacgccucaca

SEQ ID NO: 1682866 - RNA, 19 nt, Artificial Sequence
  Description of Artificial Sequence: Synthetic oligonucleotide
aucacucccuugacauaau

SEQ ID NO: 1682867 - RNA, 19 nt, Artificial Sequence
  Description of Artificial Sequence: Synthetic oligonucleotide
gacgcggcccggcgcggac

SEQ ID NO: 1682868 - RNA, 19 nt, Artificial Sequence
  Description of Artificial Sequence: Synthetic oligonucleotide
gacgcccaaaggcccuaua

SEQ ID NO: 1682869 - RNA, 19 nt, Artificial Sequence
  Description of Artificial Sequence: Synthetic oligonucleotide
gccuaccacgugccgggcc

SEQ ID NO: 1682870 - RNA, 19 nt, Artificial Sequence
  Description of Artificial Sequence: Synthetic oligonucleotide
ggucuccaagcagccauga

SEQ ID NO: 1682871 - RNA, 19 nt, Artificial Sequence
  Description of Artificial Sequence: Synthetic oligonucleotide
ccgagucugggcagagcug

SEQ ID NO: 1682872 - RNA, 19 nt, Artificial Sequence
  Description of Artificial Sequence: Synthetic oligonucleotide
cuggcgccgccgaaucgga

SEQ ID NO: 1682873 - RNA, 19 nt, Artificial Sequence
  Description of Artificial Sequence: Synthetic oligonucleotide
accugucaugcgacugcca

SEQ ID NO: 1682874 - RNA, 19 nt, Artificial Sequence
  Description of Artificial Sequence: Synthetic oligonucleotide
uggcgccgccgaaucggau

SEQ ID NO: 1682875 - RNA, 19 nt, Artificial Sequence
  Description of Artificial Sequence: Synthetic oligonucleotide
ccucaaccaauugguccag

SEQ ID NO: 1682876 - RNA, 19 nt, Artificial Sequence
  Description of Artificial Sequence: Synthetic oligonucleotide
gccgccgaaucggauacuc

SEQ ID NO: 1682877 - RNA, 19 nt, Artificial Sequence
  Description of Artificial Sequence: Synthetic oligonucleotide
cgucggcagcuugagagag

SEQ ID NO: 1682878 - RNA, 19 nt, Artificial Sequence
  Description of Artificial Sequence: Synthetic oligonucleotide
gcccguugacacaccuggg

SEQ ID NO: 1682879 - RNA, 19 nt, Artificial Sequence
  Description of Artificial Sequence: Synthetic oligonucleotide
ggcgccgccgaaucggaua

SEQ ID NO: 1682880 - RNA, 19 nt, Artificial Sequence
  Description of Artificial Sequence: Synthetic oligonucleotide
ggcagaccgcagcguacac

SEQ ID NO: 1682881 - RNA, 19 nt, Artificial Sequence
  Description of Artificial Sequence: Synthetic oligonucleotide
augccacagggcaccccug

SEQ ID NO: 1682882 - RNA, 19 nt, Artificial Sequence
  Description of Artificial Sequence: Synthetic oligonucleotide
ccacgugccgggcccgccg

SEQ ID NO: 1682883 - RNA, 19 nt, Artificial Sequence
  Description of Artificial Sequence: Synthetic oligonucleotide
cccuauagucuccacggcu

SEQ ID NO: 1682884 - RNA, 19 nt, Artificial Sequence
  Description of Artificial Sequence: Synthetic oligonucleotide
ugacgcggcccggcgcgga

SEQ ID NO: 1682885 - RNA, 19 nt, Artificial Sequence
  Description of Artificial Sequence: Synthetic oligonucleotide
ccgcaccucucgaaggcuc

SEQ ID NO: 1682886 - RNA, 19 nt, Artificial Sequence
  Description of Artificial Sequence: Synthetic oligonucleotide
cgccucaagcuccucgaac

SEQ ID NO: 1682887 - RNA, 19 nt, Artificial Sequence
  Description of Artificial Sequence: Synthetic oligonucleotide
cccgagucugggcagagcu

SEQ ID NO: 1682888 - RNA, 19 nt, Artificial Sequence
  Description of Artificial Sequence: Synthetic oligonucleotide
gagacgcccaaaggcccua

SEQ ID NO: 1682889 - RNA, 19 nt, Artificial Sequence
  Description of Artificial Sequence: Synthetic oligonucleotide
cggucacaagcuccagagc

SEQ ID NO: 1682890 - RNA, 19 nt, Artificial Sequence
  Description of Artificial Sequence: Synthetic oligonucleotide
ccugucaugcgacugccau

SEQ ID NO: 1682891 - RNA, 19 nt, Artificial Sequence
  Description of Artificial Sequence: Synthetic oligonucleotide
gcccugguuguaguccgug

SEQ ID NO: 1682892 - RNA, 19 nt, Artificial Sequence
  Description of Artificial Sequence: Synthetic oligonucleotide
gccccagcagugcgaugag

SEQ ID NO: 1682893 - RNA, 19 nt, Artificial Sequence
  Description of Artificial Sequence: Synthetic oligonucleotide
ccacggcucagagcagccg

SEQ ID NO: 1682894 - RNA, 19 nt, Artificial Sequence
  Description of Artificial Sequence: Synthetic oligonucleotide
ggaacgccucacaggcuca

SEQ ID NO: 1682895 - RNA, 19 nt, Artificial Sequence
  Description of Artificial Sequence: Synthetic oligonucleotide
agacgcccaaaggcccuau

SEQ ID NO: 1682896 - RNA, 19 nt, Artificial Sequence
  Description of Artificial Sequence: Synthetic oligonucleotide
cuccgucggcagcuugaga

SEQ ID NO: 1682897 - RNA, 19 nt, Artificial Sequence
  Description of Artificial Sequence: Synthetic oligonucleotide
cgcccuacgucuguguguc

SEQ ID NO: 1682898 - RNA, 19 nt, Artificial Sequence
  Description of Artificial Sequence: Synthetic oligonucleotide
gcagcuggguaguguugaa

SEQ ID NO: 1682899 - RNA, 19 nt, Artificial Sequence
  Description of Artificial Sequence: Synthetic oligonucleotide
ccgcugccugggcuguucg

SEQ ID NO: 1682900 - RNA, 19 nt, Artificial Sequence
  Description of Artificial Sequence: Synthetic oligonucleotide
caggaacgccucacaggcu

SEQ ID NO: 1682901 - RNA, 19 nt, Artificial Sequence
  Description of Artificial Sequence: Synthetic oligonucleotide
ccgugugcuccccgaugag

SEQ ID NO: 1682902 - RNA, 19 nt, Artificial Sequence
  Description of Artificial Sequence: Synthetic oligonucleotide
ccgagagagcagccucaac

SEQ ID NO: 1682903 - RNA, 19 nt, Artificial Sequence
  Description of Artificial Sequence: Synthetic oligonucleotide
ccgucggcagcuugagaga

SEQ ID NO: 1682904 - RNA, 19 nt, Artificial Sequence
  Description of Artificial Sequence: Synthetic oligonucleotide
cggucuccaagcagccaug

SEQ ID NO: 1682905 - RNA, 19 nt, Artificial Sequence
  Description of Artificial Sequence: Synthetic oligonucleotide
cagcguacaccugcugccu

SEQ ID NO: 1682906 - RNA, 19 nt, Artificial Sequence
  Description of Artificial Sequence: Synthetic oligonucleotide
gggcuccgucggcagcuug

SEQ ID NO: 1682907 - RNA, 19 nt, Artificial Sequence
  Description of Artificial Sequence: Synthetic oligonucleotide
caccaccugucaugcgacu

SEQ ID NO: 1682908 - RNA, 19 nt, Artificial Sequence
  Description of Artificial Sequence: Synthetic oligonucleotide
cacacuggcgccgccgaau

SEQ ID NO: 1682909 - RNA, 19 nt, Artificial Sequence
  Description of Artificial Sequence: Synthetic oligonucleotide
ggcaccccugcgaagcugu

SEQ ID NO: 1682910 - RNA, 19 nt, Artificial Sequence
  Description of Artificial Sequence: Synthetic oligonucleotide
ccggcucagcuccgaacuc

SEQ ID NO: 1682911 - RNA, 19 nt, Artificial Sequence
  Description of Artificial Sequence: Synthetic oligonucleotide
gggcuguucgccggaucuc

SEQ ID NO: 1682912 - RNA, 19 nt, Artificial Sequence
  Description of Artificial Sequence: Synthetic oligonucleotide
ccgccgaaucggauacuca

SEQ ID NO: 1682913 - RNA, 19 nt, Artificial Sequence
  Description of Artificial Sequence: Synthetic oligonucleotide
cuccgcccuacgucugugu

SEQ ID NO: 1682914 - RNA, 19 nt, Artificial Sequence
  Description of Artificial Sequence: Synthetic oligonucleotide
gcccuacgucugugugucc

SEQ ID NO: 1682915 - RNA, 19 nt, Artificial Sequence
  Description of Artificial Sequence: Synthetic oligonucleotide
gggcagcuauggcucccga

SEQ ID NO: 1682916 - RNA, 19 nt, Artificial Sequence
  Description of Artificial Sequence: Synthetic oligonucleotide
ccgcagcguacaccugcug

SEQ ID NO: 1682917 - RNA, 19 nt, Artificial Sequence
  Description of Artificial Sequence: Synthetic oligonucleotide
cgcccaaaggcccuauagu

SEQ ID NO: 1682918 - RNA, 19 nt, Artificial Sequence
  Description of Artificial Sequence: Synthetic oligonucleotide
ccuccgcccuacgucugug

SEQ ID NO: 1682919 - RNA, 19 nt, Artificial Sequence
  Description of Artificial Sequence: Synthetic oligonucleotide
ggcccauugugggguucca

SEQ ID NO: 1682920 - RNA, 19 nt, Artificial Sequence
  Description of Artificial Sequence: Synthetic oligonucleotide
ggcccgccggaagccuucc

SEQ ID NO: 1682921 - RNA, 19 nt, Artificial Sequence
  Description of Artificial Sequence: Synthetic oligonucleotide
ccuacgucuguguguccau

SEQ ID NO: 1682922 - RNA, 19 nt, Artificial Sequence
  Description of Artificial Sequence: Synthetic oligonucleotide
gcagugcgaugagcugauc

SEQ ID NO: 1682923 - RNA, 19 nt, Artificial Sequence
  Description of Artificial Sequence: Synthetic oligonucleotide
gcgcggacacggccagcuc

SEQ ID NO: 1682924 - RNA, 19 nt, Artificial Sequence
  Description of Artificial Sequence: Synthetic oligonucleotide
ccgcccuacgucugugugu

SEQ ID NO: 1682925 - RNA, 19 nt, Artificial Sequence
  Description of Artificial Sequence: Synthetic oligonucleotide
cgcggcccggcgcggacac

SEQ ID NO: 1682926 - RNA, 19 nt, Artificial Sequence
  Description of Artificial Sequence: Synthetic oligonucleotide
cggacacggccagcuccgg

SEQ ID NO: 1682927 - RNA, 19 nt, Artificial Sequence
  Description of Artificial Sequence: Synthetic oligonucleotide
ccucucgaaggcucuccuu

SEQ ID NO: 1682928 - RNA, 19 nt, Artificial Sequence
  Description of Artificial Sequence: Synthetic oligonucleotide
ggccuccagcaacguuacu

SEQ ID NO: 1682929 - RNA, 19 nt, Artificial Sequence
  Description of Artificial Sequence: Synthetic oligonucleotide
cgccuaccacgugccgggc

SEQ ID NO: 1682930 - RNA, 19 nt, Artificial Sequence
  Description of Artificial Sequence: Synthetic oligonucleotide
ggcugccaaccagcacggu

SEQ ID NO: 1682931 - RNA, 19 nt, Artificial Sequence
  Description of Artificial Sequence: Synthetic oligonucleotide
ggcggacauuggaguuagu

SEQ ID NO: 1682932 - RNA, 19 nt, Artificial Sequence
  Description of Artificial Sequence: Synthetic oligonucleotide
gcccgccggaagccuuccu

SEQ ID NO: 1682933 - RNA, 19 nt, Artificial Sequence
  Description of Artificial Sequence: Synthetic oligonucleotide
cggcagcuugagagaggua

SEQ ID NO: 1682934 - RNA, 19 nt, Artificial Sequence
  Description of Artificial Sequence: Synthetic oligonucleotide
cgggcccgccggaagccuu

SEQ ID NO: 1682935 - RNA, 19 nt, Artificial Sequence
  Description of Artificial Sequence: Synthetic oligonucleotide
cgccgccgaaucggauacu

SEQ ID NO: 1682936 - RNA, 19 nt, Artificial Sequence
  Description of Artificial Sequence: Synthetic oligonucleotide
aaaugaagaguacaaaacc

SEQ ID NO: 1682937 - RNA, 19 nt, Artificial Sequence
  Description of Artificial Sequence: Synthetic oligonucleotide
aauuuaaaguuucacaguc

SEQ ID NO: 1682938 - RNA, 19 nt, Artificial Sequence
  Description of Artificial Sequence: Synthetic oligonucleotide
cuuggagucagcaagaugg

SEQ ID NO: 1682939 - RNA, 19 nt, Artificial Sequence
  Description of Artificial Sequence: Synthetic oligonucleotide
aaaaccagaauguauguag

SEQ ID NO: 1682940 - RNA, 19 nt, Artificial Sequence
  Description of Artificial Sequence: Synthetic oligonucleotide
aauguauguagucauugcg

SEQ ID NO: 1682941 - RNA, 19 nt, Artificial Sequence
  Description of Artificial Sequence: Synthetic oligonucleotide
  modified_base (4)..(4): a, c, u, g, unknown or other
gacnguugagcacagaagg

SEQ ID NO: 1682942 - RNA, 19 nt, Artificial Sequence
  Description of Artificial Sequence: Synthetic oligonucleotide
auaagagacaaacuuguac

SEQ ID NO: 1682943 - RNA, 19 nt, Artificial Sequence
  Description of Artificial Sequence: Synthetic oligonucleotide
uuaauugauguucuuuacg

SEQ ID NO: 1682944 - RNA, 19 nt, Artificial Sequence
  Description of Artificial Sequence: Synthetic oligonucleotide
uuagauguccagcagauca

SEQ ID NO: 1682945 - RNA, 19 nt, Artificial Sequence
  Description of Artificial Sequence: Synthetic oligonucleotide
aagagggagaaauacuugg

SEQ ID NO: 1682946 - RNA, 19 nt, Artificial Sequence
  Description of Artificial Sequence: Synthetic oligonucleotide
ucuugauugacuugaaaag

SEQ ID NO: 1682947 - RNA, 19 nt, Artificial Sequence
  Description of Artificial Sequence: Synthetic oligonucleotide
agagauggacuuaagaucc

SEQ ID NO: 1682948 - RNA, 19 nt, Artificial Sequence
  Description of Artificial Sequence: Synthetic oligonucleotide
aaaaguggauacuggagag

SEQ ID NO: 1682949 - RNA, 19 nt, Artificial Sequence
  Description of Artificial Sequence: Synthetic oligonucleotide
auucauauuaggcuuguuc

SEQ ID NO: 1682950 - RNA, 19 nt, Artificial Sequence
  Description of Artificial Sequence: Synthetic oligonucleotide
ggaauuuaaaguuucacag

SEQ ID NO: 1682951 - RNA, 19 nt, Artificial Sequence
  Description of Artificial Sequence: Synthetic oligonucleotide
uguuguuacaaauuugaug

SEQ ID NO: 1682952 - RNA, 19 nt, Artificial Sequence
  Description of Artificial Sequence: Synthetic oligonucleotide
uucauauuaggcuuguucu

SEQ ID NO: 1682953 - RNA, 19 nt, Artificial Sequence
  Description of Artificial Sequence: Synthetic oligonucleotide
ucaguucuaacccuuuggg

SEQ ID NO: 1682954 - RNA, 19 nt, Artificial Sequence
  Description of Artificial Sequence: Synthetic oligonucleotide
agaguacaaaaccagaaug

SEQ ID NO: 1682955 - RNA, 19 nt, Artificial Sequence
  Description of Artificial Sequence: Synthetic oligonucleotide
uugagaguaaaaugaagag

SEQ ID NO: 1682956 - RNA, 19 nt, Artificial Sequence
  Description of Artificial Sequence: Synthetic oligonucleotide
uaucguaauucauauuagg

SEQ ID NO: 1682957 - RNA, 19 nt, Artificial Sequence
  Description of Artificial Sequence: Synthetic oligonucleotide
uaauugauguucuuuacgu

SEQ ID NO: 1682958 - RNA, 19 nt, Artificial Sequence
  Description of Artificial Sequence: Synthetic oligonucleotide
uuuaaaguuucacagucuc

SEQ ID NO: 1682959 - RNA, 19 nt, Artificial Sequence
  Description of Artificial Sequence: Synthetic oligonucleotide
aguucuaacccuuugggcu

SEQ ID NO: 1682960 - RNA, 19 nt, Artificial Sequence
  Description of Artificial Sequence: Synthetic oligonucleotide
uggguuagaacucaguggu

SEQ ID NO: 1682961 - RNA, 19 nt, Artificial Sequence
  Description of Artificial Sequence: Synthetic oligonucleotide
aacagcaacagguucgaug

SEQ ID NO: 1682962 - RNA, 19 nt, Artificial Sequence
  Description of Artificial Sequence: Synthetic oligonucleotide
uggauaagagacaaacuug

SEQ ID NO: 1682963 - RNA, 19 nt, Artificial Sequence
  Description of Artificial Sequence: Synthetic oligonucleotide
ucguaauucauauuaggcu

SEQ ID NO: 1682964 - RNA, 19 nt, Artificial Sequence
  Description of Artificial Sequence: Synthetic oligonucleotide
ucuaucuugauugacuuga

SEQ ID NO: 1682965 - RNA, 19 nt, Artificial Sequence
  Description of Artificial Sequence: Synthetic oligonucleotide
uuacguaguaguaucucag

SEQ ID NO: 1682966 - RNA, 19 nt, Artificial Sequence
  Description of Artificial Sequence: Synthetic oligonucleotide
uuauuggagguguucaaag

SEQ ID NO: 1682967 - RNA, 19 nt, Artificial Sequence
  Description of Artificial Sequence: Synthetic oligonucleotide
aaagaguugagaguaaaau

SEQ ID NO: 1682968 - RNA, 19 nt, Artificial Sequence
  Description of Artificial Sequence: Synthetic oligonucleotide
uguaggucuggagaaaacg

SEQ ID NO: 1682969 - RNA, 19 nt, Artificial Sequence
  Description of Artificial Sequence: Synthetic oligonucleotide
aucuugauugacuugaaaa

SEQ ID NO: 1682970 - RNA, 19 nt, Artificial Sequence
  Description of Artificial Sequence: Synthetic oligonucleotide
agaguugagaguaaaauga

SEQ ID NO: 1682971 - RNA, 19 nt, Artificial Sequence
  Description of Artificial Sequence: Synthetic oligonucleotide
ugaaaagcuucuuauugga

SEQ ID NO: 1682972 - RNA, 19 nt, Artificial Sequence
  Description of Artificial Sequence: Synthetic oligonucleotide
ggauucucuaucuugauug

SEQ ID NO: 1682973 - RNA, 19 nt, Artificial Sequence
  Description of Artificial Sequence: Synthetic oligonucleotide
cuuaucguaauucauauua

SEQ ID NO: 1682974 - RNA, 19 nt, Artificial Sequence
  Description of Artificial Sequence: Synthetic oligonucleotide
uuuacguaguaguaucuca

SEQ ID NO: 1682975 - RNA, 19 nt, Artificial Sequence
  Description of Artificial Sequence: Synthetic oligonucleotide
ugaagaguacaaaaccaga

SEQ ID NO: 1682976 - RNA, 19 nt, Artificial Sequence
  Description of Artificial Sequence: Synthetic oligonucleotide
uuuaauugauguucuuuac

SEQ ID NO: 1682977 - RNA, 19 nt, Artificial Sequence
  Description of Artificial Sequence: Synthetic oligonucleotide
gagagauggacuuaagauc

SEQ ID NO: 1682978 - RNA, 19 nt, Artificial Sequence
  Description of Artificial Sequence: Synthetic oligonucleotide
aaaguggauacuggagagc

SEQ ID NO: 1682979 - RNA, 19 nt, Artificial Sequence
  Description of Artificial Sequence: Synthetic oligonucleotide
uguauguagucauugcgac

SEQ ID NO: 1682980 - RNA, 19 nt, Artificial Sequence
  Description of Artificial Sequence: Synthetic oligonucleotide
aagcguauuagcaccuugc

SEQ ID NO: 1682981 - RNA, 19 nt, Artificial Sequence
  Description of Artificial Sequence: Synthetic oligonucleotide
gucuccaaagcuuggauag

SEQ ID NO: 1682982 - RNA, 19 nt, Artificial Sequence
  Description of Artificial Sequence: Synthetic oligonucleotide
uuaaaguuucacagucucc

SEQ ID NO: 1682983 - RNA, 19 nt, Artificial Sequence
  Description of Artificial Sequence: Synthetic oligonucleotide
uuuuaggcuccaaugacaa

SEQ ID NO: 1682984 - RNA, 19 nt, Artificial Sequence
  Description of Artificial Sequence: Synthetic oligonucleotide
guuccauuggcugagacgc

SEQ ID NO: 1682985 - RNA, 19 nt, Artificial Sequence
  Description of Artificial Sequence: Synthetic oligonucleotide
  modified_base (5)..(5): a, c, u, g, unknown or other
ugacnguugagcacagaag

SEQ ID NO: 1682986 - RNA, 19 nt, Artificial Sequence
  Description of Artificial Sequence: Synthetic oligonucleotide
caaaaucucuggauaagag

SEQ ID NO: 1682987 - RNA, 19 nt, Artificial Sequence
  Description of Artificial Sequence: Synthetic oligonucleotide
uuaggcuccaaugacaagu

SEQ ID NO: 1682988 - RNA, 19 nt, Artificial Sequence
  Description of Artificial Sequence: Synthetic oligonucleotide
uucucuaucuugauugacu

SEQ ID NO: 1682989 - RNA, 19 nt, Artificial Sequence
  Description of Artificial Sequence: Synthetic oligonucleotide
  modified_base (18)..(18): a, c, u, g, unknown or other
agugaaugguccaugacng

SEQ ID NO: 1682990 - RNA, 19 nt, Artificial Sequence
  Description of Artificial Sequence: Synthetic oligonucleotide
aguuccauuggcugagacg

SEQ ID NO: 1682991 - RNA, 19 nt, Artificial Sequence
  Description of Artificial Sequence: Synthetic oligonucleotide
auguucuuuacguaguagu

SEQ ID NO: 1682992 - RNA, 19 nt, Artificial Sequence
  Description of Artificial Sequence: Synthetic oligonucleotide
cuggguuagaacucagugg

SEQ ID NO: 1682993 - RNA, 19 nt, Artificial Sequence
  Description of Artificial Sequence: Synthetic oligonucleotide
ggaguuauuuguuuugucc

SEQ ID NO: 1682994 - RNA, 19 nt, Artificial Sequence
  Description of Artificial Sequence: Synthetic oligonucleotide
caugugcucguucugaggc

SEQ ID NO: 1682995 - RNA, 19 nt, Artificial Sequence
  Description of Artificial Sequence: Synthetic oligonucleotide
guugagaguaaaaugaaga

SEQ ID NO: 1682996 - RNA, 19 nt, Artificial Sequence
  Description of Artificial Sequence: Synthetic oligonucleotide
aaagcguauuagcaccuug

SEQ ID NO: 1682997 - RNA, 19 nt, Artificial Sequence
  Description of Artificial Sequence: Synthetic oligonucleotide
ggacuuaagauccccaggg

SEQ ID NO: 1682998 - RNA, 19 nt, Artificial Sequence
  Description of Artificial Sequence: Synthetic oligonucleotide
ggaaaagcguauuagcacc

SEQ ID NO: 1682999 - RNA, 19 nt, Artificial Sequence
  Description of Artificial Sequence: Synthetic oligonucleotide
uauguagucauugcgacua

SEQ ID NO: 1683000 - RNA, 19 nt, Artificial Sequence
  Description of Artificial Sequence: Synthetic oligonucleotide
uucuuuacguaguaguauc

SEQ ID NO: 1683001 - RNA, 19 nt, Artificial Sequence
  Description of Artificial Sequence: Synthetic oligonucleotide
uauuaggcuuguucuuucg

SEQ ID NO: 1683002 - RNA, 19 nt, Artificial Sequence
  Description of Artificial Sequence: Synthetic oligonucleotide
agagcaaggggcuuggagu

SEQ ID NO: 1683003 - RNA, 19 nt, Artificial Sequence
  Description of Artificial Sequence: Synthetic oligonucleotide
aacagguucgaugguuggc

SEQ ID NO: 1683004 - RNA, 19 nt, Artificial Sequence
  Description of Artificial Sequence: Synthetic oligonucleotide
auuguuagauguccagcag

SEQ ID NO: 1683005 - RNA, 19 nt, Artificial Sequence
  Description of Artificial Sequence: Synthetic oligonucleotide
aaguggauacuggagagca

SEQ ID NO: 1683006 - RNA, 19 nt, Artificial Sequence
  Description of Artificial Sequence: Synthetic oligonucleotide
ugucaguggauccauuuuc

SEQ ID NO: 1683007 - RNA, 19 nt, Artificial Sequence
  Description of Artificial Sequence: Synthetic oligonucleotide
gugugagagacgcuguugg

SEQ ID NO: 1683008 - RNA, 19 nt, Artificial Sequence
  Description of Artificial Sequence: Synthetic oligonucleotide
cucuggauaagagacaaac

SEQ ID NO: 1683009 - RNA, 19 nt, Artificial Sequence
  Description of Artificial Sequence: Synthetic oligonucleotide
  modified_base (9)..(9): a, c, u, g, unknown or other
uccaugacnguugagcaca

SEQ ID NO: 1683010 - RNA, 19 nt, Artificial Sequence
  Description of Artificial Sequence: Synthetic oligonucleotide
uguucuuuacguaguagua

SEQ ID NO: 1683011 - RNA, 19 nt, Artificial Sequence
  Description of Artificial Sequence: Synthetic oligonucleotide
ucuguuucuuaguuccuug

SEQ ID NO: 1683012 - RNA, 19 nt, Artificial Sequence
  Description of Artificial Sequence: Synthetic oligonucleotide
ucugcugagcuuaucguaa

SEQ ID NO: 1683013 - RNA, 19 nt, Artificial Sequence
  Description of Artificial Sequence: Synthetic oligonucleotide
uagucauugcgacuagaug

SEQ ID NO: 1683014 - RNA, 19 nt, Artificial Sequence
  Description of Artificial Sequence: Synthetic oligonucleotide
gacuuaagauccccagggg

SEQ ID NO: 1683015 - RNA, 19 nt, Artificial Sequence
  Description of Artificial Sequence: Synthetic oligonucleotide
uauuggagguguucaaaga

SEQ ID NO: 1683016 - RNA, 19 nt, Artificial Sequence
  Description of Artificial Sequence: Synthetic oligonucleotide
uguuucuuaguuccuuggu

SEQ ID NO: 1683017 - RNA, 19 nt, Artificial Sequence
  Description of Artificial Sequence: Synthetic oligonucleotide
uugggcuuguugaaaaggu

SEQ ID NO: 1683018 - RNA, 19 nt, Artificial Sequence
  Description of Artificial Sequence: Synthetic oligonucleotide
agagugaaugguccaugac

SEQ ID NO: 1683019 - RNA, 19 nt, Artificial Sequence
  Description of Artificial Sequence: Synthetic oligonucleotide
aauugauguucuuuacgua

SEQ ID NO: 1683020 - RNA, 19 nt, Artificial Sequence
  Description of Artificial Sequence: Synthetic oligonucleotide
uggucuuaguccacaacug

SEQ ID NO: 1683021 - RNA, 19 nt, Artificial Sequence
  Description of Artificial Sequence: Synthetic oligonucleotide
ugcagaagcuugaacuccc

SEQ ID NO: 1683022 - RNA, 19 nt, Artificial Sequence
  Description of Artificial Sequence: Synthetic oligonucleotide
ugacagaugguguuggcuc

SEQ ID NO: 1683023 - RNA, 19 nt, Artificial Sequence
  Description of Artificial Sequence: Synthetic oligonucleotide
ucuuuacguaguaguaucu

SEQ ID NO: 1683024 - RNA, 19 nt, Artificial Sequence
  Description of Artificial Sequence: Synthetic oligonucleotide
  modified_base (6)..(6): a, c, u, g, unknown or other
augacnguugagcacagaa

SEQ ID NO: 1683025 - RNA, 19 nt, Artificial Sequence
  Description of Artificial Sequence: Synthetic oligonucleotide
aggcuuguucuuucgaauc

SEQ ID NO: 1683026 - RNA, 19 nt, Artificial Sequence
  Description of Artificial Sequence: Synthetic oligonucleotide
acaacugcaaggguuaugu

SEQ ID NO: 1683027 - RNA, 19 nt, Artificial Sequence
  Description of Artificial Sequence: Synthetic oligonucleotide
gaguggaagguccauccag

SEQ ID NO: 1683028 - RNA, 19 nt, Artificial Sequence
  Description of Artificial Sequence: Synthetic oligonucleotide
gaugguguuggcuccugag

SEQ ID NO: 1683029 - RNA, 19 nt, Artificial Sequence
  Description of Artificial Sequence: Synthetic oligonucleotide
uucuuauuggagguguuca

SEQ ID NO: 1683030 - RNA, 19 nt, Artificial Sequence
  Description of Artificial Sequence: Synthetic oligonucleotide
agcgaaugggcugagagug

SEQ ID NO: 1683031 - RNA, 19 nt, Artificial Sequence
  Description of Artificial Sequence: Synthetic oligonucleotide
caaaaguggauacuggaga

SEQ ID NO: 1683032 - RNA, 19 nt, Artificial Sequence
  Description of Artificial Sequence: Synthetic oligonucleotide
ugagucaaugucuguguca

SEQ ID NO: 1683033 - RNA, 19 nt, Artificial Sequence
  Description of Artificial Sequence: Synthetic oligonucleotide
agcuuaucguaauucauau

SEQ ID NO: 1683034 - RNA, 19 nt, Artificial Sequence
  Description of Artificial Sequence: Synthetic oligonucleotide
uuggagucagcaagauggg

SEQ ID NO: 1683035 - RNA, 19 nt, Artificial Sequence
  Description of Artificial Sequence: Synthetic oligonucleotide
cuagacagagugaaugguc

SEQ ID NO: 1683036 - RNA, 19 nt, Artificial Sequence
  Description of Artificial Sequence: Synthetic oligonucleotide
cauuguuagauguccagca

SEQ ID NO: 1683037 - RNA, 19 nt, Artificial Sequence
  Description of Artificial Sequence: Synthetic oligonucleotide
ccagaauggaugcagaggc

SEQ ID NO: 1683038 - RNA, 19 nt, Artificial Sequence
  Description of Artificial Sequence: Synthetic oligonucleotide
uucacagucucccucuauc

SEQ ID NO: 1683039 - RNA, 19 nt, Artificial Sequence
  Description of Artificial Sequence: Synthetic oligonucleotide
uccuaggaggcuccuuugg

SEQ ID NO: 1683040 - RNA, 19 nt, Artificial Sequence
  Description of Artificial Sequence: Synthetic oligonucleotide
gguuagaacucaguggugg

SEQ ID NO: 1683041 - RNA, 19 nt, Artificial Sequence
  Description of Artificial Sequence: Synthetic oligonucleotide
gaaaagcuucuuauuggag

SEQ ID NO: 1683042 - RNA, 19 nt, Artificial Sequence
  Description of Artificial Sequence: Synthetic oligonucleotide
ugagcuuaucguaauucau

SEQ ID NO: 1683043 - RNA, 19 nt, Artificial Sequence
  Description of Artificial Sequence: Synthetic oligonucleotide
agaguaaaaugaagaguac

SEQ ID NO: 1683044 - RNA, 19 nt, Artificial Sequence
  Description of Artificial Sequence: Synthetic oligonucleotide
ucaaugucuggguuagaac

SEQ ID NO: 1683045 - RNA, 19 nt, Artificial Sequence
  Description of Artificial Sequence: Synthetic oligonucleotide
ugugagagacgcuguuggg

SEQ ID NO: 1683046 - RNA, 19 nt, Artificial Sequence
  Description of Artificial Sequence: Synthetic oligonucleotide
uggaaguuccauuggcuga

SEQ ID NO: 1683047 - RNA, 19 nt, Artificial Sequence
  Description of Artificial Sequence: Synthetic oligonucleotide
uuaggcuuguucuuucgaa

SEQ ID NO: 1683048 - RNA, 19 nt, Artificial Sequence
  Description of Artificial Sequence: Synthetic oligonucleotide
ggauaguuucuucagaaga

SEQ ID NO: 1683049 - RNA, 19 nt, Artificial Sequence
  Description of Artificial Sequence: Synthetic oligonucleotide
gagagcaaggggcuuggag

SEQ ID NO: 1683050 - RNA, 19 nt, Artificial Sequence
  Description of Artificial Sequence: Synthetic oligonucleotide
ugacuugaaaagcuucuua

SEQ ID NO: 1683051 - RNA, 19 nt, Artificial Sequence
  Description of Artificial Sequence: Synthetic oligonucleotide
gguuaaaggugguagccag

SEQ ID NO: 1683052 - RNA, 19 nt, Artificial Sequence
  Description of Artificial Sequence: Synthetic oligonucleotide
uuaaaggugguagccagaa

SEQ ID NO: 1683053 - RNA, 19 nt, Artificial Sequence
  Description of Artificial Sequence: Synthetic oligonucleotide
guuucuuaguuccuugguc

SEQ ID NO: 1683054 - RNA, 19 nt, Artificial Sequence
  Description of Artificial Sequence: Synthetic oligonucleotide
  modified_base (16)..(16): a, c, u, g, unknown or other
ugaaugguccaugacnguu

SEQ ID NO: 1683055 - RNA, 19 nt, Artificial Sequence
  Description of Artificial Sequence: Synthetic oligonucleotide
aaggguuaugucuucugua

SEQ ID NO: 1683056 - RNA, 19 nt, Artificial Sequence
  Description of Artificial Sequence: Synthetic oligonucleotide
auugcgacuagauguccug

SEQ ID NO: 1683057 - RNA, 19 nt, Artificial Sequence
  Description of Artificial Sequence: Synthetic oligonucleotide
gaagaguacaaaaccagaa

SEQ ID NO: 1683058 - RNA, 19 nt, Artificial Sequence
  Description of Artificial Sequence: Synthetic oligonucleotide
aaaccagaauguauguagu

SEQ ID NO: 1683059 - RNA, 19 nt, Artificial Sequence
  Description of Artificial Sequence: Synthetic oligonucleotide
gggaauuuaaaguuucaca

SEQ ID NO: 1683060 - RNA, 19 nt, Artificial Sequence
  Description of Artificial Sequence: Synthetic oligonucleotide
gacagaugguguuggcucc

SEQ ID NO: 1683061 - RNA, 19 nt, Artificial Sequence
  Description of Artificial Sequence: Synthetic oligonucleotide
caguucuaacccuuugggc

SEQ ID NO: 1683062 - RNA, 19 nt, Artificial Sequence
  Description of Artificial Sequence: Synthetic oligonucleotide
gauggaacuggaggagugg

SEQ ID NO: 1683063 - RNA, 19 nt, Artificial Sequence
  Description of Artificial Sequence: Synthetic oligonucleotide
agaagcuugaacuccccau

SEQ ID NO: 1683064 - RNA, 19 nt, Artificial Sequence
  Description of Artificial Sequence: Synthetic oligonucleotide
uccacaacugcaaggguua

SEQ ID NO: 1683065 - RNA, 19 nt, Artificial Sequence
  Description of Artificial Sequence: Synthetic oligonucleotide
guagccagaauggaugcag

SEQ ID NO: 1683066 - RNA, 19 nt, Artificial Sequence
  Description of Artificial Sequence: Synthetic oligonucleotide
gaagagggagaaauacuug

SEQ ID NO: 1683067 - RNA, 19 nt, Artificial Sequence
  Description of Artificial Sequence: Synthetic oligonucleotide
aagggcgggugucaguucu

SEQ ID NO: 1683068 - RNA, 19 nt, Artificial Sequence
  Description of Artificial Sequence: Synthetic oligonucleotide
ggagcgaaugggcugagag

SEQ ID NO: 1683069 - RNA, 19 nt, Artificial Sequence
  Description of Artificial Sequence: Synthetic oligonucleotide
uguugggagagauggacuu

SEQ ID NO: 1683070 - RNA, 19 nt, Artificial Sequence
  Description of Artificial Sequence: Synthetic oligonucleotide
gcgucaagggaauuuaaag

SEQ ID NO: 1683071 - RNA, 19 nt, Artificial Sequence
  Description of Artificial Sequence: Synthetic oligonucleotide
acuccccauuguuagaugu

SEQ ID NO: 1683072 - RNA, 19 nt, Artificial Sequence
  Description of Artificial Sequence: Synthetic oligonucleotide
aguggaagguccauccagg

SEQ ID NO: 1683073 - RNA, 19 nt, Artificial Sequence
  Description of Artificial Sequence: Synthetic oligonucleotide
aggcuagacagagugaaug

SEQ ID NO: 1683074 - RNA, 19 nt, Artificial Sequence
  Description of Artificial Sequence: Synthetic oligonucleotide
  modified_base (15)..(15): a, c, u, g, unknown or other
gaaugguccaugacnguug

SEQ ID NO: 1683075 - RNA, 19 nt, Artificial Sequence
  Description of Artificial Sequence: Synthetic oligonucleotide
ucaaagaguugagaguaaa

SEQ ID NO: 1683076 - RNA, 19 nt, Artificial Sequence
  Description of Artificial Sequence: Synthetic oligonucleotide
cuuaguuccuuggucuuag

SEQ ID NO: 1683077 - RNA, 19 nt, Artificial Sequence
  Description of Artificial Sequence: Synthetic oligonucleotide
agaagagggagaaauacuu

SEQ ID NO: 1683078 - RNA, 19 nt, Artificial Sequence
  Description of Artificial Sequence: Synthetic oligonucleotide
auguauguagucauugcga

SEQ ID NO: 1683079 - RNA, 19 nt, Artificial Sequence
  Description of Artificial Sequence: Synthetic oligonucleotide
uccccauuguuagaugucc

SEQ ID NO: 1683080 - RNA, 19 nt, Artificial Sequence
  Description of Artificial Sequence: Synthetic oligonucleotide
acgccacugagucaauguc

SEQ ID NO: 1683081 - RNA, 19 nt, Artificial Sequence
  Description of Artificial Sequence: Synthetic oligonucleotide
auuaggcuuguucuuucga

SEQ ID NO: 1683082 - RNA, 19 nt, Artificial Sequence
  Description of Artificial Sequence: Synthetic oligonucleotide
ggcuagacagagugaaugg

SEQ ID NO: 1683083 - RNA, 19 nt, Artificial Sequence
  Description of Artificial Sequence: Synthetic oligonucleotide
uugcagaagcuugaacucc

SEQ ID NO: 1683084 - RNA, 19 nt, Artificial Sequence
  Description of Artificial Sequence: Synthetic oligonucleotide
agcaagaugggugucugug

SEQ ID NO: 1683085 - RNA, 19 nt, Artificial Sequence
  Description of Artificial Sequence: Synthetic oligonucleotide
gauucucuaucuugauuga

SEQ ID NO: 1683086 - RNA, 19 nt, Artificial Sequence
  Description of Artificial Sequence: Synthetic oligonucleotide
gcuucuuggaucucgagga

SEQ ID NO: 1683087 - RNA, 19 nt, Artificial Sequence
  Description of Artificial Sequence: Synthetic oligonucleotide
agacgagccaccuccucag

SEQ ID NO: 1683088 - RNA, 19 nt, Artificial Sequence
  Description of Artificial Sequence: Synthetic oligonucleotide
uuuaggcuccaaugacaag

SEQ ID NO: 1683089 - RNA, 19 nt, Artificial Sequence
  Description of Artificial Sequence: Synthetic oligonucleotide
guauuagcaccuugcaguc

SEQ ID NO: 1683090 - RNA, 19 nt, Artificial Sequence
  Description of Artificial Sequence: Synthetic oligonucleotide
ucucccucuauccugccua

SEQ ID NO: 1683091 - RNA, 19 nt, Artificial Sequence
  Description of Artificial Sequence: Synthetic oligonucleotide
ugcgacuagauguccuggc

SEQ ID NO: 1683092 - RNA, 19 nt, Artificial Sequence
  Description of Artificial Sequence: Synthetic oligonucleotide
gaugacagaugguguuggc

SEQ ID NO: 1683093 - RNA, 19 nt, Artificial Sequence
  Description of Artificial Sequence: Synthetic oligonucleotide
ugucuccaaagcuuggaua

SEQ ID NO: 1683094 - RNA, 19 nt, Artificial Sequence
  Description of Artificial Sequence: Synthetic oligonucleotide
agcguauuagcaccuugca

SEQ ID NO: 1683095 - RNA, 19 nt, Artificial Sequence
  Description of Artificial Sequence: Synthetic oligonucleotide
auuuaaaguuucacagucu

SEQ ID NO: 1683096 - RNA, 19 nt, Artificial Sequence
  Description of Artificial Sequence: Synthetic oligonucleotide
guuccuuugccccacucuc

SEQ ID NO: 1683097 - RNA, 19 nt, Artificial Sequence
  Description of Artificial Sequence: Synthetic oligonucleotide
uuuggcagguguuguuaca

SEQ ID NO: 1683098 - RNA, 19 nt, Artificial Sequence
  Description of Artificial Sequence: Synthetic oligonucleotide
uaauucauauuaggcuugu

SEQ ID NO: 1683099 - RNA, 19 nt, Artificial Sequence
  Description of Artificial Sequence: Synthetic oligonucleotide
uggaagguccauccaggcu

SEQ ID NO: 1683100 - RNA, 19 nt, Artificial Sequence
  Description of Artificial Sequence: Synthetic oligonucleotide
gucaagggaauuuaaaguu

SEQ ID NO: 1683101 - RNA, 19 nt, Artificial Sequence
  Description of Artificial Sequence: Synthetic oligonucleotide
uugagcacagaaggaaacu

SEQ ID NO: 1683102 - RNA, 19 nt, Artificial Sequence
  Description of Artificial Sequence: Synthetic oligonucleotide
ugaggugcccguuccuuug

SEQ ID NO: 1683103 - RNA, 19 nt, Artificial Sequence
  Description of Artificial Sequence: Synthetic oligonucleotide
caacagguucgaugguugg

SEQ ID NO: 1683104 - RNA, 19 nt, Artificial Sequence
  Description of Artificial Sequence: Synthetic oligonucleotide
aacuccccauuguuagaug

SEQ ID NO: 1683105 - RNA, 19 nt, Artificial Sequence
  Description of Artificial Sequence: Synthetic oligonucleotide
aggcugaggugcccguucc

SEQ ID NO: 1683106 - RNA, 19 nt, Artificial Sequence
  Description of Artificial Sequence: Synthetic oligonucleotide
uaggcuuguucuuucgaau

SEQ ID NO: 1683107 - RNA, 19 nt, Artificial Sequence
  Description of Artificial Sequence: Synthetic oligonucleotide
ggagaaaacgggccgggag

SEQ ID NO: 1683108 - RNA, 19 nt, Artificial Sequence
  Description of Artificial Sequence: Synthetic oligonucleotide
ucuguaggucuggagaaaa

SEQ ID NO: 1683109 - RNA, 19 nt, Artificial Sequence
  Description of Artificial Sequence: Synthetic oligonucleotide
uggaggagugggguuaaag

SEQ ID NO: 1683110 - RNA, 19 nt, Artificial Sequence
  Description of Artificial Sequence: Synthetic oligonucleotide
cuuuacguaguaguaucuc

SEQ ID NO: 1683111 - RNA, 19 nt, Artificial Sequence
  Description of Artificial Sequence: Synthetic oligonucleotide
ggucuuaguccacaacugc

SEQ ID NO: 1683112 - RNA, 19 nt, Artificial Sequence
  Description of Artificial Sequence: Synthetic oligonucleotide
cuggauaagagacaaacuu

SEQ ID NO: 1683113 - RNA, 19 nt, Artificial Sequence
  Description of Artificial Sequence: Synthetic oligonucleotide
  modified_base (10)..(10): a, c, u, g, unknown or other
guccaugacnguugagcac

SEQ ID NO: 1683114 - RNA, 19 nt, Artificial Sequence
  Description of Artificial Sequence: Synthetic oligonucleotide
guugagcacagaaggaaac

SEQ ID NO: 1683115 - RNA, 19 nt, Artificial Sequence
  Description of Artificial Sequence: Synthetic oligonucleotide
uugcgacuagauguccugg

SEQ ID NO: 1683116 - RNA, 19 nt, Artificial Sequence
  Description of Artificial Sequence: Synthetic oligonucleotide
agaucaugugcucguucug

SEQ ID NO: 1683117 - RNA, 19 nt, Artificial Sequence
  Description of Artificial Sequence: Synthetic oligonucleotide
aaaacgggccgggagugga

SEQ ID NO: 1683118 - RNA, 19 nt, Artificial Sequence
  Description of Artificial Sequence: Synthetic oligonucleotide
ggagugggguuaaaggugg

SEQ ID NO: 1683119 - RNA, 19 nt, Artificial Sequence
  Description of Artificial Sequence: Synthetic oligonucleotide
aggagugggguuaaaggug

SEQ ID NO: 1683120 - RNA, 19 nt, Artificial Sequence
  Description of Artificial Sequence: Synthetic oligonucleotide
ggagucagcaagaugggug

SEQ ID NO: 1683121 - RNA, 19 nt, Artificial Sequence
  Description of Artificial Sequence: Synthetic oligonucleotide
cuuuggaacugcuggcguc

SEQ ID NO: 1683122 - RNA, 19 nt, Artificial Sequence
  Description of Artificial Sequence: Synthetic oligonucleotide
ugaacuccccauuguuaga

SEQ ID NO: 1683123 - RNA, 19 nt, Artificial Sequence
  Description of Artificial Sequence: Synthetic oligonucleotide
cucuauccugccuacuguc

SEQ ID NO: 1683124 - RNA, 19 nt, Artificial Sequence
  Description of Artificial Sequence: Synthetic oligonucleotide
cuuggauaguuucuucaga

SEQ ID NO: 1683125 - RNA, 19 nt, Artificial Sequence
  Description of Artificial Sequence: Synthetic oligonucleotide
cucuaucuugauugacuug

SEQ ID NO: 1683126 - RNA, 19 nt, Artificial Sequence
  Description of Artificial Sequence: Synthetic oligonucleotide
cuuggucuuaguccacaac

SEQ ID NO: 1683127 - RNA, 19 nt, Artificial Sequence
  Description of Artificial Sequence: Synthetic oligonucleotide
gcugagacgccacugaguc

SEQ ID NO: 1683128 - RNA, 19 nt, Artificial Sequence
  Description of Artificial Sequence: Synthetic oligonucleotide
cagucucccucuauccugc

SEQ ID NO: 1683129 - RNA, 19 nt, Artificial Sequence
  Description of Artificial Sequence: Synthetic oligonucleotide
aagaugggugucugugaaa

SEQ ID NO: 1683130 - RNA, 19 nt, Artificial Sequence
  Description of Artificial Sequence: Synthetic oligonucleotide
ggguuaugucuucuguagg

SEQ ID NO: 1683131 - RNA, 19 nt, Artificial Sequence
  Description of Artificial Sequence: Synthetic oligonucleotide
gggaguggaagguccaucc

SEQ ID NO: 1683132 - RNA, 19 nt, Artificial Sequence
  Description of Artificial Sequence: Synthetic oligonucleotide
guuagaacucaguggugga

SEQ ID NO: 1683133 - RNA, 19 nt, Artificial Sequence
  Description of Artificial Sequence: Synthetic oligonucleotide
ggcuuguucuuucgaaucc

SEQ ID NO: 1683134 - RNA, 19 nt, Artificial Sequence
  Description of Artificial Sequence: Synthetic oligonucleotide
agguccauccaggcuagac

SEQ ID NO: 1683135 - RNA, 19 nt, Artificial Sequence
  Description of Artificial Sequence: Synthetic oligonucleotide
agaaaacgggccgggagug

SEQ ID NO: 1683136 - RNA, 19 nt, Artificial Sequence
  Description of Artificial Sequence: Synthetic oligonucleotide
ucucgaggaguuauuuguu

SEQ ID NO: 1683137 - RNA, 19 nt, Artificial Sequence
  Description of Artificial Sequence: Synthetic oligonucleotide
gaagggguacggauggaac

SEQ ID NO: 1683138 - RNA, 19 nt, Artificial Sequence
  Description of Artificial Sequence: Synthetic oligonucleotide
ggaagguccauccaggcua

SEQ ID NO: 1683139 - RNA, 19 nt, Artificial Sequence
  Description of Artificial Sequence: Synthetic oligonucleotide
guuaugucuucuguagguc

SEQ ID NO: 1683140 - RNA, 19 nt, Artificial Sequence
  Description of Artificial Sequence: Synthetic oligonucleotide
acugcaaggguuaugucuu

SEQ ID NO: 1683141 - RNA, 19 nt, Artificial Sequence
  Description of Artificial Sequence: Synthetic oligonucleotide
  modified_base (11)..(11): a, c, u, g, unknown or other
gguccaugacnguugagca

SEQ ID NO: 1683142 - RNA, 19 nt, Artificial Sequence
  Description of Artificial Sequence: Synthetic oligonucleotide
uguagucauugcgacuaga

SEQ ID NO: 1683143 - RNA, 19 nt, Artificial Sequence
  Description of Artificial Sequence: Synthetic oligonucleotide
augacagaugguguuggcu

SEQ ID NO: 1683144 - RNA, 19 nt, Artificial Sequence
  Description of Artificial Sequence: Synthetic oligonucleotide
ucauugcgacuagaugucc

SEQ ID NO: 1683145 - RNA, 19 nt, Artificial Sequence
  Description of Artificial Sequence: Synthetic oligonucleotide
guggaagguccauccaggc

SEQ ID NO: 1683146 - RNA, 19 nt, Artificial Sequence
  Description of Artificial Sequence: Synthetic oligonucleotide
ugggagagauggacuuaag

SEQ ID NO: 1683147 - RNA, 19 nt, Artificial Sequence
  Description of Artificial Sequence: Synthetic oligonucleotide
gaguugagaguaaaaugaa

SEQ ID NO: 1683148 - RNA, 19 nt, Artificial Sequence
  Description of Artificial Sequence: Synthetic oligonucleotide
gagaaaacgggccgggagu

SEQ ID NO: 1683149 - RNA, 19 nt, Artificial Sequence
  Description of Artificial Sequence: Synthetic oligonucleotide
gucuucuguaggucuggag

SEQ ID NO: 1683150 - RNA, 19 nt, Artificial Sequence
  Description of Artificial Sequence: Synthetic oligonucleotide
auuggcugagacgccacug

SEQ ID NO: 1683151 - RNA, 19 nt, Artificial Sequence
  Description of Artificial Sequence: Synthetic oligonucleotide
gagcuuaucguaauucaua

SEQ ID NO: 1683152 - RNA, 19 nt, Artificial Sequence
  Description of Artificial Sequence: Synthetic oligonucleotide
cugagucaaugucuguguc

SEQ ID NO: 1683153 - RNA, 19 nt, Artificial Sequence
  Description of Artificial Sequence: Synthetic oligonucleotide
  modified_base (3)..(3): a, c, u, g, unknown or other
acnguugagcacagaagga

SEQ ID NO: 1683154 - RNA, 19 nt, Artificial Sequence
  Description of Artificial Sequence: Synthetic oligonucleotide
aacuggaggagugggguua

SEQ ID NO: 1683155 - RNA, 19 nt, Artificial Sequence
  Description of Artificial Sequence: Synthetic oligonucleotide
auguagucauugcgacuag

SEQ ID NO: 1683156 - RNA, 19 nt, Artificial Sequence
  Description of Artificial Sequence: Synthetic oligonucleotide
gucauugcgacuagauguc

SEQ ID NO: 1683157 - RNA, 19 nt, Artificial Sequence
  Description of Artificial Sequence: Synthetic oligonucleotide
gugcccguuccuuugcccc

SEQ ID NO: 1683158 - RNA, 19 nt, Artificial Sequence
  Description of Artificial Sequence: Synthetic oligonucleotide
agugucuccaaagcuugga

SEQ ID NO: 1683159 - RNA, 19 nt, Artificial Sequence
  Description of Artificial Sequence: Synthetic oligonucleotide
gcguauuagcaccuugcag

SEQ ID NO: 1683160 - RNA, 19 nt, Artificial Sequence
  Description of Artificial Sequence: Synthetic oligonucleotide
gccugugaccacaagggcg

SEQ ID NO: 1683161 - RNA, 19 nt, Artificial Sequence
  Description of Artificial Sequence: Synthetic oligonucleotide
uaaaggugguagccagaau

SEQ ID NO: 1683162 - RNA, 19 nt, Artificial Sequence
  Description of Artificial Sequence: Synthetic oligonucleotide
cugagagugcuccaaaagu

SEQ ID NO: 1683163 - RNA, 19 nt, Artificial Sequence
  Description of Artificial Sequence: Synthetic oligonucleotide
aacgggccgggaguggaag

SEQ ID NO: 1683164 - RNA, 19 nt, Artificial Sequence
  Description of Artificial Sequence: Synthetic oligonucleotide
agagugcuccaaaagugga

SEQ ID NO: 1683165 - RNA, 19 nt, Artificial Sequence
  Description of Artificial Sequence: Synthetic oligonucleotide
cuucagaagagggagaaau

SEQ ID NO: 1683166 - RNA, 19 nt, Artificial Sequence
  Description of Artificial Sequence: Synthetic oligonucleotide
gauaagagacaaacuugua

SEQ ID NO: 1683167 - RNA, 19 nt, Artificial Sequence
  Description of Artificial Sequence: Synthetic oligonucleotide
cagagugaaugguccauga

SEQ ID NO: 1683168 - RNA, 19 nt, Artificial Sequence
  Description of Artificial Sequence: Synthetic oligonucleotide
guaacagcaacagguucga

SEQ ID NO: 1683169 - RNA, 19 nt, Artificial Sequence
  Description of Artificial Sequence: Synthetic oligonucleotide
gucaguggauccauuuuca

SEQ ID NO: 1683170 - RNA, 19 nt, Artificial Sequence
  Description of Artificial Sequence: Synthetic oligonucleotide
gguuaugucuucuguaggu

SEQ ID NO: 1683171 - RNA, 19 nt, Artificial Sequence
  Description of Artificial Sequence: Synthetic oligonucleotide
aaaagcguauuagcaccuu

SEQ ID NO: 1683172 - RNA, 19 nt, Artificial Sequence
  Description of Artificial Sequence: Synthetic oligonucleotide
uggaacugcuggcgucaag

SEQ ID NO: 1683173 - RNA, 19 nt, Artificial Sequence
  Description of Artificial Sequence: Synthetic oligonucleotide
cuuauuggagguguucaaa

SEQ ID NO: 1683174 - RNA, 19 nt, Artificial Sequence
  Description of Artificial Sequence: Synthetic oligonucleotide
uauuagcaccuugcagucu

SEQ ID NO: 1683175 - RNA, 19 nt, Artificial Sequence
  Description of Artificial Sequence: Synthetic oligonucleotide
gacgccacugagucaaugu

SEQ ID NO: 1683176 - RNA, 19 nt, Artificial Sequence
  Description of Artificial Sequence: Synthetic oligonucleotide
auccugccuacugucagug

SEQ ID NO: 1683177 - RNA, 19 nt, Artificial Sequence
  Description of Artificial Sequence: Synthetic oligonucleotide
gugagagacgcuguuggga

SEQ ID NO: 1683178 - RNA, 19 nt, Artificial Sequence
  Description of Artificial Sequence: Synthetic oligonucleotide
ucuuaguuccuuggucuua

SEQ ID NO: 1683179 - RNA, 19 nt, Artificial Sequence
  Description of Artificial Sequence: Synthetic oligonucleotide
ccuaggaggcuccuuuggg

SEQ ID NO: 1683180 - RNA, 19 nt, Artificial Sequence
  Description of Artificial Sequence: Synthetic oligonucleotide
aauucauauuaggcuuguu

SEQ ID NO: 1683181 - RNA, 19 nt, Artificial Sequence
  Description of Artificial Sequence: Synthetic oligonucleotide
  modified_base (2)..(2): a, c, u, g, unknown or other
cnguugagcacagaaggaa

SEQ ID NO: 1683182 - RNA, 19 nt, Artificial Sequence
  Description of Artificial Sequence: Synthetic oligonucleotide
cccauuguuagauguccag

SEQ ID NO: 1683183 - RNA, 19 nt, Artificial Sequence
  Description of Artificial Sequence: Synthetic oligonucleotide
uggagucagcaagaugggu

SEQ ID NO: 1683184 - RNA, 19 nt, Artificial Sequence
  Description of Artificial Sequence: Synthetic oligonucleotide
augugcucguucugaggcu

SEQ ID NO: 1683185 - RNA, 19 nt, Artificial Sequence
  Description of Artificial Sequence: Synthetic oligonucleotide
uggaucucgaggaguuauu

SEQ ID NO: 1683186 - RNA, 19 nt, Artificial Sequence
  Description of Artificial Sequence: Synthetic oligonucleotide
uggcgucaagggaauuuaa

SEQ ID NO: 1683187 - RNA, 19 nt, Artificial Sequence
  Description of Artificial Sequence: Synthetic oligonucleotide
gaaaagcguauuagcaccu

SEQ ID NO: 1683188 - RNA, 19 nt, Artificial Sequence
  Description of Artificial Sequence: Synthetic oligonucleotide
ugaccacaagggcgggugu

SEQ ID NO: 1683189 - RNA, 19 nt, Artificial Sequence
  Description of Artificial Sequence: Synthetic oligonucleotide
cguauuagcaccuugcagu

SEQ ID NO: 1683190 - RNA, 19 nt, Artificial Sequence
  Description of Artificial Sequence: Synthetic oligonucleotide
ccauuguuagauguccagc

SEQ ID NO: 1683191 - RNA, 19 nt, Artificial Sequence
  Description of Artificial Sequence: Synthetic oligonucleotide
agcaacagguucgaugguu

SEQ ID NO: 1683192 - RNA, 19 nt, Artificial Sequence
  Description of Artificial Sequence: Synthetic oligonucleotide
gggagaaaccagugucucc

SEQ ID NO: 1683193 - RNA, 19 nt, Artificial Sequence
  Description of Artificial Sequence: Synthetic oligonucleotide
gcaaggguuaugucuucug

SEQ ID NO: 1683194 - RNA, 19 nt, Artificial Sequence
  Description of Artificial Sequence: Synthetic oligonucleotide
guccuaggaggcuccuuug

SEQ ID NO: 1683195 - RNA, 19 nt, Artificial Sequence
  Description of Artificial Sequence: Synthetic oligonucleotide
cuggagagcaaggggcuug

SEQ ID NO: 1683196 - RNA, 19 nt, Artificial Sequence
  Description of Artificial Sequence: Synthetic oligonucleotide
ggcuuguugaaaagguaac

SEQ ID NO: 1683197 - RNA, 19 nt, Artificial Sequence
  Description of Artificial Sequence: Synthetic oligonucleotide
guuaaaggugguagccaga

SEQ ID NO: 1683198 - RNA, 19 nt, Artificial Sequence
  Description of Artificial Sequence: Synthetic oligonucleotide
guacaaaaccagaauguau

SEQ ID NO: 1683199 - RNA, 19 nt, Artificial Sequence
  Description of Artificial Sequence: Synthetic oligonucleotide
guauguagucauugcgacu

SEQ ID NO: 1683200 - RNA, 19 nt, Artificial Sequence
  Description of Artificial Sequence: Synthetic oligonucleotide
gcaacagguucgaugguug

SEQ ID NO: 1683201 - RNA, 19 nt, Artificial Sequence
  Description of Artificial Sequence: Synthetic oligonucleotide
gcuuguugaaaagguaaca

SEQ ID NO: 1683202 - RNA, 19 nt, Artificial Sequence
  Description of Artificial Sequence: Synthetic oligonucleotide
ugcccguuccuuugcccca

SEQ ID NO: 1683203 - RNA, 19 nt, Artificial Sequence
  Description of Artificial Sequence: Synthetic oligonucleotide
gguacggauggaacuggag

SEQ ID NO: 1683204 - RNA, 19 nt, Artificial Sequence
  Description of Artificial Sequence: Synthetic oligonucleotide
gguguucaaagaguugaga

SEQ ID NO: 1683205 - RNA, 19 nt, Artificial Sequence
  Description of Artificial Sequence: Synthetic oligonucleotide
aggggagcgaaugggcuga

SEQ ID NO: 1683206 - RNA, 19 nt, Artificial Sequence
  Description of Artificial Sequence: Synthetic oligonucleotide
gagcgaaugggcugagagu

SEQ ID NO: 1683207 - RNA, 19 nt, Artificial Sequence
  Description of Artificial Sequence: Synthetic oligonucleotide
caaaaccagaauguaugua

SEQ ID NO: 1683208 - RNA, 19 nt, Artificial Sequence
  Description of Artificial Sequence: Synthetic oligonucleotide
caaggguuaugucuucugu

SEQ ID NO: 1683209 - RNA, 19 nt, Artificial Sequence
  Description of Artificial Sequence: Synthetic oligonucleotide
caacugcaaggguuauguc

SEQ ID NO: 1683210 - RNA, 19 nt, Artificial Sequence
  Description of Artificial Sequence: Synthetic oligonucleotide
cucccucuauccugccuac

SEQ ID NO: 1683211 - RNA, 19 nt, Artificial Sequence
  Description of Artificial Sequence: Synthetic oligonucleotide
cacaacugcaaggguuaug

SEQ ID NO: 1683212 - RNA, 19 nt, Artificial Sequence
  Description of Artificial Sequence: Synthetic oligonucleotide
gggcuuguugaaaagguaa

SEQ ID NO: 1683213 - RNA, 19 nt, Artificial Sequence
  Description of Artificial Sequence: Synthetic oligonucleotide
guagucauugcgacuagau

SEQ ID NO: 1683214 - RNA, 19 nt, Artificial Sequence
  Description of Artificial Sequence: Synthetic oligonucleotide
gaacuccccauuguuagau

SEQ ID NO: 1683215 - RNA, 19 nt, Artificial Sequence
  Description of Artificial Sequence: Synthetic oligonucleotide
aggugguagccagaaugga

SEQ ID NO: 1683216 - RNA, 19 nt, Artificial Sequence
  Description of Artificial Sequence: Synthetic oligonucleotide
uucuaacccuuugggcuuc

SEQ ID NO: 1683217 - RNA, 19 nt, Artificial Sequence
  Description of Artificial Sequence: Synthetic oligonucleotide
acuagauguccuggcugca

SEQ ID NO: 1683218 - RNA, 19 nt, Artificial Sequence
  Description of Artificial Sequence: Synthetic oligonucleotide
gcuccaaugacaaguucuc

SEQ ID NO: 1683219 - RNA, 19 nt, Artificial Sequence
  Description of Artificial Sequence: Synthetic oligonucleotide
ggagguguucaaagaguug

SEQ ID NO: 1683220 - RNA, 19 nt, Artificial Sequence
  Description of Artificial Sequence: Synthetic oligonucleotide
guucuaacccuuugggcuu

SEQ ID NO: 1683221 - RNA, 19 nt, Artificial Sequence
  Description of Artificial Sequence: Synthetic oligonucleotide
cauugcgacuagauguccu

SEQ ID NO: 1683222 - RNA, 19 nt, Artificial Sequence
  Description of Artificial Sequence: Synthetic oligonucleotide
cccucuauccugccuacug

SEQ ID NO: 1683223 - RNA, 19 nt, Artificial Sequence
  Description of Artificial Sequence: Synthetic oligonucleotide
uacugucaguggauccauu

SEQ ID NO: 1683224 - RNA, 19 nt, Artificial Sequence
  Description of Artificial Sequence: Synthetic oligonucleotide
agacgccacugagucaaug

SEQ ID NO: 1683225 - RNA, 19 nt, Artificial Sequence
  Description of Artificial Sequence: Synthetic oligonucleotide
cugcaaggguuaugucuuc

SEQ ID NO: 1683226 - RNA, 19 nt, Artificial Sequence
  Description of Artificial Sequence: Synthetic oligonucleotide
ugguggagaaggcguccua

SEQ ID NO: 1683227 - RNA, 19 nt, Artificial Sequence
  Description of Artificial Sequence: Synthetic oligonucleotide
ggugcccguuccuuugccc

SEQ ID NO: 1683228 - RNA, 19 nt, Artificial Sequence
  Description of Artificial Sequence: Synthetic oligonucleotide
ggcuccaaugacaaguucu

SEQ ID NO: 1683229 - RNA, 19 nt, Artificial Sequence
  Description of Artificial Sequence: Synthetic oligonucleotide
ggcuggggcuuccagagaa

SEQ ID NO: 1683230 - RNA, 19 nt, Artificial Sequence
  Description of Artificial Sequence: Synthetic oligonucleotide
gcagaucaugugcucguuc

SEQ ID NO: 1683231 - RNA, 19 nt, Artificial Sequence
  Description of Artificial Sequence: Synthetic oligonucleotide
caaggggcuuggagucagc

SEQ ID NO: 1683232 - RNA, 19 nt, Artificial Sequence
  Description of Artificial Sequence: Synthetic oligonucleotide
ccugccuacugucagugga

SEQ ID NO: 1683233 - RNA, 19 nt, Artificial Sequence
  Description of Artificial Sequence: Synthetic oligonucleotide
guucucuggaaguuccauu

SEQ ID NO: 1683234 - RNA, 19 nt, Artificial Sequence
  Description of Artificial Sequence: Synthetic oligonucleotide
ggaguggaagguccaucca

SEQ ID NO: 1683235 - RNA, 19 nt, Artificial Sequence
  Description of Artificial Sequence: Synthetic oligonucleotide
cgacuagauguccuggcug

SEQ ID NO: 1683236 - RNA, 19 nt, Artificial Sequence
  Description of Artificial Sequence: Synthetic oligonucleotide
cgucaagggaauuuaaagu

SEQ ID NO: 1683237 - RNA, 19 nt, Artificial Sequence
  Description of Artificial Sequence: Synthetic oligonucleotide
ucuaacccuuugggcuucu

SEQ ID NO: 1683238 - RNA, 19 nt, Artificial Sequence
  Description of Artificial Sequence: Synthetic oligonucleotide
caagggcgggugucaguuc

SEQ ID NO: 1683239 - RNA, 19 nt, Artificial Sequence
  Description of Artificial Sequence: Synthetic oligonucleotide
cugagacgccacugaguca

SEQ ID NO: 1683240 - RNA, 19 nt, Artificial Sequence
  Description of Artificial Sequence: Synthetic oligonucleotide
  modified_base (17)..(17): a, c, u, g, unknown or other
gugaaugguccaugacngu

SEQ ID NO: 1683241 - RNA, 19 nt, Artificial Sequence
  Description of Artificial Sequence: Synthetic oligonucleotide
aguggauacuggagagcaa

SEQ ID NO: 1683242 - RNA, 19 nt, Artificial Sequence
  Description of Artificial Sequence: Synthetic oligonucleotide
cacagucucccucuauccu

SEQ ID NO: 1683243 - RNA, 19 nt, Artificial Sequence
  Description of Artificial Sequence: Synthetic oligonucleotide
cucgaggaguuauuuguuu

SEQ ID NO: 1683244 - RNA, 19 nt, Artificial Sequence
  Description of Artificial Sequence: Synthetic oligonucleotide
acuggaggagugggguuaa

SEQ ID NO: 1683245 - RNA, 19 nt, Artificial Sequence
  Description of Artificial Sequence: Synthetic oligonucleotide
cugugaccacaagggcggg

SEQ ID NO: 1683246 - RNA, 19 nt, Artificial Sequence
  Description of Artificial Sequence: Synthetic oligonucleotide
cuggcgucaagggaauuua

SEQ ID NO: 1683247 - RNA, 19 nt, Artificial Sequence
  Description of Artificial Sequence: Synthetic oligonucleotide
ugggcucaggggagcgaau

SEQ ID NO: 1683248 - RNA, 19 nt, Artificial Sequence
  Description of Artificial Sequence: Synthetic oligonucleotide
  modified_base (8)..(8): a, c, u, g, unknown or other
ccaugacnguugagcacag

SEQ ID NO: 1683249 - RNA, 19 nt, Artificial Sequence
  Description of Artificial Sequence: Synthetic oligonucleotide
  modified_base (7)..(7): a, c, u, g, unknown or other
caugacnguugagcacaga

SEQ ID NO: 1683250 - RNA, 19 nt, Artificial Sequence
  Description of Artificial Sequence: Synthetic oligonucleotide
aaacgggccgggaguggaa

SEQ ID NO: 1683251 - RNA, 19 nt, Artificial Sequence
  Description of Artificial Sequence: Synthetic oligonucleotide
guugggagagauggacuua

SEQ ID NO: 1683252 - RNA, 19 nt, Artificial Sequence
  Description of Artificial Sequence: Synthetic oligonucleotide
ggcgucaagggaauuuaaa

SEQ ID NO: 1683253 - RNA, 19 nt, Artificial Sequence
  Description of Artificial Sequence: Synthetic oligonucleotide
ggguuagaacucaguggug

SEQ ID NO: 1683254 - RNA, 19 nt, Artificial Sequence
  Description of Artificial Sequence: Synthetic oligonucleotide
gaacuggaggagugggguu

SEQ ID NO: 1683255 - RNA, 19 nt, Artificial Sequence
  Description of Artificial Sequence: Synthetic oligonucleotide
ggccgggaguggaaggucc

SEQ ID NO: 1683256 - RNA, 19 nt, Artificial Sequence
  Description of Artificial Sequence: Synthetic oligonucleotide
gcuagacagagugaauggu

SEQ ID NO: 1683257 - RNA, 19 nt, Artificial Sequence
  Description of Artificial Sequence: Synthetic oligonucleotide
ccauuggcugagacgccac

SEQ ID NO: 1683258 - RNA, 19 nt, Artificial Sequence
  Description of Artificial Sequence: Synthetic oligonucleotide
gguagccagaauggaugca

SEQ ID NO: 1683259 - RNA, 19 nt, Artificial Sequence
  Description of Artificial Sequence: Synthetic oligonucleotide
gaaggcguccuaggaggcu

SEQ ID NO: 1683260 - RNA, 19 nt, Artificial Sequence
  Description of Artificial Sequence: Synthetic oligonucleotide
ggugguagccagaauggau

SEQ ID NO: 1683261 - RNA, 19 nt, Artificial Sequence
  Description of Artificial Sequence: Synthetic oligonucleotide
cugggcucaggggagcgaa

SEQ ID NO: 1683262 - RNA, 19 nt, Artificial Sequence
  Description of Artificial Sequence: Synthetic oligonucleotide
cugccuacugucaguggau

SEQ ID NO: 1683263 - RNA, 19 nt, Artificial Sequence
  Description of Artificial Sequence: Synthetic oligonucleotide
gcgacuagauguccuggcu

SEQ ID NO: 1683264 - RNA, 19 nt, Artificial Sequence
  Description of Artificial Sequence: Synthetic oligonucleotide
ggcgggugucaguucuaac

SEQ ID NO: 1683265 - RNA, 19 nt, Artificial Sequence
  Description of Artificial Sequence: Synthetic oligonucleotide
cauuggcugagacgccacu

SEQ ID NO: 1683266 - RNA, 19 nt, Artificial Sequence
  Description of Artificial Sequence: Synthetic oligonucleotide
cugugucaaugucuggguu

SEQ ID NO: 1683267 - RNA, 19 nt, Artificial Sequence
  Description of Artificial Sequence: Synthetic oligonucleotide
cuuggaucucgaggaguua

SEQ ID NO: 1683268 - RNA, 19 nt, Artificial Sequence
  Description of Artificial Sequence: Synthetic oligonucleotide
gguguuggcuccugaguuu

SEQ ID NO: 1683269 - RNA, 19 nt, Artificial Sequence
  Description of Artificial Sequence: Synthetic oligonucleotide
ccccauuguuagaugucca

SEQ ID NO: 1683270 - RNA, 19 nt, Artificial Sequence
  Description of Artificial Sequence: Synthetic oligonucleotide
cugcugagcuuaucguaau

SEQ ID NO: 1683271 - RNA, 19 nt, Artificial Sequence
  Description of Artificial Sequence: Synthetic oligonucleotide
gcuuaucguaauucauauu

SEQ ID NO: 1683272 - RNA, 19 nt, Artificial Sequence
  Description of Artificial Sequence: Synthetic oligonucleotide
ggugucaguucuaacccuu

SEQ ID NO: 1683273 - RNA, 19 nt, Artificial Sequence
  Description of Artificial Sequence: Synthetic oligonucleotide
gggcugagagugcuccaaa

SEQ ID NO: 1683274 - RNA, 19 nt, Artificial Sequence
  Description of Artificial Sequence: Synthetic oligonucleotide
ggaucucgaggaguuauuu

SEQ ID NO: 1683275 - RNA, 19 nt, Artificial Sequence
  Description of Artificial Sequence: Synthetic oligonucleotide
caggcuagacagagugaau

SEQ ID NO: 1683276 - RNA, 19 nt, Artificial Sequence
  Description of Artificial Sequence: Synthetic oligonucleotide
cugaggugcccguuccuuu

SEQ ID NO: 1683277 - RNA, 19 nt, Artificial Sequence
  Description of Artificial Sequence: Synthetic oligonucleotide
ggguacggauggaacugga

SEQ ID NO: 1683278 - RNA, 19 nt, Artificial Sequence
  Description of Artificial Sequence: Synthetic oligonucleotide
cagagacgagccaccuccu

SEQ ID NO: 1683279 - RNA, 19 nt, Artificial Sequence
  Description of Artificial Sequence: Synthetic oligonucleotide
gguucgaugguuggcuuuu

SEQ ID NO: 1683280 - RNA, 19 nt, Artificial Sequence
  Description of Artificial Sequence: Synthetic oligonucleotide
ugcuggcgucaagggaauu

SEQ ID NO: 1683281 - RNA, 19 nt, Artificial Sequence
  Description of Artificial Sequence: Synthetic oligonucleotide
cccagagacgagccaccuc

SEQ ID NO: 1683282 - RNA, 19 nt, Artificial Sequence
  Description of Artificial Sequence: Synthetic oligonucleotide
ccucuauccugccuacugu

SEQ ID NO: 1683283 - RNA, 19 nt, Artificial Sequence
  Description of Artificial Sequence: Synthetic oligonucleotide
cagguucgaugguuggcuu

SEQ ID NO: 1683284 - RNA, 19 nt, Artificial Sequence
  Description of Artificial Sequence: Synthetic oligonucleotide
ggcugagacgccacugagu

SEQ ID NO: 1683285 - RNA, 19 nt, Artificial Sequence
  Description of Artificial Sequence: Synthetic oligonucleotide
gcuggcgucaagggaauuu

SEQ ID NO: 1683286 - RNA, 19 nt, Artificial Sequence
  Description of Artificial Sequence: Synthetic oligonucleotide
ccguuccuuugccccacuc

SEQ ID NO: 1683287 - RNA, 19 nt, Artificial Sequence
  Description of Artificial Sequence: Synthetic oligonucleotide
gccgggaguggaaggucca

SEQ ID NO: 1683288 - RNA, 19 nt, Artificial Sequence
  Description of Artificial Sequence: Synthetic oligonucleotide
gggcgggugucaguucuaa

SEQ ID NO: 1683289 - RNA, 19 nt, Artificial Sequence
  Description of Artificial Sequence: Synthetic oligonucleotide
agggcgggugucaguucua

SEQ ID NO: 1683290 - RNA, 19 nt, Artificial Sequence
  Description of Artificial Sequence: Synthetic oligonucleotide
cguuccuuugccccacucu

SEQ ID NO: 1683291 - RNA, 19 nt, Artificial Sequence
  Description of Artificial Sequence: Synthetic oligonucleotide
gcccguuccuuugccccac

SEQ ID NO: 1683292 - RNA, 19 nt, Artificial Sequence
  Description of Artificial Sequence: Synthetic oligonucleotide
cgggaguggaagguccauc

SEQ ID NO: 1683293 - RNA, 19 nt, Artificial Sequence
  Description of Artificial Sequence: Synthetic oligonucleotide
gggagcgaaugggcugaga

SEQ ID NO: 1683294 - RNA, 19 nt, Artificial Sequence
  Description of Artificial Sequence: Synthetic oligonucleotide
ggcugaggugcccguuccu

SEQ ID NO: 1683295 - RNA, 19 nt, Artificial Sequence
  Description of Artificial Sequence: Synthetic oligonucleotide
gcugaggugcccguuccuu

SEQ ID NO: 1683296 - RNA, 19 nt, Artificial Sequence
  Description of Artificial Sequence: Synthetic oligonucleotide
gagacgccacugagucaau

SEQ ID NO: 1683297 - RNA, 19 nt, Artificial Sequence
  Description of Artificial Sequence: Synthetic oligonucleotide
ggcguccuaggaggcuccu

SEQ ID NO: 1683298 - RNA, 19 nt, Artificial Sequence
  Description of Artificial Sequence: Synthetic oligonucleotide
gcguccuaggaggcuccuu

SEQ ID NO: 1683299 - RNA, 19 nt, Artificial Sequence
  Description of Artificial Sequence: Synthetic oligonucleotide
ccgggaguggaagguccau

SEQ ID NO: 1683300 - RNA, 19 nt, Artificial Sequence
  Description of Artificial Sequence: Synthetic oligonucleotide
cccguuccuuugccccacu

SEQ ID NO: 1683301 - RNA, 19 nt, Artificial Sequence
  Description of Artificial Sequence: Synthetic oligonucleotide
  modified_base (1)..(1): a, c, u, g, unknown or other
nguugagcacagaaggaaa

SEQ ID NO: 1683302 - RNA, 19 nt, Artificial Sequence
  Description of Artificial Sequence: Synthetic oligonucleotide
auaaauguuaaauuagggc

SEQ ID NO: 1683303 - RNA, 19 nt, Artificial Sequence
  Description of Artificial Sequence: Synthetic oligonucleotide
auuaacuuauuauuggacc

SEQ ID NO: 1683304 - RNA, 19 nt, Artificial Sequence
  Description of Artificial Sequence: Synthetic oligonucleotide
acuguaacaaaccaaauuc

SEQ ID NO: 1683305 - RNA, 19 nt, Artificial Sequence
  Description of Artificial Sequence: Synthetic oligonucleotide
acuaagaauucucaaaacc

SEQ ID NO: 1683306 - RNA, 19 nt, Artificial Sequence
  Description of Artificial Sequence: Synthetic oligonucleotide
uaaauguuaaauuagggcu

SEQ ID NO: 1683307 - RNA, 19 nt, Artificial Sequence
  Description of Artificial Sequence: Synthetic oligonucleotide
aaacaauagagcuggaagg

SEQ ID NO: 1683308 - RNA, 19 nt, Artificial Sequence
  Description of Artificial Sequence: Synthetic oligonucleotide
aauucuauuaacuuauuau

SEQ ID NO: 1683309 - RNA, 19 nt, Artificial Sequence
  Description of Artificial Sequence: Synthetic oligonucleotide
uauaguaacuguuuuauca

SEQ ID NO: 1683310 - RNA, 19 nt, Artificial Sequence
  Description of Artificial Sequence: Synthetic oligonucleotide
uuauagaagcauuacagag

SEQ ID NO: 1683311 - RNA, 19 nt, Artificial Sequence
  Description of Artificial Sequence: Synthetic oligonucleotide
acgaacuaauuauagaagc

SEQ ID NO: 1683312 - RNA, 19 nt, Artificial Sequence
  Description of Artificial Sequence: Synthetic oligonucleotide
aguuuauucucauuccugc

SEQ ID NO: 1683313 - RNA, 19 nt, Artificial Sequence
  Description of Artificial Sequence: Synthetic oligonucleotide
uuaccuaucauguguaggg

SEQ ID NO: 1683314 - RNA, 19 nt, Artificial Sequence
  Description of Artificial Sequence: Synthetic oligonucleotide
ucaguugugguucuaauug

SEQ ID NO: 1683315 - RNA, 19 nt, Artificial Sequence
  Description of Artificial Sequence: Synthetic oligonucleotide
uucuaauugaagcaguuca

SEQ ID NO: 1683316 - RNA, 19 nt, Artificial Sequence
  Description of Artificial Sequence: Synthetic oligonucleotide
uguuuauacuccaggaagg

SEQ ID NO: 1683317 - RNA, 19 nt, Artificial Sequence
  Description of Artificial Sequence: Synthetic oligonucleotide
uucuauuaacuuauuauug

SEQ ID NO: 1683318 - RNA, 19 nt, Artificial Sequence
  Description of Artificial Sequence: Synthetic oligonucleotide
cagaauaacauccaacucc

SEQ ID NO: 1683319 - RNA, 19 nt, Artificial Sequence
  Description of Artificial Sequence: Synthetic oligonucleotide
uauagaagcauuacagagc

SEQ ID NO: 1683320 - RNA, 19 nt, Artificial Sequence
  Description of Artificial Sequence: Synthetic oligonucleotide
auaguaacuguuuuaucac

SEQ ID NO: 1683321 - RNA, 19 nt, Artificial Sequence
  Description of Artificial Sequence: Synthetic oligonucleotide
cauaaauguuaaauuaggg

SEQ ID NO: 1683322 - RNA, 19 nt, Artificial Sequence
  Description of Artificial Sequence: Synthetic oligonucleotide
uuuguugacagcuugacua

SEQ ID NO: 1683323 - RNA, 19 nt, Artificial Sequence
  Description of Artificial Sequence: Synthetic oligonucleotide
aaugaggcuaccauuugcc

SEQ ID NO: 1683324 - RNA, 19 nt, Artificial Sequence
  Description of Artificial Sequence: Synthetic oligonucleotide
uauuauuggaccuauuuau

SEQ ID NO: 1683325 - RNA, 19 nt, Artificial Sequence
  Description of Artificial Sequence: Synthetic oligonucleotide
uaauuauagaagcauuaca

SEQ ID NO: 1683326 - RNA, 19 nt, Artificial Sequence
  Description of Artificial Sequence: Synthetic oligonucleotide
aauuuguggaauucuuaag

SEQ ID NO: 1683327 - RNA, 19 nt, Artificial Sequence
  Description of Artificial Sequence: Synthetic oligonucleotide
auagucuugauacagcugu

SEQ ID NO: 1683328 - RNA, 19 nt, Artificial Sequence
  Description of Artificial Sequence: Synthetic oligonucleotide
auucucaaaacccaccauc

SEQ ID NO: 1683329 - RNA, 19 nt, Artificial Sequence
  Description of Artificial Sequence: Synthetic oligonucleotide
ucaaaacccaccaucaagu

SEQ ID NO: 1683330 - RNA, 19 nt, Artificial Sequence
  Description of Artificial Sequence: Synthetic oligonucleotide
caaacaauagagcuggaag

SEQ ID NO: 1683331 - RNA, 19 nt, Artificial Sequence
  Description of Artificial Sequence: Synthetic oligonucleotide
ugacgaacuaauuauagaa

SEQ ID NO: 1683332 - RNA, 19 nt, Artificial Sequence
  Description of Artificial Sequence: Synthetic oligonucleotide
guuaaauuagggcuggggc

SEQ ID NO: 1683333 - RNA, 19 nt, Artificial Sequence
  Description of Artificial Sequence: Synthetic oligonucleotide
auuuguggaauucuuaagu

SEQ ID NO: 1683334 - RNA, 19 nt, Artificial Sequence
  Description of Artificial Sequence: Synthetic oligonucleotide
aauguuaaauuagggcugg

SEQ ID NO: 1683335 - RNA, 19 nt, Artificial Sequence
  Description of Artificial Sequence: Synthetic oligonucleotide
ucaggagugacacauuuga

SEQ ID NO: 1683336 - RNA, 19 nt, Artificial Sequence
  Description of Artificial Sequence: Synthetic oligonucleotide
uggacgauauuccugacga

SEQ ID NO: 1683337 - RNA, 19 nt, Artificial Sequence
  Description of Artificial Sequence: Synthetic oligonucleotide
aaccguucuugcuucaaac

SEQ ID NO: 1683338 - RNA, 19 nt, Artificial Sequence
  Description of Artificial Sequence: Synthetic oligonucleotide
uugugguucuaauugaagc

SEQ ID NO: 1683339 - RNA, 19 nt, Artificial Sequence
  Description of Artificial Sequence: Synthetic oligonucleotide
ugacagcuugacuacaugg

SEQ ID NO: 1683340 - RNA, 19 nt, Artificial Sequence
  Description of Artificial Sequence: Synthetic oligonucleotide
uuaaauuagggcuggggcu

SEQ ID NO: 1683341 - RNA, 19 nt, Artificial Sequence
  Description of Artificial Sequence: Synthetic oligonucleotide
aaggcuagaugagucauac

SEQ ID NO: 1683342 - RNA, 19 nt, Artificial Sequence
  Description of Artificial Sequence: Synthetic oligonucleotide
aaucaaacguugccguuuc

SEQ ID NO: 1683343 - RNA, 19 nt, Artificial Sequence
  Description of Artificial Sequence: Synthetic oligonucleotide
aaauguuaaauuagggcug

SEQ ID NO: 1683344 - RNA, 19 nt, Artificial Sequence
  Description of Artificial Sequence: Synthetic oligonucleotide
uuuauaguaacuguuuuau

SEQ ID NO: 1683345 - RNA, 19 nt, Artificial Sequence
  Description of Artificial Sequence: Synthetic oligonucleotide
aaauuagauaagaaauuug

SEQ ID NO: 1683346 - RNA, 19 nt, Artificial Sequence
  Description of Artificial Sequence: Synthetic oligonucleotide
ugugguucuaauugaagca

SEQ ID NO: 1683347 - RNA, 19 nt, Artificial Sequence
  Description of Artificial Sequence: Synthetic oligonucleotide
auucuauuaacuuauuauu

SEQ ID NO: 1683348 - RNA, 19 nt, Artificial Sequence
  Description of Artificial Sequence: Synthetic oligonucleotide
uuauucucauuccugcuca

SEQ ID NO: 1683349 - RNA, 19 nt, Artificial Sequence
  Description of Artificial Sequence: Synthetic oligonucleotide
aagaauucucaaaacccac

SEQ ID NO: 1683350 - RNA, 19 nt, Artificial Sequence
  Description of Artificial Sequence: Synthetic oligonucleotide
auacuuaccuaucaugugu

SEQ ID NO: 1683351 - RNA, 19 nt, Artificial Sequence
  Description of Artificial Sequence: Synthetic oligonucleotide
aaauucuauuaacuuauua

SEQ ID NO: 1683352 - RNA, 19 nt, Artificial Sequence
  Description of Artificial Sequence: Synthetic oligonucleotide
uuaagcauucugauggagu

SEQ ID NO: 1683353 - RNA, 19 nt, Artificial Sequence
  Description of Artificial Sequence: Synthetic oligonucleotide
ugaauagucuugauacagc

SEQ ID NO: 1683354 - RNA, 19 nt, Artificial Sequence
  Description of Artificial Sequence: Synthetic oligonucleotide
uuaucacuuaguuuauucu

SEQ ID NO: 1683355 - RNA, 19 nt, Artificial Sequence
  Description of Artificial Sequence: Synthetic oligonucleotide
aaaccaaauucuauuaacu

SEQ ID NO: 1683356 - RNA, 19 nt, Artificial Sequence
  Description of Artificial Sequence: Synthetic oligonucleotide
caaaccaaauucuauuaac

SEQ ID NO: 1683357 - RNA, 19 nt, Artificial Sequence
  Description of Artificial Sequence: Synthetic oligonucleotide
uuuauucucauuccugcuc

SEQ ID NO: 1683358 - RNA, 19 nt, Artificial Sequence
  Description of Artificial Sequence: Synthetic oligonucleotide
accuaucauguguagggcc

SEQ ID NO: 1683359 - RNA, 19 nt, Artificial Sequence
  Description of Artificial Sequence: Synthetic oligonucleotide
ccuuacauuaucuucagag

SEQ ID NO: 1683360 - RNA, 19 nt, Artificial Sequence
  Description of Artificial Sequence: Synthetic oligonucleotide
ucaauggacgauauuccug

SEQ ID NO: 1683361 - RNA, 19 nt, Artificial Sequence
  Description of Artificial Sequence: Synthetic oligonucleotide
ucuuaagugacgacuuucu

SEQ ID NO: 1683362 - RNA, 19 nt, Artificial Sequence
  Description of Artificial Sequence: Synthetic oligonucleotide
aaauaaaggaggaguucac

SEQ ID NO: 1683363 - RNA, 19 nt, Artificial Sequence
  Description of Artificial Sequence: Synthetic oligonucleotide
gguuuucucaaauacagac

SEQ ID NO: 1683364 - RNA, 19 nt, Artificial Sequence
  Description of Artificial Sequence: Synthetic oligonucleotide
uaucacuuaguuuauucuc

SEQ ID NO: 1683365 - RNA, 19 nt, Artificial Sequence
  Description of Artificial Sequence: Synthetic oligonucleotide
cuucuuagaagcuacagaa

SEQ ID NO: 1683366 - RNA, 19 nt, Artificial Sequence
  Description of Artificial Sequence: Synthetic oligonucleotide
uaggacauaaauguuaaau

SEQ ID NO: 1683367 - RNA, 19 nt, Artificial Sequence
  Description of Artificial Sequence: Synthetic oligonucleotide
acuuacauaaugaggcuac

SEQ ID NO: 1683368 - RNA, 19 nt, Artificial Sequence
  Description of Artificial Sequence: Synthetic oligonucleotide
caggacuuacauaaugagg

SEQ ID NO: 1683369 - RNA, 19 nt, Artificial Sequence
  Description of Artificial Sequence: Synthetic oligonucleotide
uuaccagacagcuuuucug

SEQ ID NO: 1683370 - RNA, 19 nt, Artificial Sequence
  Description of Artificial Sequence: Synthetic oligonucleotide
uacauaaugaggcuaccau

SEQ ID NO: 1683371 - RNA, 19 nt, Artificial Sequence
  Description of Artificial Sequence: Synthetic oligonucleotide
cuucaaucaaacguugccg

SEQ ID NO: 1683372 - RNA, 19 nt, Artificial Sequence
  Description of Artificial Sequence: Synthetic oligonucleotide
acaggacuuacauaaugag

SEQ ID NO: 1683373 - RNA, 19 nt, Artificial Sequence
  Description of Artificial Sequence: Synthetic oligonucleotide
uucuuagaagcuacagaag

SEQ ID NO: 1683374 - RNA, 19 nt, Artificial Sequence
  Description of Artificial Sequence: Synthetic oligonucleotide
aggagugacacauuugacu

SEQ ID NO: 1683375 - RNA, 19 nt, Artificial Sequence
  Description of Artificial Sequence: Synthetic oligonucleotide
agaauucucaaaacccacc

SEQ ID NO: 1683376 - RNA, 19 nt, Artificial Sequence
  Description of Artificial Sequence: Synthetic oligonucleotide
aauucgcugaugcugcaga

SEQ ID NO: 1683377 - RNA, 19 nt, Artificial Sequence
  Description of Artificial Sequence: Synthetic oligonucleotide
uucaaucaaacguugccgu

SEQ ID NO: 1683378 - RNA, 19 nt, Artificial Sequence
  Description of Artificial Sequence: Synthetic oligonucleotide
ucgcugaugcugcagacag

SEQ ID NO: 1683379 - RNA, 19 nt, Artificial Sequence
  Description of Artificial Sequence: Synthetic oligonucleotide
caucaaguaaucuguuacc

SEQ ID NO: 1683380 - RNA, 19 nt, Artificial Sequence
  Description of Artificial Sequence: Synthetic oligonucleotide
uggacuucaaucaaacguu

SEQ ID NO: 1683381 - RNA, 19 nt, Artificial Sequence
  Description of Artificial Sequence: Synthetic oligonucleotide
gacgaacuaauuauagaag

SEQ ID NO: 1683382 - RNA, 19 nt, Artificial Sequence
  Description of Artificial Sequence: Synthetic oligonucleotide
cucaaaacccaccaucaag

SEQ ID NO: 1683383 - RNA, 19 nt, Artificial Sequence
  Description of Artificial Sequence: Synthetic oligonucleotide
gaauucucaaaacccacca

SEQ ID NO: 1683384 - RNA, 19 nt, Artificial Sequence
  Description of Artificial Sequence: Synthetic oligonucleotide
ucucuugaacuucugaaua

SEQ ID NO: 1683385 - RNA, 19 nt, Artificial Sequence
  Description of Artificial Sequence: Synthetic oligonucleotide
uauuggaccuauuuauagu

SEQ ID NO: 1683386 - RNA, 19 nt, Artificial Sequence
  Description of Artificial Sequence: Synthetic oligonucleotide
agcauuacagagcagcuaa

SEQ ID NO: 1683387 - RNA, 19 nt, Artificial Sequence
  Description of Artificial Sequence: Synthetic oligonucleotide
uuaauucccagcacuguaa

SEQ ID NO: 1683388 - RNA, 19 nt, Artificial Sequence
  Description of Artificial Sequence: Synthetic oligonucleotide
uugacuacaugguucagau

SEQ ID NO: 1683389 - RNA, 19 nt, Artificial Sequence
  Description of Artificial Sequence: Synthetic oligonucleotide
cuaauuauagaagcauuac

SEQ ID NO: 1683390 - RNA, 19 nt, Artificial Sequence
  Description of Artificial Sequence: Synthetic oligonucleotide
aggacauaaauguuaaauu

SEQ ID NO: 1683391 - RNA, 19 nt, Artificial Sequence
  Description of Artificial Sequence: Synthetic oligonucleotide
agugacgacuuucucuccg

SEQ ID NO: 1683392 - RNA, 19 nt, Artificial Sequence
  Description of Artificial Sequence: Synthetic oligonucleotide
cugaauagucuugauacag

SEQ ID NO: 1683393 - RNA, 19 nt, Artificial Sequence
  Description of Artificial Sequence: Synthetic oligonucleotide
auuagauaagaaauuugug

SEQ ID NO: 1683394 - RNA, 19 nt, Artificial Sequence
  Description of Artificial Sequence: Synthetic oligonucleotide
aauggacgauauuccugac

SEQ ID NO: 1683395 - RNA, 19 nt, Artificial Sequence
  Description of Artificial Sequence: Synthetic oligonucleotide
gaccuauuuauaguaacug

SEQ ID NO: 1683396 - RNA, 19 nt, Artificial Sequence
  Description of Artificial Sequence: Synthetic oligonucleotide
accaaauucuauuaacuua

SEQ ID NO: 1683397 - RNA, 19 nt, Artificial Sequence
  Description of Artificial Sequence: Synthetic oligonucleotide
uggaauucuuaagugacga

SEQ ID NO: 1683398 - RNA, 19 nt, Artificial Sequence
  Description of Artificial Sequence: Synthetic oligonucleotide
ugauaguugaugguuuuca

SEQ ID NO: 1683399 - RNA, 19 nt, Artificial Sequence
  Description of Artificial Sequence: Synthetic oligonucleotide
accuauuuauaguaacugu

SEQ ID NO: 1683400 - RNA, 19 nt, Artificial Sequence
  Description of Artificial Sequence: Synthetic oligonucleotide
auuuauaguaacuguuuua

SEQ ID NO: 1683401 - RNA, 19 nt, Artificial Sequence
  Description of Artificial Sequence: Synthetic oligonucleotide
uuccugacgaacuaauuau

SEQ ID NO: 1683402 - RNA, 19 nt, Artificial Sequence
  Description of Artificial Sequence: Synthetic oligonucleotide
uggggcuauagcccaaggg

SEQ ID NO: 1683403 - RNA, 19 nt, Artificial Sequence
  Description of Artificial Sequence: Synthetic oligonucleotide
acgacuuucucuccguaag

SEQ ID NO: 1683404 - RNA, 19 nt, Artificial Sequence
  Description of Artificial Sequence: Synthetic oligonucleotide
guaguuguuucaguugugg

SEQ ID NO: 1683405 - RNA, 19 nt, Artificial Sequence
  Description of Artificial Sequence: Synthetic oligonucleotide
uucaauggacgauauuccu

SEQ ID NO: 1683406 - RNA, 19 nt, Artificial Sequence
  Description of Artificial Sequence: Synthetic oligonucleotide
caaguaaucuguuaccaga

SEQ ID NO: 1683407 - RNA, 19 nt, Artificial Sequence
  Description of Artificial Sequence: Synthetic oligonucleotide
guaagguggucauauuuug

SEQ ID NO: 1683408 - RNA, 19 nt, Artificial Sequence
  Description of Artificial Sequence: Synthetic oligonucleotide
uuacauggggugcuggaga

SEQ ID NO: 1683409 - RNA, 19 nt, Artificial Sequence
  Description of Artificial Sequence: Synthetic oligonucleotide
aagugacgacuuucucucc

SEQ ID NO: 1683410 - RNA, 19 nt, Artificial Sequence
  Description of Artificial Sequence: Synthetic oligonucleotide
ugaggcuaccauuugccug

SEQ ID NO: 1683411 - RNA, 19 nt, Artificial Sequence
  Description of Artificial Sequence: Synthetic oligonucleotide
caaggguagaauacuuacc

SEQ ID NO: 1683412 - RNA, 19 nt, Artificial Sequence
  Description of Artificial Sequence: Synthetic oligonucleotide
gagucuguggcuucacugc

SEQ ID NO: 1683413 - RNA, 19 nt, Artificial Sequence
  Description of Artificial Sequence: Synthetic oligonucleotide
auuccugacgaacuaauua

SEQ ID NO: 1683414 - RNA, 19 nt, Artificial Sequence
  Description of Artificial Sequence: Synthetic oligonucleotide
agaauaacauccaacucca

SEQ ID NO: 1683415 - RNA, 19 nt, Artificial Sequence
  Description of Artificial Sequence: Synthetic oligonucleotide
uggaccuauuuauaguaac

SEQ ID NO: 1683416 - RNA, 19 nt, Artificial Sequence
  Description of Artificial Sequence: Synthetic oligonucleotide
caggagucuucaauggacg

SEQ ID NO: 1683417 - RNA, 19 nt, Artificial Sequence
  Description of Artificial Sequence: Synthetic oligonucleotide
gacgauauuccugacgaac

SEQ ID NO: 1683418 - RNA, 19 nt, Artificial Sequence
  Description of Artificial Sequence: Synthetic oligonucleotide
guuguuucaguugugguuc

SEQ ID NO: 1683419 - RNA, 19 nt, Artificial Sequence
  Description of Artificial Sequence: Synthetic oligonucleotide
aauagucuugauacagcug

SEQ ID NO: 1683420 - RNA, 19 nt, Artificial Sequence
  Description of Artificial Sequence: Synthetic oligonucleotide
gaauagucuugauacagcu

SEQ ID NO: 1683421 - RNA, 19 nt, Artificial Sequence
  Description of Artificial Sequence: Synthetic oligonucleotide
uacauggggugcuggagag

SEQ ID NO: 1683422 - RNA, 19 nt, Artificial Sequence
  Description of Artificial Sequence: Synthetic oligonucleotide
agcuugacuacaugguuca

SEQ ID NO: 1683423 - RNA, 19 nt, Artificial Sequence
  Description of Artificial Sequence: Synthetic oligonucleotide
uuauaguaacuguuuuauc

SEQ ID NO: 1683424 - RNA, 19 nt, Artificial Sequence
  Description of Artificial Sequence: Synthetic oligonucleotide
gaggcuaccauuugccuga

SEQ ID NO: 1683425 - RNA, 19 nt, Artificial Sequence
  Description of Artificial Sequence: Synthetic oligonucleotide
caauggacgauauuccuga

SEQ ID NO: 1683426 - RNA, 19 nt, Artificial Sequence
  Description of Artificial Sequence: Synthetic oligonucleotide
uuacauaaugaggcuacca

SEQ ID NO: 1683427 - RNA, 19 nt, Artificial Sequence
  Description of Artificial Sequence: Synthetic oligonucleotide
uuuucugaugcuggcuggg

SEQ ID NO: 1683428 - RNA, 19 nt, Artificial Sequence
  Description of Artificial Sequence: Synthetic oligonucleotide
auaaugaggcuaccauuug

SEQ ID NO: 1683429 - RNA, 19 nt, Artificial Sequence
  Description of Artificial Sequence: Synthetic oligonucleotide
uguaguuguuucaguugug

SEQ ID NO: 1683430 - RNA, 19 nt, Artificial Sequence
  Description of Artificial Sequence: Synthetic oligonucleotide
ucuugauacagcuguuuua

SEQ ID NO: 1683431 - RNA, 19 nt, Artificial Sequence
  Description of Artificial Sequence: Synthetic oligonucleotide
auucgcugaugcugcagac

SEQ ID NO: 1683432 - RNA, 19 nt, Artificial Sequence
  Description of Artificial Sequence: Synthetic oligonucleotide
gaauucuuaagugacgacu

SEQ ID NO: 1683433 - RNA, 19 nt, Artificial Sequence
  Description of Artificial Sequence: Synthetic oligonucleotide
acuaauuauagaagcauua

SEQ ID NO: 1683434 - RNA, 19 nt, Artificial Sequence
  Description of Artificial Sequence: Synthetic oligonucleotide
ucugccgggagacagccuc

SEQ ID NO: 1683435 - RNA, 19 nt, Artificial Sequence
  Description of Artificial Sequence: Synthetic oligonucleotide
ugguucuaauugaagcagu

SEQ ID NO: 1683436 - RNA, 19 nt, Artificial Sequence
  Description of Artificial Sequence: Synthetic oligonucleotide
gugguucuaauugaagcag

SEQ ID NO: 1683437 - RNA, 19 nt, Artificial Sequence
  Description of Artificial Sequence: Synthetic oligonucleotide
gacaggacuuacauaauga

SEQ ID NO: 1683438 - RNA, 19 nt, Artificial Sequence
  Description of Artificial Sequence: Synthetic oligonucleotide
caaacguugccguuucuuc

SEQ ID NO: 1683439 - RNA, 19 nt, Artificial Sequence
  Description of Artificial Sequence: Synthetic oligonucleotide
agcacuguaacaaaccaaa

SEQ ID NO: 1683440 - RNA, 19 nt, Artificial Sequence
  Description of Artificial Sequence: Synthetic oligonucleotide
ucuacaacagaggguugag

SEQ ID NO: 1683441 - RNA, 19 nt, Artificial Sequence
  Description of Artificial Sequence: Synthetic oligonucleotide
cuaauugaagcaguucauc

SEQ ID NO: 1683442 - RNA, 19 nt, Artificial Sequence
  Description of Artificial Sequence: Synthetic oligonucleotide
ggugaaaccagcaacucac

SEQ ID NO: 1683443 - RNA, 19 nt, Artificial Sequence
  Description of Artificial Sequence: Synthetic oligonucleotide
uaaauuagggcuggggcua

SEQ ID NO: 1683444 - RNA, 19 nt, Artificial Sequence
  Description of Artificial Sequence: Synthetic oligonucleotide
uacgucucuuuccuuccag

SEQ ID NO: 1683445 - RNA, 19 nt, Artificial Sequence
  Description of Artificial Sequence: Synthetic oligonucleotide
uacuuaccuaucaugugua

SEQ ID NO: 1683446 - RNA, 19 nt, Artificial Sequence
  Description of Artificial Sequence: Synthetic oligonucleotide
caugaugcugcuacgucuc

SEQ ID NO: 1683447 - RNA, 19 nt, Artificial Sequence
  Description of Artificial Sequence: Synthetic oligonucleotide
acuuaccuaucauguguag

SEQ ID NO: 1683448 - RNA, 19 nt, Artificial Sequence
  Description of Artificial Sequence: Synthetic oligonucleotide
ugcuacgucucuuuccuuc

SEQ ID NO: 1683449 - RNA, 19 nt, Artificial Sequence
  Description of Artificial Sequence: Synthetic oligonucleotide
cuggacuucaaucaaacgu

SEQ ID NO: 1683450 - RNA, 19 nt, Artificial Sequence
  Description of Artificial Sequence: Synthetic oligonucleotide
uaguuguuucaguuguggu

SEQ ID NO: 1683451 - RNA, 19 nt, Artificial Sequence
  Description of Artificial Sequence: Synthetic oligonucleotide
ccaucaaguaaucuguuac

SEQ ID NO: 1683452 - RNA, 19 nt, Artificial Sequence
  Description of Artificial Sequence: Synthetic oligonucleotide
uucaguugugguucuaauu

SEQ ID NO: 1683453 - RNA, 19 nt, Artificial Sequence
  Description of Artificial Sequence: Synthetic oligonucleotide
uucuuaagugacgacuuuc

SEQ ID NO: 1683454 - RNA, 19 nt, Artificial Sequence
  Description of Artificial Sequence: Synthetic oligonucleotide
ggugcugucgagcacuugc

SEQ ID NO: 1683455 - RNA, 19 nt, Artificial Sequence
  Description of Artificial Sequence: Synthetic oligonucleotide
guggaccccacuuuccucc

SEQ ID NO: 1683456 - RNA, 19 nt, Artificial Sequence
  Description of Artificial Sequence: Synthetic oligonucleotide
aggugaaaccagcaacuca

SEQ ID NO: 1683457 - RNA, 19 nt, Artificial Sequence
  Description of Artificial Sequence: Synthetic oligonucleotide
agcaguucauccuggacuu

SEQ ID NO: 1683458 - RNA, 19 nt, Artificial Sequence
  Description of Artificial Sequence: Synthetic oligonucleotide
cagcuugacuacaugguuc

SEQ ID NO: 1683459 - RNA, 19 nt, Artificial Sequence
  Description of Artificial Sequence: Synthetic oligonucleotide
ucacuuaguuuauucucau

SEQ ID NO: 1683460 - RNA, 19 nt, Artificial Sequence
  Description of Artificial Sequence: Synthetic oligonucleotide
gacuucaaucaaacguugc

SEQ ID NO: 1683461 - RNA, 19 nt, Artificial Sequence
  Description of Artificial Sequence: Synthetic oligonucleotide
cuuaagugacgacuuucuc

SEQ ID NO: 1683462 - RNA, 19 nt, Artificial Sequence
  Description of Artificial Sequence: Synthetic oligonucleotide
gaacuaauuauagaagcau

SEQ ID NO: 1683463 - RNA, 19 nt, Artificial Sequence
  Description of Artificial Sequence: Synthetic oligonucleotide
auguguagggcccugcauu

SEQ ID NO: 1683464 - RNA, 19 nt, Artificial Sequence
  Description of Artificial Sequence: Synthetic oligonucleotide
ccuaucauguguagggccc

SEQ ID NO: 1683465 - RNA, 19 nt, Artificial Sequence
  Description of Artificial Sequence: Synthetic oligonucleotide
uauuccugacgaacuaauu

SEQ ID NO: 1683466 - RNA, 19 nt, Artificial Sequence
  Description of Artificial Sequence: Synthetic oligonucleotide
cuuauuauuggaccuauuu

SEQ ID NO: 1683467 - RNA, 19 nt, Artificial Sequence
  Description of Artificial Sequence: Synthetic oligonucleotide
uccugacgaacuaauuaua

SEQ ID NO: 1683468 - RNA, 19 nt, Artificial Sequence
  Description of Artificial Sequence: Synthetic oligonucleotide
uguccucucaggagugaca

SEQ ID NO: 1683469 - RNA, 19 nt, Artificial Sequence
  Description of Artificial Sequence: Synthetic oligonucleotide
ccaaggguagaauacuuac

SEQ ID NO: 1683470 - RNA, 19 nt, Artificial Sequence
  Description of Artificial Sequence: Synthetic oligonucleotide
cuuacauaaugaggcuacc

SEQ ID NO: 1683471 - RNA, 19 nt, Artificial Sequence
  Description of Artificial Sequence: Synthetic oligonucleotide
cccaccaucaaguaaucug

SEQ ID NO: 1683472 - RNA, 19 nt, Artificial Sequence
  Description of Artificial Sequence: Synthetic oligonucleotide
auggaguuguccuuuuaua

SEQ ID NO: 1683473 - RNA, 19 nt, Artificial Sequence
  Description of Artificial Sequence: Synthetic oligonucleotide
acgauauuccugacgaacu

SEQ ID NO: 1683474 - RNA, 19 nt, Artificial Sequence
  Description of Artificial Sequence: Synthetic oligonucleotide
uaccuaucauguguagggc

SEQ ID NO: 1683475 - RNA, 19 nt, Artificial Sequence
  Description of Artificial Sequence: Synthetic oligonucleotide
aucauguguagggcccugc

SEQ ID NO: 1683476 - RNA, 19 nt, Artificial Sequence
  Description of Artificial Sequence: Synthetic oligonucleotide
gauauuccugacgaacuaa

SEQ ID NO: 1683477 - RNA, 19 nt, Artificial Sequence
  Description of Artificial Sequence: Synthetic oligonucleotide
ucaaucaaacguugccguu

SEQ ID NO: 1683478 - RNA, 19 nt, Artificial Sequence
  Description of Artificial Sequence: Synthetic oligonucleotide
augaggcuaccauuugccu

SEQ ID NO: 1683479 - RNA, 19 nt, Artificial Sequence
  Description of Artificial Sequence: Synthetic oligonucleotide
uguguagggcccugcauuu

SEQ ID NO: 1683480 - RNA, 19 nt, Artificial Sequence
  Description of Artificial Sequence: Synthetic oligonucleotide
uccuuacauuaucuucaga

SEQ ID NO: 1683481 - RNA, 19 nt, Artificial Sequence
  Description of Artificial Sequence: Synthetic oligonucleotide
auuagggcuggggcuauag

SEQ ID NO: 1683482 - RNA, 19 nt, Artificial Sequence
  Description of Artificial Sequence: Synthetic oligonucleotide
cagcaacucacugacuaag

SEQ ID NO: 1683483 - RNA, 19 nt, Artificial Sequence
  Description of Artificial Sequence: Synthetic oligonucleotide
accaucaaguaaucuguua

SEQ ID NO: 1683484 - RNA, 19 nt, Artificial Sequence
  Description of Artificial Sequence: Synthetic oligonucleotide
cuguaacaaaccaaauucu

SEQ ID NO: 1683485 - RNA, 19 nt, Artificial Sequence
  Description of Artificial Sequence: Synthetic oligonucleotide
guucuaauugaagcaguuc

SEQ ID NO: 1683486 - RNA, 19 nt, Artificial Sequence
  Description of Artificial Sequence: Synthetic oligonucleotide
accauuugccugaagccug

SEQ ID NO: 1683487 - RNA, 19 nt, Artificial Sequence
  Description of Artificial Sequence: Synthetic oligonucleotide
agaagaugcugaauucgcu

SEQ ID NO: 1683488 - RNA, 19 nt, Artificial Sequence
  Description of Artificial Sequence: Synthetic oligonucleotide
uguugacagcuugacuaca

SEQ ID NO: 1683489 - RNA, 19 nt, Artificial Sequence
  Description of Artificial Sequence: Synthetic oligonucleotide
cuuuaagcauucugaugga

SEQ ID NO: 1683490 - RNA, 19 nt, Artificial Sequence
  Description of Artificial Sequence: Synthetic oligonucleotide
aagcauuacagagcagcua

SEQ ID NO: 1683491 - RNA, 19 nt, Artificial Sequence
  Description of Artificial Sequence: Synthetic oligonucleotide
uucgcugaugcugcagaca

SEQ ID NO: 1683492 - RNA, 19 nt, Artificial Sequence
  Description of Artificial Sequence: Synthetic oligonucleotide
cuugacuacaugguucaga

SEQ ID NO: 1683493 - RNA, 19 nt, Artificial Sequence
  Description of Artificial Sequence: Synthetic oligonucleotide
gagucuucaauggacgaua

SEQ ID NO: 1683494 - RNA, 19 nt, Artificial Sequence
  Description of Artificial Sequence: Synthetic oligonucleotide
guaacaaaccaaauucuau

SEQ ID NO: 1683495 - RNA, 19 nt, Artificial Sequence
  Description of Artificial Sequence: Synthetic oligonucleotide
gacgacuuucucuccguaa

SEQ ID NO: 1683496 - RNA, 19 nt, Artificial Sequence
  Description of Artificial Sequence: Synthetic oligonucleotide
uaggugaaaccagcaacuc

SEQ ID NO: 1683497 - RNA, 19 nt, Artificial Sequence
  Description of Artificial Sequence: Synthetic oligonucleotide
aggguagaauacuuaccua

SEQ ID NO: 1683498 - RNA, 19 nt, Artificial Sequence
  Description of Artificial Sequence: Synthetic oligonucleotide
ggaauucuuaagugacgac

SEQ ID NO: 1683499 - RNA, 19 nt, Artificial Sequence
  Description of Artificial Sequence: Synthetic oligonucleotide
ugcugucgagcacuugcuc

SEQ ID NO: 1683500 - RNA, 19 nt, Artificial Sequence
  Description of Artificial Sequence: Synthetic oligonucleotide
guccucucaggagugacac

SEQ ID NO: 1683501 - RNA, 19 nt, Artificial Sequence
  Description of Artificial Sequence: Synthetic oligonucleotide
uguuaccagacagcuuuuc

SEQ ID NO: 1683502 - RNA, 19 nt, Artificial Sequence
  Description of Artificial Sequence: Synthetic oligonucleotide
auguuaaauuagggcuggg

SEQ ID NO: 1683503 - RNA, 19 nt, Artificial Sequence
  Description of Artificial Sequence: Synthetic oligonucleotide
gguagaauacuuaccuauc

SEQ ID NO: 1683504 - RNA, 19 nt, Artificial Sequence
  Description of Artificial Sequence: Synthetic oligonucleotide
uauagcccaaggguagaau

SEQ ID NO: 1683505 - RNA, 19 nt, Artificial Sequence
  Description of Artificial Sequence: Synthetic oligonucleotide
ggcuauagcccaaggguag

SEQ ID NO: 1683506 - RNA, 19 nt, Artificial Sequence
  Description of Artificial Sequence: Synthetic oligonucleotide
cagucuggugcugucgagc

SEQ ID NO: 1683507 - RNA, 19 nt, Artificial Sequence
  Description of Artificial Sequence: Synthetic oligonucleotide
gaaccguucuugcuucaaa

SEQ ID NO: 1683508 - RNA, 19 nt, Artificial Sequence
  Description of Artificial Sequence: Synthetic oligonucleotide
ccaaauucuauuaacuuau

SEQ ID NO: 1683509 - RNA, 19 nt, Artificial Sequence
  Description of Artificial Sequence: Synthetic oligonucleotide
gcuacgucucuuuccuucc

SEQ ID NO: 1683510 - RNA, 19 nt, Artificial Sequence
  Description of Artificial Sequence: Synthetic oligonucleotide
cugauaguugaugguuuuc

SEQ ID NO: 1683511 - RNA, 19 nt, Artificial Sequence
  Description of Artificial Sequence: Synthetic oligonucleotide
uggcuuuacauggggugcu

SEQ ID NO: 1683512 - RNA, 19 nt, Artificial Sequence
  Description of Artificial Sequence: Synthetic oligonucleotide
gcugaugcugcagacagga

SEQ ID NO: 1683513 - RNA, 19 nt, Artificial Sequence
  Description of Artificial Sequence: Synthetic oligonucleotide
uagggcccugcauuuaauu

SEQ ID NO: 1683514 - RNA, 19 nt, Artificial Sequence
  Description of Artificial Sequence: Synthetic oligonucleotide
aaauuagggcuggggcuau

SEQ ID NO: 1683515 - RNA, 19 nt, Artificial Sequence
  Description of Artificial Sequence: Synthetic oligonucleotide
ugacgacuuucucuccgua

SEQ ID NO: 1683516 - RNA, 19 nt, Artificial Sequence
  Description of Artificial Sequence: Synthetic oligonucleotide
gacuuucucuccguaaggu

SEQ ID NO: 1683517 - RNA, 19 nt, Artificial Sequence
  Description of Artificial Sequence: Synthetic oligonucleotide
ggacuucaaucaaacguug

SEQ ID NO: 1683518 - RNA, 19 nt, Artificial Sequence
  Description of Artificial Sequence: Synthetic oligonucleotide
agcaacucacugacuaaga

SEQ ID NO: 1683519 - RNA, 19 nt, Artificial Sequence
  Description of Artificial Sequence: Synthetic oligonucleotide
gcuaacuguggacaggacu

SEQ ID NO: 1683520 - RNA, 19 nt, Artificial Sequence
  Description of Artificial Sequence: Synthetic oligonucleotide
uccucucaggagugacaca

SEQ ID NO: 1683521 - RNA, 19 nt, Artificial Sequence
  Description of Artificial Sequence: Synthetic oligonucleotide
aucaaacguugccguuucu

SEQ ID NO: 1683522 - RNA, 19 nt, Artificial Sequence
  Description of Artificial Sequence: Synthetic oligonucleotide
gcaacucacugacuaagaa

SEQ ID NO: 1683523 - RNA, 19 nt, Artificial Sequence
  Description of Artificial Sequence: Synthetic oligonucleotide
gcagcuaacuguggacagg

SEQ ID NO: 1683524 - RNA, 19 nt, Artificial Sequence
  Description of Artificial Sequence: Synthetic oligonucleotide
aggcuagaugagucauacu

SEQ ID NO: 1683525 - RNA, 19 nt, Artificial Sequence
  Description of Artificial Sequence: Synthetic oligonucleotide
ugucgagcacuugcucucu

SEQ ID NO: 1683526 - RNA, 19 nt, Artificial Sequence
  Description of Artificial Sequence: Synthetic oligonucleotide
gcugcuacgucucuuuccu

SEQ ID NO: 1683527 - RNA, 19 nt, Artificial Sequence
  Description of Artificial Sequence: Synthetic oligonucleotide
uccguaagguggucauauu

SEQ ID NO: 1683528 - RNA, 19 nt, Artificial Sequence
  Description of Artificial Sequence: Synthetic oligonucleotide
gaaggcuagaugagucaua

SEQ ID NO: 1683529 - RNA, 19 nt, Artificial Sequence
  Description of Artificial Sequence: Synthetic oligonucleotide
auagagcuggaaggcuaga

SEQ ID NO: 1683530 - RNA, 19 nt, Artificial Sequence
  Description of Artificial Sequence: Synthetic oligonucleotide
ggaguuguccuuuuauauu

SEQ ID NO: 1683531 - RNA, 19 nt, Artificial Sequence
  Description of Artificial Sequence: Synthetic oligonucleotide
ggaccuauuuauaguaacu

SEQ ID NO: 1683532 - RNA, 19 nt, Artificial Sequence
  Description of Artificial Sequence: Synthetic oligonucleotide
ccaccaucaaguaaucugu

SEQ ID NO: 1683533 - RNA, 19 nt, Artificial Sequence
  Description of Artificial Sequence: Synthetic oligonucleotide
gggagacagccucacuuuc

SEQ ID NO: 1683534 - RNA, 19 nt, Artificial Sequence
  Description of Artificial Sequence: Synthetic oligonucleotide
auccuggacuucaaucaaa

SEQ ID NO: 1683535 - RNA, 19 nt, Artificial Sequence
  Description of Artificial Sequence: Synthetic oligonucleotide
cgucucuuuccuuccagac

SEQ ID NO: 1683536 - RNA, 19 nt, Artificial Sequence
  Description of Artificial Sequence: Synthetic oligonucleotide
uucugccgggagacagccu

SEQ ID NO: 1683537 - RNA, 19 nt, Artificial Sequence
  Description of Artificial Sequence: Synthetic oligonucleotide
cgacuuucucuccguaagg

SEQ ID NO: 1683538 - RNA, 19 nt, Artificial Sequence
  Description of Artificial Sequence: Synthetic oligonucleotide
cuacgucucuuuccuucca

SEQ ID NO: 1683539 - RNA, 19 nt, Artificial Sequence
  Description of Artificial Sequence: Synthetic oligonucleotide
acccaccaucaaguaaucu

SEQ ID NO: 1683540 - RNA, 19 nt, Artificial Sequence
  Description of Artificial Sequence: Synthetic oligonucleotide
acuuuccuccuuacauuau

SEQ ID NO: 1683541 - RNA, 19 nt, Artificial Sequence
  Description of Artificial Sequence: Synthetic oligonucleotide
ccguucuugcuucaaacaa

SEQ ID NO: 1683542 - RNA, 19 nt, Artificial Sequence
  Description of Artificial Sequence: Synthetic oligonucleotide
ucuccguaagguggucaua

SEQ ID NO: 1683543 - RNA, 19 nt, Artificial Sequence
  Description of Artificial Sequence: Synthetic oligonucleotide
gugacgacuuucucuccgu

SEQ ID NO: 1683544 - RNA, 19 nt, Artificial Sequence
  Description of Artificial Sequence: Synthetic oligonucleotide
guugacagcuugacuacau

SEQ ID NO: 1683545 - RNA, 19 nt, Artificial Sequence
  Description of Artificial Sequence: Synthetic oligonucleotide
cuauagcccaaggguagaa

SEQ ID NO: 1683546 - RNA, 19 nt, Artificial Sequence
  Description of Artificial Sequence: Synthetic oligonucleotide
aauuagggcuggggcuaua

SEQ ID NO: 1683547 - RNA, 19 nt, Artificial Sequence
  Description of Artificial Sequence: Synthetic oligonucleotide
caaucaaacguugccguuu

SEQ ID NO: 1683548 - RNA, 19 nt, Artificial Sequence
  Description of Artificial Sequence: Synthetic oligonucleotide
gacuggcuuuacauggggu

SEQ ID NO: 1683549 - RNA, 19 nt, Artificial Sequence
  Description of Artificial Sequence: Synthetic oligonucleotide
gucgagcacuugcucucuc

SEQ ID NO: 1683550 - RNA, 19 nt, Artificial Sequence
  Description of Artificial Sequence: Synthetic oligonucleotide
gggcuauagcccaagggua

SEQ ID NO: 1683551 - RNA, 19 nt, Artificial Sequence
  Description of Artificial Sequence: Synthetic oligonucleotide
uggugcugucgagcacuug

SEQ ID NO: 1683552 - RNA, 19 nt, Artificial Sequence
  Description of Artificial Sequence: Synthetic oligonucleotide
cucuccguaagguggucau

SEQ ID NO: 1683553 - RNA, 19 nt, Artificial Sequence
  Description of Artificial Sequence: Synthetic oligonucleotide
ggaguucacuccugaugaa

SEQ ID NO: 1683554 - RNA, 19 nt, Artificial Sequence
  Description of Artificial Sequence: Synthetic oligonucleotide
gcuauagcccaaggguaga

SEQ ID NO: 1683555 - RNA, 19 nt, Artificial Sequence
  Description of Artificial Sequence: Synthetic oligonucleotide
cagcugauaguugaugguu

SEQ ID NO: 1683556 - RNA, 19 nt, Artificial Sequence
  Description of Artificial Sequence: Synthetic oligonucleotide
gugaaaccagcaacucacu

SEQ ID NO: 1683557 - RNA, 19 nt, Artificial Sequence
  Description of Artificial Sequence: Synthetic oligonucleotide
cuacaacagaggguugagu

SEQ ID NO: 1683558 - RNA, 19 nt, Artificial Sequence
  Description of Artificial Sequence: Synthetic oligonucleotide
ggaaggcuagaugagucau

SEQ ID NO: 1683559 - RNA, 19 nt, Artificial Sequence
  Description of Artificial Sequence: Synthetic oligonucleotide
ggacgauauuccugacgaa

SEQ ID NO: 1683560 - RNA, 19 nt, Artificial Sequence
  Description of Artificial Sequence: Synthetic oligonucleotide
gcuugacuacaugguucag

SEQ ID NO: 1683561 - RNA, 19 nt, Artificial Sequence
  Description of Artificial Sequence: Synthetic oligonucleotide
cuaucauguguagggcccu

SEQ ID NO: 1683562 - RNA, 19 nt, Artificial Sequence
  Description of Artificial Sequence: Synthetic oligonucleotide
gaauaacauccaacuccau

SEQ ID NO: 1683563 - RNA, 19 nt, Artificial Sequence
  Description of Artificial Sequence: Synthetic oligonucleotide
cugccgggagacagccuca

SEQ ID NO: 1683564 - RNA, 19 nt, Artificial Sequence
  Description of Artificial Sequence: Synthetic oligonucleotide
ccaggaagguuuucucaaa

SEQ ID NO: 1683565 - RNA, 19 nt, Artificial Sequence
  Description of Artificial Sequence: Synthetic oligonucleotide
ggcuaccauuugccugaag

SEQ ID NO: 1683566 - RNA, 19 nt, Artificial Sequence
  Description of Artificial Sequence: Synthetic oligonucleotide
caccaucaaguaaucuguu

SEQ ID NO: 1683567 - RNA, 19 nt, Artificial Sequence
  Description of Artificial Sequence: Synthetic oligonucleotide
gugcugucgagcacuugcu

SEQ ID NO: 1683568 - RNA, 19 nt, Artificial Sequence
  Description of Artificial Sequence: Synthetic oligonucleotide
cguaagguggucauauuuu

SEQ ID NO: 1683569 - RNA, 19 nt, Artificial Sequence
  Description of Artificial Sequence: Synthetic oligonucleotide
ccguaagguggucauauuu

SEQ ID NO: 1683570 - RNA, 19 nt, Artificial Sequence
  Description of Artificial Sequence: Synthetic oligonucleotide
cuguuaccagacagcuuuu

SEQ ID NO: 1683571 - RNA, 19 nt, Artificial Sequence
  Description of Artificial Sequence: Synthetic oligonucleotide
aggcuaccauuugccugaa

SEQ ID NO: 1683572 - RNA, 19 nt, Artificial Sequence
  Description of Artificial Sequence: Synthetic oligonucleotide
ccgggagacagccucacuu

SEQ ID NO: 1683573 - RNA, 19 nt, Artificial Sequence
  Description of Artificial Sequence: Synthetic oligonucleotide
ggacuucuuuaagcauucu

SEQ ID NO: 1683574 - RNA, 19 nt, Artificial Sequence
  Description of Artificial Sequence: Synthetic oligonucleotide
cugcuacgucucuuuccuu

SEQ ID NO: 1683575 - RNA, 19 nt, Artificial Sequence
  Description of Artificial Sequence: Synthetic oligonucleotide
gccgggagacagccucacu

SEQ ID NO: 1683576 - RNA, 19 nt, Artificial Sequence
  Description of Artificial Sequence: Synthetic oligonucleotide
aauugguucacuaugaucc

SEQ ID NO: 1683577 - RNA, 19 nt, Artificial Sequence
  Description of Artificial Sequence: Synthetic oligonucleotide
cauauaaacgcugagaggg

SEQ ID NO: 1683578 - RNA, 19 nt, Artificial Sequence
  Description of Artificial Sequence: Synthetic oligonucleotide
auuaacaugacucggcaac

SEQ ID NO: 1683579 - RNA, 19 nt, Artificial Sequence
  Description of Artificial Sequence: Synthetic oligonucleotide
uuuauuaagcucuuccagg

SEQ ID NO: 1683580 - RNA, 19 nt, Artificial Sequence
  Description of Artificial Sequence: Synthetic oligonucleotide
gacauauaaacgcugagag

SEQ ID NO: 1683581 - RNA, 19 nt, Artificial Sequence
  Description of Artificial Sequence: Synthetic oligonucleotide
acagcggacauauaaacgc

SEQ ID NO: 1683582 - RNA, 19 nt, Artificial Sequence
  Description of Artificial Sequence: Synthetic oligonucleotide
ucuccaauuaacaugacuc

SEQ ID NO: 1683583 - RNA, 19 nt, Artificial Sequence
  Description of Artificial Sequence: Synthetic oligonucleotide
uucauaucgaucauugcug

SEQ ID NO: 1683584 - RNA, 19 nt, Artificial Sequence
  Description of Artificial Sequence: Synthetic oligonucleotide
agcauagccacucucuacc

SEQ ID NO: 1683585 - RNA, 19 nt, Artificial Sequence
  Description of Artificial Sequence: Synthetic oligonucleotide
uucuguucaagacagggca

SEQ ID NO: 1683586 - RNA, 19 nt, Artificial Sequence
  Description of Artificial Sequence: Synthetic oligonucleotide
uuuaaaaucuucugguagu

SEQ ID NO: 1683587 - RNA, 19 nt, Artificial Sequence
  Description of Artificial Sequence: Synthetic oligonucleotide
ucugguaguaccauugugu

SEQ ID NO: 1683588 - RNA, 19 nt, Artificial Sequence
  Description of Artificial Sequence: Synthetic oligonucleotide
cauugugucaaucuccucc

SEQ ID NO: 1683589 - RNA, 19 nt, Artificial Sequence
  Description of Artificial Sequence: Synthetic oligonucleotide
ugguggaucggucauaccc

SEQ ID NO: 1683590 - RNA, 19 nt, Artificial Sequence
  Description of Artificial Sequence: Synthetic oligonucleotide
acuaugauccugcuguggg

SEQ ID NO: 1683591 - RNA, 19 nt, Artificial Sequence
  Description of Artificial Sequence: Synthetic oligonucleotide
cuuuauuaagcucuuccag

SEQ ID NO: 1683592 - RNA, 19 nt, Artificial Sequence
  Description of Artificial Sequence: Synthetic oligonucleotide
guuuguucaccgcacagcg

SEQ ID NO: 1683593 - RNA, 19 nt, Artificial Sequence
  Description of Artificial Sequence: Synthetic oligonucleotide
uagggaaagugacauuugg

SEQ ID NO: 1683594 - RNA, 19 nt, Artificial Sequence
  Description of Artificial Sequence: Synthetic oligonucleotide
ucuacagauaccuccaggu

SEQ ID NO: 1683595 - RNA, 19 nt, Artificial Sequence
  Description of Artificial Sequence: Synthetic oligonucleotide
ucuuuauuaagcucuucca

SEQ ID NO: 1683596 - RNA, 19 nt, Artificial Sequence
  Description of Artificial Sequence: Synthetic oligonucleotide
acuucauucaucaagggca

SEQ ID NO: 1683597 - RNA, 19 nt, Artificial Sequence
  Description of Artificial Sequence: Synthetic oligonucleotide
gaacucuacuucuagguug

SEQ ID NO: 1683598 - RNA, 19 nt, Artificial Sequence
  Description of Artificial Sequence: Synthetic oligonucleotide
uuauuaagcucuuccaggu

SEQ ID NO: 1683599 - RNA, 19 nt, Artificial Sequence
  Description of Artificial Sequence: Synthetic oligonucleotide
auaucgaucauugcugugg

SEQ ID NO: 1683600 - RNA, 19 nt, Artificial Sequence
  Description of Artificial Sequence: Synthetic oligonucleotide
aguaccauugugucaaucu

SEQ ID NO: 1683601 - RNA, 19 nt, Artificial Sequence
  Description of Artificial Sequence: Synthetic oligonucleotide
uuuacuuuccuaucaaguu

SEQ ID NO: 1683602 - RNA, 19 nt, Artificial Sequence
  Description of Artificial Sequence: Synthetic oligonucleotide
ucuacuucuagguugcaaa

SEQ ID NO: 1683603 - RNA, 19 nt, Artificial Sequence
  Description of Artificial Sequence: Synthetic oligonucleotide
uaucaaguuuguaaagaac

SEQ ID NO: 1683604 - RNA, 19 nt, Artificial Sequence
  Description of Artificial Sequence: Synthetic oligonucleotide
uccaauuaacaugacucgg

SEQ ID NO: 1683605 - RNA, 19 nt, Artificial Sequence
  Description of Artificial Sequence: Synthetic oligonucleotide
uaucgaucauugcuguggg

SEQ ID NO: 1683606 - RNA, 19 nt, Artificial Sequence
  Description of Artificial Sequence: Synthetic oligonucleotide
cuccaauuaacaugacucg

SEQ ID NO: 1683607 - RNA, 19 nt, Artificial Sequence
  Description of Artificial Sequence: Synthetic oligonucleotide
gucaaugucguugcuaugg

SEQ ID NO: 1683608 - RNA, 19 nt, Artificial Sequence
  Description of Artificial Sequence: Synthetic oligonucleotide
uaccauugugucaaucucc

SEQ ID NO: 1683609 - RNA, 19 nt, Artificial Sequence
  Description of Artificial Sequence: Synthetic oligonucleotide
uuguucaccgcacagcggu

SEQ ID NO: 1683610 - RNA, 19 nt, Artificial Sequence
  Description of Artificial Sequence: Synthetic oligonucleotide
cugaaaagguaccggaacc

SEQ ID NO: 1683611 - RNA, 19 nt, Artificial Sequence
  Description of Artificial Sequence: Synthetic oligonucleotide
ugacauuuggccaguugcc

SEQ ID NO: 1683612 - RNA, 19 nt, Artificial Sequence
  Description of Artificial Sequence: Synthetic oligonucleotide
ugagaaagcaggaacucua

SEQ ID NO: 1683613 - RNA, 19 nt, Artificial Sequence
  Description of Artificial Sequence: Synthetic oligonucleotide
uuacuuuccuaucaaguuu

SEQ ID NO: 1683614 - RNA, 19 nt, Artificial Sequence
  Description of Artificial Sequence: Synthetic oligonucleotide
uaggucuuggacaauuggu

SEQ ID NO: 1683615 - RNA, 19 nt, Artificial Sequence
  Description of Artificial Sequence: Synthetic oligonucleotide
gguguuuccauuuccuccg

SEQ ID NO: 1683616 - RNA, 19 nt, Artificial Sequence
  Description of Artificial Sequence: Synthetic oligonucleotide
ucgaucauugcugugggug

SEQ ID NO: 1683617 - RNA, 19 nt, Artificial Sequence
  Description of Artificial Sequence: Synthetic oligonucleotide
ugguucacuaugauccugc

SEQ ID NO: 1683618 - RNA, 19 nt, Artificial Sequence
  Description of Artificial Sequence: Synthetic oligonucleotide
guaacaagaaguucauauc

SEQ ID NO: 1683619 - RNA, 19 nt, Artificial Sequence
  Description of Artificial Sequence: Synthetic oligonucleotide
aauuaacaugacucggcaa

SEQ ID NO: 1683620 - RNA, 19 nt, Artificial Sequence
  Description of Artificial Sequence: Synthetic oligonucleotide
uucuccaauuaacaugacu

SEQ ID NO: 1683621 - RNA, 19 nt, Artificial Sequence
  Description of Artificial Sequence: Synthetic oligonucleotide
ucggcaaccauuuuguauu

SEQ ID NO: 1683622 - RNA, 19 nt, Artificial Sequence
  Description of Artificial Sequence: Synthetic oligonucleotide
uauaaacgcugagagggag

SEQ ID NO: 1683623 - RNA, 19 nt, Artificial Sequence
  Description of Artificial Sequence: Synthetic oligonucleotide
agugcagucgcugugucuc

SEQ ID NO: 1683624 - RNA, 19 nt, Artificial Sequence
  Description of Artificial Sequence: Synthetic oligonucleotide
gacggucacauugagcacg

SEQ ID NO: 1683625 - RNA, 19 nt, Artificial Sequence
  Description of Artificial Sequence: Synthetic oligonucleotide
cacagcggacauauaaacg

SEQ ID NO: 1683626 - RNA, 19 nt, Artificial Sequence
  Description of Artificial Sequence: Synthetic oligonucleotide
cacuucauucaucaagggc

SEQ ID NO: 1683627 - RNA, 19 nt, Artificial Sequence
  Description of Artificial Sequence: Synthetic oligonucleotide
cuucaacuuccuuagccag

SEQ ID NO: 1683628 - RNA, 19 nt, Artificial Sequence
  Description of Artificial Sequence: Synthetic oligonucleotide
uuuguucaccgcacagcgg

SEQ ID NO: 1683629 - RNA, 19 nt, Artificial Sequence
  Description of Artificial Sequence: Synthetic oligonucleotide
uauuaagcucuuccaggug

SEQ ID NO: 1683630 - RNA, 19 nt, Artificial Sequence
  Description of Artificial Sequence: Synthetic oligonucleotide
cuucuguucaagacagggc

SEQ ID NO: 1683631 - RNA, 19 nt, Artificial Sequence
  Description of Artificial Sequence: Synthetic oligonucleotide
ucauaucgaucauugcugu

SEQ ID NO: 1683632 - RNA, 19 nt, Artificial Sequence
  Description of Artificial Sequence: Synthetic oligonucleotide
cuaugggacaguuuccuuc

SEQ ID NO: 1683633 - RNA, 19 nt, Artificial Sequence
  Description of Artificial Sequence: Synthetic oligonucleotide
uaaacgcugagagggaggc

SEQ ID NO: 1683634 - RNA, 19 nt, Artificial Sequence
  Description of Artificial Sequence: Synthetic oligonucleotide
uucugguaguaccauugug

SEQ ID NO: 1683635 - RNA, 19 nt, Artificial Sequence
  Description of Artificial Sequence: Synthetic oligonucleotide
ugggacgccaacuggcgcg

SEQ ID NO: 1683636 - RNA, 19 nt, Artificial Sequence
  Description of Artificial Sequence: Synthetic oligonucleotide
uaccgcacuucauucauca

SEQ ID NO: 1683637 - RNA, 19 nt, Artificial Sequence
  Description of Artificial Sequence: Synthetic oligonucleotide
agucugaagagugcagucg

SEQ ID NO: 1683638 - RNA, 19 nt, Artificial Sequence
  Description of Artificial Sequence: Synthetic oligonucleotide
caagaaguucauaucgauc

SEQ ID NO: 1683639 - RNA, 19 nt, Artificial Sequence
  Description of Artificial Sequence: Synthetic oligonucleotide
ucacauugagcacgggugu

SEQ ID NO: 1683640 - RNA, 19 nt, Artificial Sequence
  Description of Artificial Sequence: Synthetic oligonucleotide
aguagggaaagugacauuu

SEQ ID NO: 1683641 - RNA, 19 nt, Artificial Sequence
  Description of Artificial Sequence: Synthetic oligonucleotide
auagccacucucuaccgca

SEQ ID NO: 1683642 - RNA, 19 nt, Artificial Sequence
  Description of Artificial Sequence: Synthetic oligonucleotide
uucugaaaagguaccggaa

SEQ ID NO: 1683643 - RNA, 19 nt, Artificial Sequence
  Description of Artificial Sequence: Synthetic oligonucleotide
cuuaaauaugagcuucuga

SEQ ID NO: 1683644 - RNA, 19 nt, Artificial Sequence
  Description of Artificial Sequence: Synthetic oligonucleotide
caauugguucacuaugauc

SEQ ID NO: 1683645 - RNA, 19 nt, Artificial Sequence
  Description of Artificial Sequence: Synthetic oligonucleotide
gaucggucauacccgcugg

SEQ ID NO: 1683646 - RNA, 19 nt, Artificial Sequence
  Description of Artificial Sequence: Synthetic oligonucleotide
uggacaauugguucacuau

SEQ ID NO: 1683647 - RNA, 19 nt, Artificial Sequence
  Description of Artificial Sequence: Synthetic oligonucleotide
gucugaagagugcagucgc

SEQ ID NO: 1683648 - RNA, 19 nt, Artificial Sequence
  Description of Artificial Sequence: Synthetic oligonucleotide
ugcacagcggacauauaaa

SEQ ID NO: 1683649 - RNA, 19 nt, Artificial Sequence
  Description of Artificial Sequence: Synthetic oligonucleotide
agaaccgauggagaaguag

SEQ ID NO: 1683650 - RNA, 19 nt, Artificial Sequence
  Description of Artificial Sequence: Synthetic oligonucleotide
caaagucugaagagugcag

SEQ ID NO: 1683651 - RNA, 19 nt, Artificial Sequence
  Description of Artificial Sequence: Synthetic oligonucleotide
ggacaauugguucacuaug

SEQ ID NO: 1683652 - RNA, 19 nt, Artificial Sequence
  Description of Artificial Sequence: Synthetic oligonucleotide
cugguaguaccauuguguc

SEQ ID NO: 1683653 - RNA, 19 nt, Artificial Sequence
  Description of Artificial Sequence: Synthetic oligonucleotide
uucauccgcggccugcaag

SEQ ID NO: 1683654 - RNA, 19 nt, Artificial Sequence
  Description of Artificial Sequence: Synthetic oligonucleotide
ucccuuaaauaugagcuuc

SEQ ID NO: 1683655 - RNA, 19 nt, Artificial Sequence
  Description of Artificial Sequence: Synthetic oligonucleotide
ccaauuaacaugacucggc

SEQ ID NO: 1683656 - RNA, 19 nt, Artificial Sequence
  Description of Artificial Sequence: Synthetic oligonucleotide
guaaagaaccucugcuuca

SEQ ID NO: 1683657 - RNA, 19 nt, Artificial Sequence
  Description of Artificial Sequence: Synthetic oligonucleotide
cucagcuaggucuuggaca

SEQ ID NO: 1683658 - RNA, 19 nt, Artificial Sequence
  Description of Artificial Sequence: Synthetic oligonucleotide
gguaccggaaccccugugg

SEQ ID NO: 1683659 - RNA, 19 nt, Artificial Sequence
  Description of Artificial Sequence: Synthetic oligonucleotide
aacaugacucggcaaccau

SEQ ID NO: 1683660 - RNA, 19 nt, Artificial Sequence
  Description of Artificial Sequence: Synthetic oligonucleotide
cuuuacuuuccuaucaagu

SEQ ID NO: 1683661 - RNA, 19 nt, Artificial Sequence
  Description of Artificial Sequence: Synthetic oligonucleotide
caauuaacaugacucggca

SEQ ID NO: 1683662 - RNA, 19 nt, Artificial Sequence
  Description of Artificial Sequence: Synthetic oligonucleotide
uuagccugcugucuuuaaa

SEQ ID NO: 1683663 - RNA, 19 nt, Artificial Sequence
  Description of Artificial Sequence: Synthetic oligonucleotide
gcuucuguucaagacaggg

SEQ ID NO: 1683664 - RNA, 19 nt, Artificial Sequence
  Description of Artificial Sequence: Synthetic oligonucleotide
agaaagcaggaacucuacu

SEQ ID NO: 1683665 - RNA, 19 nt, Artificial Sequence
  Description of Artificial Sequence: Synthetic oligonucleotide
ucucuaccgcacuucauuc

SEQ ID NO: 1683666 - RNA, 19 nt, Artificial Sequence
  Description of Artificial Sequence: Synthetic oligonucleotide
aaaagguaccggaaccccu

SEQ ID NO: 1683667 - RNA, 19 nt, Artificial Sequence
  Description of Artificial Sequence: Synthetic oligonucleotide
uugcuaugggacaguuucc

SEQ ID NO: 1683668 - RNA, 19 nt, Artificial Sequence
  Description of Artificial Sequence: Synthetic oligonucleotide
agcucggucaaugucguug

SEQ ID NO: 1683669 - RNA, 19 nt, Artificial Sequence
  Description of Artificial Sequence: Synthetic oligonucleotide
auaaacgcugagagggagg

SEQ ID NO: 1683670 - RNA, 19 nt, Artificial Sequence
  Description of Artificial Sequence: Synthetic oligonucleotide
ucauccgcggccugcaagu

SEQ ID NO: 1683671 - RNA, 19 nt, Artificial Sequence
  Description of Artificial Sequence: Synthetic oligonucleotide
ggaaagugacauuuggcca

SEQ ID NO: 1683672 - RNA, 19 nt, Artificial Sequence
  Description of Artificial Sequence: Synthetic oligonucleotide
ugguaguaccauuguguca

SEQ ID NO: 1683673 - RNA, 19 nt, Artificial Sequence
  Description of Artificial Sequence: Synthetic oligonucleotide
ugucuucucuacagauacc

SEQ ID NO: 1683674 - RNA, 19 nt, Artificial Sequence
  Description of Artificial Sequence: Synthetic oligonucleotide
caagggcaaagucugaaga

SEQ ID NO: 1683675 - RNA, 19 nt, Artificial Sequence
  Description of Artificial Sequence: Synthetic oligonucleotide
cagucuugcaaccccgccc

SEQ ID NO: 1683676 - RNA, 19 nt, Artificial Sequence
  Description of Artificial Sequence: Synthetic oligonucleotide
ccugcugugagccacguac

SEQ ID NO: 1683677 - RNA, 19 nt, Artificial Sequence
  Description of Artificial Sequence: Synthetic oligonucleotide
ugcuaugggacaguuuccu

SEQ ID NO: 1683678 - RNA, 19 nt, Artificial Sequence
  Description of Artificial Sequence: Synthetic oligonucleotide
ucugaagagugcagucgcu

SEQ ID NO: 1683679 - RNA, 19 nt, Artificial Sequence
  Description of Artificial Sequence: Synthetic oligonucleotide
acacucagcuaggaacacc

SEQ ID NO: 1683680 - RNA, 19 nt, Artificial Sequence
  Description of Artificial Sequence: Synthetic oligonucleotide
ucgaucguggucacuuccu

SEQ ID NO: 1683681 - RNA, 19 nt, Artificial Sequence
  Description of Artificial Sequence: Synthetic oligonucleotide
uccgcggccugcaagugca

SEQ ID NO: 1683682 - RNA, 19 nt, Artificial Sequence
  Description of Artificial Sequence: Synthetic oligonucleotide
ucugguggaucggucauac

SEQ ID NO: 1683683 - RNA, 19 nt, Artificial Sequence
  Description of Artificial Sequence: Synthetic oligonucleotide
gguaguaccauugugucaa

SEQ ID NO: 1683684 - RNA, 19 nt, Artificial Sequence
  Description of Artificial Sequence: Synthetic oligonucleotide
ugcugugggguaacaagaa

SEQ ID NO: 1683685 - RNA, 19 nt, Artificial Sequence
  Description of Artificial Sequence: Synthetic oligonucleotide
ucaacucccugcugugagc

SEQ ID NO: 1683686 - RNA, 19 nt, Artificial Sequence
  Description of Artificial Sequence: Synthetic oligonucleotide
cucgaucguggucacuucc

SEQ ID NO: 1683687 - RNA, 19 nt, Artificial Sequence
  Description of Artificial Sequence: Synthetic oligonucleotide
aguuuguaaagaaccucug

SEQ ID NO: 1683688 - RNA, 19 nt, Artificial Sequence
  Description of Artificial Sequence: Synthetic oligonucleotide
aacuggcgcggcucccggc

SEQ ID NO: 1683689 - RNA, 19 nt, Artificial Sequence
  Description of Artificial Sequence: Synthetic oligonucleotide
aaggcgcgcagccgggguc

SEQ ID NO: 1683690 - RNA, 19 nt, Artificial Sequence
  Description of Artificial Sequence: Synthetic oligonucleotide
agucuggguccccuccucg

SEQ ID NO: 1683691 - RNA, 19 nt, Artificial Sequence
  Description of Artificial Sequence: Synthetic oligonucleotide
auacccgcuggcugcacag

SEQ ID NO: 1683692 - RNA, 19 nt, Artificial Sequence
  Description of Artificial Sequence: Synthetic oligonucleotide
aggcgagccgcgcucggcc

SEQ ID NO: 1683693 - RNA, 19 nt, Artificial Sequence
  Description of Artificial Sequence: Synthetic oligonucleotide
acguacucgcucugagagg

SEQ ID NO: 1683694 - RNA, 19 nt, Artificial Sequence
  Description of Artificial Sequence: Synthetic oligonucleotide
gguggaucggucauacccg

SEQ ID NO: 1683695 - RNA, 19 nt, Artificial Sequence
  Description of Artificial Sequence: Synthetic oligonucleotide
cauagccacucucuaccgc

SEQ ID NO: 1683696 - RNA, 19 nt, Artificial Sequence
  Description of Artificial Sequence: Synthetic oligonucleotide
uaacaugacucggcaacca

SEQ ID NO: 1683697 - RNA, 19 nt, Artificial Sequence
  Description of Artificial Sequence: Synthetic oligonucleotide
auccgcggccugcaagugc

SEQ ID NO: 1683698 - RNA, 19 nt, Artificial Sequence
  Description of Artificial Sequence: Synthetic oligonucleotide
cauaucgaucauugcugug

SEQ ID NO: 1683699 - RNA, 19 nt, Artificial Sequence
  Description of Artificial Sequence: Synthetic oligonucleotide
uucccucgcgcucuccgag

SEQ ID NO: 1683700 - RNA, 19 nt, Artificial Sequence
  Description of Artificial Sequence: Synthetic oligonucleotide
guaccggaaccccuguggc

SEQ ID NO: 1683701 - RNA, 19 nt, Artificial Sequence
  Description of Artificial Sequence: Synthetic oligonucleotide
gcugcgauccgccagcccc

SEQ ID NO: 1683702 - RNA, 19 nt, Artificial Sequence
  Description of Artificial Sequence: Synthetic oligonucleotide
acggucaccuccucagucu

SEQ ID NO: 1683703 - RNA, 19 nt, Artificial Sequence
  Description of Artificial Sequence: Synthetic oligonucleotide
caacucccugcugugagcc

SEQ ID NO: 1683704 - RNA, 19 nt, Artificial Sequence
  Description of Artificial Sequence: Synthetic oligonucleotide
aaaggcgcgcagccggggu

SEQ ID NO: 1683705 - RNA, 19 nt, Artificial Sequence
  Description of Artificial Sequence: Synthetic oligonucleotide
cugggucaccucuucggcc

SEQ ID NO: 1683706 - RNA, 19 nt, Artificial Sequence
  Description of Artificial Sequence: Synthetic oligonucleotide
uggucaacucccugcugug

SEQ ID NO: 1683707 - RNA, 19 nt, Artificial Sequence
  Description of Artificial Sequence: Synthetic oligonucleotide
uacucgcucugagaggagc

SEQ ID NO: 1683708 - RNA, 19 nt, Artificial Sequence
  Description of Artificial Sequence: Synthetic oligonucleotide
acccgcuggcugcacagcg

SEQ ID NO: 1683709 - RNA, 19 nt, Artificial Sequence
  Description of Artificial Sequence: Synthetic oligonucleotide
cacggguguuuccauuucc

SEQ ID NO: 1683710 - RNA, 19 nt, Artificial Sequence
  Description of Artificial Sequence: Synthetic oligonucleotide
aaacgcugagagggaggcg

SEQ ID NO: 1683711 - RNA, 19 nt, Artificial Sequence
  Description of Artificial Sequence: Synthetic oligonucleotide
aucauugcugugggugacg

SEQ ID NO: 1683712 - RNA, 19 nt, Artificial Sequence
  Description of Artificial Sequence: Synthetic oligonucleotide
cugcugugggguaacaaga

SEQ ID NO: 1683713 - RNA, 19 nt, Artificial Sequence
  Description of Artificial Sequence: Synthetic oligonucleotide
gcagauguauugcuccacc

SEQ ID NO: 1683714 - RNA, 19 nt, Artificial Sequence
  Description of Artificial Sequence: Synthetic oligonucleotide
aaguagggaaagugacauu

SEQ ID NO: 1683715 - RNA, 19 nt, Artificial Sequence
  Description of Artificial Sequence: Synthetic oligonucleotide
uguucaccgcacagcggug

SEQ ID NO: 1683716 - RNA, 19 nt, Artificial Sequence
  Description of Artificial Sequence: Synthetic oligonucleotide
uaccggaaccccuguggcc

SEQ ID NO: 1683717 - RNA, 19 nt, Artificial Sequence
  Description of Artificial Sequence: Synthetic oligonucleotide
cagcauagccacucucuac

SEQ ID NO: 1683718 - RNA, 19 nt, Artificial Sequence
  Description of Artificial Sequence: Synthetic oligonucleotide
cugcacagcggacauauaa

SEQ ID NO: 1683719 - RNA, 19 nt, Artificial Sequence
  Description of Artificial Sequence: Synthetic oligonucleotide
guggaucggucauacccgc

SEQ ID NO: 1683720 - RNA, 19 nt, Artificial Sequence
  Description of Artificial Sequence: Synthetic oligonucleotide
guucaccgcacagcggugg

SEQ ID NO: 1683721 - RNA, 19 nt, Artificial Sequence
  Description of Artificial Sequence: Synthetic oligonucleotide
ggacauauaaacgcugaga

SEQ ID NO: 1683722 - RNA, 19 nt, Artificial Sequence
  Description of Artificial Sequence: Synthetic oligonucleotide
ggagaaguagggaaaguga

SEQ ID NO: 1683723 - RNA, 19 nt, Artificial Sequence
  Description of Artificial Sequence: Synthetic oligonucleotide
gcacagcggacauauaaac

SEQ ID NO: 1683724 - RNA, 19 nt, Artificial Sequence
  Description of Artificial Sequence: Synthetic oligonucleotide
uccucgaucguggucacuu

SEQ ID NO: 1683725 - RNA, 19 nt, Artificial Sequence
  Description of Artificial Sequence: Synthetic oligonucleotide
uuuagccugcugucuuuaa

SEQ ID NO: 1683726 - RNA, 19 nt, Artificial Sequence
  Description of Artificial Sequence: Synthetic oligonucleotide
uuucuccaauuaacaugac

SEQ ID NO: 1683727 - RNA, 19 nt, Artificial Sequence
  Description of Artificial Sequence: Synthetic oligonucleotide
accucuucggccacgguca

SEQ ID NO: 1683728 - RNA, 19 nt, Artificial Sequence
  Description of Artificial Sequence: Synthetic oligonucleotide
gcuaggaacaccugaaccu

SEQ ID NO: 1683729 - RNA, 19 nt, Artificial Sequence
  Description of Artificial Sequence: Synthetic oligonucleotide
ucggccacggucaccuccu

SEQ ID NO: 1683730 - RNA, 19 nt, Artificial Sequence
  Description of Artificial Sequence: Synthetic oligonucleotide
auauaaacgcugagaggga

SEQ ID NO: 1683731 - RNA, 19 nt, Artificial Sequence
  Description of Artificial Sequence: Synthetic oligonucleotide
agcacggguguuuccauuu

SEQ ID NO: 1683732 - RNA, 19 nt, Artificial Sequence
  Description of Artificial Sequence: Synthetic oligonucleotide
agauaccuccaggucuuuc

SEQ ID NO: 1683733 - RNA, 19 nt, Artificial Sequence
  Description of Artificial Sequence: Synthetic oligonucleotide
accggaaccccuguggccu

SEQ ID NO: 1683734 - RNA, 19 nt, Artificial Sequence
  Description of Artificial Sequence: Synthetic oligonucleotide
ccgcacuucauucaucaag

SEQ ID NO: 1683735 - RNA, 19 nt, Artificial Sequence
  Description of Artificial Sequence: Synthetic oligonucleotide
gcauagccacucucuaccg

SEQ ID NO: 1683736 - RNA, 19 nt, Artificial Sequence
  Description of Artificial Sequence: Synthetic oligonucleotide
uuuuagccugcugucuuua

SEQ ID NO: 1683737 - RNA, 19 nt, Artificial Sequence
  Description of Artificial Sequence: Synthetic oligonucleotide
ugacggucacauugagcac

SEQ ID NO: 1683738 - RNA, 19 nt, Artificial Sequence
  Description of Artificial Sequence: Synthetic oligonucleotide
cacucagcuaggaacaccu

SEQ ID NO: 1683739 - RNA, 19 nt, Artificial Sequence
  Description of Artificial Sequence: Synthetic oligonucleotide
cugcgauccgccagccccg

SEQ ID NO: 1683740 - RNA, 19 nt, Artificial Sequence
  Description of Artificial Sequence: Synthetic oligonucleotide
uuccagguggucagcuguc

SEQ ID NO: 1683741 - RNA, 19 nt, Artificial Sequence
  Description of Artificial Sequence: Synthetic oligonucleotide
accgcacagcgguggcugc

SEQ ID NO: 1683742 - RNA, 19 nt, Artificial Sequence
  Description of Artificial Sequence: Synthetic oligonucleotide
cucgcgcucuccgagggcc

SEQ ID NO: 1683743 - RNA, 19 nt, Artificial Sequence
  Description of Artificial Sequence: Synthetic oligonucleotide
ucccucgcgcucuccgagg

SEQ ID NO: 1683744 - RNA, 19 nt, Artificial Sequence
  Description of Artificial Sequence: Synthetic oligonucleotide
acggucacauugagcacgg

SEQ ID NO: 1683745 - RNA, 19 nt, Artificial Sequence
  Description of Artificial Sequence: Synthetic oligonucleotide
agagggaggcgagccgcgc

SEQ ID NO: 1683746 - RNA, 19 nt, Artificial Sequence
  Description of Artificial Sequence: Synthetic oligonucleotide
ucggucauacccgcuggcu

SEQ ID NO: 1683747 - RNA, 19 nt, Artificial Sequence
  Description of Artificial Sequence: Synthetic oligonucleotide
agccccgcguuuguucacc

SEQ ID NO: 1683748 - RNA, 19 nt, Artificial Sequence
  Description of Artificial Sequence: Synthetic oligonucleotide
cacggucaccuccucaguc

SEQ ID NO: 1683749 - RNA, 19 nt, Artificial Sequence
  Description of Artificial Sequence: Synthetic oligonucleotide
agcggcucccgguucccuc

SEQ ID NO: 1683750 - RNA, 19 nt, Artificial Sequence
  Description of Artificial Sequence: Synthetic oligonucleotide
caaugucguugcuauggga

SEQ ID NO: 1683751 - RNA, 19 nt, Artificial Sequence
  Description of Artificial Sequence: Synthetic oligonucleotide
aacucccugcugugagcca

SEQ ID NO: 1683752 - RNA, 19 nt, Artificial Sequence
  Description of Artificial Sequence: Synthetic oligonucleotide
gucaccucuucggccacgg

SEQ ID NO: 1683753 - RNA, 19 nt, Artificial Sequence
  Description of Artificial Sequence: Synthetic oligonucleotide
ucggucaaugucguugcua

SEQ ID NO: 1683754 - RNA, 19 nt, Artificial Sequence
  Description of Artificial Sequence: Synthetic oligonucleotide
uggaucggucauacccgcu

SEQ ID NO: 1683755 - RNA, 19 nt, Artificial Sequence
  Description of Artificial Sequence: Synthetic oligonucleotide
cauugagcacggguguuuc

SEQ ID NO: 1683756 - RNA, 19 nt, Artificial Sequence
  Description of Artificial Sequence: Synthetic oligonucleotide
uccucaggauuguucuuuu

SEQ ID NO: 1683757 - RNA, 19 nt, Artificial Sequence
  Description of Artificial Sequence: Synthetic oligonucleotide
ccgaaaggcgcgcagccgg

SEQ ID NO: 1683758 - RNA, 19 nt, Artificial Sequence
  Description of Artificial Sequence: Synthetic oligonucleotide
gagagggaggcgagccgcg

SEQ ID NO: 1683759 - RNA, 19 nt, Artificial Sequence
  Description of Artificial Sequence: Synthetic oligonucleotide
ugauccugcugugggguaa

SEQ ID NO: 1683760 - RNA, 19 nt, Artificial Sequence
  Description of Artificial Sequence: Synthetic oligonucleotide
aucgaucauugcugugggu

SEQ ID NO: 1683761 - RNA, 19 nt, Artificial Sequence
  Description of Artificial Sequence: Synthetic oligonucleotide
uaguaccauugugucaauc

SEQ ID NO: 1683762 - RNA, 19 nt, Artificial Sequence
  Description of Artificial Sequence: Synthetic oligonucleotide
cugggacgccaacuggcgc

SEQ ID NO: 1683763 - RNA, 19 nt, Artificial Sequence
  Description of Artificial Sequence: Synthetic oligonucleotide
agcuaggucuuggacaauu

SEQ ID NO: 1683764 - RNA, 19 nt, Artificial Sequence
  Description of Artificial Sequence: Synthetic oligonucleotide
auggagaaguagggaaagu

SEQ ID NO: 1683765 - RNA, 19 nt, Artificial Sequence
  Description of Artificial Sequence: Synthetic oligonucleotide
agggccgcugcgauccgcc

SEQ ID NO: 1683766 - RNA, 19 nt, Artificial Sequence
  Description of Artificial Sequence: Synthetic oligonucleotide
cucuccgagggccgcugcg

SEQ ID NO: 1683767 - RNA, 19 nt, Artificial Sequence
  Description of Artificial Sequence: Synthetic oligonucleotide
gacauuuggccaguugccu

SEQ ID NO: 1683768 - RNA, 19 nt, Artificial Sequence
  Description of Artificial Sequence: Synthetic oligonucleotide
ucgcgcucuccgagggccg

SEQ ID NO: 1683769 - RNA, 19 nt, Artificial Sequence
  Description of Artificial Sequence: Synthetic oligonucleotide
cuaccgcacuucauucauc

SEQ ID NO: 1683770 - RNA, 19 nt, Artificial Sequence
  Description of Artificial Sequence: Synthetic oligonucleotide
caugacucggcaaccauuu

SEQ ID NO: 1683771 - RNA, 19 nt, Artificial Sequence
  Description of Artificial Sequence: Synthetic oligonucleotide
acggguguuuccauuuccu

SEQ ID NO: 1683772 - RNA, 19 nt, Artificial Sequence
  Description of Artificial Sequence: Synthetic oligonucleotide
cuggucaacucccugcugu

SEQ ID NO: 1683773 - RNA, 19 nt, Artificial Sequence
  Description of Artificial Sequence: Synthetic oligonucleotide
ugcucaauuguggccuuua

SEQ ID NO: 1683774 - RNA, 19 nt, Artificial Sequence
  Description of Artificial Sequence: Synthetic oligonucleotide
agguaccggaaccccugug

SEQ ID NO: 1683775 - RNA, 19 nt, Artificial Sequence
  Description of Artificial Sequence: Synthetic oligonucleotide
cacucucuaccgcacuuca

SEQ ID NO: 1683776 - RNA, 19 nt, Artificial Sequence
  Description of Artificial Sequence: Synthetic oligonucleotide
aagacagggcagagcugug

SEQ ID NO: 1683777 - RNA, 19 nt, Artificial Sequence
  Description of Artificial Sequence: Synthetic oligonucleotide
uuccuuccccuggucaacu

SEQ ID NO: 1683778 - RNA, 19 nt, Artificial Sequence
  Description of Artificial Sequence: Synthetic oligonucleotide
gccugcugucuuuaaaauc

SEQ ID NO: 1683779 - RNA, 19 nt, Artificial Sequence
  Description of Artificial Sequence: Synthetic oligonucleotide
acauugagcacggguguuu

SEQ ID NO: 1683780 - RNA, 19 nt, Artificial Sequence
  Description of Artificial Sequence: Synthetic oligonucleotide
caacuggcgcggcucccgg

SEQ ID NO: 1683781 - RNA, 19 nt, Artificial Sequence
  Description of Artificial Sequence: Synthetic oligonucleotide
cugguggaucggucauacc

SEQ ID NO: 1683782 - RNA, 19 nt, Artificial Sequence
  Description of Artificial Sequence: Synthetic oligonucleotide
acaugacucggcaaccauu

SEQ ID NO: 1683783 - RNA, 19 nt, Artificial Sequence
  Description of Artificial Sequence: Synthetic oligonucleotide
gccacguacucgcucugag

SEQ ID NO: 1683784 - RNA, 19 nt, Artificial Sequence
  Description of Artificial Sequence: Synthetic oligonucleotide
ggucacauugagcacgggu

SEQ ID NO: 1683785 - RNA, 19 nt, Artificial Sequence
  Description of Artificial Sequence: Synthetic oligonucleotide
ggccgaaaggcgcgcagcc

SEQ ID NO: 1683786 - RNA, 19 nt, Artificial Sequence
  Description of Artificial Sequence: Synthetic oligonucleotide
ccuuaaauaugagcuucug

SEQ ID NO: 1683787 - RNA, 19 nt, Artificial Sequence
  Description of Artificial Sequence: Synthetic oligonucleotide
uccugcugugggguaacaa

SEQ ID NO: 1683788 - RNA, 19 nt, Artificial Sequence
  Description of Artificial Sequence: Synthetic oligonucleotide
gcacuucaggucagcauag

SEQ ID NO: 1683789 - RNA, 19 nt, Artificial Sequence
  Description of Artificial Sequence: Synthetic oligonucleotide
caccgcacagcgguggcug

SEQ ID NO: 1683790 - RNA, 19 nt, Artificial Sequence
  Description of Artificial Sequence: Synthetic oligonucleotide
ucggucugggucaccucuu

SEQ ID NO: 1683791 - RNA, 19 nt, Artificial Sequence
  Description of Artificial Sequence: Synthetic oligonucleotide
ggucagcauagccacucuc

SEQ ID NO: 1683792 - RNA, 19 nt, Artificial Sequence
  Description of Artificial Sequence: Synthetic oligonucleotide
cagcgguggcugccgagcc

SEQ ID NO: 1683793 - RNA, 19 nt, Artificial Sequence
  Description of Artificial Sequence: Synthetic oligonucleotide
cucucuaccgcacuucauu

SEQ ID NO: 1683794 - RNA, 19 nt, Artificial Sequence
  Description of Artificial Sequence: Synthetic oligonucleotide
gcggggacggacuuucuuc

SEQ ID NO: 1683795 - RNA, 19 nt, Artificial Sequence
  Description of Artificial Sequence: Synthetic oligonucleotide
agcggggacggacuuucuu

SEQ ID NO: 1683796 - RNA, 19 nt, Artificial Sequence
  Description of Artificial Sequence: Synthetic oligonucleotide
augauccugcuguggggua

SEQ ID NO: 1683797 - RNA, 19 nt, Artificial Sequence
  Description of Artificial Sequence: Synthetic oligonucleotide
ucccgguucccucgcgcuc

SEQ ID NO: 1683798 - RNA, 19 nt, Artificial Sequence
  Description of Artificial Sequence: Synthetic oligonucleotide
ucguugcuaugggacaguu

SEQ ID NO: 1683799 - RNA, 19 nt, Artificial Sequence
  Description of Artificial Sequence: Synthetic oligonucleotide
cguuuguucaccgcacagc

SEQ ID NO: 1683800 - RNA, 19 nt, Artificial Sequence
  Description of Artificial Sequence: Synthetic oligonucleotide
ggcaaccauuuuguauucc

SEQ ID NO: 1683801 - RNA, 19 nt, Artificial Sequence
  Description of Artificial Sequence: Synthetic oligonucleotide
cccgcagucuugcaacccc

SEQ ID NO: 1683802 - RNA, 19 nt, Artificial Sequence
  Description of Artificial Sequence: Synthetic oligonucleotide
ucaccucuucggccacggu

SEQ ID NO: 1683803 - RNA, 19 nt, Artificial Sequence
  Description of Artificial Sequence: Synthetic oligonucleotide
cauacccgcuggcugcaca

SEQ ID NO: 1683804 - RNA, 19 nt, Artificial Sequence
  Description of Artificial Sequence: Synthetic oligonucleotide
guucccucgcgcucuccga

SEQ ID NO: 1683805 - RNA, 19 nt, Artificial Sequence
  Description of Artificial Sequence: Synthetic oligonucleotide
ccgagggccgcugcgaucc

SEQ ID NO: 1683806 - RNA, 19 nt, Artificial Sequence
  Description of Artificial Sequence: Synthetic oligonucleotide
gcggacauauaaacgcuga

SEQ ID NO: 1683807 - RNA, 19 nt, Artificial Sequence
  Description of Artificial Sequence: Synthetic oligonucleotide
ugugggugacggucacauu

SEQ ID NO: 1683808 - RNA, 19 nt, Artificial Sequence
  Description of Artificial Sequence: Synthetic oligonucleotide
ccgcagucuugcaaccccg

SEQ ID NO: 1683809 - RNA, 19 nt, Artificial Sequence
  Description of Artificial Sequence: Synthetic oligonucleotide
cagucuggguccccuccuc

SEQ ID NO: 1683810 - RNA, 19 nt, Artificial Sequence
  Description of Artificial Sequence: Synthetic oligonucleotide
caagcucagcuaggucuug

SEQ ID NO: 1683811 - RNA, 19 nt, Artificial Sequence
  Description of Artificial Sequence: Synthetic oligonucleotide
gcagcccggaagaaacaag

SEQ ID NO: 1683812 - RNA, 19 nt, Artificial Sequence
  Description of Artificial Sequence: Synthetic oligonucleotide
gccucugguggaucgguca

SEQ ID NO: 1683813 - RNA, 19 nt, Artificial Sequence
  Description of Artificial Sequence: Synthetic oligonucleotide
uacccgcuggcugcacagc

SEQ ID NO: 1683814 - RNA, 19 nt, Artificial Sequence
  Description of Artificial Sequence: Synthetic oligonucleotide
ggagcggggacggacuuuc

SEQ ID NO: 1683815 - RNA, 19 nt, Artificial Sequence
  Description of Artificial Sequence: Synthetic oligonucleotide
gaggcgagccgcgcucggc

SEQ ID NO: 1683816 - RNA, 19 nt, Artificial Sequence
  Description of Artificial Sequence: Synthetic oligonucleotide
ugcgauccgccagccccgc

SEQ ID NO: 1683817 - RNA, 19 nt, Artificial Sequence
  Description of Artificial Sequence: Synthetic oligonucleotide
gggacgccaacuggcgcgg

SEQ ID NO: 1683818 - RNA, 19 nt, Artificial Sequence
  Description of Artificial Sequence: Synthetic oligonucleotide
cguacucgcucugagagga

SEQ ID NO: 1683819 - RNA, 19 nt, Artificial Sequence
  Description of Artificial Sequence: Synthetic oligonucleotide
agccacguacucgcucuga

SEQ ID NO: 1683820 - RNA, 19 nt, Artificial Sequence
  Description of Artificial Sequence: Synthetic oligonucleotide
acgcugagagggaggcgag

SEQ ID NO: 1683821 - RNA, 19 nt, Artificial Sequence
  Description of Artificial Sequence: Synthetic oligonucleotide
gccgaaaggcgcgcagccg

SEQ ID NO: 1683822 - RNA, 19 nt, Artificial Sequence
  Description of Artificial Sequence: Synthetic oligonucleotide
ccgucugaaccaucucuuc

SEQ ID NO: 1683823 - RNA, 19 nt, Artificial Sequence
  Description of Artificial Sequence: Synthetic oligonucleotide
ucauacccgcuggcugcac

SEQ ID NO: 1683824 - RNA, 19 nt, Artificial Sequence
  Description of Artificial Sequence: Synthetic oligonucleotide
ccgcgcucggccugggacg

SEQ ID NO: 1683825 - RNA, 19 nt, Artificial Sequence
  Description of Artificial Sequence: Synthetic oligonucleotide
gagggccgcugcgauccgc

SEQ ID NO: 1683826 - RNA, 19 nt, Artificial Sequence
  Description of Artificial Sequence: Synthetic oligonucleotide
cccgcguuuguucaccgca

SEQ ID NO: 1683827 - RNA, 19 nt, Artificial Sequence
  Description of Artificial Sequence: Synthetic oligonucleotide
acucuacuucuagguugca

SEQ ID NO: 1683828 - RNA, 19 nt, Artificial Sequence
  Description of Artificial Sequence: Synthetic oligonucleotide
gccgcgcucggccugggac

SEQ ID NO: 1683829 - RNA, 19 nt, Artificial Sequence
  Description of Artificial Sequence: Synthetic oligonucleotide
cgaucauugcuguggguga

SEQ ID NO: 1683830 - RNA, 19 nt, Artificial Sequence
  Description of Artificial Sequence: Synthetic oligonucleotide
gacgccaacuggcgcggcu

SEQ ID NO: 1683831 - RNA, 19 nt, Artificial Sequence
  Description of Artificial Sequence: Synthetic oligonucleotide
cauccgcggccugcaagug

SEQ ID NO: 1683832 - RNA, 19 nt, Artificial Sequence
  Description of Artificial Sequence: Synthetic oligonucleotide
cccucgcgcucuccgaggg

SEQ ID NO: 1683833 - RNA, 19 nt, Artificial Sequence
  Description of Artificial Sequence: Synthetic oligonucleotide
ccgcguuuguucaccgcac

SEQ ID NO: 1683834 - RNA, 19 nt, Artificial Sequence
  Description of Artificial Sequence: Synthetic oligonucleotide
gguucacuaugauccugcu

SEQ ID NO: 1683835 - RNA, 19 nt, Artificial Sequence
  Description of Artificial Sequence: Synthetic oligonucleotide
cucggccugggacgccaac

SEQ ID NO: 1683836 - RNA, 19 nt, Artificial Sequence
  Description of Artificial Sequence: Synthetic oligonucleotide
cggucauacccgcuggcug

SEQ ID NO: 1683837 - RNA, 19 nt, Artificial Sequence
  Description of Artificial Sequence: Synthetic oligonucleotide
gccccgcguuuguucaccg

SEQ ID NO: 1683838 - RNA, 19 nt, Artificial Sequence
  Description of Artificial Sequence: Synthetic oligonucleotide
gguccccuccucgaucgug

SEQ ID NO: 1683839 - RNA, 19 nt, Artificial Sequence
  Description of Artificial Sequence: Synthetic oligonucleotide
ggucaacucccugcuguga

SEQ ID NO: 1683840 - RNA, 19 nt, Artificial Sequence
  Description of Artificial Sequence: Synthetic oligonucleotide
gcacggguguuuccauuuc

SEQ ID NO: 1683841 - RNA, 19 nt, Artificial Sequence
  Description of Artificial Sequence: Synthetic oligonucleotide
ggcgccucugguggaucgg

SEQ ID NO: 1683842 - RNA, 19 nt, Artificial Sequence
  Description of Artificial Sequence: Synthetic oligonucleotide
gagcacggguguuuccauu

SEQ ID NO: 1683843 - RNA, 19 nt, Artificial Sequence
  Description of Artificial Sequence: Synthetic oligonucleotide
ccacguacucgcucugaga

SEQ ID NO: 1683844 - RNA, 19 nt, Artificial Sequence
  Description of Artificial Sequence: Synthetic oligonucleotide
cagaaccgauggagaagua

SEQ ID NO: 1683845 - RNA, 19 nt, Artificial Sequence
  Description of Artificial Sequence: Synthetic oligonucleotide
ccucgaucguggucacuuc

SEQ ID NO: 1683846 - RNA, 19 nt, Artificial Sequence
  Description of Artificial Sequence: Synthetic oligonucleotide
gccgagcccgcagucuugc

SEQ ID NO: 1683847 - RNA, 19 nt, Artificial Sequence
  Description of Artificial Sequence: Synthetic oligonucleotide
cuucggccacggucaccuc

SEQ ID NO: 1683848 - RNA, 19 nt, Artificial Sequence
  Description of Artificial Sequence: Synthetic oligonucleotide
guaguaccauugugucaau

SEQ ID NO: 1683849 - RNA, 19 nt, Artificial Sequence
  Description of Artificial Sequence: Synthetic oligonucleotide
gggguaacaagaaguucau

SEQ ID NO: 1683850 - RNA, 19 nt, Artificial Sequence
  Description of Artificial Sequence: Synthetic oligonucleotide
gauccgccagccccgcguu

SEQ ID NO: 1683851 - RNA, 19 nt, Artificial Sequence
  Description of Artificial Sequence: Synthetic oligonucleotide
cuucauccgcggccugcaa

SEQ ID NO: 1683852 - RNA, 19 nt, Artificial Sequence
  Description of Artificial Sequence: Synthetic oligonucleotide
gucguugcuaugggacagu

SEQ ID NO: 1683853 - RNA, 19 nt, Artificial Sequence
  Description of Artificial Sequence: Synthetic oligonucleotide
cccggccgggccgaaaggc

SEQ ID NO: 1683854 - RNA, 19 nt, Artificial Sequence
  Description of Artificial Sequence: Synthetic oligonucleotide
ggguaacaagaaguucaua

SEQ ID NO: 1683855 - RNA, 19 nt, Artificial Sequence
  Description of Artificial Sequence: Synthetic oligonucleotide
cggcaaccauuuuguauuc

SEQ ID NO: 1683856 - RNA, 19 nt, Artificial Sequence
  Description of Artificial Sequence: Synthetic oligonucleotide
gcucuccgagggccgcugc

SEQ ID NO: 1683857 - RNA, 19 nt, Artificial Sequence
  Description of Artificial Sequence: Synthetic oligonucleotide
gcccgcagucuugcaaccc

SEQ ID NO: 1683858 - RNA, 19 nt, Artificial Sequence
  Description of Artificial Sequence: Synthetic oligonucleotide
cucugguggaucggucaua

SEQ ID NO: 1683859 - RNA, 19 nt, Artificial Sequence
  Description of Artificial Sequence: Synthetic oligonucleotide
ccuccucgaucguggucac

SEQ ID NO: 1683860 - RNA, 19 nt, Artificial Sequence
  Description of Artificial Sequence: Synthetic oligonucleotide
ccccgcguuuguucaccgc

SEQ ID NO: 1683861 - RNA, 19 nt, Artificial Sequence
  Description of Artificial Sequence: Synthetic oligonucleotide
cccugcugaaugucagaaa

SEQ ID NO: 1683862 - RNA, 19 nt, Artificial Sequence
  Description of Artificial Sequence: Synthetic oligonucleotide
gcgauccgccagccccgcg

SEQ ID NO: 1683863 - RNA, 19 nt, Artificial Sequence
  Description of Artificial Sequence: Synthetic oligonucleotide
cacauugagcacggguguu

SEQ ID NO: 1683864 - RNA, 19 nt, Artificial Sequence
  Description of Artificial Sequence: Synthetic oligonucleotide
ccucgcgcucuccgagggc

SEQ ID NO: 1683865 - RNA, 19 nt, Artificial Sequence
  Description of Artificial Sequence: Synthetic oligonucleotide
cgcguuuguucaccgcaca

SEQ ID NO: 1683866 - RNA, 19 nt, Artificial Sequence
  Description of Artificial Sequence: Synthetic oligonucleotide
cuccgagggccgcugcgau

SEQ ID NO: 1683867 - RNA, 19 nt, Artificial Sequence
  Description of Artificial Sequence: Synthetic oligonucleotide
gcugugucucuuggcagau

SEQ ID NO: 1683868 - RNA, 19 nt, Artificial Sequence
  Description of Artificial Sequence: Synthetic oligonucleotide
ccggaaccccuguggccuc

SEQ ID NO: 1683869 - RNA, 19 nt, Artificial Sequence
  Description of Artificial Sequence: Synthetic oligonucleotide
cggggacggacuuucuucu

SEQ ID NO: 1683870 - RNA, 19 nt, Artificial Sequence
  Description of Artificial Sequence: Synthetic oligonucleotide
ggacgccaacuggcgcggc

SEQ ID NO: 1683871 - RNA, 19 nt, Artificial Sequence
  Description of Artificial Sequence: Synthetic oligonucleotide
gccgggccgaaaggcgcgc

SEQ ID NO: 1683872 - RNA, 19 nt, Artificial Sequence
  Description of Artificial Sequence: Synthetic oligonucleotide
cgccucugguggaucgguc

SEQ ID NO: 1683873 - RNA, 19 nt, Artificial Sequence
  Description of Artificial Sequence: Synthetic oligonucleotide
ccucugguggaucggucau

SEQ ID NO: 1683874 - RNA, 19 nt, Artificial Sequence
  Description of Artificial Sequence: Synthetic oligonucleotide
gagcggggacggacuuucu

SEQ ID NO: 1683875 - RNA, 19 nt, Artificial Sequence
  Description of Artificial Sequence: Synthetic oligonucleotide
cgcugcgauccgccagccc

SEQ ID NO: 1683876 - RNA, 19 nt, Artificial Sequence
  Description of Artificial Sequence: Synthetic oligonucleotide
ccgcggccugcaagugcag

SEQ ID NO: 1683877 - RNA, 19 nt, Artificial Sequence
  Description of Artificial Sequence: Synthetic oligonucleotide
ccgcugcgauccgccagcc

SEQ ID NO: 1683878 - RNA, 19 nt, Artificial Sequence
  Description of Artificial Sequence: Synthetic oligonucleotide
cugcucaauuguggccuuu

SEQ ID NO: 1683879 - RNA, 19 nt, Artificial Sequence
  Description of Artificial Sequence: Synthetic oligonucleotide
cgagggccgcugcgauccg

SEQ ID NO: 1683880 - RNA, 19 nt, Artificial Sequence
  Description of Artificial Sequence: Synthetic oligonucleotide
ccgguucccucgcgcucuc

SEQ ID NO: 1683881 - RNA, 19 nt, Artificial Sequence
  Description of Artificial Sequence: Synthetic oligonucleotide
gcgccucugguggaucggu

SEQ ID NO: 1683882 - RNA, 19 nt, Artificial Sequence
  Description of Artificial Sequence: Synthetic oligonucleotide
cuccucgaucguggucacu

SEQ ID NO: 1683883 - RNA, 19 nt, Artificial Sequence
  Description of Artificial Sequence: Synthetic oligonucleotide
cggcucccgguucccucgc

SEQ ID NO: 1683884 - RNA, 19 nt, Artificial Sequence
  Description of Artificial Sequence: Synthetic oligonucleotide
cgcucuccgagggccgcug

SEQ ID NO: 1683885 - RNA, 19 nt, Artificial Sequence
  Description of Artificial Sequence: Synthetic oligonucleotide
ggccucggucugggucacc

SEQ ID NO: 1683886 - RNA, 19 nt, Artificial Sequence
  Description of Artificial Sequence: Synthetic oligonucleotide
ccgagcccgcagucuugca

SEQ ID NO: 1683887 - RNA, 19 nt, Artificial Sequence
  Description of Artificial Sequence: Synthetic oligonucleotide
cccgguucccucgcgcucu

SEQ ID NO: 1683888 - RNA, 19 nt, Artificial Sequence
  Description of Artificial Sequence: Synthetic oligonucleotide
cagcuaggucuuggacaau

SEQ ID NO: 1683889 - RNA, 19 nt, Artificial Sequence
  Description of Artificial Sequence: Synthetic oligonucleotide
cagcggcucccgguucccu

SEQ ID NO: 1683890 - RNA, 19 nt, Artificial Sequence
  Description of Artificial Sequence: Synthetic oligonucleotide
ggcggcgccucugguggau

SEQ ID NO: 1683891 - RNA, 19 nt, Artificial Sequence
  Description of Artificial Sequence: Synthetic oligonucleotide
ccgggccgaaaggcgcgca

SEQ ID NO: 1683892 - RNA, 19 nt, Artificial Sequence
  Description of Artificial Sequence: Synthetic oligonucleotide
gcucccggccgggccgaaa

SEQ ID NO: 1683893 - RNA, 19 nt, Artificial Sequence
  Description of Artificial Sequence: Synthetic oligonucleotide
ccgccagccccgcguuugu

SEQ ID NO: 1683894 - RNA, 19 nt, Artificial Sequence
  Description of Artificial Sequence: Synthetic oligonucleotide
cggaaccccuguggccucu

SEQ ID NO: 1683895 - RNA, 19 nt, Artificial Sequence
  Description of Artificial Sequence: Synthetic oligonucleotide
cgccagccccgcguuuguu

SEQ ID NO: 1683896 - RNA, 19 nt, Artificial Sequence
  Description of Artificial Sequence: Synthetic oligonucleotide
ucuuuauccacccacagag

SEQ ID NO: 1683897 - RNA, 19 nt, Artificial Sequence
  Description of Artificial Sequence: Synthetic oligonucleotide
auauuaaugaggcaaagug

SEQ ID NO: 1683898 - RNA, 19 nt, Artificial Sequence
  Description of Artificial Sequence: Synthetic oligonucleotide
ucauucaggauuuggaucg

SEQ ID NO: 1683899 - RNA, 19 nt, Artificial Sequence
  Description of Artificial Sequence: Synthetic oligonucleotide
aauucagcucguuugugcc

SEQ ID NO: 1683900 - RNA, 19 nt, Artificial Sequence
  Description of Artificial Sequence: Synthetic oligonucleotide
ugacuuucgauuuuguugg

SEQ ID NO: 1683901 - RNA, 19 nt, Artificial Sequence
  Description of Artificial Sequence: Synthetic oligonucleotide
uuuagaacaucuaaaggug

SEQ ID NO: 1683902 - RNA, 19 nt, Artificial Sequence
  Description of Artificial Sequence: Synthetic oligonucleotide
accaacuaagcauaugucc

SEQ ID NO: 1683903 - RNA, 19 nt, Artificial Sequence
  Description of Artificial Sequence: Synthetic oligonucleotide
acaaaacuccgucauaagc

SEQ ID NO: 1683904 - RNA, 19 nt, Artificial Sequence
  Description of Artificial Sequence: Synthetic oligonucleotide
uauuaaugaggcaaagugc

SEQ ID NO: 1683905 - RNA, 19 nt, Artificial Sequence
  Description of Artificial Sequence: Synthetic oligonucleotide
acugcauacauuuacacgu

SEQ ID NO: 1683906 - RNA, 19 nt, Artificial Sequence
  Description of Artificial Sequence: Synthetic oligonucleotide
uuagguacaacauuucaug

SEQ ID NO: 1683907 - RNA, 19 nt, Artificial Sequence
  Description of Artificial Sequence: Synthetic oligonucleotide
aacuguaggagauugauuu

SEQ ID NO: 1683908 - RNA, 19 nt, Artificial Sequence
  Description of Artificial Sequence: Synthetic oligonucleotide
auccaaguugaacaaagcc

SEQ ID NO: 1683909 - RNA, 19 nt, Artificial Sequence
  Description of Artificial Sequence: Synthetic oligonucleotide
agcuguaaugcuaaaaucc

SEQ ID NO: 1683910 - RNA, 19 nt, Artificial Sequence
  Description of Artificial Sequence: Synthetic oligonucleotide
aacugcauacauuuacacg

SEQ ID NO: 1683911 - RNA, 19 nt, Artificial Sequence
  Description of Artificial Sequence: Synthetic oligonucleotide
aaaacuccgucauaagcuc

SEQ ID NO: 1683912 - RNA, 19 nt, Artificial Sequence
  Description of Artificial Sequence: Synthetic oligonucleotide
uguaacaugcaguagcuug

SEQ ID NO: 1683913 - RNA, 19 nt, Artificial Sequence
  Description of Artificial Sequence: Synthetic oligonucleotide
ugugacaccagguaaacca

SEQ ID NO: 1683914 - RNA, 19 nt, Artificial Sequence
  Description of Artificial Sequence: Synthetic oligonucleotide
uguaaugcuaaaauccucu

SEQ ID NO: 1683915 - RNA, 19 nt, Artificial Sequence
  Description of Artificial Sequence: Synthetic oligonucleotide
aucaaauucagcucguuug

SEQ ID NO: 1683916 - RNA, 19 nt, Artificial Sequence
  Description of Artificial Sequence: Synthetic oligonucleotide
uauuuaacugaguaucacc

SEQ ID NO: 1683917 - RNA, 19 nt, Artificial Sequence
  Description of Artificial Sequence: Synthetic oligonucleotide
uaacugaguaucaccaagg

SEQ ID NO: 1683918 - RNA, 19 nt, Artificial Sequence
  Description of Artificial Sequence: Synthetic oligonucleotide
uucugaacuaugaaggaca

SEQ ID NO: 1683919 - RNA, 19 nt, Artificial Sequence
  Description of Artificial Sequence: Synthetic oligonucleotide
ucugcauggucccugaacc

SEQ ID NO: 1683920 - RNA, 19 nt, Artificial Sequence
  Description of Artificial Sequence: Synthetic oligonucleotide
aacccuuucaucuuuuaga

SEQ ID NO: 1683921 - RNA, 19 nt, Artificial Sequence
  Description of Artificial Sequence: Synthetic oligonucleotide
uuuagugaggccuguaagc

SEQ ID NO: 1683922 - RNA, 19 nt, Artificial Sequence
  Description of Artificial Sequence: Synthetic oligonucleotide
aagcauauguccggcaugc

SEQ ID NO: 1683923 - RNA, 19 nt, Artificial Sequence
  Description of Artificial Sequence: Synthetic oligonucleotide
aauucucaauccaauauug

SEQ ID NO: 1683924 - RNA, 19 nt, Artificial Sequence
  Description of Artificial Sequence: Synthetic oligonucleotide
uuuauccacccacagagcu

SEQ ID NO: 1683925 - RNA, 19 nt, Artificial Sequence
  Description of Artificial Sequence: Synthetic oligonucleotide
cugauuucgauccaccagg

SEQ ID NO: 1683926 - RNA, 19 nt, Artificial Sequence
  Description of Artificial Sequence: Synthetic oligonucleotide
gugacuuucgauuuuguug

SEQ ID NO: 1683927 - RNA, 19 nt, Artificial Sequence
  Description of Artificial Sequence: Synthetic oligonucleotide
auuucgauccaccaggaca

SEQ ID NO: 1683928 - RNA, 19 nt, Artificial Sequence
  Description of Artificial Sequence: Synthetic oligonucleotide
aagcaaaugccacucuguc

SEQ ID NO: 1683929 - RNA, 19 nt, Artificial Sequence
  Description of Artificial Sequence: Synthetic oligonucleotide
aguugaacaaagccacagc

SEQ ID NO: 1683930 - RNA, 19 nt, Artificial Sequence
  Description of Artificial Sequence: Synthetic oligonucleotide
acugggauccaacuuacuc

SEQ ID NO: 1683931 - RNA, 19 nt, Artificial Sequence
  Description of Artificial Sequence: Synthetic oligonucleotide
uuuagguacaacauuucau

SEQ ID NO: 1683932 - RNA, 19 nt, Artificial Sequence
  Description of Artificial Sequence: Synthetic oligonucleotide
uuuacaagcaaaugccacu

SEQ ID NO: 1683933 - RNA, 19 nt, Artificial Sequence
  Description of Artificial Sequence: Synthetic oligonucleotide
uagguacaacauuucaugg

SEQ ID NO: 1683934 - RNA, 19 nt, Artificial Sequence
  Description of Artificial Sequence: Synthetic oligonucleotide
guuguauccaacugcauac

SEQ ID NO: 1683935 - RNA, 19 nt, Artificial Sequence
  Description of Artificial Sequence: Synthetic oligonucleotide
aggccuguaagcaagauuc

SEQ ID NO: 1683936 - RNA, 19 nt, Artificial Sequence
  Description of Artificial Sequence: Synthetic oligonucleotide
auuaaugaggcaaagugca

SEQ ID NO: 1683937 - RNA, 19 nt, Artificial Sequence
  Description of Artificial Sequence: Synthetic oligonucleotide
uguggaguugcaaucgcag

SEQ ID NO: 1683938 - RNA, 19 nt, Artificial Sequence
  Description of Artificial Sequence: Synthetic oligonucleotide
uuaaacugagcuaacuuuu

SEQ ID NO: 1683939 - RNA, 19 nt, Artificial Sequence
  Description of Artificial Sequence: Synthetic oligonucleotide
uuagaacaucuaaagguga

SEQ ID NO: 1683940 - RNA, 19 nt, Artificial Sequence
  Description of Artificial Sequence: Synthetic oligonucleotide
aacuaagcauauguccggc

SEQ ID NO: 1683941 - RNA, 19 nt, Artificial Sequence
  Description of Artificial Sequence: Synthetic oligonucleotide
ucuugcacaagagaguuca

SEQ ID NO: 1683942 - RNA, 19 nt, Artificial Sequence
  Description of Artificial Sequence: Synthetic oligonucleotide
aauaccugggcuaaaggcu

SEQ ID NO: 1683943 - RNA, 19 nt, Artificial Sequence
  Description of Artificial Sequence: Synthetic oligonucleotide
augcaaacaugacacacag

SEQ ID NO: 1683944 - RNA, 19 nt, Artificial Sequence
  Description of Artificial Sequence: Synthetic oligonucleotide
gaacaucuaaaggugaccc

SEQ ID NO: 1683945 - RNA, 19 nt, Artificial Sequence
  Description of Artificial Sequence: Synthetic oligonucleotide
uccuguuguauccaacugc

SEQ ID NO: 1683946 - RNA, 19 nt, Artificial Sequence
  Description of Artificial Sequence: Synthetic oligonucleotide
aguucuauccacauagcuc

SEQ ID NO: 1683947 - RNA, 19 nt, Artificial Sequence
  Description of Artificial Sequence: Synthetic oligonucleotide
uguuguauccaacugcaua

SEQ ID NO: 1683948 - RNA, 19 nt, Artificial Sequence
  Description of Artificial Sequence: Synthetic oligonucleotide
uaaaauccucucuucauuc

SEQ ID NO: 1683949 - RNA, 19 nt, Artificial Sequence
  Description of Artificial Sequence: Synthetic oligonucleotide
aucaccaaggaauuuacaa

SEQ ID NO: 1683950 - RNA, 19 nt, Artificial Sequence
  Description of Artificial Sequence: Synthetic oligonucleotide
cugggauccaacuuacucc

SEQ ID NO: 1683951 - RNA, 19 nt, Artificial Sequence
  Description of Artificial Sequence: Synthetic oligonucleotide
guucccauauuaaugaggc

SEQ ID NO: 1683952 - RNA, 19 nt, Artificial Sequence
  Description of Artificial Sequence: Synthetic oligonucleotide
acaugacacacagauaggg

SEQ ID NO: 1683953 - RNA, 19 nt, Artificial Sequence
  Description of Artificial Sequence: Synthetic oligonucleotide
cuuacuccuaugaauauca

SEQ ID NO: 1683954 - RNA, 19 nt, Artificial Sequence
  Description of Artificial Sequence: Synthetic oligonucleotide
uaaugcuaaaauccucucu

SEQ ID NO: 1683955 - RNA, 19 nt, Artificial Sequence
  Description of Artificial Sequence: Synthetic oligonucleotide
aaaacggccccacgucuac

SEQ ID NO: 1683956 - RNA, 19 nt, Artificial Sequence
  Description of Artificial Sequence: Synthetic oligonucleotide
cagauuuccuguuguaucc

SEQ ID NO: 1683957 - RNA, 19 nt, Artificial Sequence
  Description of Artificial Sequence: Synthetic oligonucleotide
auuuaacugaguaucacca

SEQ ID NO: 1683958 - RNA, 19 nt, Artificial Sequence
  Description of Artificial Sequence: Synthetic oligonucleotide
aaaauccucucuucauuca

SEQ ID NO: 1683959 - RNA, 19 nt, Artificial Sequence
  Description of Artificial Sequence: Synthetic oligonucleotide
uuuccuguuguauccaacu

SEQ ID NO: 1683960 - RNA, 19 nt, Artificial Sequence
  Description of Artificial Sequence: Synthetic oligonucleotide
ugcacaagagaguucaaaa

SEQ ID NO: 1683961 - RNA, 19 nt, Artificial Sequence
  Description of Artificial Sequence: Synthetic oligonucleotide
ucccauauuaaugaggcaa

SEQ ID NO: 1683962 - RNA, 19 nt, Artificial Sequence
  Description of Artificial Sequence: Synthetic oligonucleotide
aauuuacaagcaaaugcca

SEQ ID NO: 1683963 - RNA, 19 nt, Artificial Sequence
  Description of Artificial Sequence: Synthetic oligonucleotide
ucgccgaauauccaaguug

SEQ ID NO: 1683964 - RNA, 19 nt, Artificial Sequence
  Description of Artificial Sequence: Synthetic oligonucleotide
aacugaguaucaccaagga

SEQ ID NO: 1683965 - RNA, 19 nt, Artificial Sequence
  Description of Artificial Sequence: Synthetic oligonucleotide
uucauucaggauuuggauc

SEQ ID NO: 1683966 - RNA, 19 nt, Artificial Sequence
  Description of Artificial Sequence: Synthetic oligonucleotide
ucuacaucuguuccuuucu

SEQ ID NO: 1683967 - RNA, 19 nt, Artificial Sequence
  Description of Artificial Sequence: Synthetic oligonucleotide
ucgauguauuuauuuaacu

SEQ ID NO: 1683968 - RNA, 19 nt, Artificial Sequence
  Description of Artificial Sequence: Synthetic oligonucleotide
ccaacuaagcauauguccg

SEQ ID NO: 1683969 - RNA, 19 nt, Artificial Sequence
  Description of Artificial Sequence: Synthetic oligonucleotide
acagauagggguuguggag

SEQ ID NO: 1683970 - RNA, 19 nt, Artificial Sequence
  Description of Artificial Sequence: Synthetic oligonucleotide
aacagguguucccauauua

SEQ ID NO: 1683971 - RNA, 19 nt, Artificial Sequence
  Description of Artificial Sequence: Synthetic oligonucleotide
auacagggcacucugcaug

SEQ ID NO: 1683972 - RNA, 19 nt, Artificial Sequence
  Description of Artificial Sequence: Synthetic oligonucleotide
uuucgauuuuguuggugag

SEQ ID NO: 1683973 - RNA, 19 nt, Artificial Sequence
  Description of Artificial Sequence: Synthetic oligonucleotide
caacuaagcauauguccgg

SEQ ID NO: 1683974 - RNA, 19 nt, Artificial Sequence
  Description of Artificial Sequence: Synthetic oligonucleotide
agccacuccaguuaugucu

SEQ ID NO: 1683975 - RNA, 19 nt, Artificial Sequence
  Description of Artificial Sequence: Synthetic oligonucleotide
acaagcaaaugccacucug

SEQ ID NO: 1683976 - RNA, 19 nt, Artificial Sequence
  Description of Artificial Sequence: Synthetic oligonucleotide
agcuuuucgauguauuuau

SEQ ID NO: 1683977 - RNA, 19 nt, Artificial Sequence
  Description of Artificial Sequence: Synthetic oligonucleotide
aaacuccgucauaagcucc

SEQ ID NO: 1683978 - RNA, 19 nt, Artificial Sequence
  Description of Artificial Sequence: Synthetic oligonucleotide
caggcaucuaauaaauuuc

SEQ ID NO: 1683979 - RNA, 19 nt, Artificial Sequence
  Description of Artificial Sequence: Synthetic oligonucleotide
cugaguaucaccaaggaau

SEQ ID NO: 1683980 - RNA, 19 nt, Artificial Sequence
  Description of Artificial Sequence: Synthetic oligonucleotide
aaccaacuaagcauauguc

SEQ ID NO: 1683981 - RNA, 19 nt, Artificial Sequence
  Description of Artificial Sequence: Synthetic oligonucleotide
aacuugugacuuucgauuu

SEQ ID NO: 1683982 - RNA, 19 nt, Artificial Sequence
  Description of Artificial Sequence: Synthetic oligonucleotide
agccauugccaccacauug

SEQ ID NO: 1683983 - RNA, 19 nt, Artificial Sequence
  Description of Artificial Sequence: Synthetic oligonucleotide
ugggauccaacuuacuccu

SEQ ID NO: 1683984 - RNA, 19 nt, Artificial Sequence
  Description of Artificial Sequence: Synthetic oligonucleotide
agccggauaaagccauugc

SEQ ID NO: 1683985 - RNA, 19 nt, Artificial Sequence
  Description of Artificial Sequence: Synthetic oligonucleotide
uauagccggauaaagccau

SEQ ID NO: 1683986 - RNA, 19 nt, Artificial Sequence
  Description of Artificial Sequence: Synthetic oligonucleotide
ugcauacauuuacacgugc

SEQ ID NO: 1683987 - RNA, 19 nt, Artificial Sequence
  Description of Artificial Sequence: Synthetic oligonucleotide
uucguuggucagcuuuucg

SEQ ID NO: 1683988 - RNA, 19 nt, Artificial Sequence
  Description of Artificial Sequence: Synthetic oligonucleotide
ucccugaaccaacuaagca

SEQ ID NO: 1683989 - RNA, 19 nt, Artificial Sequence
  Description of Artificial Sequence: Synthetic oligonucleotide
acaauugugacaccaggua

SEQ ID NO: 1683990 - RNA, 19 nt, Artificial Sequence
  Description of Artificial Sequence: Synthetic oligonucleotide
augcuaaaauccucucuuc

SEQ ID NO: 1683991 - RNA, 19 nt, Artificial Sequence
  Description of Artificial Sequence: Synthetic oligonucleotide
cuguaagcaagauuccuuc

SEQ ID NO: 1683992 - RNA, 19 nt, Artificial Sequence
  Description of Artificial Sequence: Synthetic oligonucleotide
cuuucgauuuuguugguga

SEQ ID NO: 1683993 - RNA, 19 nt, Artificial Sequence
  Description of Artificial Sequence: Synthetic oligonucleotide
ucguuggucagcuuuucga

SEQ ID NO: 1683994 - RNA, 19 nt, Artificial Sequence
  Description of Artificial Sequence: Synthetic oligonucleotide
cacaccauacugacuaaag

SEQ ID NO: 1683995 - RNA, 19 nt, Artificial Sequence
  Description of Artificial Sequence: Synthetic oligonucleotide
aggagauugauuugccaca

SEQ ID NO: 1683996 - RNA, 19 nt, Artificial Sequence
  Description of Artificial Sequence: Synthetic oligonucleotide
uuaaugaggcaaagugcac

SEQ ID NO: 1683997 - RNA, 19 nt, Artificial Sequence
  Description of Artificial Sequence: Synthetic oligonucleotide
ucgucaggaaugcaaacau

SEQ ID NO: 1683998 - RNA, 19 nt, Artificial Sequence
  Description of Artificial Sequence: Synthetic oligonucleotide
uaucaaauucagcucguuu

SEQ ID NO: 1683999 - RNA, 19 nt, Artificial Sequence
  Description of Artificial Sequence: Synthetic oligonucleotide
aaucgcagugugcugcaca

SEQ ID NO: 1684000 - RNA, 19 nt, Artificial Sequence
  Description of Artificial Sequence: Synthetic oligonucleotide
ugaguaucaccaaggaauu

SEQ ID NO: 1684001 - RNA, 19 nt, Artificial Sequence
  Description of Artificial Sequence: Synthetic oligonucleotide
acuuacuccuaugaauauc

SEQ ID NO: 1684002 - RNA, 19 nt, Artificial Sequence
  Description of Artificial Sequence: Synthetic oligonucleotide
ucucuuuagguacaacauu

SEQ ID NO: 1684003 - RNA, 19 nt, Artificial Sequence
  Description of Artificial Sequence: Synthetic oligonucleotide
uuccuguuguauccaacug

SEQ ID NO: 1684004 - RNA, 19 nt, Artificial Sequence
  Description of Artificial Sequence: Synthetic oligonucleotide
uccguauagccggauaaag

SEQ ID NO: 1684005 - RNA, 19 nt, Artificial Sequence
  Description of Artificial Sequence: Synthetic oligonucleotide
ugcaaucgcagugugcugc

SEQ ID NO: 1684006 - RNA, 19 nt, Artificial Sequence
  Description of Artificial Sequence: Synthetic oligonucleotide
ucguuugugccaaaaucuc

SEQ ID NO: 1684007 - RNA, 19 nt, Artificial Sequence
  Description of Artificial Sequence: Synthetic oligonucleotide
gaagaugccccuucauuca

SEQ ID NO: 1684008 - RNA, 19 nt, Artificial Sequence
  Description of Artificial Sequence: Synthetic oligonucleotide
cguauagccggauaaagcc

SEQ ID NO: 1684009 - RNA, 19 nt, Artificial Sequence
  Description of Artificial Sequence: Synthetic oligonucleotide
gaucgcucgccgaauaucc

SEQ ID NO: 1684010 - RNA, 19 nt, Artificial Sequence
  Description of Artificial Sequence: Synthetic oligonucleotide
guaagcaagauuccuucca

SEQ ID NO: 1684011 - RNA, 19 nt, Artificial Sequence
  Description of Artificial Sequence: Synthetic oligonucleotide
acacagauagggguugugg

SEQ ID NO: 1684012 - RNA, 19 nt, Artificial Sequence
  Description of Artificial Sequence: Synthetic oligonucleotide
aggaauuuacaagcaaaug

SEQ ID NO: 1684013 - RNA, 19 nt, Artificial Sequence
  Description of Artificial Sequence: Synthetic oligonucleotide
acccuuucaucuuuuagaa

SEQ ID NO: 1684014 - RNA, 19 nt, Artificial Sequence
  Description of Artificial Sequence: Synthetic oligonucleotide
uguauccaacugcauacau

SEQ ID NO: 1684015 - RNA, 19 nt, Artificial Sequence
  Description of Artificial Sequence: Synthetic oligonucleotide
aggacagcuagaaacaggu

SEQ ID NO: 1684016 - RNA, 19 nt, Artificial Sequence
  Description of Artificial Sequence: Synthetic oligonucleotide
uacuccuaugaauaucaaa

SEQ ID NO: 1684017 - RNA, 19 nt, Artificial Sequence
  Description of Artificial Sequence: Synthetic oligonucleotide
caacuuacuccuaugaaua

SEQ ID NO: 1684018 - RNA, 19 nt, Artificial Sequence
  Description of Artificial Sequence: Synthetic oligonucleotide
auuguuaaacugagcuaac

SEQ ID NO: 1684019 - RNA, 19 nt, Artificial Sequence
  Description of Artificial Sequence: Synthetic oligonucleotide
ugugcugcacaucucucuc

SEQ ID NO: 1684020 - RNA, 19 nt, Artificial Sequence
  Description of Artificial Sequence: Synthetic oligonucleotide
agccacucacaccauacug

SEQ ID NO: 1684021 - RNA, 19 nt, Artificial Sequence
  Description of Artificial Sequence: Synthetic oligonucleotide
accauacugacuaaagccu

SEQ ID NO: 1684022 - RNA, 19 nt, Artificial Sequence
  Description of Artificial Sequence: Synthetic oligonucleotide
guagcuugcugucuggaca

SEQ ID NO: 1684023 - RNA, 19 nt, Artificial Sequence
  Description of Artificial Sequence: Synthetic oligonucleotide
uaucaccaaggaauuuaca

SEQ ID NO: 1684024 - RNA, 19 nt, Artificial Sequence
  Description of Artificial Sequence: Synthetic oligonucleotide
uauccacccacagagcugu

SEQ ID NO: 1684025 - RNA, 19 nt, Artificial Sequence
  Description of Artificial Sequence: Synthetic oligonucleotide
uuuguuggugagccacuca

SEQ ID NO: 1684026 - RNA, 19 nt, Artificial Sequence
  Description of Artificial Sequence: Synthetic oligonucleotide
auuuacacgugcaugcaga

SEQ ID NO: 1684027 - RNA, 19 nt, Artificial Sequence
  Description of Artificial Sequence: Synthetic oligonucleotide
accaauuguuaaacugagc

SEQ ID NO: 1684028 - RNA, 19 nt, Artificial Sequence
  Description of Artificial Sequence: Synthetic oligonucleotide
cuuucuuuauccacccaca

SEQ ID NO: 1684029 - RNA, 19 nt, Artificial Sequence
  Description of Artificial Sequence: Synthetic oligonucleotide
uggucccugaaccaacuaa

SEQ ID NO: 1684030 - RNA, 19 nt, Artificial Sequence
  Description of Artificial Sequence: Synthetic oligonucleotide
cauagcucuccaucaaguc

SEQ ID NO: 1684031 - RNA, 19 nt, Artificial Sequence
  Description of Artificial Sequence: Synthetic oligonucleotide
guuaaacugagcuaacuuu

SEQ ID NO: 1684032 - RNA, 19 nt, Artificial Sequence
  Description of Artificial Sequence: Synthetic oligonucleotide
aaaugccacucugucacgu

SEQ ID NO: 1684033 - RNA, 19 nt, Artificial Sequence
  Description of Artificial Sequence: Synthetic oligonucleotide
agguguucccauauuaaug

SEQ ID NO: 1684034 - RNA, 19 nt, Artificial Sequence
  Description of Artificial Sequence: Synthetic oligonucleotide
uuuacacgugcaugcagau

SEQ ID NO: 1684035 - RNA, 19 nt, Artificial Sequence
  Description of Artificial Sequence: Synthetic oligonucleotide
cacauagcucuccaucaag

SEQ ID NO: 1684036 - RNA, 19 nt, Artificial Sequence
  Description of Artificial Sequence: Synthetic oligonucleotide
ucgaggaagggguuuucga

SEQ ID NO: 1684037 - RNA, 19 nt, Artificial Sequence
  Description of Artificial Sequence: Synthetic oligonucleotide
aguugcaaucgcagugugc

SEQ ID NO: 1684038 - RNA, 19 nt, Artificial Sequence
  Description of Artificial Sequence: Synthetic oligonucleotide
caggauuuggaucgcucgc

SEQ ID NO: 1684039 - RNA, 19 nt, Artificial Sequence
  Description of Artificial Sequence: Synthetic oligonucleotide
guaaugcuaaaauccucuc

SEQ ID NO: 1684040 - RNA, 19 nt, Artificial Sequence
  Description of Artificial Sequence: Synthetic oligonucleotide
auuuggaucgcucgccgaa

SEQ ID NO: 1684041 - RNA, 19 nt, Artificial Sequence
  Description of Artificial Sequence: Synthetic oligonucleotide
ucacguacugcaacuuuau

SEQ ID NO: 1684042 - RNA, 19 nt, Artificial Sequence
  Description of Artificial Sequence: Synthetic oligonucleotide
auugaacccuuucaucuuu

SEQ ID NO: 1684043 - RNA, 19 nt, Artificial Sequence
  Description of Artificial Sequence: Synthetic oligonucleotide
gguuguggaguugcaaucg

SEQ ID NO: 1684044 - RNA, 19 nt, Artificial Sequence
  Description of Artificial Sequence: Synthetic oligonucleotide
guuguggaguugcaaucgc

SEQ ID NO: 1684045 - RNA, 19 nt, Artificial Sequence
  Description of Artificial Sequence: Synthetic oligonucleotide
agggcaacuugugacuuuc

SEQ ID NO: 1684046 - RNA, 19 nt, Artificial Sequence
  Description of Artificial Sequence: Synthetic oligonucleotide
uacaagcaaaugccacucu

SEQ ID NO: 1684047 - RNA, 19 nt, Artificial Sequence
  Description of Artificial Sequence: Synthetic oligonucleotide
ucuaaaggugaccccugua

SEQ ID NO: 1684048 - RNA, 19 nt, Artificial Sequence
  Description of Artificial Sequence: Synthetic oligonucleotide
acuaagcauauguccggca

SEQ ID NO: 1684049 - RNA, 19 nt, Artificial Sequence
  Description of Artificial Sequence: Synthetic oligonucleotide
gguacaacauuucauggcu

SEQ ID NO: 1684050 - RNA, 19 nt, Artificial Sequence
  Description of Artificial Sequence: Synthetic oligonucleotide
ggguuuucgacagccaggg

SEQ ID NO: 1684051 - RNA, 19 nt, Artificial Sequence
  Description of Artificial Sequence: Synthetic oligonucleotide
guguucccauauuaaugag

SEQ ID NO: 1684052 - RNA, 19 nt, Artificial Sequence
  Description of Artificial Sequence: Synthetic oligonucleotide
cuagaaacagguguuccca

SEQ ID NO: 1684053 - RNA, 19 nt, Artificial Sequence
  Description of Artificial Sequence: Synthetic oligonucleotide
ggauuuggaucgcucgccg

SEQ ID NO: 1684054 - RNA, 19 nt, Artificial Sequence
  Description of Artificial Sequence: Synthetic oligonucleotide
caugccgacaauugugaca

SEQ ID NO: 1684055 - RNA, 19 nt, Artificial Sequence
  Description of Artificial Sequence: Synthetic oligonucleotide
accccuguaacaugcagua

SEQ ID NO: 1684056 - RNA, 19 nt, Artificial Sequence
  Description of Artificial Sequence: Synthetic oligonucleotide
ugucaguuuguuuguccaa

SEQ ID NO: 1684057 - RNA, 19 nt, Artificial Sequence
  Description of Artificial Sequence: Synthetic oligonucleotide
ccaauuguuaaacugagcu

SEQ ID NO: 1684058 - RNA, 19 nt, Artificial Sequence
  Description of Artificial Sequence: Synthetic oligonucleotide
caauugugacaccagguaa

SEQ ID NO: 1684059 - RNA, 19 nt, Artificial Sequence
  Description of Artificial Sequence: Synthetic oligonucleotide
gccggauaaagccauugcc

SEQ ID NO: 1684060 - RNA, 19 nt, Artificial Sequence
  Description of Artificial Sequence: Synthetic oligonucleotide
aucgaggaagggguuuucg

SEQ ID NO: 1684061 - RNA, 19 nt, Artificial Sequence
  Description of Artificial Sequence: Synthetic oligonucleotide
caauuguuaaacugagcua

SEQ ID NO: 1684062 - RNA, 19 nt, Artificial Sequence
  Description of Artificial Sequence: Synthetic oligonucleotide
gguaccagauuuccuguug

SEQ ID NO: 1684063 - RNA, 19 nt, Artificial Sequence
  Description of Artificial Sequence: Synthetic oligonucleotide
uuguauccaacugcauaca

SEQ ID NO: 1684064 - RNA, 19 nt, Artificial Sequence
  Description of Artificial Sequence: Synthetic oligonucleotide
aucuaaaggugaccccugu

SEQ ID NO: 1684065 - RNA, 19 nt, Artificial Sequence
  Description of Artificial Sequence: Synthetic oligonucleotide
ugucacguacugcaacuuu

SEQ ID NO: 1684066 - RNA, 19 nt, Artificial Sequence
  Description of Artificial Sequence: Synthetic oligonucleotide
uugcacaagagaguucaaa

SEQ ID NO: 1684067 - RNA, 19 nt, Artificial Sequence
  Description of Artificial Sequence: Synthetic oligonucleotide
cuucacucgucaggaaugc

SEQ ID NO: 1684068 - RNA, 19 nt, Artificial Sequence
  Description of Artificial Sequence: Synthetic oligonucleotide
auugagauucaggucuccu

SEQ ID NO: 1684069 - RNA, 19 nt, Artificial Sequence
  Description of Artificial Sequence: Synthetic oligonucleotide
gaacugggauccaacuuac

SEQ ID NO: 1684070 - RNA, 19 nt, Artificial Sequence
  Description of Artificial Sequence: Synthetic oligonucleotide
uuacuccuaugaauaucaa

SEQ ID NO: 1684071 - RNA, 19 nt, Artificial Sequence
  Description of Artificial Sequence: Synthetic oligonucleotide
gaguugcaaucgcagugug

SEQ ID NO: 1684072 - RNA, 19 nt, Artificial Sequence
  Description of Artificial Sequence: Synthetic oligonucleotide
uucccauauuaaugaggca

SEQ ID NO: 1684073 - RNA, 19 nt, Artificial Sequence
  Description of Artificial Sequence: Synthetic oligonucleotide
aacggccccacgucuacau

SEQ ID NO: 1684074 - RNA, 19 nt, Artificial Sequence
  Description of Artificial Sequence: Synthetic oligonucleotide
aaugccacucugucacgua

SEQ ID NO: 1684075 - RNA, 19 nt, Artificial Sequence
  Description of Artificial Sequence: Synthetic oligonucleotide
cagauacagggcacucugc

SEQ ID NO: 1684076 - RNA, 19 nt, Artificial Sequence
  Description of Artificial Sequence: Synthetic oligonucleotide
cucuuuagguacaacauuu

SEQ ID NO: 1684077 - RNA, 19 nt, Artificial Sequence
  Description of Artificial Sequence: Synthetic oligonucleotide
ggucccugaaccaacuaag

SEQ ID NO: 1684078 - RNA, 19 nt, Artificial Sequence
  Description of Artificial Sequence: Synthetic oligonucleotide
ucauccguauagccggaua

SEQ ID NO: 1684079 - RNA, 19 nt, Artificial Sequence
  Description of Artificial Sequence: Synthetic oligonucleotide
aucgcagugugcugcacau

SEQ ID NO: 1684080 - RNA, 19 nt, Artificial Sequence
  Description of Artificial Sequence: Synthetic oligonucleotide
gauuuggaucgcucgccga

SEQ ID NO: 1684081 - RNA, 19 nt, Artificial Sequence
  Description of Artificial Sequence: Synthetic oligonucleotide
uagccggauaaagccauug

SEQ ID NO: 1684082 - RNA, 19 nt, Artificial Sequence
  Description of Artificial Sequence: Synthetic oligonucleotide
cacagagcuguaaugcuaa

SEQ ID NO: 1684083 - RNA, 19 nt, Artificial Sequence
  Description of Artificial Sequence: Synthetic oligonucleotide
acauuuacacgugcaugca

SEQ ID NO: 1684084 - RNA, 19 nt, Artificial Sequence
  Description of Artificial Sequence: Synthetic oligonucleotide
ugcagauacagggcacucu

SEQ ID NO: 1684085 - RNA, 19 nt, Artificial Sequence
  Description of Artificial Sequence: Synthetic oligonucleotide
ccguauagccggauaaagc

SEQ ID NO: 1684086 - RNA, 19 nt, Artificial Sequence
  Description of Artificial Sequence: Synthetic oligonucleotide
gcuaaaggcuuggaacugg

SEQ ID NO: 1684087 - RNA, 19 nt, Artificial Sequence
  Description of Artificial Sequence: Synthetic oligonucleotide
ggugaccccuguaacaugc

SEQ ID NO: 1684088 - RNA, 19 nt, Artificial Sequence
  Description of Artificial Sequence: Synthetic oligonucleotide
uucuugcacaagagaguuc

SEQ ID NO: 1684089 - RNA, 19 nt, Artificial Sequence
  Description of Artificial Sequence: Synthetic oligonucleotide
auguccggcaugcccacca

SEQ ID NO: 1684090 - RNA, 19 nt, Artificial Sequence
  Description of Artificial Sequence: Synthetic oligonucleotide
cauccguauagccggauaa

SEQ ID NO: 1684091 - RNA, 19 nt, Artificial Sequence
  Description of Artificial Sequence: Synthetic oligonucleotide
cuccacauuugaagguuuc

SEQ ID NO: 1684092 - RNA, 19 nt, Artificial Sequence
  Description of Artificial Sequence: Synthetic oligonucleotide
acgugcaugcagauacagg

SEQ ID NO: 1684093 - RNA, 19 nt, Artificial Sequence
  Description of Artificial Sequence: Synthetic oligonucleotide
agcauauguccggcaugcc

SEQ ID NO: 1684094 - RNA, 19 nt, Artificial Sequence
  Description of Artificial Sequence: Synthetic oligonucleotide
cucgucaggaaugcaaaca

SEQ ID NO: 1684095 - RNA, 19 nt, Artificial Sequence
  Description of Artificial Sequence: Synthetic oligonucleotide
ucacaccauacugacuaaa

SEQ ID NO: 1684096 - RNA, 19 nt, Artificial Sequence
  Description of Artificial Sequence: Synthetic oligonucleotide
agcucguuugugccaaaau

SEQ ID NO: 1684097 - RNA, 19 nt, Artificial Sequence
  Description of Artificial Sequence: Synthetic oligonucleotide
uugcaaucgcagugugcug

SEQ ID NO: 1684098 - RNA, 19 nt, Artificial Sequence
  Description of Artificial Sequence: Synthetic oligonucleotide
ucgcucgccgaauauccaa

SEQ ID NO: 1684099 - RNA, 19 nt, Artificial Sequence
  Description of Artificial Sequence: Synthetic oligonucleotide
uaccugggcuaaaggcuug

SEQ ID NO: 1684100 - RNA, 19 nt, Artificial Sequence
  Description of Artificial Sequence: Synthetic oligonucleotide
cacgugcaugcagauacag

SEQ ID NO: 1684101 - RNA, 19 nt, Artificial Sequence
  Description of Artificial Sequence: Synthetic oligonucleotide
acuugugacuuucgauuuu

SEQ ID NO: 1684102 - RNA, 19 nt, Artificial Sequence
  Description of Artificial Sequence: Synthetic oligonucleotide
ccuucauucaggauuugga

SEQ ID NO: 1684103 - RNA, 19 nt, Artificial Sequence
  Description of Artificial Sequence: Synthetic oligonucleotide
uccuugcucaaguccacuu

SEQ ID NO: 1684104 - RNA, 19 nt, Artificial Sequence
  Description of Artificial Sequence: Synthetic oligonucleotide
cauacauuuacacgugcau

SEQ ID NO: 1684105 - RNA, 19 nt, Artificial Sequence
  Description of Artificial Sequence: Synthetic oligonucleotide
uuggaucgcucgccgaaua

SEQ ID NO: 1684106 - RNA, 19 nt, Artificial Sequence
  Description of Artificial Sequence: Synthetic oligonucleotide
uggaucgcucgccgaauau

SEQ ID NO: 1684107 - RNA, 19 nt, Artificial Sequence
  Description of Artificial Sequence: Synthetic oligonucleotide
cuccgucauaagcuccugc

SEQ ID NO: 1684108 - RNA, 19 nt, Artificial Sequence
  Description of Artificial Sequence: Synthetic oligonucleotide
cauauuaaugaggcaaagu

SEQ ID NO: 1684109 - RNA, 19 nt, Artificial Sequence
  Description of Artificial Sequence: Synthetic oligonucleotide
aggagcaacuguaggagau

SEQ ID NO: 1684110 - RNA, 19 nt, Artificial Sequence
  Description of Artificial Sequence: Synthetic oligonucleotide
uaccagauuuccuguugua

SEQ ID NO: 1684111 - RNA, 19 nt, Artificial Sequence
  Description of Artificial Sequence: Synthetic oligonucleotide
ccgaauauccaaguugaac

SEQ ID NO: 1684112 - RNA, 19 nt, Artificial Sequence
  Description of Artificial Sequence: Synthetic oligonucleotide
agugcacaucgaggaaggg

SEQ ID NO: 1684113 - RNA, 19 nt, Artificial Sequence
  Description of Artificial Sequence: Synthetic oligonucleotide
ccggauaaagccauugcca

SEQ ID NO: 1684114 - RNA, 19 nt, Artificial Sequence
  Description of Artificial Sequence: Synthetic oligonucleotide
gggguuuucgacagccagg

SEQ ID NO: 1684115 - RNA, 19 nt, Artificial Sequence
  Description of Artificial Sequence: Synthetic oligonucleotide
cacucgucaggaaugcaaa

SEQ ID NO: 1684116 - RNA, 19 nt, Artificial Sequence
  Description of Artificial Sequence: Synthetic oligonucleotide
ccauacugacuaaagccuc

SEQ ID NO: 1684117 - RNA, 19 nt, Artificial Sequence
  Description of Artificial Sequence: Synthetic oligonucleotide
gcuucacucgucaggaaug

SEQ ID NO: 1684118 - RNA, 19 nt, Artificial Sequence
  Description of Artificial Sequence: Synthetic oligonucleotide
caccagguaaaccaauugu

SEQ ID NO: 1684119 - RNA, 19 nt, Artificial Sequence
  Description of Artificial Sequence: Synthetic oligonucleotide
cgacaauugugacaccagg

SEQ ID NO: 1684120 - RNA, 19 nt, Artificial Sequence
  Description of Artificial Sequence: Synthetic oligonucleotide
cauucaggauuuggaucgc

SEQ ID NO: 1684121 - RNA, 19 nt, Artificial Sequence
  Description of Artificial Sequence: Synthetic oligonucleotide
uuuggaucgcucgccgaau

SEQ ID NO: 1684122 - RNA, 19 nt, Artificial Sequence
  Description of Artificial Sequence: Synthetic oligonucleotide
cauacugacuaaagccucu

SEQ ID NO: 1684123 - RNA, 19 nt, Artificial Sequence
  Description of Artificial Sequence: Synthetic oligonucleotide
auuucguuggucagcuuuu

SEQ ID NO: 1684124 - RNA, 19 nt, Artificial Sequence
  Description of Artificial Sequence: Synthetic oligonucleotide
ccacucacaccauacugac

SEQ ID NO: 1684125 - RNA, 19 nt, Artificial Sequence
  Description of Artificial Sequence: Synthetic oligonucleotide
auaccugggcuaaaggcuu

SEQ ID NO: 1684126 - RNA, 19 nt, Artificial Sequence
  Description of Artificial Sequence: Synthetic oligonucleotide
cuaagcauauguccggcau

SEQ ID NO: 1684127 - RNA, 19 nt, Artificial Sequence
  Description of Artificial Sequence: Synthetic oligonucleotide
cauuucguuggucagcuuu

SEQ ID NO: 1684128 - RNA, 19 nt, Artificial Sequence
  Description of Artificial Sequence: Synthetic oligonucleotide
ggguuguggaguugcaauc

SEQ ID NO: 1684129 - RNA, 19 nt, Artificial Sequence
  Description of Artificial Sequence: Synthetic oligonucleotide
auaucaaauucagcucguu

SEQ ID NO: 1684130 - RNA, 19 nt, Artificial Sequence
  Description of Artificial Sequence: Synthetic oligonucleotide
ccacgucuacaucuguucc

SEQ ID NO: 1684131 - RNA, 19 nt, Artificial Sequence
  Description of Artificial Sequence: Synthetic oligonucleotide
guccaagccacuccaguua

SEQ ID NO: 1684132 - RNA, 19 nt, Artificial Sequence
  Description of Artificial Sequence: Synthetic oligonucleotide
cauugccaccacauugaga

SEQ ID NO: 1684133 - RNA, 19 nt, Artificial Sequence
  Description of Artificial Sequence: Synthetic oligonucleotide
uucacucgucaggaaugca

SEQ ID NO: 1684134 - RNA, 19 nt, Artificial Sequence
  Description of Artificial Sequence: Synthetic oligonucleotide
ccauauuaaugaggcaaag

SEQ ID NO: 1684135 - RNA, 19 nt, Artificial Sequence
  Description of Artificial Sequence: Synthetic oligonucleotide
gggcuaaaggcuuggaacu

SEQ ID NO: 1684136 - RNA, 19 nt, Artificial Sequence
  Description of Artificial Sequence: Synthetic oligonucleotide
caaguucugaaugucaguu

SEQ ID NO: 1684137 - RNA, 19 nt, Artificial Sequence
  Description of Artificial Sequence: Synthetic oligonucleotide
gagauugauuugccacaaa

SEQ ID NO: 1684138 - RNA, 19 nt, Artificial Sequence
  Description of Artificial Sequence: Synthetic oligonucleotide
acgucuacaucuguuccuu

SEQ ID NO: 1684139 - RNA, 19 nt, Artificial Sequence
  Description of Artificial Sequence: Synthetic oligonucleotide
gucacguacugcaacuuua

SEQ ID NO: 1684140 - RNA, 19 nt, Artificial Sequence
  Description of Artificial Sequence: Synthetic oligonucleotide
ccgacaauugugacaccag

SEQ ID NO: 1684141 - RNA, 19 nt, Artificial Sequence
  Description of Artificial Sequence: Synthetic oligonucleotide
ccaguucuauccacauagc

SEQ ID NO: 1684142 - RNA, 19 nt, Artificial Sequence
  Description of Artificial Sequence: Synthetic oligonucleotide
aacugggauccaacuuacu

SEQ ID NO: 1684143 - RNA, 19 nt, Artificial Sequence
  Description of Artificial Sequence: Synthetic oligonucleotide
acggccccacgucuacauc

SEQ ID NO: 1684144 - RNA, 19 nt, Artificial Sequence
  Description of Artificial Sequence: Synthetic oligonucleotide
gcauacauuuacacgugca

SEQ ID NO: 1684145 - RNA, 19 nt, Artificial Sequence
  Description of Artificial Sequence: Synthetic oligonucleotide
gcuguaaugcuaaaauccu

SEQ ID NO: 1684146 - RNA, 19 nt, Artificial Sequence
  Description of Artificial Sequence: Synthetic oligonucleotide
auccguauagccggauaaa

SEQ ID NO: 1684147 - RNA, 19 nt, Artificial Sequence
  Description of Artificial Sequence: Synthetic oligonucleotide
acaucgaggaagggguuuu

SEQ ID NO: 1684148 - RNA, 19 nt, Artificial Sequence
  Description of Artificial Sequence: Synthetic oligonucleotide
ggcuaaaggcuuggaacug

SEQ ID NO: 1684149 - RNA, 19 nt, Artificial Sequence
  Description of Artificial Sequence: Synthetic oligonucleotide
gaacuaugaaggacaucua

SEQ ID NO: 1684150 - RNA, 19 nt, Artificial Sequence
  Description of Artificial Sequence: Synthetic oligonucleotide
aaacggccccacgucuaca

SEQ ID NO: 1684151 - RNA, 19 nt, Artificial Sequence
  Description of Artificial Sequence: Synthetic oligonucleotide
uucgauccaccaggacagc

SEQ ID NO: 1684152 - RNA, 19 nt, Artificial Sequence
  Description of Artificial Sequence: Synthetic oligonucleotide
ccaacuuacuccuaugaau

SEQ ID NO: 1684153 - RNA, 19 nt, Artificial Sequence
  Description of Artificial Sequence: Synthetic oligonucleotide
gccauugccaccacauuga

SEQ ID NO: 1684154 - RNA, 19 nt, Artificial Sequence
  Description of Artificial Sequence: Synthetic oligonucleotide
gaccccuguaacaugcagu

SEQ ID NO: 1684155 - RNA, 19 nt, Artificial Sequence
  Description of Artificial Sequence: Synthetic oligonucleotide
cacacagauagggguugug

SEQ ID NO: 1684156 - RNA, 19 nt, Artificial Sequence
  Description of Artificial Sequence: Synthetic oligonucleotide
cagguguucccauauuaau

SEQ ID NO: 1684157 - RNA, 19 nt, Artificial Sequence
  Description of Artificial Sequence: Synthetic oligonucleotide
gccgacaauugugacacca

SEQ ID NO: 1684158 - RNA, 19 nt, Artificial Sequence
  Description of Artificial Sequence: Synthetic oligonucleotide
gaggccuguaagcaagauu

SEQ ID NO: 1684159 - RNA, 19 nt, Artificial Sequence
  Description of Artificial Sequence: Synthetic oligonucleotide
ggagauugauuugccacaa

SEQ ID NO: 1684160 - RNA, 19 nt, Artificial Sequence
  Description of Artificial Sequence: Synthetic oligonucleotide
cacgucuacaucuguuccu

SEQ ID NO: 1684161 - RNA, 19 nt, Artificial Sequence
  Description of Artificial Sequence: Synthetic oligonucleotide
cccauauuaaugaggcaaa

SEQ ID NO: 1684162 - RNA, 19 nt, Artificial Sequence
  Description of Artificial Sequence: Synthetic oligonucleotide
acacacagauagggguugu

SEQ ID NO: 1684163 - RNA, 19 nt, Artificial Sequence
  Description of Artificial Sequence: Synthetic oligonucleotide
gcaacuugugacuuucgau

SEQ ID NO: 1684164 - RNA, 19 nt, Artificial Sequence
  Description of Artificial Sequence: Synthetic oligonucleotide
ggcacugaggagcaacugu

SEQ ID NO: 1684165 - RNA, 19 nt, Artificial Sequence
  Description of Artificial Sequence: Synthetic oligonucleotide
ccaaggaauuuacaagcaa

SEQ ID NO: 1684166 - RNA, 19 nt, Artificial Sequence
  Description of Artificial Sequence: Synthetic oligonucleotide
ggauccaacuuacuccuau

SEQ ID NO: 1684167 - RNA, 19 nt, Artificial Sequence
  Description of Artificial Sequence: Synthetic oligonucleotide
acuccacauuugaagguuu

SEQ ID NO: 1684168 - RNA, 19 nt, Artificial Sequence
  Description of Artificial Sequence: Synthetic oligonucleotide
ugccgacaauugugacacc

SEQ ID NO: 1684169 - RNA, 19 nt, Artificial Sequence
  Description of Artificial Sequence: Synthetic oligonucleotide
gacuuucgauuuuguuggu

SEQ ID NO: 1684170 - RNA, 19 nt, Artificial Sequence
  Description of Artificial Sequence: Synthetic oligonucleotide
cuugcacaagagaguucaa

SEQ ID NO: 1684171 - RNA, 19 nt, Artificial Sequence
  Description of Artificial Sequence: Synthetic oligonucleotide
cccugaaccaacuaagcau

SEQ ID NO: 1684172 - RNA, 19 nt, Artificial Sequence
  Description of Artificial Sequence: Synthetic oligonucleotide
ggaucgcucgccgaauauc

SEQ ID NO: 1684173 - RNA, 19 nt, Artificial Sequence
  Description of Artificial Sequence: Synthetic oligonucleotide
ggaguugcaaucgcagugu

SEQ ID NO: 1684174 - RNA, 19 nt, Artificial Sequence
  Description of Artificial Sequence: Synthetic oligonucleotide
aucuuuagugaggccugua

SEQ ID NO: 1684175 - RNA, 19 nt, Artificial Sequence
  Description of Artificial Sequence: Synthetic oligonucleotide
ggccuguaagcaagauucc

SEQ ID NO: 1684176 - RNA, 19 nt, Artificial Sequence
  Description of Artificial Sequence: Synthetic oligonucleotide
uucccuggugaggcacuga

SEQ ID NO: 1684177 - RNA, 19 nt, Artificial Sequence
  Description of Artificial Sequence: Synthetic oligonucleotide
gggguuguggaguugcaau

SEQ ID NO: 1684178 - RNA, 19 nt, Artificial Sequence
  Description of Artificial Sequence: Synthetic oligonucleotide
aucgcucgccgaauaucca

SEQ ID NO: 1684179 - RNA, 19 nt, Artificial Sequence
  Description of Artificial Sequence: Synthetic oligonucleotide
gcaaucgcagugugcugca

SEQ ID NO: 1684180 - RNA, 19 nt, Artificial Sequence
  Description of Artificial Sequence: Synthetic oligonucleotide
uugccaccacauugagauu

SEQ ID NO: 1684181 - RNA, 19 nt, Artificial Sequence
  Description of Artificial Sequence: Synthetic oligonucleotide
caacuguaggagauugauu

SEQ ID NO: 1684182 - RNA, 19 nt, Artificial Sequence
  Description of Artificial Sequence: Synthetic oligonucleotide
caaucgcagugugcugcac

SEQ ID NO: 1684183 - RNA, 19 nt, Artificial Sequence
  Description of Artificial Sequence: Synthetic oligonucleotide
cuccaguucuauccacaua

SEQ ID NO: 1684184 - RNA, 19 nt, Artificial Sequence
  Description of Artificial Sequence: Synthetic oligonucleotide
cugaaccaacuaagcauau

SEQ ID NO: 1684185 - RNA, 19 nt, Artificial Sequence
  Description of Artificial Sequence: Synthetic oligonucleotide
cgcucgccgaauauccaag

SEQ ID NO: 1684186 - RNA, 19 nt, Artificial Sequence
  Description of Artificial Sequence: Synthetic oligonucleotide
ucgcagugugcugcacauc

SEQ ID NO: 1684187 - RNA, 19 nt, Artificial Sequence
  Description of Artificial Sequence: Synthetic oligonucleotide
cuacaucuguuccuuucuu

SEQ ID NO: 1684188 - RNA, 19 nt, Artificial Sequence
  Description of Artificial Sequence: Synthetic oligonucleotide
cacucacaccauacugacu

SEQ ID NO: 1684189 - RNA, 19 nt, Artificial Sequence
  Description of Artificial Sequence: Synthetic oligonucleotide
auagccggauaaagccauu

SEQ ID NO: 1684190 - RNA, 19 nt, Artificial Sequence
  Description of Artificial Sequence: Synthetic oligonucleotide
cucgccgaauauccaaguu

SEQ ID NO: 1684191 - RNA, 19 nt, Artificial Sequence
  Description of Artificial Sequence: Synthetic oligonucleotide
cuaaagccucuucccuggu

SEQ ID NO: 1684192 - RNA, 19 nt, Artificial Sequence
  Description of Artificial Sequence: Synthetic oligonucleotide
cugcuucacucgucaggaa

SEQ ID NO: 1684193 - RNA, 19 nt, Artificial Sequence
  Description of Artificial Sequence: Synthetic oligonucleotide
gccuguaagcaagauuccu

SEQ ID NO: 1684194 - RNA, 19 nt, Artificial Sequence
  Description of Artificial Sequence: Synthetic oligonucleotide
cagcucguuugugccaaaa

SEQ ID NO: 1684195 - RNA, 19 nt, Artificial Sequence
  Description of Artificial Sequence: Synthetic oligonucleotide
gcucgccgaauauccaagu

SEQ ID NO: 1684196 - RNA, 19 nt, Artificial Sequence
  Description of Artificial Sequence: Synthetic oligonucleotide
ccccuguaacaugcaguag

SEQ ID NO: 1684197 - RNA, 19 nt, Artificial Sequence
  Description of Artificial Sequence: Synthetic oligonucleotide
cacguacugcaacuuuauu

SEQ ID NO: 1684198 - RNA, 19 nt, Artificial Sequence
  Description of Artificial Sequence: Synthetic oligonucleotide
cgauuuuguuggugagcca

SEQ ID NO: 1684199 - RNA, 19 nt, Artificial Sequence
  Description of Artificial Sequence: Synthetic oligonucleotide
ccaccaugccgacaauugu

SEQ ID NO: 1684200 - RNA, 19 nt, Artificial Sequence
  Description of Artificial Sequence: Synthetic oligonucleotide
cugucacguacugcaacuu

SEQ ID NO: 1684201 - RNA, 19 nt, Artificial Sequence
  Description of Artificial Sequence: Synthetic oligonucleotide
ggagcaacuguaggagauu

SEQ ID NO: 1684202 - RNA, 19 nt, Artificial Sequence
  Description of Artificial Sequence: Synthetic oligonucleotide
cucauccguauagccggau

SEQ ID NO: 1684203 - RNA, 19 nt, Artificial Sequence
  Description of Artificial Sequence: Synthetic oligonucleotide
cggccccacgucuacaucu

SEQ ID NO: 1684204 - RNA, 19 nt, Artificial Sequence
  Description of Artificial Sequence: Synthetic oligonucleotide
gggauccaacuuacuccua

SEQ ID NO: 1684205 - RNA, 19 nt, Artificial Sequence
  Description of Artificial Sequence: Synthetic oligonucleotide
ccccacgucuacaucuguu

SEQ ID NO: 1684206 - RNA, 19 nt, Artificial Sequence
  Description of Artificial Sequence: Synthetic oligonucleotide
aagaauauauaacaucggc

SEQ ID NO: 1684207 - RNA, 19 nt, Artificial Sequence
  Description of Artificial Sequence: Synthetic oligonucleotide
aaugugucuuuauugaagc

SEQ ID NO: 1684208 - RNA, 19 nt, Artificial Sequence
  Description of Artificial Sequence: Synthetic oligonucleotide
aauaguuucgugaagauuc

SEQ ID NO: 1684209 - RNA, 19 nt, Artificial Sequence
  Description of Artificial Sequence: Synthetic oligonucleotide
aauguuauagcccauucug

SEQ ID NO: 1684210 - RNA, 19 nt, Artificial Sequence
  Description of Artificial Sequence: Synthetic oligonucleotide
ugaagaauggaaauaaggu

SEQ ID NO: 1684211 - RNA, 19 nt, Artificial Sequence
  Description of Artificial Sequence: Synthetic oligonucleotide
uuuuaguccaaccagggca

SEQ ID NO: 1684212 - RNA, 19 nt, Artificial Sequence
  Description of Artificial Sequence: Synthetic oligonucleotide
uggaaauaagguuagaaga

SEQ ID NO: 1684213 - RNA, 19 nt, Artificial Sequence
  Description of Artificial Sequence: Synthetic oligonucleotide
uauaacaucggcugaaaag

SEQ ID NO: 1684214 - RNA, 19 nt, Artificial Sequence
  Description of Artificial Sequence: Synthetic oligonucleotide
accgauucaacccagccgc

SEQ ID NO: 1684215 - RNA, 19 nt, Artificial Sequence
  Description of Artificial Sequence: Synthetic oligonucleotide
aacaauucuuacccgcccc

SEQ ID NO: 1684216 - RNA, 19 nt, Artificial Sequence
  Description of Artificial Sequence: Synthetic oligonucleotide
aauuagucggacuccaaug

SEQ ID NO: 1684217 - RNA, 19 nt, Artificial Sequence
  Description of Artificial Sequence: Synthetic oligonucleotide
aauagagcagagaaucccc

SEQ ID NO: 1684218 - RNA, 19 nt, Artificial Sequence
  Description of Artificial Sequence: Synthetic oligonucleotide
uucgugaagauucaggagu

SEQ ID NO: 1684219 - RNA, 19 nt, Artificial Sequence
  Description of Artificial Sequence: Synthetic oligonucleotide
cauacgucagcguaaauag

SEQ ID NO: 1684220 - RNA, 19 nt, Artificial Sequence
  Description of Artificial Sequence: Synthetic oligonucleotide
uuauuagcaugaagaaugg

SEQ ID NO: 1684221 - RNA, 19 nt, Artificial Sequence
  Description of Artificial Sequence: Synthetic oligonucleotide
ucuucaauuagucggacuc

SEQ ID NO: 1684222 - RNA, 19 nt, Artificial Sequence
  Description of Artificial Sequence: Synthetic oligonucleotide
aggaaugagaccugggugg

SEQ ID NO: 1684223 - RNA, 19 nt, Artificial Sequence
  Description of Artificial Sequence: Synthetic oligonucleotide
aauauauaacaucggcuga

SEQ ID NO: 1684224 - RNA, 19 nt, Artificial Sequence
  Description of Artificial Sequence: Synthetic oligonucleotide
acagugugucacuacagcc

SEQ ID NO: 1684225 - RNA, 19 nt, Artificial Sequence
  Description of Artificial Sequence: Synthetic oligonucleotide
aauagcucagaacucauuu

SEQ ID NO: 1684226 - RNA, 19 nt, Artificial Sequence
  Description of Artificial Sequence: Synthetic oligonucleotide
ucuucacucaacaaugugu

SEQ ID NO: 1684227 - RNA, 19 nt, Artificial Sequence
  Description of Artificial Sequence: Synthetic oligonucleotide
ugagggagaauucaucgcc

SEQ ID NO: 1684228 - RNA, 19 nt, Artificial Sequence
  Description of Artificial Sequence: Synthetic oligonucleotide
aagauucaggaguaggugu

SEQ ID NO: 1684229 - RNA, 19 nt, Artificial Sequence
  Description of Artificial Sequence: Synthetic oligonucleotide
augaagaauggaaauaagg

SEQ ID NO: 1684230 - RNA, 19 nt, Artificial Sequence
  Description of Artificial Sequence: Synthetic oligonucleotide
ucuuccaacauuugaacgu

SEQ ID NO: 1684231 - RNA, 19 nt, Artificial Sequence
  Description of Artificial Sequence: Synthetic oligonucleotide
aagaauggaaauaagguua

SEQ ID NO: 1684232 - RNA, 19 nt, Artificial Sequence
  Description of Artificial Sequence: Synthetic oligonucleotide
uucccgaaaaucaugacau

SEQ ID NO: 1684233 - RNA, 19 nt, Artificial Sequence
  Description of Artificial Sequence: Synthetic oligonucleotide
aauucgugaugcuuggagu

SEQ ID NO: 1684234 - RNA, 19 nt, Artificial Sequence
  Description of Artificial Sequence: Synthetic oligonucleotide
auaacccaagacuuccuac

SEQ ID NO: 1684235 - RNA, 19 nt, Artificial Sequence
  Description of Artificial Sequence: Synthetic oligonucleotide
auaacaucggcugaaaagu

SEQ ID NO: 1684236 - RNA, 19 nt, Artificial Sequence
  Description of Artificial Sequence: Synthetic oligonucleotide
agcguaaauagcucagaac

SEQ ID NO: 1684237 - RNA, 19 nt, Artificial Sequence
  Description of Artificial Sequence: Synthetic oligonucleotide
aauucuuacccgccccuuc

SEQ ID NO: 1684238 - RNA, 19 nt, Artificial Sequence
  Description of Artificial Sequence: Synthetic oligonucleotide
gaugccuaaguacaucuug

SEQ ID NO: 1684239 - RNA, 19 nt, Artificial Sequence
  Description of Artificial Sequence: Synthetic oligonucleotide
cagccaacaauucuuaccc

SEQ ID NO: 1684240 - RNA, 19 nt, Artificial Sequence
  Description of Artificial Sequence: Synthetic oligonucleotide
agaauucaucgccagcugg

SEQ ID NO: 1684241 - RNA, 19 nt, Artificial Sequence
  Description of Artificial Sequence: Synthetic oligonucleotide
ucggacuccaauguuauag

SEQ ID NO: 1684242 - RNA, 19 nt, Artificial Sequence
  Description of Artificial Sequence: Synthetic oligonucleotide
aaaaggauggacccuccgu

SEQ ID NO: 1684243 - RNA, 19 nt, Artificial Sequence
  Description of Artificial Sequence: Synthetic oligonucleotide
accaucucccuucagagug

SEQ ID NO: 1684244 - RNA, 19 nt, Artificial Sequence
  Description of Artificial Sequence: Synthetic oligonucleotide
aauaagguuagaagaauau

SEQ ID NO: 1684245 - RNA, 19 nt, Artificial Sequence
  Description of Artificial Sequence: Synthetic oligonucleotide
gaagugcacacucguaggg

SEQ ID NO: 1684246 - RNA, 19 nt, Artificial Sequence
  Description of Artificial Sequence: Synthetic oligonucleotide
uuggaguaaauaagggaug

SEQ ID NO: 1684247 - RNA, 19 nt, Artificial Sequence
  Description of Artificial Sequence: Synthetic oligonucleotide
agggcaaguaccuccugcc

SEQ ID NO: 1684248 - RNA, 19 nt, Artificial Sequence
  Description of Artificial Sequence: Synthetic oligonucleotide
auuagucggacuccaaugu

SEQ ID NO: 1684249 - RNA, 19 nt, Artificial Sequence
  Description of Artificial Sequence: Synthetic oligonucleotide
uuucgugaagauucaggag

SEQ ID NO: 1684250 - RNA, 19 nt, Artificial Sequence
  Description of Artificial Sequence: Synthetic oligonucleotide
cucgucgcagccuaggucc

SEQ ID NO: 1684251 - RNA, 19 nt, Artificial Sequence
  Description of Artificial Sequence: Synthetic oligonucleotide
agaauauauaacaucggcu

SEQ ID NO: 1684252 - RNA, 19 nt, Artificial Sequence
  Description of Artificial Sequence: Synthetic oligonucleotide
acaccgauucaacccagcc

SEQ ID NO: 1684253 - RNA, 19 nt, Artificial Sequence
  Description of Artificial Sequence: Synthetic oligonucleotide
aacccaagacuuccuacag

SEQ ID NO: 1684254 - RNA, 19 nt, Artificial Sequence
  Description of Artificial Sequence: Synthetic oligonucleotide
aucgggaagcuccacaaag

SEQ ID NO: 1684255 - RNA, 19 nt, Artificial Sequence
  Description of Artificial Sequence: Synthetic oligonucleotide
guuucgugaagauucagga

SEQ ID NO: 1684256 - RNA, 19 nt, Artificial Sequence
  Description of Artificial Sequence: Synthetic oligonucleotide
cugaagugcacacucguag

SEQ ID NO: 1684257 - RNA, 19 nt, Artificial Sequence
  Description of Artificial Sequence: Synthetic oligonucleotide
uccaacauuugaacgugcc

SEQ ID NO: 1684258 - RNA, 19 nt, Artificial Sequence
  Description of Artificial Sequence: Synthetic oligonucleotide
gaauucaucgccagcuggg

SEQ ID NO: 1684259 - RNA, 19 nt, Artificial Sequence
  Description of Artificial Sequence: Synthetic oligonucleotide
agugcuuccggcaugacug

SEQ ID NO: 1684260 - RNA, 19 nt, Artificial Sequence
  Description of Artificial Sequence: Synthetic oligonucleotide
uuuaguccaaccagggcaa

SEQ ID NO: 1684261 - RNA, 19 nt, Artificial Sequence
  Description of Artificial Sequence: Synthetic oligonucleotide
ggaaauagagcagagaauc

SEQ ID NO: 1684262 - RNA, 19 nt, Artificial Sequence
  Description of Artificial Sequence: Synthetic oligonucleotide
uaacccaagacuuccuaca

SEQ ID NO: 1684263 - RNA, 19 nt, Artificial Sequence
  Description of Artificial Sequence: Synthetic oligonucleotide
uccaauucgugaugcuugg

SEQ ID NO: 1684264 - RNA, 19 nt, Artificial Sequence
  Description of Artificial Sequence: Synthetic oligonucleotide
aaaggauggacccuccgua

SEQ ID NO: 1684265 - RNA, 19 nt, Artificial Sequence
  Description of Artificial Sequence: Synthetic oligonucleotide
caggguugucucuuaaugg

SEQ ID NO: 1684266 - RNA, 19 nt, Artificial Sequence
  Description of Artificial Sequence: Synthetic oligonucleotide
ugacaagcgcuccauacgu

SEQ ID NO: 1684267 - RNA, 19 nt, Artificial Sequence
  Description of Artificial Sequence: Synthetic oligonucleotide
aggagguuggaguaaauaa

SEQ ID NO: 1684268 - RNA, 19 nt, Artificial Sequence
  Description of Artificial Sequence: Synthetic oligonucleotide
aaucuucaauuagucggac

SEQ ID NO: 1684269 - RNA, 19 nt, Artificial Sequence
  Description of Artificial Sequence: Synthetic oligonucleotide
caugaagaauggaaauaag

SEQ ID NO: 1684270 - RNA, 19 nt, Artificial Sequence
  Description of Artificial Sequence: Synthetic oligonucleotide
ugucacuacagccaacaau

SEQ ID NO: 1684271 - RNA, 19 nt, Artificial Sequence
  Description of Artificial Sequence: Synthetic oligonucleotide
uccaaccagggcaaguacc

SEQ ID NO: 1684272 - RNA, 19 nt, Artificial Sequence
  Description of Artificial Sequence: Synthetic oligonucleotide
aguuucgugaagauucagg

SEQ ID NO: 1684273 - RNA, 19 nt, Artificial Sequence
  Description of Artificial Sequence: Synthetic oligonucleotide
ugugucuuuauugaagcau

SEQ ID NO: 1684274 - RNA, 19 nt, Artificial Sequence
  Description of Artificial Sequence: Synthetic oligonucleotide
auucaacccagccgcggcc

SEQ ID NO: 1684275 - RNA, 19 nt, Artificial Sequence
  Description of Artificial Sequence: Synthetic oligonucleotide
gugacaagcgcuccauacg

SEQ ID NO: 1684276 - RNA, 19 nt, Artificial Sequence
  Description of Artificial Sequence: Synthetic oligonucleotide
aagggaugaguggcuaucg

SEQ ID NO: 1684277 - RNA, 19 nt, Artificial Sequence
  Description of Artificial Sequence: Synthetic oligonucleotide
uuauucacgucuucaucgu

SEQ ID NO: 1684278 - RNA, 19 nt, Artificial Sequence
  Description of Artificial Sequence: Synthetic oligonucleotide
ggagacaccgauucaaccc

SEQ ID NO: 1684279 - RNA, 19 nt, Artificial Sequence
  Description of Artificial Sequence: Synthetic oligonucleotide
gacuccaauguuauagccc

SEQ ID NO: 1684280 - RNA, 19 nt, Artificial Sequence
  Description of Artificial Sequence: Synthetic oligonucleotide
caacggguuauuuuccaag

SEQ ID NO: 1684281 - RNA, 19 nt, Artificial Sequence
  Description of Artificial Sequence: Synthetic oligonucleotide
cucgacauggugcccaccg

SEQ ID NO: 1684282 - RNA, 19 nt, Artificial Sequence
  Description of Artificial Sequence: Synthetic oligonucleotide
gauucaacccagccgcggc

SEQ ID NO: 1684283 - RNA, 19 nt, Artificial Sequence
  Description of Artificial Sequence: Synthetic oligonucleotide
ugcccaccgagcaacgccg

SEQ ID NO: 1684284 - RNA, 19 nt, Artificial Sequence
  Description of Artificial Sequence: Synthetic oligonucleotide
cucugucacaccaucuccc

SEQ ID NO: 1684285 - RNA, 19 nt, Artificial Sequence
  Description of Artificial Sequence: Synthetic oligonucleotide
uucaauuagucggacucca

SEQ ID NO: 1684286 - RNA, 19 nt, Artificial Sequence
  Description of Artificial Sequence: Synthetic oligonucleotide
acaagcgcuccauacguca

SEQ ID NO: 1684287 - RNA, 19 nt, Artificial Sequence
  Description of Artificial Sequence: Synthetic oligonucleotide
ucguagggcaagcaaagua

SEQ ID NO: 1684288 - RNA, 19 nt, Artificial Sequence
  Description of Artificial Sequence: Synthetic oligonucleotide
aaaguggcuuuugcuuugg

SEQ ID NO: 1684289 - RNA, 19 nt, Artificial Sequence
  Description of Artificial Sequence: Synthetic oligonucleotide
agugcacacucguagggca

SEQ ID NO: 1684290 - RNA, 19 nt, Artificial Sequence
  Description of Artificial Sequence: Synthetic oligonucleotide
ugaaugccaccuuagcaau

SEQ ID NO: 1684291 - RNA, 19 nt, Artificial Sequence
  Description of Artificial Sequence: Synthetic oligonucleotide
gagacaccgauucaaccca

SEQ ID NO: 1684292 - RNA, 19 nt, Artificial Sequence
  Description of Artificial Sequence: Synthetic oligonucleotide
agcaacgccgccucgccuc

SEQ ID NO: 1684293 - RNA, 19 nt, Artificial Sequence
  Description of Artificial Sequence: Synthetic oligonucleotide
caccgauucaacccagccg

SEQ ID NO: 1684294 - RNA, 19 nt, Artificial Sequence
  Description of Artificial Sequence: Synthetic oligonucleotide
gcguaaauagcucagaacu

SEQ ID NO: 1684295 - RNA, 19 nt, Artificial Sequence
  Description of Artificial Sequence: Synthetic oligonucleotide
aguuucccgaaaaucauga

SEQ ID NO: 1684296 - RNA, 19 nt, Artificial Sequence
  Description of Artificial Sequence: Synthetic oligonucleotide
uccuacagccauuugccaa

SEQ ID NO: 1684297 - RNA, 19 nt, Artificial Sequence
  Description of Artificial Sequence: Synthetic oligonucleotide
cagccuaggucccaggccc

SEQ ID NO: 1684298 - RNA, 19 nt, Artificial Sequence
  Description of Artificial Sequence: Synthetic oligonucleotide
guuggaguaaauaagggau

SEQ ID NO: 1684299 - RNA, 19 nt, Artificial Sequence
  Description of Artificial Sequence: Synthetic oligonucleotide
aacgccgccucgccucacc

SEQ ID NO: 1684300 - RNA, 19 nt, Artificial Sequence
  Description of Artificial Sequence: Synthetic oligonucleotide
ucgggaagcuccacaaagu

SEQ ID NO: 1684301 - RNA, 19 nt, Artificial Sequence
  Description of Artificial Sequence: Synthetic oligonucleotide
cuucaauuagucggacucc

SEQ ID NO: 1684302 - RNA, 19 nt, Artificial Sequence
  Description of Artificial Sequence: Synthetic oligonucleotide
agggagaauucaucgccag

SEQ ID NO: 1684303 - RNA, 19 nt, Artificial Sequence
  Description of Artificial Sequence: Synthetic oligonucleotide
gguuggaguaaauaaggga

SEQ ID NO: 1684304 - RNA, 19 nt, Artificial Sequence
  Description of Artificial Sequence: Synthetic oligonucleotide
uagucggacuccaauguua

SEQ ID NO: 1684305 - RNA, 19 nt, Artificial Sequence
  Description of Artificial Sequence: Synthetic oligonucleotide
aauaagggaugaguggcua

SEQ ID NO: 1684306 - RNA, 19 nt, Artificial Sequence
  Description of Artificial Sequence: Synthetic oligonucleotide
ugacauccgcaguuucccg

SEQ ID NO: 1684307 - RNA, 19 nt, Artificial Sequence
  Description of Artificial Sequence: Synthetic oligonucleotide
ucggcugaaaagucacuga

SEQ ID NO: 1684308 - RNA, 19 nt, Artificial Sequence
  Description of Artificial Sequence: Synthetic oligonucleotide
auauaacaucggcugaaaa

SEQ ID NO: 1684309 - RNA, 19 nt, Artificial Sequence
  Description of Artificial Sequence: Synthetic oligonucleotide
gggaugaguggcuaucggg

SEQ ID NO: 1684310 - RNA, 19 nt, Artificial Sequence
  Description of Artificial Sequence: Synthetic oligonucleotide
acaauucuuacccgccccu

SEQ ID NO: 1684311 - RNA, 19 nt, Artificial Sequence
  Description of Artificial Sequence: Synthetic oligonucleotide
cuuccaacauuugaacgug

SEQ ID NO: 1684312 - RNA, 19 nt, Artificial Sequence
  Description of Artificial Sequence: Synthetic oligonucleotide
uauauaacaucggcugaaa

SEQ ID NO: 1684313 - RNA, 19 nt, Artificial Sequence
  Description of Artificial Sequence: Synthetic oligonucleotide
acuacagccaacaauucuu

SEQ ID NO: 1684314 - RNA, 19 nt, Artificial Sequence
  Description of Artificial Sequence: Synthetic oligonucleotide
uaaguacaucuugaaugcc

SEQ ID NO: 1684315 - RNA, 19 nt, Artificial Sequence
  Description of Artificial Sequence: Synthetic oligonucleotide
agggaugaguggcuaucgg

SEQ ID NO: 1684316 - RNA, 19 nt, Artificial Sequence
  Description of Artificial Sequence: Synthetic oligonucleotide
auacgucagcguaaauagc

SEQ ID NO: 1684317 - RNA, 19 nt, Artificial Sequence
  Description of Artificial Sequence: Synthetic oligonucleotide
ucaauccgccugaggaacc

SEQ ID NO: 1684318 - RNA, 19 nt, Artificial Sequence
  Description of Artificial Sequence: Synthetic oligonucleotide
cuugcucucggugccacgg

SEQ ID NO: 1684319 - RNA, 19 nt, Artificial Sequence
  Description of Artificial Sequence: Synthetic oligonucleotide
auggugcccaccgagcaac

SEQ ID NO: 1684320 - RNA, 19 nt, Artificial Sequence
  Description of Artificial Sequence: Synthetic oligonucleotide
auaagguuagaagaauaua

SEQ ID NO: 1684321 - RNA, 19 nt, Artificial Sequence
  Description of Artificial Sequence: Synthetic oligonucleotide
aaguccaccaacggguuau

SEQ ID NO: 1684322 - RNA, 19 nt, Artificial Sequence
  Description of Artificial Sequence: Synthetic oligonucleotide
agauucaggaguaggugug

SEQ ID NO: 1684323 - RNA, 19 nt, Artificial Sequence
  Description of Artificial Sequence: Synthetic oligonucleotide
aucuucaauuagucggacu

SEQ ID NO: 1684324 - RNA, 19 nt, Artificial Sequence
  Description of Artificial Sequence: Synthetic oligonucleotide
caaggcuccccgcagcacc

SEQ ID NO: 1684325 - RNA, 19 nt, Artificial Sequence
  Description of Artificial Sequence: Synthetic oligonucleotide
caacauuugaacgugccaa

SEQ ID NO: 1684326 - RNA, 19 nt, Artificial Sequence
  Description of Artificial Sequence: Synthetic oligonucleotide
caugacuggcuuccguggc

SEQ ID NO: 1684327 - RNA, 19 nt, Artificial Sequence
  Description of Artificial Sequence: Synthetic oligonucleotide
cagaguguccuggacaaac

SEQ ID NO: 1684328 - RNA, 19 nt, Artificial Sequence
  Description of Artificial Sequence: Synthetic oligonucleotide
cugcucuuuauuagcauga

SEQ ID NO: 1684329 - RNA, 19 nt, Artificial Sequence
  Description of Artificial Sequence: Synthetic oligonucleotide
uuagucggacuccaauguu

SEQ ID NO: 1684330 - RNA, 19 nt, Artificial Sequence
  Description of Artificial Sequence: Synthetic oligonucleotide
ucaauuagucggacuccaa

SEQ ID NO: 1684331 - RNA, 19 nt, Artificial Sequence
  Description of Artificial Sequence: Synthetic oligonucleotide
ugccuaaguacaucuugaa

SEQ ID NO: 1684332 - RNA, 19 nt, Artificial Sequence
  Description of Artificial Sequence: Synthetic oligonucleotide
caaaguacccgucugcucu

SEQ ID NO: 1684333 - RNA, 19 nt, Artificial Sequence
  Description of Artificial Sequence: Synthetic oligonucleotide
ucacuacagccaacaauuc

SEQ ID NO: 1684334 - RNA, 19 nt, Artificial Sequence
  Description of Artificial Sequence: Synthetic oligonucleotide
uaagggaugaguggcuauc

SEQ ID NO: 1684335 - RNA, 19 nt, Artificial Sequence
  Description of Artificial Sequence: Synthetic oligonucleotide
gucagcguaaauagcucag

SEQ ID NO: 1684336 - RNA, 19 nt, Artificial Sequence
  Description of Artificial Sequence: Synthetic oligonucleotide
ggacuccaauguuauagcc

SEQ ID NO: 1684337 - RNA, 19 nt, Artificial Sequence
  Description of Artificial Sequence: Synthetic oligonucleotide
caccaacggguuauuuucc

SEQ ID NO: 1684338 - RNA, 19 nt, Artificial Sequence
  Description of Artificial Sequence: Synthetic oligonucleotide
agcgcuccauacgucagcg

SEQ ID NO: 1684339 - RNA, 19 nt, Artificial Sequence
  Description of Artificial Sequence: Synthetic oligonucleotide
cuggagacaccgauucaac

SEQ ID NO: 1684340 - RNA, 19 nt, Artificial Sequence
  Description of Artificial Sequence: Synthetic oligonucleotide
agcaugaagaauggaaaua

SEQ ID NO: 1684341 - RNA, 19 nt, Artificial Sequence
  Description of Artificial Sequence: Synthetic oligonucleotide
ucuuacccgccccuuccca

SEQ ID NO: 1684342 - RNA, 19 nt, Artificial Sequence
  Description of Artificial Sequence: Synthetic oligonucleotide
accaacggguuauuuucca

SEQ ID NO: 1684343 - RNA, 19 nt, Artificial Sequence
  Description of Artificial Sequence: Synthetic oligonucleotide
agcaaaguacccgucugcu

SEQ ID NO: 1684344 - RNA, 19 nt, Artificial Sequence
  Description of Artificial Sequence: Synthetic oligonucleotide
auagcccauucuguccagc

SEQ ID NO: 1684345 - RNA, 19 nt, Artificial Sequence
  Description of Artificial Sequence: Synthetic oligonucleotide
gucacuacagccaacaauu

SEQ ID NO: 1684346 - RNA, 19 nt, Artificial Sequence
  Description of Artificial Sequence: Synthetic oligonucleotide
ucccucccguccauaaccc

SEQ ID NO: 1684347 - RNA, 19 nt, Artificial Sequence
  Description of Artificial Sequence: Synthetic oligonucleotide
gacauccgcaguuucccga

SEQ ID NO: 1684348 - RNA, 19 nt, Artificial Sequence
  Description of Artificial Sequence: Synthetic oligonucleotide
cucucggugccacgguucg

SEQ ID NO: 1684349 - RNA, 19 nt, Artificial Sequence
  Description of Artificial Sequence: Synthetic oligonucleotide
auaagggaugaguggcuau

SEQ ID NO: 1684350 - RNA, 19 nt, Artificial Sequence
  Description of Artificial Sequence: Synthetic oligonucleotide
uaguuucgugaagauucag

SEQ ID NO: 1684351 - RNA, 19 nt, Artificial Sequence
  Description of Artificial Sequence: Synthetic oligonucleotide
aaaguacccgucugcucuu

SEQ ID NO: 1684352 - RNA, 19 nt, Artificial Sequence
  Description of Artificial Sequence: Synthetic oligonucleotide
uccgcaguuucccgaaaau

SEQ ID NO: 1684353 - RNA, 19 nt, Artificial Sequence
  Description of Artificial Sequence: Synthetic oligonucleotide
guugucucuuaaugggguc

SEQ ID NO: 1684354 - RNA, 19 nt, Artificial Sequence
  Description of Artificial Sequence: Synthetic oligonucleotide
ucucaccccagcaggugcu

SEQ ID NO: 1684355 - RNA, 19 nt, Artificial Sequence
  Description of Artificial Sequence: Synthetic oligonucleotide
gcaugacuggcuuccgugg

SEQ ID NO: 1684356 - RNA, 19 nt, Artificial Sequence
  Description of Artificial Sequence: Synthetic oligonucleotide
augccuaaguacaucuuga

SEQ ID NO: 1684357 - RNA, 19 nt, Artificial Sequence
  Description of Artificial Sequence: Synthetic oligonucleotide
ugucaggguugucucuuaa

SEQ ID NO: 1684358 - RNA, 19 nt, Artificial Sequence
  Description of Artificial Sequence: Synthetic oligonucleotide
cucccguccauaacccaag

SEQ ID NO: 1684359 - RNA, 19 nt, Artificial Sequence
  Description of Artificial Sequence: Synthetic oligonucleotide
uuacccgccccuucccagc

SEQ ID NO: 1684360 - RNA, 19 nt, Artificial Sequence
  Description of Artificial Sequence: Synthetic oligonucleotide
uacccgccccuucccagcg

SEQ ID NO: 1684361 - RNA, 19 nt, Artificial Sequence
  Description of Artificial Sequence: Synthetic oligonucleotide
auaguuucgugaagauuca

SEQ ID NO: 1684362 - RNA, 19 nt, Artificial Sequence
  Description of Artificial Sequence: Synthetic oligonucleotide
ugcacacucguagggcaag

SEQ ID NO: 1684363 - RNA, 19 nt, Artificial Sequence
  Description of Artificial Sequence: Synthetic oligonucleotide
ccaccaacggguuauuuuc

SEQ ID NO: 1684364 - RNA, 19 nt, Artificial Sequence
  Description of Artificial Sequence: Synthetic oligonucleotide
uccaauguuauagcccauu

SEQ ID NO: 1684365 - RNA, 19 nt, Artificial Sequence
  Description of Artificial Sequence: Synthetic oligonucleotide
acgucagcguaaauagcuc

SEQ ID NO: 1684366 - RNA, 19 nt, Artificial Sequence
  Description of Artificial Sequence: Synthetic oligonucleotide
cucggugccacgguucgcc

SEQ ID NO: 1684367 - RNA, 19 nt, Artificial Sequence
  Description of Artificial Sequence: Synthetic oligonucleotide
aauccgccugaggaaccuc

SEQ ID NO: 1684368 - RNA, 19 nt, Artificial Sequence
  Description of Artificial Sequence: Synthetic oligonucleotide
uccguggccuggcaagacu

SEQ ID NO: 1684369 - RNA, 19 nt, Artificial Sequence
  Description of Artificial Sequence: Synthetic oligonucleotide
gugcccaccgagcaacgcc

SEQ ID NO: 1684370 - RNA, 19 nt, Artificial Sequence
  Description of Artificial Sequence: Synthetic oligonucleotide
aguccuugcacagcugggu

SEQ ID NO: 1684371 - RNA, 19 nt, Artificial Sequence
  Description of Artificial Sequence: Synthetic oligonucleotide
ucgacauggugcccaccga

SEQ ID NO: 1684372 - RNA, 19 nt, Artificial Sequence
  Description of Artificial Sequence: Synthetic oligonucleotide
uaauggggucaaaguggcu

SEQ ID NO: 1684373 - RNA, 19 nt, Artificial Sequence
  Description of Artificial Sequence: Synthetic oligonucleotide
cuucaauccgccugaggaa

SEQ ID NO: 1684374 - RNA, 19 nt, Artificial Sequence
  Description of Artificial Sequence: Synthetic oligonucleotide
aaguggcuuuugcuuugga

SEQ ID NO: 1684375 - RNA, 19 nt, Artificial Sequence
  Description of Artificial Sequence: Synthetic oligonucleotide
gcuuauucacgucuucauc

SEQ ID NO: 1684376 - RNA, 19 nt, Artificial Sequence
  Description of Artificial Sequence: Synthetic oligonucleotide
acauuugaacgugccaaaa

SEQ ID NO: 1684377 - RNA, 19 nt, Artificial Sequence
  Description of Artificial Sequence: Synthetic oligonucleotide
gagggagaauucaucgcca

SEQ ID NO: 1684378 - RNA, 19 nt, Artificial Sequence
  Description of Artificial Sequence: Synthetic oligonucleotide
ggaguaaauaagggaugag

SEQ ID NO: 1684379 - RNA, 19 nt, Artificial Sequence
  Description of Artificial Sequence: Synthetic oligonucleotide
ugcucuuuauuagcaugaa

SEQ ID NO: 1684380 - RNA, 19 nt, Artificial Sequence
  Description of Artificial Sequence: Synthetic oligonucleotide
uggcuaucgggaagcucca

SEQ ID NO: 1684381 - RNA, 19 nt, Artificial Sequence
  Description of Artificial Sequence: Synthetic oligonucleotide
uggugcccaccgagcaacg

SEQ ID NO: 1684382 - RNA, 19 nt, Artificial Sequence
  Description of Artificial Sequence: Synthetic oligonucleotide
ggaugaguggcuaucggga

SEQ ID NO: 1684383 - RNA, 19 nt, Artificial Sequence
  Description of Artificial Sequence: Synthetic oligonucleotide
uacccgucugcucuuuauu

SEQ ID NO: 1684384 - RNA, 19 nt, Artificial Sequence
  Description of Artificial Sequence: Synthetic oligonucleotide
uuaguccaaccagggcaag

SEQ ID NO: 1684385 - RNA, 19 nt, Artificial Sequence
  Description of Artificial Sequence: Synthetic oligonucleotide
ugccucgacauggugccca

SEQ ID NO: 1684386 - RNA, 19 nt, Artificial Sequence
  Description of Artificial Sequence: Synthetic oligonucleotide
aguccaaccagggcaagua

SEQ ID NO: 1684387 - RNA, 19 nt, Artificial Sequence
  Description of Artificial Sequence: Synthetic oligonucleotide
ucccgaaaaucaugacauc

SEQ ID NO: 1684388 - RNA, 19 nt, Artificial Sequence
  Description of Artificial Sequence: Synthetic oligonucleotide
ugacuggcuuccguggccu

SEQ ID NO: 1684389 - RNA, 19 nt, Artificial Sequence
  Description of Artificial Sequence: Synthetic oligonucleotide
aggauggacccuccguaaa

SEQ ID NO: 1684390 - RNA, 19 nt, Artificial Sequence
  Description of Artificial Sequence: Synthetic oligonucleotide
ucaucgccagcugggcucc

SEQ ID NO: 1684391 - RNA, 19 nt, Artificial Sequence
  Description of Artificial Sequence: Synthetic oligonucleotide
aggggaaauagagcagaga

SEQ ID NO: 1684392 - RNA, 19 nt, Artificial Sequence
  Description of Artificial Sequence: Synthetic oligonucleotide
aagacuuccuacagccauu

SEQ ID NO: 1684393 - RNA, 19 nt, Artificial Sequence
  Description of Artificial Sequence: Synthetic oligonucleotide
caauguuauagcccauucu

SEQ ID NO: 1684394 - RNA, 19 nt, Artificial Sequence
  Description of Artificial Sequence: Synthetic oligonucleotide
ucaacccagccgcggcccc

SEQ ID NO: 1684395 - RNA, 19 nt, Artificial Sequence
  Description of Artificial Sequence: Synthetic oligonucleotide
auccgcaguuucccgaaaa

SEQ ID NO: 1684396 - RNA, 19 nt, Artificial Sequence
  Description of Artificial Sequence: Synthetic oligonucleotide
gacaccgauucaacccagc

SEQ ID NO: 1684397 - RNA, 19 nt, Artificial Sequence
  Description of Artificial Sequence: Synthetic oligonucleotide
ccaauguuauagcccauuc

SEQ ID NO: 1684398 - RNA, 19 nt, Artificial Sequence
  Description of Artificial Sequence: Synthetic oligonucleotide
cguaaauagcucagaacuc

SEQ ID NO: 1684399 - RNA, 19 nt, Artificial Sequence
  Description of Artificial Sequence: Synthetic oligonucleotide
cauaacccaagacuuccua

SEQ ID NO: 1684400 - RNA, 19 nt, Artificial Sequence
  Description of Artificial Sequence: Synthetic oligonucleotide
gggagaauucaucgccagc

SEQ ID NO: 1684401 - RNA, 19 nt, Artificial Sequence
  Description of Artificial Sequence: Synthetic oligonucleotide
agucggacuccaauguuau

SEQ ID NO: 1684402 - RNA, 19 nt, Artificial Sequence
  Description of Artificial Sequence: Synthetic oligonucleotide
cagcguaaauagcucagaa

SEQ ID NO: 1684403 - RNA, 19 nt, Artificial Sequence
  Description of Artificial Sequence: Synthetic oligonucleotide
ccugaucucugucacacca

SEQ ID NO: 1684404 - RNA, 19 nt, Artificial Sequence
  Description of Artificial Sequence: Synthetic oligonucleotide
ucgucgcagccuagguccc

SEQ ID NO: 1684405 - RNA, 19 nt, Artificial Sequence
  Description of Artificial Sequence: Synthetic oligonucleotide
gcagggaggaaugagaccu

SEQ ID NO: 1684406 - RNA, 19 nt, Artificial Sequence
  Description of Artificial Sequence: Synthetic oligonucleotide
ggaaugagaccuggguggc

SEQ ID NO: 1684407 - RNA, 19 nt, Artificial Sequence
  Description of Artificial Sequence: Synthetic oligonucleotide
ccaagaugagggagaauuc

SEQ ID NO: 1684408 - RNA, 19 nt, Artificial Sequence
  Description of Artificial Sequence: Synthetic oligonucleotide
cggguuauuuuccaagaug

SEQ ID NO: 1684409 - RNA, 19 nt, Artificial Sequence
  Description of Artificial Sequence: Synthetic oligonucleotide
accucgucgcagccuaggu

SEQ ID NO: 1684410 - RNA, 19 nt, Artificial Sequence
  Description of Artificial Sequence: Synthetic oligonucleotide
ucgugaugcuuggagugau

SEQ ID NO: 1684411 - RNA, 19 nt, Artificial Sequence
  Description of Artificial Sequence: Synthetic oligonucleotide
aucucccuucagagugucc

SEQ ID NO: 1684412 - RNA, 19 nt, Artificial Sequence
  Description of Artificial Sequence: Synthetic oligonucleotide
gcuaucgggaagcuccaca

SEQ ID NO: 1684413 - RNA, 19 nt, Artificial Sequence
  Description of Artificial Sequence: Synthetic oligonucleotide
caauuagucggacuccaau

SEQ ID NO: 1684414 - RNA, 19 nt, Artificial Sequence
  Description of Artificial Sequence: Synthetic oligonucleotide
gcagccuaggucccaggcc

SEQ ID NO: 1684415 - RNA, 19 nt, Artificial Sequence
  Description of Artificial Sequence: Synthetic oligonucleotide
ugcucucggugccacgguu

SEQ ID NO: 1684416 - RNA, 19 nt, Artificial Sequence
  Description of Artificial Sequence: Synthetic oligonucleotide
ucgcagccuaggucccagg

SEQ ID NO: 1684417 - RNA, 19 nt, Artificial Sequence
  Description of Artificial Sequence: Synthetic oligonucleotide
gacaagcgcuccauacguc

SEQ ID NO: 1684418 - RNA, 19 nt, Artificial Sequence
  Description of Artificial Sequence: Synthetic oligonucleotide
agacaccgauucaacccag

SEQ ID NO: 1684419 - RNA, 19 nt, Artificial Sequence
  Description of Artificial Sequence: Synthetic oligonucleotide
ccacgguucgccugccucg

SEQ ID NO: 1684420 - RNA, 19 nt, Artificial Sequence
  Description of Artificial Sequence: Synthetic oligonucleotide
accgagcaacgccgccucg

SEQ ID NO: 1684421 - RNA, 19 nt, Artificial Sequence
  Description of Artificial Sequence: Synthetic oligonucleotide
agccuaggucccaggcccc

SEQ ID NO: 1684422 - RNA, 19 nt, Artificial Sequence
  Description of Artificial Sequence: Synthetic oligonucleotide
uccauacgucagcguaaau

SEQ ID NO: 1684423 - RNA, 19 nt, Artificial Sequence
  Description of Artificial Sequence: Synthetic oligonucleotide
cucugaagugcacacucgu

SEQ ID NO: 1684424 - RNA, 19 nt, Artificial Sequence
  Description of Artificial Sequence: Synthetic oligonucleotide
ugcuuccggcaugacuggc

SEQ ID NO: 1684425 - RNA, 19 nt, Artificial Sequence
  Description of Artificial Sequence: Synthetic oligonucleotide
gauucaggaguaggugugu

SEQ ID NO: 1684426 - RNA, 19 nt, Artificial Sequence
  Description of Artificial Sequence: Synthetic oligonucleotide
caccucgucgcagccuagg

SEQ ID NO: 1684427 - RNA, 19 nt, Artificial Sequence
  Description of Artificial Sequence: Synthetic oligonucleotide
cggacuccaauguuauagc

SEQ ID NO: 1684428 - RNA, 19 nt, Artificial Sequence
  Description of Artificial Sequence: Synthetic oligonucleotide
cucaccucgucgcagccua

SEQ ID NO: 1684429 - RNA, 19 nt, Artificial Sequence
  Description of Artificial Sequence: Synthetic oligonucleotide
acgguucgccugccucgac

SEQ ID NO: 1684430 - RNA, 19 nt, Artificial Sequence
  Description of Artificial Sequence: Synthetic oligonucleotide
caccgagcaacgccgccuc

SEQ ID NO: 1684431 - RNA, 19 nt, Artificial Sequence
  Description of Artificial Sequence: Synthetic oligonucleotide
auccgccugaggaaccuca

SEQ ID NO: 1684432 - RNA, 19 nt, Artificial Sequence
  Description of Artificial Sequence: Synthetic oligonucleotide
ccguccauaacccaagacu

SEQ ID NO: 1684433 - RNA, 19 nt, Artificial Sequence
  Description of Artificial Sequence: Synthetic oligonucleotide
gccugccucgacauggugc

SEQ ID NO: 1684434 - RNA, 19 nt, Artificial Sequence
  Description of Artificial Sequence: Synthetic oligonucleotide
cugggugacaagcgcucca

SEQ ID NO: 1684435 - RNA, 19 nt, Artificial Sequence
  Description of Artificial Sequence: Synthetic oligonucleotide
caucucccuucagaguguc

SEQ ID NO: 1684436 - RNA, 19 nt, Artificial Sequence
  Description of Artificial Sequence: Synthetic oligonucleotide
agcaccccacacaggaggu

SEQ ID NO: 1684437 - RNA, 19 nt, Artificial Sequence
  Description of Artificial Sequence: Synthetic oligonucleotide
ucggugccacgguucgccu

SEQ ID NO: 1684438 - RNA, 19 nt, Artificial Sequence
  Description of Artificial Sequence: Synthetic oligonucleotide
uuccggcaugacuggcuuc

SEQ ID NO: 1684439 - RNA, 19 nt, Artificial Sequence
  Description of Artificial Sequence: Synthetic oligonucleotide
acucaacaaugugucuuua

SEQ ID NO: 1684440 - RNA, 19 nt, Artificial Sequence
  Description of Artificial Sequence: Synthetic oligonucleotide
gugucacuacagccaacaa

SEQ ID NO: 1684441 - RNA, 19 nt, Artificial Sequence
  Description of Artificial Sequence: Synthetic oligonucleotide
gguugucucuuaauggggu

SEQ ID NO: 1684442 - RNA, 19 nt, Artificial Sequence
  Description of Artificial Sequence: Synthetic oligonucleotide
cuccauacgucagcguaaa

SEQ ID NO: 1684443 - RNA, 19 nt, Artificial Sequence
  Description of Artificial Sequence: Synthetic oligonucleotide
gcuuggagugaugccuaag

SEQ ID NO: 1684444 - RNA, 19 nt, Artificial Sequence
  Description of Artificial Sequence: Synthetic oligonucleotide
ucucggugccacgguucgc

SEQ ID NO: 1684445 - RNA, 19 nt, Artificial Sequence
  Description of Artificial Sequence: Synthetic oligonucleotide
ccgauucaacccagccgcg

SEQ ID NO: 1684446 - RNA, 19 nt, Artificial Sequence
  Description of Artificial Sequence: Synthetic oligonucleotide
gggcaagcaaaguacccgu

SEQ ID NO: 1684447 - RNA, 19 nt, Artificial Sequence
  Description of Artificial Sequence: Synthetic oligonucleotide
aaguacccgucugcucuuu

SEQ ID NO: 1684448 - RNA, 19 nt, Artificial Sequence
  Description of Artificial Sequence: Synthetic oligonucleotide
ccuugcacagcugggugac

SEQ ID NO: 1684449 - RNA, 19 nt, Artificial Sequence
  Description of Artificial Sequence: Synthetic oligonucleotide
gucaggguugucucuuaau

SEQ ID NO: 1684450 - RNA, 19 nt, Artificial Sequence
  Description of Artificial Sequence: Synthetic oligonucleotide
ugccccucugaggggaaau

SEQ ID NO: 1684451 - RNA, 19 nt, Artificial Sequence
  Description of Artificial Sequence: Synthetic oligonucleotide
gccuaaguacaucuugaau

SEQ ID NO: 1684452 - RNA, 19 nt, Artificial Sequence
  Description of Artificial Sequence: Synthetic oligonucleotide
gccacgguucgccugccuc

SEQ ID NO: 1684453 - RNA, 19 nt, Artificial Sequence
  Description of Artificial Sequence: Synthetic oligonucleotide
cccgaaaaucaugacaucu

SEQ ID NO: 1684454 - RNA, 19 nt, Artificial Sequence
  Description of Artificial Sequence: Synthetic oligonucleotide
cccguccauaacccaagac

SEQ ID NO: 1684455 - RNA, 19 nt, Artificial Sequence
  Description of Artificial Sequence: Synthetic oligonucleotide
guacccgucugcucuuuau

SEQ ID NO: 1684456 - RNA, 19 nt, Artificial Sequence
  Description of Artificial Sequence: Synthetic oligonucleotide
ccaaccagggcaaguaccu

SEQ ID NO: 1684457 - RNA, 19 nt, Artificial Sequence
  Description of Artificial Sequence: Synthetic oligonucleotide
cagugcuuccggcaugacu

SEQ ID NO: 1684458 - RNA, 19 nt, Artificial Sequence
  Description of Artificial Sequence: Synthetic oligonucleotide
ccgcaguuucccgaaaauc

SEQ ID NO: 1684459 - RNA, 19 nt, Artificial Sequence
  Description of Artificial Sequence: Synthetic oligonucleotide
ggcaagcaaaguacccguc

SEQ ID NO: 1684460 - RNA, 19 nt, Artificial Sequence
  Description of Artificial Sequence: Synthetic oligonucleotide
cgauucaacccagccgcgg

SEQ ID NO: 1684461 - RNA, 19 nt, Artificial Sequence
  Description of Artificial Sequence: Synthetic oligonucleotide
gaaugagaccuggguggcu

SEQ ID NO: 1684462 - RNA, 19 nt, Artificial Sequence
  Description of Artificial Sequence: Synthetic oligonucleotide
gugucaggguugucucuua

SEQ ID NO: 1684463 - RNA, 19 nt, Artificial Sequence
  Description of Artificial Sequence: Synthetic oligonucleotide
caccaucucccuucagagu

SEQ ID NO: 1684464 - RNA, 19 nt, Artificial Sequence
  Description of Artificial Sequence: Synthetic oligonucleotide
gcuccauacgucagcguaa

SEQ ID NO: 1684465 - RNA, 19 nt, Artificial Sequence
  Description of Artificial Sequence: Synthetic oligonucleotide
ccaacggguuauuuuccaa

SEQ ID NO: 1684466 - RNA, 19 nt, Artificial Sequence
  Description of Artificial Sequence: Synthetic oligonucleotide
gucggacuccaauguuaua

SEQ ID NO: 1684467 - RNA, 19 nt, Artificial Sequence
  Description of Artificial Sequence: Synthetic oligonucleotide
cgcagccuaggucccaggc

SEQ ID NO: 1684468 - RNA, 19 nt, Artificial Sequence
  Description of Artificial Sequence: Synthetic oligonucleotide
gguucgccugccucgacau

SEQ ID NO: 1684469 - RNA, 19 nt, Artificial Sequence
  Description of Artificial Sequence: Synthetic oligonucleotide
caucguuuucauaguccuu

SEQ ID NO: 1684470 - RNA, 19 nt, Artificial Sequence
  Description of Artificial Sequence: Synthetic oligonucleotide
ccuacagccauuugccaau

SEQ ID NO: 1684471 - RNA, 19 nt, Artificial Sequence
  Description of Artificial Sequence: Synthetic oligonucleotide
ccucccguccauaacccaa

SEQ ID NO: 1684472 - RNA, 19 nt, Artificial Sequence
  Description of Artificial Sequence: Synthetic oligonucleotide
cgagcaacgccgccucgcc

SEQ ID NO: 1684473 - RNA, 19 nt, Artificial Sequence
  Description of Artificial Sequence: Synthetic oligonucleotide
ccgaaaaucaugacaucuu

SEQ ID NO: 1684474 - RNA, 19 nt, Artificial Sequence
  Description of Artificial Sequence: Synthetic oligonucleotide
gagcaacgccgccucgccu

SEQ ID NO: 1684475 - RNA, 19 nt, Artificial Sequence
  Description of Artificial Sequence: Synthetic oligonucleotide
cugccucgacauggugccc

SEQ ID NO: 1684476 - RNA, 19 nt, Artificial Sequence
  Description of Artificial Sequence: Synthetic oligonucleotide
cacgguucgccugccucga

SEQ ID NO: 1684477 - RNA, 19 nt, Artificial Sequence
  Description of Artificial Sequence: Synthetic oligonucleotide
gcucucggugccacgguuc

SEQ ID NO: 1684478 - RNA, 19 nt, Artificial Sequence
  Description of Artificial Sequence: Synthetic oligonucleotide
cauccgcaguuucccgaaa

SEQ ID NO: 1684479 - RNA, 19 nt, Artificial Sequence
  Description of Artificial Sequence: Synthetic oligonucleotide
cuugcacagcugggugaca

SEQ ID NO: 1684480 - RNA, 19 nt, Artificial Sequence
  Description of Artificial Sequence: Synthetic oligonucleotide
caauccgccugaggaaccu

SEQ ID NO: 1684481 - RNA, 19 nt, Artificial Sequence
  Description of Artificial Sequence: Synthetic oligonucleotide
cucguagggcaagcaaagu

SEQ ID NO: 1684482 - RNA, 19 nt, Artificial Sequence
  Description of Artificial Sequence: Synthetic oligonucleotide
cccaccgagcaacgccgcc

SEQ ID NO: 1684483 - RNA, 19 nt, Artificial Sequence
  Description of Artificial Sequence: Synthetic oligonucleotide
gccucgacauggugcccac

SEQ ID NO: 1684484 - RNA, 19 nt, Artificial Sequence
  Description of Artificial Sequence: Synthetic oligonucleotide
ggcuuccguggccuggcaa

SEQ ID NO: 1684485 - RNA, 19 nt, Artificial Sequence
  Description of Artificial Sequence: Synthetic oligonucleotide
gaguggcuaucgggaagcu

SEQ ID NO: 1684486 - RNA, 19 nt, Artificial Sequence
  Description of Artificial Sequence: Synthetic oligonucleotide
gcaacgccgccucgccuca

SEQ ID NO: 1684487 - RNA, 19 nt, Artificial Sequence
  Description of Artificial Sequence: Synthetic oligonucleotide
ggcuaucgggaagcuccac

SEQ ID NO: 1684488 - RNA, 19 nt, Artificial Sequence
  Description of Artificial Sequence: Synthetic oligonucleotide
ccagcguucucccucccgu

SEQ ID NO: 1684489 - RNA, 19 nt, Artificial Sequence
  Description of Artificial Sequence: Synthetic oligonucleotide
caauucuuacccgccccuu

SEQ ID NO: 1684490 - RNA, 19 nt, Artificial Sequence
  Description of Artificial Sequence: Synthetic oligonucleotide
gggugacaagcgcuccaua

SEQ ID NO: 1684491 - RNA, 19 nt, Artificial Sequence
  Description of Artificial Sequence: Synthetic oligonucleotide
ccaauucgugaugcuugga

SEQ ID NO: 1684492 - RNA, 19 nt, Artificial Sequence
  Description of Artificial Sequence: Synthetic oligonucleotide
ccggcaugacuggcuuccg

SEQ ID NO: 1684493 - RNA, 19 nt, Artificial Sequence
  Description of Artificial Sequence: Synthetic oligonucleotide
ccccgcagcaccccacaca

SEQ ID NO: 1684494 - RNA, 19 nt, Artificial Sequence
  Description of Artificial Sequence: Synthetic oligonucleotide
aggccccuggagacaccga

SEQ ID NO: 1684495 - RNA, 19 nt, Artificial Sequence
  Description of Artificial Sequence: Synthetic oligonucleotide
caacgccgccucgccucac

SEQ ID NO: 1684496 - RNA, 19 nt, Artificial Sequence
  Description of Artificial Sequence: Synthetic oligonucleotide
gcccaccgagcaacgccgc

SEQ ID NO: 1684497 - RNA, 19 nt, Artificial Sequence
  Description of Artificial Sequence: Synthetic oligonucleotide
cccucccguccauaaccca

SEQ ID NO: 1684498 - RNA, 19 nt, Artificial Sequence
  Description of Artificial Sequence: Synthetic oligonucleotide
gcuccccgcagcaccccac

SEQ ID NO: 1684499 - RNA, 19 nt, Artificial Sequence
  Description of Artificial Sequence: Synthetic oligonucleotide
cgguucgccugccucgaca

SEQ ID NO: 1684500 - RNA, 19 nt, Artificial Sequence
  Description of Artificial Sequence: Synthetic oligonucleotide
cugccccucugaggggaaa

SEQ ID NO: 1684501 - RNA, 19 nt, Artificial Sequence
  Description of Artificial Sequence: Synthetic oligonucleotide
cgccugccucgacauggug

SEQ ID NO: 1684502 - RNA, 19 nt, Artificial Sequence
  Description of Artificial Sequence: Synthetic oligonucleotide
ccgccccuucccagcguuc

SEQ ID NO: 1684503 - RNA, 19 nt, Artificial Sequence
  Description of Artificial Sequence: Synthetic oligonucleotide
gcgcuccauacgucagcgu

SEQ ID NO: 1684504 - RNA, 19 nt, Artificial Sequence
  Description of Artificial Sequence: Synthetic oligonucleotide
caucgccagcugggcucca

SEQ ID NO: 1684505 - RNA, 19 nt, Artificial Sequence
  Description of Artificial Sequence: Synthetic oligonucleotide
gccccuggagacaccgauu

SEQ ID NO: 1684506 - RNA, 19 nt, Artificial Sequence
  Description of Artificial Sequence: Synthetic oligonucleotide
ccccucugaagugcacacu

SEQ ID NO: 1684507 - RNA, 19 nt, Artificial Sequence
  Description of Artificial Sequence: Synthetic oligonucleotide
cggcaugacuggcuuccgu

SEQ ID NO: 1684508 - RNA, 19 nt, Artificial Sequence
  Description of Artificial Sequence: Synthetic oligonucleotide
cccgccccuucccagcguu

SEQ ID NO: 1684509 - RNA, 19 nt, Artificial Sequence
  Description of Artificial Sequence: Synthetic oligonucleotide
ccgccucgccucaccucgu

SEQ ID NO: 1684510 - RNA, 19 nt, Artificial Sequence
  Description of Artificial Sequence: Synthetic oligonucleotide
acuauuuccacauaggccc

SEQ ID NO: 1684511 - RNA, 19 nt, Artificial Sequence
  Description of Artificial Sequence: Synthetic oligonucleotide
aaauauagcacaaaagagc

SEQ ID NO: 1684512 - RNA, 19 nt, Artificial Sequence
  Description of Artificial Sequence: Synthetic oligonucleotide
gaauucaucaauuaggccc

SEQ ID NO: 1684513 - RNA, 19 nt, Artificial Sequence
  Description of Artificial Sequence: Synthetic oligonucleotide
ucuaauucgaaucagguac

SEQ ID NO: 1684514 - RNA, 19 nt, Artificial Sequence
  Description of Artificial Sequence: Synthetic oligonucleotide
uaaaaggacaggaugaccg

SEQ ID NO: 1684515 - RNA, 19 nt, Artificial Sequence
  Description of Artificial Sequence: Synthetic oligonucleotide
acaauugagacucuucucc

SEQ ID NO: 1684516 - RNA, 19 nt, Artificial Sequence
  Description of Artificial Sequence: Synthetic oligonucleotide
uuuauauuaaagauuguaa

SEQ ID NO: 1684517 - RNA, 19 nt, Artificial Sequence
  Description of Artificial Sequence: Synthetic oligonucleotide
uucuauaacuuucauauac

SEQ ID NO: 1684518 - RNA, 19 nt, Artificial Sequence
  Description of Artificial Sequence: Synthetic oligonucleotide
uagauaaggaaccagcaag

SEQ ID NO: 1684519 - RNA, 19 nt, Artificial Sequence
  Description of Artificial Sequence: Synthetic oligonucleotide
acugcuguacaauugagac

SEQ ID NO: 1684520 - RNA, 19 nt, Artificial Sequence
  Description of Artificial Sequence: Synthetic oligonucleotide
uuaucgaaggcauggaugg

SEQ ID NO: 1684521 - RNA, 19 nt, Artificial Sequence
  Description of Artificial Sequence: Synthetic oligonucleotide
cugacuauuugcuaaaagg

SEQ ID NO: 1684522 - RNA, 19 nt, Artificial Sequence
  Description of Artificial Sequence: Synthetic oligonucleotide
uauauuaaagauuguaagu

SEQ ID NO: 1684523 - RNA, 19 nt, Artificial Sequence
  Description of Artificial Sequence: Synthetic oligonucleotide
ugaagugacauaaauauua

SEQ ID NO: 1684524 - RNA, 19 nt, Artificial Sequence
  Description of Artificial Sequence: Synthetic oligonucleotide
aauucaucaauuaggcccc

SEQ ID NO: 1684525 - RNA, 19 nt, Artificial Sequence
  Description of Artificial Sequence: Synthetic oligonucleotide
aacuuucauauacagguag

SEQ ID NO: 1684526 - RNA, 19 nt, Artificial Sequence
  Description of Artificial Sequence: Synthetic oligonucleotide
ucuacaaacucucuuuucc

SEQ ID NO: 1684527 - RNA, 19 nt, Artificial Sequence
  Description of Artificial Sequence: Synthetic oligonucleotide
uuaauuguagcauacugac

SEQ ID NO: 1684528 - RNA, 19 nt, Artificial Sequence
  Description of Artificial Sequence: Synthetic oligonucleotide
gaaauauagcacaaaagag

SEQ ID NO: 1684529 - RNA, 19 nt, Artificial Sequence
  Description of Artificial Sequence: Synthetic oligonucleotide
acagguuuuacacaaauga

SEQ ID NO: 1684530 - RNA, 19 nt, Artificial Sequence
  Description of Artificial Sequence: Synthetic oligonucleotide
ucuuagauaaggaaccagc

SEQ ID NO: 1684531 - RNA, 19 nt, Artificial Sequence
  Description of Artificial Sequence: Synthetic oligonucleotide
auucgaaucagguacuggg

SEQ ID NO: 1684532 - RNA, 19 nt, Artificial Sequence
  Description of Artificial Sequence: Synthetic oligonucleotide
aauacugcuguacaauuga

SEQ ID NO: 1684533 - RNA, 19 nt, Artificial Sequence
  Description of Artificial Sequence: Synthetic oligonucleotide
acuaacuauuuccacauag

SEQ ID NO: 1684534 - RNA, 19 nt, Artificial Sequence
  Description of Artificial Sequence: Synthetic oligonucleotide
gauaacaucauccgacugc

SEQ ID NO: 1684535 - RNA, 19 nt, Artificial Sequence
  Description of Artificial Sequence: Synthetic oligonucleotide
ucugcuuacauuugugccg

SEQ ID NO: 1684536 - RNA, 19 nt, Artificial Sequence
  Description of Artificial Sequence: Synthetic oligonucleotide
auuccagauaacaucaucc

SEQ ID NO: 1684537 - RNA, 19 nt, Artificial Sequence
  Description of Artificial Sequence: Synthetic oligonucleotide
acucauuucugcaaaagcc

SEQ ID NO: 1684538 - RNA, 19 nt, Artificial Sequence
  Description of Artificial Sequence: Synthetic oligonucleotide
uauuaaagauuguaaguug

SEQ ID NO: 1684539 - RNA, 19 nt, Artificial Sequence
  Description of Artificial Sequence: Synthetic oligonucleotide
uauggauggaguuacagaa

SEQ ID NO: 1684540 - RNA, 19 nt, Artificial Sequence
  Description of Artificial Sequence: Synthetic oligonucleotide
uuuacacaaaugaaugucu

SEQ ID NO: 1684541 - RNA, 19 nt, Artificial Sequence
  Description of Artificial Sequence: Synthetic oligonucleotide
aaagauuguaaguuguaau

SEQ ID NO: 1684542 - RNA, 19 nt, Artificial Sequence
  Description of Artificial Sequence: Synthetic oligonucleotide
acuaagucggacccguucc

SEQ ID NO: 1684543 - RNA, 19 nt, Artificial Sequence
  Description of Artificial Sequence: Synthetic oligonucleotide
ucauauacagguagcacug

SEQ ID NO: 1684544 - RNA, 19 nt, Artificial Sequence
  Description of Artificial Sequence: Synthetic oligonucleotide
uguaaguuguaauucagaa

SEQ ID NO: 1684545 - RNA, 19 nt, Artificial Sequence
  Description of Artificial Sequence: Synthetic oligonucleotide
aaaauuguccuauccugug

SEQ ID NO: 1684546 - RNA, 19 nt, Artificial Sequence
  Description of Artificial Sequence: Synthetic oligonucleotide
uauagcacaaaagagcaca

SEQ ID NO: 1684547 - RNA, 19 nt, Artificial Sequence
  Description of Artificial Sequence: Synthetic oligonucleotide
aggaauucaucaauuaggc

SEQ ID NO: 1684548 - RNA, 19 nt, Artificial Sequence
  Description of Artificial Sequence: Synthetic oligonucleotide
uggaguuacagaaaauucu

SEQ ID NO: 1684549 - RNA, 19 nt, Artificial Sequence
  Description of Artificial Sequence: Synthetic oligonucleotide
aagauuguaaguuguaauu

SEQ ID NO: 1684550 - RNA, 19 nt, Artificial Sequence
  Description of Artificial Sequence: Synthetic oligonucleotide
ugcuaaaaggacaggauga

SEQ ID NO: 1684551 - RNA, 19 nt, Artificial Sequence
  Description of Artificial Sequence: Synthetic oligonucleotide
auuugugccgaaugaagcg

SEQ ID NO: 1684552 - RNA, 19 nt, Artificial Sequence
  Description of Artificial Sequence: Synthetic oligonucleotide
uuucuaauucgaaucaggu

SEQ ID NO: 1684553 - RNA, 19 nt, Artificial Sequence
  Description of Artificial Sequence: Synthetic oligonucleotide
ugaaagaacaaaauugcuu

SEQ ID NO: 1684554 - RNA, 19 nt, Artificial Sequence
  Description of Artificial Sequence: Synthetic oligonucleotide
uuuacaggcacaaugucau

SEQ ID NO: 1684555 - RNA, 19 nt, Artificial Sequence
  Description of Artificial Sequence: Synthetic oligonucleotide
ugacucuuagauaaggaac

SEQ ID NO: 1684556 - RNA, 19 nt, Artificial Sequence
  Description of Artificial Sequence: Synthetic oligonucleotide
ucuauaacuuucauauaca

SEQ ID NO: 1684557 - RNA, 19 nt, Artificial Sequence
  Description of Artificial Sequence: Synthetic oligonucleotide
cuauuugcuaaaaggacag

SEQ ID NO: 1684558 - RNA, 19 nt, Artificial Sequence
  Description of Artificial Sequence: Synthetic oligonucleotide
ucaauuaggccccuugggc

SEQ ID NO: 1684559 - RNA, 19 nt, Artificial Sequence
  Description of Artificial Sequence: Synthetic oligonucleotide
aaguuucuaauucgaauca

SEQ ID NO: 1684560 - RNA, 19 nt, Artificial Sequence
  Description of Artificial Sequence: Synthetic oligonucleotide
cuaacuauuuccacauagg

SEQ ID NO: 1684561 - RNA, 19 nt, Artificial Sequence
  Description of Artificial Sequence: Synthetic oligonucleotide
ucaucuauuuguuccagug

SEQ ID NO: 1684562 - RNA, 19 nt, Artificial Sequence
  Description of Artificial Sequence: Synthetic oligonucleotide
uuccagauaacaucauccg

SEQ ID NO: 1684563 - RNA, 19 nt, Artificial Sequence
  Description of Artificial Sequence: Synthetic oligonucleotide
uugcuaaaaggacaggaug

SEQ ID NO: 1684564 - RNA, 19 nt, Artificial Sequence
  Description of Artificial Sequence: Synthetic oligonucleotide
guaauucagaaauauuuac

SEQ ID NO: 1684565 - RNA, 19 nt, Artificial Sequence
  Description of Artificial Sequence: Synthetic oligonucleotide
ucuagggccuuaucgaagg

SEQ ID NO: 1684566 - RNA, 19 nt, Artificial Sequence
  Description of Artificial Sequence: Synthetic oligonucleotide
aauuaggccccuugggcuc

SEQ ID NO: 1684567 - RNA, 19 nt, Artificial Sequence
  Description of Artificial Sequence: Synthetic oligonucleotide
uaaaauuguccuauccugu

SEQ ID NO: 1684568 - RNA, 19 nt, Artificial Sequence
  Description of Artificial Sequence: Synthetic oligonucleotide
ugcuguacaauugagacuc

SEQ ID NO: 1684569 - RNA, 19 nt, Artificial Sequence
  Description of Artificial Sequence: Synthetic oligonucleotide
aucauauggauggaguuac

SEQ ID NO: 1684570 - RNA, 19 nt, Artificial Sequence
  Description of Artificial Sequence: Synthetic oligonucleotide
aaagccuugagucuugguu

SEQ ID NO: 1684571 - RNA, 19 nt, Artificial Sequence
  Description of Artificial Sequence: Synthetic oligonucleotide
acuguaugaaauauagcac

SEQ ID NO: 1684572 - RNA, 19 nt, Artificial Sequence
  Description of Artificial Sequence: Synthetic oligonucleotide
uacucauuucugcaaaagc

SEQ ID NO: 1684573 - RNA, 19 nt, Artificial Sequence
  Description of Artificial Sequence: Synthetic oligonucleotide
agauuguaaguuguaauuc

SEQ ID NO: 1684574 - RNA, 19 nt, Artificial Sequence
  Description of Artificial Sequence: Synthetic oligonucleotide
uguagaugucaccauacgu

SEQ ID NO: 1684575 - RNA, 19 nt, Artificial Sequence
  Description of Artificial Sequence: Synthetic oligonucleotide
agcguaaguuucuaauucg

SEQ ID NO: 1684576 - RNA, 19 nt, Artificial Sequence
  Description of Artificial Sequence: Synthetic oligonucleotide
aaaauacugcuguacaauu

SEQ ID NO: 1684577 - RNA, 19 nt, Artificial Sequence
  Description of Artificial Sequence: Synthetic oligonucleotide
gacucuuagauaaggaacc

SEQ ID NO: 1684578 - RNA, 19 nt, Artificial Sequence
  Description of Artificial Sequence: Synthetic oligonucleotide
gauuguaaguuguaauuca

SEQ ID NO: 1684579 - RNA, 19 nt, Artificial Sequence
  Description of Artificial Sequence: Synthetic oligonucleotide
aagggcgcuuuuccuaucc

SEQ ID NO: 1684580 - RNA, 19 nt, Artificial Sequence
  Description of Artificial Sequence: Synthetic oligonucleotide
cuuaucgaaggcauggaug

SEQ ID NO: 1684581 - RNA, 19 nt, Artificial Sequence
  Description of Artificial Sequence: Synthetic oligonucleotide
cauuugugccgaaugaagc

SEQ ID NO: 1684582 - RNA, 19 nt, Artificial Sequence
  Description of Artificial Sequence: Synthetic oligonucleotide
aacgcuuuuccucucuucu

SEQ ID NO: 1684583 - RNA, 19 nt, Artificial Sequence
  Description of Artificial Sequence: Synthetic oligonucleotide
auauuaaagauuguaaguu

SEQ ID NO: 1684584 - RNA, 19 nt, Artificial Sequence
  Description of Artificial Sequence: Synthetic oligonucleotide
uuguagaugucaccauacg

SEQ ID NO: 1684585 - RNA, 19 nt, Artificial Sequence
  Description of Artificial Sequence: Synthetic oligonucleotide
aaaugaaugucuguuuggu

SEQ ID NO: 1684586 - RNA, 19 nt, Artificial Sequence
  Description of Artificial Sequence: Synthetic oligonucleotide
cuuacauuugugccgaaug

SEQ ID NO: 1684587 - RNA, 19 nt, Artificial Sequence
  Description of Artificial Sequence: Synthetic oligonucleotide
uuagauaaggaaccagcaa

SEQ ID NO: 1684588 - RNA, 19 nt, Artificial Sequence
  Description of Artificial Sequence: Synthetic oligonucleotide
ugugaagaccgcacagugg

SEQ ID NO: 1684589 - RNA, 19 nt, Artificial Sequence
  Description of Artificial Sequence: Synthetic oligonucleotide
uucugucuaaaauuguccu

SEQ ID NO: 1684590 - RNA, 19 nt, Artificial Sequence
  Description of Artificial Sequence: Synthetic oligonucleotide
aauuguccuauccugugaa

SEQ ID NO: 1684591 - RNA, 19 nt, Artificial Sequence
  Description of Artificial Sequence: Synthetic oligonucleotide
aacucaugugguuuuggcu

SEQ ID NO: 1684592 - RNA, 19 nt, Artificial Sequence
  Description of Artificial Sequence: Synthetic oligonucleotide
guagaugucaccauacgug

SEQ ID NO: 1684593 - RNA, 19 nt, Artificial Sequence
  Description of Artificial Sequence: Synthetic oligonucleotide
ugaccgauugcacagccca

SEQ ID NO: 1684594 - RNA, 19 nt, Artificial Sequence
  Description of Artificial Sequence: Synthetic oligonucleotide
cuguaugaaauauagcaca

SEQ ID NO: 1684595 - RNA, 19 nt, Artificial Sequence
  Description of Artificial Sequence: Synthetic oligonucleotide
gcucauacuaacuauuucc

SEQ ID NO: 1684596 - RNA, 19 nt, Artificial Sequence
  Description of Artificial Sequence: Synthetic oligonucleotide
ucaucaauuaggccccuug

SEQ ID NO: 1684597 - RNA, 19 nt, Artificial Sequence
  Description of Artificial Sequence: Synthetic oligonucleotide
auacuaacuauuuccacau

SEQ ID NO: 1684598 - RNA, 19 nt, Artificial Sequence
  Description of Artificial Sequence: Synthetic oligonucleotide
ucauccgacugcauggugc

SEQ ID NO: 1684599 - RNA, 19 nt, Artificial Sequence
  Description of Artificial Sequence: Synthetic oligonucleotide
gaaguuguagaugucacca

SEQ ID NO: 1684600 - RNA, 19 nt, Artificial Sequence
  Description of Artificial Sequence: Synthetic oligonucleotide
cauacuaacuauuuccaca

SEQ ID NO: 1684601 - RNA, 19 nt, Artificial Sequence
  Description of Artificial Sequence: Synthetic oligonucleotide
uuuccuaggguauuccaga

SEQ ID NO: 1684602 - RNA, 19 nt, Artificial Sequence
  Description of Artificial Sequence: Synthetic oligonucleotide
uuguaaguuguaauucaga

SEQ ID NO: 1684603 - RNA, 19 nt, Artificial Sequence
  Description of Artificial Sequence: Synthetic oligonucleotide
aaagucacucaggucacuc

SEQ ID NO: 1684604 - RNA, 19 nt, Artificial Sequence
  Description of Artificial Sequence: Synthetic oligonucleotide
auauacagguagcacuguc

SEQ ID NO: 1684605 - RNA, 19 nt, Artificial Sequence
  Description of Artificial Sequence: Synthetic oligonucleotide
aauucgaaucagguacugg

SEQ ID NO: 1684606 - RNA, 19 nt, Artificial Sequence
  Description of Artificial Sequence: Synthetic oligonucleotide
guuucuaauucgaaucagg

SEQ ID NO: 1684607 - RNA, 19 nt, Artificial Sequence
  Description of Artificial Sequence: Synthetic oligonucleotide
uguacaauugagacucuuc

SEQ ID NO: 1684608 - RNA, 19 nt, Artificial Sequence
  Description of Artificial Sequence: Synthetic oligonucleotide
aggaugaccgauugcacag

SEQ ID NO: 1684609 - RNA, 19 nt, Artificial Sequence
  Description of Artificial Sequence: Synthetic oligonucleotide
uuccuguuucucuagggcc

SEQ ID NO: 1684610 - RNA, 19 nt, Artificial Sequence
  Description of Artificial Sequence: Synthetic oligonucleotide
cagacuauacucauuucug

SEQ ID NO: 1684611 - RNA, 19 nt, Artificial Sequence
  Description of Artificial Sequence: Synthetic oligonucleotide
acugacuauuugcuaaaag

SEQ ID NO: 1684612 - RNA, 19 nt, Artificial Sequence
  Description of Artificial Sequence: Synthetic oligonucleotide
aaaaggacaggaugaccga

SEQ ID NO: 1684613 - RNA, 19 nt, Artificial Sequence
  Description of Artificial Sequence: Synthetic oligonucleotide
caguaauuccuucucaaug

SEQ ID NO: 1684614 - RNA, 19 nt, Artificial Sequence
  Description of Artificial Sequence: Synthetic oligonucleotide
uaggguauuccagauaaca

SEQ ID NO: 1684615 - RNA, 19 nt, Artificial Sequence
  Description of Artificial Sequence: Synthetic oligonucleotide
gucuaaaauuguccuaucc

SEQ ID NO: 1684616 - RNA, 19 nt, Artificial Sequence
  Description of Artificial Sequence: Synthetic oligonucleotide
cucugcuuacauuugugcc

SEQ ID NO: 1684617 - RNA, 19 nt, Artificial Sequence
  Description of Artificial Sequence: Synthetic oligonucleotide
uagaugucaccauacgugu

SEQ ID NO: 1684618 - RNA, 19 nt, Artificial Sequence
  Description of Artificial Sequence: Synthetic oligonucleotide
agagucacucucugcuucc

SEQ ID NO: 1684619 - RNA, 19 nt, Artificial Sequence
  Description of Artificial Sequence: Synthetic oligonucleotide
aaauacugcuguacaauug

SEQ ID NO: 1684620 - RNA, 19 nt, Artificial Sequence
  Description of Artificial Sequence: Synthetic oligonucleotide
agucagacuauacucauuu

SEQ ID NO: 1684621 - RNA, 19 nt, Artificial Sequence
  Description of Artificial Sequence: Synthetic oligonucleotide
acuauuugcuaaaaggaca

SEQ ID NO: 1684622 - RNA, 19 nt, Artificial Sequence
  Description of Artificial Sequence: Synthetic oligonucleotide
aauuccuucucaauggcau

SEQ ID NO: 1684623 - RNA, 19 nt, Artificial Sequence
  Description of Artificial Sequence: Synthetic oligonucleotide
gacuauuugcuaaaaggac

SEQ ID NO: 1684624 - RNA, 19 nt, Artificial Sequence
  Description of Artificial Sequence: Synthetic oligonucleotide
uccagauaacaucauccga

SEQ ID NO: 1684625 - RNA, 19 nt, Artificial Sequence
  Description of Artificial Sequence: Synthetic oligonucleotide
uaaagauuguaaguuguaa

SEQ ID NO: 1684626 - RNA, 19 nt, Artificial Sequence
  Description of Artificial Sequence: Synthetic oligonucleotide
auauggauggaguuacaga

SEQ ID NO: 1684627 - RNA, 19 nt, Artificial Sequence
  Description of Artificial Sequence: Synthetic oligonucleotide
aguaauaaauuuucaucua

SEQ ID NO: 1684628 - RNA, 19 nt, Artificial Sequence
  Description of Artificial Sequence: Synthetic oligonucleotide
acugccagcauccaguuua

SEQ ID NO: 1684629 - RNA, 19 nt, Artificial Sequence
  Description of Artificial Sequence: Synthetic oligonucleotide
aaagucuucuucacuggag

SEQ ID NO: 1684630 - RNA, 19 nt, Artificial Sequence
  Description of Artificial Sequence: Synthetic oligonucleotide
uucagcguaaguuucuaau

SEQ ID NO: 1684631 - RNA, 19 nt, Artificial Sequence
  Description of Artificial Sequence: Synthetic oligonucleotide
aggagagugcagcagagcu

SEQ ID NO: 1684632 - RNA, 19 nt, Artificial Sequence
  Description of Artificial Sequence: Synthetic oligonucleotide
ugaagggaacucauguggu

SEQ ID NO: 1684633 - RNA, 19 nt, Artificial Sequence
  Description of Artificial Sequence: Synthetic oligonucleotide
cagcuauuaacgcuuuucc

SEQ ID NO: 1684634 - RNA, 19 nt, Artificial Sequence
  Description of Artificial Sequence: Synthetic oligonucleotide
cuuuuccuaucccagauca

SEQ ID NO: 1684635 - RNA, 19 nt, Artificial Sequence
  Description of Artificial Sequence: Synthetic oligonucleotide
auacagguagcacuguccu

SEQ ID NO: 1684636 - RNA, 19 nt, Artificial Sequence
  Description of Artificial Sequence: Synthetic oligonucleotide
caucaauuaggccccuugg

SEQ ID NO: 1684637 - RNA, 19 nt, Artificial Sequence
  Description of Artificial Sequence: Synthetic oligonucleotide
gaacucaugugguuuuggc

SEQ ID NO: 1684638 - RNA, 19 nt, Artificial Sequence
  Description of Artificial Sequence: Synthetic oligonucleotide
aaagagcacagugaaggga

SEQ ID NO: 1684639 - RNA, 19 nt, Artificial Sequence
  Description of Artificial Sequence: Synthetic oligonucleotide
ucauacuaacuauuuccac

SEQ ID NO: 1684640 - RNA, 19 nt, Artificial Sequence
  Description of Artificial Sequence: Synthetic oligonucleotide
acucaugugguuuuggcuu

SEQ ID NO: 1684641 - RNA, 19 nt, Artificial Sequence
  Description of Artificial Sequence: Synthetic oligonucleotide
uguagcauacugacuauuu

SEQ ID NO: 1684642 - RNA, 19 nt, Artificial Sequence
  Description of Artificial Sequence: Synthetic oligonucleotide
uugugccgaaugaagcggg

SEQ ID NO: 1684643 - RNA, 19 nt, Artificial Sequence
  Description of Artificial Sequence: Synthetic oligonucleotide
auacuguaugaaauauagc

SEQ ID NO: 1684644 - RNA, 19 nt, Artificial Sequence
  Description of Artificial Sequence: Synthetic oligonucleotide
uuuuacuaagucggacccg

SEQ ID NO: 1684645 - RNA, 19 nt, Artificial Sequence
  Description of Artificial Sequence: Synthetic oligonucleotide
gacaggaugaccgauugca

SEQ ID NO: 1684646 - RNA, 19 nt, Artificial Sequence
  Description of Artificial Sequence: Synthetic oligonucleotide
caucuauuuguuccagugc

SEQ ID NO: 1684647 - RNA, 19 nt, Artificial Sequence
  Description of Artificial Sequence: Synthetic oligonucleotide
uguccuauccugugaagac

SEQ ID NO: 1684648 - RNA, 19 nt, Artificial Sequence
  Description of Artificial Sequence: Synthetic oligonucleotide
aaugaaugucuguuugguu

SEQ ID NO: 1684649 - RNA, 19 nt, Artificial Sequence
  Description of Artificial Sequence: Synthetic oligonucleotide
ccaguaauaaauuuucauc

SEQ ID NO: 1684650 - RNA, 19 nt, Artificial Sequence
  Description of Artificial Sequence: Synthetic oligonucleotide
guaauuccuucucaauggc

SEQ ID NO: 1684651 - RNA, 19 nt, Artificial Sequence
  Description of Artificial Sequence: Synthetic oligonucleotide
uuccgcaaagucuucuuca

SEQ ID NO: 1684652 - RNA, 19 nt, Artificial Sequence
  Description of Artificial Sequence: Synthetic oligonucleotide
uaaucuugguaaaccucug

SEQ ID NO: 1684653 - RNA, 19 nt, Artificial Sequence
  Description of Artificial Sequence: Synthetic oligonucleotide
aguuuauccauauccucaa

SEQ ID NO: 1684654 - RNA, 19 nt, Artificial Sequence
  Description of Artificial Sequence: Synthetic oligonucleotide
auauccucaaagucacuca

SEQ ID NO: 1684655 - RNA, 19 nt, Artificial Sequence
  Description of Artificial Sequence: Synthetic oligonucleotide
uucgaaucagguacugggu

SEQ ID NO: 1684656 - RNA, 19 nt, Artificial Sequence
  Description of Artificial Sequence: Synthetic oligonucleotide
uucuaauucgaaucaggua

SEQ ID NO: 1684657 - RNA, 19 nt, Artificial Sequence
  Description of Artificial Sequence: Synthetic oligonucleotide
gcuauuaacgcuuuuccuc

SEQ ID NO: 1684658 - RNA, 19 nt, Artificial Sequence
  Description of Artificial Sequence: Synthetic oligonucleotide
uuucagucuuuccaguaau

SEQ ID NO: 1684659 - RNA, 19 nt, Artificial Sequence
  Description of Artificial Sequence: Synthetic oligonucleotide
ucuugguucuuauuuugaa

SEQ ID NO: 1684660 - RNA, 19 nt, Artificial Sequence
  Description of Artificial Sequence: Synthetic oligonucleotide
auuuacaggcacaauguca

SEQ ID NO: 1684661 - RNA, 19 nt, Artificial Sequence
  Description of Artificial Sequence: Synthetic oligonucleotide
ccagauaacaucauccgac

SEQ ID NO: 1684662 - RNA, 19 nt, Artificial Sequence
  Description of Artificial Sequence: Synthetic oligonucleotide
auugcuuguuuccuagggu

SEQ ID NO: 1684663 - RNA, 19 nt, Artificial Sequence
  Description of Artificial Sequence: Synthetic oligonucleotide
cucauacuaacuauuucca

SEQ ID NO: 1684664 - RNA, 19 nt, Artificial Sequence
  Description of Artificial Sequence: Synthetic oligonucleotide
gaugaccgauugcacagcc

SEQ ID NO: 1684665 - RNA, 19 nt, Artificial Sequence
  Description of Artificial Sequence: Synthetic oligonucleotide
cauauggauggaguuacag

SEQ ID NO: 1684666 - RNA, 19 nt, Artificial Sequence
  Description of Artificial Sequence: Synthetic oligonucleotide
aagagcacagugaagggaa

SEQ ID NO: 1684667 - RNA, 19 nt, Artificial Sequence
  Description of Artificial Sequence: Synthetic oligonucleotide
uacaauugagacucuucuc

SEQ ID NO: 1684668 - RNA, 19 nt, Artificial Sequence
  Description of Artificial Sequence: Synthetic oligonucleotide
uugcuuguuuccuagggua

SEQ ID NO: 1684669 - RNA, 19 nt, Artificial Sequence
  Description of Artificial Sequence: Synthetic oligonucleotide
cauauccucaaagucacuc

SEQ ID NO: 1684670 - RNA, 19 nt, Artificial Sequence
  Description of Artificial Sequence: Synthetic oligonucleotide
agauaacaucauccgacug

SEQ ID NO: 1684671 - RNA, 19 nt, Artificial Sequence
  Description of Artificial Sequence: Synthetic oligonucleotide
aaugaagcggggccaguaa

SEQ ID NO: 1684672 - RNA, 19 nt, Artificial Sequence
  Description of Artificial Sequence: Synthetic oligonucleotide
ugcucauacuaacuauuuc

SEQ ID NO: 1684673 - RNA, 19 nt, Artificial Sequence
  Description of Artificial Sequence: Synthetic oligonucleotide
acauuugugccgaaugaag

SEQ ID NO: 1684674 - RNA, 19 nt, Artificial Sequence
  Description of Artificial Sequence: Synthetic oligonucleotide
aagucacucaggucacucu

SEQ ID NO: 1684675 - RNA, 19 nt, Artificial Sequence
  Description of Artificial Sequence: Synthetic oligonucleotide
ugcuuccuguuucucuagg

SEQ ID NO: 1684676 - RNA, 19 nt, Artificial Sequence
  Description of Artificial Sequence: Synthetic oligonucleotide
agcugggcagcuauuaacg

SEQ ID NO: 1684677 - RNA, 19 nt, Artificial Sequence
  Description of Artificial Sequence: Synthetic oligonucleotide
agaucauauggauggaguu

SEQ ID NO: 1684678 - RNA, 19 nt, Artificial Sequence
  Description of Artificial Sequence: Synthetic oligonucleotide
ucagcguaaguuucuaauu

SEQ ID NO: 1684679 - RNA, 19 nt, Artificial Sequence
  Description of Artificial Sequence: Synthetic oligonucleotide
agguuuuacacaaaugaau

SEQ ID NO: 1684680 - RNA, 19 nt, Artificial Sequence
  Description of Artificial Sequence: Synthetic oligonucleotide
ccuaucccagaucauaugg

SEQ ID NO: 1684681 - RNA, 19 nt, Artificial Sequence
  Description of Artificial Sequence: Synthetic oligonucleotide
uuguccuauccugugaaga

SEQ ID NO: 1684682 - RNA, 19 nt, Artificial Sequence
  Description of Artificial Sequence: Synthetic oligonucleotide
guaaguuguaauucagaaa

SEQ ID NO: 1684683 - RNA, 19 nt, Artificial Sequence
  Description of Artificial Sequence: Synthetic oligonucleotide
cuauuuccacauaggcccg

SEQ ID NO: 1684684 - RNA, 19 nt, Artificial Sequence
  Description of Artificial Sequence: Synthetic oligonucleotide
uacgugucuuguuucaguc

SEQ ID NO: 1684685 - RNA, 19 nt, Artificial Sequence
  Description of Artificial Sequence: Synthetic oligonucleotide
cagcguaaguuucuaauuc

SEQ ID NO: 1684686 - RNA, 19 nt, Artificial Sequence
  Description of Artificial Sequence: Synthetic oligonucleotide
uuccuaucccagaucauau

SEQ ID NO: 1684687 - RNA, 19 nt, Artificial Sequence
  Description of Artificial Sequence: Synthetic oligonucleotide
cucuguuacagcacaugug

SEQ ID NO: 1684688 - RNA, 19 nt, Artificial Sequence
  Description of Artificial Sequence: Synthetic oligonucleotide
agguucuucugucuaaaau

SEQ ID NO: 1684689 - RNA, 19 nt, Artificial Sequence
  Description of Artificial Sequence: Synthetic oligonucleotide
ucgaaucagguacugggua

SEQ ID NO: 1684690 - RNA, 19 nt, Artificial Sequence
  Description of Artificial Sequence: Synthetic oligonucleotide
uuuccuaucccagaucaua

SEQ ID NO: 1684691 - RNA, 19 nt, Artificial Sequence
  Description of Artificial Sequence: Synthetic oligonucleotide
aagucggacccguucccag

SEQ ID NO: 1684692 - RNA, 19 nt, Artificial Sequence
  Description of Artificial Sequence: Synthetic oligonucleotide
ccuucguuccgcuucagcg

SEQ ID NO: 1684693 - RNA, 19 nt, Artificial Sequence
  Description of Artificial Sequence: Synthetic oligonucleotide
uugguaaaccucugcuuac

SEQ ID NO: 1684694 - RNA, 19 nt, Artificial Sequence
  Description of Artificial Sequence: Synthetic oligonucleotide
ugagacucuucuccucuca

SEQ ID NO: 1684695 - RNA, 19 nt, Artificial Sequence
  Description of Artificial Sequence: Synthetic oligonucleotide
uccuucgucacugccagca

SEQ ID NO: 1684696 - RNA, 19 nt, Artificial Sequence
  Description of Artificial Sequence: Synthetic oligonucleotide
auuaacgcuuuuccucucu

SEQ ID NO: 1684697 - RNA, 19 nt, Artificial Sequence
  Description of Artificial Sequence: Synthetic oligonucleotide
agcacagugaagggaacuc

SEQ ID NO: 1684698 - RNA, 19 nt, Artificial Sequence
  Description of Artificial Sequence: Synthetic oligonucleotide
acugcaucaggagagugca

SEQ ID NO: 1684699 - RNA, 19 nt, Artificial Sequence
  Description of Artificial Sequence: Synthetic oligonucleotide
agauaaggaaccagcaaga

SEQ ID NO: 1684700 - RNA, 19 nt, Artificial Sequence
  Description of Artificial Sequence: Synthetic oligonucleotide
ugggcagcuauuaacgcuu

SEQ ID NO: 1684701 - RNA, 19 nt, Artificial Sequence
  Description of Artificial Sequence: Synthetic oligonucleotide
uguuucagucuuuccagua

SEQ ID NO: 1684702 - RNA, 19 nt, Artificial Sequence
  Description of Artificial Sequence: Synthetic oligonucleotide
auuguccuauccugugaag

SEQ ID NO: 1684703 - RNA, 19 nt, Artificial Sequence
  Description of Artificial Sequence: Synthetic oligonucleotide
uccgcuucagcguaaguuu

SEQ ID NO: 1684704 - RNA, 19 nt, Artificial Sequence
  Description of Artificial Sequence: Synthetic oligonucleotide
gccagcauccaguuuaucc

SEQ ID NO: 1684705 - RNA, 19 nt, Artificial Sequence
  Description of Artificial Sequence: Synthetic oligonucleotide
aaaagccuugagucuuggu

SEQ ID NO: 1684706 - RNA, 19 nt, Artificial Sequence
  Description of Artificial Sequence: Synthetic oligonucleotide
cuugguaaaccucugcuua

SEQ ID NO: 1684707 - RNA, 19 nt, Artificial Sequence
  Description of Artificial Sequence: Synthetic oligonucleotide
cauccgacugcauggugcc

SEQ ID NO: 1684708 - RNA, 19 nt, Artificial Sequence
  Description of Artificial Sequence: Synthetic oligonucleotide
aaagggcgcuuuuccuauc

SEQ ID NO: 1684709 - RNA, 19 nt, Artificial Sequence
  Description of Artificial Sequence: Synthetic oligonucleotide
auacgugucuuguuucagu

SEQ ID NO: 1684710 - RNA, 19 nt, Artificial Sequence
  Description of Artificial Sequence: Synthetic oligonucleotide
agcccagucagacuauacu

SEQ ID NO: 1684711 - RNA, 19 nt, Artificial Sequence
  Description of Artificial Sequence: Synthetic oligonucleotide
ggguauuccagauaacauc

SEQ ID NO: 1684712 - RNA, 19 nt, Artificial Sequence
  Description of Artificial Sequence: Synthetic oligonucleotide
agaaagggcgcuuuuccua

SEQ ID NO: 1684713 - RNA, 19 nt, Artificial Sequence
  Description of Artificial Sequence: Synthetic oligonucleotide
uccgcaaagucuucuucac

SEQ ID NO: 1684714 - RNA, 19 nt, Artificial Sequence
  Description of Artificial Sequence: Synthetic oligonucleotide
uccuaucccagaucauaug

SEQ ID NO: 1684715 - RNA, 19 nt, Artificial Sequence
  Description of Artificial Sequence: Synthetic oligonucleotide
uaauucgaaucagguacug

SEQ ID NO: 1684716 - RNA, 19 nt, Artificial Sequence
  Description of Artificial Sequence: Synthetic oligonucleotide
ucucuagggccuuaucgaa

SEQ ID NO: 1684717 - RNA, 19 nt, Artificial Sequence
  Description of Artificial Sequence: Synthetic oligonucleotide
ggaauucaucaauuaggcc

SEQ ID NO: 1684718 - RNA, 19 nt, Artificial Sequence
  Description of Artificial Sequence: Synthetic oligonucleotide
aacucucuuuuccccacau

SEQ ID NO: 1684719 - RNA, 19 nt, Artificial Sequence
  Description of Artificial Sequence: Synthetic oligonucleotide
gauggaguuacagaaaauu

SEQ ID NO: 1684720 - RNA, 19 nt, Artificial Sequence
  Description of Artificial Sequence: Synthetic oligonucleotide
cuauuaacgcuuuuccucu

SEQ ID NO: 1684721 - RNA, 19 nt, Artificial Sequence
  Description of Artificial Sequence: Synthetic oligonucleotide
aagggaacucaugugguuu

SEQ ID NO: 1684722 - RNA, 19 nt, Artificial Sequence
  Description of Artificial Sequence: Synthetic oligonucleotide
ccaggaauucaucaauuag

SEQ ID NO: 1684723 - RNA, 19 nt, Artificial Sequence
  Description of Artificial Sequence: Synthetic oligonucleotide
ugcuuguuuccuaggguau

SEQ ID NO: 1684724 - RNA, 19 nt, Artificial Sequence
  Description of Artificial Sequence: Synthetic oligonucleotide
cuugggcucccucuguuac

SEQ ID NO: 1684725 - RNA, 19 nt, Artificial Sequence
  Description of Artificial Sequence: Synthetic oligonucleotide
cuaagucggacccguuccc

SEQ ID NO: 1684726 - RNA, 19 nt, Artificial Sequence
  Description of Artificial Sequence: Synthetic oligonucleotide
cucuuagauaaggaaccag

SEQ ID NO: 1684727 - RNA, 19 nt, Artificial Sequence
  Description of Artificial Sequence: Synthetic oligonucleotide
uccugcucauacuaacuau

SEQ ID NO: 1684728 - RNA, 19 nt, Artificial Sequence
  Description of Artificial Sequence: Synthetic oligonucleotide
ugaagcggggccaguaaua

SEQ ID NO: 1684729 - RNA, 19 nt, Artificial Sequence
  Description of Artificial Sequence: Synthetic oligonucleotide
ugucuaaaauuguccuauc

SEQ ID NO: 1684730 - RNA, 19 nt, Artificial Sequence
  Description of Artificial Sequence: Synthetic oligonucleotide
gaagaccgcacagugguga

SEQ ID NO: 1684731 - RNA, 19 nt, Artificial Sequence
  Description of Artificial Sequence: Synthetic oligonucleotide
agggcgcuuuuccuauccc

SEQ ID NO: 1684732 - RNA, 19 nt, Artificial Sequence
  Description of Artificial Sequence: Synthetic oligonucleotide
ucauauggauggaguuaca

SEQ ID NO: 1684733 - RNA, 19 nt, Artificial Sequence
  Description of Artificial Sequence: Synthetic oligonucleotide
ucuaccucaucaucuucua

SEQ ID NO: 1684734 - RNA, 19 nt, Artificial Sequence
  Description of Artificial Sequence: Synthetic oligonucleotide
gaucauauggauggaguua

SEQ ID NO: 1684735 - RNA, 19 nt, Artificial Sequence
  Description of Artificial Sequence: Synthetic oligonucleotide
uucguuccgcuucagcgua

SEQ ID NO: 1684736 - RNA, 19 nt, Artificial Sequence
  Description of Artificial Sequence: Synthetic oligonucleotide
auuaggccccuugggcucc

SEQ ID NO: 1684737 - RNA, 19 nt, Artificial Sequence
  Description of Artificial Sequence: Synthetic oligonucleotide
ggccuuaucgaaggcaugg

SEQ ID NO: 1684738 - RNA, 19 nt, Artificial Sequence
  Description of Artificial Sequence: Synthetic oligonucleotide
ugaagaccgcacaguggug

SEQ ID NO: 1684739 - RNA, 19 nt, Artificial Sequence
  Description of Artificial Sequence: Synthetic oligonucleotide
aggucacucucaucuaccu

SEQ ID NO: 1684740 - RNA, 19 nt, Artificial Sequence
  Description of Artificial Sequence: Synthetic oligonucleotide
uucagucuuuccaguaauu

SEQ ID NO: 1684741 - RNA, 19 nt, Artificial Sequence
  Description of Artificial Sequence: Synthetic oligonucleotide
uuccgcuucagcguaaguu

SEQ ID NO: 1684742 - RNA, 19 nt, Artificial Sequence
  Description of Artificial Sequence: Synthetic oligonucleotide
agccuugagucuugguucu

SEQ ID NO: 1684743 - RNA, 19 nt, Artificial Sequence
  Description of Artificial Sequence: Synthetic oligonucleotide
uuuuccuaucccagaucau

SEQ ID NO: 1684744 - RNA, 19 nt, Artificial Sequence
  Description of Artificial Sequence: Synthetic oligonucleotide
uuaacgcuuuuccucucuu

SEQ ID NO: 1684745 - RNA, 19 nt, Artificial Sequence
  Description of Artificial Sequence: Synthetic oligonucleotide
acuggguaaucuugguaaa

SEQ ID NO: 1684746 - RNA, 19 nt, Artificial Sequence
  Description of Artificial Sequence: Synthetic oligonucleotide
uucccuucguuccgcuuca

SEQ ID NO: 1684747 - RNA, 19 nt, Artificial Sequence
  Description of Artificial Sequence: Synthetic oligonucleotide
uauuaacgcuuuuccucuc

SEQ ID NO: 1684748 - RNA, 19 nt, Artificial Sequence
  Description of Artificial Sequence: Synthetic oligonucleotide
caggaugaccgauugcaca

SEQ ID NO: 1684749 - RNA, 19 nt, Artificial Sequence
  Description of Artificial Sequence: Synthetic oligonucleotide
ugucuccugcucauacuaa

SEQ ID NO: 1684750 - RNA, 19 nt, Artificial Sequence
  Description of Artificial Sequence: Synthetic oligonucleotide
cauacgugucuuguuucag

SEQ ID NO: 1684751 - RNA, 19 nt, Artificial Sequence
  Description of Artificial Sequence: Synthetic oligonucleotide
uuuggucaugggcucuguc

SEQ ID NO: 1684752 - RNA, 19 nt, Artificial Sequence
  Description of Artificial Sequence: Synthetic oligonucleotide
ugaacugcaucaggagagu

SEQ ID NO: 1684753 - RNA, 19 nt, Artificial Sequence
  Description of Artificial Sequence: Synthetic oligonucleotide
agcggggccaguaauaaau

SEQ ID NO: 1684754 - RNA, 19 nt, Artificial Sequence
  Description of Artificial Sequence: Synthetic oligonucleotide
uuccuaggguauuccagau

SEQ ID NO: 1684755 - RNA, 19 nt, Artificial Sequence
  Description of Artificial Sequence: Synthetic oligonucleotide
augaccgauugcacagccc

SEQ ID NO: 1684756 - RNA, 19 nt, Artificial Sequence
  Description of Artificial Sequence: Synthetic oligonucleotide
caaaauugcuuguuuccua

SEQ ID NO: 1684757 - RNA, 19 nt, Artificial Sequence
  Description of Artificial Sequence: Synthetic oligonucleotide
acucuuagauaaggaacca

SEQ ID NO: 1684758 - RNA, 19 nt, Artificial Sequence
  Description of Artificial Sequence: Synthetic oligonucleotide
agcugcccguuucuauaac

SEQ ID NO: 1684759 - RNA, 19 nt, Artificial Sequence
  Description of Artificial Sequence: Synthetic oligonucleotide
gguucuuauuuugaaagaa

SEQ ID NO: 1684760 - RNA, 19 nt, Artificial Sequence
  Description of Artificial Sequence: Synthetic oligonucleotide
aagaccgcacaguggugaa

SEQ ID NO: 1684761 - RNA, 19 nt, Artificial Sequence
  Description of Artificial Sequence: Synthetic oligonucleotide
guccuauccugugaagacc

SEQ ID NO: 1684762 - RNA, 19 nt, Artificial Sequence
  Description of Artificial Sequence: Synthetic oligonucleotide
guccacugaagugacauaa

SEQ ID NO: 1684763 - RNA, 19 nt, Artificial Sequence
  Description of Artificial Sequence: Synthetic oligonucleotide
uucauguuucagguucuuc

SEQ ID NO: 1684764 - RNA, 19 nt, Artificial Sequence
  Description of Artificial Sequence: Synthetic oligonucleotide
ugucaccauacgugucuug

SEQ ID NO: 1684765 - RNA, 19 nt, Artificial Sequence
  Description of Artificial Sequence: Synthetic oligonucleotide
aaguuguaauucagaaaua

SEQ ID NO: 1684766 - RNA, 19 nt, Artificial Sequence
  Description of Artificial Sequence: Synthetic oligonucleotide
caaaagccuugagucuugg

SEQ ID NO: 1684767 - RNA, 19 nt, Artificial Sequence
  Description of Artificial Sequence: Synthetic oligonucleotide
cuaggguauuccagauaac

SEQ ID NO: 1684768 - RNA, 19 nt, Artificial Sequence
  Description of Artificial Sequence: Synthetic oligonucleotide
gguaaucuugguaaaccuc

SEQ ID NO: 1684769 - RNA, 19 nt, Artificial Sequence
  Description of Artificial Sequence: Synthetic oligonucleotide
uggggaaaacagguuuuac

SEQ ID NO: 1684770 - RNA, 19 nt, Artificial Sequence
  Description of Artificial Sequence: Synthetic oligonucleotide
aggguauuccagauaacau

SEQ ID NO: 1684771 - RNA, 19 nt, Artificial Sequence
  Description of Artificial Sequence: Synthetic oligonucleotide
uccuaggguauuccagaua

SEQ ID NO: 1684772 - RNA, 19 nt, Artificial Sequence
  Description of Artificial Sequence: Synthetic oligonucleotide
uacuaacuauuuccacaua

SEQ ID NO: 1684773 - RNA, 19 nt, Artificial Sequence
  Description of Artificial Sequence: Synthetic oligonucleotide
cuucgucacugccagcauc

SEQ ID NO: 1684774 - RNA, 19 nt, Artificial Sequence
  Description of Artificial Sequence: Synthetic oligonucleotide
gucggacccguucccagag

SEQ ID NO: 1684775 - RNA, 19 nt, Artificial Sequence
  Description of Artificial Sequence: Synthetic oligonucleotide
aucauccgacugcauggug

SEQ ID NO: 1684776 - RNA, 19 nt, Artificial Sequence
  Description of Artificial Sequence: Synthetic oligonucleotide
caucaggagagugcagcag

SEQ ID NO: 1684777 - RNA, 19 nt, Artificial Sequence
  Description of Artificial Sequence: Synthetic oligonucleotide
uagcacaaaagagcacagu

SEQ ID NO: 1684778 - RNA, 19 nt, Artificial Sequence
  Description of Artificial Sequence: Synthetic oligonucleotide
cagaucauauggauggagu

SEQ ID NO: 1684779 - RNA, 19 nt, Artificial Sequence
  Description of Artificial Sequence: Synthetic oligonucleotide
cuaauucgaaucagguacu

SEQ ID NO: 1684780 - RNA, 19 nt, Artificial Sequence
  Description of Artificial Sequence: Synthetic oligonucleotide
acagugaagggaacucaug

SEQ ID NO: 1684781 - RNA, 19 nt, Artificial Sequence
  Description of Artificial Sequence: Synthetic oligonucleotide
ugcccguuucuauaacuuu

SEQ ID NO: 1684782 - RNA, 19 nt, Artificial Sequence
  Description of Artificial Sequence: Synthetic oligonucleotide
aaugucuguuugguuucau

SEQ ID NO: 1684783 - RNA, 19 nt, Artificial Sequence
  Description of Artificial Sequence: Synthetic oligonucleotide
gaaagggcgcuuuuccuau

SEQ ID NO: 1684784 - RNA, 19 nt, Artificial Sequence
  Description of Artificial Sequence: Synthetic oligonucleotide
agggaacucaugugguuuu

SEQ ID NO: 1684785 - RNA, 19 nt, Artificial Sequence
  Description of Artificial Sequence: Synthetic oligonucleotide
ggaacucaugugguuuugg

SEQ ID NO: 1684786 - RNA, 19 nt, Artificial Sequence
  Description of Artificial Sequence: Synthetic oligonucleotide
gucagacuauacucauuuc

SEQ ID NO: 1684787 - RNA, 19 nt, Artificial Sequence
  Description of Artificial Sequence: Synthetic oligonucleotide
cagugaagggaacucaugu

SEQ ID NO: 1684788 - RNA, 19 nt, Artificial Sequence
  Description of Artificial Sequence: Synthetic oligonucleotide
gaagcggggccaguaauaa

SEQ ID NO: 1684789 - RNA, 19 nt, Artificial Sequence
  Description of Artificial Sequence: Synthetic oligonucleotide
gcuaaaaggacaggaugac

SEQ ID NO: 1684790 - RNA, 19 nt, Artificial Sequence
  Description of Artificial Sequence: Synthetic oligonucleotide
uugggcucccucuguuaca

SEQ ID NO: 1684791 - RNA, 19 nt, Artificial Sequence
  Description of Artificial Sequence: Synthetic oligonucleotide
caugugguuuuggcuuugg

SEQ ID NO: 1684792 - RNA, 19 nt, Artificial Sequence
  Description of Artificial Sequence: Synthetic oligonucleotide
cuagggccuuaucgaaggc

SEQ ID NO: 1684793 - RNA, 19 nt, Artificial Sequence
  Description of Artificial Sequence: Synthetic oligonucleotide
gggccaguaauaaauuuuc

SEQ ID NO: 1684794 - RNA, 19 nt, Artificial Sequence
  Description of Artificial Sequence: Synthetic oligonucleotide
gcagcuauuaacgcuuuuc

SEQ ID NO: 1684795 - RNA, 19 nt, Artificial Sequence
  Description of Artificial Sequence: Synthetic oligonucleotide
guacuggguaaucuuggua

SEQ ID NO: 1684796 - RNA, 19 nt, Artificial Sequence
  Description of Artificial Sequence: Synthetic oligonucleotide
ggcgcuuuuccuaucccag

SEQ ID NO: 1684797 - RNA, 19 nt, Artificial Sequence
  Description of Artificial Sequence: Synthetic oligonucleotide
cagauaacaucauccgacu

SEQ ID NO: 1684798 - RNA, 19 nt, Artificial Sequence
  Description of Artificial Sequence: Synthetic oligonucleotide
agucggacccguucccaga

SEQ ID NO: 1684799 - RNA, 19 nt, Artificial Sequence
  Description of Artificial Sequence: Synthetic oligonucleotide
caauugagacucuucuccu

SEQ ID NO: 1684800 - RNA, 19 nt, Artificial Sequence
  Description of Artificial Sequence: Synthetic oligonucleotide
aagcggggccaguaauaaa

SEQ ID NO: 1684801 - RNA, 19 nt, Artificial Sequence
  Description of Artificial Sequence: Synthetic oligonucleotide
agcaagaaagggcgcuuuu

SEQ ID NO: 1684802 - RNA, 19 nt, Artificial Sequence
  Description of Artificial Sequence: Synthetic oligonucleotide
accgauugcacagcccagu

SEQ ID NO: 1684803 - RNA, 19 nt, Artificial Sequence
  Description of Artificial Sequence: Synthetic oligonucleotide
uggggaaguuguagauguc

SEQ ID NO: 1684804 - RNA, 19 nt, Artificial Sequence
  Description of Artificial Sequence: Synthetic oligonucleotide
cugcuuacauuugugccga

SEQ ID NO: 1684805 - RNA, 19 nt, Artificial Sequence
  Description of Artificial Sequence: Synthetic oligonucleotide
ugguuucauguuucagguu

SEQ ID NO: 1684806 - RNA, 19 nt, Artificial Sequence
  Description of Artificial Sequence: Synthetic oligonucleotide
agaccgcacaguggugaac

SEQ ID NO: 1684807 - RNA, 19 nt, Artificial Sequence
  Description of Artificial Sequence: Synthetic oligonucleotide
gaccgauugcacagcccag

SEQ ID NO: 1684808 - RNA, 19 nt, Artificial Sequence
  Description of Artificial Sequence: Synthetic oligonucleotide
ggggaaguuguagauguca

SEQ ID NO: 1684809 - RNA, 19 nt, Artificial Sequence
  Description of Artificial Sequence: Synthetic oligonucleotide
uaacaucauccgacugcau

SEQ ID NO: 1684810 - RNA, 19 nt, Artificial Sequence
  Description of Artificial Sequence: Synthetic oligonucleotide
cagcccagucagacuauac

SEQ ID NO: 1684811 - RNA, 19 nt, Artificial Sequence
  Description of Artificial Sequence: Synthetic oligonucleotide
uuacuaagucggacccguu

SEQ ID NO: 1684812 - RNA, 19 nt, Artificial Sequence
  Description of Artificial Sequence: Synthetic oligonucleotide
caggagagugcagcagagc

SEQ ID NO: 1684813 - RNA, 19 nt, Artificial Sequence
  Description of Artificial Sequence: Synthetic oligonucleotide
uuacaggcacaaugucauu

SEQ ID NO: 1684814 - RNA, 19 nt, Artificial Sequence
  Description of Artificial Sequence: Synthetic oligonucleotide
cugugaugacucuuagaua

SEQ ID NO: 1684815 - RNA, 19 nt, Artificial Sequence
  Description of Artificial Sequence: Synthetic oligonucleotide
cuccugcucauacuaacua

SEQ ID NO: 1684816 - RNA, 19 nt, Artificial Sequence
  Description of Artificial Sequence: Synthetic oligonucleotide
cuucguuccgcuucagcgu

SEQ ID NO: 1684817 - RNA, 19 nt, Artificial Sequence
  Description of Artificial Sequence: Synthetic oligonucleotide
ucggacccguucccagagc

SEQ ID NO: 1684818 - RNA, 19 nt, Artificial Sequence
  Description of Artificial Sequence: Synthetic oligonucleotide
gaccgcacaguggugaacu

SEQ ID NO: 1684819 - RNA, 19 nt, Artificial Sequence
  Description of Artificial Sequence: Synthetic oligonucleotide
ccagaucauauggauggag

SEQ ID NO: 1684820 - RNA, 19 nt, Artificial Sequence
  Description of Artificial Sequence: Synthetic oligonucleotide
ggguaaucuugguaaaccu

SEQ ID NO: 1684821 - RNA, 19 nt, Artificial Sequence
  Description of Artificial Sequence: Synthetic oligonucleotide
cacaaaugaaugucuguuu

SEQ ID NO: 1684822 - RNA, 19 nt, Artificial Sequence
  Description of Artificial Sequence: Synthetic oligonucleotide
cuucagcguaaguuucuaa

SEQ ID NO: 1684823 - RNA, 19 nt, Artificial Sequence
  Description of Artificial Sequence: Synthetic oligonucleotide
cugggcagcuauuaacgcu

SEQ ID NO: 1684824 - RNA, 19 nt, Artificial Sequence
  Description of Artificial Sequence: Synthetic oligonucleotide
gaaucagguacuggguaau

SEQ ID NO: 1684825 - RNA, 19 nt, Artificial Sequence
  Description of Artificial Sequence: Synthetic oligonucleotide
ggacaggaugaccgauugc

SEQ ID NO: 1684826 - RNA, 19 nt, Artificial Sequence
  Description of Artificial Sequence: Synthetic oligonucleotide
caggcacaaugucauucca

SEQ ID NO: 1684827 - RNA, 19 nt, Artificial Sequence
  Description of Artificial Sequence: Synthetic oligonucleotide
cugcuguacaauugagacu

SEQ ID NO: 1684828 - RNA, 19 nt, Artificial Sequence
  Description of Artificial Sequence: Synthetic oligonucleotide
gcguaaguuucuaauucga

SEQ ID NO: 1684829 - RNA, 19 nt, Artificial Sequence
  Description of Artificial Sequence: Synthetic oligonucleotide
gcaagaaagggcgcuuuuc

SEQ ID NO: 1684830 - RNA, 19 nt, Artificial Sequence
  Description of Artificial Sequence: Synthetic oligonucleotide
gcccguuucuauaacuuuc

SEQ ID NO: 1684831 - RNA, 19 nt, Artificial Sequence
  Description of Artificial Sequence: Synthetic oligonucleotide
cccguuucuauaacuuuca

SEQ ID NO: 1684832 - RNA, 19 nt, Artificial Sequence
  Description of Artificial Sequence: Synthetic oligonucleotide
cuauuuguuccagugcuuu

SEQ ID NO: 1684833 - RNA, 19 nt, Artificial Sequence
  Description of Artificial Sequence: Synthetic oligonucleotide
cacagugaagggaacucau

SEQ ID NO: 1684834 - RNA, 19 nt, Artificial Sequence
  Description of Artificial Sequence: Synthetic oligonucleotide
caaugucauuccagcucca

SEQ ID NO: 1684835 - RNA, 19 nt, Artificial Sequence
  Description of Artificial Sequence: Synthetic oligonucleotide
auccgacugcauggugccg

SEQ ID NO: 1684836 - RNA, 19 nt, Artificial Sequence
  Description of Artificial Sequence: Synthetic oligonucleotide
cugcucauacuaacuauuu

SEQ ID NO: 1684837 - RNA, 19 nt, Artificial Sequence
  Description of Artificial Sequence: Synthetic oligonucleotide
gagcacagugaagggaacu

SEQ ID NO: 1684838 - RNA, 19 nt, Artificial Sequence
  Description of Artificial Sequence: Synthetic oligonucleotide
ucguuccgcuucagcguaa

SEQ ID NO: 1684839 - RNA, 19 nt, Artificial Sequence
  Description of Artificial Sequence: Synthetic oligonucleotide
ggaugaccgauugcacagc

SEQ ID NO: 1684840 - RNA, 19 nt, Artificial Sequence
  Description of Artificial Sequence: Synthetic oligonucleotide
gggcgcuuuuccuauccca

SEQ ID NO: 1684841 - RNA, 19 nt, Artificial Sequence
  Description of Artificial Sequence: Synthetic oligonucleotide
ccauacgugucuuguuuca

SEQ ID NO: 1684842 - RNA, 19 nt, Artificial Sequence
  Description of Artificial Sequence: Synthetic oligonucleotide
aggccccuugggcucccuc

SEQ ID NO: 1684843 - RNA, 19 nt, Artificial Sequence
  Description of Artificial Sequence: Synthetic oligonucleotide
gguuuuggcuuuggucaug

SEQ ID NO: 1684844 - RNA, 19 nt, Artificial Sequence
  Description of Artificial Sequence: Synthetic oligonucleotide
caccauacgugucuuguuu

SEQ ID NO: 1684845 - RNA, 19 nt, Artificial Sequence
  Description of Artificial Sequence: Synthetic oligonucleotide
augucaccauacgugucuu

SEQ ID NO: 1684846 - RNA, 19 nt, Artificial Sequence
  Description of Artificial Sequence: Synthetic oligonucleotide
ugcuuacauuugugccgaa

SEQ ID NO: 1684847 - RNA, 19 nt, Artificial Sequence
  Description of Artificial Sequence: Synthetic oligonucleotide
cguaaguuucuaauucgaa

SEQ ID NO: 1684848 - RNA, 19 nt, Artificial Sequence
  Description of Artificial Sequence: Synthetic oligonucleotide
cguuucuauaacuuucaua

SEQ ID NO: 1684849 - RNA, 19 nt, Artificial Sequence
  Description of Artificial Sequence: Synthetic oligonucleotide
ggacccguucccagagccg

SEQ ID NO: 1684850 - RNA, 19 nt, Artificial Sequence
  Description of Artificial Sequence: Synthetic oligonucleotide
gcuuuggucaugggcucug

SEQ ID NO: 1684851 - RNA, 19 nt, Artificial Sequence
  Description of Artificial Sequence: Synthetic oligonucleotide
cggacccguucccagagcc

SEQ ID NO: 1684852 - RNA, 19 nt, Artificial Sequence
  Description of Artificial Sequence: Synthetic oligonucleotide
ccgcuucagcguaaguuuc

SEQ ID NO: 1684853 - RNA, 19 nt, Artificial Sequence
  Description of Artificial Sequence: Synthetic oligonucleotide
cugcccguuucuauaacuu

SEQ ID NO: 1684854 - RNA, 19 nt, Artificial Sequence
  Description of Artificial Sequence: Synthetic oligonucleotide
guccuucgucacugccagc

SEQ ID NO: 1684855 - RNA, 19 nt, Artificial Sequence
  Description of Artificial Sequence: Synthetic oligonucleotide
ccgauugcacagcccaguc

SEQ ID NO: 1684856 - RNA, 19 nt, Artificial Sequence
  Description of Artificial Sequence: Synthetic oligonucleotide
cccucuguuacagcacaug

SEQ ID NO: 1684857 - RNA, 19 nt, Artificial Sequence
  Description of Artificial Sequence: Synthetic oligonucleotide
cauauacagguagcacugu

SEQ ID NO: 1684858 - RNA, 19 nt, Artificial Sequence
  Description of Artificial Sequence: Synthetic oligonucleotide
gcugcccguuucuauaacu

SEQ ID NO: 1684859 - RNA, 19 nt, Artificial Sequence
  Description of Artificial Sequence: Synthetic oligonucleotide
ccucuguuacagcacaugu

SEQ ID NO: 1684860 - RNA, 19 nt, Artificial Sequence
  Description of Artificial Sequence: Synthetic oligonucleotide
ggugccggcgggucagcac

SEQ ID NO: 1684861 - RNA, 19 nt, Artificial Sequence
  Description of Artificial Sequence: Synthetic oligonucleotide
cgaaucagguacuggguaa

SEQ ID NO: 1684862 - RNA, 19 nt, Artificial Sequence
  Description of Artificial Sequence: Synthetic oligonucleotide
gcgcuuuuccuaucccaga

SEQ ID NO: 1684863 - RNA, 19 nt, Artificial Sequence
  Description of Artificial Sequence: Synthetic oligonucleotide
ggucagcacgccgcauuag

SEQ ID NO: 1684864 - RNA, 19 nt, Artificial Sequence
  Description of Artificial Sequence: Synthetic oligonucleotide
ccgcacaguggugaacugc

SEQ ID NO: 1684865 - RNA, 19 nt, Artificial Sequence
  Description of Artificial Sequence: Synthetic oligonucleotide
ucccuucguuccgcuucag

SEQ ID NO: 1684866 - RNA, 19 nt, Artificial Sequence
  Description of Artificial Sequence: Synthetic oligonucleotide
gccgaaugaagcggggcca

SEQ ID NO: 1684867 - RNA, 19 nt, Artificial Sequence
  Description of Artificial Sequence: Synthetic oligonucleotide
cccuucguuccgcuucagc

SEQ ID NO: 1684868 - RNA, 19 nt, Artificial Sequence
  Description of Artificial Sequence: Synthetic oligonucleotide
ccgaaugaagcggggccag

SEQ ID NO: 1684869 - RNA, 19 nt, Artificial Sequence
  Description of Artificial Sequence: Synthetic oligonucleotide
ggggccaguaauaaauuuu

SEQ ID NO: 1684870 - RNA, 19 nt, Artificial Sequence
  Description of Artificial Sequence: Synthetic oligonucleotide
ugccagcauccaguuuauc

SEQ ID NO: 1684871 - RNA, 19 nt, Artificial Sequence
  Description of Artificial Sequence: Synthetic oligonucleotide
ccgacugcauggugccggc

SEQ ID NO: 1684872 - RNA, 19 nt, Artificial Sequence
  Description of Artificial Sequence: Synthetic oligonucleotide
caucauccgacugcauggu

SEQ ID NO: 1684873 - RNA, 19 nt, Artificial Sequence
  Description of Artificial Sequence: Synthetic oligonucleotide
ccugcucauacuaacuauu

SEQ ID NO: 1684874 - RNA, 19 nt, Artificial Sequence
  Description of Artificial Sequence: Synthetic oligonucleotide
gccuuaucgaaggcaugga

SEQ ID NO: 1684875 - RNA, 19 nt, Artificial Sequence
  Description of Artificial Sequence: Synthetic oligonucleotide
ccaguaauuccuucucaau

SEQ ID NO: 1684876 - RNA, 19 nt, Artificial Sequence
  Description of Artificial Sequence: Synthetic oligonucleotide
gggccuuaucgaaggcaug

SEQ ID NO: 1684877 - RNA, 19 nt, Artificial Sequence
  Description of Artificial Sequence: Synthetic oligonucleotide
gggucagcacgccgcauua

SEQ ID NO: 1684878 - RNA, 19 nt, Artificial Sequence
  Description of Artificial Sequence: Synthetic oligonucleotide
agagugcagcagagcucug

SEQ ID NO: 1684879 - RNA, 19 nt, Artificial Sequence
  Description of Artificial Sequence: Synthetic oligonucleotide
cccguucccagagccgccg

SEQ ID NO: 1684880 - RNA, 19 nt, Artificial Sequence
  Description of Artificial Sequence: Synthetic oligonucleotide
ccagucagacuauacucau

SEQ ID NO: 1684881 - RNA, 19 nt, Artificial Sequence
  Description of Artificial Sequence: Synthetic oligonucleotide
gcuucagcguaaguuucua

SEQ ID NO: 1684882 - RNA, 19 nt, Artificial Sequence
  Description of Artificial Sequence: Synthetic oligonucleotide
gcuguucccugugaugacu

SEQ ID NO: 1684883 - RNA, 19 nt, Artificial Sequence
  Description of Artificial Sequence: Synthetic oligonucleotide
guuccgcuucagcguaagu

SEQ ID NO: 1684884 - RNA, 19 nt, Artificial Sequence
  Description of Artificial Sequence: Synthetic oligonucleotide
gcauggugccggcggguca

SEQ ID NO: 1684885 - RNA, 19 nt, Artificial Sequence
  Description of Artificial Sequence: Synthetic oligonucleotide
ggcgggucagcacgccgca

SEQ ID NO: 1684886 - RNA, 19 nt, Artificial Sequence
  Description of Artificial Sequence: Synthetic oligonucleotide
ccuuaucgaaggcauggau

SEQ ID NO: 1684887 - RNA, 19 nt, Artificial Sequence
  Description of Artificial Sequence: Synthetic oligonucleotide
ggauggaguuacagaaaau

SEQ ID NO: 1684888 - RNA, 19 nt, Artificial Sequence
  Description of Artificial Sequence: Synthetic oligonucleotide
gcuuacauuugugccgaau

SEQ ID NO: 1684889 - RNA, 19 nt, Artificial Sequence
  Description of Artificial Sequence: Synthetic oligonucleotide
cguucccagagccgccgag

SEQ ID NO: 1684890 - RNA, 19 nt, Artificial Sequence
  Description of Artificial Sequence: Synthetic oligonucleotide
cgugucuuguuucagucuu

SEQ ID NO: 1684891 - RNA, 19 nt, Artificial Sequence
  Description of Artificial Sequence: Synthetic oligonucleotide
cuuuggucaugggcucugu

SEQ ID NO: 1684892 - RNA, 19 nt, Artificial Sequence
  Description of Artificial Sequence: Synthetic oligonucleotide
cguuccgcuucagcguaag

SEQ ID NO: 1684893 - RNA, 19 nt, Artificial Sequence
  Description of Artificial Sequence: Synthetic oligonucleotide
cacagcccagucagacuau

SEQ ID NO: 1684894 - RNA, 19 nt, Artificial Sequence
  Description of Artificial Sequence: Synthetic oligonucleotide
ccuugggcucccucuguua

SEQ ID NO: 1684895 - RNA, 19 nt, Artificial Sequence
  Description of Artificial Sequence: Synthetic oligonucleotide
ccgcaaagucuucuucacu

SEQ ID NO: 1684896 - RNA, 19 nt, Artificial Sequence
  Description of Artificial Sequence: Synthetic oligonucleotide
ggcagcuauuaacgcuuuu

SEQ ID NO: 1684897 - RNA, 19 nt, Artificial Sequence
  Description of Artificial Sequence: Synthetic oligonucleotide
cgcuuuuccuaucccagau

SEQ ID NO: 1684898 - RNA, 19 nt, Artificial Sequence
  Description of Artificial Sequence: Synthetic oligonucleotide
ccguuucuauaacuuucau

SEQ ID NO: 1684899 - RNA, 19 nt, Artificial Sequence
  Description of Artificial Sequence: Synthetic oligonucleotide
cugcauggugccggcgggu

SEQ ID NO: 1684900 - RNA, 19 nt, Artificial Sequence
  Description of Artificial Sequence: Synthetic oligonucleotide
cgcuucagcguaaguuucu

SEQ ID NO: 1684901 - RNA, 19 nt, Artificial Sequence
  Description of Artificial Sequence: Synthetic oligonucleotide
cgacugcauggugccggcg

SEQ ID NO: 1684902 - RNA, 19 nt, Artificial Sequence
  Description of Artificial Sequence: Synthetic oligonucleotide
gccggcgggucagcacgcc

SEQ ID NO: 1684903 - RNA, 19 nt, Artificial Sequence
  Description of Artificial Sequence: Synthetic oligonucleotide
cggggccaguaauaaauuu

SEQ ID NO: 1684904 - RNA, 19 nt, Artificial Sequence
  Description of Artificial Sequence: Synthetic oligonucleotide
ccguucccagagccgccga

SEQ ID NO: 1684905 - RNA, 19 nt, Artificial Sequence
  Description of Artificial Sequence: Synthetic oligonucleotide
ccuucgucacugccagcau

SEQ ID NO: 1684906 - RNA, 19 nt, Artificial Sequence
  Description of Artificial Sequence: Synthetic oligonucleotide
gggcagcuauuaacgcuuu

SEQ ID NO: 1684907 - RNA, 19 nt, Artificial Sequence
  Description of Artificial Sequence: Synthetic oligonucleotide
cgggucagcacgccgcauu

SEQ ID NO: 1684908 - RNA, 19 nt, Artificial Sequence
  Description of Artificial Sequence: Synthetic oligonucleotide
gccuugagucuugguucuu

SEQ ID NO: 1684909 - RNA, 19 nt, Artificial Sequence
  Description of Artificial Sequence: Synthetic oligonucleotide
gcgggucagcacgccgcau

SEQ ID NO: 1684910 - RNA, 19 nt, Artificial Sequence
  Description of Artificial Sequence: Synthetic oligonucleotide
uguagaaaagggcuaaggg

SEQ ID NO: 1684911 - RNA, 19 nt, Artificial Sequence
  Description of Artificial Sequence: Synthetic oligonucleotide
uuugauguagaaaagggcu

SEQ ID NO: 1684912 - RNA, 19 nt, Artificial Sequence
  Description of Artificial Sequence: Synthetic oligonucleotide
uuaaacacucuccuaauag

SEQ ID NO: 1684913 - RNA, 19 nt, Artificial Sequence
  Description of Artificial Sequence: Synthetic oligonucleotide
uguaucauaaaauguaaug

SEQ ID NO: 1684914 - RNA, 19 nt, Artificial Sequence
  Description of Artificial Sequence: Synthetic oligonucleotide
aagaaguuggcccgggucc

SEQ ID NO: 1684915 - RNA, 19 nt, Artificial Sequence
  Description of Artificial Sequence: Synthetic oligonucleotide
auguaguguauuuaaacac

SEQ ID NO: 1684916 - RNA, 19 nt, Artificial Sequence
  Description of Artificial Sequence: Synthetic oligonucleotide
uguauuuaaacacucuccu

SEQ ID NO: 1684917 - RNA, 19 nt, Artificial Sequence
  Description of Artificial Sequence: Synthetic oligonucleotide
aagguugcuuuugagaacc

SEQ ID NO: 1684918 - RNA, 19 nt, Artificial Sequence
  Description of Artificial Sequence: Synthetic oligonucleotide
aguguauuuaaacacucuc

SEQ ID NO: 1684919 - RNA, 19 nt, Artificial Sequence
  Description of Artificial Sequence: Synthetic oligonucleotide
uuaaugaaagcauguauca

SEQ ID NO: 1684920 - RNA, 19 nt, Artificial Sequence
  Description of Artificial Sequence: Synthetic oligonucleotide
ucuccuaauagcaaguacu

SEQ ID NO: 1684921 - RNA, 19 nt, Artificial Sequence
  Description of Artificial Sequence: Synthetic oligonucleotide
cuuucugugaugaugcgcc

SEQ ID NO: 1684922 - RNA, 19 nt, Artificial Sequence
  Description of Artificial Sequence: Synthetic oligonucleotide
uguaguguauuuaaacacu

SEQ ID NO: 1684923 - RNA, 19 nt, Artificial Sequence
  Description of Artificial Sequence: Synthetic oligonucleotide
agugacacuccuuugaugu

SEQ ID NO: 1684924 - RNA, 19 nt, Artificial Sequence
  Description of Artificial Sequence: Synthetic oligonucleotide
cuucagacaguccacacgg

SEQ ID NO: 1684925 - RNA, 19 nt, Artificial Sequence
  Description of Artificial Sequence: Synthetic oligonucleotide
ucuauaucagccuggguca

SEQ ID NO: 1684926 - RNA, 19 nt, Artificial Sequence
  Description of Artificial Sequence: Synthetic oligonucleotide
cuuugauguagaaaagggc

SEQ ID NO: 1684927 - RNA, 19 nt, Artificial Sequence
  Description of Artificial Sequence: Synthetic oligonucleotide
agugucaagagccacguca

SEQ ID NO: 1684928 - RNA, 19 nt, Artificial Sequence
  Description of Artificial Sequence: Synthetic oligonucleotide
aaucucauauguguacugg

SEQ ID NO: 1684929 - RNA, 19 nt, Artificial Sequence
  Description of Artificial Sequence: Synthetic oligonucleotide
aaacaucagcaauugcauc

SEQ ID NO: 1684930 - RNA, 19 nt, Artificial Sequence
  Description of Artificial Sequence: Synthetic oligonucleotide
aauguaauguaguguauuu

SEQ ID NO: 1684931 - RNA, 19 nt, Artificial Sequence
  Description of Artificial Sequence: Synthetic oligonucleotide
ccuaauagcaaguacuucg

SEQ ID NO: 1684932 - RNA, 19 nt, Artificial Sequence
  Description of Artificial Sequence: Synthetic oligonucleotide
uaaacacucuccuaauagc

SEQ ID NO: 1684933 - RNA, 19 nt, Artificial Sequence
  Description of Artificial Sequence: Synthetic oligonucleotide
uuuugagaacccaggaggc

SEQ ID NO: 1684934 - RNA, 19 nt, Artificial Sequence
  Description of Artificial Sequence: Synthetic oligonucleotide
ugaggaagcacacagccaa

SEQ ID NO: 1684935 - RNA, 19 nt, Artificial Sequence
  Description of Artificial Sequence: Synthetic oligonucleotide
cacgucauagaauuugucc

SEQ ID NO: 1684936 - RNA, 19 nt, Artificial Sequence
  Description of Artificial Sequence: Synthetic oligonucleotide
gucuauaucagccuggguc

SEQ ID NO: 1684937 - RNA, 19 nt, Artificial Sequence
  Description of Artificial Sequence: Synthetic oligonucleotide
acugauggaguagugacac

SEQ ID NO: 1684938 - RNA, 19 nt, Artificial Sequence
  Description of Artificial Sequence: Synthetic oligonucleotide
aaguacuucgcuaggagag

SEQ ID NO: 1684939 - RNA, 19 nt, Artificial Sequence
  Description of Artificial Sequence: Synthetic oligonucleotide
acagaaggaagucuauauc

SEQ ID NO: 1684940 - RNA, 19 nt, Artificial Sequence
  Description of Artificial Sequence: Synthetic oligonucleotide
aauagcaaguacuucgcua

SEQ ID NO: 1684941 - RNA, 19 nt, Artificial Sequence
  Description of Artificial Sequence: Synthetic oligonucleotide
cuaauagcaaguacuucgc

SEQ ID NO: 1684942 - RNA, 19 nt, Artificial Sequence
  Description of Artificial Sequence: Synthetic oligonucleotide
acugucagugccaaguccc

SEQ ID NO: 1684943 - RNA, 19 nt, Artificial Sequence
  Description of Artificial Sequence: Synthetic oligonucleotide
acaaagguugcuuuugaga

SEQ ID NO: 1684944 - RNA, 19 nt, Artificial Sequence
  Description of Artificial Sequence: Synthetic oligonucleotide
uucgcuaggagaguuagug

SEQ ID NO: 1684945 - RNA, 19 nt, Artificial Sequence
  Description of Artificial Sequence: Synthetic oligonucleotide
agagucagcccucuggauc

SEQ ID NO: 1684946 - RNA, 19 nt, Artificial Sequence
  Description of Artificial Sequence: Synthetic oligonucleotide
uccacguguaaccauaauc

SEQ ID NO: 1684947 - RNA, 19 nt, Artificial Sequence
  Description of Artificial Sequence: Synthetic oligonucleotide
uccaugaccaacucaaauc

SEQ ID NO: 1684948 - RNA, 19 nt, Artificial Sequence
  Description of Artificial Sequence: Synthetic oligonucleotide
uaaccauaauccgugacgc

SEQ ID NO: 1684949 - RNA, 19 nt, Artificial Sequence
  Description of Artificial Sequence: Synthetic oligonucleotide
auugacaaacucaggcucc

SEQ ID NO: 1684950 - RNA, 19 nt, Artificial Sequence
  Description of Artificial Sequence: Synthetic oligonucleotide
uaauccgugacgcuggcaa

SEQ ID NO: 1684951 - RNA, 19 nt, Artificial Sequence
  Description of Artificial Sequence: Synthetic oligonucleotide
aguagugacacuccuuuga

SEQ ID NO: 1684952 - RNA, 19 nt, Artificial Sequence
  Description of Artificial Sequence: Synthetic oligonucleotide
uuucccucucucaucagcc

SEQ ID NO: 1684953 - RNA, 19 nt, Artificial Sequence
  Description of Artificial Sequence: Synthetic oligonucleotide
gaauuuguccugcuggaac

SEQ ID NO: 1684954 - RNA, 19 nt, Artificial Sequence
  Description of Artificial Sequence: Synthetic oligonucleotide
ucucauauguguacuggcu

SEQ ID NO: 1684955 - RNA, 19 nt, Artificial Sequence
  Description of Artificial Sequence: Synthetic oligonucleotide
agagccacgucauagaauu

SEQ ID NO: 1684956 - RNA, 19 nt, Artificial Sequence
  Description of Artificial Sequence: Synthetic oligonucleotide
agaaauggcacagagcccu

SEQ ID NO: 1684957 - RNA, 19 nt, Artificial Sequence
  Description of Artificial Sequence: Synthetic oligonucleotide
acauugacaaacucaggcu

SEQ ID NO: 1684958 - RNA, 19 nt, Artificial Sequence
  Description of Artificial Sequence: Synthetic oligonucleotide
aaacacucuccuaauagca

SEQ ID NO: 1684959 - RNA, 19 nt, Artificial Sequence
  Description of Artificial Sequence: Synthetic oligonucleotide
ugguacugaccagaaaugg

SEQ ID NO: 1684960 - RNA, 19 nt, Artificial Sequence
  Description of Artificial Sequence: Synthetic oligonucleotide
gacgcuggcaaacaucagc

SEQ ID NO: 1684961 - RNA, 19 nt, Artificial Sequence
  Description of Artificial Sequence: Synthetic oligonucleotide
guagccaaucaucauggag

SEQ ID NO: 1684962 - RNA, 19 nt, Artificial Sequence
  Description of Artificial Sequence: Synthetic oligonucleotide
uauguguacuggcuggugu

SEQ ID NO: 1684963 - RNA, 19 nt, Artificial Sequence
  Description of Artificial Sequence: Synthetic oligonucleotide
ccacguguaaccauaaucc

SEQ ID NO: 1684964 - RNA, 19 nt, Artificial Sequence
  Description of Artificial Sequence: Synthetic oligonucleotide
cauugacaaacucaggcuc

SEQ ID NO: 1684965 - RNA, 19 nt, Artificial Sequence
  Description of Artificial Sequence: Synthetic oligonucleotide
guaaucuggacucucuuuc

SEQ ID NO: 1684966 - RNA, 19 nt, Artificial Sequence
  Description of Artificial Sequence: Synthetic oligonucleotide
ccuuugauguagaaaaggg

SEQ ID NO: 1684967 - RNA, 19 nt, Artificial Sequence
  Description of Artificial Sequence: Synthetic oligonucleotide
guguauuuaaacacucucc

SEQ ID NO: 1684968 - RNA, 19 nt, Artificial Sequence
  Description of Artificial Sequence: Synthetic oligonucleotide
accgagaagcuugugaggg

SEQ ID NO: 1684969 - RNA, 19 nt, Artificial Sequence
  Description of Artificial Sequence: Synthetic oligonucleotide
gaagucuauaucagccugg

SEQ ID NO: 1684970 - RNA, 19 nt, Artificial Sequence
  Description of Artificial Sequence: Synthetic oligonucleotide
guuagugugaggaagcaca

SEQ ID NO: 1684971 - RNA, 19 nt, Artificial Sequence
  Description of Artificial Sequence: Synthetic oligonucleotide
uguaaccauaauccgugac

SEQ ID NO: 1684972 - RNA, 19 nt, Artificial Sequence
  Description of Artificial Sequence: Synthetic oligonucleotide
aacucaaauccuucccgcu

SEQ ID NO: 1684973 - RNA, 19 nt, Artificial Sequence
  Description of Artificial Sequence: Synthetic oligonucleotide
aggagaguuagugugagga

SEQ ID NO: 1684974 - RNA, 19 nt, Artificial Sequence
  Description of Artificial Sequence: Synthetic oligonucleotide
cacguguaaccauaauccg

SEQ ID NO: 1684975 - RNA, 19 nt, Artificial Sequence
  Description of Artificial Sequence: Synthetic oligonucleotide
ugcaccgagaagcuuguga

SEQ ID NO: 1684976 - RNA, 19 nt, Artificial Sequence
  Description of Artificial Sequence: Synthetic oligonucleotide
auguagaaaagggcuaagg

SEQ ID NO: 1684977 - RNA, 19 nt, Artificial Sequence
  Description of Artificial Sequence: Synthetic oligonucleotide
aacucaggcuccaugacca

SEQ ID NO: 1684978 - RNA, 19 nt, Artificial Sequence
  Description of Artificial Sequence: Synthetic oligonucleotide
acaaaccagaagcacacau

SEQ ID NO: 1684979 - RNA, 19 nt, Artificial Sequence
  Description of Artificial Sequence: Synthetic oligonucleotide
uuagugugaggaagcacac

SEQ ID NO: 1684980 - RNA, 19 nt, Artificial Sequence
  Description of Artificial Sequence: Synthetic oligonucleotide
cugguagccaaucaucaug

SEQ ID NO: 1684981 - RNA, 19 nt, Artificial Sequence
  Description of Artificial Sequence: Synthetic oligonucleotide
agagcaaaggccuggucga

SEQ ID NO: 1684982 - RNA, 19 nt, Artificial Sequence
  Description of Artificial Sequence: Synthetic oligonucleotide
ugacacuccuuugauguag

SEQ ID NO: 1684983 - RNA, 19 nt, Artificial Sequence
  Description of Artificial Sequence: Synthetic oligonucleotide
ucaagagccacgucauaga

SEQ ID NO: 1684984 - RNA, 19 nt, Artificial Sequence
  Description of Artificial Sequence: Synthetic oligonucleotide
agaagcuugugaggguucc

SEQ ID NO: 1684985 - RNA, 19 nt, Artificial Sequence
  Description of Artificial Sequence: Synthetic oligonucleotide
uaauagcaaguacuucgcu

SEQ ID NO: 1684986 - RNA, 19 nt, Artificial Sequence
  Description of Artificial Sequence: Synthetic oligonucleotide
gucaagagccacgucauag

SEQ ID NO: 1684987 - RNA, 19 nt, Artificial Sequence
  Description of Artificial Sequence: Synthetic oligonucleotide
agccagacugaucugccuc

SEQ ID NO: 1684988 - RNA, 19 nt, Artificial Sequence
  Description of Artificial Sequence: Synthetic oligonucleotide
uacugauggaguagugaca

SEQ ID NO: 1684989 - RNA, 19 nt, Artificial Sequence
  Description of Artificial Sequence: Synthetic oligonucleotide
uucaccaugcgcuccuuga

SEQ ID NO: 1684990 - RNA, 19 nt, Artificial Sequence
  Description of Artificial Sequence: Synthetic oligonucleotide
cuugugaggguuccaggcc

SEQ ID NO: 1684991 - RNA, 19 nt, Artificial Sequence
  Description of Artificial Sequence: Synthetic oligonucleotide
aaggccuggucgaugcgcc

SEQ ID NO: 1684992 - RNA, 19 nt, Artificial Sequence
  Description of Artificial Sequence: Synthetic oligonucleotide
accauaauccgugacgcug

SEQ ID NO: 1684993 - RNA, 19 nt, Artificial Sequence
  Description of Artificial Sequence: Synthetic oligonucleotide
uguuuccuacaaagguugc

SEQ ID NO: 1684994 - RNA, 19 nt, Artificial Sequence
  Description of Artificial Sequence: Synthetic oligonucleotide
ucagccagacugaucugcc

SEQ ID NO: 1684995 - RNA, 19 nt, Artificial Sequence
  Description of Artificial Sequence: Synthetic oligonucleotide
ucuccagauccucagggau

SEQ ID NO: 1684996 - RNA, 19 nt, Artificial Sequence
  Description of Artificial Sequence: Synthetic oligonucleotide
ucuaaacccugagaagagc

SEQ ID NO: 1684997 - RNA, 19 nt, Artificial Sequence
  Description of Artificial Sequence: Synthetic oligonucleotide
ugauguagaaaagggcuaa

SEQ ID NO: 1684998 - RNA, 19 nt, Artificial Sequence
  Description of Artificial Sequence: Synthetic oligonucleotide
acacccagcuuaaugaaag

SEQ ID NO: 1684999 - RNA, 19 nt, Artificial Sequence
  Description of Artificial Sequence: Synthetic oligonucleotide
aguuagugugaggaagcac

SEQ ID NO: 1685000 - RNA, 19 nt, Artificial Sequence
  Description of Artificial Sequence: Synthetic oligonucleotide
uaaucuggacucucuuucu

SEQ ID NO: 1685001 - RNA, 19 nt, Artificial Sequence
  Description of Artificial Sequence: Synthetic oligonucleotide
uguaaucuggacucucuuu

SEQ ID NO: 1685002 - RNA, 19 nt, Artificial Sequence
  Description of Artificial Sequence: Synthetic oligonucleotide
uucgaggugucccggagaa

SEQ ID NO: 1685003 - RNA, 19 nt, Artificial Sequence
  Description of Artificial Sequence: Synthetic oligonucleotide
gacgcucccaccccaggcg

SEQ ID NO: 1685004 - RNA, 19 nt, Artificial Sequence
  Description of Artificial Sequence: Synthetic oligonucleotide
uguguguccgggacagcag

SEQ ID NO: 1685005 - RNA, 19 nt, Artificial Sequence
  Description of Artificial Sequence: Synthetic oligonucleotide
gagaagaagagcagagcac

SEQ ID NO: 1685006 - RNA, 19 nt, Artificial Sequence
  Description of Artificial Sequence: Synthetic oligonucleotide
guacugaccagaaauggca

SEQ ID NO: 1685007 - RNA, 19 nt, Artificial Sequence
  Description of Artificial Sequence: Synthetic oligonucleotide
acggugguaccagaggugg

SEQ ID NO: 1685008 - RNA, 19 nt, Artificial Sequence
  Description of Artificial Sequence: Synthetic oligonucleotide
gauguagaaaagggcuaag

SEQ ID NO: 1685009 - RNA, 19 nt, Artificial Sequence
  Description of Artificial Sequence: Synthetic oligonucleotide
cagcgcuugagcagguucg

SEQ ID NO: 1685010 - RNA, 19 nt, Artificial Sequence
  Description of Artificial Sequence: Synthetic oligonucleotide
guaguguauuuaaacacuc

SEQ ID NO: 1685011 - RNA, 19 nt, Artificial Sequence
  Description of Artificial Sequence: Synthetic oligonucleotide
acuucgcuaggagaguuag

SEQ ID NO: 1685012 - RNA, 19 nt, Artificial Sequence
  Description of Artificial Sequence: Synthetic oligonucleotide
agacugaucugccucucca

SEQ ID NO: 1685013 - RNA, 19 nt, Artificial Sequence
  Description of Artificial Sequence: Synthetic oligonucleotide
agaacccaggaggcuaugc

SEQ ID NO: 1685014 - RNA, 19 nt, Artificial Sequence
  Description of Artificial Sequence: Synthetic oligonucleotide
uguacuggcugguguugag

SEQ ID NO: 1685015 - RNA, 19 nt, Artificial Sequence
  Description of Artificial Sequence: Synthetic oligonucleotide
uaaugaaagcauguaucau

SEQ ID NO: 1685016 - RNA, 19 nt, Artificial Sequence
  Description of Artificial Sequence: Synthetic oligonucleotide
uagugacacuccuuugaug

SEQ ID NO: 1685017 - RNA, 19 nt, Artificial Sequence
  Description of Artificial Sequence: Synthetic oligonucleotide
uaccgggugagagcaaagg

SEQ ID NO: 1685018 - RNA, 19 nt, Artificial Sequence
  Description of Artificial Sequence: Synthetic oligonucleotide
gguuccaggccacagaguc

SEQ ID NO: 1685019 - RNA, 19 nt, Artificial Sequence
  Description of Artificial Sequence: Synthetic oligonucleotide
uacaggcgccaccugagac

SEQ ID NO: 1685020 - RNA, 19 nt, Artificial Sequence
  Description of Artificial Sequence: Synthetic oligonucleotide
gaacagguagcuggccugg

SEQ ID NO: 1685021 - RNA, 19 nt, Artificial Sequence
  Description of Artificial Sequence: Synthetic oligonucleotide
cucuccuaauagcaaguac

SEQ ID NO: 1685022 - RNA, 19 nt, Artificial Sequence
  Description of Artificial Sequence: Synthetic oligonucleotide
gcaccgagaagcuugugag

SEQ ID NO: 1685023 - RNA, 19 nt, Artificial Sequence
  Description of Artificial Sequence: Synthetic oligonucleotide
ggucuaaacccugagaaga

SEQ ID NO: 1685024 - RNA, 19 nt, Artificial Sequence
  Description of Artificial Sequence: Synthetic oligonucleotide
agccacgucauagaauuug

SEQ ID NO: 1685025 - RNA, 19 nt, Artificial Sequence
  Description of Artificial Sequence: Synthetic oligonucleotide
gaagagcagagcacugcag

SEQ ID NO: 1685026 - RNA, 19 nt, Artificial Sequence
  Description of Artificial Sequence: Synthetic oligonucleotide
auaucagccugggucagug

SEQ ID NO: 1685027 - RNA, 19 nt, Artificial Sequence
  Description of Artificial Sequence: Synthetic oligonucleotide
aagcagcucccuuacugau

SEQ ID NO: 1685028 - RNA, 19 nt, Artificial Sequence
  Description of Artificial Sequence: Synthetic oligonucleotide
uuucugugaugaugcgccc

SEQ ID NO: 1685029 - RNA, 19 nt, Artificial Sequence
  Description of Artificial Sequence: Synthetic oligonucleotide
gucuaaacccugagaagag

SEQ ID NO: 1685030 - RNA, 19 nt, Artificial Sequence
  Description of Artificial Sequence: Synthetic oligonucleotide
guuggcccgggucccaugg

SEQ ID NO: 1685031 - RNA, 19 nt, Artificial Sequence
  Description of Artificial Sequence: Synthetic oligonucleotide
ugccucuccagauccucag

SEQ ID NO: 1685032 - RNA, 19 nt, Artificial Sequence
  Description of Artificial Sequence: Synthetic oligonucleotide
ggggucuaaacccugagaa

SEQ ID NO: 1685033 - RNA, 19 nt, Artificial Sequence
  Description of Artificial Sequence: Synthetic oligonucleotide
ucccggagaagaagagcag

SEQ ID NO: 1685034 - RNA, 19 nt, Artificial Sequence
  Description of Artificial Sequence: Synthetic oligonucleotide
cuuacugauggaguaguga

SEQ ID NO: 1685035 - RNA, 19 nt, Artificial Sequence
  Description of Artificial Sequence: Synthetic oligonucleotide
agaggugguacugaccaga

SEQ ID NO: 1685036 - RNA, 19 nt, Artificial Sequence
  Description of Artificial Sequence: Synthetic oligonucleotide
ccagcuuaaugaaagcaug

SEQ ID NO: 1685037 - RNA, 19 nt, Artificial Sequence
  Description of Artificial Sequence: Synthetic oligonucleotide
gugacgcuggcaaacauca

SEQ ID NO: 1685038 - RNA, 19 nt, Artificial Sequence
  Description of Artificial Sequence: Synthetic oligonucleotide
caaacucaggcuccaugac

SEQ ID NO: 1685039 - RNA, 19 nt, Artificial Sequence
  Description of Artificial Sequence: Synthetic oligonucleotide
uguguacuggcugguguug

SEQ ID NO: 1685040 - RNA, 19 nt, Artificial Sequence
  Description of Artificial Sequence: Synthetic oligonucleotide
acaggcgccaccugagaca

SEQ ID NO: 1685041 - RNA, 19 nt, Artificial Sequence
  Description of Artificial Sequence: Synthetic oligonucleotide
caccgagaagcuugugagg

SEQ ID NO: 1685042 - RNA, 19 nt, Artificial Sequence
  Description of Artificial Sequence: Synthetic oligonucleotide
ucccuuacugauggaguag

SEQ ID NO: 1685043 - RNA, 19 nt, Artificial Sequence
  Description of Artificial Sequence: Synthetic oligonucleotide
ggugguacugaccagaaau

SEQ ID NO: 1685044 - RNA, 19 nt, Artificial Sequence
  Description of Artificial Sequence: Synthetic oligonucleotide
gacacugucagugccaagu

SEQ ID NO: 1685045 - RNA, 19 nt, Artificial Sequence
  Description of Artificial Sequence: Synthetic oligonucleotide
cguguaaccauaauccgug

SEQ ID NO: 1685046 - RNA, 19 nt, Artificial Sequence
  Description of Artificial Sequence: Synthetic oligonucleotide
auccgugacgcuggcaaac

SEQ ID NO: 1685047 - RNA, 19 nt, Artificial Sequence
  Description of Artificial Sequence: Synthetic oligonucleotide
acuguuuccuacaaagguu

SEQ ID NO: 1685048 - RNA, 19 nt, Artificial Sequence
  Description of Artificial Sequence: Synthetic oligonucleotide
ccauaauccgugacgcugg

SEQ ID NO: 1685049 - RNA, 19 nt, Artificial Sequence
  Description of Artificial Sequence: Synthetic oligonucleotide
cuaaacccugagaagagcu

SEQ ID NO: 1685050 - RNA, 19 nt, Artificial Sequence
  Description of Artificial Sequence: Synthetic oligonucleotide
guauuuaaacacucuccua

SEQ ID NO: 1685051 - RNA, 19 nt, Artificial Sequence
  Description of Artificial Sequence: Synthetic oligonucleotide
uguguccgggacagcagga

SEQ ID NO: 1685052 - RNA, 19 nt, Artificial Sequence
  Description of Artificial Sequence: Synthetic oligonucleotide
acucaaauccuucccgcuu

SEQ ID NO: 1685053 - RNA, 19 nt, Artificial Sequence
  Description of Artificial Sequence: Synthetic oligonucleotide
guggcagcgcuugagcagg

SEQ ID NO: 1685054 - RNA, 19 nt, Artificial Sequence
  Description of Artificial Sequence: Synthetic oligonucleotide
gaaaagggcuaagggccag

SEQ ID NO: 1685055 - RNA, 19 nt, Artificial Sequence
  Description of Artificial Sequence: Synthetic oligonucleotide
gguacugaccagaaauggc

SEQ ID NO: 1685056 - RNA, 19 nt, Artificial Sequence
  Description of Artificial Sequence: Synthetic oligonucleotide
gcuaugcagagcuucggug

SEQ ID NO: 1685057 - RNA, 19 nt, Artificial Sequence
  Description of Artificial Sequence: Synthetic oligonucleotide
cucuggaucccauccagga

SEQ ID NO: 1685058 - RNA, 19 nt, Artificial Sequence
  Description of Artificial Sequence: Synthetic oligonucleotide
gucccggagaagaagagca

SEQ ID NO: 1685059 - RNA, 19 nt, Artificial Sequence
  Description of Artificial Sequence: Synthetic oligonucleotide
ucgcuaggagaguuagugu

SEQ ID NO: 1685060 - RNA, 19 nt, Artificial Sequence
  Description of Artificial Sequence: Synthetic oligonucleotide
uuccuacaaagguugcuuu

SEQ ID NO: 1685061 - RNA, 19 nt, Artificial Sequence
  Description of Artificial Sequence: Synthetic oligonucleotide
uccuacaaagguugcuuuu

SEQ ID NO: 1685062 - RNA, 19 nt, Artificial Sequence
  Description of Artificial Sequence: Synthetic oligonucleotide
acguguaaccauaauccgu

SEQ ID NO: 1685063 - RNA, 19 nt, Artificial Sequence
  Description of Artificial Sequence: Synthetic oligonucleotide
uccuaauagcaaguacuuc

SEQ ID NO: 1685064 - RNA, 19 nt, Artificial Sequence
  Description of Artificial Sequence: Synthetic oligonucleotide
aauccgugacgcuggcaaa

SEQ ID NO: 1685065 - RNA, 19 nt, Artificial Sequence
  Description of Artificial Sequence: Synthetic oligonucleotide
cauccggaagaaguuggcc

SEQ ID NO: 1685066 - RNA, 19 nt, Artificial Sequence
  Description of Artificial Sequence: Synthetic oligonucleotide
acccagcuuaaugaaagca

SEQ ID NO: 1685067 - RNA, 19 nt, Artificial Sequence
  Description of Artificial Sequence: Synthetic oligonucleotide
uaccagaggugguacugac

SEQ ID NO: 1685068 - RNA, 19 nt, Artificial Sequence
  Description of Artificial Sequence: Synthetic oligonucleotide
agacgcuccagcucacaca

SEQ ID NO: 1685069 - RNA, 19 nt, Artificial Sequence
  Description of Artificial Sequence: Synthetic oligonucleotide
cacacggcggccacacugc

SEQ ID NO: 1685070 - RNA, 19 nt, Artificial Sequence
  Description of Artificial Sequence: Synthetic oligonucleotide
cuggacucucuuucuuccc

SEQ ID NO: 1685071 - RNA, 19 nt, Artificial Sequence
  Description of Artificial Sequence: Synthetic oligonucleotide
gggucuaaacccugagaag

SEQ ID NO: 1685072 - RNA, 19 nt, Artificial Sequence
  Description of Artificial Sequence: Synthetic oligonucleotide
ggaacagguagcuggccug

SEQ ID NO: 1685073 - RNA, 19 nt, Artificial Sequence
  Description of Artificial Sequence: Synthetic oligonucleotide
cagaaaagcagcucccuua

SEQ ID NO: 1685074 - RNA, 19 nt, Artificial Sequence
  Description of Artificial Sequence: Synthetic oligonucleotide
aacagguagcuggccuggg

SEQ ID NO: 1685075 - RNA, 19 nt, Artificial Sequence
  Description of Artificial Sequence: Synthetic oligonucleotide
ccgggugagagcaaaggcc

SEQ ID NO: 1685076 - RNA, 19 nt, Artificial Sequence
  Description of Artificial Sequence: Synthetic oligonucleotide
ugugaggguuccaggccac

SEQ ID NO: 1685077 - RNA, 19 nt, Artificial Sequence
  Description of Artificial Sequence: Synthetic oligonucleotide
cauaauccgugacgcuggc

SEQ ID NO: 1685078 - RNA, 19 nt, Artificial Sequence
  Description of Artificial Sequence: Synthetic oligonucleotide
ggugagagcaaaggccugg

SEQ ID NO: 1685079 - RNA, 19 nt, Artificial Sequence
  Description of Artificial Sequence: Synthetic oligonucleotide
gaggcacaaaccagaagca

SEQ ID NO: 1685080 - RNA, 19 nt, Artificial Sequence
  Description of Artificial Sequence: Synthetic oligonucleotide
cacccagcuuaaugaaagc

SEQ ID NO: 1685081 - RNA, 19 nt, Artificial Sequence
  Description of Artificial Sequence: Synthetic oligonucleotide
uggaguagugacacuccuu

SEQ ID NO: 1685082 - RNA, 19 nt, Artificial Sequence
  Description of Artificial Sequence: Synthetic oligonucleotide
ugacgcuggcaaacaucag

SEQ ID NO: 1685083 - RNA, 19 nt, Artificial Sequence
  Description of Artificial Sequence: Synthetic oligonucleotide
agcuuaaugaaagcaugua

SEQ ID NO: 1685084 - RNA, 19 nt, Artificial Sequence
  Description of Artificial Sequence: Synthetic oligonucleotide
caaggccacuguuuccuac

SEQ ID NO: 1685085 - RNA, 19 nt, Artificial Sequence
  Description of Artificial Sequence: Synthetic oligonucleotide
cagggcacggaguuucuuc

SEQ ID NO: 1685086 - RNA, 19 nt, Artificial Sequence
  Description of Artificial Sequence: Synthetic oligonucleotide
agaaaagggcuaagggcca

SEQ ID NO: 1685087 - RNA, 19 nt, Artificial Sequence
  Description of Artificial Sequence: Synthetic oligonucleotide
aguacuucgcuaggagagu

SEQ ID NO: 1685088 - RNA, 19 nt, Artificial Sequence
  Description of Artificial Sequence: Synthetic oligonucleotide
ggucaaaggccccuagcac

SEQ ID NO: 1685089 - RNA, 19 nt, Artificial Sequence
  Description of Artificial Sequence: Synthetic oligonucleotide
gcggcauccacguguaacc

SEQ ID NO: 1685090 - RNA, 19 nt, Artificial Sequence
  Description of Artificial Sequence: Synthetic oligonucleotide
gcagguucgaggugucccg

SEQ ID NO: 1685091 - RNA, 19 nt, Artificial Sequence
  Description of Artificial Sequence: Synthetic oligonucleotide
ugaugcgcccagccagagc

SEQ ID NO: 1685092 - RNA, 19 nt, Artificial Sequence
  Description of Artificial Sequence: Synthetic oligonucleotide
aagagccacgucauagaau

SEQ ID NO: 1685093 - RNA, 19 nt, Artificial Sequence
  Description of Artificial Sequence: Synthetic oligonucleotide
acgcucccaccccaggcgg

SEQ ID NO: 1685094 - RNA, 19 nt, Artificial Sequence
  Description of Artificial Sequence: Synthetic oligonucleotide
uggucgaugcgccgcucca

SEQ ID NO: 1685095 - RNA, 19 nt, Artificial Sequence
  Description of Artificial Sequence: Synthetic oligonucleotide
agcucacacagaaggaagu

SEQ ID NO: 1685096 - RNA, 19 nt, Artificial Sequence
  Description of Artificial Sequence: Synthetic oligonucleotide
gaugccuguguguccggga

SEQ ID NO: 1685097 - RNA, 19 nt, Artificial Sequence
  Description of Artificial Sequence: Synthetic oligonucleotide
cuauaucagccugggucag

SEQ ID NO: 1685098 - RNA, 19 nt, Artificial Sequence
  Description of Artificial Sequence: Synthetic oligonucleotide
agucuauaucagccugggu

SEQ ID NO: 1685099 - RNA, 19 nt, Artificial Sequence
  Description of Artificial Sequence: Synthetic oligonucleotide
gguaccagaggugguacug

SEQ ID NO: 1685100 - RNA, 19 nt, Artificial Sequence
  Description of Artificial Sequence: Synthetic oligonucleotide
uacuucgcuaggagaguua

SEQ ID NO: 1685101 - RNA, 19 nt, Artificial Sequence
  Description of Artificial Sequence: Synthetic oligonucleotide
ccggagaagaagagcagag

SEQ ID NO: 1685102 - RNA, 19 nt, Artificial Sequence
  Description of Artificial Sequence: Synthetic oligonucleotide
uagugugaggaagcacaca

SEQ ID NO: 1685103 - RNA, 19 nt, Artificial Sequence
  Description of Artificial Sequence: Synthetic oligonucleotide
cagacgcuccagcucacac

SEQ ID NO: 1685104 - RNA, 19 nt, Artificial Sequence
  Description of Artificial Sequence: Synthetic oligonucleotide
agagcuucggugaggcuga

SEQ ID NO: 1685105 - RNA, 19 nt, Artificial Sequence
  Description of Artificial Sequence: Synthetic oligonucleotide
cgcuaggagaguuagugug

SEQ ID NO: 1685106 - RNA, 19 nt, Artificial Sequence
  Description of Artificial Sequence: Synthetic oligonucleotide
uuggcccgggucccauggg

SEQ ID NO: 1685107 - RNA, 19 nt, Artificial Sequence
  Description of Artificial Sequence: Synthetic oligonucleotide
aggcuaugcagagcuucgg

SEQ ID NO: 1685108 - RNA, 19 nt, Artificial Sequence
  Description of Artificial Sequence: Synthetic oligonucleotide
ucccucucucaucagccuu

SEQ ID NO: 1685109 - RNA, 19 nt, Artificial Sequence
  Description of Artificial Sequence: Synthetic oligonucleotide
ugguaccagaggugguacu

SEQ ID NO: 1685110 - RNA, 19 nt, Artificial Sequence
  Description of Artificial Sequence: Synthetic oligonucleotide
caggcgccaccugagacag

SEQ ID NO: 1685111 - RNA, 19 nt, Artificial Sequence
  Description of Artificial Sequence: Synthetic oligonucleotide
caagagccacgucauagaa

SEQ ID NO: 1685112 - RNA, 19 nt, Artificial Sequence
  Description of Artificial Sequence: Synthetic oligonucleotide
cagccuugaccacucggac

SEQ ID NO: 1685113 - RNA, 19 nt, Artificial Sequence
  Description of Artificial Sequence: Synthetic oligonucleotide
ugagcgggcgggguagcag

SEQ ID NO: 1685114 - RNA, 19 nt, Artificial Sequence
  Description of Artificial Sequence: Synthetic oligonucleotide
caccaccuugucuccagug

SEQ ID NO: 1685115 - RNA, 19 nt, Artificial Sequence
  Description of Artificial Sequence: Synthetic oligonucleotide
cuggucgaugcgccgcucc

SEQ ID NO: 1685116 - RNA, 19 nt, Artificial Sequence
  Description of Artificial Sequence: Synthetic oligonucleotide
ugucaagagccacgucaua

SEQ ID NO: 1685117 - RNA, 19 nt, Artificial Sequence
  Description of Artificial Sequence: Synthetic oligonucleotide
gaugaugcgcccagccaga

SEQ ID NO: 1685118 - RNA, 19 nt, Artificial Sequence
  Description of Artificial Sequence: Synthetic oligonucleotide
gcuuaaugaaagcauguau

SEQ ID NO: 1685119 - RNA, 19 nt, Artificial Sequence
  Description of Artificial Sequence: Synthetic oligonucleotide
aggugucccggagaagaag

SEQ ID NO: 1685120 - RNA, 19 nt, Artificial Sequence
  Description of Artificial Sequence: Synthetic oligonucleotide
ccuacaaagguugcuuuug

SEQ ID NO: 1685121 - RNA, 19 nt, Artificial Sequence
  Description of Artificial Sequence: Synthetic oligonucleotide
ggcaaacaucagcaauugc

SEQ ID NO: 1685122 - RNA, 19 nt, Artificial Sequence
  Description of Artificial Sequence: Synthetic oligonucleotide
cacacugcaccaccuuguc

SEQ ID NO: 1685123 - RNA, 19 nt, Artificial Sequence
  Description of Artificial Sequence: Synthetic oligonucleotide
uccgugacgcuggcaaaca

SEQ ID NO: 1685124 - RNA, 19 nt, Artificial Sequence
  Description of Artificial Sequence: Synthetic oligonucleotide
ggcgccaccugagacagcc

SEQ ID NO: 1685125 - RNA, 19 nt, Artificial Sequence
  Description of Artificial Sequence: Synthetic oligonucleotide
cagguaccgggugagagca

SEQ ID NO: 1685126 - RNA, 19 nt, Artificial Sequence
  Description of Artificial Sequence: Synthetic oligonucleotide
cacaggggcaaucucauau

SEQ ID NO: 1685127 - RNA, 19 nt, Artificial Sequence
  Description of Artificial Sequence: Synthetic oligonucleotide
cagaggugguacugaccag

SEQ ID NO: 1685128 - RNA, 19 nt, Artificial Sequence
  Description of Artificial Sequence: Synthetic oligonucleotide
caccauccggaagaaguug

SEQ ID NO: 1685129 - RNA, 19 nt, Artificial Sequence
  Description of Artificial Sequence: Synthetic oligonucleotide
gacacuccuuugauguaga

SEQ ID NO: 1685130 - RNA, 19 nt, Artificial Sequence
  Description of Artificial Sequence: Synthetic oligonucleotide
cccugcaccgagaagcuug

SEQ ID NO: 1685131 - RNA, 19 nt, Artificial Sequence
  Description of Artificial Sequence: Synthetic oligonucleotide
cacagguccuggcccagac

SEQ ID NO: 1685132 - RNA, 19 nt, Artificial Sequence
  Description of Artificial Sequence: Synthetic oligonucleotide
auggggcugguagccaauc

SEQ ID NO: 1685133 - RNA, 19 nt, Artificial Sequence
  Description of Artificial Sequence: Synthetic oligonucleotide
gagacagccuuuugcugua

SEQ ID NO: 1685134 - RNA, 19 nt, Artificial Sequence
  Description of Artificial Sequence: Synthetic oligonucleotide
uaucagccugggucagugu

SEQ ID NO: 1685135 - RNA, 19 nt, Artificial Sequence
  Description of Artificial Sequence: Synthetic oligonucleotide
aggggcaaucucauaugug

SEQ ID NO: 1685136 - RNA, 19 nt, Artificial Sequence
  Description of Artificial Sequence: Synthetic oligonucleotide
cucccuuacugauggagua

SEQ ID NO: 1685137 - RNA, 19 nt, Artificial Sequence
  Description of Artificial Sequence: Synthetic oligonucleotide
ugggacccguggcagcgcu

SEQ ID NO: 1685138 - RNA, 19 nt, Artificial Sequence
  Description of Artificial Sequence: Synthetic oligonucleotide
gagaagcuugugaggguuc

SEQ ID NO: 1685139 - RNA, 19 nt, Artificial Sequence
  Description of Artificial Sequence: Synthetic oligonucleotide
ggaggcuaugcagagcuuc

SEQ ID NO: 1685140 - RNA, 19 nt, Artificial Sequence
  Description of Artificial Sequence: Synthetic oligonucleotide
guucgaggugucccggaga

SEQ ID NO: 1685141 - RNA, 19 nt, Artificial Sequence
  Description of Artificial Sequence: Synthetic oligonucleotide
gaugcgccgcuccaguccu

SEQ ID NO: 1685142 - RNA, 19 nt, Artificial Sequence
  Description of Artificial Sequence: Synthetic oligonucleotide
agcagcucccuuacugaug

SEQ ID NO: 1685143 - RNA, 19 nt, Artificial Sequence
  Description of Artificial Sequence: Synthetic oligonucleotide
ggugucccggagaagaaga

SEQ ID NO: 1685144 - RNA, 19 nt, Artificial Sequence
  Description of Artificial Sequence: Synthetic oligonucleotide
gugucccggagaagaagag

SEQ ID NO: 1685145 - RNA, 19 nt, Artificial Sequence
  Description of Artificial Sequence: Synthetic oligonucleotide
gugguaccagaggugguac

SEQ ID NO: 1685146 - RNA, 19 nt, Artificial Sequence
  Description of Artificial Sequence: Synthetic oligonucleotide
aggccuggucgaugcgccg

SEQ ID NO: 1685147 - RNA, 19 nt, Artificial Sequence
  Description of Artificial Sequence: Synthetic oligonucleotide
cuccuaauagcaaguacuu

SEQ ID NO: 1685148 - RNA, 19 nt, Artificial Sequence
  Description of Artificial Sequence: Synthetic oligonucleotide
cacacccagcuuaaugaaa

SEQ ID NO: 1685149 - RNA, 19 nt, Artificial Sequence
  Description of Artificial Sequence: Synthetic oligonucleotide
uugcuguaaucuggacucu

SEQ ID NO: 1685150 - RNA, 19 nt, Artificial Sequence
  Description of Artificial Sequence: Synthetic oligonucleotide
auccacguguaaccauaau

SEQ ID NO: 1685151 - RNA, 19 nt, Artificial Sequence
  Description of Artificial Sequence: Synthetic oligonucleotide
ggggucaaaggccccuagc

SEQ ID NO: 1685152 - RNA, 19 nt, Artificial Sequence
  Description of Artificial Sequence: Synthetic oligonucleotide
gcuggaacagguagcuggc

SEQ ID NO: 1685153 - RNA, 19 nt, Artificial Sequence
  Description of Artificial Sequence: Synthetic oligonucleotide
guaccagaggugguacuga

SEQ ID NO: 1685154 - RNA, 19 nt, Artificial Sequence
  Description of Artificial Sequence: Synthetic oligonucleotide
caugaccaacucaaauccu

SEQ ID NO: 1685155 - RNA, 19 nt, Artificial Sequence
  Description of Artificial Sequence: Synthetic oligonucleotide
ucgaugcgccgcuccaguc

SEQ ID NO: 1685156 - RNA, 19 nt, Artificial Sequence
  Description of Artificial Sequence: Synthetic oligonucleotide
augaugcgcccagccagag

SEQ ID NO: 1685157 - RNA, 19 nt, Artificial Sequence
  Description of Artificial Sequence: Synthetic oligonucleotide
auaauccgugacgcuggca

SEQ ID NO: 1685158 - RNA, 19 nt, Artificial Sequence
  Description of Artificial Sequence: Synthetic oligonucleotide
guaccgggugagagcaaag

SEQ ID NO: 1685159 - RNA, 19 nt, Artificial Sequence
  Description of Artificial Sequence: Synthetic oligonucleotide
guuuccuacaaagguugcu

SEQ ID NO: 1685160 - RNA, 19 nt, Artificial Sequence
  Description of Artificial Sequence: Synthetic oligonucleotide
gccccuagcacggugguac

SEQ ID NO: 1685161 - RNA, 19 nt, Artificial Sequence
  Description of Artificial Sequence: Synthetic oligonucleotide
cuagcacggugguaccaga

SEQ ID NO: 1685162 - RNA, 19 nt, Artificial Sequence
  Description of Artificial Sequence: Synthetic oligonucleotide
caggacgcucccaccccag

SEQ ID NO: 1685163 - RNA, 19 nt, Artificial Sequence
  Description of Artificial Sequence: Synthetic oligonucleotide
aggugguacugaccagaaa

SEQ ID NO: 1685164 - RNA, 19 nt, Artificial Sequence
  Description of Artificial Sequence: Synthetic oligonucleotide
ggacgcucccaccccaggc

SEQ ID NO: 1685165 - RNA, 19 nt, Artificial Sequence
  Description of Artificial Sequence: Synthetic oligonucleotide
cauccacguguaaccauaa

SEQ ID NO: 1685166 - RNA, 19 nt, Artificial Sequence
  Description of Artificial Sequence: Synthetic oligonucleotide
cacucuccuaauagcaagu

SEQ ID NO: 1685167 - RNA, 19 nt, Artificial Sequence
  Description of Artificial Sequence: Synthetic oligonucleotide
ccacacggcggccacacug

SEQ ID NO: 1685168 - RNA, 19 nt, Artificial Sequence
  Description of Artificial Sequence: Synthetic oligonucleotide
ucgaggugucccggagaag

SEQ ID NO: 1685169 - RNA, 19 nt, Artificial Sequence
  Description of Artificial Sequence: Synthetic oligonucleotide
gcagcgcuugagcagguuc

SEQ ID NO: 1685170 - RNA, 19 nt, Artificial Sequence
  Description of Artificial Sequence: Synthetic oligonucleotide
guagcuggccugggacccg

SEQ ID NO: 1685171 - RNA, 19 nt, Artificial Sequence
  Description of Artificial Sequence: Synthetic oligonucleotide
uccgggacagcaggacgcu

SEQ ID NO: 1685172 - RNA, 19 nt, Artificial Sequence
  Description of Artificial Sequence: Synthetic oligonucleotide
ggcggcauccacguguaac

SEQ ID NO: 1685173 - RNA, 19 nt, Artificial Sequence
  Description of Artificial Sequence: Synthetic oligonucleotide
guacaggcgccaccugaga

SEQ ID NO: 1685174 - RNA, 19 nt, Artificial Sequence
  Description of Artificial Sequence: Synthetic oligonucleotide
ggucacagguccuggccca

SEQ ID NO: 1685175 - RNA, 19 nt, Artificial Sequence
  Description of Artificial Sequence: Synthetic oligonucleotide
gccucuccagauccucagg

SEQ ID NO: 1685176 - RNA, 19 nt, Artificial Sequence
  Description of Artificial Sequence: Synthetic oligonucleotide
gccgcuccaguccuugccc

SEQ ID NO: 1685177 - RNA, 19 nt, Artificial Sequence
  Description of Artificial Sequence: Synthetic oligonucleotide
gguugcuuuugagaaccca

SEQ ID NO: 1685178 - RNA, 19 nt, Artificial Sequence
  Description of Artificial Sequence: Synthetic oligonucleotide
ugacaaacucaggcuccau

SEQ ID NO: 1685179 - RNA, 19 nt, Artificial Sequence
  Description of Artificial Sequence: Synthetic oligonucleotide
guccacacggcggccacac

SEQ ID NO: 1685180 - RNA, 19 nt, Artificial Sequence
  Description of Artificial Sequence: Synthetic oligonucleotide
agcgcuugagcagguucga

SEQ ID NO: 1685181 - RNA, 19 nt, Artificial Sequence
  Description of Artificial Sequence: Synthetic oligonucleotide
cccucucucaucagccuug

SEQ ID NO: 1685182 - RNA, 19 nt, Artificial Sequence
  Description of Artificial Sequence: Synthetic oligonucleotide
acucaggcuccaugaccaa

SEQ ID NO: 1685183 - RNA, 19 nt, Artificial Sequence
  Description of Artificial Sequence: Synthetic oligonucleotide
gcggccacacugcaccacc

SEQ ID NO: 1685184 - RNA, 19 nt, Artificial Sequence
  Description of Artificial Sequence: Synthetic oligonucleotide
gcccuucuucaccaugcgc

SEQ ID NO: 1685185 - RNA, 19 nt, Artificial Sequence
  Description of Artificial Sequence: Synthetic oligonucleotide
gcucacacagaaggaaguc

SEQ ID NO: 1685186 - RNA, 19 nt, Artificial Sequence
  Description of Artificial Sequence: Synthetic oligonucleotide
ccacgucauagaauuuguc

SEQ ID NO: 1685187 - RNA, 19 nt, Artificial Sequence
  Description of Artificial Sequence: Synthetic oligonucleotide
cugaucugccucuccagau

SEQ ID NO: 1685188 - RNA, 19 nt, Artificial Sequence
  Description of Artificial Sequence: Synthetic oligonucleotide
gguagccaaucaucaugga

SEQ ID NO: 1685189 - RNA, 19 nt, Artificial Sequence
  Description of Artificial Sequence: Synthetic oligonucleotide
cacggcggccacacugcac

SEQ ID NO: 1685190 - RNA, 19 nt, Artificial Sequence
  Description of Artificial Sequence: Synthetic oligonucleotide
cguggcagcgcuugagcag

SEQ ID NO: 1685191 - RNA, 19 nt, Artificial Sequence
  Description of Artificial Sequence: Synthetic oligonucleotide
ccugggacccguggcagcg

SEQ ID NO: 1685192 - RNA, 19 nt, Artificial Sequence
  Description of Artificial Sequence: Synthetic oligonucleotide
cgggguagcaggucacagg

SEQ ID NO: 1685193 - RNA, 19 nt, Artificial Sequence
  Description of Artificial Sequence: Synthetic oligonucleotide
ggcuaagggccagggcacg

SEQ ID NO: 1685194 - RNA, 19 nt, Artificial Sequence
  Description of Artificial Sequence: Synthetic oligonucleotide
cugggucagugugggguug

SEQ ID NO: 1685195 - RNA, 19 nt, Artificial Sequence
  Description of Artificial Sequence: Synthetic oligonucleotide
ggacccguggcagcgcuug

SEQ ID NO: 1685196 - RNA, 19 nt, Artificial Sequence
  Description of Artificial Sequence: Synthetic oligonucleotide
uccacacggcggccacacu

SEQ ID NO: 1685197 - RNA, 19 nt, Artificial Sequence
  Description of Artificial Sequence: Synthetic oligonucleotide
gaggugucccggagaagaa

SEQ ID NO: 1685198 - RNA, 19 nt, Artificial Sequence
  Description of Artificial Sequence: Synthetic oligonucleotide
agcccugcaccgagaagcu

SEQ ID NO: 1685199 - RNA, 19 nt, Artificial Sequence
  Description of Artificial Sequence: Synthetic oligonucleotide
gugucaagagccacgucau

SEQ ID NO: 1685200 - RNA, 19 nt, Artificial Sequence
  Description of Artificial Sequence: Synthetic oligonucleotide
cagugucaagagccacguc

SEQ ID NO: 1685201 - RNA, 19 nt, Artificial Sequence
  Description of Artificial Sequence: Synthetic oligonucleotide
ucccaccccaggcggcauc

SEQ ID NO: 1685202 - RNA, 19 nt, Artificial Sequence
  Description of Artificial Sequence: Synthetic oligonucleotide
gguaccgggugagagcaaa

SEQ ID NO: 1685203 - RNA, 19 nt, Artificial Sequence
  Description of Artificial Sequence: Synthetic oligonucleotide
cgaugcgccgcuccagucc

SEQ ID NO: 1685204 - RNA, 19 nt, Artificial Sequence
  Description of Artificial Sequence: Synthetic oligonucleotide
cccguggcagcgcuugagc

SEQ ID NO: 1685205 - RNA, 19 nt, Artificial Sequence
  Description of Artificial Sequence: Synthetic oligonucleotide
ccaugcgcuccuugaguac

SEQ ID NO: 1685206 - RNA, 19 nt, Artificial Sequence
  Description of Artificial Sequence: Synthetic oligonucleotide
gcauccacguguaaccaua

SEQ ID NO: 1685207 - RNA, 19 nt, Artificial Sequence
  Description of Artificial Sequence: Synthetic oligonucleotide
cccagcuuaaugaaagcau

SEQ ID NO: 1685208 - RNA, 19 nt, Artificial Sequence
  Description of Artificial Sequence: Synthetic oligonucleotide
aggcugagcgggcggggua

SEQ ID NO: 1685209 - RNA, 19 nt, Artificial Sequence
  Description of Artificial Sequence: Synthetic oligonucleotide
caggcggcauccacgugua

SEQ ID NO: 1685210 - RNA, 19 nt, Artificial Sequence
  Description of Artificial Sequence: Synthetic oligonucleotide
guacuucgcuaggagaguu

SEQ ID NO: 1685211 - RNA, 19 nt, Artificial Sequence
  Description of Artificial Sequence: Synthetic oligonucleotide
cuucgcuaggagaguuagu

SEQ ID NO: 1685212 - RNA, 19 nt, Artificial Sequence
  Description of Artificial Sequence: Synthetic oligonucleotide
gcaggacgcucccacccca

SEQ ID NO: 1685213 - RNA, 19 nt, Artificial Sequence
  Description of Artificial Sequence: Synthetic oligonucleotide
gacccguggcagcgcuuga

SEQ ID NO: 1685214 - RNA, 19 nt, Artificial Sequence
  Description of Artificial Sequence: Synthetic oligonucleotide
gagcuucggugaggcugag

SEQ ID NO: 1685215 - RNA, 19 nt, Artificial Sequence
  Description of Artificial Sequence: Synthetic oligonucleotide
gccaaucaucauggagccc

SEQ ID NO: 1685216 - RNA, 19 nt, Artificial Sequence
  Description of Artificial Sequence: Synthetic oligonucleotide
cccggagaagaagagcaga

SEQ ID NO: 1685217 - RNA, 19 nt, Artificial Sequence
  Description of Artificial Sequence: Synthetic oligonucleotide
ccaggcggcauccacgugu

SEQ ID NO: 1685218 - RNA, 19 nt, Artificial Sequence
  Description of Artificial Sequence: Synthetic oligonucleotide
ggcccgggucccauggggc

SEQ ID NO: 1685219 - RNA, 19 nt, Artificial Sequence
  Description of Artificial Sequence: Synthetic oligonucleotide
ccguggcagcgcuugagca

SEQ ID NO: 1685220 - RNA, 19 nt, Artificial Sequence
  Description of Artificial Sequence: Synthetic oligonucleotide
gcucccuuacugauggagu

SEQ ID NO: 1685221 - RNA, 19 nt, Artificial Sequence
  Description of Artificial Sequence: Synthetic oligonucleotide
cagccagacugaucugccu

SEQ ID NO: 1685222 - RNA, 19 nt, Artificial Sequence
  Description of Artificial Sequence: Synthetic oligonucleotide
ccccuagcacggugguacc

SEQ ID NO: 1685223 - RNA, 19 nt, Artificial Sequence
  Description of Artificial Sequence: Synthetic oligonucleotide
gccacgucauagaauuugu

SEQ ID NO: 1685224 - RNA, 19 nt, Artificial Sequence
  Description of Artificial Sequence: Synthetic oligonucleotide
agcgggcgggguagcaggu

SEQ ID NO: 1685225 - RNA, 19 nt, Artificial Sequence
  Description of Artificial Sequence: Synthetic oligonucleotide
ggcauccacguguaaccau

SEQ ID NO: 1685226 - RNA, 19 nt, Artificial Sequence
  Description of Artificial Sequence: Synthetic oligonucleotide
cugcaccgagaagcuugug

SEQ ID NO: 1685227 - RNA, 19 nt, Artificial Sequence
  Description of Artificial Sequence: Synthetic oligonucleotide
aggcgccaccugagacagc

SEQ ID NO: 1685228 - RNA, 19 nt, Artificial Sequence
  Description of Artificial Sequence: Synthetic oligonucleotide
cugcaccaccuugucucca

SEQ ID NO: 1685229 - RNA, 19 nt, Artificial Sequence
  Description of Artificial Sequence: Synthetic oligonucleotide
cauggggcugguagccaau

SEQ ID NO: 1685230 - RNA, 19 nt, Artificial Sequence
  Description of Artificial Sequence: Synthetic oligonucleotide
aggaggcuaugcagagcuu

SEQ ID NO: 1685231 - RNA, 19 nt, Artificial Sequence
  Description of Artificial Sequence: Synthetic oligonucleotide
ccgggucccauggggcugg

SEQ ID NO: 1685232 - RNA, 19 nt, Artificial Sequence
  Description of Artificial Sequence: Synthetic oligonucleotide
aggcggcauccacguguaa

SEQ ID NO: 1685233 - RNA, 19 nt, Artificial Sequence
  Description of Artificial Sequence: Synthetic oligonucleotide
cccgcaggcugggaggcac

SEQ ID NO: 1685234 - RNA, 19 nt, Artificial Sequence
  Description of Artificial Sequence: Synthetic oligonucleotide
ccagugucaagagccacgu

SEQ ID NO: 1685235 - RNA, 19 nt, Artificial Sequence
  Description of Artificial Sequence: Synthetic oligonucleotide
cugagcgggcgggguagca

SEQ ID NO: 1685236 - RNA, 19 nt, Artificial Sequence
  Description of Artificial Sequence: Synthetic oligonucleotide
ggcgggguagcaggucaca

SEQ ID NO: 1685237 - RNA, 19 nt, Artificial Sequence
  Description of Artificial Sequence: Synthetic oligonucleotide
cccuuacugauggaguagu

SEQ ID NO: 1685238 - RNA, 19 nt, Artificial Sequence
  Description of Artificial Sequence: Synthetic oligonucleotide
gcugagcgggcgggguagc

SEQ ID NO: 1685239 - RNA, 19 nt, Artificial Sequence
  Description of Artificial Sequence: Synthetic oligonucleotide
ccagaaaagcagcucccuu

SEQ ID NO: 1685240 - RNA, 19 nt, Artificial Sequence
  Description of Artificial Sequence: Synthetic oligonucleotide
ccugcaccgagaagcuugu

SEQ ID NO: 1685241 - RNA, 19 nt, Artificial Sequence
  Description of Artificial Sequence: Synthetic oligonucleotide
agguaccgggugagagcaa

SEQ ID NO: 1685242 - RNA, 19 nt, Artificial Sequence
  Description of Artificial Sequence: Synthetic oligonucleotide
gggcgggguagcaggucac

SEQ ID NO: 1685243 - RNA, 19 nt, Artificial Sequence
  Description of Artificial Sequence: Synthetic oligonucleotide
cgggcgggguagcagguca

SEQ ID NO: 1685244 - RNA, 19 nt, Artificial Sequence
  Description of Artificial Sequence: Synthetic oligonucleotide
ccgagaagcuugugagggu

SEQ ID NO: 1685245 - RNA, 19 nt, Artificial Sequence
  Description of Artificial Sequence: Synthetic oligonucleotide
gcccgggucccauggggcu

SEQ ID NO: 1685246 - RNA, 19 nt, Artificial Sequence
  Description of Artificial Sequence: Synthetic oligonucleotide
gccuggucgaugcgccgcu

SEQ ID NO: 1685247 - RNA, 19 nt, Artificial Sequence
  Description of Artificial Sequence: Synthetic oligonucleotide
caaaggccccuagcacggu

SEQ ID NO: 1685248 - RNA, 19 nt, Artificial Sequence
  Description of Artificial Sequence: Synthetic oligonucleotide
ggguuccaggccacagagu

SEQ ID NO: 1685249 - RNA, 19 nt, Artificial Sequence
  Description of Artificial Sequence: Synthetic oligonucleotide
ccagacgcuccagcucaca

SEQ ID NO: 1685250 - RNA, 19 nt, Artificial Sequence
  Description of Artificial Sequence: Synthetic oligonucleotide
cggcauccacguguaacca

SEQ ID NO: 1685251 - RNA, 19 nt, Artificial Sequence
  Description of Artificial Sequence: Synthetic oligonucleotide
cgagaagcuugugaggguu

SEQ ID NO: 1685252 - RNA, 19 nt, Artificial Sequence
  Description of Artificial Sequence: Synthetic oligonucleotide
gcgggcgggguagcagguc

SEQ ID NO: 1685253 - RNA, 19 nt, Artificial Sequence
  Description of Artificial Sequence: Synthetic oligonucleotide
gccaccugagacagccuuu

SEQ ID NO: 1685254 - RNA, 19 nt, Artificial Sequence
  Description of Artificial Sequence: Synthetic oligonucleotide
augcgccgcuccaguccuu

SEQ ID NO: 1685255 - RNA, 19 nt, Artificial Sequence
  Description of Artificial Sequence: Synthetic oligonucleotide
ggccccuagcacgguggua

SEQ ID NO: 1685256 - RNA, 19 nt, Artificial Sequence
  Description of Artificial Sequence: Synthetic oligonucleotide
cgccaccugagacagccuu

SEQ ID NO: 1685257 - RNA, 19 nt, Artificial Sequence
  Description of Artificial Sequence: Synthetic oligonucleotide
ggcagcgcuugagcagguu

SEQ ID NO: 1685258 - RNA, 19 nt, Artificial Sequence
  Description of Artificial Sequence: Synthetic oligonucleotide
gcccugcaccgagaagcuu

SEQ ID NO: 1685259 - RNA, 19 nt, Artificial Sequence
  Description of Artificial Sequence: Synthetic oligonucleotide
gggacccguggcagcgcuu

SEQ ID NO: 1685260 - RNA, 19 nt, Artificial Sequence
  Description of Artificial Sequence: Synthetic oligonucleotide
gauauauuuuccuuuaucc

SEQ ID NO: 1685261 - RNA, 19 nt, Artificial Sequence
  Description of Artificial Sequence: Synthetic oligonucleotide
uccacuuuaagacagcugg

SEQ ID NO: 1685262 - RNA, 19 nt, Artificial Sequence
  Description of Artificial Sequence: Synthetic oligonucleotide
uuugucagcagcaugacag

SEQ ID NO: 1685263 - RNA, 19 nt, Artificial Sequence
  Description of Artificial Sequence: Synthetic oligonucleotide
aauaguacaguuucuccac

SEQ ID NO: 1685264 - RNA, 19 nt, Artificial Sequence
  Description of Artificial Sequence: Synthetic oligonucleotide
acuacuacugcuucaaagc

SEQ ID NO: 1685265 - RNA, 19 nt, Artificial Sequence
  Description of Artificial Sequence: Synthetic oligonucleotide
auagcauaaacucugguag

SEQ ID NO: 1685266 - RNA, 19 nt, Artificial Sequence
  Description of Artificial Sequence: Synthetic oligonucleotide
uugagaugcauguagaucc

SEQ ID NO: 1685267 - RNA, 19 nt, Artificial Sequence
  Description of Artificial Sequence: Synthetic oligonucleotide
acuucauuggccuucuugc

SEQ ID NO: 1685268 - RNA, 19 nt, Artificial Sequence
  Description of Artificial Sequence: Synthetic oligonucleotide
uuuauccacuuuaagacag

SEQ ID NO: 1685269 - RNA, 19 nt, Artificial Sequence
  Description of Artificial Sequence: Synthetic oligonucleotide
uauauuuuccuuuauccac

SEQ ID NO: 1685270 - RNA, 19 nt, Artificial Sequence
  Description of Artificial Sequence: Synthetic oligonucleotide
gaauuugagaugcauguag

SEQ ID NO: 1685271 - RNA, 19 nt, Artificial Sequence
  Description of Artificial Sequence: Synthetic oligonucleotide
aguuucuccacucagauau

SEQ ID NO: 1685272 - RNA, 19 nt, Artificial Sequence
  Description of Artificial Sequence: Synthetic oligonucleotide
gaugcauguagauccaugg

SEQ ID NO: 1685273 - RNA, 19 nt, Artificial Sequence
  Description of Artificial Sequence: Synthetic oligonucleotide
acaauaguacaguuucucc

SEQ ID NO: 1685274 - RNA, 19 nt, Artificial Sequence
  Description of Artificial Sequence: Synthetic oligonucleotide
aaaauccacguucaaucgg

SEQ ID NO: 1685275 - RNA, 19 nt, Artificial Sequence
  Description of Artificial Sequence: Synthetic oligonucleotide
agagaaguuugucagcagc

SEQ ID NO: 1685276 - RNA, 19 nt, Artificial Sequence
  Description of Artificial Sequence: Synthetic oligonucleotide
auacaaauuguccacuggg

SEQ ID NO: 1685277 - RNA, 19 nt, Artificial Sequence
  Description of Artificial Sequence: Synthetic oligonucleotide
ucauccacaaguauggcca

SEQ ID NO: 1685278 - RNA, 19 nt, Artificial Sequence
  Description of Artificial Sequence: Synthetic oligonucleotide
ugaaucaaggcaaaaucca

SEQ ID NO: 1685279 - RNA, 19 nt, Artificial Sequence
  Description of Artificial Sequence: Synthetic oligonucleotide
agauauauuuuccuuuauc

SEQ ID NO: 1685280 - RNA, 19 nt, Artificial Sequence
  Description of Artificial Sequence: Synthetic oligonucleotide
gagacaauaguacaguuuc

SEQ ID NO: 1685281 - RNA, 19 nt, Artificial Sequence
  Description of Artificial Sequence: Synthetic oligonucleotide
ucuccuaccagcaccaugc

SEQ ID NO: 1685282 - RNA, 19 nt, Artificial Sequence
  Description of Artificial Sequence: Synthetic oligonucleotide
acaagugucagccauguca

SEQ ID NO: 1685283 - RNA, 19 nt, Artificial Sequence
  Description of Artificial Sequence: Synthetic oligonucleotide
ucagcagcaugacagauug

SEQ ID NO: 1685284 - RNA, 19 nt, Artificial Sequence
  Description of Artificial Sequence: Synthetic oligonucleotide
uccuuuauccacuuuaaga

SEQ ID NO: 1685285 - RNA, 19 nt, Artificial Sequence
  Description of Artificial Sequence: Synthetic oligonucleotide
caagauagcauaaacucug

SEQ ID NO: 1685286 - RNA, 19 nt, Artificial Sequence
  Description of Artificial Sequence: Synthetic oligonucleotide
uuucacaucuccuaccagc

SEQ ID NO: 1685287 - RNA, 19 nt, Artificial Sequence
  Description of Artificial Sequence: Synthetic oligonucleotide
ugcauguagauccauggug

SEQ ID NO: 1685288 - RNA, 19 nt, Artificial Sequence
  Description of Artificial Sequence: Synthetic oligonucleotide
uccaccagcaucaggagag

SEQ ID NO: 1685289 - RNA, 19 nt, Artificial Sequence
  Description of Artificial Sequence: Synthetic oligonucleotide
uuguugaugcgagaaaugg

SEQ ID NO: 1685290 - RNA, 19 nt, Artificial Sequence
  Description of Artificial Sequence: Synthetic oligonucleotide
agaaaagauuccaugaguc

SEQ ID NO: 1685291 - RNA, 19 nt, Artificial Sequence
  Description of Artificial Sequence: Synthetic oligonucleotide
ucaagauagcauaaacucu

SEQ ID NO: 1685292 - RNA, 19 nt, Artificial Sequence
  Description of Artificial Sequence: Synthetic oligonucleotide
auggaggucacucucuugg

SEQ ID NO: 1685293 - RNA, 19 nt, Artificial Sequence
  Description of Artificial Sequence: Synthetic oligonucleotide
aaucaaggcaaaauccacg

SEQ ID NO: 1685294 - RNA, 19 nt, Artificial Sequence
  Description of Artificial Sequence: Synthetic oligonucleotide
uauccuggcgggcauaagg

SEQ ID NO: 1685295 - RNA, 19 nt, Artificial Sequence
  Description of Artificial Sequence: Synthetic oligonucleotide
caugcgauccacuucauug

SEQ ID NO: 1685296 - RNA, 19 nt, Artificial Sequence
  Description of Artificial Sequence: Synthetic oligonucleotide
uuuuccuuuauccacuuua

SEQ ID NO: 1685297 - RNA, 19 nt, Artificial Sequence
  Description of Artificial Sequence: Synthetic oligonucleotide
auuccaugagucaagauag

SEQ ID NO: 1685298 - RNA, 19 nt, Artificial Sequence
  Description of Artificial Sequence: Synthetic oligonucleotide
auauauuuuccuuuaucca

SEQ ID NO: 1685299 - RNA, 19 nt, Artificial Sequence
  Description of Artificial Sequence: Synthetic oligonucleotide
ucaggagagacaauaguac

SEQ ID NO: 1685300 - RNA, 19 nt, Artificial Sequence
  Description of Artificial Sequence: Synthetic oligonucleotide
ugugccacaagugucagcc

SEQ ID NO: 1685301 - RNA, 19 nt, Artificial Sequence
  Description of Artificial Sequence: Synthetic oligonucleotide
uguagauccauggugauaa

SEQ ID NO: 1685302 - RNA, 19 nt, Artificial Sequence
  Description of Artificial Sequence: Synthetic oligonucleotide
caugucauccacaaguaug

SEQ ID NO: 1685303 - RNA, 19 nt, Artificial Sequence
  Description of Artificial Sequence: Synthetic oligonucleotide
gguuuuauuuucaaaaugc

SEQ ID NO: 1685304 - RNA, 19 nt, Artificial Sequence
  Description of Artificial Sequence: Synthetic oligonucleotide
gacuacuacugcuucaaag

SEQ ID NO: 1685305 - RNA, 19 nt, Artificial Sequence
  Description of Artificial Sequence: Synthetic oligonucleotide
cauaaacucugguagcucc

SEQ ID NO: 1685306 - RNA, 19 nt, Artificial Sequence
  Description of Artificial Sequence: Synthetic oligonucleotide
uccgcauacaaauugucca

SEQ ID NO: 1685307 - RNA, 19 nt, Artificial Sequence
  Description of Artificial Sequence: Synthetic oligonucleotide
caaaauccacguucaaucg

SEQ ID NO: 1685308 - RNA, 19 nt, Artificial Sequence
  Description of Artificial Sequence: Synthetic oligonucleotide
agccaugucauccacaagu

SEQ ID NO: 1685309 - RNA, 19 nt, Artificial Sequence
  Description of Artificial Sequence: Synthetic oligonucleotide
aaaagauuccaugagucaa

SEQ ID NO: 1685310 - RNA, 19 nt, Artificial Sequence
  Description of Artificial Sequence: Synthetic oligonucleotide
aaauggcugggccagaaaa

SEQ ID NO: 1685311 - RNA, 19 nt, Artificial Sequence
  Description of Artificial Sequence: Synthetic oligonucleotide
agcccugaauuugagaugc

SEQ ID NO: 1685312 - RNA, 19 nt, Artificial Sequence
  Description of Artificial Sequence: Synthetic oligonucleotide
ugaugcgagaaauggcugg

SEQ ID NO: 1685313 - RNA, 19 nt, Artificial Sequence
  Description of Artificial Sequence: Synthetic oligonucleotide
aaauuguccacugggauau

SEQ ID NO: 1685314 - RNA, 19 nt, Artificial Sequence
  Description of Artificial Sequence: Synthetic oligonucleotide
gauuccaugagucaagaua

SEQ ID NO: 1685315 - RNA, 19 nt, Artificial Sequence
  Description of Artificial Sequence: Synthetic oligonucleotide
acuuuaagacagcuggcuc

SEQ ID NO: 1685316 - RNA, 19 nt, Artificial Sequence
  Description of Artificial Sequence: Synthetic oligonucleotide
uuuaagacagcuggcuccg

SEQ ID NO: 1685317 - RNA, 19 nt, Artificial Sequence
  Description of Artificial Sequence: Synthetic oligonucleotide
aacucugguagcuccagcu

SEQ ID NO: 1685318 - RNA, 19 nt, Artificial Sequence
  Description of Artificial Sequence: Synthetic oligonucleotide
uguugaugcgagaaauggc

SEQ ID NO: 1685319 - RNA, 19 nt, Artificial Sequence
  Description of Artificial Sequence: Synthetic oligonucleotide
uacaaauuguccacuggga

SEQ ID NO: 1685320 - RNA, 19 nt, Artificial Sequence
  Description of Artificial Sequence: Synthetic oligonucleotide
aaacucugguagcuccagc

SEQ ID NO: 1685321 - RNA, 19 nt, Artificial Sequence
  Description of Artificial Sequence: Synthetic oligonucleotide
acugcuucaaagcaugcgu

SEQ ID NO: 1685322 - RNA, 19 nt, Artificial Sequence
  Description of Artificial Sequence: Synthetic oligonucleotide
caaggcaaaauccacguuc

SEQ ID NO: 1685323 - RNA, 19 nt, Artificial Sequence
  Description of Artificial Sequence: Synthetic oligonucleotide
ccuuuauccacuuuaagac

SEQ ID NO: 1685324 - RNA, 19 nt, Artificial Sequence
  Description of Artificial Sequence: Synthetic oligonucleotide
uccuugugaaucaaggcaa

SEQ ID NO: 1685325 - RNA, 19 nt, Artificial Sequence
  Description of Artificial Sequence: Synthetic oligonucleotide
cagcaugacagauugugcc

SEQ ID NO: 1685326 - RNA, 19 nt, Artificial Sequence
  Description of Artificial Sequence: Synthetic oligonucleotide
aaguuugucagcagcauga

SEQ ID NO: 1685327 - RNA, 19 nt, Artificial Sequence
  Description of Artificial Sequence: Synthetic oligonucleotide
aaagauuccaugagucaag

SEQ ID NO: 1685328 - RNA, 19 nt, Artificial Sequence
  Description of Artificial Sequence: Synthetic oligonucleotide
cauacaaauuguccacugg

SEQ ID NO: 1685329 - RNA, 19 nt, Artificial Sequence
  Description of Artificial Sequence: Synthetic oligonucleotide
uccacguucaaucggucug

SEQ ID NO: 1685330 - RNA, 19 nt, Artificial Sequence
  Description of Artificial Sequence: Synthetic oligonucleotide
uucauuggccuucuugcgc

SEQ ID NO: 1685331 - RNA, 19 nt, Artificial Sequence
  Description of Artificial Sequence: Synthetic oligonucleotide
gaaaagauuccaugaguca

SEQ ID NO: 1685332 - RNA, 19 nt, Artificial Sequence
  Description of Artificial Sequence: Synthetic oligonucleotide
auuggugacuacuacugcu

SEQ ID NO: 1685333 - RNA, 19 nt, Artificial Sequence
  Description of Artificial Sequence: Synthetic oligonucleotide
uucacaucuccuaccagca

SEQ ID NO: 1685334 - RNA, 19 nt, Artificial Sequence
  Description of Artificial Sequence: Synthetic oligonucleotide
ucuccacucagauauauuu

SEQ ID NO: 1685335 - RNA, 19 nt, Artificial Sequence
  Description of Artificial Sequence: Synthetic oligonucleotide
augucauccacaaguaugg

SEQ ID NO: 1685336 - RNA, 19 nt, Artificial Sequence
  Description of Artificial Sequence: Synthetic oligonucleotide
ucagauauauuuuccuuua

SEQ ID NO: 1685337 - RNA, 19 nt, Artificial Sequence
  Description of Artificial Sequence: Synthetic oligonucleotide
aucaaggcaaaauccacgu

SEQ ID NO: 1685338 - RNA, 19 nt, Artificial Sequence
  Description of Artificial Sequence: Synthetic oligonucleotide
gagucaagauagcauaaac

SEQ ID NO: 1685339 - RNA, 19 nt, Artificial Sequence
  Description of Artificial Sequence: Synthetic oligonucleotide
augcgauccacuucauugg

SEQ ID NO: 1685340 - RNA, 19 nt, Artificial Sequence
  Description of Artificial Sequence: Synthetic oligonucleotide
aauuugagaugcauguaga

SEQ ID NO: 1685341 - RNA, 19 nt, Artificial Sequence
  Description of Artificial Sequence: Synthetic oligonucleotide
uucaaucggucugcgaugg

SEQ ID NO: 1685342 - RNA, 19 nt, Artificial Sequence
  Description of Artificial Sequence: Synthetic oligonucleotide
uccauggugauaauaugau

SEQ ID NO: 1685343 - RNA, 19 nt, Artificial Sequence
  Description of Artificial Sequence: Synthetic oligonucleotide
gcugagagaaguuugucag

SEQ ID NO: 1685344 - RNA, 19 nt, Artificial Sequence
  Description of Artificial Sequence: Synthetic oligonucleotide
uauuggugacuacuacugc

SEQ ID NO: 1685345 - RNA, 19 nt, Artificial Sequence
  Description of Artificial Sequence: Synthetic oligonucleotide
guauuggugacuacuacug

SEQ ID NO: 1685346 - RNA, 19 nt, Artificial Sequence
  Description of Artificial Sequence: Synthetic oligonucleotide
gaaguuugucagcagcaug

SEQ ID NO: 1685347 - RNA, 19 nt, Artificial Sequence
  Description of Artificial Sequence: Synthetic oligonucleotide
uuuccuuuauccacuuuaa

SEQ ID NO: 1685348 - RNA, 19 nt, Artificial Sequence
  Description of Artificial Sequence: Synthetic oligonucleotide
gcaaaauccacguucaauc

SEQ ID NO: 1685349 - RNA, 19 nt, Artificial Sequence
  Description of Artificial Sequence: Synthetic oligonucleotide
aaauccacguucaaucggu

SEQ ID NO: 1685350 - RNA, 19 nt, Artificial Sequence
  Description of Artificial Sequence: Synthetic oligonucleotide
aagauagcauaaacucugg

SEQ ID NO: 1685351 - RNA, 19 nt, Artificial Sequence
  Description of Artificial Sequence: Synthetic oligonucleotide
ugcgagaaauggcugggcc

SEQ ID NO: 1685352 - RNA, 19 nt, Artificial Sequence
  Description of Artificial Sequence: Synthetic oligonucleotide
uuccuuuauccacuuuaag

SEQ ID NO: 1685353 - RNA, 19 nt, Artificial Sequence
  Description of Artificial Sequence: Synthetic oligonucleotide
gauccauggugauaauaug

SEQ ID NO: 1685354 - RNA, 19 nt, Artificial Sequence
  Description of Artificial Sequence: Synthetic oligonucleotide
caauaguacaguuucucca

SEQ ID NO: 1685355 - RNA, 19 nt, Artificial Sequence
  Description of Artificial Sequence: Synthetic oligonucleotide
cacaaguauggccacgcgg

SEQ ID NO: 1685356 - RNA, 19 nt, Artificial Sequence
  Description of Artificial Sequence: Synthetic oligonucleotide
aaucggucugcgauggagg

SEQ ID NO: 1685357 - RNA, 19 nt, Artificial Sequence
  Description of Artificial Sequence: Synthetic oligonucleotide
agcagcaugacagauugug

SEQ ID NO: 1685358 - RNA, 19 nt, Artificial Sequence
  Description of Artificial Sequence: Synthetic oligonucleotide
uuugagaugcauguagauc

SEQ ID NO: 1685359 - RNA, 19 nt, Artificial Sequence
  Description of Artificial Sequence: Synthetic oligonucleotide
aggucacucucuuggcucc

SEQ ID NO: 1685360 - RNA, 19 nt, Artificial Sequence
  Description of Artificial Sequence: Synthetic oligonucleotide
cuucauuggccuucuugcg

SEQ ID NO: 1685361 - RNA, 19 nt, Artificial Sequence
  Description of Artificial Sequence: Synthetic oligonucleotide
gacaauaguacaguuucuc

SEQ ID NO: 1685362 - RNA, 19 nt, Artificial Sequence
  Description of Artificial Sequence: Synthetic oligonucleotide
agucaagauagcauaaacu

SEQ ID NO: 1685363 - RNA, 19 nt, Artificial Sequence
  Description of Artificial Sequence: Synthetic oligonucleotide
ucugguagcuccagcugag

SEQ ID NO: 1685364 - RNA, 19 nt, Artificial Sequence
  Description of Artificial Sequence: Synthetic oligonucleotide
cuccgcauacaaauugucc

SEQ ID NO: 1685365 - RNA, 19 nt, Artificial Sequence
  Description of Artificial Sequence: Synthetic oligonucleotide
aauggcugggccagaaaag

SEQ ID NO: 1685366 - RNA, 19 nt, Artificial Sequence
  Description of Artificial Sequence: Synthetic oligonucleotide
gaugcgagaaauggcuggg

SEQ ID NO: 1685367 - RNA, 19 nt, Artificial Sequence
  Description of Artificial Sequence: Synthetic oligonucleotide
uugaugcgagaaauggcug

SEQ ID NO: 1685368 - RNA, 19 nt, Artificial Sequence
  Description of Artificial Sequence: Synthetic oligonucleotide
ugguagcuccagcugagag

SEQ ID NO: 1685369 - RNA, 19 nt, Artificial Sequence
  Description of Artificial Sequence: Synthetic oligonucleotide
gucauccacaaguauggcc

SEQ ID NO: 1685370 - RNA, 19 nt, Artificial Sequence
  Description of Artificial Sequence: Synthetic oligonucleotide
uacugcuucaaagcaugcg

SEQ ID NO: 1685371 - RNA, 19 nt, Artificial Sequence
  Description of Artificial Sequence: Synthetic oligonucleotide
ucauuggccuucuugcgcu

SEQ ID NO: 1685372 - RNA, 19 nt, Artificial Sequence
  Description of Artificial Sequence: Synthetic oligonucleotide
gaaucaaggcaaaauccac

SEQ ID NO: 1685373 - RNA, 19 nt, Artificial Sequence
  Description of Artificial Sequence: Synthetic oligonucleotide
aagcccugaauuugagaug

SEQ ID NO: 1685374 - RNA, 19 nt, Artificial Sequence
  Description of Artificial Sequence: Synthetic oligonucleotide
uuauccacuuuaagacagc

SEQ ID NO: 1685375 - RNA, 19 nt, Artificial Sequence
  Description of Artificial Sequence: Synthetic oligonucleotide
gggcauaagggaaacaagg

SEQ ID NO: 1685376 - RNA, 19 nt, Artificial Sequence
  Description of Artificial Sequence: Synthetic oligonucleotide
uggcuccgcauacaaauug

SEQ ID NO: 1685377 - RNA, 19 nt, Artificial Sequence
  Description of Artificial Sequence: Synthetic oligonucleotide
acuacugcuucaaagcaug

SEQ ID NO: 1685378 - RNA, 19 nt, Artificial Sequence
  Description of Artificial Sequence: Synthetic oligonucleotide
ucucuuggcuccaccagca

SEQ ID NO: 1685379 - RNA, 19 nt, Artificial Sequence
  Description of Artificial Sequence: Synthetic oligonucleotide
auuugagaugcauguagau

SEQ ID NO: 1685380 - RNA, 19 nt, Artificial Sequence
  Description of Artificial Sequence: Synthetic oligonucleotide
gacagauugugccacaagu

SEQ ID NO: 1685381 - RNA, 19 nt, Artificial Sequence
  Description of Artificial Sequence: Synthetic oligonucleotide
caugagucaagauagcaua

SEQ ID NO: 1685382 - RNA, 19 nt, Artificial Sequence
  Description of Artificial Sequence: Synthetic oligonucleotide
uccaugagucaagauagca

SEQ ID NO: 1685383 - RNA, 19 nt, Artificial Sequence
  Description of Artificial Sequence: Synthetic oligonucleotide
cugaauuugagaugcaugu

SEQ ID NO: 1685384 - RNA, 19 nt, Artificial Sequence
  Description of Artificial Sequence: Synthetic oligonucleotide
agauugugccacaaguguc

SEQ ID NO: 1685385 - RNA, 19 nt, Artificial Sequence
  Description of Artificial Sequence: Synthetic oligonucleotide
cuuuauccacuuuaagaca

SEQ ID NO: 1685386 - RNA, 19 nt, Artificial Sequence
  Description of Artificial Sequence: Synthetic oligonucleotide
aggagagacaauaguacag

SEQ ID NO: 1685387 - RNA, 19 nt, Artificial Sequence
  Description of Artificial Sequence: Synthetic oligonucleotide
agauccauggugauaauau

SEQ ID NO: 1685388 - RNA, 19 nt, Artificial Sequence
  Description of Artificial Sequence: Synthetic oligonucleotide
ugacagauugugccacaag

SEQ ID NO: 1685389 - RNA, 19 nt, Artificial Sequence
  Description of Artificial Sequence: Synthetic oligonucleotide
acaaguauggccacgcggu

SEQ ID NO: 1685390 - RNA, 19 nt, Artificial Sequence
  Description of Artificial Sequence: Synthetic oligonucleotide
cuccuugugaaucaaggca

SEQ ID NO: 1685391 - RNA, 19 nt, Artificial Sequence
  Description of Artificial Sequence: Synthetic oligonucleotide
cuuggcuccaccagcauca

SEQ ID NO: 1685392 - RNA, 19 nt, Artificial Sequence
  Description of Artificial Sequence: Synthetic oligonucleotide
uaagacagcuggcuccgca

SEQ ID NO: 1685393 - RNA, 19 nt, Artificial Sequence
  Description of Artificial Sequence: Synthetic oligonucleotide
auauuuuccuuuauccacu

SEQ ID NO: 1685394 - RNA, 19 nt, Artificial Sequence
  Description of Artificial Sequence: Synthetic oligonucleotide
ugagaugcauguagaucca

SEQ ID NO: 1685395 - RNA, 19 nt, Artificial Sequence
  Description of Artificial Sequence: Synthetic oligonucleotide
ugcgauccacuucauuggc

SEQ ID NO: 1685396 - RNA, 19 nt, Artificial Sequence
  Description of Artificial Sequence: Synthetic oligonucleotide
gauugugccacaaguguca

SEQ ID NO: 1685397 - RNA, 19 nt, Artificial Sequence
  Description of Artificial Sequence: Synthetic oligonucleotide
agcaugacagauugugcca

SEQ ID NO: 1685398 - RNA, 19 nt, Artificial Sequence
  Description of Artificial Sequence: Synthetic oligonucleotide
uugugaaucaaggcaaaau

SEQ ID NO: 1685399 - RNA, 19 nt, Artificial Sequence
  Description of Artificial Sequence: Synthetic oligonucleotide
uacuacugcuucaaagcau

SEQ ID NO: 1685400 - RNA, 19 nt, Artificial Sequence
  Description of Artificial Sequence: Synthetic oligonucleotide
aagauuccaugagucaaga

SEQ ID NO: 1685401 - RNA, 19 nt, Artificial Sequence
  Description of Artificial Sequence: Synthetic oligonucleotide
ucugcgauggaggucacuc

SEQ ID NO: 1685402 - RNA, 19 nt, Artificial Sequence
  Description of Artificial Sequence: Synthetic oligonucleotide
acucagauauauuuuccuu

SEQ ID NO: 1685403 - RNA, 19 nt, Artificial Sequence
  Description of Artificial Sequence: Synthetic oligonucleotide
ugggguugguuuuauuuuc

SEQ ID NO: 1685404 - RNA, 19 nt, Artificial Sequence
  Description of Artificial Sequence: Synthetic oligonucleotide
uccacaaguauggccacgc

SEQ ID NO: 1685405 - RNA, 19 nt, Artificial Sequence
  Description of Artificial Sequence: Synthetic oligonucleotide
cacuucauuggccuucuug

SEQ ID NO: 1685406 - RNA, 19 nt, Artificial Sequence
  Description of Artificial Sequence: Synthetic oligonucleotide
ggcauaagggaaacaaggg

SEQ ID NO: 1685407 - RNA, 19 nt, Artificial Sequence
  Description of Artificial Sequence: Synthetic oligonucleotide
cugagagaaguuugucagc

SEQ ID NO: 1685408 - RNA, 19 nt, Artificial Sequence
  Description of Artificial Sequence: Synthetic oligonucleotide
gugauaauaugauccgcuc

SEQ ID NO: 1685409 - RNA, 19 nt, Artificial Sequence
  Description of Artificial Sequence: Synthetic oligonucleotide
gaggucacucucuuggcuc

SEQ ID NO: 1685410 - RNA, 19 nt, Artificial Sequence
  Description of Artificial Sequence: Synthetic oligonucleotide
ugcgauggaggucacucuc

SEQ ID NO: 1685411 - RNA, 19 nt, Artificial Sequence
  Description of Artificial Sequence: Synthetic oligonucleotide
gagagaaguuugucagcag

SEQ ID NO: 1685412 - RNA, 19 nt, Artificial Sequence
  Description of Artificial Sequence: Synthetic oligonucleotide
uaaacucugguagcuccag

SEQ ID NO: 1685413 - RNA, 19 nt, Artificial Sequence
  Description of Artificial Sequence: Synthetic oligonucleotide
acagauugugccacaagug

SEQ ID NO: 1685414 - RNA, 19 nt, Artificial Sequence
  Description of Artificial Sequence: Synthetic oligonucleotide
agcauaaacucugguagcu

SEQ ID NO: 1685415 - RNA, 19 nt, Artificial Sequence
  Description of Artificial Sequence: Synthetic oligonucleotide
ugggccagaaaagauucca

SEQ ID NO: 1685416 - RNA, 19 nt, Artificial Sequence
  Description of Artificial Sequence: Synthetic oligonucleotide
guucaaucggucugcgaug

SEQ ID NO: 1685417 - RNA, 19 nt, Artificial Sequence
  Description of Artificial Sequence: Synthetic oligonucleotide
uauccacuuuaagacagcu

SEQ ID NO: 1685418 - RNA, 19 nt, Artificial Sequence
  Description of Artificial Sequence: Synthetic oligonucleotide
aguuugucagcagcaugac

SEQ ID NO: 1685419 - RNA, 19 nt, Artificial Sequence
  Description of Artificial Sequence: Synthetic oligonucleotide
uuggugacuacuacugcuu

SEQ ID NO: 1685420 - RNA, 19 nt, Artificial Sequence
  Description of Artificial Sequence: Synthetic oligonucleotide
auaguacaguuucuccacu

SEQ ID NO: 1685421 - RNA, 19 nt, Artificial Sequence
  Description of Artificial Sequence: Synthetic oligonucleotide
aagugucagccaugucauc

SEQ ID NO: 1685422 - RNA, 19 nt, Artificial Sequence
  Description of Artificial Sequence: Synthetic oligonucleotide
agcaucaggagagacaaua

SEQ ID NO: 1685423 - RNA, 19 nt, Artificial Sequence
  Description of Artificial Sequence: Synthetic oligonucleotide
ugccacaagugucagccau

SEQ ID NO: 1685424 - RNA, 19 nt, Artificial Sequence
  Description of Artificial Sequence: Synthetic oligonucleotide
uuccaugagucaagauagc

SEQ ID NO: 1685425 - RNA, 19 nt, Artificial Sequence
  Description of Artificial Sequence: Synthetic oligonucleotide
aucaggagagacaauagua

SEQ ID NO: 1685426 - RNA, 19 nt, Artificial Sequence
  Description of Artificial Sequence: Synthetic oligonucleotide
ucuuggcuccaccagcauc

SEQ ID NO: 1685427 - RNA, 19 nt, Artificial Sequence
  Description of Artificial Sequence: Synthetic oligonucleotide
guugaugcgagaaauggcu

SEQ ID NO: 1685428 - RNA, 19 nt, Artificial Sequence
  Description of Artificial Sequence: Synthetic oligonucleotide
uaguacaguuucuccacuc

SEQ ID NO: 1685429 - RNA, 19 nt, Artificial Sequence
  Description of Artificial Sequence: Synthetic oligonucleotide
cuacuacugcuucaaagca

SEQ ID NO: 1685430 - RNA, 19 nt, Artificial Sequence
  Description of Artificial Sequence: Synthetic oligonucleotide
ccagaaaagauuccaugag

SEQ ID NO: 1685431 - RNA, 19 nt, Artificial Sequence
  Description of Artificial Sequence: Synthetic oligonucleotide
ugagucaagauagcauaaa

SEQ ID NO: 1685432 - RNA, 19 nt, Artificial Sequence
  Description of Artificial Sequence: Synthetic oligonucleotide
guuguugaugcgagaaaug

SEQ ID NO: 1685433 - RNA, 19 nt, Artificial Sequence
  Description of Artificial Sequence: Synthetic oligonucleotide
caggagagacaauaguaca

SEQ ID NO: 1685434 - RNA, 19 nt, Artificial Sequence
  Description of Artificial Sequence: Synthetic oligonucleotide
augcauguagauccauggu

SEQ ID NO: 1685435 - RNA, 19 nt, Artificial Sequence
  Description of Artificial Sequence: Synthetic oligonucleotide
gccagaaaagauuccauga

SEQ ID NO: 1685436 - RNA, 19 nt, Artificial Sequence
  Description of Artificial Sequence: Synthetic oligonucleotide
gauggaggucacucucuug

SEQ ID NO: 1685437 - RNA, 19 nt, Artificial Sequence
  Description of Artificial Sequence: Synthetic oligonucleotide
aaguauggccacgcggucu

SEQ ID NO: 1685438 - RNA, 19 nt, Artificial Sequence
  Description of Artificial Sequence: Synthetic oligonucleotide
acucugguagcuccagcug

SEQ ID NO: 1685439 - RNA, 19 nt, Artificial Sequence
  Description of Artificial Sequence: Synthetic oligonucleotide
aauccacguucaaucgguc

SEQ ID NO: 1685440 - RNA, 19 nt, Artificial Sequence
  Description of Artificial Sequence: Synthetic oligonucleotide
caaucggucugcgauggag

SEQ ID NO: 1685441 - RNA, 19 nt, Artificial Sequence
  Description of Artificial Sequence: Synthetic oligonucleotide
auccacuucauuggccuuc

SEQ ID NO: 1685442 - RNA, 19 nt, Artificial Sequence
  Description of Artificial Sequence: Synthetic oligonucleotide
guagcuccagcugagagaa

SEQ ID NO: 1685443 - RNA, 19 nt, Artificial Sequence
  Description of Artificial Sequence: Synthetic oligonucleotide
auccuggcgggcauaaggg

SEQ ID NO: 1685444 - RNA, 19 nt, Artificial Sequence
  Description of Artificial Sequence: Synthetic oligonucleotide
caccaugcgauccacuuca

SEQ ID NO: 1685445 - RNA, 19 nt, Artificial Sequence
  Description of Artificial Sequence: Synthetic oligonucleotide
ugaauuugagaugcaugua

SEQ ID NO: 1685446 - RNA, 19 nt, Artificial Sequence
  Description of Artificial Sequence: Synthetic oligonucleotide
gcauaagggaaacaaggga

SEQ ID NO: 1685447 - RNA, 19 nt, Artificial Sequence
  Description of Artificial Sequence: Synthetic oligonucleotide
uauuuuccuuuauccacuu

SEQ ID NO: 1685448 - RNA, 19 nt, Artificial Sequence
  Description of Artificial Sequence: Synthetic oligonucleotide
auuggccuucuugcgcucc

SEQ ID NO: 1685449 - RNA, 19 nt, Artificial Sequence
  Description of Artificial Sequence: Synthetic oligonucleotide
auaauaugauccgcuccug

SEQ ID NO: 1685450 - RNA, 19 nt, Artificial Sequence
  Description of Artificial Sequence: Synthetic oligonucleotide
aucuccuaccagcaccaug

SEQ ID NO: 1685451 - RNA, 19 nt, Artificial Sequence
  Description of Artificial Sequence: Synthetic oligonucleotide
ggccagaaaagauuccaug

SEQ ID NO: 1685452 - RNA, 19 nt, Artificial Sequence
  Description of Artificial Sequence: Synthetic oligonucleotide
uggugacuacuacugcuuc

SEQ ID NO: 1685453 - RNA, 19 nt, Artificial Sequence
  Description of Artificial Sequence: Synthetic oligonucleotide
uuucuccacucagauauau

SEQ ID NO: 1685454 - RNA, 19 nt, Artificial Sequence
  Description of Artificial Sequence: Synthetic oligonucleotide
agcaccaugcgauccacuu

SEQ ID NO: 1685455 - RNA, 19 nt, Artificial Sequence
  Description of Artificial Sequence: Synthetic oligonucleotide
cuacugcuucaaagcaugc

SEQ ID NO: 1685456 - RNA, 19 nt, Artificial Sequence
  Description of Artificial Sequence: Synthetic oligonucleotide
auccacguucaaucggucu

SEQ ID NO: 1685457 - RNA, 19 nt, Artificial Sequence
  Description of Artificial Sequence: Synthetic oligonucleotide
cuugcgcuccuugugaauc

SEQ ID NO: 1685458 - RNA, 19 nt, Artificial Sequence
  Description of Artificial Sequence: Synthetic oligonucleotide
uggaggucacucucuuggc

SEQ ID NO: 1685459 - RNA, 19 nt, Artificial Sequence
  Description of Artificial Sequence: Synthetic oligonucleotide
gcauacaaauuguccacug

SEQ ID NO: 1685460 - RNA, 19 nt, Artificial Sequence
  Description of Artificial Sequence: Synthetic oligonucleotide
uccuaccagcaccaugcga

SEQ ID NO: 1685461 - RNA, 19 nt, Artificial Sequence
  Description of Artificial Sequence: Synthetic oligonucleotide
agaugcauguagauccaug

SEQ ID NO: 1685462 - RNA, 19 nt, Artificial Sequence
  Description of Artificial Sequence: Synthetic oligonucleotide
gacagcuggcuccgcauac

SEQ ID NO: 1685463 - RNA, 19 nt, Artificial Sequence
  Description of Artificial Sequence: Synthetic oligonucleotide
agagacaauaguacaguuu

SEQ ID NO: 1685464 - RNA, 19 nt, Artificial Sequence
  Description of Artificial Sequence: Synthetic oligonucleotide
aucggucugcgauggaggu

SEQ ID NO: 1685465 - RNA, 19 nt, Artificial Sequence
  Description of Artificial Sequence: Synthetic oligonucleotide
ucacucucuuggcuccacc

SEQ ID NO: 1685466 - RNA, 19 nt, Artificial Sequence
  Description of Artificial Sequence: Synthetic oligonucleotide
augcgagaaauggcugggc

SEQ ID NO: 1685467 - RNA, 19 nt, Artificial Sequence
  Description of Artificial Sequence: Synthetic oligonucleotide
ucacaucuccuaccagcac

SEQ ID NO: 1685468 - RNA, 19 nt, Artificial Sequence
  Description of Artificial Sequence: Synthetic oligonucleotide
ucaaggcaaaauccacguu

SEQ ID NO: 1685469 - RNA, 19 nt, Artificial Sequence
  Description of Artificial Sequence: Synthetic oligonucleotide
auggcugggccagaaaaga

SEQ ID NO: 1685470 - RNA, 19 nt, Artificial Sequence
  Description of Artificial Sequence: Synthetic oligonucleotide
cuucuugcgcuccuuguga

SEQ ID NO: 1685471 - RNA, 19 nt, Artificial Sequence
  Description of Artificial Sequence: Synthetic oligonucleotide
aguauggccacgcggucuu

SEQ ID NO: 1685472 - RNA, 19 nt, Artificial Sequence
  Description of Artificial Sequence: Synthetic oligonucleotide
gcuccuugugaaucaaggc

SEQ ID NO: 1685473 - RNA, 19 nt, Artificial Sequence
  Description of Artificial Sequence: Synthetic oligonucleotide
ugucauccacaaguauggc

SEQ ID NO: 1685474 - RNA, 19 nt, Artificial Sequence
  Description of Artificial Sequence: Synthetic oligonucleotide
cagaaaagauuccaugagu

SEQ ID NO: 1685475 - RNA, 19 nt, Artificial Sequence
  Description of Artificial Sequence: Synthetic oligonucleotide
uucuugcgcuccuugugaa

SEQ ID NO: 1685476 - RNA, 19 nt, Artificial Sequence
  Description of Artificial Sequence: Synthetic oligonucleotide
uugcgcuccuugugaauca

SEQ ID NO: 1685477 - RNA, 19 nt, Artificial Sequence
  Description of Artificial Sequence: Synthetic oligonucleotide
auaaacucugguagcucca

SEQ ID NO: 1685478 - RNA, 19 nt, Artificial Sequence
  Description of Artificial Sequence: Synthetic oligonucleotide
guuugucagcagcaugaca

SEQ ID NO: 1685479 - RNA, 19 nt, Artificial Sequence
  Description of Artificial Sequence: Synthetic oligonucleotide
cagauugugccacaagugu

SEQ ID NO: 1685480 - RNA, 19 nt, Artificial Sequence
  Description of Artificial Sequence: Synthetic oligonucleotide
uucuccacucagauauauu

SEQ ID NO: 1685481 - RNA, 19 nt, Artificial Sequence
  Description of Artificial Sequence: Synthetic oligonucleotide
aauuguccacugggauauc

SEQ ID NO: 1685482 - RNA, 19 nt, Artificial Sequence
  Description of Artificial Sequence: Synthetic oligonucleotide
gcauguagauccaugguga

SEQ ID NO: 1685483 - RNA, 19 nt, Artificial Sequence
  Description of Artificial Sequence: Synthetic oligonucleotide
cucagauauauuuuccuuu

SEQ ID NO: 1685484 - RNA, 19 nt, Artificial Sequence
  Description of Artificial Sequence: Synthetic oligonucleotide
ugacuacuacugcuucaaa

SEQ ID NO: 1685485 - RNA, 19 nt, Artificial Sequence
  Description of Artificial Sequence: Synthetic oligonucleotide
uccuggcgggcauaaggga

SEQ ID NO: 1685486 - RNA, 19 nt, Artificial Sequence
  Description of Artificial Sequence: Synthetic oligonucleotide
acaucuccuaccagcacca

SEQ ID NO: 1685487 - RNA, 19 nt, Artificial Sequence
  Description of Artificial Sequence: Synthetic oligonucleotide
uaccagcaccaugcgaucc

SEQ ID NO: 1685488 - RNA, 19 nt, Artificial Sequence
  Description of Artificial Sequence: Synthetic oligonucleotide
cucugguagcuccagcuga

SEQ ID NO: 1685489 - RNA, 19 nt, Artificial Sequence
  Description of Artificial Sequence: Synthetic oligonucleotide
cauccacaaguauggccac

SEQ ID NO: 1685490 - RNA, 19 nt, Artificial Sequence
  Description of Artificial Sequence: Synthetic oligonucleotide
gguagcuccagcugagaga

SEQ ID NO: 1685491 - RNA, 19 nt, Artificial Sequence
  Description of Artificial Sequence: Synthetic oligonucleotide
agauuccaugagucaagau

SEQ ID NO: 1685492 - RNA, 19 nt, Artificial Sequence
  Description of Artificial Sequence: Synthetic oligonucleotide
ugucagcagcaugacagau

SEQ ID NO: 1685493 - RNA, 19 nt, Artificial Sequence
  Description of Artificial Sequence: Synthetic oligonucleotide
uggcuccaccagcaucagg

SEQ ID NO: 1685494 - RNA, 19 nt, Artificial Sequence
  Description of Artificial Sequence: Synthetic oligonucleotide
auccacaaguauggccacg

SEQ ID NO: 1685495 - RNA, 19 nt, Artificial Sequence
  Description of Artificial Sequence: Synthetic oligonucleotide
uugugccacaagugucagc

SEQ ID NO: 1685496 - RNA, 19 nt, Artificial Sequence
  Description of Artificial Sequence: Synthetic oligonucleotide
uggcugggccagaaaagau

SEQ ID NO: 1685497 - RNA, 19 nt, Artificial Sequence
  Description of Artificial Sequence: Synthetic oligonucleotide
agacaauaguacaguuucu

SEQ ID NO: 1685498 - RNA, 19 nt, Artificial Sequence
  Description of Artificial Sequence: Synthetic oligonucleotide
cacucagauauauuuuccu

SEQ ID NO: 1685499 - RNA, 19 nt, Artificial Sequence
  Description of Artificial Sequence: Synthetic oligonucleotide
augagucaagauagcauaa

SEQ ID NO: 1685500 - RNA, 19 nt, Artificial Sequence
  Description of Artificial Sequence: Synthetic oligonucleotide
cgcuccuugugaaucaagg

SEQ ID NO: 1685501 - RNA, 19 nt, Artificial Sequence
  Description of Artificial Sequence: Synthetic oligonucleotide
gugacuacuacugcuucaa

SEQ ID NO: 1685502 - RNA, 19 nt, Artificial Sequence
  Description of Artificial Sequence: Synthetic oligonucleotide
cacgcggucuuucacaucu

SEQ ID NO: 1685503 - RNA, 19 nt, Artificial Sequence
  Description of Artificial Sequence: Synthetic oligonucleotide
auccacuuuaagacagcug

SEQ ID NO: 1685504 - RNA, 19 nt, Artificial Sequence
  Description of Artificial Sequence: Synthetic oligonucleotide
caagugucagccaugucau

SEQ ID NO: 1685505 - RNA, 19 nt, Artificial Sequence
  Description of Artificial Sequence: Synthetic oligonucleotide
cuaccagcaccaugcgauc

SEQ ID NO: 1685506 - RNA, 19 nt, Artificial Sequence
  Description of Artificial Sequence: Synthetic oligonucleotide
gcaucaggagagacaauag

SEQ ID NO: 1685507 - RNA, 19 nt, Artificial Sequence
  Description of Artificial Sequence: Synthetic oligonucleotide
ucaaucggucugcgaugga

SEQ ID NO: 1685508 - RNA, 19 nt, Artificial Sequence
  Description of Artificial Sequence: Synthetic oligonucleotide
cacucucuuggcuccacca

SEQ ID NO: 1685509 - RNA, 19 nt, Artificial Sequence
  Description of Artificial Sequence: Synthetic oligonucleotide
auuuuccuuuauccacuuu

SEQ ID NO: 1685510 - RNA, 19 nt, Artificial Sequence
  Description of Artificial Sequence: Synthetic oligonucleotide
gaaauggcugggccagaaa

SEQ ID NO: 1685511 - RNA, 19 nt, Artificial Sequence
  Description of Artificial Sequence: Synthetic oligonucleotide
agaaauggcugggccagaa

SEQ ID NO: 1685512 - RNA, 19 nt, Artificial Sequence
  Description of Artificial Sequence: Synthetic oligonucleotide
caaguauggccacgcgguc

SEQ ID NO: 1685513 - RNA, 19 nt, Artificial Sequence
  Description of Artificial Sequence: Synthetic oligonucleotide
cuccuaccagcaccaugcg

SEQ ID NO: 1685514 - RNA, 19 nt, Artificial Sequence
  Description of Artificial Sequence: Synthetic oligonucleotide
auggccacgcggucuuuca

SEQ ID NO: 1685515 - RNA, 19 nt, Artificial Sequence
  Description of Artificial Sequence: Synthetic oligonucleotide
ggugacuacuacugcuuca

SEQ ID NO: 1685516 - RNA, 19 nt, Artificial Sequence
  Description of Artificial Sequence: Synthetic oligonucleotide
ccacuuuaagacagcuggc

SEQ ID NO: 1685517 - RNA, 19 nt, Artificial Sequence
  Description of Artificial Sequence: Synthetic oligonucleotide
gagagacaauaguacaguu

SEQ ID NO: 1685518 - RNA, 19 nt, Artificial Sequence
  Description of Artificial Sequence: Synthetic oligonucleotide
caucaggagagacaauagu

SEQ ID NO: 1685519 - RNA, 19 nt, Artificial Sequence
  Description of Artificial Sequence: Synthetic oligonucleotide
guccacugggauaucaaaa

SEQ ID NO: 1685520 - RNA, 19 nt, Artificial Sequence
  Description of Artificial Sequence: Synthetic oligonucleotide
ccgcauacaaauuguccac

SEQ ID NO: 1685521 - RNA, 19 nt, Artificial Sequence
  Description of Artificial Sequence: Synthetic oligonucleotide
uuauccuggcgggcauaag

SEQ ID NO: 1685522 - RNA, 19 nt, Artificial Sequence
  Description of Artificial Sequence: Synthetic oligonucleotide
cacguucaaucggucugcg

SEQ ID NO: 1685523 - RNA, 19 nt, Artificial Sequence
  Description of Artificial Sequence: Synthetic oligonucleotide
caugacagauugugccaca

SEQ ID NO: 1685524 - RNA, 19 nt, Artificial Sequence
  Description of Artificial Sequence: Synthetic oligonucleotide
ccauggugauaauaugauc

SEQ ID NO: 1685525 - RNA, 19 nt, Artificial Sequence
  Description of Artificial Sequence: Synthetic oligonucleotide
augacagauugugccacaa

SEQ ID NO: 1685526 - RNA, 19 nt, Artificial Sequence
  Description of Artificial Sequence: Synthetic oligonucleotide
uuaagacagcuggcuccgc

SEQ ID NO: 1685527 - RNA, 19 nt, Artificial Sequence
  Description of Artificial Sequence: Synthetic oligonucleotide
acguucaaucggucugcga

SEQ ID NO: 1685528 - RNA, 19 nt, Artificial Sequence
  Description of Artificial Sequence: Synthetic oligonucleotide
cacuuuaagacagcuggcu

SEQ ID NO: 1685529 - RNA, 19 nt, Artificial Sequence
  Description of Artificial Sequence: Synthetic oligonucleotide
uggccacgcggucuuucac

SEQ ID NO: 1685530 - RNA, 19 nt, Artificial Sequence
  Description of Artificial Sequence: Synthetic oligonucleotide
agacagcuggcuccgcaua

SEQ ID NO: 1685531 - RNA, 19 nt, Artificial Sequence
  Description of Artificial Sequence: Synthetic oligonucleotide
gcuggcuccgcauacaaau

SEQ ID NO: 1685532 - RNA, 19 nt, Artificial Sequence
  Description of Artificial Sequence: Synthetic oligonucleotide
gcgagaaauggcugggcca

SEQ ID NO: 1685533 - RNA, 19 nt, Artificial Sequence
  Description of Artificial Sequence: Synthetic oligonucleotide
auguagauccauggugaua

SEQ ID NO: 1685534 - RNA, 19 nt, Artificial Sequence
  Description of Artificial Sequence: Synthetic oligonucleotide
gugggguugguuuuauuuu

SEQ ID NO: 1685535 - RNA, 19 nt, Artificial Sequence
  Description of Artificial Sequence: Synthetic oligonucleotide
gcaugacagauugugccac

SEQ ID NO: 1685536 - RNA, 19 nt, Artificial Sequence
  Description of Artificial Sequence: Synthetic oligonucleotide
ggagagacaauaguacagu

SEQ ID NO: 1685537 - RNA, 19 nt, Artificial Sequence
  Description of Artificial Sequence: Synthetic oligonucleotide
cgagaaauggcugggccag

SEQ ID NO: 1685538 - RNA, 19 nt, Artificial Sequence
  Description of Artificial Sequence: Synthetic oligonucleotide
cagcugagagaaguuuguc

SEQ ID NO: 1685539 - RNA, 19 nt, Artificial Sequence
  Description of Artificial Sequence: Synthetic oligonucleotide
cuggcgggcauaagggaaa

SEQ ID NO: 1685540 - RNA, 19 nt, Artificial Sequence
  Description of Artificial Sequence: Synthetic oligonucleotide
ccuaccagcaccaugcgau

SEQ ID NO: 1685541 - RNA, 19 nt, Artificial Sequence
  Description of Artificial Sequence: Synthetic oligonucleotide
acagcuggcuccgcauaca

SEQ ID NO: 1685542 - RNA, 19 nt, Artificial Sequence
  Description of Artificial Sequence: Synthetic oligonucleotide
ccagcaucaggagagacaa

SEQ ID NO: 1685543 - RNA, 19 nt, Artificial Sequence
  Description of Artificial Sequence: Synthetic oligonucleotide
ucuuauccuggcgggcaua

SEQ ID NO: 1685544 - RNA, 19 nt, Artificial Sequence
  Description of Artificial Sequence: Synthetic oligonucleotide
uagcuccagcugagagaag

SEQ ID NO: 1685545 - RNA, 19 nt, Artificial Sequence
  Description of Artificial Sequence: Synthetic oligonucleotide
cuuauccuggcgggcauaa

SEQ ID NO: 1685546 - RNA, 19 nt, Artificial Sequence
  Description of Artificial Sequence: Synthetic oligonucleotide
caccagcaucaggagagac

SEQ ID NO: 1685547 - RNA, 19 nt, Artificial Sequence
  Description of Artificial Sequence: Synthetic oligonucleotide
gcgggcauaagggaaacaa

SEQ ID NO: 1685548 - RNA, 19 nt, Artificial Sequence
  Description of Artificial Sequence: Synthetic oligonucleotide
cauuggccuucuugcgcuc

SEQ ID NO: 1685549 - RNA, 19 nt, Artificial Sequence
  Description of Artificial Sequence: Synthetic oligonucleotide
cgggcauaagggaaacaag

SEQ ID NO: 1685550 - RNA, 19 nt, Artificial Sequence
  Description of Artificial Sequence: Synthetic oligonucleotide
ugcgcuccuugugaaucaa

SEQ ID NO: 1685551 - RNA, 19 nt, Artificial Sequence
  Description of Artificial Sequence: Synthetic oligonucleotide
uggcgggcauaagggaaac

SEQ ID NO: 1685552 - RNA, 19 nt, Artificial Sequence
  Description of Artificial Sequence: Synthetic oligonucleotide
cacaagugucagccauguc

SEQ ID NO: 1685553 - RNA, 19 nt, Artificial Sequence
  Description of Artificial Sequence: Synthetic oligonucleotide
cuccacucagauauauuuu

SEQ ID NO: 1685554 - RNA, 19 nt, Artificial Sequence
  Description of Artificial Sequence: Synthetic oligonucleotide
gcauaaacucugguagcuc

SEQ ID NO: 1685555 - RNA, 19 nt, Artificial Sequence
  Description of Artificial Sequence: Synthetic oligonucleotide
ccacaaguauggccacgcg

SEQ ID NO: 1685556 - RNA, 19 nt, Artificial Sequence
  Description of Artificial Sequence: Synthetic oligonucleotide
ccacguucaaucggucugc

SEQ ID NO: 1685557 - RNA, 19 nt, Artificial Sequence
  Description of Artificial Sequence: Synthetic oligonucleotide
cauguagauccauggugau

SEQ ID NO: 1685558 - RNA, 19 nt, Artificial Sequence
  Description of Artificial Sequence: Synthetic oligonucleotide
ucggucugcgauggagguc

SEQ ID NO: 1685559 - RNA, 19 nt, Artificial Sequence
  Description of Artificial Sequence: Synthetic oligonucleotide
ggguugguuuuauuuucaa

SEQ ID NO: 1685560 - RNA, 19 nt, Artificial Sequence
  Description of Artificial Sequence: Synthetic oligonucleotide
ggccacgcggucuuucaca

SEQ ID NO: 1685561 - RNA, 19 nt, Artificial Sequence
  Description of Artificial Sequence: Synthetic oligonucleotide
cagauauauuuuccuuuau

SEQ ID NO: 1685562 - RNA, 19 nt, Artificial Sequence
  Description of Artificial Sequence: Synthetic oligonucleotide
gcaccaugcgauccacuuc

SEQ ID NO: 1685563 - RNA, 19 nt, Artificial Sequence
  Description of Artificial Sequence: Synthetic oligonucleotide
gagaaauggcugggccaga

SEQ ID NO: 1685564 - RNA, 19 nt, Artificial Sequence
  Description of Artificial Sequence: Synthetic oligonucleotide
gcgauccacuucauuggcc

SEQ ID NO: 1685565 - RNA, 19 nt, Artificial Sequence
  Description of Artificial Sequence: Synthetic oligonucleotide
ggcaaaauccacguucaau

SEQ ID NO: 1685566 - RNA, 19 nt, Artificial Sequence
  Description of Artificial Sequence: Synthetic oligonucleotide
cugcuucaaagcaugcguu

SEQ ID NO: 1685567 - RNA, 19 nt, Artificial Sequence
  Description of Artificial Sequence: Synthetic oligonucleotide
ggaggucacucucuuggcu

SEQ ID NO: 1685568 - RNA, 19 nt, Artificial Sequence
  Description of Artificial Sequence: Synthetic oligonucleotide
gccacaagugucagccaug

SEQ ID NO: 1685569 - RNA, 19 nt, Artificial Sequence
  Description of Artificial Sequence: Synthetic oligonucleotide
ccaugagucaagauagcau

SEQ ID NO: 1685570 - RNA, 19 nt, Artificial Sequence
  Description of Artificial Sequence: Synthetic oligonucleotide
gugccacaagugucagcca

SEQ ID NO: 1685571 - RNA, 19 nt, Artificial Sequence
  Description of Artificial Sequence: Synthetic oligonucleotide
gucacucucuuggcuccac

SEQ ID NO: 1685572 - RNA, 19 nt, Artificial Sequence
  Description of Artificial Sequence: Synthetic oligonucleotide
gcuccgcauacaaauuguc

SEQ ID NO: 1685573 - RNA, 19 nt, Artificial Sequence
  Description of Artificial Sequence: Synthetic oligonucleotide
gauccacuucauuggccuu

SEQ ID NO: 1685574 - RNA, 19 nt, Artificial Sequence
  Description of Artificial Sequence: Synthetic oligonucleotide
cgcggucuuucacaucucc

SEQ ID NO: 1685575 - RNA, 19 nt, Artificial Sequence
  Description of Artificial Sequence: Synthetic oligonucleotide
cagcuggcuccgcauacaa

SEQ ID NO: 1685576 - RNA, 19 nt, Artificial Sequence
  Description of Artificial Sequence: Synthetic oligonucleotide
cguucaaucggucugcgau

SEQ ID NO: 1685577 - RNA, 19 nt, Artificial Sequence
  Description of Artificial Sequence: Synthetic oligonucleotide
ccuggcgggcauaagggaa

SEQ ID NO: 1685578 - RNA, 19 nt, Artificial Sequence
  Description of Artificial Sequence: Synthetic oligonucleotide
ccuugugaaucaaggcaaa

SEQ ID NO: 1685579 - RNA, 19 nt, Artificial Sequence
  Description of Artificial Sequence: Synthetic oligonucleotide
acgcggucuuucacaucuc

SEQ ID NO: 1685580 - RNA, 19 nt, Artificial Sequence
  Description of Artificial Sequence: Synthetic oligonucleotide
gagaugcauguagauccau

SEQ ID NO: 1685581 - RNA, 19 nt, Artificial Sequence
  Description of Artificial Sequence: Synthetic oligonucleotide
guuucuccacucagauaua

SEQ ID NO: 1685582 - RNA, 19 nt, Artificial Sequence
  Description of Artificial Sequence: Synthetic oligonucleotide
cugcgauggaggucacucu

SEQ ID NO: 1685583 - RNA, 19 nt, Artificial Sequence
  Description of Artificial Sequence: Synthetic oligonucleotide
gccaugucauccacaagua

SEQ ID NO: 1685584 - RNA, 19 nt, Artificial Sequence
  Description of Artificial Sequence: Synthetic oligonucleotide
ccagcugagagaaguuugu

SEQ ID NO: 1685585 - RNA, 19 nt, Artificial Sequence
  Description of Artificial Sequence: Synthetic oligonucleotide
gucagcagcaugacagauu

SEQ ID NO: 1685586 - RNA, 19 nt, Artificial Sequence
  Description of Artificial Sequence: Synthetic oligonucleotide
cgauccacuucauuggccu

SEQ ID NO: 1685587 - RNA, 19 nt, Artificial Sequence
  Description of Artificial Sequence: Synthetic oligonucleotide
cugguagcuccagcugaga

SEQ ID NO: 1685588 - RNA, 19 nt, Artificial Sequence
  Description of Artificial Sequence: Synthetic oligonucleotide
agcuggcuccgcauacaaa

SEQ ID NO: 1685589 - RNA, 19 nt, Artificial Sequence
  Description of Artificial Sequence: Synthetic oligonucleotide
cggucugcgauggagguca

SEQ ID NO: 1685590 - RNA, 19 nt, Artificial Sequence
  Description of Artificial Sequence: Synthetic oligonucleotide
guagauccauggugauaau

SEQ ID NO: 1685591 - RNA, 19 nt, Artificial Sequence
  Description of Artificial Sequence: Synthetic oligonucleotide
cggucuuucacaucuccua

SEQ ID NO: 1685592 - RNA, 19 nt, Artificial Sequence
  Description of Artificial Sequence: Synthetic oligonucleotide
ggcuccgcauacaaauugu

SEQ ID NO: 1685593 - RNA, 19 nt, Artificial Sequence
  Description of Artificial Sequence: Synthetic oligonucleotide
cuggcuccgcauacaaauu

SEQ ID NO: 1685594 - RNA, 19 nt, Artificial Sequence
  Description of Artificial Sequence: Synthetic oligonucleotide
gcgcuccuugugaaucaag

SEQ ID NO: 1685595 - RNA, 19 nt, Artificial Sequence
  Description of Artificial Sequence: Synthetic oligonucleotide
ccagcaccaugcgauccac

SEQ ID NO: 1685596 - RNA, 19 nt, Artificial Sequence
  Description of Artificial Sequence: Synthetic oligonucleotide
cuccagcugagagaaguuu

SEQ ID NO: 1685597 - RNA, 19 nt, Artificial Sequence
  Description of Artificial Sequence: Synthetic oligonucleotide
accaugcgauccacuucau

SEQ ID NO: 1685598 - RNA, 19 nt, Artificial Sequence
  Description of Artificial Sequence: Synthetic oligonucleotide
ggcugggccagaaaagauu

SEQ ID NO: 1685599 - RNA, 19 nt, Artificial Sequence
  Description of Artificial Sequence: Synthetic oligonucleotide
gccacgcggucuuucacau

SEQ ID NO: 1685600 - RNA, 19 nt, Artificial Sequence
  Description of Artificial Sequence: Synthetic oligonucleotide
ggucacucucuuggcucca

SEQ ID NO: 1685601 - RNA, 19 nt, Artificial Sequence
  Description of Artificial Sequence: Synthetic oligonucleotide
cagcaccaugcgauccacu

SEQ ID NO: 1685602 - RNA, 19 nt, Artificial Sequence
  Description of Artificial Sequence: Synthetic oligonucleotide
ccacaagugucagccaugu

SEQ ID NO: 1685603 - RNA, 19 nt, Artificial Sequence
  Description of Artificial Sequence: Synthetic oligonucleotide
gggccagaaaagauuccau

SEQ ID NO: 1685604 - RNA, 19 nt, Artificial Sequence
  Description of Artificial Sequence: Synthetic oligonucleotide
gcggucuuucacaucuccu

SEQ ID NO: 1685605 - RNA, 19 nt, Artificial Sequence
  Description of Artificial Sequence: Synthetic oligonucleotide
gcgauggaggucacucucu

SEQ ID NO: 1685606 - RNA, 19 nt, Artificial Sequence
  Description of Artificial Sequence: Synthetic oligonucleotide
ccaugucauccacaaguau

SEQ ID NO: 1685607 - RNA, 19 nt, Artificial Sequence
  Description of Artificial Sequence: Synthetic oligonucleotide
ggcgggcauaagggaaaca

SEQ ID NO: 1685608 - RNA, 19 nt, Artificial Sequence
  Description of Artificial Sequence: Synthetic oligonucleotide
cagcagcaugacagauugu

SEQ ID NO: 1685609 - RNA, 19 nt, Artificial Sequence
  Description of Artificial Sequence: Synthetic oligonucleotide
cucuuggcuccaccagcau

SEQ ID NO: 1685610 - RNA, 19 nt, Artificial Sequence
  Description of Artificial Sequence: Synthetic oligonucleotide
ccacgcggucuuucacauc

SEQ ID NO: 1685611 - RNA, 19 nt, Artificial Sequence
  Description of Artificial Sequence: Synthetic oligonucleotide
cccugaauuugagaugcau

SEQ ID NO: 1685612 - RNA, 19 nt, Artificial Sequence
  Description of Artificial Sequence: Synthetic oligonucleotide
gucugcgauggaggucacu

SEQ ID NO: 1685613 - RNA, 19 nt, Artificial Sequence
  Description of Artificial Sequence: Synthetic oligonucleotide
cagcaucaggagagacaau

SEQ ID NO: 1685614 - RNA, 19 nt, Artificial Sequence
  Description of Artificial Sequence: Synthetic oligonucleotide
cgcauacaaauuguccacu

SEQ ID NO: 1685615 - RNA, 19 nt, Artificial Sequence
  Description of Artificial Sequence: Synthetic oligonucleotide
ggucugcgauggaggucac

SEQ ID NO: 1685616 - RNA, 19 nt, Artificial Sequence
  Description of Artificial Sequence: Synthetic oligonucleotide
gcuccagcugagagaaguu

SEQ ID NO: 1685617 - RNA, 19 nt, Artificial Sequence
  Description of Artificial Sequence: Synthetic oligonucleotide
caucuccuaccagcaccau

SEQ ID NO: 1685618 - RNA, 19 nt, Artificial Sequence
  Description of Artificial Sequence: Synthetic oligonucleotide
ccaugcgauccacuucauu

SEQ ID NO: 1685619 - RNA, 19 nt, Artificial Sequence
  Description of Artificial Sequence: Synthetic oligonucleotide
gggugggguugguuuuauu

SEQ ID NO: 1685620 - RNA, 19 nt, Artificial Sequence
  Description of Artificial Sequence: Synthetic oligonucleotide
cgauggaggucacucucuu

SEQ ID NO: 1685621 - RNA, 19 nt, Artificial Sequence
  Description of Artificial Sequence: Synthetic oligonucleotide
ggggugggguugguuuuau

SEQ ID NO: 1685622 - RNA, 19 nt, Artificial Sequence
  Description of Artificial Sequence: Synthetic oligonucleotide
guauggccacgcggucuuu

SEQ ID NO: 1685623 - RNA, 19 nt, Artificial Sequence
  Description of Artificial Sequence: Synthetic oligonucleotide
ccacuucauuggccuucuu

SEQ ID NO: 1685624 - RNA, 19 nt, Artificial Sequence
  Description of Artificial Sequence: Synthetic oligonucleotide
auagguaaauagcacaggg

SEQ ID NO: 1685625 - RNA, 19 nt, Artificial Sequence
  Description of Artificial Sequence: Synthetic oligonucleotide
uauuccauagcucauuuga

SEQ ID NO: 1685626 - RNA, 19 nt, Artificial Sequence
  Description of Artificial Sequence: Synthetic oligonucleotide
ugaaccuuguuccacuugg

SEQ ID NO: 1685627 - RNA, 19 nt, Artificial Sequence
  Description of Artificial Sequence: Synthetic oligonucleotide
ucauuugaucuucaggucc

SEQ ID NO: 1685628 - RNA, 19 nt, Artificial Sequence
  Description of Artificial Sequence: Synthetic oligonucleotide
aauaccugucaccugcccg

SEQ ID NO: 1685629 - RNA, 19 nt, Artificial Sequence
  Description of Artificial Sequence: Synthetic oligonucleotide
auggagaugacacgggagc

SEQ ID NO: 1685630 - RNA, 19 nt, Artificial Sequence
  Description of Artificial Sequence: Synthetic oligonucleotide
accgagauuugacugacgc

SEQ ID NO: 1685631 - RNA, 19 nt, Artificial Sequence
  Description of Artificial Sequence: Synthetic oligonucleotide
uuugucgagguucuggaag

SEQ ID NO: 1685632 - RNA, 19 nt, Artificial Sequence
  Description of Artificial Sequence: Synthetic oligonucleotide
agcucaaugucccugcagc

SEQ ID NO: 1685633 - RNA, 19 nt, Artificial Sequence
  Description of Artificial Sequence: Synthetic oligonucleotide
ugugauaaaggugauggcc

SEQ ID NO: 1685634 - RNA, 19 nt, Artificial Sequence
  Description of Artificial Sequence: Synthetic oligonucleotide
ucaaaauaacagauggaga

SEQ ID NO: 1685635 - RNA, 19 nt, Artificial Sequence
  Description of Artificial Sequence: Synthetic oligonucleotide
acugucauagguaaauagc

SEQ ID NO: 1685636 - RNA, 19 nt, Artificial Sequence
  Description of Artificial Sequence: Synthetic oligonucleotide
aagcauucagcaaagcaac

SEQ ID NO: 1685637 - RNA, 19 nt, Artificial Sequence
  Description of Artificial Sequence: Synthetic oligonucleotide
guaaauagcacagggaagc

SEQ ID NO: 1685638 - RNA, 19 nt, Artificial Sequence
  Description of Artificial Sequence: Synthetic oligonucleotide
uauuuucugugauaaaggu

SEQ ID NO: 1685639 - RNA, 19 nt, Artificial Sequence
  Description of Artificial Sequence: Synthetic oligonucleotide
cuugauauaggcagagaag

SEQ ID NO: 1685640 - RNA, 19 nt, Artificial Sequence
  Description of Artificial Sequence: Synthetic oligonucleotide
agauccugcacuugaaguc

SEQ ID NO: 1685641 - RNA, 19 nt, Artificial Sequence
  Description of Artificial Sequence: Synthetic oligonucleotide
aaaauaacagauggagaug

SEQ ID NO: 1685642 - RNA, 19 nt, Artificial Sequence
  Description of Artificial Sequence: Synthetic oligonucleotide
agguaaauagcacagggaa

SEQ ID NO: 1685643 - RNA, 19 nt, Artificial Sequence
  Description of Artificial Sequence: Synthetic oligonucleotide
ugcgguuacucucaggggc

SEQ ID NO: 1685644 - RNA, 19 nt, Artificial Sequence
  Description of Artificial Sequence: Synthetic oligonucleotide
accuuguuccacuuggcac

SEQ ID NO: 1685645 - RNA, 19 nt, Artificial Sequence
  Description of Artificial Sequence: Synthetic oligonucleotide
acacauaggcauuucgguc

SEQ ID NO: 1685646 - RNA, 19 nt, Artificial Sequence
  Description of Artificial Sequence: Synthetic oligonucleotide
guggcaagguuucagaggc

SEQ ID NO: 1685647 - RNA, 19 nt, Artificial Sequence
  Description of Artificial Sequence: Synthetic oligonucleotide
agagugggcuuccacgugc

SEQ ID NO: 1685648 - RNA, 19 nt, Artificial Sequence
  Description of Artificial Sequence: Synthetic oligonucleotide
uccacacauaggcauuucg

SEQ ID NO: 1685649 - RNA, 19 nt, Artificial Sequence
  Description of Artificial Sequence: Synthetic oligonucleotide
ugucauagguaaauagcac

SEQ ID NO: 1685650 - RNA, 19 nt, Artificial Sequence
  Description of Artificial Sequence: Synthetic oligonucleotide
ugcugcucgacucaaacau

SEQ ID NO: 1685651 - RNA, 19 nt, Artificial Sequence
  Description of Artificial Sequence: Synthetic oligonucleotide
guacuggcacccuagaagc

SEQ ID NO: 1685652 - RNA, 19 nt, Artificial Sequence
  Description of Artificial Sequence: Synthetic oligonucleotide
uagguaaauagcacaggga

SEQ ID NO: 1685653 - RNA, 19 nt, Artificial Sequence
  Description of Artificial Sequence: Synthetic oligonucleotide
ugccacuagacuauuuucu

SEQ ID NO: 1685654 - RNA, 19 nt, Artificial Sequence
  Description of Artificial Sequence: Synthetic oligonucleotide
augccuguagugcagaacu

SEQ ID NO: 1685655 - RNA, 19 nt, Artificial Sequence
  Description of Artificial Sequence: Synthetic oligonucleotide
agaacugcgagcacuuggc

SEQ ID NO: 1685656 - RNA, 19 nt, Artificial Sequence
  Description of Artificial Sequence: Synthetic oligonucleotide
ugugcagcgaguccaggcc

SEQ ID NO: 1685657 - RNA, 19 nt, Artificial Sequence
  Description of Artificial Sequence: Synthetic oligonucleotide
ugauaaaggugauggccag

SEQ ID NO: 1685658 - RNA, 19 nt, Artificial Sequence
  Description of Artificial Sequence: Synthetic oligonucleotide
auagucuugucuccucggg

SEQ ID NO: 1685659 - RNA, 19 nt, Artificial Sequence
  Description of Artificial Sequence: Synthetic oligonucleotide
uguguucgguccuuguucc

SEQ ID NO: 1685660 - RNA, 19 nt, Artificial Sequence
  Description of Artificial Sequence: Synthetic oligonucleotide
gaagauccugcacuugaag

SEQ ID NO: 1685661 - RNA, 19 nt, Artificial Sequence
  Description of Artificial Sequence: Synthetic oligonucleotide
gauauaggcagagaagauc

SEQ ID NO: 1685662 - RNA, 19 nt, Artificial Sequence
  Description of Artificial Sequence: Synthetic oligonucleotide
uagucuugucuccucgggg

SEQ ID NO: 1685663 - RNA, 19 nt, Artificial Sequence
  Description of Artificial Sequence: Synthetic oligonucleotide
caaaauaacagauggagau

SEQ ID NO: 1685664 - RNA, 19 nt, Artificial Sequence
  Description of Artificial Sequence: Synthetic oligonucleotide
uccugcucaaaauaacaga

SEQ ID NO: 1685665 - RNA, 19 nt, Artificial Sequence
  Description of Artificial Sequence: Synthetic oligonucleotide
gagcacuuggccuugcccc

SEQ ID NO: 1685666 - RNA, 19 nt, Artificial Sequence
  Description of Artificial Sequence: Synthetic oligonucleotide
ugagggugguauuccauag

SEQ ID NO: 1685667 - RNA, 19 nt, Artificial Sequence
  Description of Artificial Sequence: Synthetic oligonucleotide
cuagaagcauucagcaaag

SEQ ID NO: 1685668 - RNA, 19 nt, Artificial Sequence
  Description of Artificial Sequence: Synthetic oligonucleotide
aauaacagauggagaugac

SEQ ID NO: 1685669 - RNA, 19 nt, Artificial Sequence
  Description of Artificial Sequence: Synthetic oligonucleotide
aaauagcacagggaagcag

SEQ ID NO: 1685670 - RNA, 19 nt, Artificial Sequence
  Description of Artificial Sequence: Synthetic oligonucleotide
ucuuagagccccacggugu

SEQ ID NO: 1685671 - RNA, 19 nt, Artificial Sequence
  Description of Artificial Sequence: Synthetic oligonucleotide
uuacccaagccacacggcu

SEQ ID NO: 1685672 - RNA, 19 nt, Artificial Sequence
  Description of Artificial Sequence: Synthetic oligonucleotide
cuucaguguccacacauag

SEQ ID NO: 1685673 - RNA, 19 nt, Artificial Sequence
  Description of Artificial Sequence: Synthetic oligonucleotide
aguguccacacauaggcau

SEQ ID NO: 1685674 - RNA, 19 nt, Artificial Sequence
  Description of Artificial Sequence: Synthetic oligonucleotide
guugugcuccuuaagcucg

SEQ ID NO: 1685675 - RNA, 19 nt, Artificial Sequence
  Description of Artificial Sequence: Synthetic oligonucleotide
aacugcgagcacuuggccu

SEQ ID NO: 1685676 - RNA, 19 nt, Artificial Sequence
  Description of Artificial Sequence: Synthetic oligonucleotide
ugccagucgaggcugagga

SEQ ID NO: 1685677 - RNA, 19 nt, Artificial Sequence
  Description of Artificial Sequence: Synthetic oligonucleotide
ugcagcuaggagcacguug

SEQ ID NO: 1685678 - RNA, 19 nt, Artificial Sequence
  Description of Artificial Sequence: Synthetic oligonucleotide
aaccuuguuccacuuggca

SEQ ID NO: 1685679 - RNA, 19 nt, Artificial Sequence
  Description of Artificial Sequence: Synthetic oligonucleotide
aagcucuucacaucccaga

SEQ ID NO: 1685680 - RNA, 19 nt, Artificial Sequence
  Description of Artificial Sequence: Synthetic oligonucleotide
uugucgagguucuggaagc

SEQ ID NO: 1685681 - RNA, 19 nt, Artificial Sequence
  Description of Artificial Sequence: Synthetic oligonucleotide
caaagcucaaugucccugc

SEQ ID NO: 1685682 - RNA, 19 nt, Artificial Sequence
  Description of Artificial Sequence: Synthetic oligonucleotide
cuccugcucaaaauaacag

SEQ ID NO: 1685683 - RNA, 19 nt, Artificial Sequence
  Description of Artificial Sequence: Synthetic oligonucleotide
ugugguaggccauagucuu

SEQ ID NO: 1685684 - RNA, 19 nt, Artificial Sequence
  Description of Artificial Sequence: Synthetic oligonucleotide
caccaaagcucaauguccc

SEQ ID NO: 1685685 - RNA, 19 nt, Artificial Sequence
  Description of Artificial Sequence: Synthetic oligonucleotide
acagcgugcagcucgguug

SEQ ID NO: 1685686 - RNA, 19 nt, Artificial Sequence
  Description of Artificial Sequence: Synthetic oligonucleotide
ugagcaccgagauuugacu

SEQ ID NO: 1685687 - RNA, 19 nt, Artificial Sequence
  Description of Artificial Sequence: Synthetic oligonucleotide
gcaucuuagagccccacgg

SEQ ID NO: 1685688 - RNA, 19 nt, Artificial Sequence
  Description of Artificial Sequence: Synthetic oligonucleotide
uuccauagcucauuugauc

SEQ ID NO: 1685689 - RNA, 19 nt, Artificial Sequence
  Description of Artificial Sequence: Synthetic oligonucleotide
cauagucuugucuccucgg

SEQ ID NO: 1685690 - RNA, 19 nt, Artificial Sequence
  Description of Artificial Sequence: Synthetic oligonucleotide
ugauauaggcagagaagau

SEQ ID NO: 1685691 - RNA, 19 nt, Artificial Sequence
  Description of Artificial Sequence: Synthetic oligonucleotide
aucuuagagccccacggug

SEQ ID NO: 1685692 - RNA, 19 nt, Artificial Sequence
  Description of Artificial Sequence: Synthetic oligonucleotide
acgccgugcacccagccac

SEQ ID NO: 1685693 - RNA, 19 nt, Artificial Sequence
  Description of Artificial Sequence: Synthetic oligonucleotide
agcacagggaagcagucgu

SEQ ID NO: 1685694 - RNA, 19 nt, Artificial Sequence
  Description of Artificial Sequence: Synthetic oligonucleotide
auaacagauggagaugaca

SEQ ID NO: 1685695 - RNA, 19 nt, Artificial Sequence
  Description of Artificial Sequence: Synthetic oligonucleotide
ucgguugauccgcaggaug

SEQ ID NO: 1685696 - RNA, 19 nt, Artificial Sequence
  Description of Artificial Sequence: Synthetic oligonucleotide
gcuuacccaagccacacgg

SEQ ID NO: 1685697 - RNA, 19 nt, Artificial Sequence
  Description of Artificial Sequence: Synthetic oligonucleotide
acgguguaggcgcuggccg

SEQ ID NO: 1685698 - RNA, 19 nt, Artificial Sequence
  Description of Artificial Sequence: Synthetic oligonucleotide
ugccgcaggucacaaugcg

SEQ ID NO: 1685699 - RNA, 19 nt, Artificial Sequence
  Description of Artificial Sequence: Synthetic oligonucleotide
ugcaacggccaucuucuug

SEQ ID NO: 1685700 - RNA, 19 nt, Artificial Sequence
  Description of Artificial Sequence: Synthetic oligonucleotide
aggaugaccagagugggcu

SEQ ID NO: 1685701 - RNA, 19 nt, Artificial Sequence
  Description of Artificial Sequence: Synthetic oligonucleotide
auaccugucaccugcccgu

SEQ ID NO: 1685702 - RNA, 19 nt, Artificial Sequence
  Description of Artificial Sequence: Synthetic oligonucleotide
aguaguggcaagguuucag

SEQ ID NO: 1685703 - RNA, 19 nt, Artificial Sequence
  Description of Artificial Sequence: Synthetic oligonucleotide
gagcaccgagauuugacug

SEQ ID NO: 1685704 - RNA, 19 nt, Artificial Sequence
  Description of Artificial Sequence: Synthetic oligonucleotide
uuaagcucgugaaccuugu

SEQ ID NO: 1685705 - RNA, 19 nt, Artificial Sequence
  Description of Artificial Sequence: Synthetic oligonucleotide
ccaccaaucauucuccugc

SEQ ID NO: 1685706 - RNA, 19 nt, Artificial Sequence
  Description of Artificial Sequence: Synthetic oligonucleotide
cucauuugaucuucagguc

SEQ ID NO: 1685707 - RNA, 19 nt, Artificial Sequence
  Description of Artificial Sequence: Synthetic oligonucleotide
uuucggucugugccgcagg

SEQ ID NO: 1685708 - RNA, 19 nt, Artificial Sequence
  Description of Artificial Sequence: Synthetic oligonucleotide
aaagcucaaugucccugca

SEQ ID NO: 1685709 - RNA, 19 nt, Artificial Sequence
  Description of Artificial Sequence: Synthetic oligonucleotide
uguuccacuuggcaccgcu

SEQ ID NO: 1685710 - RNA, 19 nt, Artificial Sequence
  Description of Artificial Sequence: Synthetic oligonucleotide
ugcagcacugucauaggua

SEQ ID NO: 1685711 - RNA, 19 nt, Artificial Sequence
  Description of Artificial Sequence: Synthetic oligonucleotide
ucauagaugugcaccucau

SEQ ID NO: 1685712 - RNA, 19 nt, Artificial Sequence
  Description of Artificial Sequence: Synthetic oligonucleotide
uguucgguccuuguuccag

SEQ ID NO: 1685713 - RNA, 19 nt, Artificial Sequence
  Description of Artificial Sequence: Synthetic oligonucleotide
cugagcaccgagauuugac

SEQ ID NO: 1685714 - RNA, 19 nt, Artificial Sequence
  Description of Artificial Sequence: Synthetic oligonucleotide
aggagcacguuguuggggu

SEQ ID NO: 1685715 - RNA, 19 nt, Artificial Sequence
  Description of Artificial Sequence: Synthetic oligonucleotide
ggcauuucggucugugccg

SEQ ID NO: 1685716 - RNA, 19 nt, Artificial Sequence
  Description of Artificial Sequence: Synthetic oligonucleotide
acagucgacgcgccgaacu

SEQ ID NO: 1685717 - RNA, 19 nt, Artificial Sequence
  Description of Artificial Sequence: Synthetic oligonucleotide
uccuuaagcucgugaaccu

SEQ ID NO: 1685718 - RNA, 19 nt, Artificial Sequence
  Description of Artificial Sequence: Synthetic oligonucleotide
augacacgggagccgcugc

SEQ ID NO: 1685719 - RNA, 19 nt, Artificial Sequence
  Description of Artificial Sequence: Synthetic oligonucleotide
agcaccgagauuugacuga

SEQ ID NO: 1685720 - RNA, 19 nt, Artificial Sequence
  Description of Artificial Sequence: Synthetic oligonucleotide
cuguguucgguccuuguuc

SEQ ID NO: 1685721 - RNA, 19 nt, Artificial Sequence
  Description of Artificial Sequence: Synthetic oligonucleotide
cucgacucaaacaucagcu

SEQ ID NO: 1685722 - RNA, 19 nt, Artificial Sequence
  Description of Artificial Sequence: Synthetic oligonucleotide
augcaccacccucagagcu

SEQ ID NO: 1685723 - RNA, 19 nt, Artificial Sequence
  Description of Artificial Sequence: Synthetic oligonucleotide
agugcagaacugcgagcac

SEQ ID NO: 1685724 - RNA, 19 nt, Artificial Sequence
  Description of Artificial Sequence: Synthetic oligonucleotide
cuuacccaagccacacggc

SEQ ID NO: 1685725 - RNA, 19 nt, Artificial Sequence
  Description of Artificial Sequence: Synthetic oligonucleotide
gguaaauagcacagggaag

SEQ ID NO: 1685726 - RNA, 19 nt, Artificial Sequence
  Description of Artificial Sequence: Synthetic oligonucleotide
caagcucuucacaucccag

SEQ ID NO: 1685727 - RNA, 19 nt, Artificial Sequence
  Description of Artificial Sequence: Synthetic oligonucleotide
gauccugcacuugaaguca

SEQ ID NO: 1685728 - RNA, 19 nt, Artificial Sequence
  Description of Artificial Sequence: Synthetic oligonucleotide
gaugcaccacccucagagc

SEQ ID NO: 1685729 - RNA, 19 nt, Artificial Sequence
  Description of Artificial Sequence: Synthetic oligonucleotide
cccaaaaggcaucuuagag

SEQ ID NO: 1685730 - RNA, 19 nt, Artificial Sequence
  Description of Artificial Sequence: Synthetic oligonucleotide
uaggcauuucggucugugc

SEQ ID NO: 1685731 - RNA, 19 nt, Artificial Sequence
  Description of Artificial Sequence: Synthetic oligonucleotide
ugacuccaagcucuucaca

SEQ ID NO: 1685732 - RNA, 19 nt, Artificial Sequence
  Description of Artificial Sequence: Synthetic oligonucleotide
gagggugguauuccauagc

SEQ ID NO: 1685733 - RNA, 19 nt, Artificial Sequence
  Description of Artificial Sequence: Synthetic oligonucleotide
agcacugucauagguaaau

SEQ ID NO: 1685734 - RNA, 19 nt, Artificial Sequence
  Description of Artificial Sequence: Synthetic oligonucleotide
augcgguuacucucagggg

SEQ ID NO: 1685735 - RNA, 19 nt, Artificial Sequence
  Description of Artificial Sequence: Synthetic oligonucleotide
uaggagcacguuguugggg

SEQ ID NO: 1685736 - RNA, 19 nt, Artificial Sequence
  Description of Artificial Sequence: Synthetic oligonucleotide
agcguucucgggcugucag

SEQ ID NO: 1685737 - RNA, 19 nt, Artificial Sequence
  Description of Artificial Sequence: Synthetic oligonucleotide
ugcagcucgguugauccgc

SEQ ID NO: 1685738 - RNA, 19 nt, Artificial Sequence
  Description of Artificial Sequence: Synthetic oligonucleotide
uggagaugacacgggagcc

SEQ ID NO: 1685739 - RNA, 19 nt, Artificial Sequence
  Description of Artificial Sequence: Synthetic oligonucleotide
guucgguccuuguuccagg

SEQ ID NO: 1685740 - RNA, 19 nt, Artificial Sequence
  Description of Artificial Sequence: Synthetic oligonucleotide
auaaaggugauggccagua

SEQ ID NO: 1685741 - RNA, 19 nt, Artificial Sequence
  Description of Artificial Sequence: Synthetic oligonucleotide
acugcgagcacuuggccuu

SEQ ID NO: 1685742 - RNA, 19 nt, Artificial Sequence
  Description of Artificial Sequence: Synthetic oligonucleotide
guauuccauagcucauuug

SEQ ID NO: 1685743 - RNA, 19 nt, Artificial Sequence
  Description of Artificial Sequence: Synthetic oligonucleotide
gagaugacacgggagccgc

SEQ ID NO: 1685744 - RNA, 19 nt, Artificial Sequence
  Description of Artificial Sequence: Synthetic oligonucleotide
ugcucgacucaaacaucag

SEQ ID NO: 1685745 - RNA, 19 nt, Artificial Sequence
  Description of Artificial Sequence: Synthetic oligonucleotide
ucuguguucgguccuuguu

SEQ ID NO: 1685746 - RNA, 19 nt, Artificial Sequence
  Description of Artificial Sequence: Synthetic oligonucleotide
ggcgaacuuguucucauug

SEQ ID NO: 1685747 - RNA, 19 nt, Artificial Sequence
  Description of Artificial Sequence: Synthetic oligonucleotide
guaguggcaagguuucaga

SEQ ID NO: 1685748 - RNA, 19 nt, Artificial Sequence
  Description of Artificial Sequence: Synthetic oligonucleotide
gaacugcgagcacuuggcc

SEQ ID NO: 1685749 - RNA, 19 nt, Artificial Sequence
  Description of Artificial Sequence: Synthetic oligonucleotide
guagugcagaacugcgagc

SEQ ID NO: 1685750 - RNA, 19 nt, Artificial Sequence
  Description of Artificial Sequence: Synthetic oligonucleotide
cagauggcgaucuguguuc

SEQ ID NO: 1685751 - RNA, 19 nt, Artificial Sequence
  Description of Artificial Sequence: Synthetic oligonucleotide
aacggccaucuucuuguca

SEQ ID NO: 1685752 - RNA, 19 nt, Artificial Sequence
  Description of Artificial Sequence: Synthetic oligonucleotide
uuuugucgagguucuggaa

SEQ ID NO: 1685753 - RNA, 19 nt, Artificial Sequence
  Description of Artificial Sequence: Synthetic oligonucleotide
uucugugauaaaggugaug

SEQ ID NO: 1685754 - RNA, 19 nt, Artificial Sequence
  Description of Artificial Sequence: Synthetic oligonucleotide
caugccaccauccaugccu

SEQ ID NO: 1685755 - RNA, 19 nt, Artificial Sequence
  Description of Artificial Sequence: Synthetic oligonucleotide
ugcuugcacacccaccaau

SEQ ID NO: 1685756 - RNA, 19 nt, Artificial Sequence
  Description of Artificial Sequence: Synthetic oligonucleotide
cugccacuagacuauuuuc

SEQ ID NO: 1685757 - RNA, 19 nt, Artificial Sequence
  Description of Artificial Sequence: Synthetic oligonucleotide
cugcucgacucaaacauca

SEQ ID NO: 1685758 - RNA, 19 nt, Artificial Sequence
  Description of Artificial Sequence: Synthetic oligonucleotide
ucgagguucuggaagcguu

SEQ ID NO: 1685759 - RNA, 19 nt, Artificial Sequence
  Description of Artificial Sequence: Synthetic oligonucleotide
cacaaugcgguuacucuca

SEQ ID NO: 1685760 - RNA, 19 nt, Artificial Sequence
  Description of Artificial Sequence: Synthetic oligonucleotide
guuggggugccagucgagg

SEQ ID NO: 1685761 - RNA, 19 nt, Artificial Sequence
  Description of Artificial Sequence: Synthetic oligonucleotide
caggucacaaugcgguuac

SEQ ID NO: 1685762 - RNA, 19 nt, Artificial Sequence
  Description of Artificial Sequence: Synthetic oligonucleotide
ugucgagguucuggaagcg

SEQ ID NO: 1685763 - RNA, 19 nt, Artificial Sequence
  Description of Artificial Sequence: Synthetic oligonucleotide
uggggugccagucgaggcu

SEQ ID NO: 1685764 - RNA, 19 nt, Artificial Sequence
  Description of Artificial Sequence: Synthetic oligonucleotide
uucgguccuuguuccaggc

SEQ ID NO: 1685765 - RNA, 19 nt, Artificial Sequence
  Description of Artificial Sequence: Synthetic oligonucleotide
agucaauaccugucaccug

SEQ ID NO: 1685766 - RNA, 19 nt, Artificial Sequence
  Description of Artificial Sequence: Synthetic oligonucleotide
gaugacacgggagccgcug

SEQ ID NO: 1685767 - RNA, 19 nt, Artificial Sequence
  Description of Artificial Sequence: Synthetic oligonucleotide
uccacgugcggcccuucag

SEQ ID NO: 1685768 - RNA, 19 nt, Artificial Sequence
  Description of Artificial Sequence: Synthetic oligonucleotide
cugagacccgcgcagcgcc

SEQ ID NO: 1685769 - RNA, 19 nt, Artificial Sequence
  Description of Artificial Sequence: Synthetic oligonucleotide
acaaugcgguuacucucag

SEQ ID NO: 1685770 - RNA, 19 nt, Artificial Sequence
  Description of Artificial Sequence: Synthetic oligonucleotide
uuucugugauaaaggugau

SEQ ID NO: 1685771 - RNA, 19 nt, Artificial Sequence
  Description of Artificial Sequence: Synthetic oligonucleotide
agcacguuguuggggugcc

SEQ ID NO: 1685772 - RNA, 19 nt, Artificial Sequence
  Description of Artificial Sequence: Synthetic oligonucleotide
gguugcaacggccaucuuc

SEQ ID NO: 1685773 - RNA, 19 nt, Artificial Sequence
  Description of Artificial Sequence: Synthetic oligonucleotide
ggagccgcugcccacggcg

SEQ ID NO: 1685774 - RNA, 19 nt, Artificial Sequence
  Description of Artificial Sequence: Synthetic oligonucleotide
agauggcgaucuguguucg

SEQ ID NO: 1685775 - RNA, 19 nt, Artificial Sequence
  Description of Artificial Sequence: Synthetic oligonucleotide
augagggugguauuccaua

SEQ ID NO: 1685776 - RNA, 19 nt, Artificial Sequence
  Description of Artificial Sequence: Synthetic oligonucleotide
auagcacagggaagcaguc

SEQ ID NO: 1685777 - RNA, 19 nt, Artificial Sequence
  Description of Artificial Sequence: Synthetic oligonucleotide
ggcaccgcucuucucauag

SEQ ID NO: 1685778 - RNA, 19 nt, Artificial Sequence
  Description of Artificial Sequence: Synthetic oligonucleotide
gauggcgaucuguguucgg

SEQ ID NO: 1685779 - RNA, 19 nt, Artificial Sequence
  Description of Artificial Sequence: Synthetic oligonucleotide
ugacacgggagccgcugcc

SEQ ID NO: 1685780 - RNA, 19 nt, Artificial Sequence
  Description of Artificial Sequence: Synthetic oligonucleotide
ucuggacagucgacgcgcc

SEQ ID NO: 1685781 - RNA, 19 nt, Artificial Sequence
  Description of Artificial Sequence: Synthetic oligonucleotide
agacgccgugcacccagcc

SEQ ID NO: 1685782 - RNA, 19 nt, Artificial Sequence
  Description of Artificial Sequence: Synthetic oligonucleotide
caauaccugucaccugccc

SEQ ID NO: 1685783 - RNA, 19 nt, Artificial Sequence
  Description of Artificial Sequence: Synthetic oligonucleotide
gccgaacuggcucugagac

SEQ ID NO: 1685784 - RNA, 19 nt, Artificial Sequence
  Description of Artificial Sequence: Synthetic oligonucleotide
gcuguucuugugcagcgag

SEQ ID NO: 1685785 - RNA, 19 nt, Artificial Sequence
  Description of Artificial Sequence: Synthetic oligonucleotide
uggacagucgacgcgccga

SEQ ID NO: 1685786 - RNA, 19 nt, Artificial Sequence
  Description of Artificial Sequence: Synthetic oligonucleotide
gccacuagacuauuuucug

SEQ ID NO: 1685787 - RNA, 19 nt, Artificial Sequence
  Description of Artificial Sequence: Synthetic oligonucleotide
ccagucaauaccugucacc

SEQ ID NO: 1685788 - RNA, 19 nt, Artificial Sequence
  Description of Artificial Sequence: Synthetic oligonucleotide
auucuccugcucaaaauaa

SEQ ID NO: 1685789 - RNA, 19 nt, Artificial Sequence
  Description of Artificial Sequence: Synthetic oligonucleotide
aggguugcaacggccaucu

SEQ ID NO: 1685790 - RNA, 19 nt, Artificial Sequence
  Description of Artificial Sequence: Synthetic oligonucleotide
cucugagacccgcgcagcg

SEQ ID NO: 1685791 - RNA, 19 nt, Artificial Sequence
  Description of Artificial Sequence: Synthetic oligonucleotide
uucggucugugccgcaggu

SEQ ID NO: 1685792 - RNA, 19 nt, Artificial Sequence
  Description of Artificial Sequence: Synthetic oligonucleotide
ucugagacccgcgcagcgc

SEQ ID NO: 1685793 - RNA, 19 nt, Artificial Sequence
  Description of Artificial Sequence: Synthetic oligonucleotide
gaaccuuguuccacuuggc

SEQ ID NO: 1685794 - RNA, 19 nt, Artificial Sequence
  Description of Artificial Sequence: Synthetic oligonucleotide
gcucgacucaaacaucagc

SEQ ID NO: 1685795 - RNA, 19 nt, Artificial Sequence
  Description of Artificial Sequence: Synthetic oligonucleotide
ggcaucuuagagccccacg

SEQ ID NO: 1685796 - RNA, 19 nt, Artificial Sequence
  Description of Artificial Sequence: Synthetic oligonucleotide
cgaacuggcucugagaccc

SEQ ID NO: 1685797 - RNA, 19 nt, Artificial Sequence
  Description of Artificial Sequence: Synthetic oligonucleotide
cuugucuccucggggcucg

SEQ ID NO: 1685798 - RNA, 19 nt, Artificial Sequence
  Description of Artificial Sequence: Synthetic oligonucleotide
ggagaugacacgggagccg

SEQ ID NO: 1685799 - RNA, 19 nt, Artificial Sequence
  Description of Artificial Sequence: Synthetic oligonucleotide
gcacccuagaagcauucag

SEQ ID NO: 1685800 - RNA, 19 nt, Artificial Sequence
  Description of Artificial Sequence: Synthetic oligonucleotide
uagaagcauucagcaaagc

SEQ ID NO: 1685801 - RNA, 19 nt, Artificial Sequence
  Description of Artificial Sequence: Synthetic oligonucleotide
agucgacgcgccgaacugg

SEQ ID NO: 1685802 - RNA, 19 nt, Artificial Sequence
  Description of Artificial Sequence: Synthetic oligonucleotide
cacccguggaugcaccacc

SEQ ID NO: 1685803 - RNA, 19 nt, Artificial Sequence
  Description of Artificial Sequence: Synthetic oligonucleotide
caggaugaccagagugggc

SEQ ID NO: 1685804 - RNA, 19 nt, Artificial Sequence
  Description of Artificial Sequence: Synthetic oligonucleotide
ccuugauauaggcagagaa

SEQ ID NO: 1685805 - RNA, 19 nt, Artificial Sequence
  Description of Artificial Sequence: Synthetic oligonucleotide
gagugggcuuccacgugcg

SEQ ID NO: 1685806 - RNA, 19 nt, Artificial Sequence
  Description of Artificial Sequence: Synthetic oligonucleotide
guuacucucaggggcccag

SEQ ID NO: 1685807 - RNA, 19 nt, Artificial Sequence
  Description of Artificial Sequence: Synthetic oligonucleotide
auuccauagcucauuugau

SEQ ID NO: 1685808 - RNA, 19 nt, Artificial Sequence
  Description of Artificial Sequence: Synthetic oligonucleotide
uggcuuacccaagccacac

SEQ ID NO: 1685809 - RNA, 19 nt, Artificial Sequence
  Description of Artificial Sequence: Synthetic oligonucleotide
cucgugaaccuuguuccac

SEQ ID NO: 1685810 - RNA, 19 nt, Artificial Sequence
  Description of Artificial Sequence: Synthetic oligonucleotide
cacacggcucccacuggcc

SEQ ID NO: 1685811 - RNA, 19 nt, Artificial Sequence
  Description of Artificial Sequence: Synthetic oligonucleotide
gucgaggcugaggacagug

SEQ ID NO: 1685812 - RNA, 19 nt, Artificial Sequence
  Description of Artificial Sequence: Synthetic oligonucleotide
uggcaagguuucagaggcc

SEQ ID NO: 1685813 - RNA, 19 nt, Artificial Sequence
  Description of Artificial Sequence: Synthetic oligonucleotide
uggcccgcugccacuagac

SEQ ID NO: 1685814 - RNA, 19 nt, Artificial Sequence
  Description of Artificial Sequence: Synthetic oligonucleotide
gaggacaguggagcggaug

SEQ ID NO: 1685815 - RNA, 19 nt, Artificial Sequence
  Description of Artificial Sequence: Synthetic oligonucleotide
ucgguccuuguuccaggca

SEQ ID NO: 1685816 - RNA, 19 nt, Artificial Sequence
  Description of Artificial Sequence: Synthetic oligonucleotide
cuguagugcagaacugcga

SEQ ID NO: 1685817 - RNA, 19 nt, Artificial Sequence
  Description of Artificial Sequence: Synthetic oligonucleotide
uguaggcgcuggccgcucc

SEQ ID NO: 1685818 - RNA, 19 nt, Artificial Sequence
  Description of Artificial Sequence: Synthetic oligonucleotide
cgugcagcucgguugaucc

SEQ ID NO: 1685819 - RNA, 19 nt, Artificial Sequence
  Description of Artificial Sequence: Synthetic oligonucleotide
agugggcuuccacgugcgg

SEQ ID NO: 1685820 - RNA, 19 nt, Artificial Sequence
  Description of Artificial Sequence: Synthetic oligonucleotide
uugugcuccuuaagcucgu

SEQ ID NO: 1685821 - RNA, 19 nt, Artificial Sequence
  Description of Artificial Sequence: Synthetic oligonucleotide
uccagccggccaccaaagc

SEQ ID NO: 1685822 - RNA, 19 nt, Artificial Sequence
  Description of Artificial Sequence: Synthetic oligonucleotide
gcagcacugucauagguaa

SEQ ID NO: 1685823 - RNA, 19 nt, Artificial Sequence
  Description of Artificial Sequence: Synthetic oligonucleotide
uuagagccccacgguguag

SEQ ID NO: 1685824 - RNA, 19 nt, Artificial Sequence
  Description of Artificial Sequence: Synthetic oligonucleotide
acccguggaugcaccaccc

SEQ ID NO: 1685825 - RNA, 19 nt, Artificial Sequence
  Description of Artificial Sequence: Synthetic oligonucleotide
cacgugcggcccuucagug

SEQ ID NO: 1685826 - RNA, 19 nt, Artificial Sequence
  Description of Artificial Sequence: Synthetic oligonucleotide
cagucaauaccugucaccu

SEQ ID NO: 1685827 - RNA, 19 nt, Artificial Sequence
  Description of Artificial Sequence: Synthetic oligonucleotide
acggcgaacuuguucucau

SEQ ID NO: 1685828 - RNA, 19 nt, Artificial Sequence
  Description of Artificial Sequence: Synthetic oligonucleotide
ccaguaguggcaagguuuc

SEQ ID NO: 1685829 - RNA, 19 nt, Artificial Sequence
  Description of Artificial Sequence: Synthetic oligonucleotide
gugcagcucgguugauccg

SEQ ID NO: 1685830 - RNA, 19 nt, Artificial Sequence
  Description of Artificial Sequence: Synthetic oligonucleotide
uggcacccuagaagcauuc

SEQ ID NO: 1685831 - RNA, 19 nt, Artificial Sequence
  Description of Artificial Sequence: Synthetic oligonucleotide
auccugcacuugaagucac

SEQ ID NO: 1685832 - RNA, 19 nt, Artificial Sequence
  Description of Artificial Sequence: Synthetic oligonucleotide
uccgcaggaugaccagagu

SEQ ID NO: 1685833 - RNA, 19 nt, Artificial Sequence
  Description of Artificial Sequence: Synthetic oligonucleotide
auagcucauuugaucuuca

SEQ ID NO: 1685834 - RNA, 19 nt, Artificial Sequence
  Description of Artificial Sequence: Synthetic oligonucleotide
caccgagauuugacugacg

SEQ ID NO: 1685835 - RNA, 19 nt, Artificial Sequence
  Description of Artificial Sequence: Synthetic oligonucleotide
cagucgacgcgccgaacug

SEQ ID NO: 1685836 - RNA, 19 nt, Artificial Sequence
  Description of Artificial Sequence: Synthetic oligonucleotide
gacacgggagccgcugccc

SEQ ID NO: 1685837 - RNA, 19 nt, Artificial Sequence
  Description of Artificial Sequence: Synthetic oligonucleotide
cuggacagucgacgcgccg

SEQ ID NO: 1685838 - RNA, 19 nt, Artificial Sequence
  Description of Artificial Sequence: Synthetic oligonucleotide
ccuuguuccaggcauggca

SEQ ID NO: 1685839 - RNA, 19 nt, Artificial Sequence
  Description of Artificial Sequence: Synthetic oligonucleotide
cugugguaggccauagucu

SEQ ID NO: 1685840 - RNA, 19 nt, Artificial Sequence
  Description of Artificial Sequence: Synthetic oligonucleotide
uuccacgugcggcccuuca

SEQ ID NO: 1685841 - RNA, 19 nt, Artificial Sequence
  Description of Artificial Sequence: Synthetic oligonucleotide
gacugacgcuguucuugug

SEQ ID NO: 1685842 - RNA, 19 nt, Artificial Sequence
  Description of Artificial Sequence: Synthetic oligonucleotide
gcaacggccaucuucuugu

SEQ ID NO: 1685843 - RNA, 19 nt, Artificial Sequence
  Description of Artificial Sequence: Synthetic oligonucleotide
uggccaguaguggcaaggu

SEQ ID NO: 1685844 - RNA, 19 nt, Artificial Sequence
  Description of Artificial Sequence: Synthetic oligonucleotide
agaagauccugcacuugaa

SEQ ID NO: 1685845 - RNA, 19 nt, Artificial Sequence
  Description of Artificial Sequence: Synthetic oligonucleotide
gcgaguccaggccagcacc

SEQ ID NO: 1685846 - RNA, 19 nt, Artificial Sequence
  Description of Artificial Sequence: Synthetic oligonucleotide
ugcccguugugcuccuuaa

SEQ ID NO: 1685847 - RNA, 19 nt, Artificial Sequence
  Description of Artificial Sequence: Synthetic oligonucleotide
auucagcaaagcaacccuu

SEQ ID NO: 1685848 - RNA, 19 nt, Artificial Sequence
  Description of Artificial Sequence: Synthetic oligonucleotide
gcagacgccgugcacccag

SEQ ID NO: 1685849 - RNA, 19 nt, Artificial Sequence
  Description of Artificial Sequence: Synthetic oligonucleotide
cuccccaaaaggcaucuua

SEQ ID NO: 1685850 - RNA, 19 nt, Artificial Sequence
  Description of Artificial Sequence: Synthetic oligonucleotide
uccuuguuccaggcauggc

SEQ ID NO: 1685851 - RNA, 19 nt, Artificial Sequence
  Description of Artificial Sequence: Synthetic oligonucleotide
gccuguagugcagaacugc

SEQ ID NO: 1685852 - RNA, 19 nt, Artificial Sequence
  Description of Artificial Sequence: Synthetic oligonucleotide
ggcaagguuucagaggcca

SEQ ID NO: 1685853 - RNA, 19 nt, Artificial Sequence
  Description of Artificial Sequence: Synthetic oligonucleotide
ggccgagaagcagacgccg

SEQ ID NO: 1685854 - RNA, 19 nt, Artificial Sequence
  Description of Artificial Sequence: Synthetic oligonucleotide
ggcuuacccaagccacacg

SEQ ID NO: 1685855 - RNA, 19 nt, Artificial Sequence
  Description of Artificial Sequence: Synthetic oligonucleotide
guucucgggcugucaggcc

SEQ ID NO: 1685856 - RNA, 19 nt, Artificial Sequence
  Description of Artificial Sequence: Synthetic oligonucleotide
gacgccgugcacccagcca

SEQ ID NO: 1685857 - RNA, 19 nt, Artificial Sequence
  Description of Artificial Sequence: Synthetic oligonucleotide
gcucgguugauccgcagga

SEQ ID NO: 1685858 - RNA, 19 nt, Artificial Sequence
  Description of Artificial Sequence: Synthetic oligonucleotide
cugcugcucgacucaaaca

SEQ ID NO: 1685859 - RNA, 19 nt, Artificial Sequence
  Description of Artificial Sequence: Synthetic oligonucleotide
ccgcaggaugaccagagug

SEQ ID NO: 1685860 - RNA, 19 nt, Artificial Sequence
  Description of Artificial Sequence: Synthetic oligonucleotide
agcuccccaaaaggcaucu

SEQ ID NO: 1685861 - RNA, 19 nt, Artificial Sequence
  Description of Artificial Sequence: Synthetic oligonucleotide
acacgggagccgcugccca

SEQ ID NO: 1685862 - RNA, 19 nt, Artificial Sequence
  Description of Artificial Sequence: Synthetic oligonucleotide
agcacccguggaugcacca

SEQ ID NO: 1685863 - RNA, 19 nt, Artificial Sequence
  Description of Artificial Sequence: Synthetic oligonucleotide
gucgacgcgccgaacuggc

SEQ ID NO: 1685864 - RNA, 19 nt, Artificial Sequence
  Description of Artificial Sequence: Synthetic oligonucleotide
caccuccuugauauaggca

SEQ ID NO: 1685865 - RNA, 19 nt, Artificial Sequence
  Description of Artificial Sequence: Synthetic oligonucleotide
gcucaaaauaacagaugga

SEQ ID NO: 1685866 - RNA, 19 nt, Artificial Sequence
  Description of Artificial Sequence: Synthetic oligonucleotide
gguuucagaggccaggguu

SEQ ID NO: 1685867 - RNA, 19 nt, Artificial Sequence
  Description of Artificial Sequence: Synthetic oligonucleotide
acgugcggcccuucagugu

SEQ ID NO: 1685868 - RNA, 19 nt, Artificial Sequence
  Description of Artificial Sequence: Synthetic oligonucleotide
gagauuugacugacgcugu

SEQ ID NO: 1685869 - RNA, 19 nt, Artificial Sequence
  Description of Artificial Sequence: Synthetic oligonucleotide
gaagcugugguaggccaua

SEQ ID NO: 1685870 - RNA, 19 nt, Artificial Sequence
  Description of Artificial Sequence: Synthetic oligonucleotide
ucugugccgcaggucacaa

SEQ ID NO: 1685871 - RNA, 19 nt, Artificial Sequence
  Description of Artificial Sequence: Synthetic oligonucleotide
auggcuuacccaagccaca

SEQ ID NO: 1685872 - RNA, 19 nt, Artificial Sequence
  Description of Artificial Sequence: Synthetic oligonucleotide
ggaugagggugguauucca

SEQ ID NO: 1685873 - RNA, 19 nt, Artificial Sequence
  Description of Artificial Sequence: Synthetic oligonucleotide
cuuagagccccacggugua

SEQ ID NO: 1685874 - RNA, 19 nt, Artificial Sequence
  Description of Artificial Sequence: Synthetic oligonucleotide
gaagcguucucgggcuguc

SEQ ID NO: 1685875 - RNA, 19 nt, Artificial Sequence
  Description of Artificial Sequence: Synthetic oligonucleotide
caucuuagagccccacggu

SEQ ID NO: 1685876 - RNA, 19 nt, Artificial Sequence
  Description of Artificial Sequence: Synthetic oligonucleotide
gcguucucgggcugucagg

SEQ ID NO: 1685877 - RNA, 19 nt, Artificial Sequence
  Description of Artificial Sequence: Synthetic oligonucleotide
aagcguucucgggcuguca

SEQ ID NO: 1685878 - RNA, 19 nt, Artificial Sequence
  Description of Artificial Sequence: Synthetic oligonucleotide
accugucaccugcccguug

SEQ ID NO: 1685879 - RNA, 19 nt, Artificial Sequence
  Description of Artificial Sequence: Synthetic oligonucleotide
gccgcaggucacaaugcgg

SEQ ID NO: 1685880 - RNA, 19 nt, Artificial Sequence
  Description of Artificial Sequence: Synthetic oligonucleotide
gaugagggugguauuccau

SEQ ID NO: 1685881 - RNA, 19 nt, Artificial Sequence
  Description of Artificial Sequence: Synthetic oligonucleotide
cagcuccccaaaaggcauc

SEQ ID NO: 1685882 - RNA, 19 nt, Artificial Sequence
  Description of Artificial Sequence: Synthetic oligonucleotide
ucgacgcgccgaacuggcu

SEQ ID NO: 1685883 - RNA, 19 nt, Artificial Sequence
  Description of Artificial Sequence: Synthetic oligonucleotide
ccgcucuucucauagaugu

SEQ ID NO: 1685884 - RNA, 19 nt, Artificial Sequence
  Description of Artificial Sequence: Synthetic oligonucleotide
gguauuccauagcucauuu

SEQ ID NO: 1685885 - RNA, 19 nt, Artificial Sequence
  Description of Artificial Sequence: Synthetic oligonucleotide
gcgguuacucucaggggcc

SEQ ID NO: 1685886 - RNA, 19 nt, Artificial Sequence
  Description of Artificial Sequence: Synthetic oligonucleotide
cagacgccgugcacccagc

SEQ ID NO: 1685887 - RNA, 19 nt, Artificial Sequence
  Description of Artificial Sequence: Synthetic oligonucleotide
caggguugcaacggccauc

SEQ ID NO: 1685888 - RNA, 19 nt, Artificial Sequence
  Description of Artificial Sequence: Synthetic oligonucleotide
gcauuucggucugugccgc

SEQ ID NO: 1685889 - RNA, 19 nt, Artificial Sequence
  Description of Artificial Sequence: Synthetic oligonucleotide
gcagcuaggagcacguugu

SEQ ID NO: 1685890 - RNA, 19 nt, Artificial Sequence
  Description of Artificial Sequence: Synthetic oligonucleotide
ccgaacuggcucugagacc

SEQ ID NO: 1685891 - RNA, 19 nt, Artificial Sequence
  Description of Artificial Sequence: Synthetic oligonucleotide
cagagaagauccugcacuu

SEQ ID NO: 1685892 - RNA, 19 nt, Artificial Sequence
  Description of Artificial Sequence: Synthetic oligonucleotide
cccaccaaucauucuccug

SEQ ID NO: 1685893 - RNA, 19 nt, Artificial Sequence
  Description of Artificial Sequence: Synthetic oligonucleotide
cugcccacggcgaacuugu

SEQ ID NO: 1685894 - RNA, 19 nt, Artificial Sequence
  Description of Artificial Sequence: Synthetic oligonucleotide
caacggccaucuucuuguc

SEQ ID NO: 1685895 - RNA, 19 nt, Artificial Sequence
  Description of Artificial Sequence: Synthetic oligonucleotide
gagacccgcgcagcgccgc

SEQ ID NO: 1685896 - RNA, 19 nt, Artificial Sequence
  Description of Artificial Sequence: Synthetic oligonucleotide
cccuuuccccuuuucccag

SEQ ID NO: 1685897 - RNA, 19 nt, Artificial Sequence
  Description of Artificial Sequence: Synthetic oligonucleotide
gugcagaacugcgagcacu

SEQ ID NO: 1685898 - RNA, 19 nt, Artificial Sequence
  Description of Artificial Sequence: Synthetic oligonucleotide
gaagcagucguggcccgcu

SEQ ID NO: 1685899 - RNA, 19 nt, Artificial Sequence
  Description of Artificial Sequence: Synthetic oligonucleotide
ugcggcccuucagugucca

SEQ ID NO: 1685900 - RNA, 19 nt, Artificial Sequence
  Description of Artificial Sequence: Synthetic oligonucleotide
ggccgcggacucuggacag

SEQ ID NO: 1685901 - RNA, 19 nt, Artificial Sequence
  Description of Artificial Sequence: Synthetic oligonucleotide
uccaggcauggcagcugau

SEQ ID NO: 1685902 - RNA, 19 nt, Artificial Sequence
  Description of Artificial Sequence: Synthetic oligonucleotide
cagcaucugccaggcacac

SEQ ID NO: 1685903 - RNA, 19 nt, Artificial Sequence
  Description of Artificial Sequence: Synthetic oligonucleotide
guguucgguccuuguucca

SEQ ID NO: 1685904 - RNA, 19 nt, Artificial Sequence
  Description of Artificial Sequence: Synthetic oligonucleotide
guuccacuuggcaccgcuc

SEQ ID NO: 1685905 - RNA, 19 nt, Artificial Sequence
  Description of Artificial Sequence: Synthetic oligonucleotide
ucggucugugccgcagguc

SEQ ID NO: 1685906 - RNA, 19 nt, Artificial Sequence
  Description of Artificial Sequence: Synthetic oligonucleotide
gcugccacuagacuauuuu

SEQ ID NO: 1685907 - RNA, 19 nt, Artificial Sequence
  Description of Artificial Sequence: Synthetic oligonucleotide
ugggcacauccagccggcc

SEQ ID NO: 1685908 - RNA, 19 nt, Artificial Sequence
  Description of Artificial Sequence: Synthetic oligonucleotide
cacggcgaacuuguucuca

SEQ ID NO: 1685909 - RNA, 19 nt, Artificial Sequence
  Description of Artificial Sequence: Synthetic oligonucleotide
gcaacccuuggccucccca

SEQ ID NO: 1685910 - RNA, 19 nt, Artificial Sequence
  Description of Artificial Sequence: Synthetic oligonucleotide
ucgggcugucaggccacgc

SEQ ID NO: 1685911 - RNA, 19 nt, Artificial Sequence
  Description of Artificial Sequence: Synthetic oligonucleotide
gacagucgacgcgccgaac

SEQ ID NO: 1685912 - RNA, 19 nt, Artificial Sequence
  Description of Artificial Sequence: Synthetic oligonucleotide
cacggcucccacuggccga

SEQ ID NO: 1685913 - RNA, 19 nt, Artificial Sequence
  Description of Artificial Sequence: Synthetic oligonucleotide
gcccguugugcuccuuaag

SEQ ID NO: 1685914 - RNA, 19 nt, Artificial Sequence
  Description of Artificial Sequence: Synthetic oligonucleotide
ccguggaugcaccacccuc

SEQ ID NO: 1685915 - RNA, 19 nt, Artificial Sequence
  Description of Artificial Sequence: Synthetic oligonucleotide
cugcagcacugucauaggu

SEQ ID NO: 1685916 - RNA, 19 nt, Artificial Sequence
  Description of Artificial Sequence: Synthetic oligonucleotide
cguggaugcaccacccuca

SEQ ID NO: 1685917 - RNA, 19 nt, Artificial Sequence
  Description of Artificial Sequence: Synthetic oligonucleotide
cauuucggucugugccgca

SEQ ID NO: 1685918 - RNA, 19 nt, Artificial Sequence
  Description of Artificial Sequence: Synthetic oligonucleotide
uugucuccucggggcucgg

SEQ ID NO: 1685919 - RNA, 19 nt, Artificial Sequence
  Description of Artificial Sequence: Synthetic oligonucleotide
ugcgagcacuuggccuugc

SEQ ID NO: 1685920 - RNA, 19 nt, Artificial Sequence
  Description of Artificial Sequence: Synthetic oligonucleotide
ccccaaaaggcaucuuaga

SEQ ID NO: 1685921 - RNA, 19 nt, Artificial Sequence
  Description of Artificial Sequence: Synthetic oligonucleotide
uugcaacggccaucuucuu

SEQ ID NO: 1685922 - RNA, 19 nt, Artificial Sequence
  Description of Artificial Sequence: Synthetic oligonucleotide
gcgccgaacuggcucugag

SEQ ID NO: 1685923 - RNA, 19 nt, Artificial Sequence
  Description of Artificial Sequence: Synthetic oligonucleotide
gccaguaguggcaagguuu

SEQ ID NO: 1685924 - RNA, 19 nt, Artificial Sequence
  Description of Artificial Sequence: Synthetic oligonucleotide
cccagcgcacacagcgugc

SEQ ID NO: 1685925 - RNA, 19 nt, Artificial Sequence
  Description of Artificial Sequence: Synthetic oligonucleotide
gcccgcugccacuagacua

SEQ ID NO: 1685926 - RNA, 19 nt, Artificial Sequence
  Description of Artificial Sequence: Synthetic oligonucleotide
cucgggcugucaggccacg

SEQ ID NO: 1685927 - RNA, 19 nt, Artificial Sequence
  Description of Artificial Sequence: Synthetic oligonucleotide
cgagguucuggaagcguuc

SEQ ID NO: 1685928 - RNA, 19 nt, Artificial Sequence
  Description of Artificial Sequence: Synthetic oligonucleotide
agaugacacgggagccgcu

SEQ ID NO: 1685929 - RNA, 19 nt, Artificial Sequence
  Description of Artificial Sequence: Synthetic oligonucleotide
ccacuagacuauuuucugu

SEQ ID NO: 1685930 - RNA, 19 nt, Artificial Sequence
  Description of Artificial Sequence: Synthetic oligonucleotide
gcucugagacccgcgcagc

SEQ ID NO: 1685931 - RNA, 19 nt, Artificial Sequence
  Description of Artificial Sequence: Synthetic oligonucleotide
agacccgcgcagcgccgca

SEQ ID NO: 1685932 - RNA, 19 nt, Artificial Sequence
  Description of Artificial Sequence: Synthetic oligonucleotide
gcaggucacaaugcgguua

SEQ ID NO: 1685933 - RNA, 19 nt, Artificial Sequence
  Description of Artificial Sequence: Synthetic oligonucleotide
cagcacugucauagguaaa

SEQ ID NO: 1685934 - RNA, 19 nt, Artificial Sequence
  Description of Artificial Sequence: Synthetic oligonucleotide
gcgagcacuuggccuugcc

SEQ ID NO: 1685935 - RNA, 19 nt, Artificial Sequence
  Description of Artificial Sequence: Synthetic oligonucleotide
ggcacacggugcugucaug

SEQ ID NO: 1685936 - RNA, 19 nt, Artificial Sequence
  Description of Artificial Sequence: Synthetic oligonucleotide
ugugcaccucaugguuguu

SEQ ID NO: 1685937 - RNA, 19 nt, Artificial Sequence
  Description of Artificial Sequence: Synthetic oligonucleotide
cugcgagcacuuggccuug

SEQ ID NO: 1685938 - RNA, 19 nt, Artificial Sequence
  Description of Artificial Sequence: Synthetic oligonucleotide
ggacagucgacgcgccgaa

SEQ ID NO: 1685939 - RNA, 19 nt, Artificial Sequence
  Description of Artificial Sequence: Synthetic oligonucleotide
ggugccagucgaggcugag

SEQ ID NO: 1685940 - RNA, 19 nt, Artificial Sequence
  Description of Artificial Sequence: Synthetic oligonucleotide
aggccacgcugggagcucu

SEQ ID NO: 1685941 - RNA, 19 nt, Artificial Sequence
  Description of Artificial Sequence: Synthetic oligonucleotide
gcagaacugcgagcacuug

SEQ ID NO: 1685942 - RNA, 19 nt, Artificial Sequence
  Description of Artificial Sequence: Synthetic oligonucleotide
agccgcugcccacggcgaa

SEQ ID NO: 1685943 - RNA, 19 nt, Artificial Sequence
  Description of Artificial Sequence: Synthetic oligonucleotide
cccuagaagcauucagcaa

SEQ ID NO: 1685944 - RNA, 19 nt, Artificial Sequence
  Description of Artificial Sequence: Synthetic oligonucleotide
gucgagguucuggaagcgu

SEQ ID NO: 1685945 - RNA, 19 nt, Artificial Sequence
  Description of Artificial Sequence: Synthetic oligonucleotide
cacacccaccaaucauucu

SEQ ID NO: 1685946 - RNA, 19 nt, Artificial Sequence
  Description of Artificial Sequence: Synthetic oligonucleotide
gcugagcaccgagauuuga

SEQ ID NO: 1685947 - RNA, 19 nt, Artificial Sequence
  Description of Artificial Sequence: Synthetic oligonucleotide
caguaguggcaagguuuca

SEQ ID NO: 1685948 - RNA, 19 nt, Artificial Sequence
  Description of Artificial Sequence: Synthetic oligonucleotide
cagccccuuuccccuuuuc

SEQ ID NO: 1685949 - RNA, 19 nt, Artificial Sequence
  Description of Artificial Sequence: Synthetic oligonucleotide
cugcccguugugcuccuua

SEQ ID NO: 1685950 - RNA, 19 nt, Artificial Sequence
  Description of Artificial Sequence: Synthetic oligonucleotide
cgguguaggcgcuggccgc

SEQ ID NO: 1685951 - RNA, 19 nt, Artificial Sequence
  Description of Artificial Sequence: Synthetic oligonucleotide
ggcacccuagaagcauuca

SEQ ID NO: 1685952 - RNA, 19 nt, Artificial Sequence
  Description of Artificial Sequence: Synthetic oligonucleotide
cagcgaguccaggccagca

SEQ ID NO: 1685953 - RNA, 19 nt, Artificial Sequence
  Description of Artificial Sequence: Synthetic oligonucleotide
ccggccgcggacucuggac

SEQ ID NO: 1685954 - RNA, 19 nt, Artificial Sequence
  Description of Artificial Sequence: Synthetic oligonucleotide
cgacgcgccgaacuggcuc

SEQ ID NO: 1685955 - RNA, 19 nt, Artificial Sequence
  Description of Artificial Sequence: Synthetic oligonucleotide
cuggcacccuagaagcauu

SEQ ID NO: 1685956 - RNA, 19 nt, Artificial Sequence
  Description of Artificial Sequence: Synthetic oligonucleotide
agcagacgccgugcaccca

SEQ ID NO: 1685957 - RNA, 19 nt, Artificial Sequence
  Description of Artificial Sequence: Synthetic oligonucleotide
gguuacucucaggggccca

SEQ ID NO: 1685958 - RNA, 19 nt, Artificial Sequence
  Description of Artificial Sequence: Synthetic oligonucleotide
caguggagcggaugggcuu

SEQ ID NO: 1685959 - RNA, 19 nt, Artificial Sequence
  Description of Artificial Sequence: Synthetic oligonucleotide
uggccuccccagccccuuu

SEQ ID NO: 1685960 - RNA, 19 nt, Artificial Sequence
  Description of Artificial Sequence: Synthetic oligonucleotide
gcaccgcucuucucauaga

SEQ ID NO: 1685961 - RNA, 19 nt, Artificial Sequence
  Description of Artificial Sequence: Synthetic oligonucleotide
caggccacgcugggagcuc

SEQ ID NO: 1685962 - RNA, 19 nt, Artificial Sequence
  Description of Artificial Sequence: Synthetic oligonucleotide
cuuccacgugcggcccuuc

SEQ ID NO: 1685963 - RNA, 19 nt, Artificial Sequence
  Description of Artificial Sequence: Synthetic oligonucleotide
gcacccguggaugcaccac

SEQ ID NO: 1685964 - RNA, 19 nt, Artificial Sequence
  Description of Artificial Sequence: Synthetic oligonucleotide
cggccaucuucuugucagc

SEQ ID NO: 1685965 - RNA, 19 nt, Artificial Sequence
  Description of Artificial Sequence: Synthetic oligonucleotide
gcgaucuguguucgguccu

SEQ ID NO: 1685966 - RNA, 19 nt, Artificial Sequence
  Description of Artificial Sequence: Synthetic oligonucleotide
cacagcgugcagcucgguu

SEQ ID NO: 1685967 - RNA, 19 nt, Artificial Sequence
  Description of Artificial Sequence: Synthetic oligonucleotide
ccgcugagcaccgagauuu

SEQ ID NO: 1685968 - RNA, 19 nt, Artificial Sequence
  Description of Artificial Sequence: Synthetic oligonucleotide
ccacggcgaacuuguucuc

SEQ ID NO: 1685969 - RNA, 19 nt, Artificial Sequence
  Description of Artificial Sequence: Synthetic oligonucleotide
cugggaugagggugguauu

SEQ ID NO: 1685970 - RNA, 19 nt, Artificial Sequence
  Description of Artificial Sequence: Synthetic oligonucleotide
ccacgguguaggcgcuggc

SEQ ID NO: 1685971 - RNA, 19 nt, Artificial Sequence
  Description of Artificial Sequence: Synthetic oligonucleotide
guguaggcgcuggccgcuc

SEQ ID NO: 1685972 - RNA, 19 nt, Artificial Sequence
  Description of Artificial Sequence: Synthetic oligonucleotide
ggaagcguucucgggcugu

SEQ ID NO: 1685973 - RNA, 19 nt, Artificial Sequence
  Description of Artificial Sequence: Synthetic oligonucleotide
acgcgccgaacuggcucug

SEQ ID NO: 1685974 - RNA, 19 nt, Artificial Sequence
  Description of Artificial Sequence: Synthetic oligonucleotide
gcgcuggccgcuccuccac

SEQ ID NO: 1685975 - RNA, 19 nt, Artificial Sequence
  Description of Artificial Sequence: Synthetic oligonucleotide
gguguaggcgcuggccgcu

SEQ ID NO: 1685976 - RNA, 19 nt, Artificial Sequence
  Description of Artificial Sequence: Synthetic oligonucleotide
ccagcgcacacagcgugca

SEQ ID NO: 1685977 - RNA, 19 nt, Artificial Sequence
  Description of Artificial Sequence: Synthetic oligonucleotide
cccgcugccacuagacuau

SEQ ID NO: 1685978 - RNA, 19 nt, Artificial Sequence
  Description of Artificial Sequence: Synthetic oligonucleotide
cucgguugauccgcaggau

SEQ ID NO: 1685979 - RNA, 19 nt, Artificial Sequence
  Description of Artificial Sequence: Synthetic oligonucleotide
cgcugagcaccgagauuug

SEQ ID NO: 1685980 - RNA, 19 nt, Artificial Sequence
  Description of Artificial Sequence: Synthetic oligonucleotide
ccauagcucauuugaucuu

SEQ ID NO: 1685981 - RNA, 19 nt, Artificial Sequence
  Description of Artificial Sequence: Synthetic oligonucleotide
ccacgugcggcccuucagu

SEQ ID NO: 1685982 - RNA, 19 nt, Artificial Sequence
  Description of Artificial Sequence: Synthetic oligonucleotide
ggccaguaguggcaagguu

SEQ ID NO: 1685983 - RNA, 19 nt, Artificial Sequence
  Description of Artificial Sequence: Synthetic oligonucleotide
cgccgaacuggcucugaga

SEQ ID NO: 1685984 - RNA, 19 nt, Artificial Sequence
  Description of Artificial Sequence: Synthetic oligonucleotide
cggcccuucaguguccaca

SEQ ID NO: 1685985 - RNA, 19 nt, Artificial Sequence
  Description of Artificial Sequence: Synthetic oligonucleotide
ggcccgcugccacuagacu

SEQ ID NO: 1685986 - RNA, 19 nt, Artificial Sequence
  Description of Artificial Sequence: Synthetic oligonucleotide
gccgagaagcagacgccgu

SEQ ID NO: 1685987 - RNA, 19 nt, Artificial Sequence
  Description of Artificial Sequence: Synthetic oligonucleotide
ccacaacugcugcucgacu

SEQ ID NO: 1685988 - RNA, 19 nt, Artificial Sequence
  Description of Artificial Sequence: Synthetic oligonucleotide
cggccgcggacucuggaca

SEQ ID NO: 1685989 - RNA, 19 nt, Artificial Sequence
  Description of Artificial Sequence: Synthetic oligonucleotide
gcggcccuucaguguccac

SEQ ID NO: 1685990 - RNA, 19 nt, Artificial Sequence
  Description of Artificial Sequence: Synthetic oligonucleotide
ccuccaccuccuugauaua

SEQ ID NO: 1685991 - RNA, 19 nt, Artificial Sequence
  Description of Artificial Sequence: Synthetic oligonucleotide
cgggcugucaggccacgcu

SEQ ID NO: 1685992 - RNA, 19 nt, Artificial Sequence
  Description of Artificial Sequence: Synthetic oligonucleotide
cgcuguucuugugcagcga

SEQ ID NO: 1685993 - RNA, 19 nt, Artificial Sequence
  Description of Artificial Sequence: Synthetic oligonucleotide
guggagcggaugggcuuuu

SEQ ID NO: 1685994 - RNA, 19 nt, Artificial Sequence
  Description of Artificial Sequence: Synthetic oligonucleotide
ccggccaccaaagcucaau

SEQ ID NO: 1685995 - RNA, 19 nt, Artificial Sequence
  Description of Artificial Sequence: Synthetic oligonucleotide
cgccgugcacccagccaca

SEQ ID NO: 1685996 - RNA, 19 nt, Artificial Sequence
  Description of Artificial Sequence: Synthetic oligonucleotide
cccguggaugcaccacccu

SEQ ID NO: 1685997 - RNA, 19 nt, Artificial Sequence
  Description of Artificial Sequence: Synthetic oligonucleotide
gcuuccacgugcggcccuu

SEQ ID NO: 1685998 - RNA, 19 nt, Artificial Sequence
  Description of Artificial Sequence: Synthetic oligonucleotide
gccggccaccaaagcucaa

SEQ ID NO: 1685999 - RNA, 19 nt, Artificial Sequence
  Description of Artificial Sequence: Synthetic oligonucleotide
cggggcucccggccgcgga

SEQ ID NO: 1686000 - RNA, 19 nt, Artificial Sequence
  Description of Artificial Sequence: Synthetic oligonucleotide
ggguugcaacggccaucuu

SEQ ID NO: 1686001 - RNA, 19 nt, Artificial Sequence
  Description of Artificial Sequence: Synthetic oligonucleotide
ccgcugccacuagacuauu

SEQ ID NO: 1686002 - RNA, 19 nt, Artificial Sequence
  Description of Artificial Sequence: Synthetic oligonucleotide
cgcugcccacggcgaacuu

SEQ ID NO: 1686003 - RNA, 19 nt, Artificial Sequence
  Description of Artificial Sequence: Synthetic oligonucleotide
aacucuuaacaauaggagc

SEQ ID NO: 1686004 - RNA, 19 nt, Artificial Sequence
  Description of Artificial Sequence: Synthetic oligonucleotide
ugauauucuauauugauuc

SEQ ID NO: 1686005 - RNA, 19 nt, Artificial Sequence
  Description of Artificial Sequence: Synthetic oligonucleotide
uguaaaguguuacaagaag

SEQ ID NO: 1686006 - RNA, 19 nt, Artificial Sequence
  Description of Artificial Sequence: Synthetic oligonucleotide
uaaaguguuacaagaagca

SEQ ID NO: 1686007 - RNA, 19 nt, Artificial Sequence
  Description of Artificial Sequence: Synthetic oligonucleotide
uccaugauagggcauacag

SEQ ID NO: 1686008 - RNA, 19 nt, Artificial Sequence
  Description of Artificial Sequence: Synthetic oligonucleotide
agaccuguugccuauaguc

SEQ ID NO: 1686009 - RNA, 19 nt, Artificial Sequence
  Description of Artificial Sequence: Synthetic oligonucleotide
agugaaaugccauuuucuc

SEQ ID NO: 1686010 - RNA, 19 nt, Artificial Sequence
  Description of Artificial Sequence: Synthetic oligonucleotide
ugagauuuccagcagagaa

SEQ ID NO: 1686011 - RNA, 19 nt, Artificial Sequence
  Description of Artificial Sequence: Synthetic oligonucleotide
ugggaugcaauucugauuc

SEQ ID NO: 1686012 - RNA, 19 nt, Artificial Sequence
  Description of Artificial Sequence: Synthetic oligonucleotide
uguuacaagaagcaucucu

SEQ ID NO: 1686013 - RNA, 19 nt, Artificial Sequence
  Description of Artificial Sequence: Synthetic oligonucleotide
aaauacuguccacuugaac

SEQ ID NO: 1686014 - RNA, 19 nt, Artificial Sequence
  Description of Artificial Sequence: Synthetic oligonucleotide
uuagggaacauccuaggca

SEQ ID NO: 1686015 - RNA, 19 nt, Artificial Sequence
  Description of Artificial Sequence: Synthetic oligonucleotide
cuauauugauucaggaugc

SEQ ID NO: 1686016 - RNA, 19 nt, Artificial Sequence
  Description of Artificial Sequence: Synthetic oligonucleotide
agggaaacugaccagaugu

SEQ ID NO: 1686017 - RNA, 19 nt, Artificial Sequence
  Description of Artificial Sequence: Synthetic oligonucleotide
auuaguuaccagcauacca

SEQ ID NO: 1686018 - RNA, 19 nt, Artificial Sequence
  Description of Artificial Sequence: Synthetic oligonucleotide
uuagguuuaugcaugggaa

SEQ ID NO: 1686019 - RNA, 19 nt, Artificial Sequence
  Description of Artificial Sequence: Synthetic oligonucleotide
ucuaggguaggaaaauccc

SEQ ID NO: 1686020 - RNA, 19 nt, Artificial Sequence
  Description of Artificial Sequence: Synthetic oligonucleotide
uguuuccaagccauaauug

SEQ ID NO: 1686021 - RNA, 19 nt, Artificial Sequence
  Description of Artificial Sequence: Synthetic oligonucleotide
caugauagggcauacagga

SEQ ID NO: 1686022 - RNA, 19 nt, Artificial Sequence
  Description of Artificial Sequence: Synthetic oligonucleotide
caacucuuaacaauaggag

SEQ ID NO: 1686023 - RNA, 19 nt, Artificial Sequence
  Description of Artificial Sequence: Synthetic oligonucleotide
aguaauuggguuugggaug

SEQ ID NO: 1686024 - RNA, 19 nt, Artificial Sequence
  Description of Artificial Sequence: Synthetic oligonucleotide
auaauuguacuugugcauc

SEQ ID NO: 1686025 - RNA, 19 nt, Artificial Sequence
  Description of Artificial Sequence: Synthetic oligonucleotide
guuauagagguacucuuag

SEQ ID NO: 1686026 - RNA, 19 nt, Artificial Sequence
  Description of Artificial Sequence: Synthetic oligonucleotide
gauggcucauucuuacugg

SEQ ID NO: 1686027 - RNA, 19 nt, Artificial Sequence
  Description of Artificial Sequence: Synthetic oligonucleotide
ugccgagucagcuugguag

SEQ ID NO: 1686028 - RNA, 19 nt, Artificial Sequence
  Description of Artificial Sequence: Synthetic oligonucleotide
agggguucaacucuuaaca

SEQ ID NO: 1686029 - RNA, 19 nt, Artificial Sequence
  Description of Artificial Sequence: Synthetic oligonucleotide
caugauggcgaauccaggg

SEQ ID NO: 1686030 - RNA, 19 nt, Artificial Sequence
  Description of Artificial Sequence: Synthetic oligonucleotide
uuauagagguacucuuagg

SEQ ID NO: 1686031 - RNA, 19 nt, Artificial Sequence
  Description of Artificial Sequence: Synthetic oligonucleotide
uccacuugaacagacuuag

SEQ ID NO: 1686032 - RNA, 19 nt, Artificial Sequence
  Description of Artificial Sequence: Synthetic oligonucleotide
uuccugcuaaguaauuggg

SEQ ID NO: 1686033 - RNA, 19 nt, Artificial Sequence
  Description of Artificial Sequence: Synthetic oligonucleotide
ucuugcaagggucuauuca

SEQ ID NO: 1686034 - RNA, 19 nt, Artificial Sequence
  Description of Artificial Sequence: Synthetic oligonucleotide
uuaacaauaggagcacugc

SEQ ID NO: 1686035 - RNA, 19 nt, Artificial Sequence
  Description of Artificial Sequence: Synthetic oligonucleotide
ugguggauaucuugcaagg

SEQ ID NO: 1686036 - RNA, 19 nt, Artificial Sequence
  Description of Artificial Sequence: Synthetic oligonucleotide
uuaucuauuuguccccuga

SEQ ID NO: 1686037 - RNA, 19 nt, Artificial Sequence
  Description of Artificial Sequence: Synthetic oligonucleotide
aauaggagcacugcagucu

SEQ ID NO: 1686038 - RNA, 19 nt, Artificial Sequence
  Description of Artificial Sequence: Synthetic oligonucleotide
uuccaagccauaauuguac

SEQ ID NO: 1686039 - RNA, 19 nt, Artificial Sequence
  Description of Artificial Sequence: Synthetic oligonucleotide
cuauuuguccccugaacag

SEQ ID NO: 1686040 - RNA, 19 nt, Artificial Sequence
  Description of Artificial Sequence: Synthetic oligonucleotide
uagaaaauccccuggcugu

SEQ ID NO: 1686041 - RNA, 19 nt, Artificial Sequence
  Description of Artificial Sequence: Synthetic oligonucleotide
uucaggaugcucuauugcu

SEQ ID NO: 1686042 - RNA, 19 nt, Artificial Sequence
  Description of Artificial Sequence: Synthetic oligonucleotide
cucuaggguaggaaaaucc

SEQ ID NO: 1686043 - RNA, 19 nt, Artificial Sequence
  Description of Artificial Sequence: Synthetic oligonucleotide
auauucuauauugauucag

SEQ ID NO: 1686044 - RNA, 19 nt, Artificial Sequence
  Description of Artificial Sequence: Synthetic oligonucleotide
ugaagcgcugcauuccagg

SEQ ID NO: 1686045 - RNA, 19 nt, Artificial Sequence
  Description of Artificial Sequence: Synthetic oligonucleotide
gaacauccuaggcacagcc

SEQ ID NO: 1686046 - RNA, 19 nt, Artificial Sequence
  Description of Artificial Sequence: Synthetic oligonucleotide
aguguuacaagaagcaucu

SEQ ID NO: 1686047 - RNA, 19 nt, Artificial Sequence
  Description of Artificial Sequence: Synthetic oligonucleotide
ggugggaucacaguuauag

SEQ ID NO: 1686048 - RNA, 19 nt, Artificial Sequence
  Description of Artificial Sequence: Synthetic oligonucleotide
caagaagcaucucugauca

SEQ ID NO: 1686049 - RNA, 19 nt, Artificial Sequence
  Description of Artificial Sequence: Synthetic oligonucleotide
ugucuauggugacuggcag

SEQ ID NO: 1686050 - RNA, 19 nt, Artificial Sequence
  Description of Artificial Sequence: Synthetic oligonucleotide
agaaucacucacugaguuc

SEQ ID NO: 1686051 - RNA, 19 nt, Artificial Sequence
  Description of Artificial Sequence: Synthetic oligonucleotide
accuguugccuauagucgg

SEQ ID NO: 1686052 - RNA, 19 nt, Artificial Sequence
  Description of Artificial Sequence: Synthetic oligonucleotide
gaugaggaggcucuggauc

SEQ ID NO: 1686053 - RNA, 19 nt, Artificial Sequence
  Description of Artificial Sequence: Synthetic oligonucleotide
aaccauggggcauuuggca

SEQ ID NO: 1686054 - RNA, 19 nt, Artificial Sequence
  Description of Artificial Sequence: Synthetic oligonucleotide
augauggcgaauccagggg

SEQ ID NO: 1686055 - RNA, 19 nt, Artificial Sequence
  Description of Artificial Sequence: Synthetic oligonucleotide
accaaagagggauguuggc

SEQ ID NO: 1686056 - RNA, 19 nt, Artificial Sequence
  Description of Artificial Sequence: Synthetic oligonucleotide
uggauaucuugcaaggguc

SEQ ID NO: 1686057 - RNA, 19 nt, Artificial Sequence
  Description of Artificial Sequence: Synthetic oligonucleotide
ucuuggaccaaagagggau

SEQ ID NO: 1686058 - RNA, 19 nt, Artificial Sequence
  Description of Artificial Sequence: Synthetic oligonucleotide
gacuuagguuuaugcaugg

SEQ ID NO: 1686059 - RNA, 19 nt, Artificial Sequence
  Description of Artificial Sequence: Synthetic oligonucleotide
aagggucuauucauuuggc

SEQ ID NO: 1686060 - RNA, 19 nt, Artificial Sequence
  Description of Artificial Sequence: Synthetic oligonucleotide
ucuacacacaggaaauguc

SEQ ID NO: 1686061 - RNA, 19 nt, Artificial Sequence
  Description of Artificial Sequence: Synthetic oligonucleotide
augucagaaucacucacug

SEQ ID NO: 1686062 - RNA, 19 nt, Artificial Sequence
  Description of Artificial Sequence: Synthetic oligonucleotide
agguuuaugcaugggaauc

SEQ ID NO: 1686063 - RNA, 19 nt, Artificial Sequence
  Description of Artificial Sequence: Synthetic oligonucleotide
uuacaagaagcaucucuga

SEQ ID NO: 1686064 - RNA, 19 nt, Artificial Sequence
  Description of Artificial Sequence: Synthetic oligonucleotide
gaccaaagagggauguugg

SEQ ID NO: 1686065 - RNA, 19 nt, Artificial Sequence
  Description of Artificial Sequence: Synthetic oligonucleotide
uuuccaagccauaauugua

SEQ ID NO: 1686066 - RNA, 19 nt, Artificial Sequence
  Description of Artificial Sequence: Synthetic oligonucleotide
aaagagggauguuggcucu

SEQ ID NO: 1686067 - RNA, 19 nt, Artificial Sequence
  Description of Artificial Sequence: Synthetic oligonucleotide
gauagggcauacaggaacc

SEQ ID NO: 1686068 - RNA, 19 nt, Artificial Sequence
  Description of Artificial Sequence: Synthetic oligonucleotide
ugcuaaguaauuggguuug

SEQ ID NO: 1686069 - RNA, 19 nt, Artificial Sequence
  Description of Artificial Sequence: Synthetic oligonucleotide
agcgcugcauuccaggcag

SEQ ID NO: 1686070 - RNA, 19 nt, Artificial Sequence
  Description of Artificial Sequence: Synthetic oligonucleotide
aguucaggugccucaagug

SEQ ID NO: 1686071 - RNA, 19 nt, Artificial Sequence
  Description of Artificial Sequence: Synthetic oligonucleotide
cuuagggaacauccuaggc

SEQ ID NO: 1686072 - RNA, 19 nt, Artificial Sequence
  Description of Artificial Sequence: Synthetic oligonucleotide
aaaguguuacaagaagcau

SEQ ID NO: 1686073 - RNA, 19 nt, Artificial Sequence
  Description of Artificial Sequence: Synthetic oligonucleotide
cucuuaucuauuugucccc

SEQ ID NO: 1686074 - RNA, 19 nt, Artificial Sequence
  Description of Artificial Sequence: Synthetic oligonucleotide
ggaaggauguaccuggccc

SEQ ID NO: 1686075 - RNA, 19 nt, Artificial Sequence
  Description of Artificial Sequence: Synthetic oligonucleotide
aucugguaaaucuuugaaa

SEQ ID NO: 1686076 - RNA, 19 nt, Artificial Sequence
  Description of Artificial Sequence: Synthetic oligonucleotide
gagaaauacuguccacuug

SEQ ID NO: 1686077 - RNA, 19 nt, Artificial Sequence
  Description of Artificial Sequence: Synthetic oligonucleotide
ucucugaucacaucccauc

SEQ ID NO: 1686078 - RNA, 19 nt, Artificial Sequence
  Description of Artificial Sequence: Synthetic oligonucleotide
caguggaucuccuuaguac

SEQ ID NO: 1686079 - RNA, 19 nt, Artificial Sequence
  Description of Artificial Sequence: Synthetic oligonucleotide
auggcucauucuuacuggg

SEQ ID NO: 1686080 - RNA, 19 nt, Artificial Sequence
  Description of Artificial Sequence: Synthetic oligonucleotide
uauagucgggcucuguuuu

SEQ ID NO: 1686081 - RNA, 19 nt, Artificial Sequence
  Description of Artificial Sequence: Synthetic oligonucleotide
uugugcaucucccucucga

SEQ ID NO: 1686082 - RNA, 19 nt, Artificial Sequence
  Description of Artificial Sequence: Synthetic oligonucleotide
agaggagcuuguucccugc

SEQ ID NO: 1686083 - RNA, 19 nt, Artificial Sequence
  Description of Artificial Sequence: Synthetic oligonucleotide
ugcugugggcauuaguuac

SEQ ID NO: 1686084 - RNA, 19 nt, Artificial Sequence
  Description of Artificial Sequence: Synthetic oligonucleotide
cucaucuacacacaggaaa

SEQ ID NO: 1686085 - RNA, 19 nt, Artificial Sequence
  Description of Artificial Sequence: Synthetic oligonucleotide
ugggaauccucugauauuc

SEQ ID NO: 1686086 - RNA, 19 nt, Artificial Sequence
  Description of Artificial Sequence: Synthetic oligonucleotide
cucuauugcucaucuacac

SEQ ID NO: 1686087 - RNA, 19 nt, Artificial Sequence
  Description of Artificial Sequence: Synthetic oligonucleotide
ugugaagcgcugcauucca

SEQ ID NO: 1686088 - RNA, 19 nt, Artificial Sequence
  Description of Artificial Sequence: Synthetic oligonucleotide
guaauuggguuugggaugc

SEQ ID NO: 1686089 - RNA, 19 nt, Artificial Sequence
  Description of Artificial Sequence: Synthetic oligonucleotide
acaguuauagagguacucu

SEQ ID NO: 1686090 - RNA, 19 nt, Artificial Sequence
  Description of Artificial Sequence: Synthetic oligonucleotide
ccucugauauucuauauug

SEQ ID NO: 1686091 - RNA, 19 nt, Artificial Sequence
  Description of Artificial Sequence: Synthetic oligonucleotide
cuccauugcucuuuccugc

SEQ ID NO: 1686092 - RNA, 19 nt, Artificial Sequence
  Description of Artificial Sequence: Synthetic oligonucleotide
uauugcucaucuacacaca

SEQ ID NO: 1686093 - RNA, 19 nt, Artificial Sequence
  Description of Artificial Sequence: Synthetic oligonucleotide
cuaaguaauuggguuuggg

SEQ ID NO: 1686094 - RNA, 19 nt, Artificial Sequence
  Description of Artificial Sequence: Synthetic oligonucleotide
uaguuaccagcauaccaug

SEQ ID NO: 1686095 - RNA, 19 nt, Artificial Sequence
  Description of Artificial Sequence: Synthetic oligonucleotide
acugaguucuguaaagugu

SEQ ID NO: 1686096 - RNA, 19 nt, Artificial Sequence
  Description of Artificial Sequence: Synthetic oligonucleotide
ucaggugccucaagugugc

SEQ ID NO: 1686097 - RNA, 19 nt, Artificial Sequence
  Description of Artificial Sequence: Synthetic oligonucleotide
aagaagcaucucugaucac

SEQ ID NO: 1686098 - RNA, 19 nt, Artificial Sequence
  Description of Artificial Sequence: Synthetic oligonucleotide
acugagauuuccagcagag

SEQ ID NO: 1686099 - RNA, 19 nt, Artificial Sequence
  Description of Artificial Sequence: Synthetic oligonucleotide
gaaucacucacugaguucu

SEQ ID NO: 1686100 - RNA, 19 nt, Artificial Sequence
  Description of Artificial Sequence: Synthetic oligonucleotide
aggguaggaaaaucccauc

SEQ ID NO: 1686101 - RNA, 19 nt, Artificial Sequence
  Description of Artificial Sequence: Synthetic oligonucleotide
uaucuauuuguccccugaa

SEQ ID NO: 1686102 - RNA, 19 nt, Artificial Sequence
  Description of Artificial Sequence: Synthetic oligonucleotide
agagguacucuuagggaac

SEQ ID NO: 1686103 - RNA, 19 nt, Artificial Sequence
  Description of Artificial Sequence: Synthetic oligonucleotide
ucgggcucuguuuucaggu

SEQ ID NO: 1686104 - RNA, 19 nt, Artificial Sequence
  Description of Artificial Sequence: Synthetic oligonucleotide
aagcagcuagcucuagggu

SEQ ID NO: 1686105 - RNA, 19 nt, Artificial Sequence
  Description of Artificial Sequence: Synthetic oligonucleotide
ugauucaggaugcucuauu

SEQ ID NO: 1686106 - RNA, 19 nt, Artificial Sequence
  Description of Artificial Sequence: Synthetic oligonucleotide
uccucugauauucuauauu

SEQ ID NO: 1686107 - RNA, 19 nt, Artificial Sequence
  Description of Artificial Sequence: Synthetic oligonucleotide
uugaacagacuuagguuua

SEQ ID NO: 1686108 - RNA, 19 nt, Artificial Sequence
  Description of Artificial Sequence: Synthetic oligonucleotide
gggaucacaguuauagagg

SEQ ID NO: 1686109 - RNA, 19 nt, Artificial Sequence
  Description of Artificial Sequence: Synthetic oligonucleotide
cauggggugucuaugguga

SEQ ID NO: 1686110 - RNA, 19 nt, Artificial Sequence
  Description of Artificial Sequence: Synthetic oligonucleotide
ggauggcucauucuuacug

SEQ ID NO: 1686111 - RNA, 19 nt, Artificial Sequence
  Description of Artificial Sequence: Synthetic oligonucleotide
uagguuuaugcaugggaau

SEQ ID NO: 1686112 - RNA, 19 nt, Artificial Sequence
  Description of Artificial Sequence: Synthetic oligonucleotide
gguaaaucuuugaaagaag

SEQ ID NO: 1686113 - RNA, 19 nt, Artificial Sequence
  Description of Artificial Sequence: Synthetic oligonucleotide
aucacccaaggacugagau

SEQ ID NO: 1686114 - RNA, 19 nt, Artificial Sequence
  Description of Artificial Sequence: Synthetic oligonucleotide
cucacuguggccccgcaug

SEQ ID NO: 1686115 - RNA, 19 nt, Artificial Sequence
  Description of Artificial Sequence: Synthetic oligonucleotide
auugcucuuuccugcuaag

SEQ ID NO: 1686116 - RNA, 19 nt, Artificial Sequence
  Description of Artificial Sequence: Synthetic oligonucleotide
uagcucuaggguaggaaaa

SEQ ID NO: 1686117 - RNA, 19 nt, Artificial Sequence
  Description of Artificial Sequence: Synthetic oligonucleotide
uguggauggcucauucuua

SEQ ID NO: 1686118 - RNA, 19 nt, Artificial Sequence
  Description of Artificial Sequence: Synthetic oligonucleotide
ccuuaguacaugcuucugg

SEQ ID NO: 1686119 - RNA, 19 nt, Artificial Sequence
  Description of Artificial Sequence: Synthetic oligonucleotide
gaaccauggggcauuuggc

SEQ ID NO: 1686120 - RNA, 19 nt, Artificial Sequence
  Description of Artificial Sequence: Synthetic oligonucleotide
gacagguggaaggauguac

SEQ ID NO: 1686121 - RNA, 19 nt, Artificial Sequence
  Description of Artificial Sequence: Synthetic oligonucleotide
uuaguacaugcuucugguc

SEQ ID NO: 1686122 - RNA, 19 nt, Artificial Sequence
  Description of Artificial Sequence: Synthetic oligonucleotide
gacugagauuuccagcaga

SEQ ID NO: 1686123 - RNA, 19 nt, Artificial Sequence
  Description of Artificial Sequence: Synthetic oligonucleotide
aggagaucaggaccaccuc

SEQ ID NO: 1686124 - RNA, 19 nt, Artificial Sequence
  Description of Artificial Sequence: Synthetic oligonucleotide
uggcucuuaucuauuuguc

SEQ ID NO: 1686125 - RNA, 19 nt, Artificial Sequence
  Description of Artificial Sequence: Synthetic oligonucleotide
cuuacugggcugccgaguc

SEQ ID NO: 1686126 - RNA, 19 nt, Artificial Sequence
  Description of Artificial Sequence: Synthetic oligonucleotide
cagggguucaacucuuaac

SEQ ID NO: 1686127 - RNA, 19 nt, Artificial Sequence
  Description of Artificial Sequence: Synthetic oligonucleotide
uggcucauucuuacugggc

SEQ ID NO: 1686128 - RNA, 19 nt, Artificial Sequence
  Description of Artificial Sequence: Synthetic oligonucleotide
ggaucuccuuaguacaugc

SEQ ID NO: 1686129 - RNA, 19 nt, Artificial Sequence
  Description of Artificial Sequence: Synthetic oligonucleotide
cuuaguacaugcuucuggu

SEQ ID NO: 1686130 - RNA, 19 nt, Artificial Sequence
  Description of Artificial Sequence: Synthetic oligonucleotide
uugggugggaucacaguua

SEQ ID NO: 1686131 - RNA, 19 nt, Artificial Sequence
  Description of Artificial Sequence: Synthetic oligonucleotide
uugccuauagucgggcucu

SEQ ID NO: 1686132 - RNA, 19 nt, Artificial Sequence
  Description of Artificial Sequence: Synthetic oligonucleotide
cauuaguuaccagcauacc

SEQ ID NO: 1686133 - RNA, 19 nt, Artificial Sequence
  Description of Artificial Sequence: Synthetic oligonucleotide
ugaacaugcccuggcuucc

SEQ ID NO: 1686134 - RNA, 19 nt, Artificial Sequence
  Description of Artificial Sequence: Synthetic oligonucleotide
uucuuacugggcugccgag

SEQ ID NO: 1686135 - RNA, 19 nt, Artificial Sequence
  Description of Artificial Sequence: Synthetic oligonucleotide
cuuggaccaaagagggaug

SEQ ID NO: 1686136 - RNA, 19 nt, Artificial Sequence
  Description of Artificial Sequence: Synthetic oligonucleotide
cuagcucuaggguaggaaa

SEQ ID NO: 1686137 - RNA, 19 nt, Artificial Sequence
  Description of Artificial Sequence: Synthetic oligonucleotide
guugccuauagucgggcuc

SEQ ID NO: 1686138 - RNA, 19 nt, Artificial Sequence
  Description of Artificial Sequence: Synthetic oligonucleotide
cuguaaaguguuacaagaa

SEQ ID NO: 1686139 - RNA, 19 nt, Artificial Sequence
  Description of Artificial Sequence: Synthetic oligonucleotide
uggccccgcaugaagaggu

SEQ ID NO: 1686140 - RNA, 19 nt, Artificial Sequence
  Description of Artificial Sequence: Synthetic oligonucleotide
cuuaucuauuuguccccug

SEQ ID NO: 1686141 - RNA, 19 nt, Artificial Sequence
  Description of Artificial Sequence: Synthetic oligonucleotide
ugaccuccugacuucucug

SEQ ID NO: 1686142 - RNA, 19 nt, Artificial Sequence
  Description of Artificial Sequence: Synthetic oligonucleotide
ccaugauagggcauacagg

SEQ ID NO: 1686143 - RNA, 19 nt, Artificial Sequence
  Description of Artificial Sequence: Synthetic oligonucleotide
uccauugcucuuuccugcu

SEQ ID NO: 1686144 - RNA, 19 nt, Artificial Sequence
  Description of Artificial Sequence: Synthetic oligonucleotide
cugcaguaggcaccagugg

SEQ ID NO: 1686145 - RNA, 19 nt, Artificial Sequence
  Description of Artificial Sequence: Synthetic oligonucleotide
gguuuaugcaugggaaucc

SEQ ID NO: 1686146 - RNA, 19 nt, Artificial Sequence
  Description of Artificial Sequence: Synthetic oligonucleotide
guacuugugcaucucccuc

SEQ ID NO: 1686147 - RNA, 19 nt, Artificial Sequence
  Description of Artificial Sequence: Synthetic oligonucleotide
ggaccaaagagggauguug

SEQ ID NO: 1686148 - RNA, 19 nt, Artificial Sequence
  Description of Artificial Sequence: Synthetic oligonucleotide
ugguguuuccaagccauaa

SEQ ID NO: 1686149 - RNA, 19 nt, Artificial Sequence
  Description of Artificial Sequence: Synthetic oligonucleotide
guggauaucuugcaagggu

SEQ ID NO: 1686150 - RNA, 19 nt, Artificial Sequence
  Description of Artificial Sequence: Synthetic oligonucleotide
caugcccuggcuuccauga

SEQ ID NO: 1686151 - RNA, 19 nt, Artificial Sequence
  Description of Artificial Sequence: Synthetic oligonucleotide
cauucuuacugggcugccg

SEQ ID NO: 1686152 - RNA, 19 nt, Artificial Sequence
  Description of Artificial Sequence: Synthetic oligonucleotide
guagugaccuccugacuuc

SEQ ID NO: 1686153 - RNA, 19 nt, Artificial Sequence
  Description of Artificial Sequence: Synthetic oligonucleotide
cacaguuauagagguacuc

SEQ ID NO: 1686154 - RNA, 19 nt, Artificial Sequence
  Description of Artificial Sequence: Synthetic oligonucleotide
aauuggguuugggaugcaa

SEQ ID NO: 1686155 - RNA, 19 nt, Artificial Sequence
  Description of Artificial Sequence: Synthetic oligonucleotide
caccagugggaugaucugg

SEQ ID NO: 1686156 - RNA, 19 nt, Artificial Sequence
  Description of Artificial Sequence: Synthetic oligonucleotide
aguuauagagguacucuua

SEQ ID NO: 1686157 - RNA, 19 nt, Artificial Sequence
  Description of Artificial Sequence: Synthetic oligonucleotide
ugcauccucuguagaaaau

SEQ ID NO: 1686158 - RNA, 19 nt, Artificial Sequence
  Description of Artificial Sequence: Synthetic oligonucleotide
aagagggauguuggcucuc

SEQ ID NO: 1686159 - RNA, 19 nt, Artificial Sequence
  Description of Artificial Sequence: Synthetic oligonucleotide
gguggauaucuugcaaggg

SEQ ID NO: 1686160 - RNA, 19 nt, Artificial Sequence
  Description of Artificial Sequence: Synthetic oligonucleotide
ugugggcauuaguuaccag

SEQ ID NO: 1686161 - RNA, 19 nt, Artificial Sequence
  Description of Artificial Sequence: Synthetic oligonucleotide
augacagguggaaggaugu

SEQ ID NO: 1686162 - RNA, 19 nt, Artificial Sequence
  Description of Artificial Sequence: Synthetic oligonucleotide
acacaggaaaugucagaau

SEQ ID NO: 1686163 - RNA, 19 nt, Artificial Sequence
  Description of Artificial Sequence: Synthetic oligonucleotide
aacauccuaggcacagcca

SEQ ID NO: 1686164 - RNA, 19 nt, Artificial Sequence
  Description of Artificial Sequence: Synthetic oligonucleotide
gguucaacucuuaacaaua

SEQ ID NO: 1686165 - RNA, 19 nt, Artificial Sequence
  Description of Artificial Sequence: Synthetic oligonucleotide
auucugauucacacagacu

SEQ ID NO: 1686166 - RNA, 19 nt, Artificial Sequence
  Description of Artificial Sequence: Synthetic oligonucleotide
uccuuaguacaugcuucug

SEQ ID NO: 1686167 - RNA, 19 nt, Artificial Sequence
  Description of Artificial Sequence: Synthetic oligonucleotide
gcagcuagcucuaggguag

SEQ ID NO: 1686168 - RNA, 19 nt, Artificial Sequence
  Description of Artificial Sequence: Synthetic oligonucleotide
uggauggcucauucuuacu

SEQ ID NO: 1686169 - RNA, 19 nt, Artificial Sequence
  Description of Artificial Sequence: Synthetic oligonucleotide
ucacccaaggacugagauu

SEQ ID NO: 1686170 - RNA, 19 nt, Artificial Sequence
  Description of Artificial Sequence: Synthetic oligonucleotide
auggcgaauccagggguuc

SEQ ID NO: 1686171 - RNA, 19 nt, Artificial Sequence
  Description of Artificial Sequence: Synthetic oligonucleotide
uccuggcagggaaacugac

SEQ ID NO: 1686172 - RNA, 19 nt, Artificial Sequence
  Description of Artificial Sequence: Synthetic oligonucleotide
cuugugcaucucccucucg

SEQ ID NO: 1686173 - RNA, 19 nt, Artificial Sequence
  Description of Artificial Sequence: Synthetic oligonucleotide
agagggauccuggauccca

SEQ ID NO: 1686174 - RNA, 19 nt, Artificial Sequence
  Description of Artificial Sequence: Synthetic oligonucleotide
ggaucacaguuauagaggu

SEQ ID NO: 1686175 - RNA, 19 nt, Artificial Sequence
  Description of Artificial Sequence: Synthetic oligonucleotide
ucggcauggggugucuaug

SEQ ID NO: 1686176 - RNA, 19 nt, Artificial Sequence
  Description of Artificial Sequence: Synthetic oligonucleotide
cugauauucuauauugauu

SEQ ID NO: 1686177 - RNA, 19 nt, Artificial Sequence
  Description of Artificial Sequence: Synthetic oligonucleotide
cagugaaaugccauuuucu

SEQ ID NO: 1686178 - RNA, 19 nt, Artificial Sequence
  Description of Artificial Sequence: Synthetic oligonucleotide
augggaauccucugauauu

SEQ ID NO: 1686179 - RNA, 19 nt, Artificial Sequence
  Description of Artificial Sequence: Synthetic oligonucleotide
aguaggcaccagugggaug

SEQ ID NO: 1686180 - RNA, 19 nt, Artificial Sequence
  Description of Artificial Sequence: Synthetic oligonucleotide
cagggaaacugaccagaug

SEQ ID NO: 1686181 - RNA, 19 nt, Artificial Sequence
  Description of Artificial Sequence: Synthetic oligonucleotide
uagucgggcucuguuuuca

SEQ ID NO: 1686182 - RNA, 19 nt, Artificial Sequence
  Description of Artificial Sequence: Synthetic oligonucleotide
uugcucuuuccugcuaagu

SEQ ID NO: 1686183 - RNA, 19 nt, Artificial Sequence
  Description of Artificial Sequence: Synthetic oligonucleotide
cauugcucuuuccugcuaa

SEQ ID NO: 1686184 - RNA, 19 nt, Artificial Sequence
  Description of Artificial Sequence: Synthetic oligonucleotide
gcugcaguaggcaccagug

SEQ ID NO: 1686185 - RNA, 19 nt, Artificial Sequence
  Description of Artificial Sequence: Synthetic oligonucleotide
ggcauuaguuaccagcaua

SEQ ID NO: 1686186 - RNA, 19 nt, Artificial Sequence
  Description of Artificial Sequence: Synthetic oligonucleotide
cacucacugaguucuguaa

SEQ ID NO: 1686187 - RNA, 19 nt, Artificial Sequence
  Description of Artificial Sequence: Synthetic oligonucleotide
ggcauacaggaaccauggg

SEQ ID NO: 1686188 - RNA, 19 nt, Artificial Sequence
  Description of Artificial Sequence: Synthetic oligonucleotide
agcucuaggguaggaaaau

SEQ ID NO: 1686189 - RNA, 19 nt, Artificial Sequence
  Description of Artificial Sequence: Synthetic oligonucleotide
uugauucaggaugcucuau

SEQ ID NO: 1686190 - RNA, 19 nt, Artificial Sequence
  Description of Artificial Sequence: Synthetic oligonucleotide
ccuguugccuauagucggg

SEQ ID NO: 1686191 - RNA, 19 nt, Artificial Sequence
  Description of Artificial Sequence: Synthetic oligonucleotide
ccaugauggcgaauccagg

SEQ ID NO: 1686192 - RNA, 19 nt, Artificial Sequence
  Description of Artificial Sequence: Synthetic oligonucleotide
agccauaauuguacuugug

SEQ ID NO: 1686193 - RNA, 19 nt, Artificial Sequence
  Description of Artificial Sequence: Synthetic oligonucleotide
auaccaugcccaaggugug

SEQ ID NO: 1686194 - RNA, 19 nt, Artificial Sequence
  Description of Artificial Sequence: Synthetic oligonucleotide
gguagugaccuccugacuu

SEQ ID NO: 1686195 - RNA, 19 nt, Artificial Sequence
  Description of Artificial Sequence: Synthetic oligonucleotide
cacccaaggacugagauuu

SEQ ID NO: 1686196 - RNA, 19 nt, Artificial Sequence
  Description of Artificial Sequence: Synthetic oligonucleotide
ggugcauccuggcagggaa

SEQ ID NO: 1686197 - RNA, 19 nt, Artificial Sequence
  Description of Artificial Sequence: Synthetic oligonucleotide
uagugaccuccugacuucu

SEQ ID NO: 1686198 - RNA, 19 nt, Artificial Sequence
  Description of Artificial Sequence: Synthetic oligonucleotide
gcauccucuguagaaaauc

SEQ ID NO: 1686199 - RNA, 19 nt, Artificial Sequence
  Description of Artificial Sequence: Synthetic oligonucleotide
cauuuggcauguggauggc

SEQ ID NO: 1686200 - RNA, 19 nt, Artificial Sequence
  Description of Artificial Sequence: Synthetic oligonucleotide
gguacucuuagggaacauc

SEQ ID NO: 1686201 - RNA, 19 nt, Artificial Sequence
  Description of Artificial Sequence: Synthetic oligonucleotide
gguacagaccuguugccua

SEQ ID NO: 1686202 - RNA, 19 nt, Artificial Sequence
  Description of Artificial Sequence: Synthetic oligonucleotide
ggcucauucuuacugggcu

SEQ ID NO: 1686203 - RNA, 19 nt, Artificial Sequence
  Description of Artificial Sequence: Synthetic oligonucleotide
uggcgaauccagggguuca

SEQ ID NO: 1686204 - RNA, 19 nt, Artificial Sequence
  Description of Artificial Sequence: Synthetic oligonucleotide
ugccucaagugugcuggug

SEQ ID NO: 1686205 - RNA, 19 nt, Artificial Sequence
  Description of Artificial Sequence: Synthetic oligonucleotide
gggguacagaccuguugcc

SEQ ID NO: 1686206 - RNA, 19 nt, Artificial Sequence
  Description of Artificial Sequence: Synthetic oligonucleotide
cuccuuaguacaugcuucu

SEQ ID NO: 1686207 - RNA, 19 nt, Artificial Sequence
  Description of Artificial Sequence: Synthetic oligonucleotide
cucuuuccugcuaaguaau

SEQ ID NO: 1686208 - RNA, 19 nt, Artificial Sequence
  Description of Artificial Sequence: Synthetic oligonucleotide
augcccaagguguggggua

SEQ ID NO: 1686209 - RNA, 19 nt, Artificial Sequence
  Description of Artificial Sequence: Synthetic oligonucleotide
aucucugaucacaucccau

SEQ ID NO: 1686210 - RNA, 19 nt, Artificial Sequence
  Description of Artificial Sequence: Synthetic oligonucleotide
ggagaucaggaccaccucu

SEQ ID NO: 1686211 - RNA, 19 nt, Artificial Sequence
  Description of Artificial Sequence: Synthetic oligonucleotide
caguuauagagguacucuu

SEQ ID NO: 1686212 - RNA, 19 nt, Artificial Sequence
  Description of Artificial Sequence: Synthetic oligonucleotide
gaccuccugacuucucugu

SEQ ID NO: 1686213 - RNA, 19 nt, Artificial Sequence
  Description of Artificial Sequence: Synthetic oligonucleotide
aggaugcucuauugcucau

SEQ ID NO: 1686214 - RNA, 19 nt, Artificial Sequence
  Description of Artificial Sequence: Synthetic oligonucleotide
gggguucaacucuuaacaa

SEQ ID NO: 1686215 - RNA, 19 nt, Artificial Sequence
  Description of Artificial Sequence: Synthetic oligonucleotide
gugaagcgcugcauuccag

SEQ ID NO: 1686216 - RNA, 19 nt, Artificial Sequence
  Description of Artificial Sequence: Synthetic oligonucleotide
ggaauccucugauauucua

SEQ ID NO: 1686217 - RNA, 19 nt, Artificial Sequence
  Description of Artificial Sequence: Synthetic oligonucleotide
agagaagcagcuagcucua

SEQ ID NO: 1686218 - RNA, 19 nt, Artificial Sequence
  Description of Artificial Sequence: Synthetic oligonucleotide
cugcugugggcauuaguua

SEQ ID NO: 1686219 - RNA, 19 nt, Artificial Sequence
  Description of Artificial Sequence: Synthetic oligonucleotide
gcugugggcauuaguuacc

SEQ ID NO: 1686220 - RNA, 19 nt, Artificial Sequence
  Description of Artificial Sequence: Synthetic oligonucleotide
caguucaggugccucaagu

SEQ ID NO: 1686221 - RNA, 19 nt, Artificial Sequence
  Description of Artificial Sequence: Synthetic oligonucleotide
ccacuugaacagacuuagg

SEQ ID NO: 1686222 - RNA, 19 nt, Artificial Sequence
  Description of Artificial Sequence: Synthetic oligonucleotide
ccaggaccagcccaugaug

SEQ ID NO: 1686223 - RNA, 19 nt, Artificial Sequence
  Description of Artificial Sequence: Synthetic oligonucleotide
cuauagucgggcucuguuu

SEQ ID NO: 1686224 - RNA, 19 nt, Artificial Sequence
  Description of Artificial Sequence: Synthetic oligonucleotide
ccugcaggauccaacagua

SEQ ID NO: 1686225 - RNA, 19 nt, Artificial Sequence
  Description of Artificial Sequence: Synthetic oligonucleotide
ggaacauccuaggcacagc

SEQ ID NO: 1686226 - RNA, 19 nt, Artificial Sequence
  Description of Artificial Sequence: Synthetic oligonucleotide
ggguucaacucuuaacaau

SEQ ID NO: 1686227 - RNA, 19 nt, Artificial Sequence
  Description of Artificial Sequence: Synthetic oligonucleotide
cugagauuuccagcagaga

SEQ ID NO: 1686228 - RNA, 19 nt, Artificial Sequence
  Description of Artificial Sequence: Synthetic oligonucleotide
cuuugggugggaucacagu

SEQ ID NO: 1686229 - RNA, 19 nt, Artificial Sequence
  Description of Artificial Sequence: Synthetic oligonucleotide
caucacccaaggacugaga

SEQ ID NO: 1686230 - RNA, 19 nt, Artificial Sequence
  Description of Artificial Sequence: Synthetic oligonucleotide
uaauuggguuugggaugca

SEQ ID NO: 1686231 - RNA, 19 nt, Artificial Sequence
  Description of Artificial Sequence: Synthetic oligonucleotide
gcccugguggauaucuugc

SEQ ID NO: 1686232 - RNA, 19 nt, Artificial Sequence
  Description of Artificial Sequence: Synthetic oligonucleotide
gaucuccuuaguacaugcu

SEQ ID NO: 1686233 - RNA, 19 nt, Artificial Sequence
  Description of Artificial Sequence: Synthetic oligonucleotide
gggaaacugaccagauguc

SEQ ID NO: 1686234 - RNA, 19 nt, Artificial Sequence
  Description of Artificial Sequence: Synthetic oligonucleotide
gaacaugcccuggcuucca

SEQ ID NO: 1686235 - RNA, 19 nt, Artificial Sequence
  Description of Artificial Sequence: Synthetic oligonucleotide
cucucgaccccuggcacca

SEQ ID NO: 1686236 - RNA, 19 nt, Artificial Sequence
  Description of Artificial Sequence: Synthetic oligonucleotide
ggaucccaggcugccuugg

SEQ ID NO: 1686237 - RNA, 19 nt, Artificial Sequence
  Description of Artificial Sequence: Synthetic oligonucleotide
ccugcuaaguaauuggguu

SEQ ID NO: 1686238 - RNA, 19 nt, Artificial Sequence
  Description of Artificial Sequence: Synthetic oligonucleotide
cagcuagcucuaggguagg

SEQ ID NO: 1686239 - RNA, 19 nt, Artificial Sequence
  Description of Artificial Sequence: Synthetic oligonucleotide
caccucugaggcacagaca

SEQ ID NO: 1686240 - RNA, 19 nt, Artificial Sequence
  Description of Artificial Sequence: Synthetic oligonucleotide
guacagaccuguugccuau

SEQ ID NO: 1686241 - RNA, 19 nt, Artificial Sequence
  Description of Artificial Sequence: Synthetic oligonucleotide
ugccuauagucgggcucug

SEQ ID NO: 1686242 - RNA, 19 nt, Artificial Sequence
  Description of Artificial Sequence: Synthetic oligonucleotide
ggauaucuugcaagggucu

SEQ ID NO: 1686243 - RNA, 19 nt, Artificial Sequence
  Description of Artificial Sequence: Synthetic oligonucleotide
gcucuaggguaggaaaauc

SEQ ID NO: 1686244 - RNA, 19 nt, Artificial Sequence
  Description of Artificial Sequence: Synthetic oligonucleotide
acccaaggacugagauuuc

SEQ ID NO: 1686245 - RNA, 19 nt, Artificial Sequence
  Description of Artificial Sequence: Synthetic oligonucleotide
uaccuggcccugguggaua

SEQ ID NO: 1686246 - RNA, 19 nt, Artificial Sequence
  Description of Artificial Sequence: Synthetic oligonucleotide
augcccuggcuuccaugau

SEQ ID NO: 1686247 - RNA, 19 nt, Artificial Sequence
  Description of Artificial Sequence: Synthetic oligonucleotide
ggccaugucggcauggggu

SEQ ID NO: 1686248 - RNA, 19 nt, Artificial Sequence
  Description of Artificial Sequence: Synthetic oligonucleotide
agguacucuuagggaacau

SEQ ID NO: 1686249 - RNA, 19 nt, Artificial Sequence
  Description of Artificial Sequence: Synthetic oligonucleotide
guguuacaagaagcaucuc

SEQ ID NO: 1686250 - RNA, 19 nt, Artificial Sequence
  Description of Artificial Sequence: Synthetic oligonucleotide
gauggcgaauccagggguu

SEQ ID NO: 1686251 - RNA, 19 nt, Artificial Sequence
  Description of Artificial Sequence: Synthetic oligonucleotide
aggaaccauggggcauuug

SEQ ID NO: 1686252 - RNA, 19 nt, Artificial Sequence
  Description of Artificial Sequence: Synthetic oligonucleotide
cugguguuuccaagccaua

SEQ ID NO: 1686253 - RNA, 19 nt, Artificial Sequence
  Description of Artificial Sequence: Synthetic oligonucleotide
cuggcccugguggauaucu

SEQ ID NO: 1686254 - RNA, 19 nt, Artificial Sequence
  Description of Artificial Sequence: Synthetic oligonucleotide
ccugguggauaucuugcaa

SEQ ID NO: 1686255 - RNA, 19 nt, Artificial Sequence
  Description of Artificial Sequence: Synthetic oligonucleotide
gucggcauggggugucuau

SEQ ID NO: 1686256 - RNA, 19 nt, Artificial Sequence
  Description of Artificial Sequence: Synthetic oligonucleotide
cagaccuguugccuauagu

SEQ ID NO: 1686257 - RNA, 19 nt, Artificial Sequence
  Description of Artificial Sequence: Synthetic oligonucleotide
ccaguggaucuccuuagua

SEQ ID NO: 1686258 - RNA, 19 nt, Artificial Sequence
  Description of Artificial Sequence: Synthetic oligonucleotide
cucugcugugggcauuagu

SEQ ID NO: 1686259 - RNA, 19 nt, Artificial Sequence
  Description of Artificial Sequence: Synthetic oligonucleotide
gcgaauccagggguucaac

SEQ ID NO: 1686260 - RNA, 19 nt, Artificial Sequence
  Description of Artificial Sequence: Synthetic oligonucleotide
ggcauggggugucuauggu

SEQ ID NO: 1686261 - RNA, 19 nt, Artificial Sequence
  Description of Artificial Sequence: Synthetic oligonucleotide
gugggaugaucugguaaau

SEQ ID NO: 1686262 - RNA, 19 nt, Artificial Sequence
  Description of Artificial Sequence: Synthetic oligonucleotide
cgaccccuggcaccagugg

SEQ ID NO: 1686263 - RNA, 19 nt, Artificial Sequence
  Description of Artificial Sequence: Synthetic oligonucleotide
caguggcucuuaucuauuu

SEQ ID NO: 1686264 - RNA, 19 nt, Artificial Sequence
  Description of Artificial Sequence: Synthetic oligonucleotide
ggcugccgagucagcuugg

SEQ ID NO: 1686265 - RNA, 19 nt, Artificial Sequence
  Description of Artificial Sequence: Synthetic oligonucleotide
caguaggcaccagugggau

SEQ ID NO: 1686266 - RNA, 19 nt, Artificial Sequence
  Description of Artificial Sequence: Synthetic oligonucleotide
cugccgagucagcuuggua

SEQ ID NO: 1686267 - RNA, 19 nt, Artificial Sequence
  Description of Artificial Sequence: Synthetic oligonucleotide
cugggcugccgagucagcu

SEQ ID NO: 1686268 - RNA, 19 nt, Artificial Sequence
  Description of Artificial Sequence: Synthetic oligonucleotide
gccaggaccagcccaugau

SEQ ID NO: 1686269 - RNA, 19 nt, Artificial Sequence
  Description of Artificial Sequence: Synthetic oligonucleotide
ggcgaauccagggguucaa

SEQ ID NO: 1686270 - RNA, 19 nt, Artificial Sequence
  Description of Artificial Sequence: Synthetic oligonucleotide
cgaauccagggguucaacu

SEQ ID NO: 1686271 - RNA, 19 nt, Artificial Sequence
  Description of Artificial Sequence: Synthetic oligonucleotide
gggaauccucugauauucu

SEQ ID NO: 1686272 - RNA, 19 nt, Artificial Sequence
  Description of Artificial Sequence: Synthetic oligonucleotide
auggggcauuuggcaugug

SEQ ID NO: 1686273 - RNA, 19 nt, Artificial Sequence
  Description of Artificial Sequence: Synthetic oligonucleotide
gccccgcaugaagagguga

SEQ ID NO: 1686274 - RNA, 19 nt, Artificial Sequence
  Description of Artificial Sequence: Synthetic oligonucleotide
gccuggcuagggcccgggc

SEQ ID NO: 1686275 - RNA, 19 nt, Artificial Sequence
  Description of Artificial Sequence: Synthetic oligonucleotide
cuauggugacuggcaggcu

SEQ ID NO: 1686276 - RNA, 19 nt, Artificial Sequence
  Description of Artificial Sequence: Synthetic oligonucleotide
ccaaggugugggguacaga

SEQ ID NO: 1686277 - RNA, 19 nt, Artificial Sequence
  Description of Artificial Sequence: Synthetic oligonucleotide
ccauugcucuuuccugcua

SEQ ID NO: 1686278 - RNA, 19 nt, Artificial Sequence
  Description of Artificial Sequence: Synthetic oligonucleotide
ggcauguggauggcucauu

SEQ ID NO: 1686279 - RNA, 19 nt, Artificial Sequence
  Description of Artificial Sequence: Synthetic oligonucleotide
gccuauagucgggcucugu

SEQ ID NO: 1686280 - RNA, 19 nt, Artificial Sequence
  Description of Artificial Sequence: Synthetic oligonucleotide
cccgggcccaguggcucuu

SEQ ID NO: 1686281 - RNA, 19 nt, Artificial Sequence
  Description of Artificial Sequence: Synthetic oligonucleotide
uuaaauuccgauaaucuag

SEQ ID NO: 1686282 - RNA, 19 nt, Artificial Sequence
  Description of Artificial Sequence: Synthetic oligonucleotide
aaauacuccauccuuauga

SEQ ID NO: 1686283 - RNA, 19 nt, Artificial Sequence
  Description of Artificial Sequence: Synthetic oligonucleotide
agauugaugaagaugaugc

SEQ ID NO: 1686284 - RNA, 19 nt, Artificial Sequence
  Description of Artificial Sequence: Synthetic oligonucleotide
auuccgauaaucuaguauc

SEQ ID NO: 1686285 - RNA, 19 nt, Artificial Sequence
  Description of Artificial Sequence: Synthetic oligonucleotide
uuaguuguagauuuaaccu

SEQ ID NO: 1686286 - RNA, 19 nt, Artificial Sequence
  Description of Artificial Sequence: Synthetic oligonucleotide
aaucagccaaaacacacgg

SEQ ID NO: 1686287 - RNA, 19 nt, Artificial Sequence
  Description of Artificial Sequence: Synthetic oligonucleotide
uccaaaagcuccaaaauug

SEQ ID NO: 1686288 - RNA, 19 nt, Artificial Sequence
  Description of Artificial Sequence: Synthetic oligonucleotide
uccaaagagugaaagagag

SEQ ID NO: 1686289 - RNA, 19 nt, Artificial Sequence
  Description of Artificial Sequence: Synthetic oligonucleotide
guuaguuguagauuuaacc

SEQ ID NO: 1686290 - RNA, 19 nt, Artificial Sequence
  Description of Artificial Sequence: Synthetic oligonucleotide
aguaucauaagacacucug

SEQ ID NO: 1686291 - RNA, 19 nt, Artificial Sequence
  Description of Artificial Sequence: Synthetic oligonucleotide
aacucggagagacuuuugc

SEQ ID NO: 1686292 - RNA, 19 nt, Artificial Sequence
  Description of Artificial Sequence: Synthetic oligonucleotide
uaucauaagacacucugga

SEQ ID NO: 1686293 - RNA, 19 nt, Artificial Sequence
  Description of Artificial Sequence: Synthetic oligonucleotide
auagcucugaacucaaacg

SEQ ID NO: 1686294 - RNA, 19 nt, Artificial Sequence
  Description of Artificial Sequence: Synthetic oligonucleotide
aauacugcaggagugcuuc

SEQ ID NO: 1686295 - RNA, 19 nt, Artificial Sequence
  Description of Artificial Sequence: Synthetic oligonucleotide
aaagcaacucccauuaguc

SEQ ID NO: 1686296 - RNA, 19 nt, Artificial Sequence
  Description of Artificial Sequence: Synthetic oligonucleotide
auaaucuaguaucauaaga

SEQ ID NO: 1686297 - RNA, 19 nt, Artificial Sequence
  Description of Artificial Sequence: Synthetic oligonucleotide
cuaaguuuccccugaaggg

SEQ ID NO: 1686298 - RNA, 19 nt, Artificial Sequence
  Description of Artificial Sequence: Synthetic oligonucleotide
uaaucagccaaaacacacg

SEQ ID NO: 1686299 - RNA, 19 nt, Artificial Sequence
  Description of Artificial Sequence: Synthetic oligonucleotide
aauuccgauaaucuaguau

SEQ ID NO: 1686300 - RNA, 19 nt, Artificial Sequence
  Description of Artificial Sequence: Synthetic oligonucleotide
cuaaaguagcuugagaggc

SEQ ID NO: 1686301 - RNA, 19 nt, Artificial Sequence
  Description of Artificial Sequence: Synthetic oligonucleotide
gagacuuuugccauuuugg

SEQ ID NO: 1686302 - RNA, 19 nt, Artificial Sequence
  Description of Artificial Sequence: Synthetic oligonucleotide
uuuaaauuccgauaaucua

SEQ ID NO: 1686303 - RNA, 19 nt, Artificial Sequence
  Description of Artificial Sequence: Synthetic oligonucleotide
gauaaucuaguaucauaag

SEQ ID NO: 1686304 - RNA, 19 nt, Artificial Sequence
  Description of Artificial Sequence: Synthetic oligonucleotide
caucggagguucuagaccg

SEQ ID NO: 1686305 - RNA, 19 nt, Artificial Sequence
  Description of Artificial Sequence: Synthetic oligonucleotide
uaaauuccgauaaucuagu

SEQ ID NO: 1686306 - RNA, 19 nt, Artificial Sequence
  Description of Artificial Sequence: Synthetic oligonucleotide
ggcuaaaguagcuugagag

SEQ ID NO: 1686307 - RNA, 19 nt, Artificial Sequence
  Description of Artificial Sequence: Synthetic oligonucleotide
guaguaguuuucuagcagc

SEQ ID NO: 1686308 - RNA, 19 nt, Artificial Sequence
  Description of Artificial Sequence: Synthetic oligonucleotide
uuaguccaaagagugaaag

SEQ ID NO: 1686309 - RNA, 19 nt, Artificial Sequence
  Description of Artificial Sequence: Synthetic oligonucleotide
acucggagagacuuuugcc

SEQ ID NO: 1686310 - RNA, 19 nt, Artificial Sequence
  Description of Artificial Sequence: Synthetic oligonucleotide
ugaaaccucaagucucugg

SEQ ID NO: 1686311 - RNA, 19 nt, Artificial Sequence
  Description of Artificial Sequence: Synthetic oligonucleotide
gcuaaguuuccccugaagg

SEQ ID NO: 1686312 - RNA, 19 nt, Artificial Sequence
  Description of Artificial Sequence: Synthetic oligonucleotide
uguaaucagccaaaacaca

SEQ ID NO: 1686313 - RNA, 19 nt, Artificial Sequence
  Description of Artificial Sequence: Synthetic oligonucleotide
caugcugaaaccucaaguc

SEQ ID NO: 1686314 - RNA, 19 nt, Artificial Sequence
  Description of Artificial Sequence: Synthetic oligonucleotide
gacuuuugccauuuuggag

SEQ ID NO: 1686315 - RNA, 19 nt, Artificial Sequence
  Description of Artificial Sequence: Synthetic oligonucleotide
uucaauagcucugaacuca

SEQ ID NO: 1686316 - RNA, 19 nt, Artificial Sequence
  Description of Artificial Sequence: Synthetic oligonucleotide
auaaucccuguaaucagcc

SEQ ID NO: 1686317 - RNA, 19 nt, Artificial Sequence
  Description of Artificial Sequence: Synthetic oligonucleotide
aacggcaacggguauguga

SEQ ID NO: 1686318 - RNA, 19 nt, Artificial Sequence
  Description of Artificial Sequence: Synthetic oligonucleotide
ucagcuaaccgguaguagu

SEQ ID NO: 1686319 - RNA, 19 nt, Artificial Sequence
  Description of Artificial Sequence: Synthetic oligonucleotide
cuuaugauaauccuguugu

SEQ ID NO: 1686320 - RNA, 19 nt, Artificial Sequence
  Description of Artificial Sequence: Synthetic oligonucleotide
aaccucaagucucuggccu

SEQ ID NO: 1686321 - RNA, 19 nt, Artificial Sequence
  Description of Artificial Sequence: Synthetic oligonucleotide
acauaaucccuguaaucag

SEQ ID NO: 1686322 - RNA, 19 nt, Artificial Sequence
  Description of Artificial Sequence: Synthetic oligonucleotide
cugcgagucaucaaucagg

SEQ ID NO: 1686323 - RNA, 19 nt, Artificial Sequence
  Description of Artificial Sequence: Synthetic oligonucleotide
cuguuucuaacucggagag

SEQ ID NO: 1686324 - RNA, 19 nt, Artificial Sequence
  Description of Artificial Sequence: Synthetic oligonucleotide
auaauccuguuguuccugg

SEQ ID NO: 1686325 - RNA, 19 nt, Artificial Sequence
  Description of Artificial Sequence: Synthetic oligonucleotide
gauuuaaccucaucaucac

SEQ ID NO: 1686326 - RNA, 19 nt, Artificial Sequence
  Description of Artificial Sequence: Synthetic oligonucleotide
ucugcgagucaucaaucag

SEQ ID NO: 1686327 - RNA, 19 nt, Artificial Sequence
  Description of Artificial Sequence: Synthetic oligonucleotide
ugaacucaaacggcaacgg

SEQ ID NO: 1686328 - RNA, 19 nt, Artificial Sequence
  Description of Artificial Sequence: Synthetic oligonucleotide
caucaucacauugcgaugg

SEQ ID NO: 1686329 - RNA, 19 nt, Artificial Sequence
  Description of Artificial Sequence: Synthetic oligonucleotide
cacuaaugcauccaggguc

SEQ ID NO: 1686330 - RNA, 19 nt, Artificial Sequence
  Description of Artificial Sequence: Synthetic oligonucleotide
ugcgagucaucaaucagga

SEQ ID NO: 1686331 - RNA, 19 nt, Artificial Sequence
  Description of Artificial Sequence: Synthetic oligonucleotide
acggugguccucuucaagg

SEQ ID NO: 1686332 - RNA, 19 nt, Artificial Sequence
  Description of Artificial Sequence: Synthetic oligonucleotide
aagaugaugcucugcgagu

SEQ ID NO: 1686333 - RNA, 19 nt, Artificial Sequence
  Description of Artificial Sequence: Synthetic oligonucleotide
agcaacucccauuagucca

SEQ ID NO: 1686334 - RNA, 19 nt, Artificial Sequence
  Description of Artificial Sequence: Synthetic oligonucleotide
augcaguuugcuucugucg

SEQ ID NO: 1686335 - RNA, 19 nt, Artificial Sequence
  Description of Artificial Sequence: Synthetic oligonucleotide
auuaccugcagcgcagggc

SEQ ID NO: 1686336 - RNA, 19 nt, Artificial Sequence
  Description of Artificial Sequence: Synthetic oligonucleotide
cauccuuaugauaauccug

SEQ ID NO: 1686337 - RNA, 19 nt, Artificial Sequence
  Description of Artificial Sequence: Synthetic oligonucleotide
ucuaucugccagaaggguc

SEQ ID NO: 1686338 - RNA, 19 nt, Artificial Sequence
  Description of Artificial Sequence: Synthetic oligonucleotide
guaaucagccaaaacacac

SEQ ID NO: 1686339 - RNA, 19 nt, Artificial Sequence
  Description of Artificial Sequence: Synthetic oligonucleotide
gcuaaaguagcuugagagg

SEQ ID NO: 1686340 - RNA, 19 nt, Artificial Sequence
  Description of Artificial Sequence: Synthetic oligonucleotide
caucacauugcgauggcug

SEQ ID NO: 1686341 - RNA, 19 nt, Artificial Sequence
  Description of Artificial Sequence: Synthetic oligonucleotide
ucaaacuuugucacagcaa

SEQ ID NO: 1686342 - RNA, 19 nt, Artificial Sequence
  Description of Artificial Sequence: Synthetic oligonucleotide
ugcugaaaccucaagucuc

SEQ ID NO: 1686343 - RNA, 19 nt, Artificial Sequence
  Description of Artificial Sequence: Synthetic oligonucleotide
aggguguugauccaauacu

SEQ ID NO: 1686344 - RNA, 19 nt, Artificial Sequence
  Description of Artificial Sequence: Synthetic oligonucleotide
ugcauggucaaucccagua

SEQ ID NO: 1686345 - RNA, 19 nt, Artificial Sequence
  Description of Artificial Sequence: Synthetic oligonucleotide
uuagguaaggaggccauca

SEQ ID NO: 1686346 - RNA, 19 nt, Artificial Sequence
  Description of Artificial Sequence: Synthetic oligonucleotide
uagacagaguucuuccagc

SEQ ID NO: 1686347 - RNA, 19 nt, Artificial Sequence
  Description of Artificial Sequence: Synthetic oligonucleotide
ugauccaauacugcaggag

SEQ ID NO: 1686348 - RNA, 19 nt, Artificial Sequence
  Description of Artificial Sequence: Synthetic oligonucleotide
ucugucgacagacgagugc

SEQ ID NO: 1686349 - RNA, 19 nt, Artificial Sequence
  Description of Artificial Sequence: Synthetic oligonucleotide
uaaaguagcuugagaggca

SEQ ID NO: 1686350 - RNA, 19 nt, Artificial Sequence
  Description of Artificial Sequence: Synthetic oligonucleotide
guaucauaagacacucugg

SEQ ID NO: 1686351 - RNA, 19 nt, Artificial Sequence
  Description of Artificial Sequence: Synthetic oligonucleotide
ucccauuaguccaaagagu

SEQ ID NO: 1686352 - RNA, 19 nt, Artificial Sequence
  Description of Artificial Sequence: Synthetic oligonucleotide
ucauaagaaguaacauuuc

SEQ ID NO: 1686353 - RNA, 19 nt, Artificial Sequence
  Description of Artificial Sequence: Synthetic oligonucleotide
uaaguuuccccugaagggu

SEQ ID NO: 1686354 - RNA, 19 nt, Artificial Sequence
  Description of Artificial Sequence: Synthetic oligonucleotide
uuccgauaaucuaguauca

SEQ ID NO: 1686355 - RNA, 19 nt, Artificial Sequence
  Description of Artificial Sequence: Synthetic oligonucleotide
gacagacgagugcuuaggg

SEQ ID NO: 1686356 - RNA, 19 nt, Artificial Sequence
  Description of Artificial Sequence: Synthetic oligonucleotide
gguaaggaggccaucauag

SEQ ID NO: 1686357 - RNA, 19 nt, Artificial Sequence
  Description of Artificial Sequence: Synthetic oligonucleotide
agacuuuugccauuuugga

SEQ ID NO: 1686358 - RNA, 19 nt, Artificial Sequence
  Description of Artificial Sequence: Synthetic oligonucleotide
ucuagaccggugaacauua

SEQ ID NO: 1686359 - RNA, 19 nt, Artificial Sequence
  Description of Artificial Sequence: Synthetic oligonucleotide
gaggccacuucccauaaac

SEQ ID NO: 1686360 - RNA, 19 nt, Artificial Sequence
  Description of Artificial Sequence: Synthetic oligonucleotide
agugcuaauucaugguaca

SEQ ID NO: 1686361 - RNA, 19 nt, Artificial Sequence
  Description of Artificial Sequence: Synthetic oligonucleotide
cucuggaguuaucacagcc

SEQ ID NO: 1686362 - RNA, 19 nt, Artificial Sequence
  Description of Artificial Sequence: Synthetic oligonucleotide
caaacuuugucacagcaaa

SEQ ID NO: 1686363 - RNA, 19 nt, Artificial Sequence
  Description of Artificial Sequence: Synthetic oligonucleotide
aacauuaccugcagcgcag

SEQ ID NO: 1686364 - RNA, 19 nt, Artificial Sequence
  Description of Artificial Sequence: Synthetic oligonucleotide
aauugacucuuugaaaauu

SEQ ID NO: 1686365 - RNA, 19 nt, Artificial Sequence
  Description of Artificial Sequence: Synthetic oligonucleotide
ccuguaaucagccaaaaca

SEQ ID NO: 1686366 - RNA, 19 nt, Artificial Sequence
  Description of Artificial Sequence: Synthetic oligonucleotide
uggaaagguccucagcuaa

SEQ ID NO: 1686367 - RNA, 19 nt, Artificial Sequence
  Description of Artificial Sequence: Synthetic oligonucleotide
uguuccgaguccuuccgcc

SEQ ID NO: 1686368 - RNA, 19 nt, Artificial Sequence
  Description of Artificial Sequence: Synthetic oligonucleotide
uagaccggugaacauuacc

SEQ ID NO: 1686369 - RNA, 19 nt, Artificial Sequence
  Description of Artificial Sequence: Synthetic oligonucleotide
gaacauuaccugcagcgca

SEQ ID NO: 1686370 - RNA, 19 nt, Artificial Sequence
  Description of Artificial Sequence: Synthetic oligonucleotide
auccuuaugauaauccugu

SEQ ID NO: 1686371 - RNA, 19 nt, Artificial Sequence
  Description of Artificial Sequence: Synthetic oligonucleotide
uccucucauaagaaguaac

SEQ ID NO: 1686372 - RNA, 19 nt, Artificial Sequence
  Description of Artificial Sequence: Synthetic oligonucleotide
cucauaagaaguaacauuu

SEQ ID NO: 1686373 - RNA, 19 nt, Artificial Sequence
  Description of Artificial Sequence: Synthetic oligonucleotide
gaugcuaaguuuccccuga

SEQ ID NO: 1686374 - RNA, 19 nt, Artificial Sequence
  Description of Artificial Sequence: Synthetic oligonucleotide
cuaguaucauaagacacuc

SEQ ID NO: 1686375 - RNA, 19 nt, Artificial Sequence
  Description of Artificial Sequence: Synthetic oligonucleotide
gguuagacagaguucuucc

SEQ ID NO: 1686376 - RNA, 19 nt, Artificial Sequence
  Description of Artificial Sequence: Synthetic oligonucleotide
ugcucugcgagucaucaau

SEQ ID NO: 1686377 - RNA, 19 nt, Artificial Sequence
  Description of Artificial Sequence: Synthetic oligonucleotide
uuccaaggaaagaaagcaa

SEQ ID NO: 1686378 - RNA, 19 nt, Artificial Sequence
  Description of Artificial Sequence: Synthetic oligonucleotide
agcucugaacucaaacggc

SEQ ID NO: 1686379 - RNA, 19 nt, Artificial Sequence
  Description of Artificial Sequence: Synthetic oligonucleotide
aaagaccugugggucacuc

SEQ ID NO: 1686380 - RNA, 19 nt, Artificial Sequence
  Description of Artificial Sequence: Synthetic oligonucleotide
guacaacucaguuuucuuc

SEQ ID NO: 1686381 - RNA, 19 nt, Artificial Sequence
  Description of Artificial Sequence: Synthetic oligonucleotide
aacgcaggcauuccauggu

SEQ ID NO: 1686382 - RNA, 19 nt, Artificial Sequence
  Description of Artificial Sequence: Synthetic oligonucleotide
caacgcaggcauuccaugg

SEQ ID NO: 1686383 - RNA, 19 nt, Artificial Sequence
  Description of Artificial Sequence: Synthetic oligonucleotide
ugcuucaauagcucugaac

SEQ ID NO: 1686384 - RNA, 19 nt, Artificial Sequence
  Description of Artificial Sequence: Synthetic oligonucleotide
acggcaacggguaugugac

SEQ ID NO: 1686385 - RNA, 19 nt, Artificial Sequence
  Description of Artificial Sequence: Synthetic oligonucleotide
agaugaugcucugcgaguc

SEQ ID NO: 1686386 - RNA, 19 nt, Artificial Sequence
  Description of Artificial Sequence: Synthetic oligonucleotide
ggucucaaggaucaguggc

SEQ ID NO: 1686387 - RNA, 19 nt, Artificial Sequence
  Description of Artificial Sequence: Synthetic oligonucleotide
gcuucaauagcucugaacu

SEQ ID NO: 1686388 - RNA, 19 nt, Artificial Sequence
  Description of Artificial Sequence: Synthetic oligonucleotide
agaccugugggucacucca

SEQ ID NO: 1686389 - RNA, 19 nt, Artificial Sequence
  Description of Artificial Sequence: Synthetic oligonucleotide
ucaaggaucaguggcugca

SEQ ID NO: 1686390 - RNA, 19 nt, Artificial Sequence
  Description of Artificial Sequence: Synthetic oligonucleotide
gugaaagagagaagguucc

SEQ ID NO: 1686391 - RNA, 19 nt, Artificial Sequence
  Description of Artificial Sequence: Synthetic oligonucleotide
gcuguuagcggcuugccag

SEQ ID NO: 1686392 - RNA, 19 nt, Artificial Sequence
  Description of Artificial Sequence: Synthetic oligonucleotide
cuuguuccgaguccuuccg

SEQ ID NO: 1686393 - RNA, 19 nt, Artificial Sequence
  Description of Artificial Sequence: Synthetic oligonucleotide
ucaucacaugcugaaaccu

SEQ ID NO: 1686394 - RNA, 19 nt, Artificial Sequence
  Description of Artificial Sequence: Synthetic oligonucleotide
gaaagguccucagcuaacc

SEQ ID NO: 1686395 - RNA, 19 nt, Artificial Sequence
  Description of Artificial Sequence: Synthetic oligonucleotide
cuuaggguccacuaaugca

SEQ ID NO: 1686396 - RNA, 19 nt, Artificial Sequence
  Description of Artificial Sequence: Synthetic oligonucleotide
aucacauugcgauggcugu

SEQ ID NO: 1686397 - RNA, 19 nt, Artificial Sequence
  Description of Artificial Sequence: Synthetic oligonucleotide
ugcuuaggguccacuaaug

SEQ ID NO: 1686398 - RNA, 19 nt, Artificial Sequence
  Description of Artificial Sequence: Synthetic oligonucleotide
uccaauacugcaggagugc

SEQ ID NO: 1686399 - RNA, 19 nt, Artificial Sequence
  Description of Artificial Sequence: Synthetic oligonucleotide
ucaauagcucugaacucaa

SEQ ID NO: 1686400 - RNA, 19 nt, Artificial Sequence
  Description of Artificial Sequence: Synthetic oligonucleotide
aaaguagcuugagaggcau

SEQ ID NO: 1686401 - RNA, 19 nt, Artificial Sequence
  Description of Artificial Sequence: Synthetic oligonucleotide
ucaugguacaacucaguuu

SEQ ID NO: 1686402 - RNA, 19 nt, Artificial Sequence
  Description of Artificial Sequence: Synthetic oligonucleotide
cccauuaguccaaagagug

SEQ ID NO: 1686403 - RNA, 19 nt, Artificial Sequence
  Description of Artificial Sequence: Synthetic oligonucleotide
uggagugcuaauucauggu

SEQ ID NO: 1686404 - RNA, 19 nt, Artificial Sequence
  Description of Artificial Sequence: Synthetic oligonucleotide
guuuaaauuccgauaaucu

SEQ ID NO: 1686405 - RNA, 19 nt, Artificial Sequence
  Description of Artificial Sequence: Synthetic oligonucleotide
aaugcauccagggucucaa

SEQ ID NO: 1686406 - RNA, 19 nt, Artificial Sequence
  Description of Artificial Sequence: Synthetic oligonucleotide
agaccggugaacauuaccu

SEQ ID NO: 1686407 - RNA, 19 nt, Artificial Sequence
  Description of Artificial Sequence: Synthetic oligonucleotide
cuucaauagcucugaacuc

SEQ ID NO: 1686408 - RNA, 19 nt, Artificial Sequence
  Description of Artificial Sequence: Synthetic oligonucleotide
aggaugcuaaguuuccccu

SEQ ID NO: 1686409 - RNA, 19 nt, Artificial Sequence
  Description of Artificial Sequence: Synthetic oligonucleotide
agacgagugcuuagggucc

SEQ ID NO: 1686410 - RNA, 19 nt, Artificial Sequence
  Description of Artificial Sequence: Synthetic oligonucleotide
gacacucuggaguuaucac

SEQ ID NO: 1686411 - RNA, 19 nt, Artificial Sequence
  Description of Artificial Sequence: Synthetic oligonucleotide
aguuuucuagcagcaguuc

SEQ ID NO: 1686412 - RNA, 19 nt, Artificial Sequence
  Description of Artificial Sequence: Synthetic oligonucleotide
agacagaguucuuccagca

SEQ ID NO: 1686413 - RNA, 19 nt, Artificial Sequence
  Description of Artificial Sequence: Synthetic oligonucleotide
aguuugcuucugucgacag

SEQ ID NO: 1686414 - RNA, 19 nt, Artificial Sequence
  Description of Artificial Sequence: Synthetic oligonucleotide
gauuccaaauucaugccaa

SEQ ID NO: 1686415 - RNA, 19 nt, Artificial Sequence
  Description of Artificial Sequence: Synthetic oligonucleotide
acugcuccagguuuaaauu

SEQ ID NO: 1686416 - RNA, 19 nt, Artificial Sequence
  Description of Artificial Sequence: Synthetic oligonucleotide
cucggagagacuuuugcca

SEQ ID NO: 1686417 - RNA, 19 nt, Artificial Sequence
  Description of Artificial Sequence: Synthetic oligonucleotide
gccauuuuggaguaggaca

SEQ ID NO: 1686418 - RNA, 19 nt, Artificial Sequence
  Description of Artificial Sequence: Synthetic oligonucleotide
ucaaacggcaacggguaug

SEQ ID NO: 1686419 - RNA, 19 nt, Artificial Sequence
  Description of Artificial Sequence: Synthetic oligonucleotide
acuaaugcauccagggucu

SEQ ID NO: 1686420 - RNA, 19 nt, Artificial Sequence
  Description of Artificial Sequence: Synthetic oligonucleotide
gagugcuaauucaugguac

SEQ ID NO: 1686421 - RNA, 19 nt, Artificial Sequence
  Description of Artificial Sequence: Synthetic oligonucleotide
gaccggugaacauuaccug

SEQ ID NO: 1686422 - RNA, 19 nt, Artificial Sequence
  Description of Artificial Sequence: Synthetic oligonucleotide
uggcuaaaguagcuugaga

SEQ ID NO: 1686423 - RNA, 19 nt, Artificial Sequence
  Description of Artificial Sequence: Synthetic oligonucleotide
acuugguuagacagaguuc

SEQ ID NO: 1686424 - RNA, 19 nt, Artificial Sequence
  Description of Artificial Sequence: Synthetic oligonucleotide
acagacgagugcuuagggu

SEQ ID NO: 1686425 - RNA, 19 nt, Artificial Sequence
  Description of Artificial Sequence: Synthetic oligonucleotide
gacgagcugaccuucucca

SEQ ID NO: 1686426 - RNA, 19 nt, Artificial Sequence
  Description of Artificial Sequence: Synthetic oligonucleotide
gguuuaaauuccgauaauc

SEQ ID NO: 1686427 - RNA, 19 nt, Artificial Sequence
  Description of Artificial Sequence: Synthetic oligonucleotide
uuccauccuucuaucugcc

SEQ ID NO: 1686428 - RNA, 19 nt, Artificial Sequence
  Description of Artificial Sequence: Synthetic oligonucleotide
uaugugacgagcugaccuu

SEQ ID NO: 1686429 - RNA, 19 nt, Artificial Sequence
  Description of Artificial Sequence: Synthetic oligonucleotide
aaauuccgauaaucuagua

SEQ ID NO: 1686430 - RNA, 19 nt, Artificial Sequence
  Description of Artificial Sequence: Synthetic oligonucleotide
uaguaucauaagacacucu

SEQ ID NO: 1686431 - RNA, 19 nt, Artificial Sequence
  Description of Artificial Sequence: Synthetic oligonucleotide
gcugucuagauugaugaag

SEQ ID NO: 1686432 - RNA, 19 nt, Artificial Sequence
  Description of Artificial Sequence: Synthetic oligonucleotide
gcuugagaggcaucggagg

SEQ ID NO: 1686433 - RNA, 19 nt, Artificial Sequence
  Description of Artificial Sequence: Synthetic oligonucleotide
agugcuuaggguccacuaa

SEQ ID NO: 1686434 - RNA, 19 nt, Artificial Sequence
  Description of Artificial Sequence: Synthetic oligonucleotide
guaugugacgagcugaccu

SEQ ID NO: 1686435 - RNA, 19 nt, Artificial Sequence
  Description of Artificial Sequence: Synthetic oligonucleotide
cuguuagcggcuugccagg

SEQ ID NO: 1686436 - RNA, 19 nt, Artificial Sequence
  Description of Artificial Sequence: Synthetic oligonucleotide
uaagacacucuggaguuau

SEQ ID NO: 1686437 - RNA, 19 nt, Artificial Sequence
  Description of Artificial Sequence: Synthetic oligonucleotide
uccucagcuaaccgguagu

SEQ ID NO: 1686438 - RNA, 19 nt, Artificial Sequence
  Description of Artificial Sequence: Synthetic oligonucleotide
caucucgucugcaugguca

SEQ ID NO: 1686439 - RNA, 19 nt, Artificial Sequence
  Description of Artificial Sequence: Synthetic oligonucleotide
uugauccaauacugcagga

SEQ ID NO: 1686440 - RNA, 19 nt, Artificial Sequence
  Description of Artificial Sequence: Synthetic oligonucleotide
uaaccgguaguaguuuucu

SEQ ID NO: 1686441 - RNA, 19 nt, Artificial Sequence
  Description of Artificial Sequence: Synthetic oligonucleotide
ucggagagacuuuugccau

SEQ ID NO: 1686442 - RNA, 19 nt, Artificial Sequence
  Description of Artificial Sequence: Synthetic oligonucleotide
cuaaccgguaguaguuuuc

SEQ ID NO: 1686443 - RNA, 19 nt, Artificial Sequence
  Description of Artificial Sequence: Synthetic oligonucleotide
ugguuaguuguagauuuaa

SEQ ID NO: 1686444 - RNA, 19 nt, Artificial Sequence
  Description of Artificial Sequence: Synthetic oligonucleotide
ugcuguuagcggcuugcca

SEQ ID NO: 1686445 - RNA, 19 nt, Artificial Sequence
  Description of Artificial Sequence: Synthetic oligonucleotide
aguucugcuuguuccgagu

SEQ ID NO: 1686446 - RNA, 19 nt, Artificial Sequence
  Description of Artificial Sequence: Synthetic oligonucleotide
uucugucgacagacgagug

SEQ ID NO: 1686447 - RNA, 19 nt, Artificial Sequence
  Description of Artificial Sequence: Synthetic oligonucleotide
agguucuagaccggugaac

SEQ ID NO: 1686448 - RNA, 19 nt, Artificial Sequence
  Description of Artificial Sequence: Synthetic oligonucleotide
ugguuagacagaguucuuc

SEQ ID NO: 1686449 - RNA, 19 nt, Artificial Sequence
  Description of Artificial Sequence: Synthetic oligonucleotide
uggucaaucccaguacuuc

SEQ ID NO: 1686450 - RNA, 19 nt, Artificial Sequence
  Description of Artificial Sequence: Synthetic oligonucleotide
agggucucaaggaucagug

SEQ ID NO: 1686451 - RNA, 19 nt, Artificial Sequence
  Description of Artificial Sequence: Synthetic oligonucleotide
caugguuaguuguagauuu

SEQ ID NO: 1686452 - RNA, 19 nt, Artificial Sequence
  Description of Artificial Sequence: Synthetic oligonucleotide
aacggguaugugacgagcu

SEQ ID NO: 1686453 - RNA, 19 nt, Artificial Sequence
  Description of Artificial Sequence: Synthetic oligonucleotide
caaauacuccauccuuaug

SEQ ID NO: 1686454 - RNA, 19 nt, Artificial Sequence
  Description of Artificial Sequence: Synthetic oligonucleotide
ucuaacucggagagacuuu

SEQ ID NO: 1686455 - RNA, 19 nt, Artificial Sequence
  Description of Artificial Sequence: Synthetic oligonucleotide
uaacucggagagacuuuug

SEQ ID NO: 1686456 - RNA, 19 nt, Artificial Sequence
  Description of Artificial Sequence: Synthetic oligonucleotide
ccaaaauugacucuuugaa

SEQ ID NO: 1686457 - RNA, 19 nt, Artificial Sequence
  Description of Artificial Sequence: Synthetic oligonucleotide
gaggcaucggagguucuag

SEQ ID NO: 1686458 - RNA, 19 nt, Artificial Sequence
  Description of Artificial Sequence: Synthetic oligonucleotide
cugugggucacuccacuug

SEQ ID NO: 1686459 - RNA, 19 nt, Artificial Sequence
  Description of Artificial Sequence: Synthetic oligonucleotide
aggagugcuucaauagcuc

SEQ ID NO: 1686460 - RNA, 19 nt, Artificial Sequence
  Description of Artificial Sequence: Synthetic oligonucleotide
ccuuaugauaauccuguug

SEQ ID NO: 1686461 - RNA, 19 nt, Artificial Sequence
  Description of Artificial Sequence: Synthetic oligonucleotide
agcuugagaggcaucggag

SEQ ID NO: 1686462 - RNA, 19 nt, Artificial Sequence
  Description of Artificial Sequence: Synthetic oligonucleotide
uuguuccgaguccuuccgc

SEQ ID NO: 1686463 - RNA, 19 nt, Artificial Sequence
  Description of Artificial Sequence: Synthetic oligonucleotide
ugugacgagcugaccuucu

SEQ ID NO: 1686464 - RNA, 19 nt, Artificial Sequence
  Description of Artificial Sequence: Synthetic oligonucleotide
uucuagaccggugaacauu

SEQ ID NO: 1686465 - RNA, 19 nt, Artificial Sequence
  Description of Artificial Sequence: Synthetic oligonucleotide
cauuaccugcagcgcaggg

SEQ ID NO: 1686466 - RNA, 19 nt, Artificial Sequence
  Description of Artificial Sequence: Synthetic oligonucleotide
cauugcgauggcugucuag

SEQ ID NO: 1686467 - RNA, 19 nt, Artificial Sequence
  Description of Artificial Sequence: Synthetic oligonucleotide
cucaaggaucaguggcugc

SEQ ID NO: 1686468 - RNA, 19 nt, Artificial Sequence
  Description of Artificial Sequence: Synthetic oligonucleotide
auccaauacugcaggagug

SEQ ID NO: 1686469 - RNA, 19 nt, Artificial Sequence
  Description of Artificial Sequence: Synthetic oligonucleotide
cuggcuaaaguagcuugag

SEQ ID NO: 1686470 - RNA, 19 nt, Artificial Sequence
  Description of Artificial Sequence: Synthetic oligonucleotide
ucccaugguuaguuguaga

SEQ ID NO: 1686471 - RNA, 19 nt, Artificial Sequence
  Description of Artificial Sequence: Synthetic oligonucleotide
gcuuaggguccacuaaugc

SEQ ID NO: 1686472 - RNA, 19 nt, Artificial Sequence
  Description of Artificial Sequence: Synthetic oligonucleotide
gaugaugcucugcgaguca

SEQ ID NO: 1686473 - RNA, 19 nt, Artificial Sequence
  Description of Artificial Sequence: Synthetic oligonucleotide
acggguaugugacgagcug

SEQ ID NO: 1686474 - RNA, 19 nt, Artificial Sequence
  Description of Artificial Sequence: Synthetic oligonucleotide
uuccgaguccuuccgcccu

SEQ ID NO: 1686475 - RNA, 19 nt, Artificial Sequence
  Description of Artificial Sequence: Synthetic oligonucleotide
agguuuaaauuccgauaau

SEQ ID NO: 1686476 - RNA, 19 nt, Artificial Sequence
  Description of Artificial Sequence: Synthetic oligonucleotide
ggguguugauccaauacug

SEQ ID NO: 1686477 - RNA, 19 nt, Artificial Sequence
  Description of Artificial Sequence: Synthetic oligonucleotide
ccgguaguaguuuucuagc

SEQ ID NO: 1686478 - RNA, 19 nt, Artificial Sequence
  Description of Artificial Sequence: Synthetic oligonucleotide
guccacuaaugcauccagg

SEQ ID NO: 1686479 - RNA, 19 nt, Artificial Sequence
  Description of Artificial Sequence: Synthetic oligonucleotide
gcaucggagguucuagacc

SEQ ID NO: 1686480 - RNA, 19 nt, Artificial Sequence
  Description of Artificial Sequence: Synthetic oligonucleotide
augugacgagcugaccuuc

SEQ ID NO: 1686481 - RNA, 19 nt, Artificial Sequence
  Description of Artificial Sequence: Synthetic oligonucleotide
gagcucggcgccuuccggc

SEQ ID NO: 1686482 - RNA, 19 nt, Artificial Sequence
  Description of Artificial Sequence: Synthetic oligonucleotide
uccgauaaucuaguaucau

SEQ ID NO: 1686483 - RNA, 19 nt, Artificial Sequence
  Description of Artificial Sequence: Synthetic oligonucleotide
guuccgaguccuuccgccc

SEQ ID NO: 1686484 - RNA, 19 nt, Artificial Sequence
  Description of Artificial Sequence: Synthetic oligonucleotide
accucaagucucuggccug

SEQ ID NO: 1686485 - RNA, 19 nt, Artificial Sequence
  Description of Artificial Sequence: Synthetic oligonucleotide
cauaagacacucuggaguu

SEQ ID NO: 1686486 - RNA, 19 nt, Artificial Sequence
  Description of Artificial Sequence: Synthetic oligonucleotide
cucagcuaaccgguaguag

SEQ ID NO: 1686487 - RNA, 19 nt, Artificial Sequence
  Description of Artificial Sequence: Synthetic oligonucleotide
acgagcugaccuucuccag

SEQ ID NO: 1686488 - RNA, 19 nt, Artificial Sequence
  Description of Artificial Sequence: Synthetic oligonucleotide
cgauaaucuaguaucauaa

SEQ ID NO: 1686489 - RNA, 19 nt, Artificial Sequence
  Description of Artificial Sequence: Synthetic oligonucleotide
cacggcgcggggaagcagc

SEQ ID NO: 1686490 - RNA, 19 nt, Artificial Sequence
  Description of Artificial Sequence: Synthetic oligonucleotide
uccuguuguuccuggucgu

SEQ ID NO: 1686491 - RNA, 19 nt, Artificial Sequence
  Description of Artificial Sequence: Synthetic oligonucleotide
uuuagguaaggaggccauc

SEQ ID NO: 1686492 - RNA, 19 nt, Artificial Sequence
  Description of Artificial Sequence: Synthetic oligonucleotide
guccaaagagugaaagaga

SEQ ID NO: 1686493 - RNA, 19 nt, Artificial Sequence
  Description of Artificial Sequence: Synthetic oligonucleotide
caacucaguuuucuuccuc

SEQ ID NO: 1686494 - RNA, 19 nt, Artificial Sequence
  Description of Artificial Sequence: Synthetic oligonucleotide
caaucaggacccgaagcuc

SEQ ID NO: 1686495 - RNA, 19 nt, Artificial Sequence
  Description of Artificial Sequence: Synthetic oligonucleotide
ggaugcuaaguuuccccug

SEQ ID NO: 1686496 - RNA, 19 nt, Artificial Sequence
  Description of Artificial Sequence: Synthetic oligonucleotide
ccucucauaagaaguaaca

SEQ ID NO: 1686497 - RNA, 19 nt, Artificial Sequence
  Description of Artificial Sequence: Synthetic oligonucleotide
aaccgguaguaguuuucua

SEQ ID NO: 1686498 - RNA, 19 nt, Artificial Sequence
  Description of Artificial Sequence: Synthetic oligonucleotide
agcggggucgcgcgaccgc

SEQ ID NO: 1686499 - RNA, 19 nt, Artificial Sequence
  Description of Artificial Sequence: Synthetic oligonucleotide
aggacccgaagcucccgag

SEQ ID NO: 1686500 - RNA, 19 nt, Artificial Sequence
  Description of Artificial Sequence: Synthetic oligonucleotide
uccgcccugaggcuguuuu

SEQ ID NO: 1686501 - RNA, 19 nt, Artificial Sequence
  Description of Artificial Sequence: Synthetic oligonucleotide
cacggugguccucuucaag

SEQ ID NO: 1686502 - RNA, 19 nt, Artificial Sequence
  Description of Artificial Sequence: Synthetic oligonucleotide
gguuaguuguagauuuaac

SEQ ID NO: 1686503 - RNA, 19 nt, Artificial Sequence
  Description of Artificial Sequence: Synthetic oligonucleotide
caguucccggaacagccac

SEQ ID NO: 1686504 - RNA, 19 nt, Artificial Sequence
  Description of Artificial Sequence: Synthetic oligonucleotide
ggagugcuaauucauggua

SEQ ID NO: 1686505 - RNA, 19 nt, Artificial Sequence
  Description of Artificial Sequence: Synthetic oligonucleotide
ggucgugaugcucaucaca

SEQ ID NO: 1686506 - RNA, 19 nt, Artificial Sequence
  Description of Artificial Sequence: Synthetic oligonucleotide
uccgaguccuuccgcccug

SEQ ID NO: 1686507 - RNA, 19 nt, Artificial Sequence
  Description of Artificial Sequence: Synthetic oligonucleotide
gagugaaagagagaagguu

SEQ ID NO: 1686508 - RNA, 19 nt, Artificial Sequence
  Description of Artificial Sequence: Synthetic oligonucleotide
ugggccacgcuggcuaaag

SEQ ID NO: 1686509 - RNA, 19 nt, Artificial Sequence
  Description of Artificial Sequence: Synthetic oligonucleotide
ccaaaagcuccaaaauuga

SEQ ID NO: 1686510 - RNA, 19 nt, Artificial Sequence
  Description of Artificial Sequence: Synthetic oligonucleotide
cuugagaggcaucggaggu

SEQ ID NO: 1686511 - RNA, 19 nt, Artificial Sequence
  Description of Artificial Sequence: Synthetic oligonucleotide
uccuuaugauaauccuguu

SEQ ID NO: 1686512 - RNA, 19 nt, Artificial Sequence
  Description of Artificial Sequence: Synthetic oligonucleotide
gccacgcuggcuaaaguag

SEQ ID NO: 1686513 - RNA, 19 nt, Artificial Sequence
  Description of Artificial Sequence: Synthetic oligonucleotide
gcuucugucgacagacgag

SEQ ID NO: 1686514 - RNA, 19 nt, Artificial Sequence
  Description of Artificial Sequence: Synthetic oligonucleotide
ucacauugcgauggcuguc

SEQ ID NO: 1686515 - RNA, 19 nt, Artificial Sequence
  Description of Artificial Sequence: Synthetic oligonucleotide
cuagaccggugaacauuac

SEQ ID NO: 1686516 - RNA, 19 nt, Artificial Sequence
  Description of Artificial Sequence: Synthetic oligonucleotide
uccaucucgucugcauggu

SEQ ID NO: 1686517 - RNA, 19 nt, Artificial Sequence
  Description of Artificial Sequence: Synthetic oligonucleotide
cauggucaaucccaguacu

SEQ ID NO: 1686518 - RNA, 19 nt, Artificial Sequence
  Description of Artificial Sequence: Synthetic oligonucleotide
gucgcgcgaccgcagcagg

SEQ ID NO: 1686519 - RNA, 19 nt, Artificial Sequence
  Description of Artificial Sequence: Synthetic oligonucleotide
guuagcggcuugccaggac

SEQ ID NO: 1686520 - RNA, 19 nt, Artificial Sequence
  Description of Artificial Sequence: Synthetic oligonucleotide
ucgcgcgaccgcagcaggc

SEQ ID NO: 1686521 - RNA, 19 nt, Artificial Sequence
  Description of Artificial Sequence: Synthetic oligonucleotide
caagucucuggccuggagu

SEQ ID NO: 1686522 - RNA, 19 nt, Artificial Sequence
  Description of Artificial Sequence: Synthetic oligonucleotide
gucgugaugcucaucacau

SEQ ID NO: 1686523 - RNA, 19 nt, Artificial Sequence
  Description of Artificial Sequence: Synthetic oligonucleotide
cuucugucgacagacgagu

SEQ ID NO: 1686524 - RNA, 19 nt, Artificial Sequence
  Description of Artificial Sequence: Synthetic oligonucleotide
aucccuguaaucagccaaa

SEQ ID NO: 1686525 - RNA, 19 nt, Artificial Sequence
  Description of Artificial Sequence: Synthetic oligonucleotide
gcucugaacucaaacggca

SEQ ID NO: 1686526 - RNA, 19 nt, Artificial Sequence
  Description of Artificial Sequence: Synthetic oligonucleotide
gacugcacggcgcggggaa

SEQ ID NO: 1686527 - RNA, 19 nt, Artificial Sequence
  Description of Artificial Sequence: Synthetic oligonucleotide
caaaacacacggugguccu

SEQ ID NO: 1686528 - RNA, 19 nt, Artificial Sequence
  Description of Artificial Sequence: Synthetic oligonucleotide
ugucgacagacgagugcuu

SEQ ID NO: 1686529 - RNA, 19 nt, Artificial Sequence
  Description of Artificial Sequence: Synthetic oligonucleotide
aucagccaaaacacacggu

SEQ ID NO: 1686530 - RNA, 19 nt, Artificial Sequence
  Description of Artificial Sequence: Synthetic oligonucleotide
gcaacggguaugugacgag

SEQ ID NO: 1686531 - RNA, 19 nt, Artificial Sequence
  Description of Artificial Sequence: Synthetic oligonucleotide
cucucauaagaaguaacau

SEQ ID NO: 1686532 - RNA, 19 nt, Artificial Sequence
  Description of Artificial Sequence: Synthetic oligonucleotide
gucucaaggaucaguggcu

SEQ ID NO: 1686533 - RNA, 19 nt, Artificial Sequence
  Description of Artificial Sequence: Synthetic oligonucleotide
gugcuuaggguccacuaau

SEQ ID NO: 1686534 - RNA, 19 nt, Artificial Sequence
  Description of Artificial Sequence: Synthetic oligonucleotide
aaacggcaacggguaugug

SEQ ID NO: 1686535 - RNA, 19 nt, Artificial Sequence
  Description of Artificial Sequence: Synthetic oligonucleotide
cugucgacagacgagugcu

SEQ ID NO: 1686536 - RNA, 19 nt, Artificial Sequence
  Description of Artificial Sequence: Synthetic oligonucleotide
ggacccgaagcucccgagc

SEQ ID NO: 1686537 - RNA, 19 nt, Artificial Sequence
  Description of Artificial Sequence: Synthetic oligonucleotide
auccuucuaucugccagaa

SEQ ID NO: 1686538 - RNA, 19 nt, Artificial Sequence
  Description of Artificial Sequence: Synthetic oligonucleotide
gguaugugacgagcugacc

SEQ ID NO: 1686539 - RNA, 19 nt, Artificial Sequence
  Description of Artificial Sequence: Synthetic oligonucleotide
ggaaagguccucagcuaac

SEQ ID NO: 1686540 - RNA, 19 nt, Artificial Sequence
  Description of Artificial Sequence: Synthetic oligonucleotide
cuguuguuccuggucguga

SEQ ID NO: 1686541 - RNA, 19 nt, Artificial Sequence
  Description of Artificial Sequence: Synthetic oligonucleotide
auggucaaucccaguacuu

SEQ ID NO: 1686542 - RNA, 19 nt, Artificial Sequence
  Description of Artificial Sequence: Synthetic oligonucleotide
ccgauaaucuaguaucaua

SEQ ID NO: 1686543 - RNA, 19 nt, Artificial Sequence
  Description of Artificial Sequence: Synthetic oligonucleotide
agcuaaccgguaguaguuu

SEQ ID NO: 1686544 - RNA, 19 nt, Artificial Sequence
  Description of Artificial Sequence: Synthetic oligonucleotide
gcaggaugcuaaguuuccc

SEQ ID NO: 1686545 - RNA, 19 nt, Artificial Sequence
  Description of Artificial Sequence: Synthetic oligonucleotide
caaacggcaacggguaugu

SEQ ID NO: 1686546 - RNA, 19 nt, Artificial Sequence
  Description of Artificial Sequence: Synthetic oligonucleotide
cucccgagccucauuggaa

SEQ ID NO: 1686547 - RNA, 19 nt, Artificial Sequence
  Description of Artificial Sequence: Synthetic oligonucleotide
gccgggacugcacggcgcg

SEQ ID NO: 1686548 - RNA, 19 nt, Artificial Sequence
  Description of Artificial Sequence: Synthetic oligonucleotide
cagcgcagggcgagcucgg

SEQ ID NO: 1686549 - RNA, 19 nt, Artificial Sequence
  Description of Artificial Sequence: Synthetic oligonucleotide
ggccuggagugcuaauuca

SEQ ID NO: 1686550 - RNA, 19 nt, Artificial Sequence
  Description of Artificial Sequence: Synthetic oligonucleotide
ccauuaguccaaagaguga

SEQ ID NO: 1686551 - RNA, 19 nt, Artificial Sequence
  Description of Artificial Sequence: Synthetic oligonucleotide
acacggugguccucuucaa

SEQ ID NO: 1686552 - RNA, 19 nt, Artificial Sequence
  Description of Artificial Sequence: Synthetic oligonucleotide
gacgagugcuuagggucca

SEQ ID NO: 1686553 - RNA, 19 nt, Artificial Sequence
  Description of Artificial Sequence: Synthetic oligonucleotide
cugcacggcgcggggaagc

SEQ ID NO: 1686554 - RNA, 19 nt, Artificial Sequence
  Description of Artificial Sequence: Synthetic oligonucleotide
ccgagccucauuggaaagg

SEQ ID NO: 1686555 - RNA, 19 nt, Artificial Sequence
  Description of Artificial Sequence: Synthetic oligonucleotide
cuagauugaugaagaugau

SEQ ID NO: 1686556 - RNA, 19 nt, Artificial Sequence
  Description of Artificial Sequence: Synthetic oligonucleotide
augguuaguuguagauuua

SEQ ID NO: 1686557 - RNA, 19 nt, Artificial Sequence
  Description of Artificial Sequence: Synthetic oligonucleotide
ggacaugcaguuugcuucu

SEQ ID NO: 1686558 - RNA, 19 nt, Artificial Sequence
  Description of Artificial Sequence: Synthetic oligonucleotide
ugcacggcgcggggaagca

SEQ ID NO: 1686559 - RNA, 19 nt, Artificial Sequence
  Description of Artificial Sequence: Synthetic oligonucleotide
cccuguaaucagccaaaac

SEQ ID NO: 1686560 - RNA, 19 nt, Artificial Sequence
  Description of Artificial Sequence: Synthetic oligonucleotide
gaagguucccaugguuagu

SEQ ID NO: 1686561 - RNA, 19 nt, Artificial Sequence
  Description of Artificial Sequence: Synthetic oligonucleotide
acauugcgauggcugucua

SEQ ID NO: 1686562 - RNA, 19 nt, Artificial Sequence
  Description of Artificial Sequence: Synthetic oligonucleotide
gcuggcuaaaguagcuuga

SEQ ID NO: 1686563 - RNA, 19 nt, Artificial Sequence
  Description of Artificial Sequence: Synthetic oligonucleotide
aguucccggaacagccacu

SEQ ID NO: 1686564 - RNA, 19 nt, Artificial Sequence
  Description of Artificial Sequence: Synthetic oligonucleotide
cuaaugcauccagggucuc

SEQ ID NO: 1686565 - RNA, 19 nt, Artificial Sequence
  Description of Artificial Sequence: Synthetic oligonucleotide
acugcacggcgcggggaag

SEQ ID NO: 1686566 - RNA, 19 nt, Artificial Sequence
  Description of Artificial Sequence: Synthetic oligonucleotide
cuaacucggagagacuuuu

SEQ ID NO: 1686567 - RNA, 19 nt, Artificial Sequence
  Description of Artificial Sequence: Synthetic oligonucleotide
cacauugcgauggcugucu

SEQ ID NO: 1686568 - RNA, 19 nt, Artificial Sequence
  Description of Artificial Sequence: Synthetic oligonucleotide
cagcuaaccgguaguaguu

SEQ ID NO: 1686569 - RNA, 19 nt, Artificial Sequence
  Description of Artificial Sequence: Synthetic oligonucleotide
cgacagacgagugcuuagg

SEQ ID NO: 1686570 - RNA, 19 nt, Artificial Sequence
  Description of Artificial Sequence: Synthetic oligonucleotide
cacuuccauccuucuaucu

SEQ ID NO: 1686571 - RNA, 19 nt, Artificial Sequence
  Description of Artificial Sequence: Synthetic oligonucleotide
ggauggcaguucccggaac

SEQ ID NO: 1686572 - RNA, 19 nt, Artificial Sequence
  Description of Artificial Sequence: Synthetic oligonucleotide
cccgagccucauuggaaag

SEQ ID NO: 1686573 - RNA, 19 nt, Artificial Sequence
  Description of Artificial Sequence: Synthetic oligonucleotide
acgcuggcuaaaguagcuu

SEQ ID NO: 1686574 - RNA, 19 nt, Artificial Sequence
  Description of Artificial Sequence: Synthetic oligonucleotide
gugcuucaauagcucugaa

SEQ ID NO: 1686575 - RNA, 19 nt, Artificial Sequence
  Description of Artificial Sequence: Synthetic oligonucleotide
cgguaguaguuuucuagca

SEQ ID NO: 1686576 - RNA, 19 nt, Artificial Sequence
  Description of Artificial Sequence: Synthetic oligonucleotide
cagcggggucgcgcgaccg

SEQ ID NO: 1686577 - RNA, 19 nt, Artificial Sequence
  Description of Artificial Sequence: Synthetic oligonucleotide
agcggcuugccaggacagu

SEQ ID NO: 1686578 - RNA, 19 nt, Artificial Sequence
  Description of Artificial Sequence: Synthetic oligonucleotide
gcgagucaucaaucaggac

SEQ ID NO: 1686579 - RNA, 19 nt, Artificial Sequence
  Description of Artificial Sequence: Synthetic oligonucleotide
cccaugguuaguuguagau

SEQ ID NO: 1686580 - RNA, 19 nt, Artificial Sequence
  Description of Artificial Sequence: Synthetic oligonucleotide
ggggucgcgcgaccgcagc

SEQ ID NO: 1686581 - RNA, 19 nt, Artificial Sequence
  Description of Artificial Sequence: Synthetic oligonucleotide
gcuaaccgguaguaguuuu

SEQ ID NO: 1686582 - RNA, 19 nt, Artificial Sequence
  Description of Artificial Sequence: Synthetic oligonucleotide
caaucccaguacuucucuu

SEQ ID NO: 1686583 - RNA, 19 nt, Artificial Sequence
  Description of Artificial Sequence: Synthetic oligonucleotide
ggagagacuuuugccauuu

SEQ ID NO: 1686584 - RNA, 19 nt, Artificial Sequence
  Description of Artificial Sequence: Synthetic oligonucleotide
ccaucucgucugcaugguc

SEQ ID NO: 1686585 - RNA, 19 nt, Artificial Sequence
  Description of Artificial Sequence: Synthetic oligonucleotide
cucaagucucuggccugga

SEQ ID NO: 1686586 - RNA, 19 nt, Artificial Sequence
  Description of Artificial Sequence: Synthetic oligonucleotide
cucaggggcgccgcacaca

SEQ ID NO: 1686587 - RNA, 19 nt, Artificial Sequence
  Description of Artificial Sequence: Synthetic oligonucleotide
gcgcgaccgcagcaggcag

SEQ ID NO: 1686588 - RNA, 19 nt, Artificial Sequence
  Description of Artificial Sequence: Synthetic oligonucleotide
gcucaggggcgccgcacac

SEQ ID NO: 1686589 - RNA, 19 nt, Artificial Sequence
  Description of Artificial Sequence: Synthetic oligonucleotide
cggagguucuagaccggug

SEQ ID NO: 1686590 - RNA, 19 nt, Artificial Sequence
  Description of Artificial Sequence: Synthetic oligonucleotide
ggcgagcucggcgccuucc

SEQ ID NO: 1686591 - RNA, 19 nt, Artificial Sequence
  Description of Artificial Sequence: Synthetic oligonucleotide
ccacuaaugcauccagggu

SEQ ID NO: 1686592 - RNA, 19 nt, Artificial Sequence
  Description of Artificial Sequence: Synthetic oligonucleotide
gcgccuuccggcucccgga

SEQ ID NO: 1686593 - RNA, 19 nt, Artificial Sequence
  Description of Artificial Sequence: Synthetic oligonucleotide
cucuggccuggagugcuaa

SEQ ID NO: 1686594 - RNA, 19 nt, Artificial Sequence
  Description of Artificial Sequence: Synthetic oligonucleotide
caaacaccugggccacgcu

SEQ ID NO: 1686595 - RNA, 19 nt, Artificial Sequence
  Description of Artificial Sequence: Synthetic oligonucleotide
cugcauggucaaucccagu

SEQ ID NO: 1686596 - RNA, 19 nt, Artificial Sequence
  Description of Artificial Sequence: Synthetic oligonucleotide
ccgccgggacugcacggcg

SEQ ID NO: 1686597 - RNA, 19 nt, Artificial Sequence
  Description of Artificial Sequence: Synthetic oligonucleotide
ggcaacgcaggcauuccau

SEQ ID NO: 1686598 - RNA, 19 nt, Artificial Sequence
  Description of Artificial Sequence: Synthetic oligonucleotide
cgcgaccgcagcaggcagc

SEQ ID NO: 1686599 - RNA, 19 nt, Artificial Sequence
  Description of Artificial Sequence: Synthetic oligonucleotide
cgggacugcacggcgcggg

SEQ ID NO: 1686600 - RNA, 19 nt, Artificial Sequence
  Description of Artificial Sequence: Synthetic oligonucleotide
agggcgagcucggcgccuu

SEQ ID NO: 1686601 - RNA, 19 nt, Artificial Sequence
  Description of Artificial Sequence: Synthetic oligonucleotide
gccuggagugcuaauucau

SEQ ID NO: 1686602 - RNA, 19 nt, Artificial Sequence
  Description of Artificial Sequence: Synthetic oligonucleotide
gugggucacuccacuuggu

SEQ ID NO: 1686603 - RNA, 19 nt, Artificial Sequence
  Description of Artificial Sequence: Synthetic oligonucleotide
cacuucccauaaacauaau

SEQ ID NO: 1686604 - RNA, 19 nt, Artificial Sequence
  Description of Artificial Sequence: Synthetic oligonucleotide
ccucagcuaaccgguagua

SEQ ID NO: 1686605 - RNA, 19 nt, Artificial Sequence
  Description of Artificial Sequence: Synthetic oligonucleotide
ccaugguuaguuguagauu

SEQ ID NO: 1686606 - RNA, 19 nt, Artificial Sequence
  Description of Artificial Sequence: Synthetic oligonucleotide
gcacggcgcggggaagcag

SEQ ID NO: 1686607 - RNA, 19 nt, Artificial Sequence
  Description of Artificial Sequence: Synthetic oligonucleotide
uuccgcccugaggcuguuu

SEQ ID NO: 1686608 - RNA, 19 nt, Artificial Sequence
  Description of Artificial Sequence: Synthetic oligonucleotide
ccuggucgugaugcucauc

SEQ ID NO: 1686609 - RNA, 19 nt, Artificial Sequence
  Description of Artificial Sequence: Synthetic oligonucleotide
guuuccccugaaggguguu

SEQ ID NO: 1686610 - RNA, 19 nt, Artificial Sequence
  Description of Artificial Sequence: Synthetic oligonucleotide
cugggccacgcuggcuaaa

SEQ ID NO: 1686611 - RNA, 19 nt, Artificial Sequence
  Description of Artificial Sequence: Synthetic oligonucleotide
cggggucgcgcgaccgcag

SEQ ID NO: 1686612 - RNA, 19 nt, Artificial Sequence
  Description of Artificial Sequence: Synthetic oligonucleotide
ccugugggucacuccacuu

SEQ ID NO: 1686613 - RNA, 19 nt, Artificial Sequence
  Description of Artificial Sequence: Synthetic oligonucleotide
cgcgcgaccgcagcaggca

SEQ ID NO: 1686614 - RNA, 19 nt, Artificial Sequence
  Description of Artificial Sequence: Synthetic oligonucleotide
gggcgagcucggcgccuuc

SEQ ID NO: 1686615 - RNA, 19 nt, Artificial Sequence
  Description of Artificial Sequence: Synthetic oligonucleotide
ccacugcuccagguuuaaa

SEQ ID NO: 1686616 - RNA, 19 nt, Artificial Sequence
  Description of Artificial Sequence: Synthetic oligonucleotide
ccgaguccuuccgcccuga

SEQ ID NO: 1686617 - RNA, 19 nt, Artificial Sequence
  Description of Artificial Sequence: Synthetic oligonucleotide
cuuccgcccugaggcuguu

SEQ ID NO: 1686618 - RNA, 19 nt, Artificial Sequence
  Description of Artificial Sequence: Synthetic oligonucleotide
cggcgccuuccggcucccg

SEQ ID NO: 1686619 - RNA, 19 nt, Artificial Sequence
  Description of Artificial Sequence: Synthetic oligonucleotide
cggcgcggggaagcagccu

SEQ ID NO: 1686620 - RNA, 19 nt, Artificial Sequence
  Description of Artificial Sequence: Synthetic oligonucleotide
ucuacuauaauacagaggg

SEQ ID NO: 1686621 - RNA, 19 nt, Artificial Sequence
  Description of Artificial Sequence: Synthetic oligonucleotide
aaauaaguuucccagcccc

SEQ ID NO: 1686622 - RNA, 19 nt, Artificial Sequence
  Description of Artificial Sequence: Synthetic oligonucleotide
auuauuagaaucuccuccc

SEQ ID NO: 1686623 - RNA, 19 nt, Artificial Sequence
  Description of Artificial Sequence: Synthetic oligonucleotide
aaucaauugguagagugcc

SEQ ID NO: 1686624 - RNA, 19 nt, Artificial Sequence
  Description of Artificial Sequence: Synthetic oligonucleotide
aauauguacaccaggagac

SEQ ID NO: 1686625 - RNA, 19 nt, Artificial Sequence
  Description of Artificial Sequence: Synthetic oligonucleotide
uacaaaaugguacacaggu

SEQ ID NO: 1686626 - RNA, 19 nt, Artificial Sequence
  Description of Artificial Sequence: Synthetic oligonucleotide
auugcgcucauucacaagc

SEQ ID NO: 1686627 - RNA, 19 nt, Artificial Sequence
  Description of Artificial Sequence: Synthetic oligonucleotide
agaauauacaaaaugguac

SEQ ID NO: 1686628 - RNA, 19 nt, Artificial Sequence
  Description of Artificial Sequence: Synthetic oligonucleotide
uuuuagacaaccauaauuu

SEQ ID NO: 1686629 - RNA, 19 nt, Artificial Sequence
  Description of Artificial Sequence: Synthetic oligonucleotide
aaaaguuagguagugcugg

SEQ ID NO: 1686630 - RNA, 19 nt, Artificial Sequence
  Description of Artificial Sequence: Synthetic oligonucleotide
aaccauaauuuucacuucg

SEQ ID NO: 1686631 - RNA, 19 nt, Artificial Sequence
  Description of Artificial Sequence: Synthetic oligonucleotide
uaaaucaauugguagagug

SEQ ID NO: 1686632 - RNA, 19 nt, Artificial Sequence
  Description of Artificial Sequence: Synthetic oligonucleotide
aaugccuagccuuuagcac

SEQ ID NO: 1686633 - RNA, 19 nt, Artificial Sequence
  Description of Artificial Sequence: Synthetic oligonucleotide
acagguacaauauguacac

SEQ ID NO: 1686634 - RNA, 19 nt, Artificial Sequence
  Description of Artificial Sequence: Synthetic oligonucleotide
aauaguacccaauuucccu

SEQ ID NO: 1686635 - RNA, 19 nt, Artificial Sequence
  Description of Artificial Sequence: Synthetic oligonucleotide
uugucauaaggccugagag

SEQ ID NO: 1686636 - RNA, 19 nt, Artificial Sequence
  Description of Artificial Sequence: Synthetic oligonucleotide
uagacaaccauaauuuuca

SEQ ID NO: 1686637 - RNA, 19 nt, Artificial Sequence
  Description of Artificial Sequence: Synthetic oligonucleotide
aauauacaaaaugguacac

SEQ ID NO: 1686638 - RNA, 19 nt, Artificial Sequence
  Description of Artificial Sequence: Synthetic oligonucleotide
cuggauacagcaauguucg

SEQ ID NO: 1686639 - RNA, 19 nt, Artificial Sequence
  Description of Artificial Sequence: Synthetic oligonucleotide
acaaccauaauuuucacuu

SEQ ID NO: 1686640 - RNA, 19 nt, Artificial Sequence
  Description of Artificial Sequence: Synthetic oligonucleotide
auucacaagccucaacacc

SEQ ID NO: 1686641 - RNA, 19 nt, Artificial Sequence
  Description of Artificial Sequence: Synthetic oligonucleotide
agaauaguacccaauuucc

SEQ ID NO: 1686642 - RNA, 19 nt, Artificial Sequence
  Description of Artificial Sequence: Synthetic oligonucleotide
acagcaauguucgaguucc

SEQ ID NO: 1686643 - RNA, 19 nt, Artificial Sequence
  Description of Artificial Sequence: Synthetic oligonucleotide
uauacugucggccaggcuc

SEQ ID NO: 1686644 - RNA, 19 nt, Artificial Sequence
  Description of Artificial Sequence: Synthetic oligonucleotide
uguaaaucaauugguagag

SEQ ID NO: 1686645 - RNA, 19 nt, Artificial Sequence
  Description of Artificial Sequence: Synthetic oligonucleotide
uucacaagccucaacacca

SEQ ID NO: 1686646 - RNA, 19 nt, Artificial Sequence
  Description of Artificial Sequence: Synthetic oligonucleotide
aaaugccuagccuuuagca

SEQ ID NO: 1686647 - RNA, 19 nt, Artificial Sequence
  Description of Artificial Sequence: Synthetic oligonucleotide
acauguagggccugguugc

SEQ ID NO: 1686648 - RNA, 19 nt, Artificial Sequence
  Description of Artificial Sequence: Synthetic oligonucleotide
aauuuucacuucgucauuc

SEQ ID NO: 1686649 - RNA, 19 nt, Artificial Sequence
  Description of Artificial Sequence: Synthetic oligonucleotide
gagaauaguacccaauuuc

SEQ ID NO: 1686650 - RNA, 19 nt, Artificial Sequence
  Description of Artificial Sequence: Synthetic oligonucleotide
uuagacaaccauaauuuuc

SEQ ID NO: 1686651 - RNA, 19 nt, Artificial Sequence
  Description of Artificial Sequence: Synthetic oligonucleotide
cauggcuacauguagggcc

SEQ ID NO: 1686652 - RNA, 19 nt, Artificial Sequence
  Description of Artificial Sequence: Synthetic oligonucleotide
uccuacacuaccaauaaau

SEQ ID NO: 1686653 - RNA, 19 nt, Artificial Sequence
  Description of Artificial Sequence: Synthetic oligonucleotide
uuaagaagaugggaguugg

SEQ ID NO: 1686654 - RNA, 19 nt, Artificial Sequence
  Description of Artificial Sequence: Synthetic oligonucleotide
aagaagaugggaguugguc

SEQ ID NO: 1686655 - RNA, 19 nt, Artificial Sequence
  Description of Artificial Sequence: Synthetic oligonucleotide
cauacaguuaccccaauug

SEQ ID NO: 1686656 - RNA, 19 nt, Artificial Sequence
  Description of Artificial Sequence: Synthetic oligonucleotide
aagccucaacaccagcucc

SEQ ID NO: 1686657 - RNA, 19 nt, Artificial Sequence
  Description of Artificial Sequence: Synthetic oligonucleotide
acuaccaauaaauaaguuu

SEQ ID NO: 1686658 - RNA, 19 nt, Artificial Sequence
  Description of Artificial Sequence: Synthetic oligonucleotide
uaccccaauugucauaagg

SEQ ID NO: 1686659 - RNA, 19 nt, Artificial Sequence
  Description of Artificial Sequence: Synthetic oligonucleotide
aacccauggaaaugcugcc

SEQ ID NO: 1686660 - RNA, 19 nt, Artificial Sequence
  Description of Artificial Sequence: Synthetic oligonucleotide
acacagguacaauauguac

SEQ ID NO: 1686661 - RNA, 19 nt, Artificial Sequence
  Description of Artificial Sequence: Synthetic oligonucleotide
uacauguagggccugguug

SEQ ID NO: 1686662 - RNA, 19 nt, Artificial Sequence
  Description of Artificial Sequence: Synthetic oligonucleotide
aaaguuagguagugcuggg

SEQ ID NO: 1686663 - RNA, 19 nt, Artificial Sequence
  Description of Artificial Sequence: Synthetic oligonucleotide
aauguucgaguuccucuac

SEQ ID NO: 1686664 - RNA, 19 nt, Artificial Sequence
  Description of Artificial Sequence: Synthetic oligonucleotide
uucgucauucucaucagca

SEQ ID NO: 1686665 - RNA, 19 nt, Artificial Sequence
  Description of Artificial Sequence: Synthetic oligonucleotide
uuggcauacaguuacccca

SEQ ID NO: 1686666 - RNA, 19 nt, Artificial Sequence
  Description of Artificial Sequence: Synthetic oligonucleotide
ucuacccucuccuugagcu

SEQ ID NO: 1686667 - RNA, 19 nt, Artificial Sequence
  Description of Artificial Sequence: Synthetic oligonucleotide
cauaauuuucacuucguca

SEQ ID NO: 1686668 - RNA, 19 nt, Artificial Sequence
  Description of Artificial Sequence: Synthetic oligonucleotide
auaauacagaggguguccc

SEQ ID NO: 1686669 - RNA, 19 nt, Artificial Sequence
  Description of Artificial Sequence: Synthetic oligonucleotide
gauacaaggauugcugccc

SEQ ID NO: 1686670 - RNA, 19 nt, Artificial Sequence
  Description of Artificial Sequence: Synthetic oligonucleotide
uauaauacagagggugucc

SEQ ID NO: 1686671 - RNA, 19 nt, Artificial Sequence
  Description of Artificial Sequence: Synthetic oligonucleotide
acaauauguacaccaggag

SEQ ID NO: 1686672 - RNA, 19 nt, Artificial Sequence
  Description of Artificial Sequence: Synthetic oligonucleotide
uucccugucccaaagugcc

SEQ ID NO: 1686673 - RNA, 19 nt, Artificial Sequence
  Description of Artificial Sequence: Synthetic oligonucleotide
guacaauauguacaccagg

SEQ ID NO: 1686674 - RNA, 19 nt, Artificial Sequence
  Description of Artificial Sequence: Synthetic oligonucleotide
accccaauugucauaaggc

SEQ ID NO: 1686675 - RNA, 19 nt, Artificial Sequence
  Description of Artificial Sequence: Synthetic oligonucleotide
aaaggggauacaaggauug

SEQ ID NO: 1686676 - RNA, 19 nt, Artificial Sequence
  Description of Artificial Sequence: Synthetic oligonucleotide
ucuccagagagcuggauac

SEQ ID NO: 1686677 - RNA, 19 nt, Artificial Sequence
  Description of Artificial Sequence: Synthetic oligonucleotide
ugcaucagcaggaugcuac

SEQ ID NO: 1686678 - RNA, 19 nt, Artificial Sequence
  Description of Artificial Sequence: Synthetic oligonucleotide
aaccucuacuauaauacag

SEQ ID NO: 1686679 - RNA, 19 nt, Artificial Sequence
  Description of Artificial Sequence: Synthetic oligonucleotide
gaagaugggaguuggucug

SEQ ID NO: 1686680 - RNA, 19 nt, Artificial Sequence
  Description of Artificial Sequence: Synthetic oligonucleotide
gaacccauggaaaugcugc

SEQ ID NO: 1686681 - RNA, 19 nt, Artificial Sequence
  Description of Artificial Sequence: Synthetic oligonucleotide
ucugggaaugugcugggcc

SEQ ID NO: 1686682 - RNA, 19 nt, Artificial Sequence
  Description of Artificial Sequence: Synthetic oligonucleotide
uacccaauuucccuguccc

SEQ ID NO: 1686683 - RNA, 19 nt, Artificial Sequence
  Description of Artificial Sequence: Synthetic oligonucleotide
uuuaagaagaugggaguug

SEQ ID NO: 1686684 - RNA, 19 nt, Artificial Sequence
  Description of Artificial Sequence: Synthetic oligonucleotide
agucccacucccuaaagug

SEQ ID NO: 1686685 - RNA, 19 nt, Artificial Sequence
  Description of Artificial Sequence: Synthetic oligonucleotide
guguaaaucaauugguaga

SEQ ID NO: 1686686 - RNA, 19 nt, Artificial Sequence
  Description of Artificial Sequence: Synthetic oligonucleotide
uugugcaggcucuauacug

SEQ ID NO: 1686687 - RNA, 19 nt, Artificial Sequence
  Description of Artificial Sequence: Synthetic oligonucleotide
auaguacccaauuucccug

SEQ ID NO: 1686688 - RNA, 19 nt, Artificial Sequence
  Description of Artificial Sequence: Synthetic oligonucleotide
uggucugggaaugugcugg

SEQ ID NO: 1686689 - RNA, 19 nt, Artificial Sequence
  Description of Artificial Sequence: Synthetic oligonucleotide
caagaagcggcucugcagc

SEQ ID NO: 1686690 - RNA, 19 nt, Artificial Sequence
  Description of Artificial Sequence: Synthetic oligonucleotide
uguucgaguuccucuaccc

SEQ ID NO: 1686691 - RNA, 19 nt, Artificial Sequence
  Description of Artificial Sequence: Synthetic oligonucleotide
uccucuguccuacacuacc

SEQ ID NO: 1686692 - RNA, 19 nt, Artificial Sequence
  Description of Artificial Sequence: Synthetic oligonucleotide
uuucccugucccaaagugc

SEQ ID NO: 1686693 - RNA, 19 nt, Artificial Sequence
  Description of Artificial Sequence: Synthetic oligonucleotide
gagacugccaggaauuugc

SEQ ID NO: 1686694 - RNA, 19 nt, Artificial Sequence
  Description of Artificial Sequence: Synthetic oligonucleotide
ugcccucugguuuugguag

SEQ ID NO: 1686695 - RNA, 19 nt, Artificial Sequence
  Description of Artificial Sequence: Synthetic oligonucleotide
auugucauaaggccugaga

SEQ ID NO: 1686696 - RNA, 19 nt, Artificial Sequence
  Description of Artificial Sequence: Synthetic oligonucleotide
ucaauugguagagugccug

SEQ ID NO: 1686697 - RNA, 19 nt, Artificial Sequence
  Description of Artificial Sequence: Synthetic oligonucleotide
auacaguuaccccaauugu

SEQ ID NO: 1686698 - RNA, 19 nt, Artificial Sequence
  Description of Artificial Sequence: Synthetic oligonucleotide
ugggcuagccugcugaugu

SEQ ID NO: 1686699 - RNA, 19 nt, Artificial Sequence
  Description of Artificial Sequence: Synthetic oligonucleotide
auguucgaguuccucuacc

SEQ ID NO: 1686700 - RNA, 19 nt, Artificial Sequence
  Description of Artificial Sequence: Synthetic oligonucleotide
cuuggcauacaguuacccc

SEQ ID NO: 1686701 - RNA, 19 nt, Artificial Sequence
  Description of Artificial Sequence: Synthetic oligonucleotide
aguuagguagugcuggggu

SEQ ID NO: 1686702 - RNA, 19 nt, Artificial Sequence
  Description of Artificial Sequence: Synthetic oligonucleotide
cuggaucucacgcaguagc

SEQ ID NO: 1686703 - RNA, 19 nt, Artificial Sequence
  Description of Artificial Sequence: Synthetic oligonucleotide
aagauggaagcccuccuaa

SEQ ID NO: 1686704 - RNA, 19 nt, Artificial Sequence
  Description of Artificial Sequence: Synthetic oligonucleotide
ugauuauuagaaucuccuc

SEQ ID NO: 1686705 - RNA, 19 nt, Artificial Sequence
  Description of Artificial Sequence: Synthetic oligonucleotide
ccaaccucuacuauaauac

SEQ ID NO: 1686706 - RNA, 19 nt, Artificial Sequence
  Description of Artificial Sequence: Synthetic oligonucleotide
gaauaguacccaauuuccc

SEQ ID NO: 1686707 - RNA, 19 nt, Artificial Sequence
  Description of Artificial Sequence: Synthetic oligonucleotide
uguacaccaggagacgggg

SEQ ID NO: 1686708 - RNA, 19 nt, Artificial Sequence
  Description of Artificial Sequence: Synthetic oligonucleotide
ucuccaaaugccuagccuu

SEQ ID NO: 1686709 - RNA, 19 nt, Artificial Sequence
  Description of Artificial Sequence: Synthetic oligonucleotide
agaaucacucacauuacug

SEQ ID NO: 1686710 - RNA, 19 nt, Artificial Sequence
  Description of Artificial Sequence: Synthetic oligonucleotide
ugugcaggcucuauacugu

SEQ ID NO: 1686711 - RNA, 19 nt, Artificial Sequence
  Description of Artificial Sequence: Synthetic oligonucleotide
gauacagcaauguucgagu

SEQ ID NO: 1686712 - RNA, 19 nt, Artificial Sequence
  Description of Artificial Sequence: Synthetic oligonucleotide
ucugucucuccagagagcu

SEQ ID NO: 1686713 - RNA, 19 nt, Artificial Sequence
  Description of Artificial Sequence: Synthetic oligonucleotide
aaggggauacaaggauugc

SEQ ID NO: 1686714 - RNA, 19 nt, Artificial Sequence
  Description of Artificial Sequence: Synthetic oligonucleotide
cacagguacaauauguaca

SEQ ID NO: 1686715 - RNA, 19 nt, Artificial Sequence
  Description of Artificial Sequence: Synthetic oligonucleotide
uucuccaaaugccuagccu

SEQ ID NO: 1686716 - RNA, 19 nt, Artificial Sequence
  Description of Artificial Sequence: Synthetic oligonucleotide
aguuagcccaacugccugg

SEQ ID NO: 1686717 - RNA, 19 nt, Artificial Sequence
  Description of Artificial Sequence: Synthetic oligonucleotide
aauuucccugucccaaagu

SEQ ID NO: 1686718 - RNA, 19 nt, Artificial Sequence
  Description of Artificial Sequence: Synthetic oligonucleotide
ugagagaauaguacccaau

SEQ ID NO: 1686719 - RNA, 19 nt, Artificial Sequence
  Description of Artificial Sequence: Synthetic oligonucleotide
augccuagccuuuagcacu

SEQ ID NO: 1686720 - RNA, 19 nt, Artificial Sequence
  Description of Artificial Sequence: Synthetic oligonucleotide
agacaaccauaauuuucac

SEQ ID NO: 1686721 - RNA, 19 nt, Artificial Sequence
  Description of Artificial Sequence: Synthetic oligonucleotide
aaagauggaagcccuccua

SEQ ID NO: 1686722 - RNA, 19 nt, Artificial Sequence
  Description of Artificial Sequence: Synthetic oligonucleotide
aaaugguacacagguacaa

SEQ ID NO: 1686723 - RNA, 19 nt, Artificial Sequence
  Description of Artificial Sequence: Synthetic oligonucleotide
uuuagacaaccauaauuuu

SEQ ID NO: 1686724 - RNA, 19 nt, Artificial Sequence
  Description of Artificial Sequence: Synthetic oligonucleotide
aaguuagguagugcugggg

SEQ ID NO: 1686725 - RNA, 19 nt, Artificial Sequence
  Description of Artificial Sequence: Synthetic oligonucleotide
uaagugggaugcuuuccag

SEQ ID NO: 1686726 - RNA, 19 nt, Artificial Sequence
  Description of Artificial Sequence: Synthetic oligonucleotide
uccaaccucuacuauaaua

SEQ ID NO: 1686727 - RNA, 19 nt, Artificial Sequence
  Description of Artificial Sequence: Synthetic oligonucleotide
aagaggagcugcaucagca

SEQ ID NO: 1686728 - RNA, 19 nt, Artificial Sequence
  Description of Artificial Sequence: Synthetic oligonucleotide
ugcaggcucuauacugucg

SEQ ID NO: 1686729 - RNA, 19 nt, Artificial Sequence
  Description of Artificial Sequence: Synthetic oligonucleotide
aaaugcugcccagucccac

SEQ ID NO: 1686730 - RNA, 19 nt, Artificial Sequence
  Description of Artificial Sequence: Synthetic oligonucleotide
uaaguuucccagccccaag

SEQ ID NO: 1686731 - RNA, 19 nt, Artificial Sequence
  Description of Artificial Sequence: Synthetic oligonucleotide
cauucacaagccucaacac

SEQ ID NO: 1686732 - RNA, 19 nt, Artificial Sequence
  Description of Artificial Sequence: Synthetic oligonucleotide
ugggaacccauggaaaugc

SEQ ID NO: 1686733 - RNA, 19 nt, Artificial Sequence
  Description of Artificial Sequence: Synthetic oligonucleotide
cuacacuaccaauaaauaa

SEQ ID NO: 1686734 - RNA, 19 nt, Artificial Sequence
  Description of Artificial Sequence: Synthetic oligonucleotide
agacaaaauaaaagaggag

SEQ ID NO: 1686735 - RNA, 19 nt, Artificial Sequence
  Description of Artificial Sequence: Synthetic oligonucleotide
agagaauaguacccaauuu

SEQ ID NO: 1686736 - RNA, 19 nt, Artificial Sequence
  Description of Artificial Sequence: Synthetic oligonucleotide
auauguacaccaggagacg

SEQ ID NO: 1686737 - RNA, 19 nt, Artificial Sequence
  Description of Artificial Sequence: Synthetic oligonucleotide
uucgaguuccucuacccuc

SEQ ID NO: 1686738 - RNA, 19 nt, Artificial Sequence
  Description of Artificial Sequence: Synthetic oligonucleotide
ucacgcaguagcugcauga

SEQ ID NO: 1686739 - RNA, 19 nt, Artificial Sequence
  Description of Artificial Sequence: Synthetic oligonucleotide
aauugguagagugccugcu

SEQ ID NO: 1686740 - RNA, 19 nt, Artificial Sequence
  Description of Artificial Sequence: Synthetic oligonucleotide
aucacucacauuacugggg

SEQ ID NO: 1686741 - RNA, 19 nt, Artificial Sequence
  Description of Artificial Sequence: Synthetic oligonucleotide
uucccaguuucccaaguaa

SEQ ID NO: 1686742 - RNA, 19 nt, Artificial Sequence
  Description of Artificial Sequence: Synthetic oligonucleotide
uucugagagacugccagga

SEQ ID NO: 1686743 - RNA, 19 nt, Artificial Sequence
  Description of Artificial Sequence: Synthetic oligonucleotide
acuauaauacagagggugu

SEQ ID NO: 1686744 - RNA, 19 nt, Artificial Sequence
  Description of Artificial Sequence: Synthetic oligonucleotide
cugggaaugugcugggccc

SEQ ID NO: 1686745 - RNA, 19 nt, Artificial Sequence
  Description of Artificial Sequence: Synthetic oligonucleotide
aaaaggggauacaaggauu

SEQ ID NO: 1686746 - RNA, 19 nt, Artificial Sequence
  Description of Artificial Sequence: Synthetic oligonucleotide
agauggaagcccuccuaag

SEQ ID NO: 1686747 - RNA, 19 nt, Artificial Sequence
  Description of Artificial Sequence: Synthetic oligonucleotide
uuccucuacccucuccuug

SEQ ID NO: 1686748 - RNA, 19 nt, Artificial Sequence
  Description of Artificial Sequence: Synthetic oligonucleotide
aauaaguuucccagcccca

SEQ ID NO: 1686749 - RNA, 19 nt, Artificial Sequence
  Description of Artificial Sequence: Synthetic oligonucleotide
caacgagccucuauccugc

SEQ ID NO: 1686750 - RNA, 19 nt, Artificial Sequence
  Description of Artificial Sequence: Synthetic oligonucleotide
uagagggcaauguacucuc

SEQ ID NO: 1686751 - RNA, 19 nt, Artificial Sequence
  Description of Artificial Sequence: Synthetic oligonucleotide
guuagguagugcuggggug

SEQ ID NO: 1686752 - RNA, 19 nt, Artificial Sequence
  Description of Artificial Sequence: Synthetic oligonucleotide
ucgaguuccucuacccucu

SEQ ID NO: 1686753 - RNA, 19 nt, Artificial Sequence
  Description of Artificial Sequence: Synthetic oligonucleotide
uacagcaauguucgaguuc

SEQ ID NO: 1686754 - RNA, 19 nt, Artificial Sequence
  Description of Artificial Sequence: Synthetic oligonucleotide
cugggguguaaaucaauug

SEQ ID NO: 1686755 - RNA, 19 nt, Artificial Sequence
  Description of Artificial Sequence: Synthetic oligonucleotide
acaaggauugcugcccagg

SEQ ID NO: 1686756 - RNA, 19 nt, Artificial Sequence
  Description of Artificial Sequence: Synthetic oligonucleotide
gucauaaggccugagagaa

SEQ ID NO: 1686757 - RNA, 19 nt, Artificial Sequence
  Description of Artificial Sequence: Synthetic oligonucleotide
acacuaccaauaaauaagu

SEQ ID NO: 1686758 - RNA, 19 nt, Artificial Sequence
  Description of Artificial Sequence: Synthetic oligonucleotide
agccccaagugauuauuag

SEQ ID NO: 1686759 - RNA, 19 nt, Artificial Sequence
  Description of Artificial Sequence: Synthetic oligonucleotide
uccucuacccucuccuuga

SEQ ID NO: 1686760 - RNA, 19 nt, Artificial Sequence
  Description of Artificial Sequence: Synthetic oligonucleotide
aauuugcccugccauucau

SEQ ID NO: 1686761 - RNA, 19 nt, Artificial Sequence
  Description of Artificial Sequence: Synthetic oligonucleotide
cucccuaaggucacccugc

SEQ ID NO: 1686762 - RNA, 19 nt, Artificial Sequence
  Description of Artificial Sequence: Synthetic oligonucleotide
uugcgcucauucacaagcc

SEQ ID NO: 1686763 - RNA, 19 nt, Artificial Sequence
  Description of Artificial Sequence: Synthetic oligonucleotide
cugccagucuuuuagacaa

SEQ ID NO: 1686764 - RNA, 19 nt, Artificial Sequence
  Description of Artificial Sequence: Synthetic oligonucleotide
gucuuuuagacaaccauaa

SEQ ID NO: 1686765 - RNA, 19 nt, Artificial Sequence
  Description of Artificial Sequence: Synthetic oligonucleotide
caggagacggggaaacccc

SEQ ID NO: 1686766 - RNA, 19 nt, Artificial Sequence
  Description of Artificial Sequence: Synthetic oligonucleotide
ggauacagcaauguucgag

SEQ ID NO: 1686767 - RNA, 19 nt, Artificial Sequence
  Description of Artificial Sequence: Synthetic oligonucleotide
aauugucauaaggccugag

SEQ ID NO: 1686768 - RNA, 19 nt, Artificial Sequence
  Description of Artificial Sequence: Synthetic oligonucleotide
gcaggcucuauacugucgg

SEQ ID NO: 1686769 - RNA, 19 nt, Artificial Sequence
  Description of Artificial Sequence: Synthetic oligonucleotide
acccauggaaaugcugccc

SEQ ID NO: 1686770 - RNA, 19 nt, Artificial Sequence
  Description of Artificial Sequence: Synthetic oligonucleotide
ggauacaaggauugcugcc

SEQ ID NO: 1686771 - RNA, 19 nt, Artificial Sequence
  Description of Artificial Sequence: Synthetic oligonucleotide
augggaguuggucugggaa

SEQ ID NO: 1686772 - RNA, 19 nt, Artificial Sequence
  Description of Artificial Sequence: Synthetic oligonucleotide
gaaugugcugggcccuggg

SEQ ID NO: 1686773 - RNA, 19 nt, Artificial Sequence
  Description of Artificial Sequence: Synthetic oligonucleotide
aggcucaccucccuaaggu

SEQ ID NO: 1686774 - RNA, 19 nt, Artificial Sequence
  Description of Artificial Sequence: Synthetic oligonucleotide
accucuacuauaauacaga

SEQ ID NO: 1686775 - RNA, 19 nt, Artificial Sequence
  Description of Artificial Sequence: Synthetic oligonucleotide
caauuucccugucccaaag

SEQ ID NO: 1686776 - RNA, 19 nt, Artificial Sequence
  Description of Artificial Sequence: Synthetic oligonucleotide
gugccuuuaagaagauggg

SEQ ID NO: 1686777 - RNA, 19 nt, Artificial Sequence
  Description of Artificial Sequence: Synthetic oligonucleotide
gccuggacguuccugaggg

SEQ ID NO: 1686778 - RNA, 19 nt, Artificial Sequence
  Description of Artificial Sequence: Synthetic oligonucleotide
ugucccuaccccagaauau

SEQ ID NO: 1686779 - RNA, 19 nt, Artificial Sequence
  Description of Artificial Sequence: Synthetic oligonucleotide
agcaauguucgaguuccuc

SEQ ID NO: 1686780 - RNA, 19 nt, Artificial Sequence
  Description of Artificial Sequence: Synthetic oligonucleotide
uaagaagaugggaguuggu

SEQ ID NO: 1686781 - RNA, 19 nt, Artificial Sequence
  Description of Artificial Sequence: Synthetic oligonucleotide
cuaagugggaugcuuucca

SEQ ID NO: 1686782 - RNA, 19 nt, Artificial Sequence
  Description of Artificial Sequence: Synthetic oligonucleotide
auacaaggauugcugccca

SEQ ID NO: 1686783 - RNA, 19 nt, Artificial Sequence
  Description of Artificial Sequence: Synthetic oligonucleotide
aagaagcggcucugcagcu

SEQ ID NO: 1686784 - RNA, 19 nt, Artificial Sequence
  Description of Artificial Sequence: Synthetic oligonucleotide
uggcauacaguuaccccaa

SEQ ID NO: 1686785 - RNA, 19 nt, Artificial Sequence
  Description of Artificial Sequence: Synthetic oligonucleotide
guuaccccaauugucauaa

SEQ ID NO: 1686786 - RNA, 19 nt, Artificial Sequence
  Description of Artificial Sequence: Synthetic oligonucleotide
ugccuagccuuuagcacug

SEQ ID NO: 1686787 - RNA, 19 nt, Artificial Sequence
  Description of Artificial Sequence: Synthetic oligonucleotide
cauucauugcgcucauuca

SEQ ID NO: 1686788 - RNA, 19 nt, Artificial Sequence
  Description of Artificial Sequence: Synthetic oligonucleotide
agucuuuuagacaaccaua

SEQ ID NO: 1686789 - RNA, 19 nt, Artificial Sequence
  Description of Artificial Sequence: Synthetic oligonucleotide
caaccauaauuuucacuuc

SEQ ID NO: 1686790 - RNA, 19 nt, Artificial Sequence
  Description of Artificial Sequence: Synthetic oligonucleotide
uacccucuccuugagcucc

SEQ ID NO: 1686791 - RNA, 19 nt, Artificial Sequence
  Description of Artificial Sequence: Synthetic oligonucleotide
ucccuaccccagaauauac

SEQ ID NO: 1686792 - RNA, 19 nt, Artificial Sequence
  Description of Artificial Sequence: Synthetic oligonucleotide
ucuguccuacacuaccaau

SEQ ID NO: 1686793 - RNA, 19 nt, Artificial Sequence
  Description of Artificial Sequence: Synthetic oligonucleotide
uaguacccaauuucccugu

SEQ ID NO: 1686794 - RNA, 19 nt, Artificial Sequence
  Description of Artificial Sequence: Synthetic oligonucleotide
uuucccaguuucccaagua

SEQ ID NO: 1686795 - RNA, 19 nt, Artificial Sequence
  Description of Artificial Sequence: Synthetic oligonucleotide
ccucuacuauaauacagag

SEQ ID NO: 1686796 - RNA, 19 nt, Artificial Sequence
  Description of Artificial Sequence: Synthetic oligonucleotide
gggauacaaggauugcugc

SEQ ID NO: 1686797 - RNA, 19 nt, Artificial Sequence
  Description of Artificial Sequence: Synthetic oligonucleotide
guacccaauuucccugucc

SEQ ID NO: 1686798 - RNA, 19 nt, Artificial Sequence
  Description of Artificial Sequence: Synthetic oligonucleotide
uacagagggugucccuacc

SEQ ID NO: 1686799 - RNA, 19 nt, Artificial Sequence
  Description of Artificial Sequence: Synthetic oligonucleotide
gagccucuauccugcuugg

SEQ ID NO: 1686800 - RNA, 19 nt, Artificial Sequence
  Description of Artificial Sequence: Synthetic oligonucleotide
aguagcugcaugaucugcu

SEQ ID NO: 1686801 - RNA, 19 nt, Artificial Sequence
  Description of Artificial Sequence: Synthetic oligonucleotide
uacaaggauugcugcccag

SEQ ID NO: 1686802 - RNA, 19 nt, Artificial Sequence
  Description of Artificial Sequence: Synthetic oligonucleotide
gagagaauaguacccaauu

SEQ ID NO: 1686803 - RNA, 19 nt, Artificial Sequence
  Description of Artificial Sequence: Synthetic oligonucleotide
aaggccugagagaauagua

SEQ ID NO: 1686804 - RNA, 19 nt, Artificial Sequence
  Description of Artificial Sequence: Synthetic oligonucleotide
uggacguuccugaggguuc

SEQ ID NO: 1686805 - RNA, 19 nt, Artificial Sequence
  Description of Artificial Sequence: Synthetic oligonucleotide
acgcaguagcugcaugauc

SEQ ID NO: 1686806 - RNA, 19 nt, Artificial Sequence
  Description of Artificial Sequence: Synthetic oligonucleotide
ucuauccugcuuggcauac

SEQ ID NO: 1686807 - RNA, 19 nt, Artificial Sequence
  Description of Artificial Sequence: Synthetic oligonucleotide
ccacuugccagcuccaacc

SEQ ID NO: 1686808 - RNA, 19 nt, Artificial Sequence
  Description of Artificial Sequence: Synthetic oligonucleotide
ugucccaaagugccucuaa

SEQ ID NO: 1686809 - RNA, 19 nt, Artificial Sequence
  Description of Artificial Sequence: Synthetic oligonucleotide
ccccaauugucauaaggcc

SEQ ID NO: 1686810 - RNA, 19 nt, Artificial Sequence
  Description of Artificial Sequence: Synthetic oligonucleotide
gaagcggcucugcagcuuc

SEQ ID NO: 1686811 - RNA, 19 nt, Artificial Sequence
  Description of Artificial Sequence: Synthetic oligonucleotide
gugggaugcuuuccagagg

SEQ ID NO: 1686812 - RNA, 19 nt, Artificial Sequence
  Description of Artificial Sequence: Synthetic oligonucleotide
ccccagaauauacaaaaug

SEQ ID NO: 1686813 - RNA, 19 nt, Artificial Sequence
  Description of Artificial Sequence: Synthetic oligonucleotide
ugaccuccaagaagcggcu

SEQ ID NO: 1686814 - RNA, 19 nt, Artificial Sequence
  Description of Artificial Sequence: Synthetic oligonucleotide
gcuuuccagaggcaguuag

SEQ ID NO: 1686815 - RNA, 19 nt, Artificial Sequence
  Description of Artificial Sequence: Synthetic oligonucleotide
agagggugucccuacccca

SEQ ID NO: 1686816 - RNA, 19 nt, Artificial Sequence
  Description of Artificial Sequence: Synthetic oligonucleotide
ugcuuggcauacaguuacc

SEQ ID NO: 1686817 - RNA, 19 nt, Artificial Sequence
  Description of Artificial Sequence: Synthetic oligonucleotide
guuagcccaacugccuggg

SEQ ID NO: 1686818 - RNA, 19 nt, Artificial Sequence
  Description of Artificial Sequence: Synthetic oligonucleotide
cuuuagcacugcccucugg

SEQ ID NO: 1686819 - RNA, 19 nt, Artificial Sequence
  Description of Artificial Sequence: Synthetic oligonucleotide
ucugagagacugccaggaa

SEQ ID NO: 1686820 - RNA, 19 nt, Artificial Sequence
  Description of Artificial Sequence: Synthetic oligonucleotide
aggggauacaaggauugcu

SEQ ID NO: 1686821 - RNA, 19 nt, Artificial Sequence
  Description of Artificial Sequence: Synthetic oligonucleotide
ggggauacaaggauugcug

SEQ ID NO: 1686822 - RNA, 19 nt, Artificial Sequence
  Description of Artificial Sequence: Synthetic oligonucleotide
caguguucccacacuuaag

SEQ ID NO: 1686823 - RNA, 19 nt, Artificial Sequence
  Description of Artificial Sequence: Synthetic oligonucleotide
caguuagcccaacugccug

SEQ ID NO: 1686824 - RNA, 19 nt, Artificial Sequence
  Description of Artificial Sequence: Synthetic oligonucleotide
guuuugguagagggcaaug

SEQ ID NO: 1686825 - RNA, 19 nt, Artificial Sequence
  Description of Artificial Sequence: Synthetic oligonucleotide
cuguccuacacuaccaaua

SEQ ID NO: 1686826 - RNA, 19 nt, Artificial Sequence
  Description of Artificial Sequence: Synthetic oligonucleotide
cauaaggccugagagaaua

SEQ ID NO: 1686827 - RNA, 19 nt, Artificial Sequence
  Description of Artificial Sequence: Synthetic oligonucleotide
caaccucuacuauaauaca

SEQ ID NO: 1686828 - RNA, 19 nt, Artificial Sequence
  Description of Artificial Sequence: Synthetic oligonucleotide
aggaauuugcccugccauu

SEQ ID NO: 1686829 - RNA, 19 nt, Artificial Sequence
  Description of Artificial Sequence: Synthetic oligonucleotide
acagugaugagcaggcuuu

SEQ ID NO: 1686830 - RNA, 19 nt, Artificial Sequence
  Description of Artificial Sequence: Synthetic oligonucleotide
ggugucugucucuccagag

SEQ ID NO: 1686831 - RNA, 19 nt, Artificial Sequence
  Description of Artificial Sequence: Synthetic oligonucleotide
caggcuuuggcugccaguc

SEQ ID NO: 1686832 - RNA, 19 nt, Artificial Sequence
  Description of Artificial Sequence: Synthetic oligonucleotide
cauugcgcucauucacaag

SEQ ID NO: 1686833 - RNA, 19 nt, Artificial Sequence
  Description of Artificial Sequence: Synthetic oligonucleotide
auacagcaauguucgaguu

SEQ ID NO: 1686834 - RNA, 19 nt, Artificial Sequence
  Description of Artificial Sequence: Synthetic oligonucleotide
ggggugggcacaucaacag

SEQ ID NO: 1686835 - RNA, 19 nt, Artificial Sequence
  Description of Artificial Sequence: Synthetic oligonucleotide
cucaccucccuaaggucac

SEQ ID NO: 1686836 - RNA, 19 nt, Artificial Sequence
  Description of Artificial Sequence: Synthetic oligonucleotide
caggcucaccucccuaagg

SEQ ID NO: 1686837 - RNA, 19 nt, Artificial Sequence
  Description of Artificial Sequence: Synthetic oligonucleotide
agagacugccaggaauuug

SEQ ID NO: 1686838 - RNA, 19 nt, Artificial Sequence
  Description of Artificial Sequence: Synthetic oligonucleotide
ugguuuugguagagggcaa

SEQ ID NO: 1686839 - RNA, 19 nt, Artificial Sequence
  Description of Artificial Sequence: Synthetic oligonucleotide
accauaauuuucacuucgu

SEQ ID NO: 1686840 - RNA, 19 nt, Artificial Sequence
  Description of Artificial Sequence: Synthetic oligonucleotide
cgucauucucaucagcacg

SEQ ID NO: 1686841 - RNA, 19 nt, Artificial Sequence
  Description of Artificial Sequence: Synthetic oligonucleotide
agccugcugauguacuccu

SEQ ID NO: 1686842 - RNA, 19 nt, Artificial Sequence
  Description of Artificial Sequence: Synthetic oligonucleotide
cuccaauggugucugucuc

SEQ ID NO: 1686843 - RNA, 19 nt, Artificial Sequence
  Description of Artificial Sequence: Synthetic oligonucleotide
gauugcugcccaggccugg

SEQ ID NO: 1686844 - RNA, 19 nt, Artificial Sequence
  Description of Artificial Sequence: Synthetic oligonucleotide
ccugcugauguacuccucc

SEQ ID NO: 1686845 - RNA, 19 nt, Artificial Sequence
  Description of Artificial Sequence: Synthetic oligonucleotide
auaaguuucccagccccaa

SEQ ID NO: 1686846 - RNA, 19 nt, Artificial Sequence
  Description of Artificial Sequence: Synthetic oligonucleotide
gucccacucccuaaagugc

SEQ ID NO: 1686847 - RNA, 19 nt, Artificial Sequence
  Description of Artificial Sequence: Synthetic oligonucleotide
auggcuacauguagggccu

SEQ ID NO: 1686848 - RNA, 19 nt, Artificial Sequence
  Description of Artificial Sequence: Synthetic oligonucleotide
uuagcacugcccucugguu

SEQ ID NO: 1686849 - RNA, 19 nt, Artificial Sequence
  Description of Artificial Sequence: Synthetic oligonucleotide
cacaucaacaggguucuga

SEQ ID NO: 1686850 - RNA, 19 nt, Artificial Sequence
  Description of Artificial Sequence: Synthetic oligonucleotide
agcuggauacagcaauguu

SEQ ID NO: 1686851 - RNA, 19 nt, Artificial Sequence
  Description of Artificial Sequence: Synthetic oligonucleotide
cuggggugggcacaucaac

SEQ ID NO: 1686852 - RNA, 19 nt, Artificial Sequence
  Description of Artificial Sequence: Synthetic oligonucleotide
aguuaccccaauugucaua

SEQ ID NO: 1686853 - RNA, 19 nt, Artificial Sequence
  Description of Artificial Sequence: Synthetic oligonucleotide
ucauaaggccugagagaau

SEQ ID NO: 1686854 - RNA, 19 nt, Artificial Sequence
  Description of Artificial Sequence: Synthetic oligonucleotide
auaaggccugagagaauag

SEQ ID NO: 1686855 - RNA, 19 nt, Artificial Sequence
  Description of Artificial Sequence: Synthetic oligonucleotide
ccaacgagccucuauccug

SEQ ID NO: 1686856 - RNA, 19 nt, Artificial Sequence
  Description of Artificial Sequence: Synthetic oligonucleotide
acguuccugaggguucugg

SEQ ID NO: 1686857 - RNA, 19 nt, Artificial Sequence
  Description of Artificial Sequence: Synthetic oligonucleotide
uggguuccauccccagugu

SEQ ID NO: 1686858 - RNA, 19 nt, Artificial Sequence
  Description of Artificial Sequence: Synthetic oligonucleotide
ggaauuugcccugccauuc

SEQ ID NO: 1686859 - RNA, 19 nt, Artificial Sequence
  Description of Artificial Sequence: Synthetic oligonucleotide
caggcucuauacugucggc

SEQ ID NO: 1686860 - RNA, 19 nt, Artificial Sequence
  Description of Artificial Sequence: Synthetic oligonucleotide
gaucugcugugcagugggg

SEQ ID NO: 1686861 - RNA, 19 nt, Artificial Sequence
  Description of Artificial Sequence: Synthetic oligonucleotide
uggauacagcaauguucga

SEQ ID NO: 1686862 - RNA, 19 nt, Artificial Sequence
  Description of Artificial Sequence: Synthetic oligonucleotide
aacgagccucuauccugcu

SEQ ID NO: 1686863 - RNA, 19 nt, Artificial Sequence
  Description of Artificial Sequence: Synthetic oligonucleotide
gugucccuaccccagaaua

SEQ ID NO: 1686864 - RNA, 19 nt, Artificial Sequence
  Description of Artificial Sequence: Synthetic oligonucleotide
ucacccugcuggucagcag

SEQ ID NO: 1686865 - RNA, 19 nt, Artificial Sequence
  Description of Artificial Sequence: Synthetic oligonucleotide
cugccaggaauuugcccug

SEQ ID NO: 1686866 - RNA, 19 nt, Artificial Sequence
  Description of Artificial Sequence: Synthetic oligonucleotide
gaugggaguuggucuggga

SEQ ID NO: 1686867 - RNA, 19 nt, Artificial Sequence
  Description of Artificial Sequence: Synthetic oligonucleotide
auacugucggccaggcuca

SEQ ID NO: 1686868 - RNA, 19 nt, Artificial Sequence
  Description of Artificial Sequence: Synthetic oligonucleotide
agcaggcuuuggcugccag

SEQ ID NO: 1686869 - RNA, 19 nt, Artificial Sequence
  Description of Artificial Sequence: Synthetic oligonucleotide
cugagagaauaguacccaa

SEQ ID NO: 1686870 - RNA, 19 nt, Artificial Sequence
  Description of Artificial Sequence: Synthetic oligonucleotide
cucuacccucuccuugagc

SEQ ID NO: 1686871 - RNA, 19 nt, Artificial Sequence
  Description of Artificial Sequence: Synthetic oligonucleotide
gggugggcacaucaacagg

SEQ ID NO: 1686872 - RNA, 19 nt, Artificial Sequence
  Description of Artificial Sequence: Synthetic oligonucleotide
uccgccuccuguccucugu

SEQ ID NO: 1686873 - RNA, 19 nt, Artificial Sequence
  Description of Artificial Sequence: Synthetic oligonucleotide
ccccaagugauuauuagaa

SEQ ID NO: 1686874 - RNA, 19 nt, Artificial Sequence
  Description of Artificial Sequence: Synthetic oligonucleotide
uuagcccaacugccuggga

SEQ ID NO: 1686875 - RNA, 19 nt, Artificial Sequence
  Description of Artificial Sequence: Synthetic oligonucleotide
gguagagggcaauguacuc

SEQ ID NO: 1686876 - RNA, 19 nt, Artificial Sequence
  Description of Artificial Sequence: Synthetic oligonucleotide
cacucuccgccuccugucc

SEQ ID NO: 1686877 - RNA, 19 nt, Artificial Sequence
  Description of Artificial Sequence: Synthetic oligonucleotide
cagguacaauauguacacc

SEQ ID NO: 1686878 - RNA, 19 nt, Artificial Sequence
  Description of Artificial Sequence: Synthetic oligonucleotide
ugagcaggcuuuggcugcc

SEQ ID NO: 1686879 - RNA, 19 nt, Artificial Sequence
  Description of Artificial Sequence: Synthetic oligonucleotide
cuaccccagaauauacaaa

SEQ ID NO: 1686880 - RNA, 19 nt, Artificial Sequence
  Description of Artificial Sequence: Synthetic oligonucleotide
acaaaaugguacacaggua

SEQ ID NO: 1686881 - RNA, 19 nt, Artificial Sequence
  Description of Artificial Sequence: Synthetic oligonucleotide
aaagugccuuuaagaagau

SEQ ID NO: 1686882 - RNA, 19 nt, Artificial Sequence
  Description of Artificial Sequence: Synthetic oligonucleotide
guagagggcaauguacucu

SEQ ID NO: 1686883 - RNA, 19 nt, Artificial Sequence
  Description of Artificial Sequence: Synthetic oligonucleotide
cagucuuuuagacaaccau

SEQ ID NO: 1686884 - RNA, 19 nt, Artificial Sequence
  Description of Artificial Sequence: Synthetic oligonucleotide
ugccagucuuuuagacaac

SEQ ID NO: 1686885 - RNA, 19 nt, Artificial Sequence
  Description of Artificial Sequence: Synthetic oligonucleotide
gcaauguucgaguuccucu

SEQ ID NO: 1686886 - RNA, 19 nt, Artificial Sequence
  Description of Artificial Sequence: Synthetic oligonucleotide
agccucuauccugcuuggc

SEQ ID NO: 1686887 - RNA, 19 nt, Artificial Sequence
  Description of Artificial Sequence: Synthetic oligonucleotide
caucaacaggguucugaga

SEQ ID NO: 1686888 - RNA, 19 nt, Artificial Sequence
  Description of Artificial Sequence: Synthetic oligonucleotide
gccagucuuuuagacaacc

SEQ ID NO: 1686889 - RNA, 19 nt, Artificial Sequence
  Description of Artificial Sequence: Synthetic oligonucleotide
cucacgcaguagcugcaug

SEQ ID NO: 1686890 - RNA, 19 nt, Artificial Sequence
  Description of Artificial Sequence: Synthetic oligonucleotide
gaugcuuuccagaggcagu

SEQ ID NO: 1686891 - RNA, 19 nt, Artificial Sequence
  Description of Artificial Sequence: Synthetic oligonucleotide
gggcacaucaacaggguuc

SEQ ID NO: 1686892 - RNA, 19 nt, Artificial Sequence
  Description of Artificial Sequence: Synthetic oligonucleotide
caccaggagacggggaaac

SEQ ID NO: 1686893 - RNA, 19 nt, Artificial Sequence
  Description of Artificial Sequence: Synthetic oligonucleotide
ccaaaugccuagccuuuag

SEQ ID NO: 1686894 - RNA, 19 nt, Artificial Sequence
  Description of Artificial Sequence: Synthetic oligonucleotide
ggcugccagucuuuuagac

SEQ ID NO: 1686895 - RNA, 19 nt, Artificial Sequence
  Description of Artificial Sequence: Synthetic oligonucleotide
guuggucugggaaugugcu

SEQ ID NO: 1686896 - RNA, 19 nt, Artificial Sequence
  Description of Artificial Sequence: Synthetic oligonucleotide
gccucuauccugcuuggca

SEQ ID NO: 1686897 - RNA, 19 nt, Artificial Sequence
  Description of Artificial Sequence: Synthetic oligonucleotide
gucccaaagugccucuaaa

SEQ ID NO: 1686898 - RNA, 19 nt, Artificial Sequence
  Description of Artificial Sequence: Synthetic oligonucleotide
gggaguuggucugggaaug

SEQ ID NO: 1686899 - RNA, 19 nt, Artificial Sequence
  Description of Artificial Sequence: Synthetic oligonucleotide
ugcugugcagugggguucu

SEQ ID NO: 1686900 - RNA, 19 nt, Artificial Sequence
  Description of Artificial Sequence: Synthetic oligonucleotide
ccaggagacggggaaaccc

SEQ ID NO: 1686901 - RNA, 19 nt, Artificial Sequence
  Description of Artificial Sequence: Synthetic oligonucleotide
cuuuaagaagaugggaguu

SEQ ID NO: 1686902 - RNA, 19 nt, Artificial Sequence
  Description of Artificial Sequence: Synthetic oligonucleotide
agccucaacaccagcuccu

SEQ ID NO: 1686903 - RNA, 19 nt, Artificial Sequence
  Description of Artificial Sequence: Synthetic oligonucleotide
uccaaaugccuagccuuua

SEQ ID NO: 1686904 - RNA, 19 nt, Artificial Sequence
  Description of Artificial Sequence: Synthetic oligonucleotide
cucuccagagagcuggaua

SEQ ID NO: 1686905 - RNA, 19 nt, Artificial Sequence
  Description of Artificial Sequence: Synthetic oligonucleotide
ccuaagugggaugcuuucc

SEQ ID NO: 1686906 - RNA, 19 nt, Artificial Sequence
  Description of Artificial Sequence: Synthetic oligonucleotide
gguuccauccccaguguuc

SEQ ID NO: 1686907 - RNA, 19 nt, Artificial Sequence
  Description of Artificial Sequence: Synthetic oligonucleotide
caggaauuugcccugccau

SEQ ID NO: 1686908 - RNA, 19 nt, Artificial Sequence
  Description of Artificial Sequence: Synthetic oligonucleotide
gccccaagugauuauuaga

SEQ ID NO: 1686909 - RNA, 19 nt, Artificial Sequence
  Description of Artificial Sequence: Synthetic oligonucleotide
guucgaguuccucuacccu

SEQ ID NO: 1686910 - RNA, 19 nt, Artificial Sequence
  Description of Artificial Sequence: Synthetic oligonucleotide
cuacuauaauacagagggu

SEQ ID NO: 1686911 - RNA, 19 nt, Artificial Sequence
  Description of Artificial Sequence: Synthetic oligonucleotide
caccucccuaaggucaccc

SEQ ID NO: 1686912 - RNA, 19 nt, Artificial Sequence
  Description of Artificial Sequence: Synthetic oligonucleotide
ucacuucgucauucucauc

SEQ ID NO: 1686913 - RNA, 19 nt, Artificial Sequence
  Description of Artificial Sequence: Synthetic oligonucleotide
ucucacgcaguagcugcau

SEQ ID NO: 1686914 - RNA, 19 nt, Artificial Sequence
  Description of Artificial Sequence: Synthetic oligonucleotide
gcuccaaccucuacuauaa

SEQ ID NO: 1686915 - RNA, 19 nt, Artificial Sequence
  Description of Artificial Sequence: Synthetic oligonucleotide
ccuuuaagaagaugggagu

SEQ ID NO: 1686916 - RNA, 19 nt, Artificial Sequence
  Description of Artificial Sequence: Synthetic oligonucleotide
agggugucccuaccccaga

SEQ ID NO: 1686917 - RNA, 19 nt, Artificial Sequence
  Description of Artificial Sequence: Synthetic oligonucleotide
ucccagccccaagugauua

SEQ ID NO: 1686918 - RNA, 19 nt, Artificial Sequence
  Description of Artificial Sequence: Synthetic oligonucleotide
cugcugugcagugggguuc

SEQ ID NO: 1686919 - RNA, 19 nt, Artificial Sequence
  Description of Artificial Sequence: Synthetic oligonucleotide
gcucaccucccuaagguca

SEQ ID NO: 1686920 - RNA, 19 nt, Artificial Sequence
  Description of Artificial Sequence: Synthetic oligonucleotide
ccucccuaaggucacccug

SEQ ID NO: 1686921 - RNA, 19 nt, Artificial Sequence
  Description of Artificial Sequence: Synthetic oligonucleotide
cuugugcaggcucuauacu

SEQ ID NO: 1686922 - RNA, 19 nt, Artificial Sequence
  Description of Artificial Sequence: Synthetic oligonucleotide
cagugaugagcaggcuuug

SEQ ID NO: 1686923 - RNA, 19 nt, Artificial Sequence
  Description of Artificial Sequence: Synthetic oligonucleotide
ggcuacauguagggccugg

SEQ ID NO: 1686924 - RNA, 19 nt, Artificial Sequence
  Description of Artificial Sequence: Synthetic oligonucleotide
ccccaacgagccucuaucc

SEQ ID NO: 1686925 - RNA, 19 nt, Artificial Sequence
  Description of Artificial Sequence: Synthetic oligonucleotide
guccuacacuaccaauaaa

SEQ ID NO: 1686926 - RNA, 19 nt, Artificial Sequence
  Description of Artificial Sequence: Synthetic oligonucleotide
guacucuccaauggugucu

SEQ ID NO: 1686927 - RNA, 19 nt, Artificial Sequence
  Description of Artificial Sequence: Synthetic oligonucleotide
gcugcccagucccacuccc

SEQ ID NO: 1686928 - RNA, 19 nt, Artificial Sequence
  Description of Artificial Sequence: Synthetic oligonucleotide
cuccuucuccaaaugccua

SEQ ID NO: 1686929 - RNA, 19 nt, Artificial Sequence
  Description of Artificial Sequence: Synthetic oligonucleotide
ggguguaaaucaauuggua

SEQ ID NO: 1686930 - RNA, 19 nt, Artificial Sequence
  Description of Artificial Sequence: Synthetic oligonucleotide
cugucggccaggcucaccu

SEQ ID NO: 1686931 - RNA, 19 nt, Artificial Sequence
  Description of Artificial Sequence: Synthetic oligonucleotide
ccugccauucauugcgcuc

SEQ ID NO: 1686932 - RNA, 19 nt, Artificial Sequence
  Description of Artificial Sequence: Synthetic oligonucleotide
gggguguaaaucaauuggu

SEQ ID NO: 1686933 - RNA, 19 nt, Artificial Sequence
  Description of Artificial Sequence: Synthetic oligonucleotide
cccaauugucauaaggccu

SEQ ID NO: 1686934 - RNA, 19 nt, Artificial Sequence
  Description of Artificial Sequence: Synthetic oligonucleotide
gcaugaccuccaagaagcg

SEQ ID NO: 1686935 - RNA, 19 nt, Artificial Sequence
  Description of Artificial Sequence: Synthetic oligonucleotide
cauucucaucagcacggua

SEQ ID NO: 1686936 - RNA, 19 nt, Artificial Sequence
  Description of Artificial Sequence: Synthetic oligonucleotide
gcucagcacugcaaaacac

SEQ ID NO: 1686937 - RNA, 19 nt, Artificial Sequence
  Description of Artificial Sequence: Synthetic oligonucleotide
uccuguccucuguccuaca

SEQ ID NO: 1686938 - RNA, 19 nt, Artificial Sequence
  Description of Artificial Sequence: Synthetic oligonucleotide
gucccuaccccagaauaua

SEQ ID NO: 1686939 - RNA, 19 nt, Artificial Sequence
  Description of Artificial Sequence: Synthetic oligonucleotide
ccaguguucccacacuuaa

SEQ ID NO: 1686940 - RNA, 19 nt, Artificial Sequence
  Description of Artificial Sequence: Synthetic oligonucleotide
cugcccucugguuuuggua

SEQ ID NO: 1686941 - RNA, 19 nt, Artificial Sequence
  Description of Artificial Sequence: Synthetic oligonucleotide
cccauggaaaugcugccca

SEQ ID NO: 1686942 - RNA, 19 nt, Artificial Sequence
  Description of Artificial Sequence: Synthetic oligonucleotide
cugaggguucuggaucuca

SEQ ID NO: 1686943 - RNA, 19 nt, Artificial Sequence
  Description of Artificial Sequence: Synthetic oligonucleotide
cacagugaugagcaggcuu

SEQ ID NO: 1686944 - RNA, 19 nt, Artificial Sequence
  Description of Artificial Sequence: Synthetic oligonucleotide
ggcucaccucccuaagguc

SEQ ID NO: 1686945 - RNA, 19 nt, Artificial Sequence
  Description of Artificial Sequence: Synthetic oligonucleotide
auuugcccugccauucauu

SEQ ID NO: 1686946 - RNA, 19 nt, Artificial Sequence
  Description of Artificial Sequence: Synthetic oligonucleotide
ggcacaucaacaggguucu

SEQ ID NO: 1686947 - RNA, 19 nt, Artificial Sequence
  Description of Artificial Sequence: Synthetic oligonucleotide
gcccuccuaagugggaugc

SEQ ID NO: 1686948 - RNA, 19 nt, Artificial Sequence
  Description of Artificial Sequence: Synthetic oligonucleotide
cuccuuguccugggcuagc

SEQ ID NO: 1686949 - RNA, 19 nt, Artificial Sequence
  Description of Artificial Sequence: Synthetic oligonucleotide
cacuaccaauaaauaaguu

SEQ ID NO: 1686950 - RNA, 19 nt, Artificial Sequence
  Description of Artificial Sequence: Synthetic oligonucleotide
ggcuagccugcugauguac

SEQ ID NO: 1686951 - RNA, 19 nt, Artificial Sequence
  Description of Artificial Sequence: Synthetic oligonucleotide
acgagccucuauccugcuu

SEQ ID NO: 1686952 - RNA, 19 nt, Artificial Sequence
  Description of Artificial Sequence: Synthetic oligonucleotide
gccugcucagcacugcaaa

SEQ ID NO: 1686953 - RNA, 19 nt, Artificial Sequence
  Description of Artificial Sequence: Synthetic oligonucleotide
uggcuacauguagggccug

SEQ ID NO: 1686954 - RNA, 19 nt, Artificial Sequence
  Description of Artificial Sequence: Synthetic oligonucleotide
gcgcucauucacaagccuc

SEQ ID NO: 1686955 - RNA, 19 nt, Artificial Sequence
  Description of Artificial Sequence: Synthetic oligonucleotide
ccaaaucccugggagccug

SEQ ID NO: 1686956 - RNA, 19 nt, Artificial Sequence
  Description of Artificial Sequence: Synthetic oligonucleotide
ccagucccacucccuaaag

SEQ ID NO: 1686957 - RNA, 19 nt, Artificial Sequence
  Description of Artificial Sequence: Synthetic oligonucleotide
cucuccucagacacagaau

SEQ ID NO: 1686958 - RNA, 19 nt, Artificial Sequence
  Description of Artificial Sequence: Synthetic oligonucleotide
cccacuugccagcuccaac

SEQ ID NO: 1686959 - RNA, 19 nt, Artificial Sequence
  Description of Artificial Sequence: Synthetic oligonucleotide
agaagcggcucugcagcuu

SEQ ID NO: 1686960 - RNA, 19 nt, Artificial Sequence
  Description of Artificial Sequence: Synthetic oligonucleotide
guacaccaggagacgggga

SEQ ID NO: 1686961 - RNA, 19 nt, Artificial Sequence
  Description of Artificial Sequence: Synthetic oligonucleotide
ccucaacaccagcuccugc

SEQ ID NO: 1686962 - RNA, 19 nt, Artificial Sequence
  Description of Artificial Sequence: Synthetic oligonucleotide
cuccaaaugccuagccuuu

SEQ ID NO: 1686963 - RNA, 19 nt, Artificial Sequence
  Description of Artificial Sequence: Synthetic oligonucleotide
cuccuaagugggaugcuuu

SEQ ID NO: 1686964 - RNA, 19 nt, Artificial Sequence
  Description of Artificial Sequence: Synthetic oligonucleotide
gaccuccaagaagcggcuc

SEQ ID NO: 1686965 - RNA, 19 nt, Artificial Sequence
  Description of Artificial Sequence: Synthetic oligonucleotide
ccauggcuacauguagggc

SEQ ID NO: 1686966 - RNA, 19 nt, Artificial Sequence
  Description of Artificial Sequence: Synthetic oligonucleotide
guccucuguccuacacuac

SEQ ID NO: 1686967 - RNA, 19 nt, Artificial Sequence
  Description of Artificial Sequence: Synthetic oligonucleotide
caucagcaggaugcuacaa

SEQ ID NO: 1686968 - RNA, 19 nt, Artificial Sequence
  Description of Artificial Sequence: Synthetic oligonucleotide
caguuaccccaauugucau

SEQ ID NO: 1686969 - RNA, 19 nt, Artificial Sequence
  Description of Artificial Sequence: Synthetic oligonucleotide
cuauccugcuuggcauaca

SEQ ID NO: 1686970 - RNA, 19 nt, Artificial Sequence
  Description of Artificial Sequence: Synthetic oligonucleotide
gccaggcucaccucccuaa

SEQ ID NO: 1686971 - RNA, 19 nt, Artificial Sequence
  Description of Artificial Sequence: Synthetic oligonucleotide
cccuaccccagaauauaca

SEQ ID NO: 1686972 - RNA, 19 nt, Artificial Sequence
  Description of Artificial Sequence: Synthetic oligonucleotide
cuacauguagggccugguu

SEQ ID NO: 1686973 - RNA, 19 nt, Artificial Sequence
  Description of Artificial Sequence: Synthetic oligonucleotide
cccaauuucccugucccaa

SEQ ID NO: 1686974 - RNA, 19 nt, Artificial Sequence
  Description of Artificial Sequence: Synthetic oligonucleotide
ccuuuagcacugcccucug

SEQ ID NO: 1686975 - RNA, 19 nt, Artificial Sequence
  Description of Artificial Sequence: Synthetic oligonucleotide
gugcugggguguaaaucaa

SEQ ID NO: 1686976 - RNA, 19 nt, Artificial Sequence
  Description of Artificial Sequence: Synthetic oligonucleotide
gagagacugccaggaauuu

SEQ ID NO: 1686977 - RNA, 19 nt, Artificial Sequence
  Description of Artificial Sequence: Synthetic oligonucleotide
cuggacguuccugaggguu

SEQ ID NO: 1686978 - RNA, 19 nt, Artificial Sequence
  Description of Artificial Sequence: Synthetic oligonucleotide
gugggcacaucaacagggu

SEQ ID NO: 1686979 - RNA, 19 nt, Artificial Sequence
  Description of Artificial Sequence: Synthetic oligonucleotide
cuauacugucggccaggcu

SEQ ID NO: 1686980 - RNA, 19 nt, Artificial Sequence
  Description of Artificial Sequence: Synthetic oligonucleotide
ccucuauccugcuuggcau

SEQ ID NO: 1686981 - RNA, 19 nt, Artificial Sequence
  Description of Artificial Sequence: Synthetic oligonucleotide
gcauacaguuaccccaauu

SEQ ID NO: 1686982 - RNA, 19 nt, Artificial Sequence
  Description of Artificial Sequence: Synthetic oligonucleotide
cccaacugccugggaaccc

SEQ ID NO: 1686983 - RNA, 19 nt, Artificial Sequence
  Description of Artificial Sequence: Synthetic oligonucleotide
agguagugcugggguguaa

SEQ ID NO: 1686984 - RNA, 19 nt, Artificial Sequence
  Description of Artificial Sequence: Synthetic oligonucleotide
ccaacugccugggaaccca

SEQ ID NO: 1686985 - RNA, 19 nt, Artificial Sequence
  Description of Artificial Sequence: Synthetic oligonucleotide
gccugggaacccauggaaa

SEQ ID NO: 1686986 - RNA, 19 nt, Artificial Sequence
  Description of Artificial Sequence: Synthetic oligonucleotide
cccaagugauuauuagaau

SEQ ID NO: 1686987 - RNA, 19 nt, Artificial Sequence
  Description of Artificial Sequence: Synthetic oligonucleotide
cacgcaguagcugcaugau

SEQ ID NO: 1686988 - RNA, 19 nt, Artificial Sequence
  Description of Artificial Sequence: Synthetic oligonucleotide
ggugucccuaccccagaau

SEQ ID NO: 1686989 - RNA, 19 nt, Artificial Sequence
  Description of Artificial Sequence: Synthetic oligonucleotide
cccaguguucccacacuua

SEQ ID NO: 1686990 - RNA, 19 nt, Artificial Sequence
  Description of Artificial Sequence: Synthetic oligonucleotide
gcccugccauucauugcgc

SEQ ID NO: 1686991 - RNA, 19 nt, Artificial Sequence
  Description of Artificial Sequence: Synthetic oligonucleotide
gcuagccugcugauguacu

SEQ ID NO: 1686992 - RNA, 19 nt, Artificial Sequence
  Description of Artificial Sequence: Synthetic oligonucleotide
cacucccuaaagugccuuu

SEQ ID NO: 1686993 - RNA, 19 nt, Artificial Sequence
  Description of Artificial Sequence: Synthetic oligonucleotide
gcuacauguagggccuggu

SEQ ID NO: 1686994 - RNA, 19 nt, Artificial Sequence
  Description of Artificial Sequence: Synthetic oligonucleotide
cugcaucagcaggaugcua

SEQ ID NO: 1686995 - RNA, 19 nt, Artificial Sequence
  Description of Artificial Sequence: Synthetic oligonucleotide
gcccagucccacucccuaa

SEQ ID NO: 1686996 - RNA, 19 nt, Artificial Sequence
  Description of Artificial Sequence: Synthetic oligonucleotide
ggaguuggucugggaaugu

SEQ ID NO: 1686997 - RNA, 19 nt, Artificial Sequence
  Description of Artificial Sequence: Synthetic oligonucleotide
ggacguuccugaggguucu

SEQ ID NO: 1686998 - RNA, 19 nt, Artificial Sequence
  Description of Artificial Sequence: Synthetic oligonucleotide
cugucccaaagugccucua

SEQ ID NO: 1686999 - RNA, 19 nt, Artificial Sequence
  Description of Artificial Sequence: Synthetic oligonucleotide
cugcccagucccacucccu

SEQ ID NO: 1687000 - RNA, 19 nt, Artificial Sequence
  Description of Artificial Sequence: Synthetic oligonucleotide
caacugccugggaacccau

SEQ ID NO: 1687001 - RNA, 19 nt, Artificial Sequence
  Description of Artificial Sequence: Synthetic oligonucleotide
cagcuccaaccucuacuau

SEQ ID NO: 1687002 - RNA, 19 nt, Artificial Sequence
  Description of Artificial Sequence: Synthetic oligonucleotide
gggaacccauggaaaugcu

SEQ ID NO: 1687003 - RNA, 19 nt, Artificial Sequence
  Description of Artificial Sequence: Synthetic oligonucleotide
gggcuagccugcugaugua

SEQ ID NO: 1687004 - RNA, 19 nt, Artificial Sequence
  Description of Artificial Sequence: Synthetic oligonucleotide
ccgccuccuguccucuguc

SEQ ID NO: 1687005 - RNA, 19 nt, Artificial Sequence
  Description of Artificial Sequence: Synthetic oligonucleotide
gcagcucuagcagcuuuau

SEQ ID NO: 1687006 - RNA, 19 nt, Artificial Sequence
  Description of Artificial Sequence: Synthetic oligonucleotide
ggcauacaguuaccccaau

SEQ ID NO: 1687007 - RNA, 19 nt, Artificial Sequence
  Description of Artificial Sequence: Synthetic oligonucleotide
gccuagccuuuagcacugc

SEQ ID NO: 1687008 - RNA, 19 nt, Artificial Sequence
  Description of Artificial Sequence: Synthetic oligonucleotide
ggguuccauccccaguguu

SEQ ID NO: 1687009 - RNA, 19 nt, Artificial Sequence
  Description of Artificial Sequence: Synthetic oligonucleotide
cagcucuagcagcuuuauu

SEQ ID NO: 1687010 - RNA, 19 nt, Artificial Sequence
  Description of Artificial Sequence: Synthetic oligonucleotide
cgaguuccucuacccucuc

SEQ ID NO: 1687011 - RNA, 19 nt, Artificial Sequence
  Description of Artificial Sequence: Synthetic oligonucleotide
cccugccauucauugcgcu

SEQ ID NO: 1687012 - RNA, 19 nt, Artificial Sequence
  Description of Artificial Sequence: Synthetic oligonucleotide
ccccacucuccgccuccug

SEQ ID NO: 1687013 - RNA, 19 nt, Artificial Sequence
  Description of Artificial Sequence: Synthetic oligonucleotide
ccuccuaagugggaugcuu

SEQ ID NO: 1687014 - RNA, 19 nt, Artificial Sequence
  Description of Artificial Sequence: Synthetic oligonucleotide
ccuggacguuccugagggu

SEQ ID NO: 1687015 - RNA, 19 nt, Artificial Sequence
  Description of Artificial Sequence: Synthetic oligonucleotide
cccagccccaagugauuau

SEQ ID NO: 1687016 - RNA, 19 nt, Artificial Sequence
  Description of Artificial Sequence: Synthetic oligonucleotide
ccacucccuaaagugccuu

SEQ ID NO: 1687017 - RNA, 19 nt, Artificial Sequence
  Description of Artificial Sequence: Synthetic oligonucleotide
aaucaaaucauauuaaacu

SEQ ID NO: 1687018 - RNA, 19 nt, Artificial Sequence
  Description of Artificial Sequence: Synthetic oligonucleotide
aaaaucaagaaauaguaca

SEQ ID NO: 1687019 - RNA, 19 nt, Artificial Sequence
  Description of Artificial Sequence: Synthetic oligonucleotide
aauuagacagacucaauac

SEQ ID NO: 1687020 - RNA, 19 nt, Artificial Sequence
  Description of Artificial Sequence: Synthetic oligonucleotide
ucauauuaaacucuuauug

SEQ ID NO: 1687021 - RNA, 19 nt, Artificial Sequence
  Description of Artificial Sequence: Synthetic oligonucleotide
auauuaaacucuuauugcc

SEQ ID NO: 1687022 - RNA, 19 nt, Artificial Sequence
  Description of Artificial Sequence: Synthetic oligonucleotide
aacaaacacacacacacac

SEQ ID NO: 1687023 - RNA, 19 nt, Artificial Sequence
  Description of Artificial Sequence: Synthetic oligonucleotide
auuagugauauucuaaaac

SEQ ID NO: 1687024 - RNA, 19 nt, Artificial Sequence
  Description of Artificial Sequence: Synthetic oligonucleotide
uucaagauagcauugauga

SEQ ID NO: 1687025 - RNA, 19 nt, Artificial Sequence
  Description of Artificial Sequence: Synthetic oligonucleotide
aaaggaaucggacagccuc

SEQ ID NO: 1687026 - RNA, 19 nt, Artificial Sequence
  Description of Artificial Sequence: Synthetic oligonucleotide
aguguaguuaaauaguacg

SEQ ID NO: 1687027 - RNA, 19 nt, Artificial Sequence
  Description of Artificial Sequence: Synthetic oligonucleotide
aacacacacacacacacac

SEQ ID NO: 1687028 - RNA, 19 nt, Artificial Sequence
  Description of Artificial Sequence: Synthetic oligonucleotide
aaauaguaaaaccuucauc

SEQ ID NO: 1687029 - RNA, 19 nt, Artificial Sequence
  Description of Artificial Sequence: Synthetic oligonucleotide
uuuaucuugucccaaagca

SEQ ID NO: 1687030 - RNA, 19 nt, Artificial Sequence
  Description of Artificial Sequence: Synthetic oligonucleotide
aucaaaucauauuaaacuc

SEQ ID NO: 1687031 - RNA, 19 nt, Artificial Sequence
  Description of Artificial Sequence: Synthetic oligonucleotide
agaacucucauucguaucc

SEQ ID NO: 1687032 - RNA, 19 nt, Artificial Sequence
  Description of Artificial Sequence: Synthetic oligonucleotide
uuagugauauucuaaaaca

SEQ ID NO: 1687033 - RNA, 19 nt, Artificial Sequence
  Description of Artificial Sequence: Synthetic oligonucleotide
aaaucaaaucauauuaaac

SEQ ID NO: 1687034 - RNA, 19 nt, Artificial Sequence
  Description of Artificial Sequence: Synthetic oligonucleotide
caaacaaacacacacacac

SEQ ID NO: 1687035 - RNA, 19 nt, Artificial Sequence
  Description of Artificial Sequence: Synthetic oligonucleotide
uauaaugccagcaccauac

SEQ ID NO: 1687036 - RNA, 19 nt, Artificial Sequence
  Description of Artificial Sequence: Synthetic oligonucleotide
aaucauauuaaacucuuau

SEQ ID NO: 1687037 - RNA, 19 nt, Artificial Sequence
  Description of Artificial Sequence: Synthetic oligonucleotide
aaaacacagggcuacagug

SEQ ID NO: 1687038 - RNA, 19 nt, Artificial Sequence
  Description of Artificial Sequence: Synthetic oligonucleotide
agggagauuucucugaagc

SEQ ID NO: 1687039 - RNA, 19 nt, Artificial Sequence
  Description of Artificial Sequence: Synthetic oligonucleotide
cauauuaaacucuuauugc

SEQ ID NO: 1687040 - RNA, 19 nt, Artificial Sequence
  Description of Artificial Sequence: Synthetic oligonucleotide
aaaugaagaguacaauaug

SEQ ID NO: 1687041 - RNA, 19 nt, Artificial Sequence
  Description of Artificial Sequence: Synthetic oligonucleotide
ucauucguaucccauaaag

SEQ ID NO: 1687042 - RNA, 19 nt, Artificial Sequence
  Description of Artificial Sequence: Synthetic oligonucleotide
uguaagaccaugguuaucc

SEQ ID NO: 1687043 - RNA, 19 nt, Artificial Sequence
  Description of Artificial Sequence: Synthetic oligonucleotide
ugauauucuaaaacacagg

SEQ ID NO: 1687044 - RNA, 19 nt, Artificial Sequence
  Description of Artificial Sequence: Synthetic oligonucleotide
cugaguuaaaaucuuacag

SEQ ID NO: 1687045 - RNA, 19 nt, Artificial Sequence
  Description of Artificial Sequence: Synthetic oligonucleotide
aagguaacagcccagaauu

SEQ ID NO: 1687046 - RNA, 19 nt, Artificial Sequence
  Description of Artificial Sequence: Synthetic oligonucleotide
uacacaaauuauuacaagu

SEQ ID NO: 1687047 - RNA, 19 nt, Artificial Sequence
  Description of Artificial Sequence: Synthetic oligonucleotide
aauaguacggugcuugccu

SEQ ID NO: 1687048 - RNA, 19 nt, Artificial Sequence
  Description of Artificial Sequence: Synthetic oligonucleotide
aaauuagacagacucaaua

SEQ ID NO: 1687049 - RNA, 19 nt, Artificial Sequence
  Description of Artificial Sequence: Synthetic oligonucleotide
ucuuaccucauuccaaagg

SEQ ID NO: 1687050 - RNA, 19 nt, Artificial Sequence
  Description of Artificial Sequence: Synthetic oligonucleotide
ugcacuauguccaacugcc

SEQ ID NO: 1687051 - RNA, 19 nt, Artificial Sequence
  Description of Artificial Sequence: Synthetic oligonucleotide
ugaaauaguaaaaccuuca

SEQ ID NO: 1687052 - RNA, 19 nt, Artificial Sequence
  Description of Artificial Sequence: Synthetic oligonucleotide
ucaaaucauauuaaacucu

SEQ ID NO: 1687053 - RNA, 19 nt, Artificial Sequence
  Description of Artificial Sequence: Synthetic oligonucleotide
auucguaucccauaaagga

SEQ ID NO: 1687054 - RNA, 19 nt, Artificial Sequence
  Description of Artificial Sequence: Synthetic oligonucleotide
uaguuaaauaguacggugc

SEQ ID NO: 1687055 - RNA, 19 nt, Artificial Sequence
  Description of Artificial Sequence: Synthetic oligonucleotide
acagacucaauacaaauga

SEQ ID NO: 1687056 - RNA, 19 nt, Artificial Sequence
  Description of Artificial Sequence: Synthetic oligonucleotide
uuaaauaguacggugcuug

SEQ ID NO: 1687057 - RNA, 19 nt, Artificial Sequence
  Description of Artificial Sequence: Synthetic oligonucleotide
aaugaagaguacaauauga

SEQ ID NO: 1687058 - RNA, 19 nt, Artificial Sequence
  Description of Artificial Sequence: Synthetic oligonucleotide
aaaagccccgccuaacacg

SEQ ID NO: 1687059 - RNA, 19 nt, Artificial Sequence
  Description of Artificial Sequence: Synthetic oligonucleotide
ucaauacaaaugaagagua

SEQ ID NO: 1687060 - RNA, 19 nt, Artificial Sequence
  Description of Artificial Sequence: Synthetic oligonucleotide
cuugguacaagguaacagc

SEQ ID NO: 1687061 - RNA, 19 nt, Artificial Sequence
  Description of Artificial Sequence: Synthetic oligonucleotide
aaagauguaagaccauggu

SEQ ID NO: 1687062 - RNA, 19 nt, Artificial Sequence
  Description of Artificial Sequence: Synthetic oligonucleotide
ugucaggcaaacaaugugc

SEQ ID NO: 1687063 - RNA, 19 nt, Artificial Sequence
  Description of Artificial Sequence: Synthetic oligonucleotide
uacuuuucaacauuugaac

SEQ ID NO: 1687064 - RNA, 19 nt, Artificial Sequence
  Description of Artificial Sequence: Synthetic oligonucleotide
acucaauacaaaugaagag

SEQ ID NO: 1687065 - RNA, 19 nt, Artificial Sequence
  Description of Artificial Sequence: Synthetic oligonucleotide
aagaguacaauaugaaaua

SEQ ID NO: 1687066 - RNA, 19 nt, Artificial Sequence
  Description of Artificial Sequence: Synthetic oligonucleotide
gaacagauuucucuugagg

SEQ ID NO: 1687067 - RNA, 19 nt, Artificial Sequence
  Description of Artificial Sequence: Synthetic oligonucleotide
uuucaagauagcauugaug

SEQ ID NO: 1687068 - RNA, 19 nt, Artificial Sequence
  Description of Artificial Sequence: Synthetic oligonucleotide
aacauuugaacagaacucu

SEQ ID NO: 1687069 - RNA, 19 nt, Artificial Sequence
  Description of Artificial Sequence: Synthetic oligonucleotide
uagagaggaaugaaaacca

SEQ ID NO: 1687070 - RNA, 19 nt, Artificial Sequence
  Description of Artificial Sequence: Synthetic oligonucleotide
uuagacagacucaauacaa

SEQ ID NO: 1687071 - RNA, 19 nt, Artificial Sequence
  Description of Artificial Sequence: Synthetic oligonucleotide
gaagcgguaggagauaugg

SEQ ID NO: 1687072 - RNA, 19 nt, Artificial Sequence
  Description of Artificial Sequence: Synthetic oligonucleotide
uucauaacguacccuuugg

SEQ ID NO: 1687073 - RNA, 19 nt, Artificial Sequence
  Description of Artificial Sequence: Synthetic oligonucleotide
caagauagcauugaugagc

SEQ ID NO: 1687074 - RNA, 19 nt, Artificial Sequence
  Description of Artificial Sequence: Synthetic oligonucleotide
uacaguguaguuaaauagu

SEQ ID NO: 1687075 - RNA, 19 nt, Artificial Sequence
  Description of Artificial Sequence: Synthetic oligonucleotide
aguugacuuuaucuugucc

SEQ ID NO: 1687076 - RNA, 19 nt, Artificial Sequence
  Description of Artificial Sequence: Synthetic oligonucleotide
ucauuuacuuccuuucuca

SEQ ID NO: 1687077 - RNA, 19 nt, Artificial Sequence
  Description of Artificial Sequence: Synthetic oligonucleotide
uguggauuguaguuccugg

SEQ ID NO: 1687078 - RNA, 19 nt, Artificial Sequence
  Description of Artificial Sequence: Synthetic oligonucleotide
aauccuucaaacagugaac

SEQ ID NO: 1687079 - RNA, 19 nt, Artificial Sequence
  Description of Artificial Sequence: Synthetic oligonucleotide
aaauaguacggugcuugcc

SEQ ID NO: 1687080 - RNA, 19 nt, Artificial Sequence
  Description of Artificial Sequence: Synthetic oligonucleotide
uuucauaacguacccuuug

SEQ ID NO: 1687081 - RNA, 19 nt, Artificial Sequence
  Description of Artificial Sequence: Synthetic oligonucleotide
cuacaagucaaguuccagg

SEQ ID NO: 1687082 - RNA, 19 nt, Artificial Sequence
  Description of Artificial Sequence: Synthetic oligonucleotide
ucuuguacaaaaguuuuca

SEQ ID NO: 1687083 - RNA, 19 nt, Artificial Sequence
  Description of Artificial Sequence: Synthetic oligonucleotide
uuuaggugacaccagagua

SEQ ID NO: 1687084 - RNA, 19 nt, Artificial Sequence
  Description of Artificial Sequence: Synthetic oligonucleotide
ggaaauuagacgcugcucc

SEQ ID NO: 1687085 - RNA, 19 nt, Artificial Sequence
  Description of Artificial Sequence: Synthetic oligonucleotide
ugaacagaacucucauucg

SEQ ID NO: 1687086 - RNA, 19 nt, Artificial Sequence
  Description of Artificial Sequence: Synthetic oligonucleotide
cauucguaucccauaaagg

SEQ ID NO: 1687087 - RNA, 19 nt, Artificial Sequence
  Description of Artificial Sequence: Synthetic oligonucleotide
auauucuaaaacacagggc

SEQ ID NO: 1687088 - RNA, 19 nt, Artificial Sequence
  Description of Artificial Sequence: Synthetic oligonucleotide
caaacacacacacacacac

SEQ ID NO: 1687089 - RNA, 19 nt, Artificial Sequence
  Description of Artificial Sequence: Synthetic oligonucleotide
augguuauccucuuucaag

SEQ ID NO: 1687090 - RNA, 19 nt, Artificial Sequence
  Description of Artificial Sequence: Synthetic oligonucleotide
ucugaguuaaaaucuuaca

SEQ ID NO: 1687091 - RNA, 19 nt, Artificial Sequence
  Description of Artificial Sequence: Synthetic oligonucleotide
guaguuaaauaguacggug

SEQ ID NO: 1687092 - RNA, 19 nt, Artificial Sequence
  Description of Artificial Sequence: Synthetic oligonucleotide
agugaacuugaucuguuag

SEQ ID NO: 1687093 - RNA, 19 nt, Artificial Sequence
  Description of Artificial Sequence: Synthetic oligonucleotide
auuagacagacucaauaca

SEQ ID NO: 1687094 - RNA, 19 nt, Artificial Sequence
  Description of Artificial Sequence: Synthetic oligonucleotide
aguuaaauaguacggugcu

SEQ ID NO: 1687095 - RNA, 19 nt, Artificial Sequence
  Description of Artificial Sequence: Synthetic oligonucleotide
aggcaugucaguuugccag

SEQ ID NO: 1687096 - RNA, 19 nt, Artificial Sequence
  Description of Artificial Sequence: Synthetic oligonucleotide
ugaagaguacaauaugaaa

SEQ ID NO: 1687097 - RNA, 19 nt, Artificial Sequence
  Description of Artificial Sequence: Synthetic oligonucleotide
aaaucaagaaauaguacaa

SEQ ID NO: 1687098 - RNA, 19 nt, Artificial Sequence
  Description of Artificial Sequence: Synthetic oligonucleotide
ccuaacacggccuugaagc

SEQ ID NO: 1687099 - RNA, 19 nt, Artificial Sequence
  Description of Artificial Sequence: Synthetic oligonucleotide
ucguaucccauaaaggacu

SEQ ID NO: 1687100 - RNA, 19 nt, Artificial Sequence
  Description of Artificial Sequence: Synthetic oligonucleotide
acagauuucucuugaggag

SEQ ID NO: 1687101 - RNA, 19 nt, Artificial Sequence
  Description of Artificial Sequence: Synthetic oligonucleotide
agucuggaaauuccggaac

SEQ ID NO: 1687102 - RNA, 19 nt, Artificial Sequence
  Description of Artificial Sequence: Synthetic oligonucleotide
auacacaaauuauuacaag

SEQ ID NO: 1687103 - RNA, 19 nt, Artificial Sequence
  Description of Artificial Sequence: Synthetic oligonucleotide
caacauuugaacagaacuc

SEQ ID NO: 1687104 - RNA, 19 nt, Artificial Sequence
  Description of Artificial Sequence: Synthetic oligonucleotide
uguaguuaaauaguacggu

SEQ ID NO: 1687105 - RNA, 19 nt, Artificial Sequence
  Description of Artificial Sequence: Synthetic oligonucleotide
ucuuagucuccuuacuuca

SEQ ID NO: 1687106 - RNA, 19 nt, Artificial Sequence
  Description of Artificial Sequence: Synthetic oligonucleotide
uaguuccugguauaaaagc

SEQ ID NO: 1687107 - RNA, 19 nt, Artificial Sequence
  Description of Artificial Sequence: Synthetic oligonucleotide
uuguagagaucuuaccuca

SEQ ID NO: 1687108 - RNA, 19 nt, Artificial Sequence
  Description of Artificial Sequence: Synthetic oligonucleotide
ucuuauugccaacauuagu

SEQ ID NO: 1687109 - RNA, 19 nt, Artificial Sequence
  Description of Artificial Sequence: Synthetic oligonucleotide
aaauuagacgcugcuccac

SEQ ID NO: 1687110 - RNA, 19 nt, Artificial Sequence
  Description of Artificial Sequence: Synthetic oligonucleotide
aauuccggaacagauuucu

SEQ ID NO: 1687111 - RNA, 19 nt, Artificial Sequence
  Description of Artificial Sequence: Synthetic oligonucleotide
uucguaucccauaaaggac

SEQ ID NO: 1687112 - RNA, 19 nt, Artificial Sequence
  Description of Artificial Sequence: Synthetic oligonucleotide
aacaaugugcuccugcauu

SEQ ID NO: 1687113 - RNA, 19 nt, Artificial Sequence
  Description of Artificial Sequence: Synthetic oligonucleotide
guguaguuaaauaguacgg

SEQ ID NO: 1687114 - RNA, 19 nt, Artificial Sequence
  Description of Artificial Sequence: Synthetic oligonucleotide
uugucccaaagcaacaugu

SEQ ID NO: 1687115 - RNA, 19 nt, Artificial Sequence
  Description of Artificial Sequence: Synthetic oligonucleotide
cuuguagagaucuuaccuc

SEQ ID NO: 1687116 - RNA, 19 nt, Artificial Sequence
  Description of Artificial Sequence: Synthetic oligonucleotide
acauuagugauauucuaaa

SEQ ID NO: 1687117 - RNA, 19 nt, Artificial Sequence
  Description of Artificial Sequence: Synthetic oligonucleotide
gguuauacacuauaguaac

SEQ ID NO: 1687118 - RNA, 19 nt, Artificial Sequence
  Description of Artificial Sequence: Synthetic oligonucleotide
aauuagacgcugcuccacu

SEQ ID NO: 1687119 - RNA, 19 nt, Artificial Sequence
  Description of Artificial Sequence: Synthetic oligonucleotide
agauaugguuucuucacca

SEQ ID NO: 1687120 - RNA, 19 nt, Artificial Sequence
  Description of Artificial Sequence: Synthetic oligonucleotide
aguacaauaugaaauagua

SEQ ID NO: 1687121 - RNA, 19 nt, Artificial Sequence
  Description of Artificial Sequence: Synthetic oligonucleotide
aagauagcauugaugagca

SEQ ID NO: 1687122 - RNA, 19 nt, Artificial Sequence
  Description of Artificial Sequence: Synthetic oligonucleotide
cauaaaggacuuuuccuug

SEQ ID NO: 1687123 - RNA, 19 nt, Artificial Sequence
  Description of Artificial Sequence: Synthetic oligonucleotide
ugguauaaaagccccgccu

SEQ ID NO: 1687124 - RNA, 19 nt, Artificial Sequence
  Description of Artificial Sequence: Synthetic oligonucleotide
uuaucuugucccaaagcaa

SEQ ID NO: 1687125 - RNA, 19 nt, Artificial Sequence
  Description of Artificial Sequence: Synthetic oligonucleotide
cauacuccagccaucuuag

SEQ ID NO: 1687126 - RNA, 19 nt, Artificial Sequence
  Description of Artificial Sequence: Synthetic oligonucleotide
uagagaucuuaccucauuc

SEQ ID NO: 1687127 - RNA, 19 nt, Artificial Sequence
  Description of Artificial Sequence: Synthetic oligonucleotide
auuaaacucuuauugccaa

SEQ ID NO: 1687128 - RNA, 19 nt, Artificial Sequence
  Description of Artificial Sequence: Synthetic oligonucleotide
ucugaucagaagaggggcc

SEQ ID NO: 1687129 - RNA, 19 nt, Artificial Sequence
  Description of Artificial Sequence: Synthetic oligonucleotide
ucauaacguacccuuuggc

SEQ ID NO: 1687130 - RNA, 19 nt, Artificial Sequence
  Description of Artificial Sequence: Synthetic oligonucleotide
ugaucuguuagagaggaau

SEQ ID NO: 1687131 - RNA, 19 nt, Artificial Sequence
  Description of Artificial Sequence: Synthetic oligonucleotide
cucugaguuaaaaucuuac

SEQ ID NO: 1687132 - RNA, 19 nt, Artificial Sequence
  Description of Artificial Sequence: Synthetic oligonucleotide
agauguaagaccaugguua

SEQ ID NO: 1687133 - RNA, 19 nt, Artificial Sequence
  Description of Artificial Sequence: Synthetic oligonucleotide
cauacacaaauuauuacaa

SEQ ID NO: 1687134 - RNA, 19 nt, Artificial Sequence
  Description of Artificial Sequence: Synthetic oligonucleotide
caguuugccaggaaauuag

SEQ ID NO: 1687135 - RNA, 19 nt, Artificial Sequence
  Description of Artificial Sequence: Synthetic oligonucleotide
cacacacacacacacacac

SEQ ID NO: 1687136 - RNA, 19 nt, Artificial Sequence
  Description of Artificial Sequence: Synthetic oligonucleotide
aaagccccgccuaacacgg

SEQ ID NO: 1687137 - RNA, 19 nt, Artificial Sequence
  Description of Artificial Sequence: Synthetic oligonucleotide
gagauaugguuucuucacc

SEQ ID NO: 1687138 - RNA, 19 nt, Artificial Sequence
  Description of Artificial Sequence: Synthetic oligonucleotide
guuagagaggaaugaaaac

SEQ ID NO: 1687139 - RNA, 19 nt, Artificial Sequence
  Description of Artificial Sequence: Synthetic oligonucleotide
ucucauuuacuuccuuucu

SEQ ID NO: 1687140 - RNA, 19 nt, Artificial Sequence
  Description of Artificial Sequence: Synthetic oligonucleotide
ucucauucguaucccauaa

SEQ ID NO: 1687141 - RNA, 19 nt, Artificial Sequence
  Description of Artificial Sequence: Synthetic oligonucleotide
ugccuauaaugccagcacc

SEQ ID NO: 1687142 - RNA, 19 nt, Artificial Sequence
  Description of Artificial Sequence: Synthetic oligonucleotide
uacuccagccaucuuaggu

SEQ ID NO: 1687143 - RNA, 19 nt, Artificial Sequence
  Description of Artificial Sequence: Synthetic oligonucleotide
agaguacaauaugaaauag

SEQ ID NO: 1687144 - RNA, 19 nt, Artificial Sequence
  Description of Artificial Sequence: Synthetic oligonucleotide
aaacauacuccagccaucu

SEQ ID NO: 1687145 - RNA, 19 nt, Artificial Sequence
  Description of Artificial Sequence: Synthetic oligonucleotide
auaacguacccuuuggcuu

SEQ ID NO: 1687146 - RNA, 19 nt, Artificial Sequence
  Description of Artificial Sequence: Synthetic oligonucleotide
agaacucugaucagaagag

SEQ ID NO: 1687147 - RNA, 19 nt, Artificial Sequence
  Description of Artificial Sequence: Synthetic oligonucleotide
cuuaccucauuccaaagga

SEQ ID NO: 1687148 - RNA, 19 nt, Artificial Sequence
  Description of Artificial Sequence: Synthetic oligonucleotide
uaaauaguacggugcuugc

SEQ ID NO: 1687149 - RNA, 19 nt, Artificial Sequence
  Description of Artificial Sequence: Synthetic oligonucleotide
aaucuuacagggagauuuc

SEQ ID NO: 1687150 - RNA, 19 nt, Artificial Sequence
  Description of Artificial Sequence: Synthetic oligonucleotide
uuccggaacagauuucucu

SEQ ID NO: 1687151 - RNA, 19 nt, Artificial Sequence
  Description of Artificial Sequence: Synthetic oligonucleotide
acucuuauugccaacauua

SEQ ID NO: 1687152 - RNA, 19 nt, Artificial Sequence
  Description of Artificial Sequence: Synthetic oligonucleotide
uaaaagccccgccuaacac

SEQ ID NO: 1687153 - RNA, 19 nt, Artificial Sequence
  Description of Artificial Sequence: Synthetic oligonucleotide
agagucuggaaauuccgga

SEQ ID NO: 1687154 - RNA, 19 nt, Artificial Sequence
  Description of Artificial Sequence: Synthetic oligonucleotide
auaaaagccccgccuaaca

SEQ ID NO: 1687155 - RNA, 19 nt, Artificial Sequence
  Description of Artificial Sequence: Synthetic oligonucleotide
auaaaggacuuuuccuugu

SEQ ID NO: 1687156 - RNA, 19 nt, Artificial Sequence
  Description of Artificial Sequence: Synthetic oligonucleotide
cacacacacacacacacuc

SEQ ID NO: 1687157 - RNA, 19 nt, Artificial Sequence
  Description of Artificial Sequence: Synthetic oligonucleotide
uuacagggagauuucucug

SEQ ID NO: 1687158 - RNA, 19 nt, Artificial Sequence
  Description of Artificial Sequence: Synthetic oligonucleotide
uaccucauuccaaaggaau

SEQ ID NO: 1687159 - RNA, 19 nt, Artificial Sequence
  Description of Artificial Sequence: Synthetic oligonucleotide
ucuacaagucaaguuccag

SEQ ID NO: 1687160 - RNA, 19 nt, Artificial Sequence
  Description of Artificial Sequence: Synthetic oligonucleotide
uuuucacacguucuucauc

SEQ ID NO: 1687161 - RNA, 19 nt, Artificial Sequence
  Description of Artificial Sequence: Synthetic oligonucleotide
gaaauuccggaacagauuu

SEQ ID NO: 1687162 - RNA, 19 nt, Artificial Sequence
  Description of Artificial Sequence: Synthetic oligonucleotide
uuucuucaccauuuggguc

SEQ ID NO: 1687163 - RNA, 19 nt, Artificial Sequence
  Description of Artificial Sequence: Synthetic oligonucleotide
uaugugggaugcacuaugu

SEQ ID NO: 1687164 - RNA, 19 nt, Artificial Sequence
  Description of Artificial Sequence: Synthetic oligonucleotide
uccuuacuucaucugucag

SEQ ID NO: 1687165 - RNA, 19 nt, Artificial Sequence
  Description of Artificial Sequence: Synthetic oligonucleotide
uucuuguacaaaaguuuuc

SEQ ID NO: 1687166 - RNA, 19 nt, Artificial Sequence
  Description of Artificial Sequence: Synthetic oligonucleotide
uauaccaaguccuggcuuu

SEQ ID NO: 1687167 - RNA, 19 nt, Artificial Sequence
  Description of Artificial Sequence: Synthetic oligonucleotide
gaucuguuagagaggaaug

SEQ ID NO: 1687168 - RNA, 19 nt, Artificial Sequence
  Description of Artificial Sequence: Synthetic oligonucleotide
cagauuucucuugaggagc

SEQ ID NO: 1687169 - RNA, 19 nt, Artificial Sequence
  Description of Artificial Sequence: Synthetic oligonucleotide
gauuucucugaagcgguag

SEQ ID NO: 1687170 - RNA, 19 nt, Artificial Sequence
  Description of Artificial Sequence: Synthetic oligonucleotide
gaucuuaccucauuccaaa

SEQ ID NO: 1687171 - RNA, 19 nt, Artificial Sequence
  Description of Artificial Sequence: Synthetic oligonucleotide
ugcuugccuauaaugccag

SEQ ID NO: 1687172 - RNA, 19 nt, Artificial Sequence
  Description of Artificial Sequence: Synthetic oligonucleotide
gccaucuuagguuauacac

SEQ ID NO: 1687173 - RNA, 19 nt, Artificial Sequence
  Description of Artificial Sequence: Synthetic oligonucleotide
uccuuauaccaaguccugg

SEQ ID NO: 1687174 - RNA, 19 nt, Artificial Sequence
  Description of Artificial Sequence: Synthetic oligonucleotide
uuggcuuguggauuguagu

SEQ ID NO: 1687175 - RNA, 19 nt, Artificial Sequence
  Description of Artificial Sequence: Synthetic oligonucleotide
auacacuauaguaacauuu

SEQ ID NO: 1687176 - RNA, 19 nt, Artificial Sequence
  Description of Artificial Sequence: Synthetic oligonucleotide
ucaccauuugggucuaugu

SEQ ID NO: 1687177 - RNA, 19 nt, Artificial Sequence
  Description of Artificial Sequence: Synthetic oligonucleotide
uccugguauaaaagccccg

SEQ ID NO: 1687178 - RNA, 19 nt, Artificial Sequence
  Description of Artificial Sequence: Synthetic oligonucleotide
uagacagacucaauacaaa

SEQ ID NO: 1687179 - RNA, 19 nt, Artificial Sequence
  Description of Artificial Sequence: Synthetic oligonucleotide
aaaagaucucugaauucga

SEQ ID NO: 1687180 - RNA, 19 nt, Artificial Sequence
  Description of Artificial Sequence: Synthetic oligonucleotide
uuagucuccuuacuucauc

SEQ ID NO: 1687181 - RNA, 19 nt, Artificial Sequence
  Description of Artificial Sequence: Synthetic oligonucleotide
guuccugguauaaaagccc

SEQ ID NO: 1687182 - RNA, 19 nt, Artificial Sequence
  Description of Artificial Sequence: Synthetic oligonucleotide
gaaauuagacgcugcucca

SEQ ID NO: 1687183 - RNA, 19 nt, Artificial Sequence
  Description of Artificial Sequence: Synthetic oligonucleotide
cuaugugggaugcacuaug

SEQ ID NO: 1687184 - RNA, 19 nt, Artificial Sequence
  Description of Artificial Sequence: Synthetic oligonucleotide
ggagauaugguuucuucac

SEQ ID NO: 1687185 - RNA, 19 nt, Artificial Sequence
  Description of Artificial Sequence: Synthetic oligonucleotide
agcgguaggagauaugguu

SEQ ID NO: 1687186 - RNA, 19 nt, Artificial Sequence
  Description of Artificial Sequence: Synthetic oligonucleotide
aaacaaugugcuccugcau

SEQ ID NO: 1687187 - RNA, 19 nt, Artificial Sequence
  Description of Artificial Sequence: Synthetic oligonucleotide
acggugcuugccuauaaug

SEQ ID NO: 1687188 - RNA, 19 nt, Artificial Sequence
  Description of Artificial Sequence: Synthetic oligonucleotide
acucugaucagaagagggg

SEQ ID NO: 1687189 - RNA, 19 nt, Artificial Sequence
  Description of Artificial Sequence: Synthetic oligonucleotide
uggauuguaguuccuggua

SEQ ID NO: 1687190 - RNA, 19 nt, Artificial Sequence
  Description of Artificial Sequence: Synthetic oligonucleotide
uuauaccaaguccuggcuu

SEQ ID NO: 1687191 - RNA, 19 nt, Artificial Sequence
  Description of Artificial Sequence: Synthetic oligonucleotide
cucauuuacuuccuuucuc

SEQ ID NO: 1687192 - RNA, 19 nt, Artificial Sequence
  Description of Artificial Sequence: Synthetic oligonucleotide
uauacacuauaguaacauu

SEQ ID NO: 1687193 - RNA, 19 nt, Artificial Sequence
  Description of Artificial Sequence: Synthetic oligonucleotide
agguuauacacuauaguaa

SEQ ID NO: 1687194 - RNA, 19 nt, Artificial Sequence
  Description of Artificial Sequence: Synthetic oligonucleotide
ucuguuagagaggaaugaa

SEQ ID NO: 1687195 - RNA, 19 nt, Artificial Sequence
  Description of Artificial Sequence: Synthetic oligonucleotide
auacaaaugaagaguacaa

SEQ ID NO: 1687196 - RNA, 19 nt, Artificial Sequence
  Description of Artificial Sequence: Synthetic oligonucleotide
cugcauucugcgcagccgg

SEQ ID NO: 1687197 - RNA, 19 nt, Artificial Sequence
  Description of Artificial Sequence: Synthetic oligonucleotide
cuugaucuguuagagagga

SEQ ID NO: 1687198 - RNA, 19 nt, Artificial Sequence
  Description of Artificial Sequence: Synthetic oligonucleotide
aacucucauucguauccca

SEQ ID NO: 1687199 - RNA, 19 nt, Artificial Sequence
  Description of Artificial Sequence: Synthetic oligonucleotide
acagaacucucauucguau

SEQ ID NO: 1687200 - RNA, 19 nt, Artificial Sequence
  Description of Artificial Sequence: Synthetic oligonucleotide
uaucccauaaaggacuuuu

SEQ ID NO: 1687201 - RNA, 19 nt, Artificial Sequence
  Description of Artificial Sequence: Synthetic oligonucleotide
aaauuccggaacagauuuc

SEQ ID NO: 1687202 - RNA, 19 nt, Artificial Sequence
  Description of Artificial Sequence: Synthetic oligonucleotide
uuagacgcugcuccacugu

SEQ ID NO: 1687203 - RNA, 19 nt, Artificial Sequence
  Description of Artificial Sequence: Synthetic oligonucleotide
uauaaaagccccgccuaac

SEQ ID NO: 1687204 - RNA, 19 nt, Artificial Sequence
  Description of Artificial Sequence: Synthetic oligonucleotide
caaacaaugugcuccugca

SEQ ID NO: 1687205 - RNA, 19 nt, Artificial Sequence
  Description of Artificial Sequence: Synthetic oligonucleotide
aaacaaacacacacacaca

SEQ ID NO: 1687206 - RNA, 19 nt, Artificial Sequence
  Description of Artificial Sequence: Synthetic oligonucleotide
cucauuccaaaggaaucgg

SEQ ID NO: 1687207 - RNA, 19 nt, Artificial Sequence
  Description of Artificial Sequence: Synthetic oligonucleotide
uuaccucauuccaaaggaa

SEQ ID NO: 1687208 - RNA, 19 nt, Artificial Sequence
  Description of Artificial Sequence: Synthetic oligonucleotide
gggagauuucucugaagcg

SEQ ID NO: 1687209 - RNA, 19 nt, Artificial Sequence
  Description of Artificial Sequence: Synthetic oligonucleotide
cacacacacacacacucug

SEQ ID NO: 1687210 - RNA, 19 nt, Artificial Sequence
  Description of Artificial Sequence: Synthetic oligonucleotide
cuaaaacacagggcuacag

SEQ ID NO: 1687211 - RNA, 19 nt, Artificial Sequence
  Description of Artificial Sequence: Synthetic oligonucleotide
cucaauacaaaugaagagu

SEQ ID NO: 1687212 - RNA, 19 nt, Artificial Sequence
  Description of Artificial Sequence: Synthetic oligonucleotide
caucuuagguuauacacua

SEQ ID NO: 1687213 - RNA, 19 nt, Artificial Sequence
  Description of Artificial Sequence: Synthetic oligonucleotide
caccauuugggucuaugug

SEQ ID NO: 1687214 - RNA, 19 nt, Artificial Sequence
  Description of Artificial Sequence: Synthetic oligonucleotide
gcagccggauuucauaacg

SEQ ID NO: 1687215 - RNA, 19 nt, Artificial Sequence
  Description of Artificial Sequence: Synthetic oligonucleotide
gguacaagguaacagccca

SEQ ID NO: 1687216 - RNA, 19 nt, Artificial Sequence
  Description of Artificial Sequence: Synthetic oligonucleotide
auuagacgcugcuccacug

SEQ ID NO: 1687217 - RNA, 19 nt, Artificial Sequence
  Description of Artificial Sequence: Synthetic oligonucleotide
caaagcaacaugucucuga

SEQ ID NO: 1687218 - RNA, 19 nt, Artificial Sequence
  Description of Artificial Sequence: Synthetic oligonucleotide
ggccuugaagcuuaguggc

SEQ ID NO: 1687219 - RNA, 19 nt, Artificial Sequence
  Description of Artificial Sequence: Synthetic oligonucleotide
agccccgccuaacacggcc

SEQ ID NO: 1687220 - RNA, 19 nt, Artificial Sequence
  Description of Artificial Sequence: Synthetic oligonucleotide
augugggaugcacuauguc

SEQ ID NO: 1687221 - RNA, 19 nt, Artificial Sequence
  Description of Artificial Sequence: Synthetic oligonucleotide
ccauacacaaauuauuaca

SEQ ID NO: 1687222 - RNA, 19 nt, Artificial Sequence
  Description of Artificial Sequence: Synthetic oligonucleotide
ccggauuucauaacguacc

SEQ ID NO: 1687223 - RNA, 19 nt, Artificial Sequence
  Description of Artificial Sequence: Synthetic oligonucleotide
aaucggacagccucuucuu

SEQ ID NO: 1687224 - RNA, 19 nt, Artificial Sequence
  Description of Artificial Sequence: Synthetic oligonucleotide
aucuuaccucauuccaaag

SEQ ID NO: 1687225 - RNA, 19 nt, Artificial Sequence
  Description of Artificial Sequence: Synthetic oligonucleotide
uaagaccaugguuauccuc

SEQ ID NO: 1687226 - RNA, 19 nt, Artificial Sequence
  Description of Artificial Sequence: Synthetic oligonucleotide
ccuuauaccaaguccuggc

SEQ ID NO: 1687227 - RNA, 19 nt, Artificial Sequence
  Description of Artificial Sequence: Synthetic oligonucleotide
aaaauuagacagacucaau

SEQ ID NO: 1687228 - RNA, 19 nt, Artificial Sequence
  Description of Artificial Sequence: Synthetic oligonucleotide
aucuguuagagaggaauga

SEQ ID NO: 1687229 - RNA, 19 nt, Artificial Sequence
  Description of Artificial Sequence: Synthetic oligonucleotide
cacuauguccaacugccuc

SEQ ID NO: 1687230 - RNA, 19 nt, Artificial Sequence
  Description of Artificial Sequence: Synthetic oligonucleotide
cuugaagcuuaguggcagc

SEQ ID NO: 1687231 - RNA, 19 nt, Artificial Sequence
  Description of Artificial Sequence: Synthetic oligonucleotide
cuuacagggagauuucucu

SEQ ID NO: 1687232 - RNA, 19 nt, Artificial Sequence
  Description of Artificial Sequence: Synthetic oligonucleotide
acacacacacacacucugc

SEQ ID NO: 1687233 - RNA, 19 nt, Artificial Sequence
  Description of Artificial Sequence: Synthetic oligonucleotide
ucggacagccucuucuugu

SEQ ID NO: 1687234 - RNA, 19 nt, Artificial Sequence
  Description of Artificial Sequence: Synthetic oligonucleotide
acuugaucuguuagagagg

SEQ ID NO: 1687235 - RNA, 19 nt, Artificial Sequence
  Description of Artificial Sequence: Synthetic oligonucleotide
caaacauacuccagccauc

SEQ ID NO: 1687236 - RNA, 19 nt, Artificial Sequence
  Description of Artificial Sequence: Synthetic oligonucleotide
gaaucggacagccucuucu

SEQ ID NO: 1687237 - RNA, 19 nt, Artificial Sequence
  Description of Artificial Sequence: Synthetic oligonucleotide
aguuaaaaucuuacaggga

SEQ ID NO: 1687238 - RNA, 19 nt, Artificial Sequence
  Description of Artificial Sequence: Synthetic oligonucleotide
ccgggaaagauguaagacc

SEQ ID NO: 1687239 - RNA, 19 nt, Artificial Sequence
  Description of Artificial Sequence: Synthetic oligonucleotide
cugaucagaagaggggccc

SEQ ID NO: 1687240 - RNA, 19 nt, Artificial Sequence
  Description of Artificial Sequence: Synthetic oligonucleotide
augaagaguacaauaugaa

SEQ ID NO: 1687241 - RNA, 19 nt, Artificial Sequence
  Description of Artificial Sequence: Synthetic oligonucleotide
uccugcauucugcgcagcc

SEQ ID NO: 1687242 - RNA, 19 nt, Artificial Sequence
  Description of Artificial Sequence: Synthetic oligonucleotide
agcaccauacacaaauuau

SEQ ID NO: 1687243 - RNA, 19 nt, Artificial Sequence
  Description of Artificial Sequence: Synthetic oligonucleotide
ucuaaaacacagggcuaca

SEQ ID NO: 1687244 - RNA, 19 nt, Artificial Sequence
  Description of Artificial Sequence: Synthetic oligonucleotide
gcaaacaaugugcuccugc

SEQ ID NO: 1687245 - RNA, 19 nt, Artificial Sequence
  Description of Artificial Sequence: Synthetic oligonucleotide
cauaacguacccuuuggcu

SEQ ID NO: 1687246 - RNA, 19 nt, Artificial Sequence
  Description of Artificial Sequence: Synthetic oligonucleotide
uguagagaucuuaccucau

SEQ ID NO: 1687247 - RNA, 19 nt, Artificial Sequence
  Description of Artificial Sequence: Synthetic oligonucleotide
cagaguacuugacacagaa

SEQ ID NO: 1687248 - RNA, 19 nt, Artificial Sequence
  Description of Artificial Sequence: Synthetic oligonucleotide
uuaguggcagcugcauuca

SEQ ID NO: 1687249 - RNA, 19 nt, Artificial Sequence
  Description of Artificial Sequence: Synthetic oligonucleotide
aaacacacacacacacaca

SEQ ID NO: 1687250 - RNA, 19 nt, Artificial Sequence
  Description of Artificial Sequence: Synthetic oligonucleotide
cauuagugauauucuaaaa

SEQ ID NO: 1687251 - RNA, 19 nt, Artificial Sequence
  Description of Artificial Sequence: Synthetic oligonucleotide
uugggucuaugugggaugc

SEQ ID NO: 1687252 - RNA, 19 nt, Artificial Sequence
  Description of Artificial Sequence: Synthetic oligonucleotide
aaggaaucggacagccucu

SEQ ID NO: 1687253 - RNA, 19 nt, Artificial Sequence
  Description of Artificial Sequence: Synthetic oligonucleotide
auuugggucuaugugggau

SEQ ID NO: 1687254 - RNA, 19 nt, Artificial Sequence
  Description of Artificial Sequence: Synthetic oligonucleotide
cuauguccaacugccuccg

SEQ ID NO: 1687255 - RNA, 19 nt, Artificial Sequence
  Description of Artificial Sequence: Synthetic oligonucleotide
uucaccauuugggucuaug

SEQ ID NO: 1687256 - RNA, 19 nt, Artificial Sequence
  Description of Artificial Sequence: Synthetic oligonucleotide
ugaagcuuaguggcagcug

SEQ ID NO: 1687257 - RNA, 19 nt, Artificial Sequence
  Description of Artificial Sequence: Synthetic oligonucleotide
ugaagcgguaggagauaug

SEQ ID NO: 1687258 - RNA, 19 nt, Artificial Sequence
  Description of Artificial Sequence: Synthetic oligonucleotide
aacagaacucucauucgua

SEQ ID NO: 1687259 - RNA, 19 nt, Artificial Sequence
  Description of Artificial Sequence: Synthetic oligonucleotide
acaguguaguuaaauagua

SEQ ID NO: 1687260 - RNA, 19 nt, Artificial Sequence
  Description of Artificial Sequence: Synthetic oligonucleotide
gucuggaaauuccggaaca

SEQ ID NO: 1687261 - RNA, 19 nt, Artificial Sequence
  Description of Artificial Sequence: Synthetic oligonucleotide
aaaucauauuaaacucuua

SEQ ID NO: 1687262 - RNA, 19 nt, Artificial Sequence
  Description of Artificial Sequence: Synthetic oligonucleotide
aggcaaacaaugugcuccu

SEQ ID NO: 1687263 - RNA, 19 nt, Artificial Sequence
  Description of Artificial Sequence: Synthetic oligonucleotide
uuacaaguuacaggacaaa

SEQ ID NO: 1687264 - RNA, 19 nt, Artificial Sequence
  Description of Artificial Sequence: Synthetic oligonucleotide
ucaggcaaacaaugugcuc

SEQ ID NO: 1687265 - RNA, 19 nt, Artificial Sequence
  Description of Artificial Sequence: Synthetic oligonucleotide
ggaacagauuucucuugag

SEQ ID NO: 1687266 - RNA, 19 nt, Artificial Sequence
  Description of Artificial Sequence: Synthetic oligonucleotide
guuauacacuauaguaaca

SEQ ID NO: 1687267 - RNA, 19 nt, Artificial Sequence
  Description of Artificial Sequence: Synthetic oligonucleotide
gauguaagaccaugguuau

SEQ ID NO: 1687268 - RNA, 19 nt, Artificial Sequence
  Description of Artificial Sequence: Synthetic oligonucleotide
agccaucuuagguuauaca

SEQ ID NO: 1687269 - RNA, 19 nt, Artificial Sequence
  Description of Artificial Sequence: Synthetic oligonucleotide
guuauccucuuucaagaua

SEQ ID NO: 1687270 - RNA, 19 nt, Artificial Sequence
  Description of Artificial Sequence: Synthetic oligonucleotide
caacaugucucugaguuaa

SEQ ID NO: 1687271 - RNA, 19 nt, Artificial Sequence
  Description of Artificial Sequence: Synthetic oligonucleotide
ucuugucccaaagcaacau

SEQ ID NO: 1687272 - RNA, 19 nt, Artificial Sequence
  Description of Artificial Sequence: Synthetic oligonucleotide
aucccauaaaggacuuuuc

SEQ ID NO: 1687273 - RNA, 19 nt, Artificial Sequence
  Description of Artificial Sequence: Synthetic oligonucleotide
uagacgcugcuccacuguc

SEQ ID NO: 1687274 - RNA, 19 nt, Artificial Sequence
  Description of Artificial Sequence: Synthetic oligonucleotide
caaaucauauuaaacucuu

SEQ ID NO: 1687275 - RNA, 19 nt, Artificial Sequence
  Description of Artificial Sequence: Synthetic oligonucleotide
ggcaugucaguuugccagg

SEQ ID NO: 1687276 - RNA, 19 nt, Artificial Sequence
  Description of Artificial Sequence: Synthetic oligonucleotide
gaguacaauaugaaauagu

SEQ ID NO: 1687277 - RNA, 19 nt, Artificial Sequence
  Description of Artificial Sequence: Synthetic oligonucleotide
guauaaaagccccgccuaa

SEQ ID NO: 1687278 - RNA, 19 nt, Artificial Sequence
  Description of Artificial Sequence: Synthetic oligonucleotide
acaaacacacacacacaca

SEQ ID NO: 1687279 - RNA, 19 nt, Artificial Sequence
  Description of Artificial Sequence: Synthetic oligonucleotide
ugcuuucuauggaacuuuu

SEQ ID NO: 1687280 - RNA, 19 nt, Artificial Sequence
  Description of Artificial Sequence: Synthetic oligonucleotide
aggacaaacagggccgugu

SEQ ID NO: 1687281 - RNA, 19 nt, Artificial Sequence
  Description of Artificial Sequence: Synthetic oligonucleotide
caacauuagugauauucua

SEQ ID NO: 1687282 - RNA, 19 nt, Artificial Sequence
  Description of Artificial Sequence: Synthetic oligonucleotide
aaaaucuuacagggagauu

SEQ ID NO: 1687283 - RNA, 19 nt, Artificial Sequence
  Description of Artificial Sequence: Synthetic oligonucleotide
gaguugacuuuaucuuguc

SEQ ID NO: 1687284 - RNA, 19 nt, Artificial Sequence
  Description of Artificial Sequence: Synthetic oligonucleotide
agauuucucuugaggagcu

SEQ ID NO: 1687285 - RNA, 19 nt, Artificial Sequence
  Description of Artificial Sequence: Synthetic oligonucleotide
gguauaaaagccccgccua

SEQ ID NO: 1687286 - RNA, 19 nt, Artificial Sequence
  Description of Artificial Sequence: Synthetic oligonucleotide
acugccuccgggaaagaug

SEQ ID NO: 1687287 - RNA, 19 nt, Artificial Sequence
  Description of Artificial Sequence: Synthetic oligonucleotide
gguuuaggugacaccagag

SEQ ID NO: 1687288 - RNA, 19 nt, Artificial Sequence
  Description of Artificial Sequence: Synthetic oligonucleotide
guaacagcccagaauucuc

SEQ ID NO: 1687289 - RNA, 19 nt, Artificial Sequence
  Description of Artificial Sequence: Synthetic oligonucleotide
gucuaugugggaugcacua

SEQ ID NO: 1687290 - RNA, 19 nt, Artificial Sequence
  Description of Artificial Sequence: Synthetic oligonucleotide
ucuaugugggaugcacuau

SEQ ID NO: 1687291 - RNA, 19 nt, Artificial Sequence
  Description of Artificial Sequence: Synthetic oligonucleotide
ugcgcagccggauuucaua

SEQ ID NO: 1687292 - RNA, 19 nt, Artificial Sequence
  Description of Artificial Sequence: Synthetic oligonucleotide
uacggugcuugccuauaau

SEQ ID NO: 1687293 - RNA, 19 nt, Artificial Sequence
  Description of Artificial Sequence: Synthetic oligonucleotide
cuccuuacuucaucuguca

SEQ ID NO: 1687294 - RNA, 19 nt, Artificial Sequence
  Description of Artificial Sequence: Synthetic oligonucleotide
cagggagauuucucugaag

SEQ ID NO: 1687295 - RNA, 19 nt, Artificial Sequence
  Description of Artificial Sequence: Synthetic oligonucleotide
aucuuacagggagauuucu

SEQ ID NO: 1687296 - RNA, 19 nt, Artificial Sequence
  Description of Artificial Sequence: Synthetic oligonucleotide
auaccaaguccuggcuuuc

SEQ ID NO: 1687297 - RNA, 19 nt, Artificial Sequence
  Description of Artificial Sequence: Synthetic oligonucleotide
ccaaaggaaucggacagcc

SEQ ID NO: 1687298 - RNA, 19 nt, Artificial Sequence
  Description of Artificial Sequence: Synthetic oligonucleotide
auucugcgcagccggauuu

SEQ ID NO: 1687299 - RNA, 19 nt, Artificial Sequence
  Description of Artificial Sequence: Synthetic oligonucleotide
agguaacagcccagaauuc

SEQ ID NO: 1687300 - RNA, 19 nt, Artificial Sequence
  Description of Artificial Sequence: Synthetic oligonucleotide
ugcauucugcgcagccgga

SEQ ID NO: 1687301 - RNA, 19 nt, Artificial Sequence
  Description of Artificial Sequence: Synthetic oligonucleotide
auaguacggugcuugccua

SEQ ID NO: 1687302 - RNA, 19 nt, Artificial Sequence
  Description of Artificial Sequence: Synthetic oligonucleotide
guacaagguaacagcccag

SEQ ID NO: 1687303 - RNA, 19 nt, Artificial Sequence
  Description of Artificial Sequence: Synthetic oligonucleotide
acaugucucugaguuaaaa

SEQ ID NO: 1687304 - RNA, 19 nt, Artificial Sequence
  Description of Artificial Sequence: Synthetic oligonucleotide
gaucagaagaggggcccug

SEQ ID NO: 1687305 - RNA, 19 nt, Artificial Sequence
  Description of Artificial Sequence: Synthetic oligonucleotide
caugguuauccucuuucaa

SEQ ID NO: 1687306 - RNA, 19 nt, Artificial Sequence
  Description of Artificial Sequence: Synthetic oligonucleotide
agccggauuucauaacgua

SEQ ID NO: 1687307 - RNA, 19 nt, Artificial Sequence
  Description of Artificial Sequence: Synthetic oligonucleotide
cacucugcuuucuauggaa

SEQ ID NO: 1687308 - RNA, 19 nt, Artificial Sequence
  Description of Artificial Sequence: Synthetic oligonucleotide
ccugguauaaaagccccgc

SEQ ID NO: 1687309 - RNA, 19 nt, Artificial Sequence
  Description of Artificial Sequence: Synthetic oligonucleotide
auuccggaacagauuucuc

SEQ ID NO: 1687310 - RNA, 19 nt, Artificial Sequence
  Description of Artificial Sequence: Synthetic oligonucleotide
cagacucaauacaaaugaa

SEQ ID NO: 1687311 - RNA, 19 nt, Artificial Sequence
  Description of Artificial Sequence: Synthetic oligonucleotide
cggugcuugccuauaaugc

SEQ ID NO: 1687312 - RNA, 19 nt, Artificial Sequence
  Description of Artificial Sequence: Synthetic oligonucleotide
aguuugccaggaaauuaga

SEQ ID NO: 1687313 - RNA, 19 nt, Artificial Sequence
  Description of Artificial Sequence: Synthetic oligonucleotide
guccuuauaccaaguccug

SEQ ID NO: 1687314 - RNA, 19 nt, Artificial Sequence
  Description of Artificial Sequence: Synthetic oligonucleotide
acacacacacacucugcuu

SEQ ID NO: 1687315 - RNA, 19 nt, Artificial Sequence
  Description of Artificial Sequence: Synthetic oligonucleotide
cuuauaccaaguccuggcu

SEQ ID NO: 1687316 - RNA, 19 nt, Artificial Sequence
  Description of Artificial Sequence: Synthetic oligonucleotide
gugcuugccuauaaugcca

SEQ ID NO: 1687317 - RNA, 19 nt, Artificial Sequence
  Description of Artificial Sequence: Synthetic oligonucleotide
aagcgguaggagauauggu

SEQ ID NO: 1687318 - RNA, 19 nt, Artificial Sequence
  Description of Artificial Sequence: Synthetic oligonucleotide
aggaaccaaucagaacucu

SEQ ID NO: 1687319 - RNA, 19 nt, Artificial Sequence
  Description of Artificial Sequence: Synthetic oligonucleotide
gaugagcacugacuuggua

SEQ ID NO: 1687320 - RNA, 19 nt, Artificial Sequence
  Description of Artificial Sequence: Synthetic oligonucleotide
ccaggaaauuagacgcugc

SEQ ID NO: 1687321 - RNA, 19 nt, Artificial Sequence
  Description of Artificial Sequence: Synthetic oligonucleotide
aacugccuccgggaaagau

SEQ ID NO: 1687322 - RNA, 19 nt, Artificial Sequence
  Description of Artificial Sequence: Synthetic oligonucleotide
uaguacggugcuugccuau

SEQ ID NO: 1687323 - RNA, 19 nt, Artificial Sequence
  Description of Artificial Sequence: Synthetic oligonucleotide
cgggaaagauguaagacca

SEQ ID NO: 1687324 - RNA, 19 nt, Artificial Sequence
  Description of Artificial Sequence: Synthetic oligonucleotide
cagccaucuuagguuauac

SEQ ID NO: 1687325 - RNA, 19 nt, Artificial Sequence
  Description of Artificial Sequence: Synthetic oligonucleotide
cuauaaugccagcaccaua

SEQ ID NO: 1687326 - RNA, 19 nt, Artificial Sequence
  Description of Artificial Sequence: Synthetic oligonucleotide
caagguaacagcccagaau

SEQ ID NO: 1687327 - RNA, 19 nt, Artificial Sequence
  Description of Artificial Sequence: Synthetic oligonucleotide
cucucauucguaucccaua

SEQ ID NO: 1687328 - RNA, 19 nt, Artificial Sequence
  Description of Artificial Sequence: Synthetic oligonucleotide
ccuccgggaaagauguaag

SEQ ID NO: 1687329 - RNA, 19 nt, Artificial Sequence
  Description of Artificial Sequence: Synthetic oligonucleotide
guggauuguaguuccuggu

SEQ ID NO: 1687330 - RNA, 19 nt, Artificial Sequence
  Description of Artificial Sequence: Synthetic oligonucleotide
acacacacacacacacucu

SEQ ID NO: 1687331 - RNA, 19 nt, Artificial Sequence
  Description of Artificial Sequence: Synthetic oligonucleotide
cuuucaagauagcauugau

SEQ ID NO: 1687332 - RNA, 19 nt, Artificial Sequence
  Description of Artificial Sequence: Synthetic oligonucleotide
cugccuccgggaaagaugu

SEQ ID NO: 1687333 - RNA, 19 nt, Artificial Sequence
  Description of Artificial Sequence: Synthetic oligonucleotide
gccuaacacggccuugaag

SEQ ID NO: 1687334 - RNA, 19 nt, Artificial Sequence
  Description of Artificial Sequence: Synthetic oligonucleotide
acucucauucguaucccau

SEQ ID NO: 1687335 - RNA, 19 nt, Artificial Sequence
  Description of Artificial Sequence: Synthetic oligonucleotide
uaacacggccuugaagcuu

SEQ ID NO: 1687336 - RNA, 19 nt, Artificial Sequence
  Description of Artificial Sequence: Synthetic oligonucleotide
gccggauuucauaacguac

SEQ ID NO: 1687337 - RNA, 19 nt, Artificial Sequence
  Description of Artificial Sequence: Synthetic oligonucleotide
uugugggaauggagguuua

SEQ ID NO: 1687338 - RNA, 19 nt, Artificial Sequence
  Description of Artificial Sequence: Synthetic oligonucleotide
cggauuucauaacguaccc

SEQ ID NO: 1687339 - RNA, 19 nt, Artificial Sequence
  Description of Artificial Sequence: Synthetic oligonucleotide
aacguacccuuuggcuugu

SEQ ID NO: 1687340 - RNA, 19 nt, Artificial Sequence
  Description of Artificial Sequence: Synthetic oligonucleotide
ggcuuguggauuguaguuc

SEQ ID NO: 1687341 - RNA, 19 nt, Artificial Sequence
  Description of Artificial Sequence: Synthetic oligonucleotide
gggucuaugugggaugcac

SEQ ID NO: 1687342 - RNA, 19 nt, Artificial Sequence
  Description of Artificial Sequence: Synthetic oligonucleotide
caggaaauuagacgcugcu

SEQ ID NO: 1687343 - RNA, 19 nt, Artificial Sequence
  Description of Artificial Sequence: Synthetic oligonucleotide
acacacacacacacacaca

SEQ ID NO: 1687344 - RNA, 19 nt, Artificial Sequence
  Description of Artificial Sequence: Synthetic oligonucleotide
acacacacacacacacacu

SEQ ID NO: 1687345 - RNA, 19 nt, Artificial Sequence
  Description of Artificial Sequence: Synthetic oligonucleotide
ggauuguaguuccugguau

SEQ ID NO: 1687346 - RNA, 19 nt, Artificial Sequence
  Description of Artificial Sequence: Synthetic oligonucleotide
guuuucacacguucuucau

SEQ ID NO: 1687347 - RNA, 19 nt, Artificial Sequence
  Description of Artificial Sequence: Synthetic oligonucleotide
cacacacacacacucugcu

SEQ ID NO: 1687348 - RNA, 19 nt, Artificial Sequence
  Description of Artificial Sequence: Synthetic oligonucleotide
cuccagccaucuuagguua

SEQ ID NO: 1687349 - RNA, 19 nt, Artificial Sequence
  Description of Artificial Sequence: Synthetic oligonucleotide
gucaggcaaacaaugugcu

SEQ ID NO: 1687350 - RNA, 19 nt, Artificial Sequence
  Description of Artificial Sequence: Synthetic oligonucleotide
cuaacacggccuugaagcu

SEQ ID NO: 1687351 - RNA, 19 nt, Artificial Sequence
  Description of Artificial Sequence: Synthetic oligonucleotide
gguaacagcccagaauucu

SEQ ID NO: 1687352 - RNA, 19 nt, Artificial Sequence
  Description of Artificial Sequence: Synthetic oligonucleotide
agcccagaauucucauuua

SEQ ID NO: 1687353 - RNA, 19 nt, Artificial Sequence
  Description of Artificial Sequence: Synthetic oligonucleotide
caucugucaggcaaacaau

SEQ ID NO: 1687354 - RNA, 19 nt, Artificial Sequence
  Description of Artificial Sequence: Synthetic oligonucleotide
gccguguagacagacccug

SEQ ID NO: 1687355 - RNA, 19 nt, Artificial Sequence
  Description of Artificial Sequence: Synthetic oligonucleotide
aacaugucucugaguuaaa

SEQ ID NO: 1687356 - RNA, 19 nt, Artificial Sequence
  Description of Artificial Sequence: Synthetic oligonucleotide
aaccuucaucaaacauacu

SEQ ID NO: 1687357 - RNA, 19 nt, Artificial Sequence
  Description of Artificial Sequence: Synthetic oligonucleotide
guagagaucuuaccucauu

SEQ ID NO: 1687358 - RNA, 19 nt, Artificial Sequence
  Description of Artificial Sequence: Synthetic oligonucleotide
cauuugggucuauguggga

SEQ ID NO: 1687359 - RNA, 19 nt, Artificial Sequence
  Description of Artificial Sequence: Synthetic oligonucleotide
aagccccgccuaacacggc

SEQ ID NO: 1687360 - RNA, 19 nt, Artificial Sequence
  Description of Artificial Sequence: Synthetic oligonucleotide
cauuuacuuccuuucucau

SEQ ID NO: 1687361 - RNA, 19 nt, Artificial Sequence
  Description of Artificial Sequence: Synthetic oligonucleotide
ccaucuuagguuauacacu

SEQ ID NO: 1687362 - RNA, 19 nt, Artificial Sequence
  Description of Artificial Sequence: Synthetic oligonucleotide
cucauucguaucccauaaa

SEQ ID NO: 1687363 - RNA, 19 nt, Artificial Sequence
  Description of Artificial Sequence: Synthetic oligonucleotide
aguacggugcuugccuaua

SEQ ID NO: 1687364 - RNA, 19 nt, Artificial Sequence
  Description of Artificial Sequence: Synthetic oligonucleotide
guacggugcuugccuauaa

SEQ ID NO: 1687365 - RNA, 19 nt, Artificial Sequence
  Description of Artificial Sequence: Synthetic oligonucleotide
ccauaaaggacuuuuccuu

SEQ ID NO: 1687366 - RNA, 19 nt, Artificial Sequence
  Description of Artificial Sequence: Synthetic oligonucleotide
cuuagucuccuuacuucau

SEQ ID NO: 1687367 - RNA, 19 nt, Artificial Sequence
  Description of Artificial Sequence: Synthetic oligonucleotide
aucuuagguuauacacuau

SEQ ID NO: 1687368 - RNA, 19 nt, Artificial Sequence
  Description of Artificial Sequence: Synthetic oligonucleotide
ccaugguuauccucuuuca

SEQ ID NO: 1687369 - RNA, 19 nt, Artificial Sequence
  Description of Artificial Sequence: Synthetic oligonucleotide
ugccagcaccauacacaaa

SEQ ID NO: 1687370 - RNA, 19 nt, Artificial Sequence
  Description of Artificial Sequence: Synthetic oligonucleotide
guuaaauaguacggugcuu

SEQ ID NO: 1687371 - RNA, 19 nt, Artificial Sequence
  Description of Artificial Sequence: Synthetic oligonucleotide
caaaggaaucggacagccu

SEQ ID NO: 1687372 - RNA, 19 nt, Artificial Sequence
  Description of Artificial Sequence: Synthetic oligonucleotide
cguacccuuuggcuugugg

SEQ ID NO: 1687373 - RNA, 19 nt, Artificial Sequence
  Description of Artificial Sequence: Synthetic oligonucleotide
gguuauccucuuucaagau

SEQ ID NO: 1687374 - RNA, 19 nt, Artificial Sequence
  Description of Artificial Sequence: Synthetic oligonucleotide
cgguaggagauaugguuuc

SEQ ID NO: 1687375 - RNA, 19 nt, Artificial Sequence
  Description of Artificial Sequence: Synthetic oligonucleotide
gcaacaugucucugaguua

SEQ ID NO: 1687376 - RNA, 19 nt, Artificial Sequence
  Description of Artificial Sequence: Synthetic oligonucleotide
aggaaucggacagccucuu

SEQ ID NO: 1687377 - RNA, 19 nt, Artificial Sequence
  Description of Artificial Sequence: Synthetic oligonucleotide
cuuguggauuguaguuccu

SEQ ID NO: 1687378 - RNA, 19 nt, Artificial Sequence
  Description of Artificial Sequence: Synthetic oligonucleotide
cagccggauuucauaacgu

SEQ ID NO: 1687379 - RNA, 19 nt, Artificial Sequence
  Description of Artificial Sequence: Synthetic oligonucleotide
cguguagacagacccuguc

SEQ ID NO: 1687380 - RNA, 19 nt, Artificial Sequence
  Description of Artificial Sequence: Synthetic oligonucleotide
gucaguuugccaggaaauu

SEQ ID NO: 1687381 - RNA, 19 nt, Artificial Sequence
  Description of Artificial Sequence: Synthetic oligonucleotide
ggaaauuccggaacagauu

SEQ ID NO: 1687382 - RNA, 19 nt, Artificial Sequence
  Description of Artificial Sequence: Synthetic oligonucleotide
gcgcagccggauuucauaa

SEQ ID NO: 1687383 - RNA, 19 nt, Artificial Sequence
  Description of Artificial Sequence: Synthetic oligonucleotide
gaagaggggcccugauguu

SEQ ID NO: 1687384 - RNA, 19 nt, Artificial Sequence
  Description of Artificial Sequence: Synthetic oligonucleotide
cggaacagauuucucuuga

SEQ ID NO: 1687385 - RNA, 19 nt, Artificial Sequence
  Description of Artificial Sequence: Synthetic oligonucleotide
gccuccgggaaagauguaa

SEQ ID NO: 1687386 - RNA, 19 nt, Artificial Sequence
  Description of Artificial Sequence: Synthetic oligonucleotide
ggcaaacaaugugcuccug

SEQ ID NO: 1687387 - RNA, 19 nt, Artificial Sequence
  Description of Artificial Sequence: Synthetic oligonucleotide
gcaugucaguuugccagga

SEQ ID NO: 1687388 - RNA, 19 nt, Artificial Sequence
  Description of Artificial Sequence: Synthetic oligonucleotide
caaugugcuccugcauucu

SEQ ID NO: 1687389 - RNA, 19 nt, Artificial Sequence
  Description of Artificial Sequence: Synthetic oligonucleotide
ggucuaugugggaugcacu

SEQ ID NO: 1687390 - RNA, 19 nt, Artificial Sequence
  Description of Artificial Sequence: Synthetic oligonucleotide
cauucugcgcagccggauu

SEQ ID NO: 1687391 - RNA, 19 nt, Artificial Sequence
  Description of Artificial Sequence: Synthetic oligonucleotide
ccagaguacuugacacaga

SEQ ID NO: 1687392 - RNA, 19 nt, Artificial Sequence
  Description of Artificial Sequence: Synthetic oligonucleotide
cccugauguugugggaaug

SEQ ID NO: 1687393 - RNA, 19 nt, Artificial Sequence
  Description of Artificial Sequence: Synthetic oligonucleotide
acacggccuugaagcuuag

SEQ ID NO: 1687394 - RNA, 19 nt, Artificial Sequence
  Description of Artificial Sequence: Synthetic oligonucleotide
gcgguaggagauaugguuu

SEQ ID NO: 1687395 - RNA, 19 nt, Artificial Sequence
  Description of Artificial Sequence: Synthetic oligonucleotide
cgcagccggauuucauaac

SEQ ID NO: 1687396 - RNA, 19 nt, Artificial Sequence
  Description of Artificial Sequence: Synthetic oligonucleotide
acguacccuuuggcuugug

SEQ ID NO: 1687397 - RNA, 19 nt, Artificial Sequence
  Description of Artificial Sequence: Synthetic oligonucleotide
ccgccuaacacggccuuga

SEQ ID NO: 1687398 - RNA, 19 nt, Artificial Sequence
  Description of Artificial Sequence: Synthetic oligonucleotide
gggaaagauguaagaccau

SEQ ID NO: 1687399 - RNA, 19 nt, Artificial Sequence
  Description of Artificial Sequence: Synthetic oligonucleotide
cugcgcagccggauuucau

SEQ ID NO: 1687400 - RNA, 19 nt, Artificial Sequence
  Description of Artificial Sequence: Synthetic oligonucleotide
caacugccuccgggaaaga

SEQ ID NO: 1687401 - RNA, 19 nt, Artificial Sequence
  Description of Artificial Sequence: Synthetic oligonucleotide
ggccguguagacagacccu

SEQ ID NO: 1687402 - RNA, 19 nt, Artificial Sequence
  Description of Artificial Sequence: Synthetic oligonucleotide
gcacuauguccaacugccu

SEQ ID NO: 1687403 - RNA, 19 nt, Artificial Sequence
  Description of Artificial Sequence: Synthetic oligonucleotide
cccgccuaacacggccuug

SEQ ID NO: 1687404 - RNA, 19 nt, Artificial Sequence
  Description of Artificial Sequence: Synthetic oligonucleotide
cggacagccucuucuugua

SEQ ID NO: 1687405 - RNA, 19 nt, Artificial Sequence
  Description of Artificial Sequence: Synthetic oligonucleotide
gcauucugcgcagccggau

SEQ ID NO: 1687406 - RNA, 19 nt, Artificial Sequence
  Description of Artificial Sequence: Synthetic oligonucleotide
ccguguagacagacccugu

SEQ ID NO: 1687407 - RNA, 19 nt, Artificial Sequence
  Description of Artificial Sequence: Synthetic oligonucleotide
ccaagcuuguagagaucuu

SEQ ID NO: 1687408 - RNA, 19 nt, Artificial Sequence
  Description of Artificial Sequence: Synthetic oligonucleotide
cacggccuugaagcuuagu

SEQ ID NO: 1687409 - RNA, 19 nt, Artificial Sequence
  Description of Artificial Sequence: Synthetic oligonucleotide
cuucaccauuugggucuau

SEQ ID NO: 1687410 - RNA, 19 nt, Artificial Sequence
  Description of Artificial Sequence: Synthetic oligonucleotide
cgccuaacacggccuugaa

SEQ ID NO: 1687411 - RNA, 19 nt, Artificial Sequence
  Description of Artificial Sequence: Synthetic oligonucleotide
ccccgccuaacacggccuu

SEQ ID NO: 1687412 - RNA, 19 nt, Artificial Sequence
  Description of Artificial Sequence: Synthetic oligonucleotide
uguuauauaaaacaaaggc

SEQ ID NO: 1687413 - RNA, 19 nt, Artificial Sequence
  Description of Artificial Sequence: Synthetic oligonucleotide
aguaacggcaauuagaccc

SEQ ID NO: 1687414 - RNA, 19 nt, Artificial Sequence
  Description of Artificial Sequence: Synthetic oligonucleotide
ugagaucugacaauuaugg

SEQ ID NO: 1687415 - RNA, 19 nt, Artificial Sequence
  Description of Artificial Sequence: Synthetic oligonucleotide
uauaguauguacuaguuga

SEQ ID NO: 1687416 - RNA, 19 nt, Artificial Sequence
  Description of Artificial Sequence: Synthetic oligonucleotide
uaaguaacggcaauuagac

SEQ ID NO: 1687417 - RNA, 19 nt, Artificial Sequence
  Description of Artificial Sequence: Synthetic oligonucleotide
uuguuauauaaaacaaagg

SEQ ID NO: 1687418 - RNA, 19 nt, Artificial Sequence
  Description of Artificial Sequence: Synthetic oligonucleotide
aauuauggaaaaccuaagu

SEQ ID NO: 1687419 - RNA, 19 nt, Artificial Sequence
  Description of Artificial Sequence: Synthetic oligonucleotide
auuguuauauaaaacaaag

SEQ ID NO: 1687420 - RNA, 19 nt, Artificial Sequence
  Description of Artificial Sequence: Synthetic oligonucleotide
auuaaguuaacuugaguug

SEQ ID NO: 1687421 - RNA, 19 nt, Artificial Sequence
  Description of Artificial Sequence: Synthetic oligonucleotide
uuauggaaaaccuaaguaa

SEQ ID NO: 1687422 - RNA, 19 nt, Artificial Sequence
  Description of Artificial Sequence: Synthetic oligonucleotide
acaagaaguacuuugagau

SEQ ID NO: 1687423 - RNA, 19 nt, Artificial Sequence
  Description of Artificial Sequence: Synthetic oligonucleotide
uuaauuccacgauagaucu

SEQ ID NO: 1687424 - RNA, 19 nt, Artificial Sequence
  Description of Artificial Sequence: Synthetic oligonucleotide
aguauguacuaguugagag

SEQ ID NO: 1687425 - RNA, 19 nt, Artificial Sequence
  Description of Artificial Sequence: Synthetic oligonucleotide
acuacgucacugcugagcc

SEQ ID NO: 1687426 - RNA, 19 nt, Artificial Sequence
  Description of Artificial Sequence: Synthetic oligonucleotide
auuauuaauuccacgauag

SEQ ID NO: 1687427 - RNA, 19 nt, Artificial Sequence
  Description of Artificial Sequence: Synthetic oligonucleotide
uuugagguggccaaaacaa

SEQ ID NO: 1687428 - RNA, 19 nt, Artificial Sequence
  Description of Artificial Sequence: Synthetic oligonucleotide
ucuuuugcgggauugaaga

SEQ ID NO: 1687429 - RNA, 19 nt, Artificial Sequence
  Description of Artificial Sequence: Synthetic oligonucleotide
aacuugaguugauucaauc

SEQ ID NO: 1687430 - RNA, 19 nt, Artificial Sequence
  Description of Artificial Sequence: Synthetic oligonucleotide
gauuucggaagguuugucg

SEQ ID NO: 1687431 - RNA, 19 nt, Artificial Sequence
  Description of Artificial Sequence: Synthetic oligonucleotide
aacaagaaguacuuugaga

SEQ ID NO: 1687432 - RNA, 19 nt, Artificial Sequence
  Description of Artificial Sequence: Synthetic oligonucleotide
aagaggaaagagcacaccu

SEQ ID NO: 1687433 - RNA, 19 nt, Artificial Sequence
  Description of Artificial Sequence: Synthetic oligonucleotide
aaagagcacaccugguccg

SEQ ID NO: 1687434 - RNA, 19 nt, Artificial Sequence
  Description of Artificial Sequence: Synthetic oligonucleotide
uuauaguauguacuaguug

SEQ ID NO: 1687435 - RNA, 19 nt, Artificial Sequence
  Description of Artificial Sequence: Synthetic oligonucleotide
ugcuguacgauacuucucc

SEQ ID NO: 1687436 - RNA, 19 nt, Artificial Sequence
  Description of Artificial Sequence: Synthetic oligonucleotide
aguacuuugagaucugaca

SEQ ID NO: 1687437 - RNA, 19 nt, Artificial Sequence
  Description of Artificial Sequence: Synthetic oligonucleotide
gauacuacgucacugcuga

SEQ ID NO: 1687438 - RNA, 19 nt, Artificial Sequence
  Description of Artificial Sequence: Synthetic oligonucleotide
uucauacacaccguaacgg

SEQ ID NO: 1687439 - RNA, 19 nt, Artificial Sequence
  Description of Artificial Sequence: Synthetic oligonucleotide
acugcuuccgcuuuccccg

SEQ ID NO: 1687440 - RNA, 19 nt, Artificial Sequence
  Description of Artificial Sequence: Synthetic oligonucleotide
cuugaguugauucaaucug

SEQ ID NO: 1687441 - RNA, 19 nt, Artificial Sequence
  Description of Artificial Sequence: Synthetic oligonucleotide
aaguaacggcaauuagacc

SEQ ID NO: 1687442 - RNA, 19 nt, Artificial Sequence
  Description of Artificial Sequence: Synthetic oligonucleotide
uuccauuaaguuaacuuga

SEQ ID NO: 1687443 - RNA, 19 nt, Artificial Sequence
  Description of Artificial Sequence: Synthetic oligonucleotide
uccuagaaaacuuaauuau

SEQ ID NO: 1687444 - RNA, 19 nt, Artificial Sequence
  Description of Artificial Sequence: Synthetic oligonucleotide
uuuugagguggccaaaaca

SEQ ID NO: 1687445 - RNA, 19 nt, Artificial Sequence
  Description of Artificial Sequence: Synthetic oligonucleotide
uuugcgggauugaagaccc

SEQ ID NO: 1687446 - RNA, 19 nt, Artificial Sequence
  Description of Artificial Sequence: Synthetic oligonucleotide
uuugagaucugacaauuau

SEQ ID NO: 1687447 - RNA, 19 nt, Artificial Sequence
  Description of Artificial Sequence: Synthetic oligonucleotide
uugaguugauucaaucugc

SEQ ID NO: 1687448 - RNA, 19 nt, Artificial Sequence
  Description of Artificial Sequence: Synthetic oligonucleotide
acaacuggauuucggaagg

SEQ ID NO: 1687449 - RNA, 19 nt, Artificial Sequence
  Description of Artificial Sequence: Synthetic oligonucleotide
uaauuauuaauuccacgau

SEQ ID NO: 1687450 - RNA, 19 nt, Artificial Sequence
  Description of Artificial Sequence: Synthetic oligonucleotide
uguacuaguugagaguucc

SEQ ID NO: 1687451 - RNA, 19 nt, Artificial Sequence
  Description of Artificial Sequence: Synthetic oligonucleotide
auuagaccccaucaggguc

SEQ ID NO: 1687452 - RNA, 19 nt, Artificial Sequence
  Description of Artificial Sequence: Synthetic oligonucleotide
uuugucgacagaugaaaca

SEQ ID NO: 1687453 - RNA, 19 nt, Artificial Sequence
  Description of Artificial Sequence: Synthetic oligonucleotide
uugagaucugacaauuaug

SEQ ID NO: 1687454 - RNA, 19 nt, Artificial Sequence
  Description of Artificial Sequence: Synthetic oligonucleotide
uguacgauacuucuccagu

SEQ ID NO: 1687455 - RNA, 19 nt, Artificial Sequence
  Description of Artificial Sequence: Synthetic oligonucleotide
aaucaauucuuuugcggga

SEQ ID NO: 1687456 - RNA, 19 nt, Artificial Sequence
  Description of Artificial Sequence: Synthetic oligonucleotide
uuuauaguauguacuaguu

SEQ ID NO: 1687457 - RNA, 19 nt, Artificial Sequence
  Description of Artificial Sequence: Synthetic oligonucleotide
guugauucaaucugcagca

SEQ ID NO: 1687458 - RNA, 19 nt, Artificial Sequence
  Description of Artificial Sequence: Synthetic oligonucleotide
gaucauuggauugugggug

SEQ ID NO: 1687459 - RNA, 19 nt, Artificial Sequence
  Description of Artificial Sequence: Synthetic oligonucleotide
uuccuagaaaacuuaauua

SEQ ID NO: 1687460 - RNA, 19 nt, Artificial Sequence
  Description of Artificial Sequence: Synthetic oligonucleotide
ucacaaacauagcagcgug

SEQ ID NO: 1687461 - RNA, 19 nt, Artificial Sequence
  Description of Artificial Sequence: Synthetic oligonucleotide
uccauuaaguuaacuugag

SEQ ID NO: 1687462 - RNA, 19 nt, Artificial Sequence
  Description of Artificial Sequence: Synthetic oligonucleotide
ugcucacaaacauagcagc

SEQ ID NO: 1687463 - RNA, 19 nt, Artificial Sequence
  Description of Artificial Sequence: Synthetic oligonucleotide
ucugcuguacgauacuucu

SEQ ID NO: 1687464 - RNA, 19 nt, Artificial Sequence
  Description of Artificial Sequence: Synthetic oligonucleotide
acuugaguugauucaaucu

SEQ ID NO: 1687465 - RNA, 19 nt, Artificial Sequence
  Description of Artificial Sequence: Synthetic oligonucleotide
cuaaguaacggcaauuaga

SEQ ID NO: 1687466 - RNA, 19 nt, Artificial Sequence
  Description of Artificial Sequence: Synthetic oligonucleotide
ugagaguuccauuaaguua

SEQ ID NO: 1687467 - RNA, 19 nt, Artificial Sequence
  Description of Artificial Sequence: Synthetic oligonucleotide
uggacuuguagacuacgcc

SEQ ID NO: 1687468 - RNA, 19 nt, Artificial Sequence
  Description of Artificial Sequence: Synthetic oligonucleotide
uucuuuugcgggauugaag

SEQ ID NO: 1687469 - RNA, 19 nt, Artificial Sequence
  Description of Artificial Sequence: Synthetic oligonucleotide
ucauacacaccguaacggc

SEQ ID NO: 1687470 - RNA, 19 nt, Artificial Sequence
  Description of Artificial Sequence: Synthetic oligonucleotide
auuggauuguggguggccc

SEQ ID NO: 1687471 - RNA, 19 nt, Artificial Sequence
  Description of Artificial Sequence: Synthetic oligonucleotide
gagaguuccauuaaguuaa

SEQ ID NO: 1687472 - RNA, 19 nt, Artificial Sequence
  Description of Artificial Sequence: Synthetic oligonucleotide
uagacacucagucuccggc

SEQ ID NO: 1687473 - RNA, 19 nt, Artificial Sequence
  Description of Artificial Sequence: Synthetic oligonucleotide
gaaaaccuaaguaacggca

SEQ ID NO: 1687474 - RNA, 19 nt, Artificial Sequence
  Description of Artificial Sequence: Synthetic oligonucleotide
agcgcguggacuuguagac

SEQ ID NO: 1687475 - RNA, 19 nt, Artificial Sequence
  Description of Artificial Sequence: Synthetic oligonucleotide
aguugagaguuccauuaag

SEQ ID NO: 1687476 - RNA, 19 nt, Artificial Sequence
  Description of Artificial Sequence: Synthetic oligonucleotide
auuucggaagguuugucga

SEQ ID NO: 1687477 - RNA, 19 nt, Artificial Sequence
  Description of Artificial Sequence: Synthetic oligonucleotide
uuuugcgggauugaagacc

SEQ ID NO: 1687478 - RNA, 19 nt, Artificial Sequence
  Description of Artificial Sequence: Synthetic oligonucleotide
aaguacuuugagaucugac

SEQ ID NO: 1687479 - RNA, 19 nt, Artificial Sequence
  Description of Artificial Sequence: Synthetic oligonucleotide
guuauauaaaacaaaggcu

SEQ ID NO: 1687480 - RNA, 19 nt, Artificial Sequence
  Description of Artificial Sequence: Synthetic oligonucleotide
uuguagacuacgccuagac

SEQ ID NO: 1687481 - RNA, 19 nt, Artificial Sequence
  Description of Artificial Sequence: Synthetic oligonucleotide
uggaguagugcggaaaugc

SEQ ID NO: 1687482 - RNA, 19 nt, Artificial Sequence
  Description of Artificial Sequence: Synthetic oligonucleotide
uauguacuaguugagaguu

SEQ ID NO: 1687483 - RNA, 19 nt, Artificial Sequence
  Description of Artificial Sequence: Synthetic oligonucleotide
cauacacaccguaacggcc

SEQ ID NO: 1687484 - RNA, 19 nt, Artificial Sequence
  Description of Artificial Sequence: Synthetic oligonucleotide
acacaggccgcuuucggcg

SEQ ID NO: 1687485 - RNA, 19 nt, Artificial Sequence
  Description of Artificial Sequence: Synthetic oligonucleotide
auacacaccguaacggccc

SEQ ID NO: 1687486 - RNA, 19 nt, Artificial Sequence
  Description of Artificial Sequence: Synthetic oligonucleotide
uggauuuucuggcugcgcu

SEQ ID NO: 1687487 - RNA, 19 nt, Artificial Sequence
  Description of Artificial Sequence: Synthetic oligonucleotide
aucauuggauugugggugg

SEQ ID NO: 1687488 - RNA, 19 nt, Artificial Sequence
  Description of Artificial Sequence: Synthetic oligonucleotide
accagcacucccuuuccgc

SEQ ID NO: 1687489 - RNA, 19 nt, Artificial Sequence
  Description of Artificial Sequence: Synthetic oligonucleotide
gcaaucaauucuuuugcgg

SEQ ID NO: 1687490 - RNA, 19 nt, Artificial Sequence
  Description of Artificial Sequence: Synthetic oligonucleotide
cugcucacaaacauagcag

SEQ ID NO: 1687491 - RNA, 19 nt, Artificial Sequence
  Description of Artificial Sequence: Synthetic oligonucleotide
aaggcuugguauauucuuc

SEQ ID NO: 1687492 - RNA, 19 nt, Artificial Sequence
  Description of Artificial Sequence: Synthetic oligonucleotide
aagccaguuuccuuguagu

SEQ ID NO: 1687493 - RNA, 19 nt, Artificial Sequence
  Description of Artificial Sequence: Synthetic oligonucleotide
gcaauuagaccccaucagg

SEQ ID NO: 1687494 - RNA, 19 nt, Artificial Sequence
  Description of Artificial Sequence: Synthetic oligonucleotide
uugaagaccccaugggucu

SEQ ID NO: 1687495 - RNA, 19 nt, Artificial Sequence
  Description of Artificial Sequence: Synthetic oligonucleotide
uugagguggccaaaacaag

SEQ ID NO: 1687496 - RNA, 19 nt, Artificial Sequence
  Description of Artificial Sequence: Synthetic oligonucleotide
uggcugcgcucaaagaugg

SEQ ID NO: 1687497 - RNA, 19 nt, Artificial Sequence
  Description of Artificial Sequence: Synthetic oligonucleotide
uguagacuacgccuagaca

SEQ ID NO: 1687498 - RNA, 19 nt, Artificial Sequence
  Description of Artificial Sequence: Synthetic oligonucleotide
uuuccuuguaguccuuaca

SEQ ID NO: 1687499 - RNA, 19 nt, Artificial Sequence
  Description of Artificial Sequence: Synthetic oligonucleotide
cauuaaguuaacuugaguu

SEQ ID NO: 1687500 - RNA, 19 nt, Artificial Sequence
  Description of Artificial Sequence: Synthetic oligonucleotide
guccggaucgcacacaggc

SEQ ID NO: 1687501 - RNA, 19 nt, Artificial Sequence
  Description of Artificial Sequence: Synthetic oligonucleotide
cuuccgagcgccgaaacgg

SEQ ID NO: 1687502 - RNA, 19 nt, Artificial Sequence
  Description of Artificial Sequence: Synthetic oligonucleotide
accgguuucgccgagcgcg

SEQ ID NO: 1687503 - RNA, 19 nt, Artificial Sequence
  Description of Artificial Sequence: Synthetic oligonucleotide
guacuuugagaucugacaa

SEQ ID NO: 1687504 - RNA, 19 nt, Artificial Sequence
  Description of Artificial Sequence: Synthetic oligonucleotide
aaaccuaaguaacggcaau

SEQ ID NO: 1687505 - RNA, 19 nt, Artificial Sequence
  Description of Artificial Sequence: Synthetic oligonucleotide
cauuguuauauaaaacaaa

SEQ ID NO: 1687506 - RNA, 19 nt, Artificial Sequence
  Description of Artificial Sequence: Synthetic oligonucleotide
uuccccggaguccggaucg

SEQ ID NO: 1687507 - RNA, 19 nt, Artificial Sequence
  Description of Artificial Sequence: Synthetic oligonucleotide
ugagaaacuugcucugcca

SEQ ID NO: 1687508 - RNA, 19 nt, Artificial Sequence
  Description of Artificial Sequence: Synthetic oligonucleotide
ucuucgacuuccgagcgcc

SEQ ID NO: 1687509 - RNA, 19 nt, Artificial Sequence
  Description of Artificial Sequence: Synthetic oligonucleotide
cuggauuucggaagguuug

SEQ ID NO: 1687510 - RNA, 19 nt, Artificial Sequence
  Description of Artificial Sequence: Synthetic oligonucleotide
aaaaccuaaguaacggcaa

SEQ ID NO: 1687511 - RNA, 19 nt, Artificial Sequence
  Description of Artificial Sequence: Synthetic oligonucleotide
ucuacuucguaguuuucau

SEQ ID NO: 1687512 - RNA, 19 nt, Artificial Sequence
  Description of Artificial Sequence: Synthetic oligonucleotide
accguaacggcccucguca

SEQ ID NO: 1687513 - RNA, 19 nt, Artificial Sequence
  Description of Artificial Sequence: Synthetic oligonucleotide
ggcacguaaauguucgggg

SEQ ID NO: 1687514 - RNA, 19 nt, Artificial Sequence
  Description of Artificial Sequence: Synthetic oligonucleotide
ucuuccuagaaaacuuaau

SEQ ID NO: 1687515 - RNA, 19 nt, Artificial Sequence
  Description of Artificial Sequence: Synthetic oligonucleotide
uugucgacagaugaaacau

SEQ ID NO: 1687516 - RNA, 19 nt, Artificial Sequence
  Description of Artificial Sequence: Synthetic oligonucleotide
guccuuacagaugucaggc

SEQ ID NO: 1687517 - RNA, 19 nt, Artificial Sequence
  Description of Artificial Sequence: Synthetic oligonucleotide
cuaguugagaguuccauua

SEQ ID NO: 1687518 - RNA, 19 nt, Artificial Sequence
  Description of Artificial Sequence: Synthetic oligonucleotide
acuacgccuagacacucag

SEQ ID NO: 1687519 - RNA, 19 nt, Artificial Sequence
  Description of Artificial Sequence: Synthetic oligonucleotide
uagacuacgccuagacacu

SEQ ID NO: 1687520 - RNA, 19 nt, Artificial Sequence
  Description of Artificial Sequence: Synthetic oligonucleotide
uacgucacugcugagccgc

SEQ ID NO: 1687521 - RNA, 19 nt, Artificial Sequence
  Description of Artificial Sequence: Synthetic oligonucleotide
cagcauuguuauauaaaac

SEQ ID NO: 1687522 - RNA, 19 nt, Artificial Sequence
  Description of Artificial Sequence: Synthetic oligonucleotide
uguuggaagcaccacccuc

SEQ ID NO: 1687523 - RNA, 19 nt, Artificial Sequence
  Description of Artificial Sequence: Synthetic oligonucleotide
aagagcacaccugguccgc

SEQ ID NO: 1687524 - RNA, 19 nt, Artificial Sequence
  Description of Artificial Sequence: Synthetic oligonucleotide
auaaaacaaaggcuuggua

SEQ ID NO: 1687525 - RNA, 19 nt, Artificial Sequence
  Description of Artificial Sequence: Synthetic oligonucleotide
acaaacauagcagcgugga

SEQ ID NO: 1687526 - RNA, 19 nt, Artificial Sequence
  Description of Artificial Sequence: Synthetic oligonucleotide
aauucuuuugcgggauuga

SEQ ID NO: 1687527 - RNA, 19 nt, Artificial Sequence
  Description of Artificial Sequence: Synthetic oligonucleotide
uuggauuguggguggcccg

SEQ ID NO: 1687528 - RNA, 19 nt, Artificial Sequence
  Description of Artificial Sequence: Synthetic oligonucleotide
cuuucggcgaccagcacuc

SEQ ID NO: 1687529 - RNA, 19 nt, Artificial Sequence
  Description of Artificial Sequence: Synthetic oligonucleotide
acuuccgagcgccgaaacg

SEQ ID NO: 1687530 - RNA, 19 nt, Artificial Sequence
  Description of Artificial Sequence: Synthetic oligonucleotide
auaguauguacuaguugag

SEQ ID NO: 1687531 - RNA, 19 nt, Artificial Sequence
  Description of Artificial Sequence: Synthetic oligonucleotide
uaaguuaacuugaguugau

SEQ ID NO: 1687532 - RNA, 19 nt, Artificial Sequence
  Description of Artificial Sequence: Synthetic oligonucleotide
ggcaauuagaccccaucag

SEQ ID NO: 1687533 - RNA, 19 nt, Artificial Sequence
  Description of Artificial Sequence: Synthetic oligonucleotide
ggaaaaccuaaguaacggc

SEQ ID NO: 1687534 - RNA, 19 nt, Artificial Sequence
  Description of Artificial Sequence: Synthetic oligonucleotide
aaacaaaggcuugguauau

SEQ ID NO: 1687535 - RNA, 19 nt, Artificial Sequence
  Description of Artificial Sequence: Synthetic oligonucleotide
uccuggauuuucuggcugc

SEQ ID NO: 1687536 - RNA, 19 nt, Artificial Sequence
  Description of Artificial Sequence: Synthetic oligonucleotide
aucuucgacuuccgagcgc

SEQ ID NO: 1687537 - RNA, 19 nt, Artificial Sequence
  Description of Artificial Sequence: Synthetic oligonucleotide
uccuuguaguccuuacaga

SEQ ID NO: 1687538 - RNA, 19 nt, Artificial Sequence
  Description of Artificial Sequence: Synthetic oligonucleotide
ucugacaauuauggaaaac

SEQ ID NO: 1687539 - RNA, 19 nt, Artificial Sequence
  Description of Artificial Sequence: Synthetic oligonucleotide
gaguccggaucgcacacag

SEQ ID NO: 1687540 - RNA, 19 nt, Artificial Sequence
  Description of Artificial Sequence: Synthetic oligonucleotide
cuguacgauacuucuccag

SEQ ID NO: 1687541 - RNA, 19 nt, Artificial Sequence
  Description of Artificial Sequence: Synthetic oligonucleotide
uggacugugcgucucgcuc

SEQ ID NO: 1687542 - RNA, 19 nt, Artificial Sequence
  Description of Artificial Sequence: Synthetic oligonucleotide
uacuuugagaucugacaau

SEQ ID NO: 1687543 - RNA, 19 nt, Artificial Sequence
  Description of Artificial Sequence: Synthetic oligonucleotide
uuucggaagguuugucgac

SEQ ID NO: 1687544 - RNA, 19 nt, Artificial Sequence
  Description of Artificial Sequence: Synthetic oligonucleotide
agguggccaaaacaagaag

SEQ ID NO: 1687545 - RNA, 19 nt, Artificial Sequence
  Description of Artificial Sequence: Synthetic oligonucleotide
aagauggacugugcgucuc

SEQ ID NO: 1687546 - RNA, 19 nt, Artificial Sequence
  Description of Artificial Sequence: Synthetic oligonucleotide
uacgauacuucuccaguuu

SEQ ID NO: 1687547 - RNA, 19 nt, Artificial Sequence
  Description of Artificial Sequence: Synthetic oligonucleotide
uuucaacuaugguugguuu

SEQ ID NO: 1687548 - RNA, 19 nt, Artificial Sequence
  Description of Artificial Sequence: Synthetic oligonucleotide
agauggacugugcgucucg

SEQ ID NO: 1687549 - RNA, 19 nt, Artificial Sequence
  Description of Artificial Sequence: Synthetic oligonucleotide
agcucguagacagcugucg

SEQ ID NO: 1687550 - RNA, 19 nt, Artificial Sequence
  Description of Artificial Sequence: Synthetic oligonucleotide
uucaacuaugguugguuuu

SEQ ID NO: 1687551 - RNA, 19 nt, Artificial Sequence
  Description of Artificial Sequence: Synthetic oligonucleotide
ucuguuuaccgcugccacu

SEQ ID NO: 1687552 - RNA, 19 nt, Artificial Sequence
  Description of Artificial Sequence: Synthetic oligonucleotide
gaguagugcggaaaugcug

SEQ ID NO: 1687553 - RNA, 19 nt, Artificial Sequence
  Description of Artificial Sequence: Synthetic oligonucleotide
uaguugagaguuccauuaa

SEQ ID NO: 1687554 - RNA, 19 nt, Artificial Sequence
  Description of Artificial Sequence: Synthetic oligonucleotide
cuagacacucagucuccgg

SEQ ID NO: 1687555 - RNA, 19 nt, Artificial Sequence
  Description of Artificial Sequence: Synthetic oligonucleotide
uguuuaccgcugccacucg

SEQ ID NO: 1687556 - RNA, 19 nt, Artificial Sequence
  Description of Artificial Sequence: Synthetic oligonucleotide
acuaguugagaguuccauu

SEQ ID NO: 1687557 - RNA, 19 nt, Artificial Sequence
  Description of Artificial Sequence: Synthetic oligonucleotide
cucuucgcugcucacauca

SEQ ID NO: 1687558 - RNA, 19 nt, Artificial Sequence
  Description of Artificial Sequence: Synthetic oligonucleotide
acaggucucgcagaaauaa

SEQ ID NO: 1687559 - RNA, 19 nt, Artificial Sequence
  Description of Artificial Sequence: Synthetic oligonucleotide
guaacggcccucgucaagc

SEQ ID NO: 1687560 - RNA, 19 nt, Artificial Sequence
  Description of Artificial Sequence: Synthetic oligonucleotide
uaacuugaguugauucaau

SEQ ID NO: 1687561 - RNA, 19 nt, Artificial Sequence
  Description of Artificial Sequence: Synthetic oligonucleotide
guaacggcaauuagacccc

SEQ ID NO: 1687562 - RNA, 19 nt, Artificial Sequence
  Description of Artificial Sequence: Synthetic oligonucleotide
acuuugagaucugacaauu

SEQ ID NO: 1687563 - RNA, 19 nt, Artificial Sequence
  Description of Artificial Sequence: Synthetic oligonucleotide
agucuccggcuucuccucc

SEQ ID NO: 1687564 - RNA, 19 nt, Artificial Sequence
  Description of Artificial Sequence: Synthetic oligonucleotide
aggucucgcagaaauaaug

SEQ ID NO: 1687565 - RNA, 19 nt, Artificial Sequence
  Description of Artificial Sequence: Synthetic oligonucleotide
caauucuuuugcgggauug

SEQ ID NO: 1687566 - RNA, 19 nt, Artificial Sequence
  Description of Artificial Sequence: Synthetic oligonucleotide
uacuaguugagaguuccau

SEQ ID NO: 1687567 - RNA, 19 nt, Artificial Sequence
  Description of Artificial Sequence: Synthetic oligonucleotide
ucuccaguuuagcaaucaa

SEQ ID NO: 1687568 - RNA, 19 nt, Artificial Sequence
  Description of Artificial Sequence: Synthetic oligonucleotide
agcacucccuuuccgcccg

SEQ ID NO: 1687569 - RNA, 19 nt, Artificial Sequence
  Description of Artificial Sequence: Synthetic oligonucleotide
gauuuucuggcugcgcuca

SEQ ID NO: 1687570 - RNA, 19 nt, Artificial Sequence
  Description of Artificial Sequence: Synthetic oligonucleotide
agaggaaagagcacaccug

SEQ ID NO: 1687571 - RNA, 19 nt, Artificial Sequence
  Description of Artificial Sequence: Synthetic oligonucleotide
cuuuugcgggauugaagac

SEQ ID NO: 1687572 - RNA, 19 nt, Artificial Sequence
  Description of Artificial Sequence: Synthetic oligonucleotide
caaacauagcagcguggag

SEQ ID NO: 1687573 - RNA, 19 nt, Artificial Sequence
  Description of Artificial Sequence: Synthetic oligonucleotide
gcucacaucacaguaggcc

SEQ ID NO: 1687574 - RNA, 19 nt, Artificial Sequence
  Description of Artificial Sequence: Synthetic oligonucleotide
agacacucagucuccggcu

SEQ ID NO: 1687575 - RNA, 19 nt, Artificial Sequence
  Description of Artificial Sequence: Synthetic oligonucleotide
uuaccgcugccacucgucu

SEQ ID NO: 1687576 - RNA, 19 nt, Artificial Sequence
  Description of Artificial Sequence: Synthetic oligonucleotide
cuacuucguaguuuucauc

SEQ ID NO: 1687577 - RNA, 19 nt, Artificial Sequence
  Description of Artificial Sequence: Synthetic oligonucleotide
gguguuggaagcaccaccc

SEQ ID NO: 1687578 - RNA, 19 nt, Artificial Sequence
  Description of Artificial Sequence: Synthetic oligonucleotide
ggaggcgcgggauacuacg

SEQ ID NO: 1687579 - RNA, 19 nt, Artificial Sequence
  Description of Artificial Sequence: Synthetic oligonucleotide
cuguuuaccgcugccacuc

SEQ ID NO: 1687580 - RNA, 19 nt, Artificial Sequence
  Description of Artificial Sequence: Synthetic oligonucleotide
ucggcgaccagcacucccu

SEQ ID NO: 1687581 - RNA, 19 nt, Artificial Sequence
  Description of Artificial Sequence: Synthetic oligonucleotide
gaaacuugcucugccaucu

SEQ ID NO: 1687582 - RNA, 19 nt, Artificial Sequence
  Description of Artificial Sequence: Synthetic oligonucleotide
cuuccuagaaaacuuaauu

SEQ ID NO: 1687583 - RNA, 19 nt, Artificial Sequence
  Description of Artificial Sequence: Synthetic oligonucleotide
ugguccgccgacuuuuccu

SEQ ID NO: 1687584 - RNA, 19 nt, Artificial Sequence
  Description of Artificial Sequence: Synthetic oligonucleotide
uucggcgaccagcacuccc

SEQ ID NO: 1687585 - RNA, 19 nt, Artificial Sequence
  Description of Artificial Sequence: Synthetic oligonucleotide
uccggucgcaccacagagc

SEQ ID NO: 1687586 - RNA, 19 nt, Artificial Sequence
  Description of Artificial Sequence: Synthetic oligonucleotide
aaguuaacuugaguugauu

SEQ ID NO: 1687587 - RNA, 19 nt, Artificial Sequence
  Description of Artificial Sequence: Synthetic oligonucleotide
ugcucacaucacaguaggc

SEQ ID NO: 1687588 - RNA, 19 nt, Artificial Sequence
  Description of Artificial Sequence: Synthetic oligonucleotide
gagcgcguggacuuguaga

SEQ ID NO: 1687589 - RNA, 19 nt, Artificial Sequence
  Description of Artificial Sequence: Synthetic oligonucleotide
aaccuaaguaacggcaauu

SEQ ID NO: 1687590 - RNA, 19 nt, Artificial Sequence
  Description of Artificial Sequence: Synthetic oligonucleotide
gaccagcacucccuuuccg

SEQ ID NO: 1687591 - RNA, 19 nt, Artificial Sequence
  Description of Artificial Sequence: Synthetic oligonucleotide
acacucagucuccggcuuc

SEQ ID NO: 1687592 - RNA, 19 nt, Artificial Sequence
  Description of Artificial Sequence: Synthetic oligonucleotide
guuugucgacagaugaaac

SEQ ID NO: 1687593 - RNA, 19 nt, Artificial Sequence
  Description of Artificial Sequence: Synthetic oligonucleotide
caaucugcagcauuguuau

SEQ ID NO: 1687594 - RNA, 19 nt, Artificial Sequence
  Description of Artificial Sequence: Synthetic oligonucleotide
uccuuacagaugucaggcu

SEQ ID NO: 1687595 - RNA, 19 nt, Artificial Sequence
  Description of Artificial Sequence: Synthetic oligonucleotide
ccgacuuuuccugagaaac

SEQ ID NO: 1687596 - RNA, 19 nt, Artificial Sequence
  Description of Artificial Sequence: Synthetic oligonucleotide
ggucgcaccacagagcagc

SEQ ID NO: 1687597 - RNA, 19 nt, Artificial Sequence
  Description of Artificial Sequence: Synthetic oligonucleotide
cucugcuguacgauacuuc

SEQ ID NO: 1687598 - RNA, 19 nt, Artificial Sequence
  Description of Artificial Sequence: Synthetic oligonucleotide
ugucgacagaugaaacauu

SEQ ID NO: 1687599 - RNA, 19 nt, Artificial Sequence
  Description of Artificial Sequence: Synthetic oligonucleotide
acgauacuucuccaguuua

SEQ ID NO: 1687600 - RNA, 19 nt, Artificial Sequence
  Description of Artificial Sequence: Synthetic oligonucleotide
cacaccguaacggcccucg

SEQ ID NO: 1687601 - RNA, 19 nt, Artificial Sequence
  Description of Artificial Sequence: Synthetic oligonucleotide
acccucugcuguacgauac

SEQ ID NO: 1687602 - RNA, 19 nt, Artificial Sequence
  Description of Artificial Sequence: Synthetic oligonucleotide
uccgccgacuuuuccugag

SEQ ID NO: 1687603 - RNA, 19 nt, Artificial Sequence
  Description of Artificial Sequence: Synthetic oligonucleotide
agacuacgccuagacacuc

SEQ ID NO: 1687604 - RNA, 19 nt, Artificial Sequence
  Description of Artificial Sequence: Synthetic oligonucleotide
aacuggauuucggaagguu

SEQ ID NO: 1687605 - RNA, 19 nt, Artificial Sequence
  Description of Artificial Sequence: Synthetic oligonucleotide
gcucacaaacauagcagcg

SEQ ID NO: 1687606 - RNA, 19 nt, Artificial Sequence
  Description of Artificial Sequence: Synthetic oligonucleotide
aucaauucuuuugcgggau

SEQ ID NO: 1687607 - RNA, 19 nt, Artificial Sequence
  Description of Artificial Sequence: Synthetic oligonucleotide
ugugcgucucgcuccuucu

SEQ ID NO: 1687608 - RNA, 19 nt, Artificial Sequence
  Description of Artificial Sequence: Synthetic oligonucleotide
uggugacaacuggauuucg

SEQ ID NO: 1687609 - RNA, 19 nt, Artificial Sequence
  Description of Artificial Sequence: Synthetic oligonucleotide
ggguguuggaagcaccacc

SEQ ID NO: 1687610 - RNA, 19 nt, Artificial Sequence
  Description of Artificial Sequence: Synthetic oligonucleotide
aggcgcgggauacuacguc

SEQ ID NO: 1687611 - RNA, 19 nt, Artificial Sequence
  Description of Artificial Sequence: Synthetic oligonucleotide
ucaauucuuuugcgggauu

SEQ ID NO: 1687612 - RNA, 19 nt, Artificial Sequence
  Description of Artificial Sequence: Synthetic oligonucleotide
guugagaguuccauuaagu

SEQ ID NO: 1687613 - RNA, 19 nt, Artificial Sequence
  Description of Artificial Sequence: Synthetic oligonucleotide
cugggguguuggaagcacc

SEQ ID NO: 1687614 - RNA, 19 nt, Artificial Sequence
  Description of Artificial Sequence: Synthetic oligonucleotide
acgccuagacacucagucu

SEQ ID NO: 1687615 - RNA, 19 nt, Artificial Sequence
  Description of Artificial Sequence: Synthetic oligonucleotide
uccagcucguagacagcug

SEQ ID NO: 1687616 - RNA, 19 nt, Artificial Sequence
  Description of Artificial Sequence: Synthetic oligonucleotide
guggacuuguagacuacgc

SEQ ID NO: 1687617 - RNA, 19 nt, Artificial Sequence
  Description of Artificial Sequence: Synthetic oligonucleotide
uuuccccggaguccggauc

SEQ ID NO: 1687618 - RNA, 19 nt, Artificial Sequence
  Description of Artificial Sequence: Synthetic oligonucleotide
gauggacugugcgucucgc

SEQ ID NO: 1687619 - RNA, 19 nt, Artificial Sequence
  Description of Artificial Sequence: Synthetic oligonucleotide
cauuggauuguggguggcc

SEQ ID NO: 1687620 - RNA, 19 nt, Artificial Sequence
  Description of Artificial Sequence: Synthetic oligonucleotide
uggaagcaccacccucugc

SEQ ID NO: 1687621 - RNA, 19 nt, Artificial Sequence
  Description of Artificial Sequence: Synthetic oligonucleotide
agagcacaccugguccgcc

SEQ ID NO: 1687622 - RNA, 19 nt, Artificial Sequence
  Description of Artificial Sequence: Synthetic oligonucleotide
cuacgucacugcugagccg

SEQ ID NO: 1687623 - RNA, 19 nt, Artificial Sequence
  Description of Artificial Sequence: Synthetic oligonucleotide
agaguuccauuaaguuaac

SEQ ID NO: 1687624 - RNA, 19 nt, Artificial Sequence
  Description of Artificial Sequence: Synthetic oligonucleotide
uacacaccguaacggcccu

SEQ ID NO: 1687625 - RNA, 19 nt, Artificial Sequence
  Description of Artificial Sequence: Synthetic oligonucleotide
cagccuucgucgcuacugc

SEQ ID NO: 1687626 - RNA, 19 nt, Artificial Sequence
  Description of Artificial Sequence: Synthetic oligonucleotide
ucgacuuccgagcgccgaa

SEQ ID NO: 1687627 - RNA, 19 nt, Artificial Sequence
  Description of Artificial Sequence: Synthetic oligonucleotide
cacaucacaguaggccgcc

SEQ ID NO: 1687628 - RNA, 19 nt, Artificial Sequence
  Description of Artificial Sequence: Synthetic oligonucleotide
ucauuggauuguggguggc

SEQ ID NO: 1687629 - RNA, 19 nt, Artificial Sequence
  Description of Artificial Sequence: Synthetic oligonucleotide
gacuuccgagcgccgaaac

SEQ ID NO: 1687630 - RNA, 19 nt, Artificial Sequence
  Description of Artificial Sequence: Synthetic oligonucleotide
auguacuaguugagaguuc

SEQ ID NO: 1687631 - RNA, 19 nt, Artificial Sequence
  Description of Artificial Sequence: Synthetic oligonucleotide
ggacugugcgucucgcucc

SEQ ID NO: 1687632 - RNA, 19 nt, Artificial Sequence
  Description of Artificial Sequence: Synthetic oligonucleotide
uaauuccacgauagaucuu

SEQ ID NO: 1687633 - RNA, 19 nt, Artificial Sequence
  Description of Artificial Sequence: Synthetic oligonucleotide
uucgacuuccgagcgccga

SEQ ID NO: 1687634 - RNA, 19 nt, Artificial Sequence
  Description of Artificial Sequence: Synthetic oligonucleotide
gguuugucgacagaugaaa

SEQ ID NO: 1687635 - RNA, 19 nt, Artificial Sequence
  Description of Artificial Sequence: Synthetic oligonucleotide
auagcagcguggaguagug

SEQ ID NO: 1687636 - RNA, 19 nt, Artificial Sequence
  Description of Artificial Sequence: Synthetic oligonucleotide
uucgccgagcgcguggacu

SEQ ID NO: 1687637 - RNA, 19 nt, Artificial Sequence
  Description of Artificial Sequence: Synthetic oligonucleotide
ggauacuacgucacugcug

SEQ ID NO: 1687638 - RNA, 19 nt, Artificial Sequence
  Description of Artificial Sequence: Synthetic oligonucleotide
gguuucgccgagcgcgugg

SEQ ID NO: 1687639 - RNA, 19 nt, Artificial Sequence
  Description of Artificial Sequence: Synthetic oligonucleotide
aaacuugcucugccaucuu

SEQ ID NO: 1687640 - RNA, 19 nt, Artificial Sequence
  Description of Artificial Sequence: Synthetic oligonucleotide
cugcuguacgauacuucuc

SEQ ID NO: 1687641 - RNA, 19 nt, Artificial Sequence
  Description of Artificial Sequence: Synthetic oligonucleotide
ucgucgcuacugcuuccgc

SEQ ID NO: 1687642 - RNA, 19 nt, Artificial Sequence
  Description of Artificial Sequence: Synthetic oligonucleotide
cuucuguuuaccgcugcca

SEQ ID NO: 1687643 - RNA, 19 nt, Artificial Sequence
  Description of Artificial Sequence: Synthetic oligonucleotide
uggcccgcuucuucuccgg

SEQ ID NO: 1687644 - RNA, 19 nt, Artificial Sequence
  Description of Artificial Sequence: Synthetic oligonucleotide
ucgcacacaggccgcuuuc

SEQ ID NO: 1687645 - RNA, 19 nt, Artificial Sequence
  Description of Artificial Sequence: Synthetic oligonucleotide
cuggauuuucuggcugcgc

SEQ ID NO: 1687646 - RNA, 19 nt, Artificial Sequence
  Description of Artificial Sequence: Synthetic oligonucleotide
ucgucaagcucacguucua

SEQ ID NO: 1687647 - RNA, 19 nt, Artificial Sequence
  Description of Artificial Sequence: Synthetic oligonucleotide
ugcuggugcugggaggcgc

SEQ ID NO: 1687648 - RNA, 19 nt, Artificial Sequence
  Description of Artificial Sequence: Synthetic oligonucleotide
auacuacgucacugcugag

SEQ ID NO: 1687649 - RNA, 19 nt, Artificial Sequence
  Description of Artificial Sequence: Synthetic oligonucleotide
caucuucauacacaccgua

SEQ ID NO: 1687650 - RNA, 19 nt, Artificial Sequence
  Description of Artificial Sequence: Synthetic oligonucleotide
cuucgcugcucacaucaca

SEQ ID NO: 1687651 - RNA, 19 nt, Artificial Sequence
  Description of Artificial Sequence: Synthetic oligonucleotide
gcucguagacagcugucgc

SEQ ID NO: 1687652 - RNA, 19 nt, Artificial Sequence
  Description of Artificial Sequence: Synthetic oligonucleotide
gguccgccgacuuuuccug

SEQ ID NO: 1687653 - RNA, 19 nt, Artificial Sequence
  Description of Artificial Sequence: Synthetic oligonucleotide
uaacggcccucgucaagcu

SEQ ID NO: 1687654 - RNA, 19 nt, Artificial Sequence
  Description of Artificial Sequence: Synthetic oligonucleotide
ccagcacucccuuuccgcc

SEQ ID NO: 1687655 - RNA, 19 nt, Artificial Sequence
  Description of Artificial Sequence: Synthetic oligonucleotide
ggauuuucuggcugcgcuc

SEQ ID NO: 1687656 - RNA, 19 nt, Artificial Sequence
  Description of Artificial Sequence: Synthetic oligonucleotide
cuucgacuuccgagcgccg

SEQ ID NO: 1687657 - RNA, 19 nt, Artificial Sequence
  Description of Artificial Sequence: Synthetic oligonucleotide
gaaacggcuggcaguagcu

SEQ ID NO: 1687658 - RNA, 19 nt, Artificial Sequence
  Description of Artificial Sequence: Synthetic oligonucleotide
agcacaccugguccgccga

SEQ ID NO: 1687659 - RNA, 19 nt, Artificial Sequence
  Description of Artificial Sequence: Synthetic oligonucleotide
guggaguagugcggaaaug

SEQ ID NO: 1687660 - RNA, 19 nt, Artificial Sequence
  Description of Artificial Sequence: Synthetic oligonucleotide
cucacaaacauagcagcgu

SEQ ID NO: 1687661 - RNA, 19 nt, Artificial Sequence
  Description of Artificial Sequence: Synthetic oligonucleotide
gccucucaacuccuccugg

SEQ ID NO: 1687662 - RNA, 19 nt, Artificial Sequence
  Description of Artificial Sequence: Synthetic oligonucleotide
cgauacuucuccaguuuag

SEQ ID NO: 1687663 - RNA, 19 nt, Artificial Sequence
  Description of Artificial Sequence: Synthetic oligonucleotide
agcaccacccucugcugua

SEQ ID NO: 1687664 - RNA, 19 nt, Artificial Sequence
  Description of Artificial Sequence: Synthetic oligonucleotide
gcacacaggccgcuuucgg

SEQ ID NO: 1687665 - RNA, 19 nt, Artificial Sequence
  Description of Artificial Sequence: Synthetic oligonucleotide
caccguaacggcccucguc

SEQ ID NO: 1687666 - RNA, 19 nt, Artificial Sequence
  Description of Artificial Sequence: Synthetic oligonucleotide
gcagcguggaguagugcgg

SEQ ID NO: 1687667 - RNA, 19 nt, Artificial Sequence
  Description of Artificial Sequence: Synthetic oligonucleotide
cugguccgccgacuuuucc

SEQ ID NO: 1687668 - RNA, 19 nt, Artificial Sequence
  Description of Artificial Sequence: Synthetic oligonucleotide
ucgccgagcgcguggacuu

SEQ ID NO: 1687669 - RNA, 19 nt, Artificial Sequence
  Description of Artificial Sequence: Synthetic oligonucleotide
aucgcacacaggccgcuuu

SEQ ID NO: 1687670 - RNA, 19 nt, Artificial Sequence
  Description of Artificial Sequence: Synthetic oligonucleotide
gccgcuuucggcgaccagc

SEQ ID NO: 1687671 - RNA, 19 nt, Artificial Sequence
  Description of Artificial Sequence: Synthetic oligonucleotide
gucgacagaugaaacauuu

SEQ ID NO: 1687672 - RNA, 19 nt, Artificial Sequence
  Description of Artificial Sequence: Synthetic oligonucleotide
cauagcagcguggaguagu

SEQ ID NO: 1687673 - RNA, 19 nt, Artificial Sequence
  Description of Artificial Sequence: Synthetic oligonucleotide
cugcgcucaaagauggacu

SEQ ID NO: 1687674 - RNA, 19 nt, Artificial Sequence
  Description of Artificial Sequence: Synthetic oligonucleotide
ugggucugcugcucacaaa

SEQ ID NO: 1687675 - RNA, 19 nt, Artificial Sequence
  Description of Artificial Sequence: Synthetic oligonucleotide
gcgaccagcacucccuuuc

SEQ ID NO: 1687676 - RNA, 19 nt, Artificial Sequence
  Description of Artificial Sequence: Synthetic oligonucleotide
caucacuuucuacuucgua

SEQ ID NO: 1687677 - RNA, 19 nt, Artificial Sequence
  Description of Artificial Sequence: Synthetic oligonucleotide
uugcgggauugaagacccc

SEQ ID NO: 1687678 - RNA, 19 nt, Artificial Sequence
  Description of Artificial Sequence: Synthetic oligonucleotide
ggaagguuugucgacagau

SEQ ID NO: 1687679 - RNA, 19 nt, Artificial Sequence
  Description of Artificial Sequence: Synthetic oligonucleotide
cagcucguagacagcuguc

SEQ ID NO: 1687680 - RNA, 19 nt, Artificial Sequence
  Description of Artificial Sequence: Synthetic oligonucleotide
guacgauacuucuccaguu

SEQ ID NO: 1687681 - RNA, 19 nt, Artificial Sequence
  Description of Artificial Sequence: Synthetic oligonucleotide
ggcgcgggauacuacguca

SEQ ID NO: 1687682 - RNA, 19 nt, Artificial Sequence
  Description of Artificial Sequence: Synthetic oligonucleotide
ccacagagcagccuucguc

SEQ ID NO: 1687683 - RNA, 19 nt, Artificial Sequence
  Description of Artificial Sequence: Synthetic oligonucleotide
gcuacugcuuccgcuuucc

SEQ ID NO: 1687684 - RNA, 19 nt, Artificial Sequence
  Description of Artificial Sequence: Synthetic oligonucleotide
caccacccucugcuguacg

SEQ ID NO: 1687685 - RNA, 19 nt, Artificial Sequence
  Description of Artificial Sequence: Synthetic oligonucleotide
ggccgccuucuguuuaccg

SEQ ID NO: 1687686 - RNA, 19 nt, Artificial Sequence
  Description of Artificial Sequence: Synthetic oligonucleotide
aggccgccuucuguuuacc

SEQ ID NO: 1687687 - RNA, 19 nt, Artificial Sequence
  Description of Artificial Sequence: Synthetic oligonucleotide
ucgcuacugcuuccgcuuu

SEQ ID NO: 1687688 - RNA, 19 nt, Artificial Sequence
  Description of Artificial Sequence: Synthetic oligonucleotide
acaccugguccgccgacuu

SEQ ID NO: 1687689 - RNA, 19 nt, Artificial Sequence
  Description of Artificial Sequence: Synthetic oligonucleotide
ccaccgguuucgccgagcg

SEQ ID NO: 1687690 - RNA, 19 nt, Artificial Sequence
  Description of Artificial Sequence: Synthetic oligonucleotide
gacuacgccuagacacuca

SEQ ID NO: 1687691 - RNA, 19 nt, Artificial Sequence
  Description of Artificial Sequence: Synthetic oligonucleotide
aguccggaucgcacacagg

SEQ ID NO: 1687692 - RNA, 19 nt, Artificial Sequence
  Description of Artificial Sequence: Synthetic oligonucleotide
cgccuagacacucagucuc

SEQ ID NO: 1687693 - RNA, 19 nt, Artificial Sequence
  Description of Artificial Sequence: Synthetic oligonucleotide
ugggaggcgcgggauacua

SEQ ID NO: 1687694 - RNA, 19 nt, Artificial Sequence
  Description of Artificial Sequence: Synthetic oligonucleotide
accugguccgccgacuuuu

SEQ ID NO: 1687695 - RNA, 19 nt, Artificial Sequence
  Description of Artificial Sequence: Synthetic oligonucleotide
guacuaguugagaguucca

SEQ ID NO: 1687696 - RNA, 19 nt, Artificial Sequence
  Description of Artificial Sequence: Synthetic oligonucleotide
ccuagacacucagucuccg

SEQ ID NO: 1687697 - RNA, 19 nt, Artificial Sequence
  Description of Artificial Sequence: Synthetic oligonucleotide
uuucgccgagcgcguggac

SEQ ID NO: 1687698 - RNA, 19 nt, Artificial Sequence
  Description of Artificial Sequence: Synthetic oligonucleotide
agcgccgaaacggcuggca

SEQ ID NO: 1687699 - RNA, 19 nt, Artificial Sequence
  Description of Artificial Sequence: Synthetic oligonucleotide
gcuguacgauacuucucca

SEQ ID NO: 1687700 - RNA, 19 nt, Artificial Sequence
  Description of Artificial Sequence: Synthetic oligonucleotide
gucgcuacugcuuccgcuu

SEQ ID NO: 1687701 - RNA, 19 nt, Artificial Sequence
  Description of Artificial Sequence: Synthetic oligonucleotide
ugcacaggucucgcagaaa

SEQ ID NO: 1687702 - RNA, 19 nt, Artificial Sequence
  Description of Artificial Sequence: Synthetic oligonucleotide
ccuagaaaacuuaauuauu

SEQ ID NO: 1687703 - RNA, 19 nt, Artificial Sequence
  Description of Artificial Sequence: Synthetic oligonucleotide
agaccccaugggucugcug

SEQ ID NO: 1687704 - RNA, 19 nt, Artificial Sequence
  Description of Artificial Sequence: Synthetic oligonucleotide
guuucgccgagcgcgugga

SEQ ID NO: 1687705 - RNA, 19 nt, Artificial Sequence
  Description of Artificial Sequence: Synthetic oligonucleotide
gagcagccuucgucgcuac

SEQ ID NO: 1687706 - RNA, 19 nt, Artificial Sequence
  Description of Artificial Sequence: Synthetic oligonucleotide
gcacaggucucgcagaaau

SEQ ID NO: 1687707 - RNA, 19 nt, Artificial Sequence
  Description of Artificial Sequence: Synthetic oligonucleotide
acaccguaacggcccucgu

SEQ ID NO: 1687708 - RNA, 19 nt, Artificial Sequence
  Description of Artificial Sequence: Synthetic oligonucleotide
gucgcaccacagagcagcc

SEQ ID NO: 1687709 - RNA, 19 nt, Artificial Sequence
  Description of Artificial Sequence: Synthetic oligonucleotide
agcguggaguagugcggaa

SEQ ID NO: 1687710 - RNA, 19 nt, Artificial Sequence
  Description of Artificial Sequence: Synthetic oligonucleotide
gcgccgaaacggcuggcag

SEQ ID NO: 1687711 - RNA, 19 nt, Artificial Sequence
  Description of Artificial Sequence: Synthetic oligonucleotide
uuucggcgaccagcacucc

SEQ ID NO: 1687712 - RNA, 19 nt, Artificial Sequence
  Description of Artificial Sequence: Synthetic oligonucleotide
guuuaccgcugccacucgu

SEQ ID NO: 1687713 - RNA, 19 nt, Artificial Sequence
  Description of Artificial Sequence: Synthetic oligonucleotide
cgcucaaagauggacugug

SEQ ID NO: 1687714 - RNA, 19 nt, Artificial Sequence
  Description of Artificial Sequence: Synthetic oligonucleotide
gacugugcgucucgcuccu

SEQ ID NO: 1687715 - RNA, 19 nt, Artificial Sequence
  Description of Artificial Sequence: Synthetic oligonucleotide
caccgguuucgccgagcgc

SEQ ID NO: 1687716 - RNA, 19 nt, Artificial Sequence
  Description of Artificial Sequence: Synthetic oligonucleotide
ccggucgcaccacagagca

SEQ ID NO: 1687717 - RNA, 19 nt, Artificial Sequence
  Description of Artificial Sequence: Synthetic oligonucleotide
cacaggucucgcagaaaua

SEQ ID NO: 1687718 - RNA, 19 nt, Artificial Sequence
  Description of Artificial Sequence: Synthetic oligonucleotide
gcuggugcugggaggcgcg

SEQ ID NO: 1687719 - RNA, 19 nt, Artificial Sequence
  Description of Artificial Sequence: Synthetic oligonucleotide
gccuagacacucagucucc

SEQ ID NO: 1687720 - RNA, 19 nt, Artificial Sequence
  Description of Artificial Sequence: Synthetic oligonucleotide
gugcgucucgcuccuucuc

SEQ ID NO: 1687721 - RNA, 19 nt, Artificial Sequence
  Description of Artificial Sequence: Synthetic oligonucleotide
guccagcucguagacagcu

SEQ ID NO: 1687722 - RNA, 19 nt, Artificial Sequence
  Description of Artificial Sequence: Synthetic oligonucleotide
cguggacuuguagacuacg

SEQ ID NO: 1687723 - RNA, 19 nt, Artificial Sequence
  Description of Artificial Sequence: Synthetic oligonucleotide
caugggucugcugcucaca

SEQ ID NO: 1687724 - RNA, 19 nt, Artificial Sequence
  Description of Artificial Sequence: Synthetic oligonucleotide
gggauacuacgucacugcu

SEQ ID NO: 1687725 - RNA, 19 nt, Artificial Sequence
  Description of Artificial Sequence: Synthetic oligonucleotide
cacaggccgcuuucggcga

SEQ ID NO: 1687726 - RNA, 19 nt, Artificial Sequence
  Description of Artificial Sequence: Synthetic oligonucleotide
acacaccguaacggcccuc

SEQ ID NO: 1687727 - RNA, 19 nt, Artificial Sequence
  Description of Artificial Sequence: Synthetic oligonucleotide
ucgcaccacagagcagccu

SEQ ID NO: 1687728 - RNA, 19 nt, Artificial Sequence
  Description of Artificial Sequence: Synthetic oligonucleotide
ccgagcgccgaaacggcug

SEQ ID NO: 1687729 - RNA, 19 nt, Artificial Sequence
  Description of Artificial Sequence: Synthetic oligonucleotide
gcugggaggcgcgggauac

SEQ ID NO: 1687730 - RNA, 19 nt, Artificial Sequence
  Description of Artificial Sequence: Synthetic oligonucleotide
cucccuuuccgcccgggcu

SEQ ID NO: 1687731 - RNA, 19 nt, Artificial Sequence
  Description of Artificial Sequence: Synthetic oligonucleotide
ggaguagugcggaaaugcu

SEQ ID NO: 1687732 - RNA, 19 nt, Artificial Sequence
  Description of Artificial Sequence: Synthetic oligonucleotide
cagcguggaguagugcgga

SEQ ID NO: 1687733 - RNA, 19 nt, Artificial Sequence
  Description of Artificial Sequence: Synthetic oligonucleotide
cugcuggugcugggaggcg

SEQ ID NO: 1687734 - RNA, 19 nt, Artificial Sequence
  Description of Artificial Sequence: Synthetic oligonucleotide
cggcaauuagaccccauca

SEQ ID NO: 1687735 - RNA, 19 nt, Artificial Sequence
  Description of Artificial Sequence: Synthetic oligonucleotide
cacucccuuuccgcccggg

SEQ ID NO: 1687736 - RNA, 19 nt, Artificial Sequence
  Description of Artificial Sequence: Synthetic oligonucleotide
guccgccgacuuuuccuga

SEQ ID NO: 1687737 - RNA, 19 nt, Artificial Sequence
  Description of Artificial Sequence: Synthetic oligonucleotide
ccauuaaguuaacuugagu

SEQ ID NO: 1687738 - RNA, 19 nt, Artificial Sequence
  Description of Artificial Sequence: Synthetic oligonucleotide
ggcuugguauauucuuccu

SEQ ID NO: 1687739 - RNA, 19 nt, Artificial Sequence
  Description of Artificial Sequence: Synthetic oligonucleotide
ccaugggucugcugcucac

SEQ ID NO: 1687740 - RNA, 19 nt, Artificial Sequence
  Description of Artificial Sequence: Synthetic oligonucleotide
cccggaguccggaucgcac

SEQ ID NO: 1687741 - RNA, 19 nt, Artificial Sequence
  Description of Artificial Sequence: Synthetic oligonucleotide
cgggauugaagaccccaug

SEQ ID NO: 1687742 - RNA, 19 nt, Artificial Sequence
  Description of Artificial Sequence: Synthetic oligonucleotide
uguggguggcccgcuucuu

SEQ ID NO: 1687743 - RNA, 19 nt, Artificial Sequence
  Description of Artificial Sequence: Synthetic oligonucleotide
gccgacuuuuccugagaaa

SEQ ID NO: 1687744 - RNA, 19 nt, Artificial Sequence
  Description of Artificial Sequence: Synthetic oligonucleotide
uccccggaguccggaucgc

SEQ ID NO: 1687745 - RNA, 19 nt, Artificial Sequence
  Description of Artificial Sequence: Synthetic oligonucleotide
caggucucgcagaaauaau

SEQ ID NO: 1687746 - RNA, 19 nt, Artificial Sequence
  Description of Artificial Sequence: Synthetic oligonucleotide
caggccgcuuucggcgacc

SEQ ID NO: 1687747 - RNA, 19 nt, Artificial Sequence
  Description of Artificial Sequence: Synthetic oligonucleotide
gggguguuggaagcaccac

SEQ ID NO: 1687748 - RNA, 19 nt, Artificial Sequence
  Description of Artificial Sequence: Synthetic oligonucleotide
cguaacggcccucgucaag

SEQ ID NO: 1687749 - RNA, 19 nt, Artificial Sequence
  Description of Artificial Sequence: Synthetic oligonucleotide
acucgucuucuggaucauu

SEQ ID NO: 1687750 - RNA, 19 nt, Artificial Sequence
  Description of Artificial Sequence: Synthetic oligonucleotide
gccgaaacggcuggcagua

SEQ ID NO: 1687751 - RNA, 19 nt, Artificial Sequence
  Description of Artificial Sequence: Synthetic oligonucleotide
uagaccccaucagggucuu

SEQ ID NO: 1687752 - RNA, 19 nt, Artificial Sequence
  Description of Artificial Sequence: Synthetic oligonucleotide
gagcgccgaaacggcuggc

SEQ ID NO: 1687753 - RNA, 19 nt, Artificial Sequence
  Description of Artificial Sequence: Synthetic oligonucleotide
cuacgccuagacacucagu

SEQ ID NO: 1687754 - RNA, 19 nt, Artificial Sequence
  Description of Artificial Sequence: Synthetic oligonucleotide
gaggcgcgggauacuacgu

SEQ ID NO: 1687755 - RNA, 19 nt, Artificial Sequence
  Description of Artificial Sequence: Synthetic oligonucleotide
ccggaguccggaucgcaca

SEQ ID NO: 1687756 - RNA, 19 nt, Artificial Sequence
  Description of Artificial Sequence: Synthetic oligonucleotide
aggccgcuuucggcgacca

SEQ ID NO: 1687757 - RNA, 19 nt, Artificial Sequence
  Description of Artificial Sequence: Synthetic oligonucleotide
cagagcagccuucgucgcu

SEQ ID NO: 1687758 - RNA, 19 nt, Artificial Sequence
  Description of Artificial Sequence: Synthetic oligonucleotide
gcgcgggauacuacgucac

SEQ ID NO: 1687759 - RNA, 19 nt, Artificial Sequence
  Description of Artificial Sequence: Synthetic oligonucleotide
cgcguggacuuguagacua

SEQ ID NO: 1687760 - RNA, 19 nt, Artificial Sequence
  Description of Artificial Sequence: Synthetic oligonucleotide
cgagcgcguggacuuguag

SEQ ID NO: 1687761 - RNA, 19 nt, Artificial Sequence
  Description of Artificial Sequence: Synthetic oligonucleotide
cacucagucuccggcuucu

SEQ ID NO: 1687762 - RNA, 19 nt, Artificial Sequence
  Description of Artificial Sequence: Synthetic oligonucleotide
ccgccuucuguuuaccgcu

SEQ ID NO: 1687763 - RNA, 19 nt, Artificial Sequence
  Description of Artificial Sequence: Synthetic oligonucleotide
cuuuccccggaguccggau

SEQ ID NO: 1687764 - RNA, 19 nt, Artificial Sequence
  Description of Artificial Sequence: Synthetic oligonucleotide
caacuggauuucggaaggu

SEQ ID NO: 1687765 - RNA, 19 nt, Artificial Sequence
  Description of Artificial Sequence: Synthetic oligonucleotide
gcguggaguagugcggaaa

SEQ ID NO: 1687766 - RNA, 19 nt, Artificial Sequence
  Description of Artificial Sequence: Synthetic oligonucleotide
gcguggacuuguagacuac

SEQ ID NO: 1687767 - RNA, 19 nt, Artificial Sequence
  Description of Artificial Sequence: Synthetic oligonucleotide
ccugguccgccgacuuuuc

SEQ ID NO: 1687768 - RNA, 19 nt, Artificial Sequence
  Description of Artificial Sequence: Synthetic oligonucleotide
gcacucccuuuccgcccgg

SEQ ID NO: 1687769 - RNA, 19 nt, Artificial Sequence
  Description of Artificial Sequence: Synthetic oligonucleotide
cgcugcucacaucacagua

SEQ ID NO: 1687770 - RNA, 19 nt, Artificial Sequence
  Description of Artificial Sequence: Synthetic oligonucleotide
cccaugggucugcugcuca

SEQ ID NO: 1687771 - RNA, 19 nt, Artificial Sequence
  Description of Artificial Sequence: Synthetic oligonucleotide
ccucuucgcugcucacauc

SEQ ID NO: 1687772 - RNA, 19 nt, Artificial Sequence
  Description of Artificial Sequence: Synthetic oligonucleotide
gcuuuccccggaguccgga

SEQ ID NO: 1687773 - RNA, 19 nt, Artificial Sequence
  Description of Artificial Sequence: Synthetic oligonucleotide
cgacuuuuccugagaaacu

SEQ ID NO: 1687774 - RNA, 19 nt, Artificial Sequence
  Description of Artificial Sequence: Synthetic oligonucleotide
gggaggcgcgggauacuac

SEQ ID NO: 1687775 - RNA, 19 nt, Artificial Sequence
  Description of Artificial Sequence: Synthetic oligonucleotide
ccgcuucuucuccggucgc

SEQ ID NO: 1687776 - RNA, 19 nt, Artificial Sequence
  Description of Artificial Sequence: Synthetic oligonucleotide
gccccaccgguuucgccga

SEQ ID NO: 1687777 - RNA, 19 nt, Artificial Sequence
  Description of Artificial Sequence: Synthetic oligonucleotide
cgccuucuguuuaccgcug

SEQ ID NO: 1687778 - RNA, 19 nt, Artificial Sequence
  Description of Artificial Sequence: Synthetic oligonucleotide
ggccgcuuucggcgaccag

SEQ ID NO: 1687779 - RNA, 19 nt, Artificial Sequence
  Description of Artificial Sequence: Synthetic oligonucleotide
gaucgcacacaggccgcuu

SEQ ID NO: 1687780 - RNA, 19 nt, Artificial Sequence
  Description of Artificial Sequence: Synthetic oligonucleotide
cguggaguagugcggaaau

SEQ ID NO: 1687781 - RNA, 19 nt, Artificial Sequence
  Description of Artificial Sequence: Synthetic oligonucleotide
ggcccucgucaagcucacg

SEQ ID NO: 1687782 - RNA, 19 nt, Artificial Sequence
  Description of Artificial Sequence: Synthetic oligonucleotide
cgcuacugcuuccgcuuuc

SEQ ID NO: 1687783 - RNA, 19 nt, Artificial Sequence
  Description of Artificial Sequence: Synthetic oligonucleotide
ccgaaacggcuggcaguag

SEQ ID NO: 1687784 - RNA, 19 nt, Artificial Sequence
  Description of Artificial Sequence: Synthetic oligonucleotide
cgccgacuuuuccugagaa

SEQ ID NO: 1687785 - RNA, 19 nt, Artificial Sequence
  Description of Artificial Sequence: Synthetic oligonucleotide
acugugcgucucgcuccuu

SEQ ID NO: 1687786 - RNA, 19 nt, Artificial Sequence
  Description of Artificial Sequence: Synthetic oligonucleotide
cgucacugcugagccgcgc

SEQ ID NO: 1687787 - RNA, 19 nt, Artificial Sequence
  Description of Artificial Sequence: Synthetic oligonucleotide
gcgggauugaagaccccau

SEQ ID NO: 1687788 - RNA, 19 nt, Artificial Sequence
  Description of Artificial Sequence: Synthetic oligonucleotide
ccgccgacuuuuccugaga

SEQ ID NO: 1687789 - RNA, 19 nt, Artificial Sequence
  Description of Artificial Sequence: Synthetic oligonucleotide
ggcugcgcucaaagaugga

SEQ ID NO: 1687790 - RNA, 19 nt, Artificial Sequence
  Description of Artificial Sequence: Synthetic oligonucleotide
cggaagguuugucgacaga

SEQ ID NO: 1687791 - RNA, 19 nt, Artificial Sequence
  Description of Artificial Sequence: Synthetic oligonucleotide
ccguaacggcccucgucaa

SEQ ID NO: 1687792 - RNA, 19 nt, Artificial Sequence
  Description of Artificial Sequence: Synthetic oligonucleotide
cgcaccacagagcagccuu

SEQ ID NO: 1687793 - RNA, 19 nt, Artificial Sequence
  Description of Artificial Sequence: Synthetic oligonucleotide
cgucgcuacugcuuccgcu

SEQ ID NO: 1687794 - RNA, 19 nt, Artificial Sequence
  Description of Artificial Sequence: Synthetic oligonucleotide
cggcccucgucaagcucac

SEQ ID NO: 1687795 - RNA, 19 nt, Artificial Sequence
  Description of Artificial Sequence: Synthetic oligonucleotide
gcgcguggacuuguagacu

SEQ ID NO: 1687796 - RNA, 19 nt, Artificial Sequence
  Description of Artificial Sequence: Synthetic oligonucleotide
caccugguccgccgacuuu

SEQ ID NO: 1687797 - RNA, 19 nt, Artificial Sequence
  Description of Artificial Sequence: Synthetic oligonucleotide
cgccgaaacggcuggcagu

SEQ ID NO: 1687798 - RNA, 19 nt, Artificial Sequence
  Description of Artificial Sequence: Synthetic oligonucleotide
ccucugcuguacgauacuu

SEQ ID NO: 1687799 - RNA, 19 nt, Artificial Sequence
  Description of Artificial Sequence: Synthetic oligonucleotide
ccgguuucgccgagcgcgu

SEQ ID NO: 1687800 - RNA, 19 nt, Artificial Sequence
  Description of Artificial Sequence: Synthetic oligonucleotide
gccgagcgcguggacuugu

SEQ ID NO: 1687801 - RNA, 19 nt, Artificial Sequence
  Description of Artificial Sequence: Synthetic oligonucleotide
cgacuuccgagcgccgaaa

SEQ ID NO: 1687802 - RNA, 19 nt, Artificial Sequence
  Description of Artificial Sequence: Synthetic oligonucleotide
ccccggaguccggaucgca

SEQ ID NO: 1687803 - RNA, 19 nt, Artificial Sequence
  Description of Artificial Sequence: Synthetic oligonucleotide
ccgagcgcguggacuugua

SEQ ID NO: 1687804 - RNA, 19 nt, Artificial Sequence
  Description of Artificial Sequence: Synthetic oligonucleotide
cgguuucgccgagcgcgug

SEQ ID NO: 1687805 - RNA, 19 nt, Artificial Sequence
  Description of Artificial Sequence: Synthetic oligonucleotide
cgucaagcucacguucuau

SEQ ID NO: 1687806 - RNA, 19 nt, Artificial Sequence
  Description of Artificial Sequence: Synthetic oligonucleotide
cgccgagcgcguggacuug

SEQ ID NO: 1687807 - RNA, 19 nt, Artificial Sequence
  Description of Artificial Sequence: Synthetic oligonucleotide
cggcgaccagcacucccuu

SEQ ID NO: 1687808 - RNA, 19 nt, Artificial Sequence
  Description of Artificial Sequence: Synthetic oligonucleotide
uuaguuaugagcaagacuc

SEQ ID NO: 1687809 - RNA, 19 nt, Artificial Sequence
  Description of Artificial Sequence: Synthetic oligonucleotide
uuuaacacaguaauaacag

SEQ ID NO: 1687810 - RNA, 19 nt, Artificial Sequence
  Description of Artificial Sequence: Synthetic oligonucleotide
uucgaaacaaaucauaaca

SEQ ID NO: 1687811 - RNA, 19 nt, Artificial Sequence
  Description of Artificial Sequence: Synthetic oligonucleotide
gaaacaaaucauaacaucg

SEQ ID NO: 1687812 - RNA, 19 nt, Artificial Sequence
  Description of Artificial Sequence: Synthetic oligonucleotide
gaauauucaagacugacug

SEQ ID NO: 1687813 - RNA, 19 nt, Artificial Sequence
  Description of Artificial Sequence: Synthetic oligonucleotide
aagaaguuuaucaauuccc

SEQ ID NO: 1687814 - RNA, 19 nt, Artificial Sequence
  Description of Artificial Sequence: Synthetic oligonucleotide
uucaaaucgagcuaacagg

SEQ ID NO: 1687815 - RNA, 19 nt, Artificial Sequence
  Description of Artificial Sequence: Synthetic oligonucleotide
cauuucugaaaauaaaugc

SEQ ID NO: 1687816 - RNA, 19 nt, Artificial Sequence
  Description of Artificial Sequence: Synthetic oligonucleotide
uacugaauauucaagacug

SEQ ID NO: 1687817 - RNA, 19 nt, Artificial Sequence
  Description of Artificial Sequence: Synthetic oligonucleotide
gacaguuacagacugaacc

SEQ ID NO: 1687818 - RNA, 19 nt, Artificial Sequence
  Description of Artificial Sequence: Synthetic oligonucleotide
aaaacagagucuuaugaug

SEQ ID NO: 1687819 - RNA, 19 nt, Artificial Sequence
  Description of Artificial Sequence: Synthetic oligonucleotide
agugauuagaauuuaguug

SEQ ID NO: 1687820 - RNA, 19 nt, Artificial Sequence
  Description of Artificial Sequence: Synthetic oligonucleotide
ugagcaagacucuagaacc

SEQ ID NO: 1687821 - RNA, 19 nt, Artificial Sequence
  Description of Artificial Sequence: Synthetic oligonucleotide
ucucguaucauuuaguuuc

SEQ ID NO: 1687822 - RNA, 19 nt, Artificial Sequence
  Description of Artificial Sequence: Synthetic oligonucleotide
ucauuucugaaaauaaaug

SEQ ID NO: 1687823 - RNA, 19 nt, Artificial Sequence
  Description of Artificial Sequence: Synthetic oligonucleotide
acaguaauaacagaagacg

SEQ ID NO: 1687824 - RNA, 19 nt, Artificial Sequence
  Description of Artificial Sequence: Synthetic oligonucleotide
aacucaagcaaagccaugc

SEQ ID NO: 1687825 - RNA, 19 nt, Artificial Sequence
  Description of Artificial Sequence: Synthetic oligonucleotide
uuaaagaguaccgugaaca

SEQ ID NO: 1687826 - RNA, 19 nt, Artificial Sequence
  Description of Artificial Sequence: Synthetic oligonucleotide
guaauagaugauuuuaaag

SEQ ID NO: 1687827 - RNA, 19 nt, Artificial Sequence
  Description of Artificial Sequence: Synthetic oligonucleotide
aaucauaacaucguuccuc

SEQ ID NO: 1687828 - RNA, 19 nt, Artificial Sequence
  Description of Artificial Sequence: Synthetic oligonucleotide
ucaaaucgagcuaacaggc

SEQ ID NO: 1687829 - RNA, 19 nt, Artificial Sequence
  Description of Artificial Sequence: Synthetic oligonucleotide
uucuauaaaggauucuuag

SEQ ID NO: 1687830 - RNA, 19 nt, Artificial Sequence
  Description of Artificial Sequence: Synthetic oligonucleotide
aauuaagaaguuuaucaau

SEQ ID NO: 1687831 - RNA, 19 nt, Artificial Sequence
  Description of Artificial Sequence: Synthetic oligonucleotide
aauauucaagacugacugg

SEQ ID NO: 1687832 - RNA, 19 nt, Artificial Sequence
  Description of Artificial Sequence: Synthetic oligonucleotide
uuuguacugaauauucaag

SEQ ID NO: 1687833 - RNA, 19 nt, Artificial Sequence
  Description of Artificial Sequence: Synthetic oligonucleotide
uucuaugccacacuuagga

SEQ ID NO: 1687834 - RNA, 19 nt, Artificial Sequence
  Description of Artificial Sequence: Synthetic oligonucleotide
uaaaugacgguuucgaaac

SEQ ID NO: 1687835 - RNA, 19 nt, Artificial Sequence
  Description of Artificial Sequence: Synthetic oligonucleotide
uaucauuuaguuuccagug

SEQ ID NO: 1687836 - RNA, 19 nt, Artificial Sequence
  Description of Artificial Sequence: Synthetic oligonucleotide
agaagacguguucacaucc

SEQ ID NO: 1687837 - RNA, 19 nt, Artificial Sequence
  Description of Artificial Sequence: Synthetic oligonucleotide
aauggugugaggcauugug

SEQ ID NO: 1687838 - RNA, 19 nt, Artificial Sequence
  Description of Artificial Sequence: Synthetic oligonucleotide
cuauaaaggauucuuaguc

SEQ ID NO: 1687839 - RNA, 19 nt, Artificial Sequence
  Description of Artificial Sequence: Synthetic oligonucleotide
aacaaugugcugucuaaag

SEQ ID NO: 1687840 - RNA, 19 nt, Artificial Sequence
  Description of Artificial Sequence: Synthetic oligonucleotide
uucaagugcauccagcuga

SEQ ID NO: 1687841 - RNA, 19 nt, Artificial Sequence
  Description of Artificial Sequence: Synthetic oligonucleotide
acacugugcacuucuaugc

SEQ ID NO: 1687842 - RNA, 19 nt, Artificial Sequence
  Description of Artificial Sequence: Synthetic oligonucleotide
ugugcuuggaaaagaagag

SEQ ID NO: 1687843 - RNA, 19 nt, Artificial Sequence
  Description of Artificial Sequence: Synthetic oligonucleotide
acuucuaugccacacuuag

SEQ ID NO: 1687844 - RNA, 19 nt, Artificial Sequence
  Description of Artificial Sequence: Synthetic oligonucleotide
aacuucacgaauguucugg

SEQ ID NO: 1687845 - RNA, 19 nt, Artificial Sequence
  Description of Artificial Sequence: Synthetic oligonucleotide
uauaaaggauucuuaguca

SEQ ID NO: 1687846 - RNA, 19 nt, Artificial Sequence
  Description of Artificial Sequence: Synthetic oligonucleotide
aaaucgagcuaacaggccu

SEQ ID NO: 1687847 - RNA, 19 nt, Artificial Sequence
  Description of Artificial Sequence: Synthetic oligonucleotide
uagaugauuuuaaagagua

SEQ ID NO: 1687848 - RNA, 19 nt, Artificial Sequence
  Description of Artificial Sequence: Synthetic oligonucleotide
ccaaccauaacauucaugc

SEQ ID NO: 1687849 - RNA, 19 nt, Artificial Sequence
  Description of Artificial Sequence: Synthetic oligonucleotide
uucacgaauguucuggggc

SEQ ID NO: 1687850 - RNA, 19 nt, Artificial Sequence
  Description of Artificial Sequence: Synthetic oligonucleotide
cuuaggacagguaaaguac

SEQ ID NO: 1687851 - RNA, 19 nt, Artificial Sequence
  Description of Artificial Sequence: Synthetic oligonucleotide
uagaauuuaguugugcuug

SEQ ID NO: 1687852 - RNA, 19 nt, Artificial Sequence
  Description of Artificial Sequence: Synthetic oligonucleotide
auaacaucguuccucuaac

SEQ ID NO: 1687853 - RNA, 19 nt, Artificial Sequence
  Description of Artificial Sequence: Synthetic oligonucleotide
uucuuagucauucucagua

SEQ ID NO: 1687854 - RNA, 19 nt, Artificial Sequence
  Description of Artificial Sequence: Synthetic oligonucleotide
ugaauauucaagacugacu

SEQ ID NO: 1687855 - RNA, 19 nt, Artificial Sequence
  Description of Artificial Sequence: Synthetic oligonucleotide
auuccccuaauuuuaaaag

SEQ ID NO: 1687856 - RNA, 19 nt, Artificial Sequence
  Description of Artificial Sequence: Synthetic oligonucleotide
acgguuucgaaacaaauca

SEQ ID NO: 1687857 - RNA, 19 nt, Artificial Sequence
  Description of Artificial Sequence: Synthetic oligonucleotide
ucaaaguuugcaaacuuuc

SEQ ID NO: 1687858 - RNA, 19 nt, Artificial Sequence
  Description of Artificial Sequence: Synthetic oligonucleotide
aaugugcugucuaaagagc

SEQ ID NO: 1687859 - RNA, 19 nt, Artificial Sequence
  Description of Artificial Sequence: Synthetic oligonucleotide
auaggaagcuacuuuuaac

SEQ ID NO: 1687860 - RNA, 19 nt, Artificial Sequence
  Description of Artificial Sequence: Synthetic oligonucleotide
agaaguuuaucaauucccc

SEQ ID NO: 1687861 - RNA, 19 nt, Artificial Sequence
  Description of Artificial Sequence: Synthetic oligonucleotide
uuguacugaauauucaaga

SEQ ID NO: 1687862 - RNA, 19 nt, Artificial Sequence
  Description of Artificial Sequence: Synthetic oligonucleotide
ucagaggaaacaaugugcu

SEQ ID NO: 1687863 - RNA, 19 nt, Artificial Sequence
  Description of Artificial Sequence: Synthetic oligonucleotide
uguuugacuuucccgaaag

SEQ ID NO: 1687864 - RNA, 19 nt, Artificial Sequence
  Description of Artificial Sequence: Synthetic oligonucleotide
ugacuaauaccaaggacug

SEQ ID NO: 1687865 - RNA, 19 nt, Artificial Sequence
  Description of Artificial Sequence: Synthetic oligonucleotide
cucagaggaaacaaugugc

SEQ ID NO: 1687866 - RNA, 19 nt, Artificial Sequence
  Description of Artificial Sequence: Synthetic oligonucleotide
ugucuaaagagcauucacu

SEQ ID NO: 1687867 - RNA, 19 nt, Artificial Sequence
  Description of Artificial Sequence: Synthetic oligonucleotide
aauuccccuaauuuuaaaa

SEQ ID NO: 1687868 - RNA, 19 nt, Artificial Sequence
  Description of Artificial Sequence: Synthetic oligonucleotide
acuuuuaacacaguaauaa

SEQ ID NO: 1687869 - RNA, 19 nt, Artificial Sequence
  Description of Artificial Sequence: Synthetic oligonucleotide
aacauucaugcacuguuug

SEQ ID NO: 1687870 - RNA, 19 nt, Artificial Sequence
  Description of Artificial Sequence: Synthetic oligonucleotide
uuuuguacugaauauucaa

SEQ ID NO: 1687871 - RNA, 19 nt, Artificial Sequence
  Description of Artificial Sequence: Synthetic oligonucleotide
augacuaauaccaaggacu

SEQ ID NO: 1687872 - RNA, 19 nt, Artificial Sequence
  Description of Artificial Sequence: Synthetic oligonucleotide
ucuauaaaggauucuuagu

SEQ ID NO: 1687873 - RNA, 19 nt, Artificial Sequence
  Description of Artificial Sequence: Synthetic oligonucleotide
uugacauuaaaagauguaa

SEQ ID NO: 1687874 - RNA, 19 nt, Artificial Sequence
  Description of Artificial Sequence: Synthetic oligonucleotide
aaguuuaucaauuccccua

SEQ ID NO: 1687875 - RNA, 19 nt, Artificial Sequence
  Description of Artificial Sequence: Synthetic oligonucleotide
agacucuagaaccugaggu

SEQ ID NO: 1687876 - RNA, 19 nt, Artificial Sequence
  Description of Artificial Sequence: Synthetic oligonucleotide
gacguguucacauccaaug

SEQ ID NO: 1687877 - RNA, 19 nt, Artificial Sequence
  Description of Artificial Sequence: Synthetic oligonucleotide
agauggugaaccuccauag

SEQ ID NO: 1687878 - RNA, 19 nt, Artificial Sequence
  Description of Artificial Sequence: Synthetic oligonucleotide
uuaguuuccagugauuaga

SEQ ID NO: 1687879 - RNA, 19 nt, Artificial Sequence
  Description of Artificial Sequence: Synthetic oligonucleotide
augaugucagcuuaugaug

SEQ ID NO: 1687880 - RNA, 19 nt, Artificial Sequence
  Description of Artificial Sequence: Synthetic oligonucleotide
aaugcacacucaucccagc

SEQ ID NO: 1687881 - RNA, 19 nt, Artificial Sequence
  Description of Artificial Sequence: Synthetic oligonucleotide
ucuugacauuaaaagaugu

SEQ ID NO: 1687882 - RNA, 19 nt, Artificial Sequence
  Description of Artificial Sequence: Synthetic oligonucleotide
uguaauagaugauuuuaaa

SEQ ID NO: 1687883 - RNA, 19 nt, Artificial Sequence
  Description of Artificial Sequence: Synthetic oligonucleotide
ucaaauaggaagcuacuuu

SEQ ID NO: 1687884 - RNA, 19 nt, Artificial Sequence
  Description of Artificial Sequence: Synthetic oligonucleotide
uuuaguuuccagugauuag

SEQ ID NO: 1687885 - RNA, 19 nt, Artificial Sequence
  Description of Artificial Sequence: Synthetic oligonucleotide
uuaugagcaagacucuaga

SEQ ID NO: 1687886 - RNA, 19 nt, Artificial Sequence
  Description of Artificial Sequence: Synthetic oligonucleotide
ugaugucagcuuaugaugu

SEQ ID NO: 1687887 - RNA, 19 nt, Artificial Sequence
  Description of Artificial Sequence: Synthetic oligonucleotide
uuuuaaagaguaccgugaa

SEQ ID NO: 1687888 - RNA, 19 nt, Artificial Sequence
  Description of Artificial Sequence: Synthetic oligonucleotide
aauggugcacacagcauac

SEQ ID NO: 1687889 - RNA, 19 nt, Artificial Sequence
  Description of Artificial Sequence: Synthetic oligonucleotide
auaacauucaugcacuguu

SEQ ID NO: 1687890 - RNA, 19 nt, Artificial Sequence
  Description of Artificial Sequence: Synthetic oligonucleotide
aacagagucuuaugauguc

SEQ ID NO: 1687891 - RNA, 19 nt, Artificial Sequence
  Description of Artificial Sequence: Synthetic oligonucleotide
aauuuaguugugcuuggaa

SEQ ID NO: 1687892 - RNA, 19 nt, Artificial Sequence
  Description of Artificial Sequence: Synthetic oligonucleotide
aaagccaacuucacgaaug

SEQ ID NO: 1687893 - RNA, 19 nt, Artificial Sequence
  Description of Artificial Sequence: Synthetic oligonucleotide
uggggcuugcaaaauacag

SEQ ID NO: 1687894 - RNA, 19 nt, Artificial Sequence
  Description of Artificial Sequence: Synthetic oligonucleotide
gugauuagaauuuaguugu

SEQ ID NO: 1687895 - RNA, 19 nt, Artificial Sequence
  Description of Artificial Sequence: Synthetic oligonucleotide
aggauucuuagucauucuc

SEQ ID NO: 1687896 - RNA, 19 nt, Artificial Sequence
  Description of Artificial Sequence: Synthetic oligonucleotide
acaguuacagacugaaccu

SEQ ID NO: 1687897 - RNA, 19 nt, Artificial Sequence
  Description of Artificial Sequence: Synthetic oligonucleotide
ucccgaaagaugcuaaaug

SEQ ID NO: 1687898 - RNA, 19 nt, Artificial Sequence
  Description of Artificial Sequence: Synthetic oligonucleotide
guucaguucaagugcaucc

SEQ ID NO: 1687899 - RNA, 19 nt, Artificial Sequence
  Description of Artificial Sequence: Synthetic oligonucleotide
aaacaaaucauaacaucgu

SEQ ID NO: 1687900 - RNA, 19 nt, Artificial Sequence
  Description of Artificial Sequence: Synthetic oligonucleotide
aaaguacaugucaaauagg

SEQ ID NO: 1687901 - RNA, 19 nt, Artificial Sequence
  Description of Artificial Sequence: Synthetic oligonucleotide
aaacagagucuuaugaugu

SEQ ID NO: 1687902 - RNA, 19 nt, Artificial Sequence
  Description of Artificial Sequence: Synthetic oligonucleotide
uuucgaaacaaaucauaac

SEQ ID NO: 1687903 - RNA, 19 nt, Artificial Sequence
  Description of Artificial Sequence: Synthetic oligonucleotide
uagaaccugagguuuaaca

SEQ ID NO: 1687904 - RNA, 19 nt, Artificial Sequence
  Description of Artificial Sequence: Synthetic oligonucleotide
ucauuuaguuuccagugau

SEQ ID NO: 1687905 - RNA, 19 nt, Artificial Sequence
  Description of Artificial Sequence: Synthetic oligonucleotide
uuaugaugucagcuuauga

SEQ ID NO: 1687906 - RNA, 19 nt, Artificial Sequence
  Description of Artificial Sequence: Synthetic oligonucleotide
caauuccugacuucagugg

SEQ ID NO: 1687907 - RNA, 19 nt, Artificial Sequence
  Description of Artificial Sequence: Synthetic oligonucleotide
uccucuaaccaucuacccc

SEQ ID NO: 1687908 - RNA, 19 nt, Artificial Sequence
  Description of Artificial Sequence: Synthetic oligonucleotide
uccccuaauuuuaaaaguc

SEQ ID NO: 1687909 - RNA, 19 nt, Artificial Sequence
  Description of Artificial Sequence: Synthetic oligonucleotide
aaggacugggacacaauac

SEQ ID NO: 1687910 - RNA, 19 nt, Artificial Sequence
  Description of Artificial Sequence: Synthetic oligonucleotide
uuaacacaguaauaacaga

SEQ ID NO: 1687911 - RNA, 19 nt, Artificial Sequence
  Description of Artificial Sequence: Synthetic oligonucleotide
aagaguaccgugaacauuu

SEQ ID NO: 1687912 - RNA, 19 nt, Artificial Sequence
  Description of Artificial Sequence: Synthetic oligonucleotide
aguucaagugcauccagcu

SEQ ID NO: 1687913 - RNA, 19 nt, Artificial Sequence
  Description of Artificial Sequence: Synthetic oligonucleotide
acauuuguaagagucucuc

SEQ ID NO: 1687914 - RNA, 19 nt, Artificial Sequence
  Description of Artificial Sequence: Synthetic oligonucleotide
agagucuuaugaugucagc

SEQ ID NO: 1687915 - RNA, 19 nt, Artificial Sequence
  Description of Artificial Sequence: Synthetic oligonucleotide
gauuagaauuuaguugugc

SEQ ID NO: 1687916 - RNA, 19 nt, Artificial Sequence
  Description of Artificial Sequence: Synthetic oligonucleotide
uuucuauaaaggauucuua

SEQ ID NO: 1687917 - RNA, 19 nt, Artificial Sequence
  Description of Artificial Sequence: Synthetic oligonucleotide
acucaagcaaagccaugcc

SEQ ID NO: 1687918 - RNA, 19 nt, Artificial Sequence
  Description of Artificial Sequence: Synthetic oligonucleotide
aggaugacuaauaccaagg

SEQ ID NO: 1687919 - RNA, 19 nt, Artificial Sequence
  Description of Artificial Sequence: Synthetic oligonucleotide
aaccuccauaggaaaagcc

SEQ ID NO: 1687920 - RNA, 19 nt, Artificial Sequence
  Description of Artificial Sequence: Synthetic oligonucleotide
uccagugauuagaauuuag

SEQ ID NO: 1687921 - RNA, 19 nt, Artificial Sequence
  Description of Artificial Sequence: Synthetic oligonucleotide
aagcucccuauucauguag

SEQ ID NO: 1687922 - RNA, 19 nt, Artificial Sequence
  Description of Artificial Sequence: Synthetic oligonucleotide
gugaacauuuguaagaguc

SEQ ID NO: 1687923 - RNA, 19 nt, Artificial Sequence
  Description of Artificial Sequence: Synthetic oligonucleotide
ugucacuacuagcagcacc

SEQ ID NO: 1687924 - RNA, 19 nt, Artificial Sequence
  Description of Artificial Sequence: Synthetic oligonucleotide
aagacugacuggcccacag

SEQ ID NO: 1687925 - RNA, 19 nt, Artificial Sequence
  Description of Artificial Sequence: Synthetic oligonucleotide
acuuaggacagguaaagua

SEQ ID NO: 1687926 - RNA, 19 nt, Artificial Sequence
  Description of Artificial Sequence: Synthetic oligonucleotide
agaggacagcggcugagcc

SEQ ID NO: 1687927 - RNA, 19 nt, Artificial Sequence
  Description of Artificial Sequence: Synthetic oligonucleotide
ucccuauucauguagucaa

SEQ ID NO: 1687928 - RNA, 19 nt, Artificial Sequence
  Description of Artificial Sequence: Synthetic oligonucleotide
auggugaaccuccauagga

SEQ ID NO: 1687929 - RNA, 19 nt, Artificial Sequence
  Description of Artificial Sequence: Synthetic oligonucleotide
gauguaauagaugauuuua

SEQ ID NO: 1687930 - RNA, 19 nt, Artificial Sequence
  Description of Artificial Sequence: Synthetic oligonucleotide
uauucaagacugacuggcc

SEQ ID NO: 1687931 - RNA, 19 nt, Artificial Sequence
  Description of Artificial Sequence: Synthetic oligonucleotide
gguaucuugaguuggaaga

SEQ ID NO: 1687932 - RNA, 19 nt, Artificial Sequence
  Description of Artificial Sequence: Synthetic oligonucleotide
acguguucacauccaaugg

SEQ ID NO: 1687933 - RNA, 19 nt, Artificial Sequence
  Description of Artificial Sequence: Synthetic oligonucleotide
ugauuuuaaagaguaccgu

SEQ ID NO: 1687934 - RNA, 19 nt, Artificial Sequence
  Description of Artificial Sequence: Synthetic oligonucleotide
gauggugaaccuccauagg

SEQ ID NO: 1687935 - RNA, 19 nt, Artificial Sequence
  Description of Artificial Sequence: Synthetic oligonucleotide
accgugaacauuuguaaga

SEQ ID NO: 1687936 - RNA, 19 nt, Artificial Sequence
  Description of Artificial Sequence: Synthetic oligonucleotide
aagcuuaguuaugagcaag

SEQ ID NO: 1687937 - RNA, 19 nt, Artificial Sequence
  Description of Artificial Sequence: Synthetic oligonucleotide
gaguagauggugaaccucc

SEQ ID NO: 1687938 - RNA, 19 nt, Artificial Sequence
  Description of Artificial Sequence: Synthetic oligonucleotide
agucucucguaucauuuag

SEQ ID NO: 1687939 - RNA, 19 nt, Artificial Sequence
  Description of Artificial Sequence: Synthetic oligonucleotide
uuugacuuucccgaaagau

SEQ ID NO: 1687940 - RNA, 19 nt, Artificial Sequence
  Description of Artificial Sequence: Synthetic oligonucleotide
uucucaguauucaucugac

SEQ ID NO: 1687941 - RNA, 19 nt, Artificial Sequence
  Description of Artificial Sequence: Synthetic oligonucleotide
ugcacuguuugacuuuccc

SEQ ID NO: 1687942 - RNA, 19 nt, Artificial Sequence
  Description of Artificial Sequence: Synthetic oligonucleotide
uaccgugaacauuuguaag

SEQ ID NO: 1687943 - RNA, 19 nt, Artificial Sequence
  Description of Artificial Sequence: Synthetic oligonucleotide
ucaguucaagugcauccag

SEQ ID NO: 1687944 - RNA, 19 nt, Artificial Sequence
  Description of Artificial Sequence: Synthetic oligonucleotide
uacagacugaaccucuuaa

SEQ ID NO: 1687945 - RNA, 19 nt, Artificial Sequence
  Description of Artificial Sequence: Synthetic oligonucleotide
aaaugcacacucaucccag

SEQ ID NO: 1687946 - RNA, 19 nt, Artificial Sequence
  Description of Artificial Sequence: Synthetic oligonucleotide
uugaguuggaagagaaauc

SEQ ID NO: 1687947 - RNA, 19 nt, Artificial Sequence
  Description of Artificial Sequence: Synthetic oligonucleotide
aguuuaucaauuccccuaa

SEQ ID NO: 1687948 - RNA, 19 nt, Artificial Sequence
  Description of Artificial Sequence: Synthetic oligonucleotide
ugcuaaaugacgguuucga

SEQ ID NO: 1687949 - RNA, 19 nt, Artificial Sequence
  Description of Artificial Sequence: Synthetic oligonucleotide
gaugcuaaaugacgguuuc

SEQ ID NO: 1687950 - RNA, 19 nt, Artificial Sequence
  Description of Artificial Sequence: Synthetic oligonucleotide
uacugaggaugacuaauac

SEQ ID NO: 1687951 - RNA, 19 nt, Artificial Sequence
  Description of Artificial Sequence: Synthetic oligonucleotide
gaacugggaccacacaagc

SEQ ID NO: 1687952 - RNA, 19 nt, Artificial Sequence
  Description of Artificial Sequence: Synthetic oligonucleotide
uucugucaaaguuugcaaa

SEQ ID NO: 1687953 - RNA, 19 nt, Artificial Sequence
  Description of Artificial Sequence: Synthetic oligonucleotide
cacagcauaccacaguuuc

SEQ ID NO: 1687954 - RNA, 19 nt, Artificial Sequence
  Description of Artificial Sequence: Synthetic oligonucleotide
cucaguauucaucugacaa

SEQ ID NO: 1687955 - RNA, 19 nt, Artificial Sequence
  Description of Artificial Sequence: Synthetic oligonucleotide
ugauuagaauuuaguugug

SEQ ID NO: 1687956 - RNA, 19 nt, Artificial Sequence
  Description of Artificial Sequence: Synthetic oligonucleotide
guaagagucucucguauca

SEQ ID NO: 1687957 - RNA, 19 nt, Artificial Sequence
  Description of Artificial Sequence: Synthetic oligonucleotide
uccaaccauaacauucaug

SEQ ID NO: 1687958 - RNA, 19 nt, Artificial Sequence
  Description of Artificial Sequence: Synthetic oligonucleotide
aagauguaauagaugauuu

SEQ ID NO: 1687959 - RNA, 19 nt, Artificial Sequence
  Description of Artificial Sequence: Synthetic oligonucleotide
uuguaagagucucucguau

SEQ ID NO: 1687960 - RNA, 19 nt, Artificial Sequence
  Description of Artificial Sequence: Synthetic oligonucleotide
augaaugccaaggaggcgu

SEQ ID NO: 1687961 - RNA, 19 nt, Artificial Sequence
  Description of Artificial Sequence: Synthetic oligonucleotide
guuaugagcaagacucuag

SEQ ID NO: 1687962 - RNA, 19 nt, Artificial Sequence
  Description of Artificial Sequence: Synthetic oligonucleotide
cugaauauucaagacugac

SEQ ID NO: 1687963 - RNA, 19 nt, Artificial Sequence
  Description of Artificial Sequence: Synthetic oligonucleotide
uuuguaagagucucucgua

SEQ ID NO: 1687964 - RNA, 19 nt, Artificial Sequence
  Description of Artificial Sequence: Synthetic oligonucleotide
ucaauuccccuaauuuuaa

SEQ ID NO: 1687965 - RNA, 19 nt, Artificial Sequence
  Description of Artificial Sequence: Synthetic oligonucleotide
guagucaaagccaacuuca

SEQ ID NO: 1687966 - RNA, 19 nt, Artificial Sequence
  Description of Artificial Sequence: Synthetic oligonucleotide
cauucaugcacuguuugac

SEQ ID NO: 1687967 - RNA, 19 nt, Artificial Sequence
  Description of Artificial Sequence: Synthetic oligonucleotide
cuucagguucaaaucgagc

SEQ ID NO: 1687968 - RNA, 19 nt, Artificial Sequence
  Description of Artificial Sequence: Synthetic oligonucleotide
ugaaagcacugugugaacu

SEQ ID NO: 1687969 - RNA, 19 nt, Artificial Sequence
  Description of Artificial Sequence: Synthetic oligonucleotide
cacuguuugacuuucccga

SEQ ID NO: 1687970 - RNA, 19 nt, Artificial Sequence
  Description of Artificial Sequence: Synthetic oligonucleotide
auagaugauuuuaaagagu

SEQ ID NO: 1687971 - RNA, 19 nt, Artificial Sequence
  Description of Artificial Sequence: Synthetic oligonucleotide
augaaagcacugugugaac

SEQ ID NO: 1687972 - RNA, 19 nt, Artificial Sequence
  Description of Artificial Sequence: Synthetic oligonucleotide
gaaccugagguuuaacaaa

SEQ ID NO: 1687973 - RNA, 19 nt, Artificial Sequence
  Description of Artificial Sequence: Synthetic oligonucleotide
ucucucguaucauuuaguu

SEQ ID NO: 1687974 - RNA, 19 nt, Artificial Sequence
  Description of Artificial Sequence: Synthetic oligonucleotide
auucaugcacuguuugacu

SEQ ID NO: 1687975 - RNA, 19 nt, Artificial Sequence
  Description of Artificial Sequence: Synthetic oligonucleotide
uaugagcaagacucuagaa

SEQ ID NO: 1687976 - RNA, 19 nt, Artificial Sequence
  Description of Artificial Sequence: Synthetic oligonucleotide
agaaaauuaagaaguuuau

SEQ ID NO: 1687977 - RNA, 19 nt, Artificial Sequence
  Description of Artificial Sequence: Synthetic oligonucleotide
uggugaaccuccauaggaa

SEQ ID NO: 1687978 - RNA, 19 nt, Artificial Sequence
  Description of Artificial Sequence: Synthetic oligonucleotide
cugacuggcccacaguggc

SEQ ID NO: 1687979 - RNA, 19 nt, Artificial Sequence
  Description of Artificial Sequence: Synthetic oligonucleotide
uuccucuaaccaucuaccc

SEQ ID NO: 1687980 - RNA, 19 nt, Artificial Sequence
  Description of Artificial Sequence: Synthetic oligonucleotide
uguaagagucucucguauc

SEQ ID NO: 1687981 - RNA, 19 nt, Artificial Sequence
  Description of Artificial Sequence: Synthetic oligonucleotide
aaugacgguuucgaaacaa

SEQ ID NO: 1687982 - RNA, 19 nt, Artificial Sequence
  Description of Artificial Sequence: Synthetic oligonucleotide
caagacucuagaaccugag

SEQ ID NO: 1687983 - RNA, 19 nt, Artificial Sequence
  Description of Artificial Sequence: Synthetic oligonucleotide
ugacgguuucgaaacaaau

SEQ ID NO: 1687984 - RNA, 19 nt, Artificial Sequence
  Description of Artificial Sequence: Synthetic oligonucleotide
aaaugacgguuucgaaaca

SEQ ID NO: 1687985 - RNA, 19 nt, Artificial Sequence
  Description of Artificial Sequence: Synthetic oligonucleotide
guaucauuuaguuuccagu

SEQ ID NO: 1687986 - RNA, 19 nt, Artificial Sequence
  Description of Artificial Sequence: Synthetic oligonucleotide
aaaacuggcuucagggaga

SEQ ID NO: 1687987 - RNA, 19 nt, Artificial Sequence
  Description of Artificial Sequence: Synthetic oligonucleotide
aaaagauguaauagaugau

SEQ ID NO: 1687988 - RNA, 19 nt, Artificial Sequence
  Description of Artificial Sequence: Synthetic oligonucleotide
gacauuucaauuccugacu

SEQ ID NO: 1687989 - RNA, 19 nt, Artificial Sequence
  Description of Artificial Sequence: Synthetic oligonucleotide
caaaucgagcuaacaggcc

SEQ ID NO: 1687990 - RNA, 19 nt, Artificial Sequence
  Description of Artificial Sequence: Synthetic oligonucleotide
agaugauuuuaaagaguac

SEQ ID NO: 1687991 - RNA, 19 nt, Artificial Sequence
  Description of Artificial Sequence: Synthetic oligonucleotide
agauguaauagaugauuuu

SEQ ID NO: 1687992 - RNA, 19 nt, Artificial Sequence
  Description of Artificial Sequence: Synthetic oligonucleotide
guuccucuaaccaucuacc

SEQ ID NO: 1687993 - RNA, 19 nt, Artificial Sequence
  Description of Artificial Sequence: Synthetic oligonucleotide
ucuuaugaugucagcuuau

SEQ ID NO: 1687994 - RNA, 19 nt, Artificial Sequence
  Description of Artificial Sequence: Synthetic oligonucleotide
acauuucaauuccugacuu

SEQ ID NO: 1687995 - RNA, 19 nt, Artificial Sequence
  Description of Artificial Sequence: Synthetic oligonucleotide
ccuuguucaguucaagugc

SEQ ID NO: 1687996 - RNA, 19 nt, Artificial Sequence
  Description of Artificial Sequence: Synthetic oligonucleotide
uaacaucguuccucuaacc

SEQ ID NO: 1687997 - RNA, 19 nt, Artificial Sequence
  Description of Artificial Sequence: Synthetic oligonucleotide
cucguaucauuuaguuucc

SEQ ID NO: 1687998 - RNA, 19 nt, Artificial Sequence
  Description of Artificial Sequence: Synthetic oligonucleotide
acauucaugcacuguuuga

SEQ ID NO: 1687999 - RNA, 19 nt, Artificial Sequence
  Description of Artificial Sequence: Synthetic oligonucleotide
agcauaccacaguuucugg

SEQ ID NO: 1688000 - RNA, 19 nt, Artificial Sequence
  Description of Artificial Sequence: Synthetic oligonucleotide
aagaugcuaaaugacgguu

SEQ ID NO: 1688001 - RNA, 19 nt, Artificial Sequence
  Description of Artificial Sequence: Synthetic oligonucleotide
uucaguucaagugcaucca

SEQ ID NO: 1688002 - RNA, 19 nt, Artificial Sequence
  Description of Artificial Sequence: Synthetic oligonucleotide
ugaacccaugaaagcacug

SEQ ID NO: 1688003 - RNA, 19 nt, Artificial Sequence
  Description of Artificial Sequence: Synthetic oligonucleotide
cacugucacuacuagcagc

SEQ ID NO: 1688004 - RNA, 19 nt, Artificial Sequence
  Description of Artificial Sequence: Synthetic oligonucleotide
uuuaguagcuugaccuuuu

SEQ ID NO: 1688005 - RNA, 19 nt, Artificial Sequence
  Description of Artificial Sequence: Synthetic oligonucleotide
agcuugaccuuuucuauaa

SEQ ID NO: 1688006 - RNA, 19 nt, Artificial Sequence
  Description of Artificial Sequence: Synthetic oligonucleotide
acugucacuacuagcagca

SEQ ID NO: 1688007 - RNA, 19 nt, Artificial Sequence
  Description of Artificial Sequence: Synthetic oligonucleotide
guuucgaaacaaaucauaa

SEQ ID NO: 1688008 - RNA, 19 nt, Artificial Sequence
  Description of Artificial Sequence: Synthetic oligonucleotide
uaugauguucugucauuuc

SEQ ID NO: 1688009 - RNA, 19 nt, Artificial Sequence
  Description of Artificial Sequence: Synthetic oligonucleotide
uaguuaugagcaagacucu

SEQ ID NO: 1688010 - RNA, 19 nt, Artificial Sequence
  Description of Artificial Sequence: Synthetic oligonucleotide
aacauuuguaagagucucu

SEQ ID NO: 1688011 - RNA, 19 nt, Artificial Sequence
  Description of Artificial Sequence: Synthetic oligonucleotide
uucaugcacuguuugacuu

SEQ ID NO: 1688012 - RNA, 19 nt, Artificial Sequence
  Description of Artificial Sequence: Synthetic oligonucleotide
gacgguuucgaaacaaauc

SEQ ID NO: 1688013 - RNA, 19 nt, Artificial Sequence
  Description of Artificial Sequence: Synthetic oligonucleotide
ugcacuucuaugccacacu

SEQ ID NO: 1688014 - RNA, 19 nt, Artificial Sequence
  Description of Artificial Sequence: Synthetic oligonucleotide
cuucuaugccacacuuagg

SEQ ID NO: 1688015 - RNA, 19 nt, Artificial Sequence
  Description of Artificial Sequence: Synthetic oligonucleotide
uagucaaagccaacuucac

SEQ ID NO: 1688016 - RNA, 19 nt, Artificial Sequence
  Description of Artificial Sequence: Synthetic oligonucleotide
ucaagugcauccagcugac

SEQ ID NO: 1688017 - RNA, 19 nt, Artificial Sequence
  Description of Artificial Sequence: Synthetic oligonucleotide
aagagucucucguaucauu

SEQ ID NO: 1688018 - RNA, 19 nt, Artificial Sequence
  Description of Artificial Sequence: Synthetic oligonucleotide
ugcacacucaucccagcgu

SEQ ID NO: 1688019 - RNA, 19 nt, Artificial Sequence
  Description of Artificial Sequence: Synthetic oligonucleotide
ugcugucuaaagagcauuc

SEQ ID NO: 1688020 - RNA, 19 nt, Artificial Sequence
  Description of Artificial Sequence: Synthetic oligonucleotide
augucagcuuaugauguuc

SEQ ID NO: 1688021 - RNA, 19 nt, Artificial Sequence
  Description of Artificial Sequence: Synthetic oligonucleotide
uaauaacagaagacguguu

SEQ ID NO: 1688022 - RNA, 19 nt, Artificial Sequence
  Description of Artificial Sequence: Synthetic oligonucleotide
ugaggaugacuaauaccaa

SEQ ID NO: 1688023 - RNA, 19 nt, Artificial Sequence
  Description of Artificial Sequence: Synthetic oligonucleotide
ugguugguaucuugaguug

SEQ ID NO: 1688024 - RNA, 19 nt, Artificial Sequence
  Description of Artificial Sequence: Synthetic oligonucleotide
agcugccuccccaugauac

SEQ ID NO: 1688025 - RNA, 19 nt, Artificial Sequence
  Description of Artificial Sequence: Synthetic oligonucleotide
agguuuaacaaaacagagu

SEQ ID NO: 1688026 - RNA, 19 nt, Artificial Sequence
  Description of Artificial Sequence: Synthetic oligonucleotide
auucuuagucauucucagu

SEQ ID NO: 1688027 - RNA, 19 nt, Artificial Sequence
  Description of Artificial Sequence: Synthetic oligonucleotide
ugugaacugggaccacaca

SEQ ID NO: 1688028 - RNA, 19 nt, Artificial Sequence
  Description of Artificial Sequence: Synthetic oligonucleotide
aaucgagcuaacaggccug

SEQ ID NO: 1688029 - RNA, 19 nt, Artificial Sequence
  Description of Artificial Sequence: Synthetic oligonucleotide
uaacauucaugcacuguuu

SEQ ID NO: 1688030 - RNA, 19 nt, Artificial Sequence
  Description of Artificial Sequence: Synthetic oligonucleotide
cuacuagcagcaccaguag

SEQ ID NO: 1688031 - RNA, 19 nt, Artificial Sequence
  Description of Artificial Sequence: Synthetic oligonucleotide
acagacugaaccucuuaaa

SEQ ID NO: 1688032 - RNA, 19 nt, Artificial Sequence
  Description of Artificial Sequence: Synthetic oligonucleotide
uggaguagauggugaaccu

SEQ ID NO: 1688033 - RNA, 19 nt, Artificial Sequence
  Description of Artificial Sequence: Synthetic oligonucleotide
auggugugaggcauugugg

SEQ ID NO: 1688034 - RNA, 19 nt, Artificial Sequence
  Description of Artificial Sequence: Synthetic oligonucleotide
cuuaugaugucagcuuaug

SEQ ID NO: 1688035 - RNA, 19 nt, Artificial Sequence
  Description of Artificial Sequence: Synthetic oligonucleotide
guaccgugaacauuuguaa

SEQ ID NO: 1688036 - RNA, 19 nt, Artificial Sequence
  Description of Artificial Sequence: Synthetic oligonucleotide
gugaacugggaccacacaa

SEQ ID NO: 1688037 - RNA, 19 nt, Artificial Sequence
  Description of Artificial Sequence: Synthetic oligonucleotide
aucaauuccccuaauuuua

SEQ ID NO: 1688038 - RNA, 19 nt, Artificial Sequence
  Description of Artificial Sequence: Synthetic oligonucleotide
gacuaauaccaaggacugg

SEQ ID NO: 1688039 - RNA, 19 nt, Artificial Sequence
  Description of Artificial Sequence: Synthetic oligonucleotide
uaaaggauucuuagucauu

SEQ ID NO: 1688040 - RNA, 19 nt, Artificial Sequence
  Description of Artificial Sequence: Synthetic oligonucleotide
gaaguuuaucaauuccccu

SEQ ID NO: 1688041 - RNA, 19 nt, Artificial Sequence
  Description of Artificial Sequence: Synthetic oligonucleotide
acugugcacuucuaugcca

SEQ ID NO: 1688042 - RNA, 19 nt, Artificial Sequence
  Description of Artificial Sequence: Synthetic oligonucleotide
aaagaguaccgugaacauu

SEQ ID NO: 1688043 - RNA, 19 nt, Artificial Sequence
  Description of Artificial Sequence: Synthetic oligonucleotide
uaucuugaguuggaagaga

SEQ ID NO: 1688044 - RNA, 19 nt, Artificial Sequence
  Description of Artificial Sequence: Synthetic oligonucleotide
aguccaaccauaacauuca

SEQ ID NO: 1688045 - RNA, 19 nt, Artificial Sequence
  Description of Artificial Sequence: Synthetic oligonucleotide
aagcacugugugaacuggg

SEQ ID NO: 1688046 - RNA, 19 nt, Artificial Sequence
  Description of Artificial Sequence: Synthetic oligonucleotide
agcuuaugauguucuguca

SEQ ID NO: 1688047 - RNA, 19 nt, Artificial Sequence
  Description of Artificial Sequence: Synthetic oligonucleotide
aaauaggaagcuacuuuua

SEQ ID NO: 1688048 - RNA, 19 nt, Artificial Sequence
  Description of Artificial Sequence: Synthetic oligonucleotide
aguaccgugaacauuugua

SEQ ID NO: 1688049 - RNA, 19 nt, Artificial Sequence
  Description of Artificial Sequence: Synthetic oligonucleotide
cugggaccacacaagcugc

SEQ ID NO: 1688050 - RNA, 19 nt, Artificial Sequence
  Description of Artificial Sequence: Synthetic oligonucleotide
cacugugcacuucuaugcc

SEQ ID NO: 1688051 - RNA, 19 nt, Artificial Sequence
  Description of Artificial Sequence: Synthetic oligonucleotide
uguucaguucaagugcauc

SEQ ID NO: 1688052 - RNA, 19 nt, Artificial Sequence
  Description of Artificial Sequence: Synthetic oligonucleotide
auacagaaacucaagcaaa

SEQ ID NO: 1688053 - RNA, 19 nt, Artificial Sequence
  Description of Artificial Sequence: Synthetic oligonucleotide
guuugcaaacuuucccuuc

SEQ ID NO: 1688054 - RNA, 19 nt, Artificial Sequence
  Description of Artificial Sequence: Synthetic oligonucleotide
gaagcuuaguuaugagcaa

SEQ ID NO: 1688055 - RNA, 19 nt, Artificial Sequence
  Description of Artificial Sequence: Synthetic oligonucleotide
gcacuguuugacuuucccg

SEQ ID NO: 1688056 - RNA, 19 nt, Artificial Sequence
  Description of Artificial Sequence: Synthetic oligonucleotide
uuaguagcuugaccuuuuc

SEQ ID NO: 1688057 - RNA, 19 nt, Artificial Sequence
  Description of Artificial Sequence: Synthetic oligonucleotide
agguaaaguacaugucaaa

SEQ ID NO: 1688058 - RNA, 19 nt, Artificial Sequence
  Description of Artificial Sequence: Synthetic oligonucleotide
cuugacauuaaaagaugua

SEQ ID NO: 1688059 - RNA, 19 nt, Artificial Sequence
  Description of Artificial Sequence: Synthetic oligonucleotide
uaggacagguaaaguacau

SEQ ID NO: 1688060 - RNA, 19 nt, Artificial Sequence
  Description of Artificial Sequence: Synthetic oligonucleotide
ggaagcuacuuuuaacaca

SEQ ID NO: 1688061 - RNA, 19 nt, Artificial Sequence
  Description of Artificial Sequence: Synthetic oligonucleotide
ugauacugaggaugacuaa

SEQ ID NO: 1688062 - RNA, 19 nt, Artificial Sequence
  Description of Artificial Sequence: Synthetic oligonucleotide
ccccuaauuuuaaaagucc

SEQ ID NO: 1688063 - RNA, 19 nt, Artificial Sequence
  Description of Artificial Sequence: Synthetic oligonucleotide
ggacacaauacauccuccc

SEQ ID NO: 1688064 - RNA, 19 nt, Artificial Sequence
  Description of Artificial Sequence: Synthetic oligonucleotide
agggcacugucacuacuag

SEQ ID NO: 1688065 - RNA, 19 nt, Artificial Sequence
  Description of Artificial Sequence: Synthetic oligonucleotide
auguucuggggcuugcaaa

SEQ ID NO: 1688066 - RNA, 19 nt, Artificial Sequence
  Description of Artificial Sequence: Synthetic oligonucleotide
uuucccgaaagaugcuaaa

SEQ ID NO: 1688067 - RNA, 19 nt, Artificial Sequence
  Description of Artificial Sequence: Synthetic oligonucleotide
ggacagguaaaguacaugu

SEQ ID NO: 1688068 - RNA, 19 nt, Artificial Sequence
  Description of Artificial Sequence: Synthetic oligonucleotide
cuuaguuaugagcaagacu

SEQ ID NO: 1688069 - RNA, 19 nt, Artificial Sequence
  Description of Artificial Sequence: Synthetic oligonucleotide
augcuaaaugacgguuucg

SEQ ID NO: 1688070 - RNA, 19 nt, Artificial Sequence
  Description of Artificial Sequence: Synthetic oligonucleotide
gacagguaaaguacauguc

SEQ ID NO: 1688071 - RNA, 19 nt, Artificial Sequence
  Description of Artificial Sequence: Synthetic oligonucleotide
caaauaggaagcuacuuuu

SEQ ID NO: 1688072 - RNA, 19 nt, Artificial Sequence
  Description of Artificial Sequence: Synthetic oligonucleotide
aaacucaagcaaagccaug

SEQ ID NO: 1688073 - RNA, 19 nt, Artificial Sequence
  Description of Artificial Sequence: Synthetic oligonucleotide
cagagaagcucccuauuca

SEQ ID NO: 1688074 - RNA, 19 nt, Artificial Sequence
  Description of Artificial Sequence: Synthetic oligonucleotide
gaaacucaagcaaagccau

SEQ ID NO: 1688075 - RNA, 19 nt, Artificial Sequence
  Description of Artificial Sequence: Synthetic oligonucleotide
aggacagguaaaguacaug

SEQ ID NO: 1688076 - RNA, 19 nt, Artificial Sequence
  Description of Artificial Sequence: Synthetic oligonucleotide
gugguugguaucuugaguu

SEQ ID NO: 1688077 - RNA, 19 nt, Artificial Sequence
  Description of Artificial Sequence: Synthetic oligonucleotide
ucuagaaccugagguuuaa

SEQ ID NO: 1688078 - RNA, 19 nt, Artificial Sequence
  Description of Artificial Sequence: Synthetic oligonucleotide
gucuuaugaugucagcuua

SEQ ID NO: 1688079 - RNA, 19 nt, Artificial Sequence
  Description of Artificial Sequence: Synthetic oligonucleotide
uagcuugaccuuuucuaua

SEQ ID NO: 1688080 - RNA, 19 nt, Artificial Sequence
  Description of Artificial Sequence: Synthetic oligonucleotide
ucaugcacuguuugacuuu

SEQ ID NO: 1688081 - RNA, 19 nt, Artificial Sequence
  Description of Artificial Sequence: Synthetic oligonucleotide
ggauucuuagucauucuca

SEQ ID NO: 1688082 - RNA, 19 nt, Artificial Sequence
  Description of Artificial Sequence: Synthetic oligonucleotide
acucuagaaccugagguuu

SEQ ID NO: 1688083 - RNA, 19 nt, Artificial Sequence
  Description of Artificial Sequence: Synthetic oligonucleotide
ggaugacuaauaccaagga

SEQ ID NO: 1688084 - RNA, 19 nt, Artificial Sequence
  Description of Artificial Sequence: Synthetic oligonucleotide
aucuugaguuggaagagaa

SEQ ID NO: 1688085 - RNA, 19 nt, Artificial Sequence
  Description of Artificial Sequence: Synthetic oligonucleotide
agcuuaguuaugagcaaga

SEQ ID NO: 1688086 - RNA, 19 nt, Artificial Sequence
  Description of Artificial Sequence: Synthetic oligonucleotide
aucgagcuaacaggccugg

SEQ ID NO: 1688087 - RNA, 19 nt, Artificial Sequence
  Description of Artificial Sequence: Synthetic oligonucleotide
uucccgaaagaugcuaaau

SEQ ID NO: 1688088 - RNA, 19 nt, Artificial Sequence
  Description of Artificial Sequence: Synthetic oligonucleotide
cacacuuaggacagguaaa

SEQ ID NO: 1688089 - RNA, 19 nt, Artificial Sequence
  Description of Artificial Sequence: Synthetic oligonucleotide
cacuucagguucaaaucga

SEQ ID NO: 1688090 - RNA, 19 nt, Artificial Sequence
  Description of Artificial Sequence: Synthetic oligonucleotide
caugcacuguuugacuuuc

SEQ ID NO: 1688091 - RNA, 19 nt, Artificial Sequence
  Description of Artificial Sequence: Synthetic oligonucleotide
ggcauugugggccacucuc

SEQ ID NO: 1688092 - RNA, 19 nt, Artificial Sequence
  Description of Artificial Sequence: Synthetic oligonucleotide
cugacuuauccucagcacu

SEQ ID NO: 1688093 - RNA, 19 nt, Artificial Sequence
  Description of Artificial Sequence: Synthetic oligonucleotide
aguuaugagcaagacucua

SEQ ID NO: 1688094 - RNA, 19 nt, Artificial Sequence
  Description of Artificial Sequence: Synthetic oligonucleotide
cccgaaagaugcuaaauga

SEQ ID NO: 1688095 - RNA, 19 nt, Artificial Sequence
  Description of Artificial Sequence: Synthetic oligonucleotide
ugugcacuucuaugccaca

SEQ ID NO: 1688096 - RNA, 19 nt, Artificial Sequence
  Description of Artificial Sequence: Synthetic oligonucleotide
cagugauuagaauuuaguu

SEQ ID NO: 1688097 - RNA, 19 nt, Artificial Sequence
  Description of Artificial Sequence: Synthetic oligonucleotide
cuuucccgaaagaugcuaa

SEQ ID NO: 1688098 - RNA, 19 nt, Artificial Sequence
  Description of Artificial Sequence: Synthetic oligonucleotide
gaggcguucugucaaaguu

SEQ ID NO: 1688099 - RNA, 19 nt, Artificial Sequence
  Description of Artificial Sequence: Synthetic oligonucleotide
cauguagucaaagccaacu

SEQ ID NO: 1688100 - RNA, 19 nt, Artificial Sequence
  Description of Artificial Sequence: Synthetic oligonucleotide
gacucuagaaccugagguu

SEQ ID NO: 1688101 - RNA, 19 nt, Artificial Sequence
  Description of Artificial Sequence: Synthetic oligonucleotide
cguaucauuuaguuuccag

SEQ ID NO: 1688102 - RNA, 19 nt, Artificial Sequence
  Description of Artificial Sequence: Synthetic oligonucleotide
uaagagucucucguaucau

SEQ ID NO: 1688103 - RNA, 19 nt, Artificial Sequence
  Description of Artificial Sequence: Synthetic oligonucleotide
gcugacuuauccucagcac

SEQ ID NO: 1688104 - RNA, 19 nt, Artificial Sequence
  Description of Artificial Sequence: Synthetic oligonucleotide
agaugcuaaaugacgguuu

SEQ ID NO: 1688105 - RNA, 19 nt, Artificial Sequence
  Description of Artificial Sequence: Synthetic oligonucleotide
caaggacugggacacaaua

SEQ ID NO: 1688106 - RNA, 19 nt, Artificial Sequence
  Description of Artificial Sequence: Synthetic oligonucleotide
ugaaugccaaggaggcguu

SEQ ID NO: 1688107 - RNA, 19 nt, Artificial Sequence
  Description of Artificial Sequence: Synthetic oligonucleotide
caguuacagacugaaccuc

SEQ ID NO: 1688108 - RNA, 19 nt, Artificial Sequence
  Description of Artificial Sequence: Synthetic oligonucleotide
ucacuacuagcagcaccag

SEQ ID NO: 1688109 - RNA, 19 nt, Artificial Sequence
  Description of Artificial Sequence: Synthetic oligonucleotide
caacuucacgaauguucug

SEQ ID NO: 1688110 - RNA, 19 nt, Artificial Sequence
  Description of Artificial Sequence: Synthetic oligonucleotide
ggugugaggcauugugggc

SEQ ID NO: 1688111 - RNA, 19 nt, Artificial Sequence
  Description of Artificial Sequence: Synthetic oligonucleotide
ucuuugccacugcuggcua

SEQ ID NO: 1688112 - RNA, 19 nt, Artificial Sequence
  Description of Artificial Sequence: Synthetic oligonucleotide
ggaaacaaugugcugucua

SEQ ID NO: 1688113 - RNA, 19 nt, Artificial Sequence
  Description of Artificial Sequence: Synthetic oligonucleotide
ggcguucugucaaaguuug

SEQ ID NO: 1688114 - RNA, 19 nt, Artificial Sequence
  Description of Artificial Sequence: Synthetic oligonucleotide
acccaugaaagcacugugu

SEQ ID NO: 1688115 - RNA, 19 nt, Artificial Sequence
  Description of Artificial Sequence: Synthetic oligonucleotide
caaggaggcguucugucaa

SEQ ID NO: 1688116 - RNA, 19 nt, Artificial Sequence
  Description of Artificial Sequence: Synthetic oligonucleotide
agacugacuggcccacagu

SEQ ID NO: 1688117 - RNA, 19 nt, Artificial Sequence
  Description of Artificial Sequence: Synthetic oligonucleotide
auacugaggaugacuaaua

SEQ ID NO: 1688118 - RNA, 19 nt, Artificial Sequence
  Description of Artificial Sequence: Synthetic oligonucleotide
uccaauggugugaggcauu

SEQ ID NO: 1688119 - RNA, 19 nt, Artificial Sequence
  Description of Artificial Sequence: Synthetic oligonucleotide
caugauacugaggaugacu

SEQ ID NO: 1688120 - RNA, 19 nt, Artificial Sequence
  Description of Artificial Sequence: Synthetic oligonucleotide
augccaaggaggcguucug

SEQ ID NO: 1688121 - RNA, 19 nt, Artificial Sequence
  Description of Artificial Sequence: Synthetic oligonucleotide
acagcauaccacaguuucu

SEQ ID NO: 1688122 - RNA, 19 nt, Artificial Sequence
  Description of Artificial Sequence: Synthetic oligonucleotide
auccaauggugugaggcau

SEQ ID NO: 1688123 - RNA, 19 nt, Artificial Sequence
  Description of Artificial Sequence: Synthetic oligonucleotide
gaacccaugaaagcacugu

SEQ ID NO: 1688124 - RNA, 19 nt, Artificial Sequence
  Description of Artificial Sequence: Synthetic oligonucleotide
ccugagguuuaacaaaaca

SEQ ID NO: 1688125 - RNA, 19 nt, Artificial Sequence
  Description of Artificial Sequence: Synthetic oligonucleotide
gagucucucguaucauuua

SEQ ID NO: 1688126 - RNA, 19 nt, Artificial Sequence
  Description of Artificial Sequence: Synthetic oligonucleotide
cguuccucuaaccaucuac

SEQ ID NO: 1688127 - RNA, 19 nt, Artificial Sequence
  Description of Artificial Sequence: Synthetic oligonucleotide
gccacagacaugcuuucac

SEQ ID NO: 1688128 - RNA, 19 nt, Artificial Sequence
  Description of Artificial Sequence: Synthetic oligonucleotide
gcaaagccaugccagagaa

SEQ ID NO: 1688129 - RNA, 19 nt, Artificial Sequence
  Description of Artificial Sequence: Synthetic oligonucleotide
gguuucgaaacaaaucaua

SEQ ID NO: 1688130 - RNA, 19 nt, Artificial Sequence
  Description of Artificial Sequence: Synthetic oligonucleotide
ggugaaccuccauaggaaa

SEQ ID NO: 1688131 - RNA, 19 nt, Artificial Sequence
  Description of Artificial Sequence: Synthetic oligonucleotide
ucguaucauuuaguuucca

SEQ ID NO: 1688132 - RNA, 19 nt, Artificial Sequence
  Description of Artificial Sequence: Synthetic oligonucleotide
cauugugggccacucucca

SEQ ID NO: 1688133 - RNA, 19 nt, Artificial Sequence
  Description of Artificial Sequence: Synthetic oligonucleotide
cauucacuucugacauuuc

SEQ ID NO: 1688134 - RNA, 19 nt, Artificial Sequence
  Description of Artificial Sequence: Synthetic oligonucleotide
ccgugaacauuuguaagag

SEQ ID NO: 1688135 - RNA, 19 nt, Artificial Sequence
  Description of Artificial Sequence: Synthetic oligonucleotide
acuuucccgaaagaugcua

SEQ ID NO: 1688136 - RNA, 19 nt, Artificial Sequence
  Description of Artificial Sequence: Synthetic oligonucleotide
gaagcucccuauucaugua

SEQ ID NO: 1688137 - RNA, 19 nt, Artificial Sequence
  Description of Artificial Sequence: Synthetic oligonucleotide
acgaauguucuggggcuug

SEQ ID NO: 1688138 - RNA, 19 nt, Artificial Sequence
  Description of Artificial Sequence: Synthetic oligonucleotide
cuagaaccugagguuuaac

SEQ ID NO: 1688139 - RNA, 19 nt, Artificial Sequence
  Description of Artificial Sequence: Synthetic oligonucleotide
ucauaacaucguuccucua

SEQ ID NO: 1688140 - RNA, 19 nt, Artificial Sequence
  Description of Artificial Sequence: Synthetic oligonucleotide
ugcacacugugcacuucua

SEQ ID NO: 1688141 - RNA, 19 nt, Artificial Sequence
  Description of Artificial Sequence: Synthetic oligonucleotide
gcuuaguuaugagcaagac

SEQ ID NO: 1688142 - RNA, 19 nt, Artificial Sequence
  Description of Artificial Sequence: Synthetic oligonucleotide
cagcugacuuauccucagc

SEQ ID NO: 1688143 - RNA, 19 nt, Artificial Sequence
  Description of Artificial Sequence: Synthetic oligonucleotide
agggagaagcuuaguuaug

SEQ ID NO: 1688144 - RNA, 19 nt, Artificial Sequence
  Description of Artificial Sequence: Synthetic oligonucleotide
augacgguuucgaaacaaa

SEQ ID NO: 1688145 - RNA, 19 nt, Artificial Sequence
  Description of Artificial Sequence: Synthetic oligonucleotide
cccaugauacugaggauga

SEQ ID NO: 1688146 - RNA, 19 nt, Artificial Sequence
  Description of Artificial Sequence: Synthetic oligonucleotide
gcacugugugaacugggac

SEQ ID NO: 1688147 - RNA, 19 nt, Artificial Sequence
  Description of Artificial Sequence: Synthetic oligonucleotide
aucguuccucuaaccaucu

SEQ ID NO: 1688148 - RNA, 19 nt, Artificial Sequence
  Description of Artificial Sequence: Synthetic oligonucleotide
ggggcuugcaaaauacaga

SEQ ID NO: 1688149 - RNA, 19 nt, Artificial Sequence
  Description of Artificial Sequence: Synthetic oligonucleotide
gcuucagggagaagcuuag

SEQ ID NO: 1688150 - RNA, 19 nt, Artificial Sequence
  Description of Artificial Sequence: Synthetic oligonucleotide
gcuaaaugacgguuucgaa

SEQ ID NO: 1688151 - RNA, 19 nt, Artificial Sequence
  Description of Artificial Sequence: Synthetic oligonucleotide
agcucccuauucauguagu

SEQ ID NO: 1688152 - RNA, 19 nt, Artificial Sequence
  Description of Artificial Sequence: Synthetic oligonucleotide
gugaaccuccauaggaaaa

SEQ ID NO: 1688153 - RNA, 19 nt, Artificial Sequence
  Description of Artificial Sequence: Synthetic oligonucleotide
ccacacuuaggacagguaa

SEQ ID NO: 1688154 - RNA, 19 nt, Artificial Sequence
  Description of Artificial Sequence: Synthetic oligonucleotide
aggcguucugucaaaguuu

SEQ ID NO: 1688155 - RNA, 19 nt, Artificial Sequence
  Description of Artificial Sequence: Synthetic oligonucleotide
cauaacauucaugcacugu

SEQ ID NO: 1688156 - RNA, 19 nt, Artificial Sequence
  Description of Artificial Sequence: Synthetic oligonucleotide
gcuuaugauguucugucau

SEQ ID NO: 1688157 - RNA, 19 nt, Artificial Sequence
  Description of Artificial Sequence: Synthetic oligonucleotide
ccaacuucacgaauguucu

SEQ ID NO: 1688158 - RNA, 19 nt, Artificial Sequence
  Description of Artificial Sequence: Synthetic oligonucleotide
gaugucagcuuaugauguu

SEQ ID NO: 1688159 - RNA, 19 nt, Artificial Sequence
  Description of Artificial Sequence: Synthetic oligonucleotide
agaguaccgugaacauuug

SEQ ID NO: 1688160 - RNA, 19 nt, Artificial Sequence
  Description of Artificial Sequence: Synthetic oligonucleotide
gaguaccgugaacauuugu

SEQ ID NO: 1688161 - RNA, 19 nt, Artificial Sequence
  Description of Artificial Sequence: Synthetic oligonucleotide
cucuagaaccugagguuua

SEQ ID NO: 1688162 - RNA, 19 nt, Artificial Sequence
  Description of Artificial Sequence: Synthetic oligonucleotide
ccagugauuagaauuuagu

SEQ ID NO: 1688163 - RNA, 19 nt, Artificial Sequence
  Description of Artificial Sequence: Synthetic oligonucleotide
gagcaagacucuagaaccu

SEQ ID NO: 1688164 - RNA, 19 nt, Artificial Sequence
  Description of Artificial Sequence: Synthetic oligonucleotide
ucccagcugccuccccaug

SEQ ID NO: 1688165 - RNA, 19 nt, Artificial Sequence
  Description of Artificial Sequence: Synthetic oligonucleotide
gcauugugggccacucucc

SEQ ID NO: 1688166 - RNA, 19 nt, Artificial Sequence
  Description of Artificial Sequence: Synthetic oligonucleotide
uggcuagggcacugucacu

SEQ ID NO: 1688167 - RNA, 19 nt, Artificial Sequence
  Description of Artificial Sequence: Synthetic oligonucleotide
agagccuuguucaguucaa

SEQ ID NO: 1688168 - RNA, 19 nt, Artificial Sequence
  Description of Artificial Sequence: Synthetic oligonucleotide
ugcauccagcugacuuauc

SEQ ID NO: 1688169 - RNA, 19 nt, Artificial Sequence
  Description of Artificial Sequence: Synthetic oligonucleotide
cacuucuaugccacacuua

SEQ ID NO: 1688170 - RNA, 19 nt, Artificial Sequence
  Description of Artificial Sequence: Synthetic oligonucleotide
gcugucuaaagagcauuca

SEQ ID NO: 1688171 - RNA, 19 nt, Artificial Sequence
  Description of Artificial Sequence: Synthetic oligonucleotide
gccaaggaggcguucuguc

SEQ ID NO: 1688172 - RNA, 19 nt, Artificial Sequence
  Description of Artificial Sequence: Synthetic oligonucleotide
ucguuccucuaaccaucua

SEQ ID NO: 1688173 - RNA, 19 nt, Artificial Sequence
  Description of Artificial Sequence: Synthetic oligonucleotide
gcucccuauucauguaguc

SEQ ID NO: 1688174 - RNA, 19 nt, Artificial Sequence
  Description of Artificial Sequence: Synthetic oligonucleotide
gcauaccacaguuucuggu

SEQ ID NO: 1688175 - RNA, 19 nt, Artificial Sequence
  Description of Artificial Sequence: Synthetic oligonucleotide
ccaauggugugaggcauug

SEQ ID NO: 1688176 - RNA, 19 nt, Artificial Sequence
  Description of Artificial Sequence: Synthetic oligonucleotide
cucucguaucauuuaguuu

SEQ ID NO: 1688177 - RNA, 19 nt, Artificial Sequence
  Description of Artificial Sequence: Synthetic oligonucleotide
gcaagacucuagaaccuga

SEQ ID NO: 1688178 - RNA, 19 nt, Artificial Sequence
  Description of Artificial Sequence: Synthetic oligonucleotide
cugucacuacuagcagcac

SEQ ID NO: 1688179 - RNA, 19 nt, Artificial Sequence
  Description of Artificial Sequence: Synthetic oligonucleotide
ggcuagggcacugucacua

SEQ ID NO: 1688180 - RNA, 19 nt, Artificial Sequence
  Description of Artificial Sequence: Synthetic oligonucleotide
gcuagggcacugucacuac

SEQ ID NO: 1688181 - RNA, 19 nt, Artificial Sequence
  Description of Artificial Sequence: Synthetic oligonucleotide
gucucucguaucauuuagu

SEQ ID NO: 1688182 - RNA, 19 nt, Artificial Sequence
  Description of Artificial Sequence: Synthetic oligonucleotide
cacucaucccagcgucuca

SEQ ID NO: 1688183 - RNA, 19 nt, Artificial Sequence
  Description of Artificial Sequence: Synthetic oligonucleotide
gacuuucccgaaagaugcu

SEQ ID NO: 1688184 - RNA, 19 nt, Artificial Sequence
  Description of Artificial Sequence: Synthetic oligonucleotide
gaaaagccacagacaugcu

SEQ ID NO: 1688185 - RNA, 19 nt, Artificial Sequence
  Description of Artificial Sequence: Synthetic oligonucleotide
gcuggcuagggcacuguca

SEQ ID NO: 1688186 - RNA, 19 nt, Artificial Sequence
  Description of Artificial Sequence: Synthetic oligonucleotide
ccuggcuugaacccaugaa

SEQ ID NO: 1688187 - RNA, 19 nt, Artificial Sequence
  Description of Artificial Sequence: Synthetic oligonucleotide
guuacagacugaaccucuu

SEQ ID NO: 1688188 - RNA, 19 nt, Artificial Sequence
  Description of Artificial Sequence: Synthetic oligonucleotide
gugcugucuaaagagcauu

SEQ ID NO: 1688189 - RNA, 19 nt, Artificial Sequence
  Description of Artificial Sequence: Synthetic oligonucleotide
gcuugaccuuuucuauaaa

SEQ ID NO: 1688190 - RNA, 19 nt, Artificial Sequence
  Description of Artificial Sequence: Synthetic oligonucleotide
ggaggcguucugucaaagu

SEQ ID NO: 1688191 - RNA, 19 nt, Artificial Sequence
  Description of Artificial Sequence: Synthetic oligonucleotide
ccccaauggugcacacagc

SEQ ID NO: 1688192 - RNA, 19 nt, Artificial Sequence
  Description of Artificial Sequence: Synthetic oligonucleotide
cagcggcugagccacacau

SEQ ID NO: 1688193 - RNA, 19 nt, Artificial Sequence
  Description of Artificial Sequence: Synthetic oligonucleotide
uggcccacaguggcauuuu

SEQ ID NO: 1688194 - RNA, 19 nt, Artificial Sequence
  Description of Artificial Sequence: Synthetic oligonucleotide
gccuggcuugaacccauga

SEQ ID NO: 1688195 - RNA, 19 nt, Artificial Sequence
  Description of Artificial Sequence: Synthetic oligonucleotide
gugcauccagcugacuuau

SEQ ID NO: 1688196 - RNA, 19 nt, Artificial Sequence
  Description of Artificial Sequence: Synthetic oligonucleotide
ccaugauacugaggaugac

SEQ ID NO: 1688197 - RNA, 19 nt, Artificial Sequence
  Description of Artificial Sequence: Synthetic oligonucleotide
gugaggcauugugggccac

SEQ ID NO: 1688198 - RNA, 19 nt, Artificial Sequence
  Description of Artificial Sequence: Synthetic oligonucleotide
caauggugugaggcauugu

SEQ ID NO: 1688199 - RNA, 19 nt, Artificial Sequence
  Description of Artificial Sequence: Synthetic oligonucleotide
cgugaacauuuguaagagu

SEQ ID NO: 1688200 - RNA, 19 nt, Artificial Sequence
  Description of Artificial Sequence: Synthetic oligonucleotide
cacgaauguucuggggcuu

SEQ ID NO: 1688201 - RNA, 19 nt, Artificial Sequence
  Description of Artificial Sequence: Synthetic oligonucleotide
cgguuucgaaacaaaucau

SEQ ID NO: 1688202 - RNA, 19 nt, Artificial Sequence
  Description of Artificial Sequence: Synthetic oligonucleotide
uauuaaaugaacuggaucg

SEQ ID NO: 1688203 - RNA, 19 nt, Artificial Sequence
  Description of Artificial Sequence: Synthetic oligonucleotide
aaaucuuagcuacugaccg

SEQ ID NO: 1688204 - RNA, 19 nt, Artificial Sequence
  Description of Artificial Sequence: Synthetic oligonucleotide
agaaagaucauuuaauaag

SEQ ID NO: 1688205 - RNA, 19 nt, Artificial Sequence
  Description of Artificial Sequence: Synthetic oligonucleotide
uucacuacaauccaauagg

SEQ ID NO: 1688206 - RNA, 19 nt, Artificial Sequence
  Description of Artificial Sequence: Synthetic oligonucleotide
auaaauguucaauucgacc

SEQ ID NO: 1688207 - RNA, 19 nt, Artificial Sequence
  Description of Artificial Sequence: Synthetic oligonucleotide
uucaauaugagccugugga

SEQ ID NO: 1688208 - RNA, 19 nt, Artificial Sequence
  Description of Artificial Sequence: Synthetic oligonucleotide
agucacaugaauuuugccg

SEQ ID NO: 1688209 - RNA, 19 nt, Artificial Sequence
  Description of Artificial Sequence: Synthetic oligonucleotide
uuugacaaaagcgaagugg

SEQ ID NO: 1688210 - RNA, 19 nt, Artificial Sequence
  Description of Artificial Sequence: Synthetic oligonucleotide
uuucgaguaacaaaauuag

SEQ ID NO: 1688211 - RNA, 19 nt, Artificial Sequence
  Description of Artificial Sequence: Synthetic oligonucleotide
ucgaguaacaaaauuagcu

SEQ ID NO: 1688212 - RNA, 19 nt, Artificial Sequence
  Description of Artificial Sequence: Synthetic oligonucleotide
agauuucccaaacugaaac

SEQ ID NO: 1688213 - RNA, 19 nt, Artificial Sequence
  Description of Artificial Sequence: Synthetic oligonucleotide
acaagucuuaauugcaucc

SEQ ID NO: 1688214 - RNA, 19 nt, Artificial Sequence
  Description of Artificial Sequence: Synthetic oligonucleotide
auuauaagccucucgaaag

SEQ ID NO: 1688215 - RNA, 19 nt, Artificial Sequence
  Description of Artificial Sequence: Synthetic oligonucleotide
uucacggacacuaugaacu

SEQ ID NO: 1688216 - RNA, 19 nt, Artificial Sequence
  Description of Artificial Sequence: Synthetic oligonucleotide
ucgguaguauuucagaucc

SEQ ID NO: 1688217 - RNA, 19 nt, Artificial Sequence
  Description of Artificial Sequence: Synthetic oligonucleotide
uuuucgaguaacaaaauua

SEQ ID NO: 1688218 - RNA, 19 nt, Artificial Sequence
  Description of Artificial Sequence: Synthetic oligonucleotide
ucuaggacucucaugauug

SEQ ID NO: 1688219 - RNA, 19 nt, Artificial Sequence
  Description of Artificial Sequence: Synthetic oligonucleotide
aauugcauccagaagccgc

SEQ ID NO: 1688220 - RNA, 19 nt, Artificial Sequence
  Description of Artificial Sequence: Synthetic oligonucleotide
aaguaaaaugaguauguga

SEQ ID NO: 1688221 - RNA, 19 nt, Artificial Sequence
  Description of Artificial Sequence: Synthetic oligonucleotide
uaaaucuuagcuacugacc

SEQ ID NO: 1688222 - RNA, 19 nt, Artificial Sequence
  Description of Artificial Sequence: Synthetic oligonucleotide
uaaaugaacuggaucgccg

SEQ ID NO: 1688223 - RNA, 19 nt, Artificial Sequence
  Description of Artificial Sequence: Synthetic oligonucleotide
aaaccuguggcccagcucu

SEQ ID NO: 1688224 - RNA, 19 nt, Artificial Sequence
  Description of Artificial Sequence: Synthetic oligonucleotide
uuaauugcauccagaagcc

SEQ ID NO: 1688225 - RNA, 19 nt, Artificial Sequence
  Description of Artificial Sequence: Synthetic oligonucleotide
acuacaauccaauaggcau

SEQ ID NO: 1688226 - RNA, 19 nt, Artificial Sequence
  Description of Artificial Sequence: Synthetic oligonucleotide
uaggcauaaaguuuggcug

SEQ ID NO: 1688227 - RNA, 19 nt, Artificial Sequence
  Description of Artificial Sequence: Synthetic oligonucleotide
ugguucaucauuuuguaac

SEQ ID NO: 1688228 - RNA, 19 nt, Artificial Sequence
  Description of Artificial Sequence: Synthetic oligonucleotide
aauccaauaggcauaaagu

SEQ ID NO: 1688229 - RNA, 19 nt, Artificial Sequence
  Description of Artificial Sequence: Synthetic oligonucleotide
gaauuuauaaggccacaag

SEQ ID NO: 1688230 - RNA, 19 nt, Artificial Sequence
  Description of Artificial Sequence: Synthetic oligonucleotide
uuuguagaggugcucaggc

SEQ ID NO: 1688231 - RNA, 19 nt, Artificial Sequence
  Description of Artificial Sequence: Synthetic oligonucleotide
ugauugaagagaaugccgu

SEQ ID NO: 1688232 - RNA, 19 nt, Artificial Sequence
  Description of Artificial Sequence: Synthetic oligonucleotide
acuaguugaggccugguag

SEQ ID NO: 1688233 - RNA, 19 nt, Artificial Sequence
  Description of Artificial Sequence: Synthetic oligonucleotide
aguagcuaugacaaagucc

SEQ ID NO: 1688234 - RNA, 19 nt, Artificial Sequence
  Description of Artificial Sequence: Synthetic oligonucleotide
ugcaccauaguccaugucu

SEQ ID NO: 1688235 - RNA, 19 nt, Artificial Sequence
  Description of Artificial Sequence: Synthetic oligonucleotide
ugauuucccaaaaucauuc

SEQ ID NO: 1688236 - RNA, 19 nt, Artificial Sequence
  Description of Artificial Sequence: Synthetic oligonucleotide
aguaaaaugaguaugugau

SEQ ID NO: 1688237 - RNA, 19 nt, Artificial Sequence
  Description of Artificial Sequence: Synthetic oligonucleotide
auuaaaugaacuggaucgc

SEQ ID NO: 1688238 - RNA, 19 nt, Artificial Sequence
  Description of Artificial Sequence: Synthetic oligonucleotide
ugaguaugugauuuuaaac

SEQ ID NO: 1688239 - RNA, 19 nt, Artificial Sequence
  Description of Artificial Sequence: Synthetic oligonucleotide
ucuuauauaaauguucaau

SEQ ID NO: 1688240 - RNA, 19 nt, Artificial Sequence
  Description of Artificial Sequence: Synthetic oligonucleotide
ucuagugacauaauuucaa

SEQ ID NO: 1688241 - RNA, 19 nt, Artificial Sequence
  Description of Artificial Sequence: Synthetic oligonucleotide
uucaauucgaccuguauua

SEQ ID NO: 1688242 - RNA, 19 nt, Artificial Sequence
  Description of Artificial Sequence: Synthetic oligonucleotide
ugucuagugacauaauuuc

SEQ ID NO: 1688243 - RNA, 19 nt, Artificial Sequence
  Description of Artificial Sequence: Synthetic oligonucleotide
aaucuuagcuacugaccgg

SEQ ID NO: 1688244 - RNA, 19 nt, Artificial Sequence
  Description of Artificial Sequence: Synthetic oligonucleotide
gaggguuuauggucgaugg

SEQ ID NO: 1688245 - RNA, 19 nt, Artificial Sequence
  Description of Artificial Sequence: Synthetic oligonucleotide
agugcaacuucauguuucc

SEQ ID NO: 1688246 - RNA, 19 nt, Artificial Sequence
  Description of Artificial Sequence: Synthetic oligonucleotide
uauaaauguucaauucgac

SEQ ID NO: 1688247 - RNA, 19 nt, Artificial Sequence
  Description of Artificial Sequence: Synthetic oligonucleotide
guaaaucuuagcuacugac

SEQ ID NO: 1688248 - RNA, 19 nt, Artificial Sequence
  Description of Artificial Sequence: Synthetic oligonucleotide
aguuguccaagguaaaucu

SEQ ID NO: 1688249 - RNA, 19 nt, Artificial Sequence
  Description of Artificial Sequence: Synthetic oligonucleotide
aaagcgaaguggccuuagc

SEQ ID NO: 1688250 - RNA, 19 nt, Artificial Sequence
  Description of Artificial Sequence: Synthetic oligonucleotide
accgcaaagagauuauaag

SEQ ID NO: 1688251 - RNA, 19 nt, Artificial Sequence
  Description of Artificial Sequence: Synthetic oligonucleotide
uguagaggugcucaggcgu

SEQ ID NO: 1688252 - RNA, 19 nt, Artificial Sequence
  Description of Artificial Sequence: Synthetic oligonucleotide
gauuucucaacaaauucac

SEQ ID NO: 1688253 - RNA, 19 nt, Artificial Sequence
  Description of Artificial Sequence: Synthetic oligonucleotide
aaaugaacuggaucgccgu

SEQ ID NO: 1688254 - RNA, 19 nt, Artificial Sequence
  Description of Artificial Sequence: Synthetic oligonucleotide
aaauucacggacacuauga

SEQ ID NO: 1688255 - RNA, 19 nt, Artificial Sequence
  Description of Artificial Sequence: Synthetic oligonucleotide
ucgaaaguucacuacaauc

SEQ ID NO: 1688256 - RNA, 19 nt, Artificial Sequence
  Description of Artificial Sequence: Synthetic oligonucleotide
ucacuacaauccaauaggc

SEQ ID NO: 1688257 - RNA, 19 nt, Artificial Sequence
  Description of Artificial Sequence: Synthetic oligonucleotide
aauuuugccggucucuuua

SEQ ID NO: 1688258 - RNA, 19 nt, Artificial Sequence
  Description of Artificial Sequence: Synthetic oligonucleotide
agcgaaguggccuuagcuc

SEQ ID NO: 1688259 - RNA, 19 nt, Artificial Sequence
  Description of Artificial Sequence: Synthetic oligonucleotide
uucgaccuguauuaaauga

SEQ ID NO: 1688260 - RNA, 19 nt, Artificial Sequence
  Description of Artificial Sequence: Synthetic oligonucleotide
cauaaaguuuggcugcucc

SEQ ID NO: 1688261 - RNA, 19 nt, Artificial Sequence
  Description of Artificial Sequence: Synthetic oligonucleotide
ucucaacaaauucacggac

SEQ ID NO: 1688262 - RNA, 19 nt, Artificial Sequence
  Description of Artificial Sequence: Synthetic oligonucleotide
auucacggacacuaugaac

SEQ ID NO: 1688263 - RNA, 19 nt, Artificial Sequence
  Description of Artificial Sequence: Synthetic oligonucleotide
uucgaguaacaaaauuagc

SEQ ID NO: 1688264 - RNA, 19 nt, Artificial Sequence
  Description of Artificial Sequence: Synthetic oligonucleotide
gauuauaagccucucgaaa

SEQ ID NO: 1688265 - RNA, 19 nt, Artificial Sequence
  Description of Artificial Sequence: Synthetic oligonucleotide
aaugccguucaccgcaaag

SEQ ID NO: 1688266 - RNA, 19 nt, Artificial Sequence
  Description of Artificial Sequence: Synthetic oligonucleotide
aucuuagcuacugaccggc

SEQ ID NO: 1688267 - RNA, 19 nt, Artificial Sequence
  Description of Artificial Sequence: Synthetic oligonucleotide
uguauuaaaugaacuggau

SEQ ID NO: 1688268 - RNA, 19 nt, Artificial Sequence
  Description of Artificial Sequence: Synthetic oligonucleotide
cucgucaaaggcaacgcgg

SEQ ID NO: 1688269 - RNA, 19 nt, Artificial Sequence
  Description of Artificial Sequence: Synthetic oligonucleotide
uuauaagccucucgaaagu

SEQ ID NO: 1688270 - RNA, 19 nt, Artificial Sequence
  Description of Artificial Sequence: Synthetic oligonucleotide
aguaugugauuuuaaacuu

SEQ ID NO: 1688271 - RNA, 19 nt, Artificial Sequence
  Description of Artificial Sequence: Synthetic oligonucleotide
aauucgaccuguauuaaau

SEQ ID NO: 1688272 - RNA, 19 nt, Artificial Sequence
  Description of Artificial Sequence: Synthetic oligonucleotide
uuaaaugaacuggaucgcc

SEQ ID NO: 1688273 - RNA, 19 nt, Artificial Sequence
  Description of Artificial Sequence: Synthetic oligonucleotide
auauaaauguucaauucga

SEQ ID NO: 1688274 - RNA, 19 nt, Artificial Sequence
  Description of Artificial Sequence: Synthetic oligonucleotide
cauagccucgacauagucc

SEQ ID NO: 1688275 - RNA, 19 nt, Artificial Sequence
  Description of Artificial Sequence: Synthetic oligonucleotide
ucggcuugcaccaucuccc

SEQ ID NO: 1688276 - RNA, 19 nt, Artificial Sequence
  Description of Artificial Sequence: Synthetic oligonucleotide
cauacaguucacuaguuga

SEQ ID NO: 1688277 - RNA, 19 nt, Artificial Sequence
  Description of Artificial Sequence: Synthetic oligonucleotide
uggaucgccguacaauucc

SEQ ID NO: 1688278 - RNA, 19 nt, Artificial Sequence
  Description of Artificial Sequence: Synthetic oligonucleotide
aaguugucuagugacauaa

SEQ ID NO: 1688279 - RNA, 19 nt, Artificial Sequence
  Description of Artificial Sequence: Synthetic oligonucleotide
aaaucauucagaggagccu

SEQ ID NO: 1688280 - RNA, 19 nt, Artificial Sequence
  Description of Artificial Sequence: Synthetic oligonucleotide
ucguuuggcguccagauuu

SEQ ID NO: 1688281 - RNA, 19 nt, Artificial Sequence
  Description of Artificial Sequence: Synthetic oligonucleotide
agagaaugccguucaccgc

SEQ ID NO: 1688282 - RNA, 19 nt, Artificial Sequence
  Description of Artificial Sequence: Synthetic oligonucleotide
cuuggauagaaaggggugg

SEQ ID NO: 1688283 - RNA, 19 nt, Artificial Sequence
  Description of Artificial Sequence: Synthetic oligonucleotide
uagugacauaauuucaagu

SEQ ID NO: 1688284 - RNA, 19 nt, Artificial Sequence
  Description of Artificial Sequence: Synthetic oligonucleotide
cuugcacuuuuccauacag

SEQ ID NO: 1688285 - RNA, 19 nt, Artificial Sequence
  Description of Artificial Sequence: Synthetic oligonucleotide
aagcgaaguggccuuagcu

SEQ ID NO: 1688286 - RNA, 19 nt, Artificial Sequence
  Description of Artificial Sequence: Synthetic oligonucleotide
gacauaguccuuggcaugg

SEQ ID NO: 1688287 - RNA, 19 nt, Artificial Sequence
  Description of Artificial Sequence: Synthetic oligonucleotide
acagucacaugaauuuugc

SEQ ID NO: 1688288 - RNA, 19 nt, Artificial Sequence
  Description of Artificial Sequence: Synthetic oligonucleotide
aauucacggacacuaugaa

SEQ ID NO: 1688289 - RNA, 19 nt, Artificial Sequence
  Description of Artificial Sequence: Synthetic oligonucleotide
guagcuaugacaaaguccu

SEQ ID NO: 1688290 - RNA, 19 nt, Artificial Sequence
  Description of Artificial Sequence: Synthetic oligonucleotide
aguguacucugcuaaguca

SEQ ID NO: 1688291 - RNA, 19 nt, Artificial Sequence
  Description of Artificial Sequence: Synthetic oligonucleotide
uucagauccacagucacau

SEQ ID NO: 1688292 - RNA, 19 nt, Artificial Sequence
  Description of Artificial Sequence: Synthetic oligonucleotide
uuauaaggccacaagucuu

SEQ ID NO: 1688293 - RNA, 19 nt, Artificial Sequence
  Description of Artificial Sequence: Synthetic oligonucleotide
uuuacuaggcaggugcugu

SEQ ID NO: 1688294 - RNA, 19 nt, Artificial Sequence
  Description of Artificial Sequence: Synthetic oligonucleotide
ucgaccuguauuaaaugaa

SEQ ID NO: 1688295 - RNA, 19 nt, Artificial Sequence
  Description of Artificial Sequence: Synthetic oligonucleotide
uuccccaguagcuaugaca

SEQ ID NO: 1688296 - RNA, 19 nt, Artificial Sequence
  Description of Artificial Sequence: Synthetic oligonucleotide
uuggucgguaguauuucag

SEQ ID NO: 1688297 - RNA, 19 nt, Artificial Sequence
  Description of Artificial Sequence: Synthetic oligonucleotide
ugccguucaccgcaaagag

SEQ ID NO: 1688298 - RNA, 19 nt, Artificial Sequence
  Description of Artificial Sequence: Synthetic oligonucleotide
ucaaaggcaacgcggggcu

SEQ ID NO: 1688299 - RNA, 19 nt, Artificial Sequence
  Description of Artificial Sequence: Synthetic oligonucleotide
ccuguauuaaaugaacugg

SEQ ID NO: 1688300 - RNA, 19 nt, Artificial Sequence
  Description of Artificial Sequence: Synthetic oligonucleotide
aguccacuucaguuggucg

SEQ ID NO: 1688301 - RNA, 19 nt, Artificial Sequence
  Description of Artificial Sequence: Synthetic oligonucleotide
caucauuuuguaacaucag

SEQ ID NO: 1688302 - RNA, 19 nt, Artificial Sequence
  Description of Artificial Sequence: Synthetic oligonucleotide
uuguagaggugcucaggcg

SEQ ID NO: 1688303 - RNA, 19 nt, Artificial Sequence
  Description of Artificial Sequence: Synthetic oligonucleotide
uggucgauggucucaggag

SEQ ID NO: 1688304 - RNA, 19 nt, Artificial Sequence
  Description of Artificial Sequence: Synthetic oligonucleotide
caaaaucauucagaggagc

SEQ ID NO: 1688305 - RNA, 19 nt, Artificial Sequence
  Description of Artificial Sequence: Synthetic oligonucleotide
caaggugccaacuccauca

SEQ ID NO: 1688306 - RNA, 19 nt, Artificial Sequence
  Description of Artificial Sequence: Synthetic oligonucleotide
ugacaaaagcgaaguggcc

SEQ ID NO: 1688307 - RNA, 19 nt, Artificial Sequence
  Description of Artificial Sequence: Synthetic oligonucleotide
ucucuuuacaucugcccac

SEQ ID NO: 1688308 - RNA, 19 nt, Artificial Sequence
  Description of Artificial Sequence: Synthetic oligonucleotide
ucgccguacaauuccauga

SEQ ID NO: 1688309 - RNA, 19 nt, Artificial Sequence
  Description of Artificial Sequence: Synthetic oligonucleotide
auuuugccggucucuuuac

SEQ ID NO: 1688310 - RNA, 19 nt, Artificial Sequence
  Description of Artificial Sequence: Synthetic oligonucleotide
ucucgaaaguucacuacaa

SEQ ID NO: 1688311 - RNA, 19 nt, Artificial Sequence
  Description of Artificial Sequence: Synthetic oligonucleotide
aguaacaaaauuagcuccu

SEQ ID NO: 1688312 - RNA, 19 nt, Artificial Sequence
  Description of Artificial Sequence: Synthetic oligonucleotide
ggaaguccacuucaguugg

SEQ ID NO: 1688313 - RNA, 19 nt, Artificial Sequence
  Description of Artificial Sequence: Synthetic oligonucleotide
auucgaccuguauuaaaug

SEQ ID NO: 1688314 - RNA, 19 nt, Artificial Sequence
  Description of Artificial Sequence: Synthetic oligonucleotide
ucccaaacugaaacauucc

SEQ ID NO: 1688315 - RNA, 19 nt, Artificial Sequence
  Description of Artificial Sequence: Synthetic oligonucleotide
aaguccacuucaguugguc

SEQ ID NO: 1688316 - RNA, 19 nt, Artificial Sequence
  Description of Artificial Sequence: Synthetic oligonucleotide
uguucaauucgaccuguau

SEQ ID NO: 1688317 - RNA, 19 nt, Artificial Sequence
  Description of Artificial Sequence: Synthetic oligonucleotide
aaaggcaacgcggggcuuc

SEQ ID NO: 1688318 - RNA, 19 nt, Artificial Sequence
  Description of Artificial Sequence: Synthetic oligonucleotide
caaauucacggacacuaug

SEQ ID NO: 1688319 - RNA, 19 nt, Artificial Sequence
  Description of Artificial Sequence: Synthetic oligonucleotide
ucaauaugagccuguggau

SEQ ID NO: 1688320 - RNA, 19 nt, Artificial Sequence
  Description of Artificial Sequence: Synthetic oligonucleotide
uuuauggucgauggucuca

SEQ ID NO: 1688321 - RNA, 19 nt, Artificial Sequence
  Description of Artificial Sequence: Synthetic oligonucleotide
acaugaauuuugccggucu

SEQ ID NO: 1688322 - RNA, 19 nt, Artificial Sequence
  Description of Artificial Sequence: Synthetic oligonucleotide
uuauggucgauggucucag

SEQ ID NO: 1688323 - RNA, 19 nt, Artificial Sequence
  Description of Artificial Sequence: Synthetic oligonucleotide
agcucuuagcuguggggac

SEQ ID NO: 1688324 - RNA, 19 nt, Artificial Sequence
  Description of Artificial Sequence: Synthetic oligonucleotide
acuaugaacuuccccagua

SEQ ID NO: 1688325 - RNA, 19 nt, Artificial Sequence
  Description of Artificial Sequence: Synthetic oligonucleotide
ugaacuggaucgccguaca

SEQ ID NO: 1688326 - RNA, 19 nt, Artificial Sequence
  Description of Artificial Sequence: Synthetic oligonucleotide
agucgaggguuuauggucg

SEQ ID NO: 1688327 - RNA, 19 nt, Artificial Sequence
  Description of Artificial Sequence: Synthetic oligonucleotide
uggucgguaguauuucaga

SEQ ID NO: 1688328 - RNA, 19 nt, Artificial Sequence
  Description of Artificial Sequence: Synthetic oligonucleotide
ccgcaaagagauuauaagc

SEQ ID NO: 1688329 - RNA, 19 nt, Artificial Sequence
  Description of Artificial Sequence: Synthetic oligonucleotide
agcucgucaaaggcaacgc

SEQ ID NO: 1688330 - RNA, 19 nt, Artificial Sequence
  Description of Artificial Sequence: Synthetic oligonucleotide
cucaugagcuccacaucgg

SEQ ID NO: 1688331 - RNA, 19 nt, Artificial Sequence
  Description of Artificial Sequence: Synthetic oligonucleotide
ucucguuuggcguccagau

SEQ ID NO: 1688332 - RNA, 19 nt, Artificial Sequence
  Description of Artificial Sequence: Synthetic oligonucleotide
uaauugcauccagaagccg

SEQ ID NO: 1688333 - RNA, 19 nt, Artificial Sequence
  Description of Artificial Sequence: Synthetic oligonucleotide
aaaagcgaaguggccuuag

SEQ ID NO: 1688334 - RNA, 19 nt, Artificial Sequence
  Description of Artificial Sequence: Synthetic oligonucleotide
auagggcgaccuuggauag

SEQ ID NO: 1688335 - RNA, 19 nt, Artificial Sequence
  Description of Artificial Sequence: Synthetic oligonucleotide
uucuaggacucucaugauu

SEQ ID NO: 1688336 - RNA, 19 nt, Artificial Sequence
  Description of Artificial Sequence: Synthetic oligonucleotide
agguaaaucuuagcuacug

SEQ ID NO: 1688337 - RNA, 19 nt, Artificial Sequence
  Description of Artificial Sequence: Synthetic oligonucleotide
cacacaauggucuuuccaa

SEQ ID NO: 1688338 - RNA, 19 nt, Artificial Sequence
  Description of Artificial Sequence: Synthetic oligonucleotide
cagucgaggguuuaugguc

SEQ ID NO: 1688339 - RNA, 19 nt, Artificial Sequence
  Description of Artificial Sequence: Synthetic oligonucleotide
auaagccucucgaaaguuc

SEQ ID NO: 1688340 - RNA, 19 nt, Artificial Sequence
  Description of Artificial Sequence: Synthetic oligonucleotide
ugccggucucuuuacaucu

SEQ ID NO: 1688341 - RNA, 19 nt, Artificial Sequence
  Description of Artificial Sequence: Synthetic oligonucleotide
aguuggucgguaguauuuc

SEQ ID NO: 1688342 - RNA, 19 nt, Artificial Sequence
  Description of Artificial Sequence: Synthetic oligonucleotide
agaauuuauaaggccacaa

SEQ ID NO: 1688343 - RNA, 19 nt, Artificial Sequence
  Description of Artificial Sequence: Synthetic oligonucleotide
cucaacaaauucacggaca

SEQ ID NO: 1688344 - RNA, 19 nt, Artificial Sequence
  Description of Artificial Sequence: Synthetic oligonucleotide
ccguacaauuccaugaacc

SEQ ID NO: 1688345 - RNA, 19 nt, Artificial Sequence
  Description of Artificial Sequence: Synthetic oligonucleotide
acuggaucgccguacaauu

SEQ ID NO: 1688346 - RNA, 19 nt, Artificial Sequence
  Description of Artificial Sequence: Synthetic oligonucleotide
auggucgauggucucagga

SEQ ID NO: 1688347 - RNA, 19 nt, Artificial Sequence
  Description of Artificial Sequence: Synthetic oligonucleotide
uuuuacuaggcaggugcug

SEQ ID NO: 1688348 - RNA, 19 nt, Artificial Sequence
  Description of Artificial Sequence: Synthetic oligonucleotide
uugcacuuuuccauacagu

SEQ ID NO: 1688349 - RNA, 19 nt, Artificial Sequence
  Description of Artificial Sequence: Synthetic oligonucleotide
cauagggcgaccuuggaua

SEQ ID NO: 1688350 - RNA, 19 nt, Artificial Sequence
  Description of Artificial Sequence: Synthetic oligonucleotide
uguggggacgacacaggca

SEQ ID NO: 1688351 - RNA, 19 nt, Artificial Sequence
  Description of Artificial Sequence: Synthetic oligonucleotide
cagauccacagucacauga

SEQ ID NO: 1688352 - RNA, 19 nt, Artificial Sequence
  Description of Artificial Sequence: Synthetic oligonucleotide
aacgcggggcuuccaguuc

SEQ ID NO: 1688353 - RNA, 19 nt, Artificial Sequence
  Description of Artificial Sequence: Synthetic oligonucleotide
ggcgaccuuggauagaaag

SEQ ID NO: 1688354 - RNA, 19 nt, Artificial Sequence
  Description of Artificial Sequence: Synthetic oligonucleotide
uacuaggcaggugcugucg

SEQ ID NO: 1688355 - RNA, 19 nt, Artificial Sequence
  Description of Artificial Sequence: Synthetic oligonucleotide
aacuggaucgccguacaau

SEQ ID NO: 1688356 - RNA, 19 nt, Artificial Sequence
  Description of Artificial Sequence: Synthetic oligonucleotide
aaugaacuggaucgccgua

SEQ ID NO: 1688357 - RNA, 19 nt, Artificial Sequence
  Description of Artificial Sequence: Synthetic oligonucleotide
aaaguucacuacaauccaa

SEQ ID NO: 1688358 - RNA, 19 nt, Artificial Sequence
  Description of Artificial Sequence: Synthetic oligonucleotide
gaccuuggauagaaagggg

SEQ ID NO: 1688359 - RNA, 19 nt, Artificial Sequence
  Description of Artificial Sequence: Synthetic oligonucleotide
aucgccguacaauuccaug

SEQ ID NO: 1688360 - RNA, 19 nt, Artificial Sequence
  Description of Artificial Sequence: Synthetic oligonucleotide
aaaucuugacauggcucug

SEQ ID NO: 1688361 - RNA, 19 nt, Artificial Sequence
  Description of Artificial Sequence: Synthetic oligonucleotide
cucucgaaaguucacuaca

SEQ ID NO: 1688362 - RNA, 19 nt, Artificial Sequence
  Description of Artificial Sequence: Synthetic oligonucleotide
uuuugccggucucuuuaca

SEQ ID NO: 1688363 - RNA, 19 nt, Artificial Sequence
  Description of Artificial Sequence: Synthetic oligonucleotide
ugagcuccacaucggcuug

SEQ ID NO: 1688364 - RNA, 19 nt, Artificial Sequence
  Description of Artificial Sequence: Synthetic oligonucleotide
cuaguugaggccugguaga

SEQ ID NO: 1688365 - RNA, 19 nt, Artificial Sequence
  Description of Artificial Sequence: Synthetic oligonucleotide
ggcagucgaggguuuaugg

SEQ ID NO: 1688366 - RNA, 19 nt, Artificial Sequence
  Description of Artificial Sequence: Synthetic oligonucleotide
caggcguugggguugguuc

SEQ ID NO: 1688367 - RNA, 19 nt, Artificial Sequence
  Description of Artificial Sequence: Synthetic oligonucleotide
ucacaugaauuuugccggu

SEQ ID NO: 1688368 - RNA, 19 nt, Artificial Sequence
  Description of Artificial Sequence: Synthetic oligonucleotide
cucaggaguggcuggacuc

SEQ ID NO: 1688369 - RNA, 19 nt, Artificial Sequence
  Description of Artificial Sequence: Synthetic oligonucleotide
uucaccgcaaagagauuau

SEQ ID NO: 1688370 - RNA, 19 nt, Artificial Sequence
  Description of Artificial Sequence: Synthetic oligonucleotide
caugaauuuugccggucuc

SEQ ID NO: 1688371 - RNA, 19 nt, Artificial Sequence
  Description of Artificial Sequence: Synthetic oligonucleotide
accuuggauagaaaggggu

SEQ ID NO: 1688372 - RNA, 19 nt, Artificial Sequence
  Description of Artificial Sequence: Synthetic oligonucleotide
gcaacuucauguuuccuuc

SEQ ID NO: 1688373 - RNA, 19 nt, Artificial Sequence
  Description of Artificial Sequence: Synthetic oligonucleotide
aguucacuacaauccaaua

SEQ ID NO: 1688374 - RNA, 19 nt, Artificial Sequence
  Description of Artificial Sequence: Synthetic oligonucleotide
caguguacucugcuaaguc

SEQ ID NO: 1688375 - RNA, 19 nt, Artificial Sequence
  Description of Artificial Sequence: Synthetic oligonucleotide
caguagcuaugacaaaguc

SEQ ID NO: 1688376 - RNA, 19 nt, Artificial Sequence
  Description of Artificial Sequence: Synthetic oligonucleotide
uaaguugucuagugacaua

SEQ ID NO: 1688377 - RNA, 19 nt, Artificial Sequence
  Description of Artificial Sequence: Synthetic oligonucleotide
uauggucgauggucucagg

SEQ ID NO: 1688378 - RNA, 19 nt, Artificial Sequence
  Description of Artificial Sequence: Synthetic oligonucleotide
auagaaagggguggucucu

SEQ ID NO: 1688379 - RNA, 19 nt, Artificial Sequence
  Description of Artificial Sequence: Synthetic oligonucleotide
uauaagccucucgaaaguu

SEQ ID NO: 1688380 - RNA, 19 nt, Artificial Sequence
  Description of Artificial Sequence: Synthetic oligonucleotide
ggacucucaugauugaaga

SEQ ID NO: 1688381 - RNA, 19 nt, Artificial Sequence
  Description of Artificial Sequence: Synthetic oligonucleotide
cuacaauccaauaggcaua

SEQ ID NO: 1688382 - RNA, 19 nt, Artificial Sequence
  Description of Artificial Sequence: Synthetic oligonucleotide
agguuugacuucauugaug

SEQ ID NO: 1688383 - RNA, 19 nt, Artificial Sequence
  Description of Artificial Sequence: Synthetic oligonucleotide
agccgcaaggugccaacuc

SEQ ID NO: 1688384 - RNA, 19 nt, Artificial Sequence
  Description of Artificial Sequence: Synthetic oligonucleotide
ucaguuggucgguaguauu

SEQ ID NO: 1688385 - RNA, 19 nt, Artificial Sequence
  Description of Artificial Sequence: Synthetic oligonucleotide
cagcucgucaaaggcaacg

SEQ ID NO: 1688386 - RNA, 19 nt, Artificial Sequence
  Description of Artificial Sequence: Synthetic oligonucleotide
ucaauucgaccuguauuaa

SEQ ID NO: 1688387 - RNA, 19 nt, Artificial Sequence
  Description of Artificial Sequence: Synthetic oligonucleotide
aagccucucgaaaguucac

SEQ ID NO: 1688388 - RNA, 19 nt, Artificial Sequence
  Description of Artificial Sequence: Synthetic oligonucleotide
agucuuaauugcauccaga

SEQ ID NO: 1688389 - RNA, 19 nt, Artificial Sequence
  Description of Artificial Sequence: Synthetic oligonucleotide
uacaucugcccacuucauu

SEQ ID NO: 1688390 - RNA, 19 nt, Artificial Sequence
  Description of Artificial Sequence: Synthetic oligonucleotide
gugcaugaaugauuucuca

SEQ ID NO: 1688391 - RNA, 19 nt, Artificial Sequence
  Description of Artificial Sequence: Synthetic oligonucleotide
gaagccgcaaggugccaac

SEQ ID NO: 1688392 - RNA, 19 nt, Artificial Sequence
  Description of Artificial Sequence: Synthetic oligonucleotide
gguaaaucuuagcuacuga

SEQ ID NO: 1688393 - RNA, 19 nt, Artificial Sequence
  Description of Artificial Sequence: Synthetic oligonucleotide
acgacacaggcagucgagg

SEQ ID NO: 1688394 - RNA, 19 nt, Artificial Sequence
  Description of Artificial Sequence: Synthetic oligonucleotide
uuacaucugcccacuucau

SEQ ID NO: 1688395 - RNA, 19 nt, Artificial Sequence
  Description of Artificial Sequence: Synthetic oligonucleotide
augccguucaccgcaaaga

SEQ ID NO: 1688396 - RNA, 19 nt, Artificial Sequence
  Description of Artificial Sequence: Synthetic oligonucleotide
ucagauccacagucacaug

SEQ ID NO: 1688397 - RNA, 19 nt, Artificial Sequence
  Description of Artificial Sequence: Synthetic oligonucleotide
ccacauagccucgacauag

SEQ ID NO: 1688398 - RNA, 19 nt, Artificial Sequence
  Description of Artificial Sequence: Synthetic oligonucleotide
cucuggaguguccccgucc

SEQ ID NO: 1688399 - RNA, 19 nt, Artificial Sequence
  Description of Artificial Sequence: Synthetic oligonucleotide
ggguuuauggucgaugguc

SEQ ID NO: 1688400 - RNA, 19 nt, Artificial Sequence
  Description of Artificial Sequence: Synthetic oligonucleotide
uuacuaggcaggugcuguc

SEQ ID NO: 1688401 - RNA, 19 nt, Artificial Sequence
  Description of Artificial Sequence: Synthetic oligonucleotide
gcuaagucaaaggaaaucu

SEQ ID NO: 1688402 - RNA, 19 nt, Artificial Sequence
  Description of Artificial Sequence: Synthetic oligonucleotide
cgaccuuggauagaaaggg

SEQ ID NO: 1688403 - RNA, 19 nt, Artificial Sequence
  Description of Artificial Sequence: Synthetic oligonucleotide
caccgcaaagagauuauaa

SEQ ID NO: 1688404 - RNA, 19 nt, Artificial Sequence
  Description of Artificial Sequence: Synthetic oligonucleotide
uccacuucaguuggucggu

SEQ ID NO: 1688405 - RNA, 19 nt, Artificial Sequence
  Description of Artificial Sequence: Synthetic oligonucleotide
guucaccgcaaagagauua

SEQ ID NO: 1688406 - RNA, 19 nt, Artificial Sequence
  Description of Artificial Sequence: Synthetic oligonucleotide
uccauagggcgaccuugga

SEQ ID NO: 1688407 - RNA, 19 nt, Artificial Sequence
  Description of Artificial Sequence: Synthetic oligonucleotide
gcucgucaaaggcaacgcg

SEQ ID NO: 1688408 - RNA, 19 nt, Artificial Sequence
  Description of Artificial Sequence: Synthetic oligonucleotide
gucgauggucucaggagug

SEQ ID NO: 1688409 - RNA, 19 nt, Artificial Sequence
  Description of Artificial Sequence: Synthetic oligonucleotide
cuggaucgccguacaauuc

SEQ ID NO: 1688410 - RNA, 19 nt, Artificial Sequence
  Description of Artificial Sequence: Synthetic oligonucleotide
aggcguugggguugguucu

SEQ ID NO: 1688411 - RNA, 19 nt, Artificial Sequence
  Description of Artificial Sequence: Synthetic oligonucleotide
agaggugcucaggcguugg

SEQ ID NO: 1688412 - RNA, 19 nt, Artificial Sequence
  Description of Artificial Sequence: Synthetic oligonucleotide
ugaggccugguagaacuuc

SEQ ID NO: 1688413 - RNA, 19 nt, Artificial Sequence
  Description of Artificial Sequence: Synthetic oligonucleotide
caauucgaccuguauuaaa

SEQ ID NO: 1688414 - RNA, 19 nt, Artificial Sequence
  Description of Artificial Sequence: Synthetic oligonucleotide
cugcaguguacucugcuaa

SEQ ID NO: 1688415 - RNA, 19 nt, Artificial Sequence
  Description of Artificial Sequence: Synthetic oligonucleotide
cagauuucccaaacugaaa

SEQ ID NO: 1688416 - RNA, 19 nt, Artificial Sequence
  Description of Artificial Sequence: Synthetic oligonucleotide
ccagcucuuagcugugggg

SEQ ID NO: 1688417 - RNA, 19 nt, Artificial Sequence
  Description of Artificial Sequence: Synthetic oligonucleotide
gccgcaaggugccaacucc

SEQ ID NO: 1688418 - RNA, 19 nt, Artificial Sequence
  Description of Artificial Sequence: Synthetic oligonucleotide
gccccagucucguuuggcg

SEQ ID NO: 1688419 - RNA, 19 nt, Artificial Sequence
  Description of Artificial Sequence: Synthetic oligonucleotide
ccuguggauucuuauauaa

SEQ ID NO: 1688420 - RNA, 19 nt, Artificial Sequence
  Description of Artificial Sequence: Synthetic oligonucleotide
cauucagaggagccuuuga

SEQ ID NO: 1688421 - RNA, 19 nt, Artificial Sequence
  Description of Artificial Sequence: Synthetic oligonucleotide
agccucucgaaaguucacu

SEQ ID NO: 1688422 - RNA, 19 nt, Artificial Sequence
  Description of Artificial Sequence: Synthetic oligonucleotide
cuugcaccaucucccucac

SEQ ID NO: 1688423 - RNA, 19 nt, Artificial Sequence
  Description of Artificial Sequence: Synthetic oligonucleotide
ucuuuacaucugcccacuu

SEQ ID NO: 1688424 - RNA, 19 nt, Artificial Sequence
  Description of Artificial Sequence: Synthetic oligonucleotide
acaaauucacggacacuau

SEQ ID NO: 1688425 - RNA, 19 nt, Artificial Sequence
  Description of Artificial Sequence: Synthetic oligonucleotide
cgaccuguauuaaaugaac

SEQ ID NO: 1688426 - RNA, 19 nt, Artificial Sequence
  Description of Artificial Sequence: Synthetic oligonucleotide
agggcgaccuuggauagaa

SEQ ID NO: 1688427 - RNA, 19 nt, Artificial Sequence
  Description of Artificial Sequence: Synthetic oligonucleotide
cuaggacucucaugauuga

SEQ ID NO: 1688428 - RNA, 19 nt, Artificial Sequence
  Description of Artificial Sequence: Synthetic oligonucleotide
gccuuugacaaaagcgaag

SEQ ID NO: 1688429 - RNA, 19 nt, Artificial Sequence
  Description of Artificial Sequence: Synthetic oligonucleotide
cagcucuuagcugugggga

SEQ ID NO: 1688430 - RNA, 19 nt, Artificial Sequence
  Description of Artificial Sequence: Synthetic oligonucleotide
uagaggugcucaggcguug

SEQ ID NO: 1688431 - RNA, 19 nt, Artificial Sequence
  Description of Artificial Sequence: Synthetic oligonucleotide
cacaugaauuuugccgguc

SEQ ID NO: 1688432 - RNA, 19 nt, Artificial Sequence
  Description of Artificial Sequence: Synthetic oligonucleotide
cagaauuuauaaggccaca

SEQ ID NO: 1688433 - RNA, 19 nt, Artificial Sequence
  Description of Artificial Sequence: Synthetic oligonucleotide
cuuagcuacugaccggcua

SEQ ID NO: 1688434 - RNA, 19 nt, Artificial Sequence
  Description of Artificial Sequence: Synthetic oligonucleotide
gguugguucucaugagcuc

SEQ ID NO: 1688435 - RNA, 19 nt, Artificial Sequence
  Description of Artificial Sequence: Synthetic oligonucleotide
cacaucggcuugcaccauc

SEQ ID NO: 1688436 - RNA, 19 nt, Artificial Sequence
  Description of Artificial Sequence: Synthetic oligonucleotide
cccaaacugaaacauucca

SEQ ID NO: 1688437 - RNA, 19 nt, Artificial Sequence
  Description of Artificial Sequence: Synthetic oligonucleotide
ucaccgcaaagagauuaua

SEQ ID NO: 1688438 - RNA, 19 nt, Artificial Sequence
  Description of Artificial Sequence: Synthetic oligonucleotide
gccucgacauaguccuugg

SEQ ID NO: 1688439 - RNA, 19 nt, Artificial Sequence
  Description of Artificial Sequence: Synthetic oligonucleotide
agucucguuuggcguccag

SEQ ID NO: 1688440 - RNA, 19 nt, Artificial Sequence
  Description of Artificial Sequence: Synthetic oligonucleotide
guucacuaguugaggccug

SEQ ID NO: 1688441 - RNA, 19 nt, Artificial Sequence
  Description of Artificial Sequence: Synthetic oligonucleotide
aggcagucgaggguuuaug

SEQ ID NO: 1688442 - RNA, 19 nt, Artificial Sequence
  Description of Artificial Sequence: Synthetic oligonucleotide
aagccgcaaggugccaacu

SEQ ID NO: 1688443 - RNA, 19 nt, Artificial Sequence
  Description of Artificial Sequence: Synthetic oligonucleotide
gaacuggaucgccguacaa

SEQ ID NO: 1688444 - RNA, 19 nt, Artificial Sequence
  Description of Artificial Sequence: Synthetic oligonucleotide
ggcaacgcggggcuuccag

SEQ ID NO: 1688445 - RNA, 19 nt, Artificial Sequence
  Description of Artificial Sequence: Synthetic oligonucleotide
auaaggccacaagucuuaa

SEQ ID NO: 1688446 - RNA, 19 nt, Artificial Sequence
  Description of Artificial Sequence: Synthetic oligonucleotide
ggauagaaagggguggucu

SEQ ID NO: 1688447 - RNA, 19 nt, Artificial Sequence
  Description of Artificial Sequence: Synthetic oligonucleotide
agaagccgcaaggugccaa

SEQ ID NO: 1688448 - RNA, 19 nt, Artificial Sequence
  Description of Artificial Sequence: Synthetic oligonucleotide
cacggacacuaugaacuuc

SEQ ID NO: 1688449 - RNA, 19 nt, Artificial Sequence
  Description of Artificial Sequence: Synthetic oligonucleotide
gucucguuuggcguccaga

SEQ ID NO: 1688450 - RNA, 19 nt, Artificial Sequence
  Description of Artificial Sequence: Synthetic oligonucleotide
uggugcccacaaaccugug

SEQ ID NO: 1688451 - RNA, 19 nt, Artificial Sequence
  Description of Artificial Sequence: Synthetic oligonucleotide
gggacgacacaggcagucg

SEQ ID NO: 1688452 - RNA, 19 nt, Artificial Sequence
  Description of Artificial Sequence: Synthetic oligonucleotide
gcguccagauuucccaaac

SEQ ID NO: 1688453 - RNA, 19 nt, Artificial Sequence
  Description of Artificial Sequence: Synthetic oligonucleotide
ccggucucuuuacaucugc

SEQ ID NO: 1688454 - RNA, 19 nt, Artificial Sequence
  Description of Artificial Sequence: Synthetic oligonucleotide
ggucgguaguauuucagau

SEQ ID NO: 1688455 - RNA, 19 nt, Artificial Sequence
  Description of Artificial Sequence: Synthetic oligonucleotide
aguugucuagugacauaau

SEQ ID NO: 1688456 - RNA, 19 nt, Artificial Sequence
  Description of Artificial Sequence: Synthetic oligonucleotide
caauaugagccuguggauu

SEQ ID NO: 1688457 - RNA, 19 nt, Artificial Sequence
  Description of Artificial Sequence: Synthetic oligonucleotide
gguucauagaaagaucauu

SEQ ID NO: 1688458 - RNA, 19 nt, Artificial Sequence
  Description of Artificial Sequence: Synthetic oligonucleotide
uggggacgacacaggcagu

SEQ ID NO: 1688459 - RNA, 19 nt, Artificial Sequence
  Description of Artificial Sequence: Synthetic oligonucleotide
ccguucaccgcaaagagau

SEQ ID NO: 1688460 - RNA, 19 nt, Artificial Sequence
  Description of Artificial Sequence: Synthetic oligonucleotide
cagccacauagccucgaca

SEQ ID NO: 1688461 - RNA, 19 nt, Artificial Sequence
  Description of Artificial Sequence: Synthetic oligonucleotide
gucgaggguuuauggucga

SEQ ID NO: 1688462 - RNA, 19 nt, Artificial Sequence
  Description of Artificial Sequence: Synthetic oligonucleotide
cucgaaaguucacuacaau

SEQ ID NO: 1688463 - RNA, 19 nt, Artificial Sequence
  Description of Artificial Sequence: Synthetic oligonucleotide
gcuacugaccggcuaauuu

SEQ ID NO: 1688464 - RNA, 19 nt, Artificial Sequence
  Description of Artificial Sequence: Synthetic oligonucleotide
ccuuugacaaaagcgaagu

SEQ ID NO: 1688465 - RNA, 19 nt, Artificial Sequence
  Description of Artificial Sequence: Synthetic oligonucleotide
caguuggucgguaguauuu

SEQ ID NO: 1688466 - RNA, 19 nt, Artificial Sequence
  Description of Artificial Sequence: Synthetic oligonucleotide
aucauucagaggagccuuu

SEQ ID NO: 1688467 - RNA, 19 nt, Artificial Sequence
  Description of Artificial Sequence: Synthetic oligonucleotide
caggaguggcuggacucug

SEQ ID NO: 1688468 - RNA, 19 nt, Artificial Sequence
  Description of Artificial Sequence: Synthetic oligonucleotide
uagggcgaccuuggauaga

SEQ ID NO: 1688469 - RNA, 19 nt, Artificial Sequence
  Description of Artificial Sequence: Synthetic oligonucleotide
ggguugguucucaugagcu

SEQ ID NO: 1688470 - RNA, 19 nt, Artificial Sequence
  Description of Artificial Sequence: Synthetic oligonucleotide
cugcuaagucaaaggaaau

SEQ ID NO: 1688471 - RNA, 19 nt, Artificial Sequence
  Description of Artificial Sequence: Synthetic oligonucleotide
gaaugccguucaccgcaaa

SEQ ID NO: 1688472 - RNA, 19 nt, Artificial Sequence
  Description of Artificial Sequence: Synthetic oligonucleotide
gccucucgaaaguucacua

SEQ ID NO: 1688473 - RNA, 19 nt, Artificial Sequence
  Description of Artificial Sequence: Synthetic oligonucleotide
gcagucgaggguuuauggu

SEQ ID NO: 1688474 - RNA, 19 nt, Artificial Sequence
  Description of Artificial Sequence: Synthetic oligonucleotide
ucuuagcuguggggacgac

SEQ ID NO: 1688475 - RNA, 19 nt, Artificial Sequence
  Description of Artificial Sequence: Synthetic oligonucleotide
caucggcuugcaccaucuc

SEQ ID NO: 1688476 - RNA, 19 nt, Artificial Sequence
  Description of Artificial Sequence: Synthetic oligonucleotide
ggggacgacacaggcaguc

SEQ ID NO: 1688477 - RNA, 19 nt, Artificial Sequence
  Description of Artificial Sequence: Synthetic oligonucleotide
ucgaggguuuauggucgau

SEQ ID NO: 1688478 - RNA, 19 nt, Artificial Sequence
  Description of Artificial Sequence: Synthetic oligonucleotide
cucuuuacaucugcccacu

SEQ ID NO: 1688479 - RNA, 19 nt, Artificial Sequence
  Description of Artificial Sequence: Synthetic oligonucleotide
guccaugucucgcgaauuu

SEQ ID NO: 1688480 - RNA, 19 nt, Artificial Sequence
  Description of Artificial Sequence: Synthetic oligonucleotide
agcuacugaccggcuaauu

SEQ ID NO: 1688481 - RNA, 19 nt, Artificial Sequence
  Description of Artificial Sequence: Synthetic oligonucleotide
ccagucucguuuggcgucc

SEQ ID NO: 1688482 - RNA, 19 nt, Artificial Sequence
  Description of Artificial Sequence: Synthetic oligonucleotide
ggaucgccguacaauucca

SEQ ID NO: 1688483 - RNA, 19 nt, Artificial Sequence
  Description of Artificial Sequence: Synthetic oligonucleotide
auguucaauucgaccugua

SEQ ID NO: 1688484 - RNA, 19 nt, Artificial Sequence
  Description of Artificial Sequence: Synthetic oligonucleotide
cauggccccagucucguuu

SEQ ID NO: 1688485 - RNA, 19 nt, Artificial Sequence
  Description of Artificial Sequence: Synthetic oligonucleotide
caccauagugcaacuucau

SEQ ID NO: 1688486 - RNA, 19 nt, Artificial Sequence
  Description of Artificial Sequence: Synthetic oligonucleotide
cuucuaggacucucaugau

SEQ ID NO: 1688487 - RNA, 19 nt, Artificial Sequence
  Description of Artificial Sequence: Synthetic oligonucleotide
augagccuguggauucuua

SEQ ID NO: 1688488 - RNA, 19 nt, Artificial Sequence
  Description of Artificial Sequence: Synthetic oligonucleotide
gaaguccacuucaguuggu

SEQ ID NO: 1688489 - RNA, 19 nt, Artificial Sequence
  Description of Artificial Sequence: Synthetic oligonucleotide
ggcguccagauuucccaaa

SEQ ID NO: 1688490 - RNA, 19 nt, Artificial Sequence
  Description of Artificial Sequence: Synthetic oligonucleotide
gaucgccguacaauuccau

SEQ ID NO: 1688491 - RNA, 19 nt, Artificial Sequence
  Description of Artificial Sequence: Synthetic oligonucleotide
guccccguccuggugccca

SEQ ID NO: 1688492 - RNA, 19 nt, Artificial Sequence
  Description of Artificial Sequence: Synthetic oligonucleotide
gcaguguacucugcuaagu

SEQ ID NO: 1688493 - RNA, 19 nt, Artificial Sequence
  Description of Artificial Sequence: Synthetic oligonucleotide
gccguucaccgcaaagaga

SEQ ID NO: 1688494 - RNA, 19 nt, Artificial Sequence
  Description of Artificial Sequence: Synthetic oligonucleotide
ccacaagucuuaauugcau

SEQ ID NO: 1688495 - RNA, 19 nt, Artificial Sequence
  Description of Artificial Sequence: Synthetic oligonucleotide
ccgcaaggugccaacucca

SEQ ID NO: 1688496 - RNA, 19 nt, Artificial Sequence
  Description of Artificial Sequence: Synthetic oligonucleotide
caacgcggggcuuccaguu

SEQ ID NO: 1688497 - RNA, 19 nt, Artificial Sequence
  Description of Artificial Sequence: Synthetic oligonucleotide
cguuuggcguccagauuuc

SEQ ID NO: 1688498 - RNA, 19 nt, Artificial Sequence
  Description of Artificial Sequence: Synthetic oligonucleotide
gccuuagcucuggaguguc

SEQ ID NO: 1688499 - RNA, 19 nt, Artificial Sequence
  Description of Artificial Sequence: Synthetic oligonucleotide
gccacauagccucgacaua

SEQ ID NO: 1688500 - RNA, 19 nt, Artificial Sequence
  Description of Artificial Sequence: Synthetic oligonucleotide
gccggucucuuuacaucug

SEQ ID NO: 1688501 - RNA, 19 nt, Artificial Sequence
  Description of Artificial Sequence: Synthetic oligonucleotide
gcucuggaguguccccguc

SEQ ID NO: 1688502 - RNA, 19 nt, Artificial Sequence
  Description of Artificial Sequence: Synthetic oligonucleotide
cucguuuggcguccagauu

SEQ ID NO: 1688503 - RNA, 19 nt, Artificial Sequence
  Description of Artificial Sequence: Synthetic oligonucleotide
ggcguugggguugguucuc

SEQ ID NO: 1688504 - RNA, 19 nt, Artificial Sequence
  Description of Artificial Sequence: Synthetic oligonucleotide
gcaacgcggggcuuccagu

SEQ ID NO: 1688505 - RNA, 19 nt, Artificial Sequence
  Description of Artificial Sequence: Synthetic oligonucleotide
gggcaccaagauuguagau

SEQ ID NO: 1688506 - RNA, 19 nt, Artificial Sequence
  Description of Artificial Sequence: Synthetic oligonucleotide
ccauagggcgaccuuggau

SEQ ID NO: 1688507 - RNA, 19 nt, Artificial Sequence
  Description of Artificial Sequence: Synthetic oligonucleotide
ggccuuagcucuggagugu

SEQ ID NO: 1688508 - RNA, 19 nt, Artificial Sequence
  Description of Artificial Sequence: Synthetic oligonucleotide
cagucucguuuggcgucca

SEQ ID NO: 1688509 - RNA, 19 nt, Artificial Sequence
  Description of Artificial Sequence: Synthetic oligonucleotide
ccccagucucguuuggcgu

SEQ ID NO: 1688510 - RNA, 19 nt, Artificial Sequence
  Description of Artificial Sequence: Synthetic oligonucleotide
cgguaguauuucagaucca

SEQ ID NO: 1688511 - RNA, 19 nt, Artificial Sequence
  Description of Artificial Sequence: Synthetic oligonucleotide
gcugcgccuuggagcaguc

SEQ ID NO: 1688512 - RNA, 19 nt, Artificial Sequence
  Description of Artificial Sequence: Synthetic oligonucleotide
cccguccuggugcccacaa

SEQ ID NO: 1688513 - RNA, 19 nt, Artificial Sequence
  Description of Artificial Sequence: Synthetic oligonucleotide
caaaggcaacgcggggcuu

SEQ ID NO: 1688514 - RNA, 19 nt, Artificial Sequence
  Description of Artificial Sequence: Synthetic oligonucleotide
cugcgccuuggagcagucu

SEQ ID NO: 1688515 - RNA, 19 nt, Artificial Sequence
  Description of Artificial Sequence: Synthetic oligonucleotide
gggcgaccuuggauagaaa

SEQ ID NO: 1688516 - RNA, 19 nt, Artificial Sequence
  Description of Artificial Sequence: Synthetic oligonucleotide
ccacuucaguuggucggua

SEQ ID NO: 1688517 - RNA, 19 nt, Artificial Sequence
  Description of Artificial Sequence: Synthetic oligonucleotide
gcauggccccagucucguu

SEQ ID NO: 1688518 - RNA, 19 nt, Artificial Sequence
  Description of Artificial Sequence: Synthetic oligonucleotide
cguugggguugguucucau

SEQ ID NO: 1688519 - RNA, 19 nt, Artificial Sequence
  Description of Artificial Sequence: Synthetic oligonucleotide
cucaggcguugggguuggu

SEQ ID NO: 1688520 - RNA, 19 nt, Artificial Sequence
  Description of Artificial Sequence: Synthetic oligonucleotide
aaguuuauaacucacccuc

SEQ ID NO: 1688521 - RNA, 19 nt, Artificial Sequence
  Description of Artificial Sequence: Synthetic oligonucleotide
cuggacaucaaauugaggg

SEQ ID NO: 1688522 - RNA, 19 nt, Artificial Sequence
  Description of Artificial Sequence: Synthetic oligonucleotide
aaaacccucguuuguaugg

SEQ ID NO: 1688523 - RNA, 19 nt, Artificial Sequence
  Description of Artificial Sequence: Synthetic oligonucleotide
agcacgaagacccaccucc

SEQ ID NO: 1688524 - RNA, 19 nt, Artificial Sequence
  Description of Artificial Sequence: Synthetic oligonucleotide
aaauagaugggaauggcag

SEQ ID NO: 1688525 - RNA, 19 nt, Artificial Sequence
  Description of Artificial Sequence: Synthetic oligonucleotide
ucugagacauaucggaccg

SEQ ID NO: 1688526 - RNA, 19 nt, Artificial Sequence
  Description of Artificial Sequence: Synthetic oligonucleotide
accaagaagaacugaaccg

SEQ ID NO: 1688527 - RNA, 19 nt, Artificial Sequence
  Description of Artificial Sequence: Synthetic oligonucleotide
agagcgugaauagagacgc

SEQ ID NO: 1688528 - RNA, 19 nt, Artificial Sequence
  Description of Artificial Sequence: Synthetic oligonucleotide
uaugguguguucaccaggg

SEQ ID NO: 1688529 - RNA, 19 nt, Artificial Sequence
  Description of Artificial Sequence: Synthetic oligonucleotide
agauccaucgccgagaguc

SEQ ID NO: 1688530 - RNA, 19 nt, Artificial Sequence
  Description of Artificial Sequence: Synthetic oligonucleotide
ucggguguagcccacauag

SEQ ID NO: 1688531 - RNA, 19 nt, Artificial Sequence
  Description of Artificial Sequence: Synthetic oligonucleotide
acuggguacucauaguggc

SEQ ID NO: 1688532 - RNA, 19 nt, Artificial Sequence
  Description of Artificial Sequence: Synthetic oligonucleotide
aagucugagacauaucgga

SEQ ID NO: 1688533 - RNA, 19 nt, Artificial Sequence
  Description of Artificial Sequence: Synthetic oligonucleotide
ucugaaauagaugggaaug

SEQ ID NO: 1688534 - RNA, 19 nt, Artificial Sequence
  Description of Artificial Sequence: Synthetic oligonucleotide
acauaucggaccgugaggc

SEQ ID NO: 1688535 - RNA, 19 nt, Artificial Sequence
  Description of Artificial Sequence: Synthetic oligonucleotide
aauagagacgcucugugua

SEQ ID NO: 1688536 - RNA, 19 nt, Artificial Sequence
  Description of Artificial Sequence: Synthetic oligonucleotide
caguacaugccaaaggagg

SEQ ID NO: 1688537 - RNA, 19 nt, Artificial Sequence
  Description of Artificial Sequence: Synthetic oligonucleotide
ucaauggucaccagccggg

SEQ ID NO: 1688538 - RNA, 19 nt, Artificial Sequence
  Description of Artificial Sequence: Synthetic oligonucleotide
acucauaguggcuaagauc

SEQ ID NO: 1688539 - RNA, 19 nt, Artificial Sequence
  Description of Artificial Sequence: Synthetic oligonucleotide
aguaaaaggacagccuggc

SEQ ID NO: 1688540 - RNA, 19 nt, Artificial Sequence
  Description of Artificial Sequence: Synthetic oligonucleotide
acaggauucagacccaaag

SEQ ID NO: 1688541 - RNA, 19 nt, Artificial Sequence
  Description of Artificial Sequence: Synthetic oligonucleotide
gauugcaaaggccaccaag

SEQ ID NO: 1688542 - RNA, 19 nt, Artificial Sequence
  Description of Artificial Sequence: Synthetic oligonucleotide
agagacuggguacucauag

SEQ ID NO: 1688543 - RNA, 19 nt, Artificial Sequence
  Description of Artificial Sequence: Synthetic oligonucleotide
accggauggagucaucgcc

SEQ ID NO: 1688544 - RNA, 19 nt, Artificial Sequence
  Description of Artificial Sequence: Synthetic oligonucleotide
cuggcuacauaucuggucc

SEQ ID NO: 1688545 - RNA, 19 nt, Artificial Sequence
  Description of Artificial Sequence: Synthetic oligonucleotide
guggcuaagauccaucgcc

SEQ ID NO: 1688546 - RNA, 19 nt, Artificial Sequence
  Description of Artificial Sequence: Synthetic oligonucleotide
auagagacgcucuguguac

SEQ ID NO: 1688547 - RNA, 19 nt, Artificial Sequence
  Description of Artificial Sequence: Synthetic oligonucleotide
agacauaucggaccgugag

SEQ ID NO: 1688548 - RNA, 19 nt, Artificial Sequence
  Description of Artificial Sequence: Synthetic oligonucleotide
aucgccgagagucaguguc

SEQ ID NO: 1688549 - RNA, 19 nt, Artificial Sequence
  Description of Artificial Sequence: Synthetic oligonucleotide
uaguggcuaagauccaucg

SEQ ID NO: 1688550 - RNA, 19 nt, Artificial Sequence
  Description of Artificial Sequence: Synthetic oligonucleotide
aucaaauugagggagggcu

SEQ ID NO: 1688551 - RNA, 19 nt, Artificial Sequence
  Description of Artificial Sequence: Synthetic oligonucleotide
uuuauaacucacccuccca

SEQ ID NO: 1688552 - RNA, 19 nt, Artificial Sequence
  Description of Artificial Sequence: Synthetic oligonucleotide
gaaucuucuacuaggcuug

SEQ ID NO: 1688553 - RNA, 19 nt, Artificial Sequence
  Description of Artificial Sequence: Synthetic oligonucleotide
acccuguccauacucaggg

SEQ ID NO: 1688554 - RNA, 19 nt, Artificial Sequence
  Description of Artificial Sequence: Synthetic oligonucleotide
auagccggaacaguugacc

SEQ ID NO: 1688555 - RNA, 19 nt, Artificial Sequence
  Description of Artificial Sequence: Synthetic oligonucleotide
agacuggguacucauagug

SEQ ID NO: 1688556 - RNA, 19 nt, Artificial Sequence
  Description of Artificial Sequence: Synthetic oligonucleotide
cacgugugaccuuucaugg

SEQ ID NO: 1688557 - RNA, 19 nt, Artificial Sequence
  Description of Artificial Sequence: Synthetic oligonucleotide
uaagauccaucgccgagag

SEQ ID NO: 1688558 - RNA, 19 nt, Artificial Sequence
  Description of Artificial Sequence: Synthetic oligonucleotide
uggcuaagauccaucgccg

SEQ ID NO: 1688559 - RNA, 19 nt, Artificial Sequence
  Description of Artificial Sequence: Synthetic oligonucleotide
aguggcuaagauccaucgc

SEQ ID NO: 1688560 - RNA, 19 nt, Artificial Sequence
  Description of Artificial Sequence: Synthetic oligonucleotide
aacuuuaaguguucugaaa

SEQ ID NO: 1688561 - RNA, 19 nt, Artificial Sequence
  Description of Artificial Sequence: Synthetic oligonucleotide
gacauaucggaccgugagg

SEQ ID NO: 1688562 - RNA, 19 nt, Artificial Sequence
  Description of Artificial Sequence: Synthetic oligonucleotide
cuagucaauggucaccagc

SEQ ID NO: 1688563 - RNA, 19 nt, Artificial Sequence
  Description of Artificial Sequence: Synthetic oligonucleotide
uggacaucaaauugaggga

SEQ ID NO: 1688564 - RNA, 19 nt, Artificial Sequence
  Description of Artificial Sequence: Synthetic oligonucleotide
ugaaauagaugggaauggc

SEQ ID NO: 1688565 - RNA, 19 nt, Artificial Sequence
  Description of Artificial Sequence: Synthetic oligonucleotide
cugaaauagaugggaaugg

SEQ ID NO: 1688566 - RNA, 19 nt, Artificial Sequence
  Description of Artificial Sequence: Synthetic oligonucleotide
aaagccaguagugccugac

SEQ ID NO: 1688567 - RNA, 19 nt, Artificial Sequence
  Description of Artificial Sequence: Synthetic oligonucleotide
ucagagcgugaauagagac

SEQ ID NO: 1688568 - RNA, 19 nt, Artificial Sequence
  Description of Artificial Sequence: Synthetic oligonucleotide
uuguaugguguguucacca

SEQ ID NO: 1688569 - RNA, 19 nt, Artificial Sequence
  Description of Artificial Sequence: Synthetic oligonucleotide
aguuuauaacucacccucc

SEQ ID NO: 1688570 - RNA, 19 nt, Artificial Sequence
  Description of Artificial Sequence: Synthetic oligonucleotide
gaagaacugaaccgugggc

SEQ ID NO: 1688571 - RNA, 19 nt, Artificial Sequence
  Description of Artificial Sequence: Synthetic oligonucleotide
uguaugguguguucaccag

SEQ ID NO: 1688572 - RNA, 19 nt, Artificial Sequence
  Description of Artificial Sequence: Synthetic oligonucleotide
augccaaaggaggagugcc

SEQ ID NO: 1688573 - RNA, 19 nt, Artificial Sequence
  Description of Artificial Sequence: Synthetic oligonucleotide
agagaggcgaccagcacgc

SEQ ID NO: 1688574 - RNA, 19 nt, Artificial Sequence
  Description of Artificial Sequence: Synthetic oligonucleotide
cagacggccaaucauguac

SEQ ID NO: 1688575 - RNA, 19 nt, Artificial Sequence
  Description of Artificial Sequence: Synthetic oligonucleotide
cagagcgugaauagagacg

SEQ ID NO: 1688576 - RNA, 19 nt, Artificial Sequence
  Description of Artificial Sequence: Synthetic oligonucleotide
auugugucuggacgguacg

SEQ ID NO: 1688577 - RNA, 19 nt, Artificial Sequence
  Description of Artificial Sequence: Synthetic oligonucleotide
uaaaacccucguuuguaug

SEQ ID NO: 1688578 - RNA, 19 nt, Artificial Sequence
  Description of Artificial Sequence: Synthetic oligonucleotide
caggauucagacccaaagc

SEQ ID NO: 1688579 - RNA, 19 nt, Artificial Sequence
  Description of Artificial Sequence: Synthetic oligonucleotide
uggucagacacucgggugu

SEQ ID NO: 1688580 - RNA, 19 nt, Artificial Sequence
  Description of Artificial Sequence: Synthetic oligonucleotide
ugugaccuuucauggaccc

SEQ ID NO: 1688581 - RNA, 19 nt, Artificial Sequence
  Description of Artificial Sequence: Synthetic oligonucleotide
auaacucacccucccauga

SEQ ID NO: 1688582 - RNA, 19 nt, Artificial Sequence
  Description of Artificial Sequence: Synthetic oligonucleotide
uucugaaauagaugggaau

SEQ ID NO: 1688583 - RNA, 19 nt, Artificial Sequence
  Description of Artificial Sequence: Synthetic oligonucleotide
uacauaucugguccaugug

SEQ ID NO: 1688584 - RNA, 19 nt, Artificial Sequence
  Description of Artificial Sequence: Synthetic oligonucleotide
ugaccuuucauggacccug

SEQ ID NO: 1688585 - RNA, 19 nt, Artificial Sequence
  Description of Artificial Sequence: Synthetic oligonucleotide
caucgccgcaguaaaaccc

SEQ ID NO: 1688586 - RNA, 19 nt, Artificial Sequence
  Description of Artificial Sequence: Synthetic oligonucleotide
agucagagcgugaauagag

SEQ ID NO: 1688587 - RNA, 19 nt, Artificial Sequence
  Description of Artificial Sequence: Synthetic oligonucleotide
gagugcccggaguaaaagg

SEQ ID NO: 1688588 - RNA, 19 nt, Artificial Sequence
  Description of Artificial Sequence: Synthetic oligonucleotide
uaucggaccgugaggcagg

SEQ ID NO: 1688589 - RNA, 19 nt, Artificial Sequence
  Description of Artificial Sequence: Synthetic oligonucleotide
uuguugaagucagagcgug

SEQ ID NO: 1688590 - RNA, 19 nt, Artificial Sequence
  Description of Artificial Sequence: Synthetic oligonucleotide
gacaucaaauugagggagg

SEQ ID NO: 1688591 - RNA, 19 nt, Artificial Sequence
  Description of Artificial Sequence: Synthetic oligonucleotide
ucgcagacggccaaucaug

SEQ ID NO: 1688592 - RNA, 19 nt, Artificial Sequence
  Description of Artificial Sequence: Synthetic oligonucleotide
auggacccuguccauacuc

SEQ ID NO: 1688593 - RNA, 19 nt, Artificial Sequence
  Description of Artificial Sequence: Synthetic oligonucleotide
gacuggguacucauagugg

SEQ ID NO: 1688594 - RNA, 19 nt, Artificial Sequence
  Description of Artificial Sequence: Synthetic oligonucleotide
gaaauagaugggaauggca

SEQ ID NO: 1688595 - RNA, 19 nt, Artificial Sequence
  Description of Artificial Sequence: Synthetic oligonucleotide
gacuggacaucaaauugag

SEQ ID NO: 1688596 - RNA, 19 nt, Artificial Sequence
  Description of Artificial Sequence: Synthetic oligonucleotide
aaauugagggagggcuugg

SEQ ID NO: 1688597 - RNA, 19 nt, Artificial Sequence
  Description of Artificial Sequence: Synthetic oligonucleotide
aguugacccggcuccaguc

SEQ ID NO: 1688598 - RNA, 19 nt, Artificial Sequence
  Description of Artificial Sequence: Synthetic oligonucleotide
ucaucgccgcaguaaaacc

SEQ ID NO: 1688599 - RNA, 19 nt, Artificial Sequence
  Description of Artificial Sequence: Synthetic oligonucleotide
ugguguguucaccaggguc

SEQ ID NO: 1688600 - RNA, 19 nt, Artificial Sequence
  Description of Artificial Sequence: Synthetic oligonucleotide
uucuacuaggcuugagaac

SEQ ID NO: 1688601 - RNA, 19 nt, Artificial Sequence
  Description of Artificial Sequence: Synthetic oligonucleotide
uugacccggcuccagucgg

SEQ ID NO: 1688602 - RNA, 19 nt, Artificial Sequence
  Description of Artificial Sequence: Synthetic oligonucleotide
gggugauugugucuggacg

SEQ ID NO: 1688603 - RNA, 19 nt, Artificial Sequence
  Description of Artificial Sequence: Synthetic oligonucleotide
acauagccggaacaguuga

SEQ ID NO: 1688604 - RNA, 19 nt, Artificial Sequence
  Description of Artificial Sequence: Synthetic oligonucleotide
acauuggcagggcugccuc

SEQ ID NO: 1688605 - RNA, 19 nt, Artificial Sequence
  Description of Artificial Sequence: Synthetic oligonucleotide
cuucuacuaggcuugagaa

SEQ ID NO: 1688606 - RNA, 19 nt, Artificial Sequence
  Description of Artificial Sequence: Synthetic oligonucleotide
auaucggaccgugaggcag

SEQ ID NO: 1688607 - RNA, 19 nt, Artificial Sequence
  Description of Artificial Sequence: Synthetic oligonucleotide
gucagagacuggcucacag

SEQ ID NO: 1688608 - RNA, 19 nt, Artificial Sequence
  Description of Artificial Sequence: Synthetic oligonucleotide
ugcccggaguaaaaggaca

SEQ ID NO: 1688609 - RNA, 19 nt, Artificial Sequence
  Description of Artificial Sequence: Synthetic oligonucleotide
agggccaaggggccaacac

SEQ ID NO: 1688610 - RNA, 19 nt, Artificial Sequence
  Description of Artificial Sequence: Synthetic oligonucleotide
aacucacccucccaugaaa

SEQ ID NO: 1688611 - RNA, 19 nt, Artificial Sequence
  Description of Artificial Sequence: Synthetic oligonucleotide
cagucggggucacagacag

SEQ ID NO: 1688612 - RNA, 19 nt, Artificial Sequence
  Description of Artificial Sequence: Synthetic oligonucleotide
guaccggauggagucaucg

SEQ ID NO: 1688613 - RNA, 19 nt, Artificial Sequence
  Description of Artificial Sequence: Synthetic oligonucleotide
ggacaucaaauugagggag

SEQ ID NO: 1688614 - RNA, 19 nt, Artificial Sequence
  Description of Artificial Sequence: Synthetic oligonucleotide
aguacaugccaaaggagga

SEQ ID NO: 1688615 - RNA, 19 nt, Artificial Sequence
  Description of Artificial Sequence: Synthetic oligonucleotide
aggcaggccaccaaggcuc

SEQ ID NO: 1688616 - RNA, 19 nt, Artificial Sequence
  Description of Artificial Sequence: Synthetic oligonucleotide
auaguggcuaagauccauc

SEQ ID NO: 1688617 - RNA, 19 nt, Artificial Sequence
  Description of Artificial Sequence: Synthetic oligonucleotide
ugccaaaggaggagugccc

SEQ ID NO: 1688618 - RNA, 19 nt, Artificial Sequence
  Description of Artificial Sequence: Synthetic oligonucleotide
aaagccacgugugaccuuu

SEQ ID NO: 1688619 - RNA, 19 nt, Artificial Sequence
  Description of Artificial Sequence: Synthetic oligonucleotide
uugugucuggacgguacgg

SEQ ID NO: 1688620 - RNA, 19 nt, Artificial Sequence
  Description of Artificial Sequence: Synthetic oligonucleotide
gaaccgugggccucagcag

SEQ ID NO: 1688621 - RNA, 19 nt, Artificial Sequence
  Description of Artificial Sequence: Synthetic oligonucleotide
uguugaagucagagcguga

SEQ ID NO: 1688622 - RNA, 19 nt, Artificial Sequence
  Description of Artificial Sequence: Synthetic oligonucleotide
guguacaccagguaggccu

SEQ ID NO: 1688623 - RNA, 19 nt, Artificial Sequence
  Description of Artificial Sequence: Synthetic oligonucleotide
cacagcggccccaaacagg

SEQ ID NO: 1688624 - RNA, 19 nt, Artificial Sequence
  Description of Artificial Sequence: Synthetic oligonucleotide
aagucagagcgugaauaga

SEQ ID NO: 1688625 - RNA, 19 nt, Artificial Sequence
  Description of Artificial Sequence: Synthetic oligonucleotide
gaagacccaccuccgcucc

SEQ ID NO: 1688626 - RNA, 19 nt, Artificial Sequence
  Description of Artificial Sequence: Synthetic oligonucleotide
aguaaaacccucguuugua

SEQ ID NO: 1688627 - RNA, 19 nt, Artificial Sequence
  Description of Artificial Sequence: Synthetic oligonucleotide
ggggccaacacaugacugg

SEQ ID NO: 1688628 - RNA, 19 nt, Artificial Sequence
  Description of Artificial Sequence: Synthetic oligonucleotide
gacgaggacaucacuccag

SEQ ID NO: 1688629 - RNA, 19 nt, Artificial Sequence
  Description of Artificial Sequence: Synthetic oligonucleotide
cagacacucggguguagcc

SEQ ID NO: 1688630 - RNA, 19 nt, Artificial Sequence
  Description of Artificial Sequence: Synthetic oligonucleotide
uguagcccacauagauugc

SEQ ID NO: 1688631 - RNA, 19 nt, Artificial Sequence
  Description of Artificial Sequence: Synthetic oligonucleotide
gacacucggguguagccca

SEQ ID NO: 1688632 - RNA, 19 nt, Artificial Sequence
  Description of Artificial Sequence: Synthetic oligonucleotide
cacaugacuggcccacagg

SEQ ID NO: 1688633 - RNA, 19 nt, Artificial Sequence
  Description of Artificial Sequence: Synthetic oligonucleotide
aacccucguuuguauggug

SEQ ID NO: 1688634 - RNA, 19 nt, Artificial Sequence
  Description of Artificial Sequence: Synthetic oligonucleotide
caaggggccaacacaugac

SEQ ID NO: 1688635 - RNA, 19 nt, Artificial Sequence
  Description of Artificial Sequence: Synthetic oligonucleotide
aaacccucguuuguauggu

SEQ ID NO: 1688636 - RNA, 19 nt, Artificial Sequence
  Description of Artificial Sequence: Synthetic oligonucleotide
gucaucgccgcaguaaaac

SEQ ID NO: 1688637 - RNA, 19 nt, Artificial Sequence
  Description of Artificial Sequence: Synthetic oligonucleotide
ugggugauugugucuggac

SEQ ID NO: 1688638 - RNA, 19 nt, Artificial Sequence
  Description of Artificial Sequence: Synthetic oligonucleotide
aagcaacuuuaaguguucu

SEQ ID NO: 1688639 - RNA, 19 nt, Artificial Sequence
  Description of Artificial Sequence: Synthetic oligonucleotide
agccaagaagcugggucgc

SEQ ID NO: 1688640 - RNA, 19 nt, Artificial Sequence
  Description of Artificial Sequence: Synthetic oligonucleotide
acgaggacaucacuccagu

SEQ ID NO: 1688641 - RNA, 19 nt, Artificial Sequence
  Description of Artificial Sequence: Synthetic oligonucleotide
gcuaagauccaucgccgag

SEQ ID NO: 1688642 - RNA, 19 nt, Artificial Sequence
  Description of Artificial Sequence: Synthetic oligonucleotide
ugucagugacagacugggc

SEQ ID NO: 1688643 - RNA, 19 nt, Artificial Sequence
  Description of Artificial Sequence: Synthetic oligonucleotide
gaggccucgagcaggaauc

SEQ ID NO: 1688644 - RNA, 19 nt, Artificial Sequence
  Description of Artificial Sequence: Synthetic oligonucleotide
ugucuggacgguacgggua

SEQ ID NO: 1688645 - RNA, 19 nt, Artificial Sequence
  Description of Artificial Sequence: Synthetic oligonucleotide
uugaagucagagcgugaau

SEQ ID NO: 1688646 - RNA, 19 nt, Artificial Sequence
  Description of Artificial Sequence: Synthetic oligonucleotide
uaacucacccucccaugaa

SEQ ID NO: 1688647 - RNA, 19 nt, Artificial Sequence
  Description of Artificial Sequence: Synthetic oligonucleotide
aauugagggagggcuugga

SEQ ID NO: 1688648 - RNA, 19 nt, Artificial Sequence
  Description of Artificial Sequence: Synthetic oligonucleotide
cggccaaucauguacuugg

SEQ ID NO: 1688649 - RNA, 19 nt, Artificial Sequence
  Description of Artificial Sequence: Synthetic oligonucleotide
caugggugauugugucugg

SEQ ID NO: 1688650 - RNA, 19 nt, Artificial Sequence
  Description of Artificial Sequence: Synthetic oligonucleotide
gccccaaacaggaaggucc

SEQ ID NO: 1688651 - RNA, 19 nt, Artificial Sequence
  Description of Artificial Sequence: Synthetic oligonucleotide
gaauagagacgcucugugu

SEQ ID NO: 1688652 - RNA, 19 nt, Artificial Sequence
  Description of Artificial Sequence: Synthetic oligonucleotide
gagucaucgccgcaguaaa

SEQ ID NO: 1688653 - RNA, 19 nt, Artificial Sequence
  Description of Artificial Sequence: Synthetic oligonucleotide
caacuuuaaguguucugaa

SEQ ID NO: 1688654 - RNA, 19 nt, Artificial Sequence
  Description of Artificial Sequence: Synthetic oligonucleotide
auacucagggcuagccagg

SEQ ID NO: 1688655 - RNA, 19 nt, Artificial Sequence
  Description of Artificial Sequence: Synthetic oligonucleotide
cucuagucaauggucacca

SEQ ID NO: 1688656 - RNA, 19 nt, Artificial Sequence
  Description of Artificial Sequence: Synthetic oligonucleotide
uggguacucauaguggcua

SEQ ID NO: 1688657 - RNA, 19 nt, Artificial Sequence
  Description of Artificial Sequence: Synthetic oligonucleotide
cuaagauccaucgccgaga

SEQ ID NO: 1688658 - RNA, 19 nt, Artificial Sequence
  Description of Artificial Sequence: Synthetic oligonucleotide
acagcggccccaaacagga

SEQ ID NO: 1688659 - RNA, 19 nt, Artificial Sequence
  Description of Artificial Sequence: Synthetic oligonucleotide
ugcacauagccggaacagu

SEQ ID NO: 1688660 - RNA, 19 nt, Artificial Sequence
  Description of Artificial Sequence: Synthetic oligonucleotide
agacccaaagccacgugug

SEQ ID NO: 1688661 - RNA, 19 nt, Artificial Sequence
  Description of Artificial Sequence: Synthetic oligonucleotide
ccacgugugaccuuucaug

SEQ ID NO: 1688662 - RNA, 19 nt, Artificial Sequence
  Description of Artificial Sequence: Synthetic oligonucleotide
uguguacaccagguaggcc

SEQ ID NO: 1688663 - RNA, 19 nt, Artificial Sequence
  Description of Artificial Sequence: Synthetic oligonucleotide
gucuggacgguacggguac

SEQ ID NO: 1688664 - RNA, 19 nt, Artificial Sequence
  Description of Artificial Sequence: Synthetic oligonucleotide
ucguuuguaugguguguuc

SEQ ID NO: 1688665 - RNA, 19 nt, Artificial Sequence
  Description of Artificial Sequence: Synthetic oligonucleotide
gaggccgacgaggacauca

SEQ ID NO: 1688666 - RNA, 19 nt, Artificial Sequence
  Description of Artificial Sequence: Synthetic oligonucleotide
uccaaagccuggcuacaua

SEQ ID NO: 1688667 - RNA, 19 nt, Artificial Sequence
  Description of Artificial Sequence: Synthetic oligonucleotide
gcgaccagcacgcacagca

SEQ ID NO: 1688668 - RNA, 19 nt, Artificial Sequence
  Description of Artificial Sequence: Synthetic oligonucleotide
ugacccggcuccagucggg

SEQ ID NO: 1688669 - RNA, 19 nt, Artificial Sequence
  Description of Artificial Sequence: Synthetic oligonucleotide
cauagccggaacaguugac

SEQ ID NO: 1688670 - RNA, 19 nt, Artificial Sequence
  Description of Artificial Sequence: Synthetic oligonucleotide
uggcuacauaucuggucca

SEQ ID NO: 1688671 - RNA, 19 nt, Artificial Sequence
  Description of Artificial Sequence: Synthetic oligonucleotide
uagagacgcucuguguaca

SEQ ID NO: 1688672 - RNA, 19 nt, Artificial Sequence
  Description of Artificial Sequence: Synthetic oligonucleotide
aaucuucuacuaggcuuga

SEQ ID NO: 1688673 - RNA, 19 nt, Artificial Sequence
  Description of Artificial Sequence: Synthetic oligonucleotide
ggaaucuucuacuaggcuu

SEQ ID NO: 1688674 - RNA, 19 nt, Artificial Sequence
  Description of Artificial Sequence: Synthetic oligonucleotide
guucugaaauagaugggaa

SEQ ID NO: 1688675 - RNA, 19 nt, Artificial Sequence
  Description of Artificial Sequence: Synthetic oligonucleotide
guacucauaguggcuaaga

SEQ ID NO: 1688676 - RNA, 19 nt, Artificial Sequence
  Description of Artificial Sequence: Synthetic oligonucleotide
uacucagggcuagccaggc

SEQ ID NO: 1688677 - RNA, 19 nt, Artificial Sequence
  Description of Artificial Sequence: Synthetic oligonucleotide
gaggcaggacuggacauca

SEQ ID NO: 1688678 - RNA, 19 nt, Artificial Sequence
  Description of Artificial Sequence: Synthetic oligonucleotide
ccggaguaaaaggacagcc

SEQ ID NO: 1688679 - RNA, 19 nt, Artificial Sequence
  Description of Artificial Sequence: Synthetic oligonucleotide
gacccaaagccacguguga

SEQ ID NO: 1688680 - RNA, 19 nt, Artificial Sequence
  Description of Artificial Sequence: Synthetic oligonucleotide
ccggauggagucaucgccg

SEQ ID NO: 1688681 - RNA, 19 nt, Artificial Sequence
  Description of Artificial Sequence: Synthetic oligonucleotide
acgugugaccuuucaugga

SEQ ID NO: 1688682 - RNA, 19 nt, Artificial Sequence
  Description of Artificial Sequence: Synthetic oligonucleotide
cccgaugagacaaggauga

SEQ ID NO: 1688683 - RNA, 19 nt, Artificial Sequence
  Description of Artificial Sequence: Synthetic oligonucleotide
uggucaccagccgggaccc

SEQ ID NO: 1688684 - RNA, 19 nt, Artificial Sequence
  Description of Artificial Sequence: Synthetic oligonucleotide
ccgacgaggacaucacucc

SEQ ID NO: 1688685 - RNA, 19 nt, Artificial Sequence
  Description of Artificial Sequence: Synthetic oligonucleotide
guagcccacauagauugca

SEQ ID NO: 1688686 - RNA, 19 nt, Artificial Sequence
  Description of Artificial Sequence: Synthetic oligonucleotide
caggcacccaagacucuag

SEQ ID NO: 1688687 - RNA, 19 nt, Artificial Sequence
  Description of Artificial Sequence: Synthetic oligonucleotide
cacgaagacccaccuccgc

SEQ ID NO: 1688688 - RNA, 19 nt, Artificial Sequence
  Description of Artificial Sequence: Synthetic oligonucleotide
gaugaccccggccaugagu

SEQ ID NO: 1688689 - RNA, 19 nt, Artificial Sequence
  Description of Artificial Sequence: Synthetic oligonucleotide
augagacaaggaugacagu

SEQ ID NO: 1688690 - RNA, 19 nt, Artificial Sequence
  Description of Artificial Sequence: Synthetic oligonucleotide
aagauccaucgccgagagu

SEQ ID NO: 1688691 - RNA, 19 nt, Artificial Sequence
  Description of Artificial Sequence: Synthetic oligonucleotide
aucgccgcaguaaaacccu

SEQ ID NO: 1688692 - RNA, 19 nt, Artificial Sequence
  Description of Artificial Sequence: Synthetic oligonucleotide
gccaaaggaggagugcccg

SEQ ID NO: 1688693 - RNA, 19 nt, Artificial Sequence
  Description of Artificial Sequence: Synthetic oligonucleotide
gcaguacaugccaaaggag

SEQ ID NO: 1688694 - RNA, 19 nt, Artificial Sequence
  Description of Artificial Sequence: Synthetic oligonucleotide
guacggguaccggauggag

SEQ ID NO: 1688695 - RNA, 19 nt, Artificial Sequence
  Description of Artificial Sequence: Synthetic oligonucleotide
cauaguuguugaagucaga

SEQ ID NO: 1688696 - RNA, 19 nt, Artificial Sequence
  Description of Artificial Sequence: Synthetic oligonucleotide
uucauggacccuguccaua

SEQ ID NO: 1688697 - RNA, 19 nt, Artificial Sequence
  Description of Artificial Sequence: Synthetic oligonucleotide
gugugaccuuucauggacc

SEQ ID NO: 1688698 - RNA, 19 nt, Artificial Sequence
  Description of Artificial Sequence: Synthetic oligonucleotide
gacgcucuguguacaccag

SEQ ID NO: 1688699 - RNA, 19 nt, Artificial Sequence
  Description of Artificial Sequence: Synthetic oligonucleotide
aagacccaccuccgcucca

SEQ ID NO: 1688700 - RNA, 19 nt, Artificial Sequence
  Description of Artificial Sequence: Synthetic oligonucleotide
aacaggauucagacccaaa

SEQ ID NO: 1688701 - RNA, 19 nt, Artificial Sequence
  Description of Artificial Sequence: Synthetic oligonucleotide
gucagagcgugaauagaga

SEQ ID NO: 1688702 - RNA, 19 nt, Artificial Sequence
  Description of Artificial Sequence: Synthetic oligonucleotide
aucggaccgugaggcaggc

SEQ ID NO: 1688703 - RNA, 19 nt, Artificial Sequence
  Description of Artificial Sequence: Synthetic oligonucleotide
ccggccaugaguccauggg

SEQ ID NO: 1688704 - RNA, 19 nt, Artificial Sequence
  Description of Artificial Sequence: Synthetic oligonucleotide
ccuggcuacauaucugguc

SEQ ID NO: 1688705 - RNA, 19 nt, Artificial Sequence
  Description of Artificial Sequence: Synthetic oligonucleotide
aggcacccaagacucuagu

SEQ ID NO: 1688706 - RNA, 19 nt, Artificial Sequence
  Description of Artificial Sequence: Synthetic oligonucleotide
acgguacggguaccggaug

SEQ ID NO: 1688707 - RNA, 19 nt, Artificial Sequence
  Description of Artificial Sequence: Synthetic oligonucleotide
augguguguucaccagggu

SEQ ID NO: 1688708 - RNA, 19 nt, Artificial Sequence
  Description of Artificial Sequence: Synthetic oligonucleotide
acccucguuuguauggugu

SEQ ID NO: 1688709 - RNA, 19 nt, Artificial Sequence
  Description of Artificial Sequence: Synthetic oligonucleotide
gugacagacugggcuugcg

SEQ ID NO: 1688710 - RNA, 19 nt, Artificial Sequence
  Description of Artificial Sequence: Synthetic oligonucleotide
ccccgaugagacaaggaug

SEQ ID NO: 1688711 - RNA, 19 nt, Artificial Sequence
  Description of Artificial Sequence: Synthetic oligonucleotide
auccaucgccgagagucag

SEQ ID NO: 1688712 - RNA, 19 nt, Artificial Sequence
  Description of Artificial Sequence: Synthetic oligonucleotide
gauccaucgccgagaguca

SEQ ID NO: 1688713 - RNA, 19 nt, Artificial Sequence
  Description of Artificial Sequence: Synthetic oligonucleotide
agccacgugugaccuuuca

SEQ ID NO: 1688714 - RNA, 19 nt, Artificial Sequence
  Description of Artificial Sequence: Synthetic oligonucleotide
ggagugcccggaguaaaag

SEQ ID NO: 1688715 - RNA, 19 nt, Artificial Sequence
  Description of Artificial Sequence: Synthetic oligonucleotide
ccacauaguuguugaaguc

SEQ ID NO: 1688716 - RNA, 19 nt, Artificial Sequence
  Description of Artificial Sequence: Synthetic oligonucleotide
gagacuggguacucauagu

SEQ ID NO: 1688717 - RNA, 19 nt, Artificial Sequence
  Description of Artificial Sequence: Synthetic oligonucleotide
aggccgacgaggacaucac

SEQ ID NO: 1688718 - RNA, 19 nt, Artificial Sequence
  Description of Artificial Sequence: Synthetic oligonucleotide
aagagacuggguacucaua

SEQ ID NO: 1688719 - RNA, 19 nt, Artificial Sequence
  Description of Artificial Sequence: Synthetic oligonucleotide
cauaucggaccgugaggca

SEQ ID NO: 1688720 - RNA, 19 nt, Artificial Sequence
  Description of Artificial Sequence: Synthetic oligonucleotide
gacccggcuccagucgggg

SEQ ID NO: 1688721 - RNA, 19 nt, Artificial Sequence
  Description of Artificial Sequence: Synthetic oligonucleotide
cacguccagcagcacgaag

SEQ ID NO: 1688722 - RNA, 19 nt, Artificial Sequence
  Description of Artificial Sequence: Synthetic oligonucleotide
uggagucaucgccgcagua

SEQ ID NO: 1688723 - RNA, 19 nt, Artificial Sequence
  Description of Artificial Sequence: Synthetic oligonucleotide
acucggguguagcccacau

SEQ ID NO: 1688724 - RNA, 19 nt, Artificial Sequence
  Description of Artificial Sequence: Synthetic oligonucleotide
gaacaggauucagacccaa

SEQ ID NO: 1688725 - RNA, 19 nt, Artificial Sequence
  Description of Artificial Sequence: Synthetic oligonucleotide
gugaauagagacgcucugu

SEQ ID NO: 1688726 - RNA, 19 nt, Artificial Sequence
  Description of Artificial Sequence: Synthetic oligonucleotide
ccaccuccgcuccaugucg

SEQ ID NO: 1688727 - RNA, 19 nt, Artificial Sequence
  Description of Artificial Sequence: Synthetic oligonucleotide
gugcccggaguaaaaggac

SEQ ID NO: 1688728 - RNA, 19 nt, Artificial Sequence
  Description of Artificial Sequence: Synthetic oligonucleotide
cagacccaaagccacgugu

SEQ ID NO: 1688729 - RNA, 19 nt, Artificial Sequence
  Description of Artificial Sequence: Synthetic oligonucleotide
aggacagccuggccucagu

SEQ ID NO: 1688730 - RNA, 19 nt, Artificial Sequence
  Description of Artificial Sequence: Synthetic oligonucleotide
cccaagacucuagucaaug

SEQ ID NO: 1688731 - RNA, 19 nt, Artificial Sequence
  Description of Artificial Sequence: Synthetic oligonucleotide
acuggggcggccgggauuu

SEQ ID NO: 1688732 - RNA, 19 nt, Artificial Sequence
  Description of Artificial Sequence: Synthetic oligonucleotide
ggcggccgggauuugaaga

SEQ ID NO: 1688733 - RNA, 19 nt, Artificial Sequence
  Description of Artificial Sequence: Synthetic oligonucleotide
gaggagugcccggaguaaa

SEQ ID NO: 1688734 - RNA, 19 nt, Artificial Sequence
  Description of Artificial Sequence: Synthetic oligonucleotide
ccaaggggccaacacauga

SEQ ID NO: 1688735 - RNA, 19 nt, Artificial Sequence
  Description of Artificial Sequence: Synthetic oligonucleotide
gaccgugaggcaggccacc

SEQ ID NO: 1688736 - RNA, 19 nt, Artificial Sequence
  Description of Artificial Sequence: Synthetic oligonucleotide
ucgccgcaguaaaacccuc

SEQ ID NO: 1688737 - RNA, 19 nt, Artificial Sequence
  Description of Artificial Sequence: Synthetic oligonucleotide
aagccacgugugaccuuuc

SEQ ID NO: 1688738 - RNA, 19 nt, Artificial Sequence
  Description of Artificial Sequence: Synthetic oligonucleotide
cccacagguggcuucccag

SEQ ID NO: 1688739 - RNA, 19 nt, Artificial Sequence
  Description of Artificial Sequence: Synthetic oligonucleotide
cgugaauagagacgcucug

SEQ ID NO: 1688740 - RNA, 19 nt, Artificial Sequence
  Description of Artificial Sequence: Synthetic oligonucleotide
gucgcagacggccaaucau

SEQ ID NO: 1688741 - RNA, 19 nt, Artificial Sequence
  Description of Artificial Sequence: Synthetic oligonucleotide
ggcuaagauccaucgccga

SEQ ID NO: 1688742 - RNA, 19 nt, Artificial Sequence
  Description of Artificial Sequence: Synthetic oligonucleotide
ucccagggacgcccgcgac

SEQ ID NO: 1688743 - RNA, 19 nt, Artificial Sequence
  Description of Artificial Sequence: Synthetic oligonucleotide
gacauuggcagggcugccu

SEQ ID NO: 1688744 - RNA, 19 nt, Artificial Sequence
  Description of Artificial Sequence: Synthetic oligonucleotide
cccucguuuguauggugug

SEQ ID NO: 1688745 - RNA, 19 nt, Artificial Sequence
  Description of Artificial Sequence: Synthetic oligonucleotide
gccgacgaggacaucacuc

SEQ ID NO: 1688746 - RNA, 19 nt, Artificial Sequence
  Description of Artificial Sequence: Synthetic oligonucleotide
gcacgaagacccaccuccg

SEQ ID NO: 1688747 - RNA, 19 nt, Artificial Sequence
  Description of Artificial Sequence: Synthetic oligonucleotide
ggaagagacuggguacuca

SEQ ID NO: 1688748 - RNA, 19 nt, Artificial Sequence
  Description of Artificial Sequence: Synthetic oligonucleotide
gacgguacggguaccggau

SEQ ID NO: 1688749 - RNA, 19 nt, Artificial Sequence
  Description of Artificial Sequence: Synthetic oligonucleotide
gccucgagcaggaaucuuc

SEQ ID NO: 1688750 - RNA, 19 nt, Artificial Sequence
  Description of Artificial Sequence: Synthetic oligonucleotide
ccuugcaggaggccgacga

SEQ ID NO: 1688751 - RNA, 19 nt, Artificial Sequence
  Description of Artificial Sequence: Synthetic oligonucleotide
gucagacacucggguguag

SEQ ID NO: 1688752 - RNA, 19 nt, Artificial Sequence
  Description of Artificial Sequence: Synthetic oligonucleotide
ccagggacgcccgcgaccc

SEQ ID NO: 1688753 - RNA, 19 nt, Artificial Sequence
  Description of Artificial Sequence: Synthetic oligonucleotide
gacccaccuccgcuccaug

SEQ ID NO: 1688754 - RNA, 19 nt, Artificial Sequence
  Description of Artificial Sequence: Synthetic oligonucleotide
gcuagccaggcacccaaga

SEQ ID NO: 1688755 - RNA, 19 nt, Artificial Sequence
  Description of Artificial Sequence: Synthetic oligonucleotide
cagcacgaagacccaccuc

SEQ ID NO: 1688756 - RNA, 19 nt, Artificial Sequence
  Description of Artificial Sequence: Synthetic oligonucleotide
acacucggguguagcccac

SEQ ID NO: 1688757 - RNA, 19 nt, Artificial Sequence
  Description of Artificial Sequence: Synthetic oligonucleotide
gcuuguggucagacacucg

SEQ ID NO: 1688758 - RNA, 19 nt, Artificial Sequence
  Description of Artificial Sequence: Synthetic oligonucleotide
gcaugcaguacaugccaaa

SEQ ID NO: 1688759 - RNA, 19 nt, Artificial Sequence
  Description of Artificial Sequence: Synthetic oligonucleotide
ccaucgccgagagucagug

SEQ ID NO: 1688760 - RNA, 19 nt, Artificial Sequence
  Description of Artificial Sequence: Synthetic oligonucleotide
ggucgcagacggccaauca

SEQ ID NO: 1688761 - RNA, 19 nt, Artificial Sequence
  Description of Artificial Sequence: Synthetic oligonucleotide
aggagugcccggaguaaaa

SEQ ID NO: 1688762 - RNA, 19 nt, Artificial Sequence
  Description of Artificial Sequence: Synthetic oligonucleotide
cugaaccgugggccucagc

SEQ ID NO: 1688763 - RNA, 19 nt, Artificial Sequence
  Description of Artificial Sequence: Synthetic oligonucleotide
cauaguggcuaagauccau

SEQ ID NO: 1688764 - RNA, 19 nt, Artificial Sequence
  Description of Artificial Sequence: Synthetic oligonucleotide
caaagccaguagugccuga

SEQ ID NO: 1688765 - RNA, 19 nt, Artificial Sequence
  Description of Artificial Sequence: Synthetic oligonucleotide
agucaucgccgcaguaaaa

SEQ ID NO: 1688766 - RNA, 19 nt, Artificial Sequence
  Description of Artificial Sequence: Synthetic oligonucleotide
uggggcggccgggauuuga

SEQ ID NO: 1688767 - RNA, 19 nt, Artificial Sequence
  Description of Artificial Sequence: Synthetic oligonucleotide
gcaggacuggggcggccgg

SEQ ID NO: 1688768 - RNA, 19 nt, Artificial Sequence
  Description of Artificial Sequence: Synthetic oligonucleotide
caccagccgggacccuggg

SEQ ID NO: 1688769 - RNA, 19 nt, Artificial Sequence
  Description of Artificial Sequence: Synthetic oligonucleotide
ggacaucacuccaguggug

SEQ ID NO: 1688770 - RNA, 19 nt, Artificial Sequence
  Description of Artificial Sequence: Synthetic oligonucleotide
gcggccgggauuugaagaa

SEQ ID NO: 1688771 - RNA, 19 nt, Artificial Sequence
  Description of Artificial Sequence: Synthetic oligonucleotide
cccggaguaaaaggacagc

SEQ ID NO: 1688772 - RNA, 19 nt, Artificial Sequence
  Description of Artificial Sequence: Synthetic oligonucleotide
cgccgcaguaaaacccucg

SEQ ID NO: 1688773 - RNA, 19 nt, Artificial Sequence
  Description of Artificial Sequence: Synthetic oligonucleotide
ggguacucauaguggcuaa

SEQ ID NO: 1688774 - RNA, 19 nt, Artificial Sequence
  Description of Artificial Sequence: Synthetic oligonucleotide
gguacggguaccggaugga

SEQ ID NO: 1688775 - RNA, 19 nt, Artificial Sequence
  Description of Artificial Sequence: Synthetic oligonucleotide
cguuuguaugguguguuca

SEQ ID NO: 1688776 - RNA, 19 nt, Artificial Sequence
  Description of Artificial Sequence: Synthetic oligonucleotide
cgaugagacaaggaugaca

SEQ ID NO: 1688777 - RNA, 19 nt, Artificial Sequence
  Description of Artificial Sequence: Synthetic oligonucleotide
cucguuuguaugguguguu

SEQ ID NO: 1688778 - RNA, 19 nt, Artificial Sequence
  Description of Artificial Sequence: Synthetic oligonucleotide
ugggucgcagacggccaau

SEQ ID NO: 1688779 - RNA, 19 nt, Artificial Sequence
  Description of Artificial Sequence: Synthetic oligonucleotide
cucgagcaggaaucuucua

SEQ ID NO: 1688780 - RNA, 19 nt, Artificial Sequence
  Description of Artificial Sequence: Synthetic oligonucleotide
gaccuuucauggacccugu

SEQ ID NO: 1688781 - RNA, 19 nt, Artificial Sequence
  Description of Artificial Sequence: Synthetic oligonucleotide
gccgggauuugaagaaguc

SEQ ID NO: 1688782 - RNA, 19 nt, Artificial Sequence
  Description of Artificial Sequence: Synthetic oligonucleotide
gccgcaguaaaacccucgu

SEQ ID NO: 1688783 - RNA, 19 nt, Artificial Sequence
  Description of Artificial Sequence: Synthetic oligonucleotide
gugcuuguggucagacacu

SEQ ID NO: 1688784 - RNA, 19 nt, Artificial Sequence
  Description of Artificial Sequence: Synthetic oligonucleotide
cgagcaggaaucuucuacu

SEQ ID NO: 1688785 - RNA, 19 nt, Artificial Sequence
  Description of Artificial Sequence: Synthetic oligonucleotide
ucggaccgugaggcaggcc

SEQ ID NO: 1688786 - RNA, 19 nt, Artificial Sequence
  Description of Artificial Sequence: Synthetic oligonucleotide
gacggccaaucauguacuu

SEQ ID NO: 1688787 - RNA, 19 nt, Artificial Sequence
  Description of Artificial Sequence: Synthetic oligonucleotide
cucggguguagcccacaua

SEQ ID NO: 1688788 - RNA, 19 nt, Artificial Sequence
  Description of Artificial Sequence: Synthetic oligonucleotide
gacagccaagaagcugggu

SEQ ID NO: 1688789 - RNA, 19 nt, Artificial Sequence
  Description of Artificial Sequence: Synthetic oligonucleotide
ccagucggggucacagaca

SEQ ID NO: 1688790 - RNA, 19 nt, Artificial Sequence
  Description of Artificial Sequence: Synthetic oligonucleotide
ggaccgugaggcaggccac

SEQ ID NO: 1688791 - RNA, 19 nt, Artificial Sequence
  Description of Artificial Sequence: Synthetic oligonucleotide
caguugacccggcuccagu

SEQ ID NO: 1688792 - RNA, 19 nt, Artificial Sequence
  Description of Artificial Sequence: Synthetic oligonucleotide
gcacauagccggaacaguu

SEQ ID NO: 1688793 - RNA, 19 nt, Artificial Sequence
  Description of Artificial Sequence: Synthetic oligonucleotide
ccuccgcuccaugucgccc

SEQ ID NO: 1688794 - RNA, 19 nt, Artificial Sequence
  Description of Artificial Sequence: Synthetic oligonucleotide
gcagacggccaaucaugua

SEQ ID NO: 1688795 - RNA, 19 nt, Artificial Sequence
  Description of Artificial Sequence: Synthetic oligonucleotide
cagggacgcccgcgacccc

SEQ ID NO: 1688796 - RNA, 19 nt, Artificial Sequence
  Description of Artificial Sequence: Synthetic oligonucleotide
ggucagacacucgggugua

SEQ ID NO: 1688797 - RNA, 19 nt, Artificial Sequence
  Description of Artificial Sequence: Synthetic oligonucleotide
ccggaacaguugacccggc

SEQ ID NO: 1688798 - RNA, 19 nt, Artificial Sequence
  Description of Artificial Sequence: Synthetic oligonucleotide
ccgggauuugaagaagucu

SEQ ID NO: 1688799 - RNA, 19 nt, Artificial Sequence
  Description of Artificial Sequence: Synthetic oligonucleotide
gagcgugaauagagacgcu

SEQ ID NO: 1688800 - RNA, 19 nt, Artificial Sequence
  Description of Artificial Sequence: Synthetic oligonucleotide
ggccgggauuugaagaagu

SEQ ID NO: 1688801 - RNA, 19 nt, Artificial Sequence
  Description of Artificial Sequence: Synthetic oligonucleotide
ccaaagccacgugugaccu

SEQ ID NO: 1688802 - RNA, 19 nt, Artificial Sequence
  Description of Artificial Sequence: Synthetic oligonucleotide
gggucgcagacggccaauc

SEQ ID NO: 1688803 - RNA, 19 nt, Artificial Sequence
  Description of Artificial Sequence: Synthetic oligonucleotide
ccgaugagacaaggaugac

SEQ ID NO: 1688804 - RNA, 19 nt, Artificial Sequence
  Description of Artificial Sequence: Synthetic oligonucleotide
gccacgugugaccuuucau

SEQ ID NO: 1688805 - RNA, 19 nt, Artificial Sequence
  Description of Artificial Sequence: Synthetic oligonucleotide
cacucggguguagcccaca

SEQ ID NO: 1688806 - RNA, 19 nt, Artificial Sequence
  Description of Artificial Sequence: Synthetic oligonucleotide
caucgccgagagucagugu

SEQ ID NO: 1688807 - RNA, 19 nt, Artificial Sequence
  Description of Artificial Sequence: Synthetic oligonucleotide
cugagacauaucggaccgu

SEQ ID NO: 1688808 - RNA, 19 nt, Artificial Sequence
  Description of Artificial Sequence: Synthetic oligonucleotide
cgccgagagucagugucag

SEQ ID NO: 1688809 - RNA, 19 nt, Artificial Sequence
  Description of Artificial Sequence: Synthetic oligonucleotide
ggcuacauaucugguccau

SEQ ID NO: 1688810 - RNA, 19 nt, Artificial Sequence
  Description of Artificial Sequence: Synthetic oligonucleotide
ggcgaccagcacgcacagc

SEQ ID NO: 1688811 - RNA, 19 nt, Artificial Sequence
  Description of Artificial Sequence: Synthetic oligonucleotide
ggggcggccgggauuugaa

SEQ ID NO: 1688812 - RNA, 19 nt, Artificial Sequence
  Description of Artificial Sequence: Synthetic oligonucleotide
ggccgacgaggacaucacu

SEQ ID NO: 1688813 - RNA, 19 nt, Artificial Sequence
  Description of Artificial Sequence: Synthetic oligonucleotide
cagcggccccaaacaggaa

SEQ ID NO: 1688814 - RNA, 19 nt, Artificial Sequence
  Description of Artificial Sequence: Synthetic oligonucleotide
ccucguuuguauggugugu

SEQ ID NO: 1688815 - RNA, 19 nt, Artificial Sequence
  Description of Artificial Sequence: Synthetic oligonucleotide
gccuggcuacauaucuggu

SEQ ID NO: 1688816 - RNA, 19 nt, Artificial Sequence
  Description of Artificial Sequence: Synthetic oligonucleotide
cuggggcggccgggauuug

SEQ ID NO: 1688817 - RNA, 19 nt, Artificial Sequence
  Description of Artificial Sequence: Synthetic oligonucleotide
gccgagagucagugucagu

SEQ ID NO: 1688818 - RNA, 19 nt, Artificial Sequence
  Description of Artificial Sequence: Synthetic oligonucleotide
gcacguccagcagcacgaa

SEQ ID NO: 1688819 - RNA, 19 nt, Artificial Sequence
  Description of Artificial Sequence: Synthetic oligonucleotide
ccaugaguccaugggugau

SEQ ID NO: 1688820 - RNA, 19 nt, Artificial Sequence
  Description of Artificial Sequence: Synthetic oligonucleotide
ggcuccagucggggucaca

SEQ ID NO: 1688821 - RNA, 19 nt, Artificial Sequence
  Description of Artificial Sequence: Synthetic oligonucleotide
ccgcaguaaaacccucguu

SEQ ID NO: 1688822 - RNA, 19 nt, Artificial Sequence
  Description of Artificial Sequence: Synthetic oligonucleotide
ggacuggggcggccgggau

SEQ ID NO: 1688823 - RNA, 19 nt, Artificial Sequence
  Description of Artificial Sequence: Synthetic oligonucleotide
cggguaccggauggaguca

SEQ ID NO: 1688824 - RNA, 19 nt, Artificial Sequence
  Description of Artificial Sequence: Synthetic oligonucleotide
ccccggccaugaguccaug

SEQ ID NO: 1688825 - RNA, 19 nt, Artificial Sequence
  Description of Artificial Sequence: Synthetic oligonucleotide
ggccucgagcaggaaucuu

SEQ ID NO: 1688826 - RNA, 19 nt, Artificial Sequence
  Description of Artificial Sequence: Synthetic oligonucleotide
uugucuauuaccuagauag

SEQ ID NO: 1688827 - RNA, 19 nt, Artificial Sequence
  Description of Artificial Sequence: Synthetic oligonucleotide
uuaacuugcauuaaggaag

SEQ ID NO: 1688828 - RNA, 19 nt, Artificial Sequence
  Description of Artificial Sequence: Synthetic oligonucleotide
ucaaaaguaaccuuaguag

SEQ ID NO: 1688829 - RNA, 19 nt, Artificial Sequence
  Description of Artificial Sequence: Synthetic oligonucleotide
aauuacaagugauugauca

SEQ ID NO: 1688830 - RNA, 19 nt, Artificial Sequence
  Description of Artificial Sequence: Synthetic oligonucleotide
aagugauugaucaaaaucg

SEQ ID NO: 1688831 - RNA, 19 nt, Artificial Sequence
  Description of Artificial Sequence: Synthetic oligonucleotide
aaccuuaguagccaaaccg

SEQ ID NO: 1688832 - RNA, 19 nt, Artificial Sequence
  Description of Artificial Sequence: Synthetic oligonucleotide
aauacuagacaauccauug

SEQ ID NO: 1688833 - RNA, 19 nt, Artificial Sequence
  Description of Artificial Sequence: Synthetic oligonucleotide
aaaaguaaccuuaguagcc

SEQ ID NO: 1688834 - RNA, 19 nt, Artificial Sequence
  Description of Artificial Sequence: Synthetic oligonucleotide
uuuauuaugccacauuugu

SEQ ID NO: 1688835 - RNA, 19 nt, Artificial Sequence
  Description of Artificial Sequence: Synthetic oligonucleotide
uaagacugcgaucacaagg

SEQ ID NO: 1688836 - RNA, 19 nt, Artificial Sequence
  Description of Artificial Sequence: Synthetic oligonucleotide
acagcuaacuuccagcugc

SEQ ID NO: 1688837 - RNA, 19 nt, Artificial Sequence
  Description of Artificial Sequence: Synthetic oligonucleotide
cuagauaguuauaacaggg

SEQ ID NO: 1688838 - RNA, 19 nt, Artificial Sequence
  Description of Artificial Sequence: Synthetic oligonucleotide
auagacaacucucaaugcc

SEQ ID NO: 1688839 - RNA, 19 nt, Artificial Sequence
  Description of Artificial Sequence: Synthetic oligonucleotide
auaaaaugcucauugugac

SEQ ID NO: 1688840 - RNA, 19 nt, Artificial Sequence
  Description of Artificial Sequence: Synthetic oligonucleotide
aacaaccugaaacagacca

SEQ ID NO: 1688841 - RNA, 19 nt, Artificial Sequence
  Description of Artificial Sequence: Synthetic oligonucleotide
aucaaaaucgggaauaagc

SEQ ID NO: 1688842 - RNA, 19 nt, Artificial Sequence
  Description of Artificial Sequence: Synthetic oligonucleotide
ucaaagaggagagagagag

SEQ ID NO: 1688843 - RNA, 19 nt, Artificial Sequence
  Description of Artificial Sequence: Synthetic oligonucleotide
caagguaugacacaguggc

SEQ ID NO: 1688844 - RNA, 19 nt, Artificial Sequence
  Description of Artificial Sequence: Synthetic oligonucleotide
auaguuauaacagggcugc

SEQ ID NO: 1688845 - RNA, 19 nt, Artificial Sequence
  Description of Artificial Sequence: Synthetic oligonucleotide
uuuagugcaagauuuaaaa

SEQ ID NO: 1688846 - RNA, 19 nt, Artificial Sequence
  Description of Artificial Sequence: Synthetic oligonucleotide
ucugaauaacagcugaugc

SEQ ID NO: 1688847 - RNA, 19 nt, Artificial Sequence
  Description of Artificial Sequence: Synthetic oligonucleotide
ucaaaaucgggaauaagcu

SEQ ID NO: 1688848 - RNA, 19 nt, Artificial Sequence
  Description of Artificial Sequence: Synthetic oligonucleotide
ugucuuauuauccuuuccc

SEQ ID NO: 1688849 - RNA, 19 nt, Artificial Sequence
  Description of Artificial Sequence: Synthetic oligonucleotide
guauagacaacucucaaug

SEQ ID NO: 1688850 - RNA, 19 nt, Artificial Sequence
  Description of Artificial Sequence: Synthetic oligonucleotide
aaagaggagagagagagug

SEQ ID NO: 1688851 - RNA, 19 nt, Artificial Sequence
  Description of Artificial Sequence: Synthetic oligonucleotide
uuugauuguguggagaagg

SEQ ID NO: 1688852 - RNA, 19 nt, Artificial Sequence
  Description of Artificial Sequence: Synthetic oligonucleotide
uuguccaauggcuacaagg

SEQ ID NO: 1688853 - RNA, 19 nt, Artificial Sequence
  Description of Artificial Sequence: Synthetic oligonucleotide
acagaguuagcuaaugucc

SEQ ID NO: 1688854 - RNA, 19 nt, Artificial Sequence
  Description of Artificial Sequence: Synthetic oligonucleotide
caaaaguaaccuuaguagc

SEQ ID NO: 1688855 - RNA, 19 nt, Artificial Sequence
  Description of Artificial Sequence: Synthetic oligonucleotide
uuuacagcuaacuuccagc

SEQ ID NO: 1688856 - RNA, 19 nt, Artificial Sequence
  Description of Artificial Sequence: Synthetic oligonucleotide
aguaaauuaacuggaaaag

SEQ ID NO: 1688857 - RNA, 19 nt, Artificial Sequence
  Description of Artificial Sequence: Synthetic oligonucleotide
uuuaacuugcauuaaggaa

SEQ ID NO: 1688858 - RNA, 19 nt, Artificial Sequence
  Description of Artificial Sequence: Synthetic oligonucleotide
aaauaaugcucuaagagau

SEQ ID NO: 1688859 - RNA, 19 nt, Artificial Sequence
  Description of Artificial Sequence: Synthetic oligonucleotide
uuagucaaaaguaaccuua

SEQ ID NO: 1688860 - RNA, 19 nt, Artificial Sequence
  Description of Artificial Sequence: Synthetic oligonucleotide
auacuagacaauccauugc

SEQ ID NO: 1688861 - RNA, 19 nt, Artificial Sequence
  Description of Artificial Sequence: Synthetic oligonucleotide
aaaugacagaguuagcuaa

SEQ ID NO: 1688862 - RNA, 19 nt, Artificial Sequence
  Description of Artificial Sequence: Synthetic oligonucleotide
uuagcaaauucaacuuugg

SEQ ID NO: 1688863 - RNA, 19 nt, Artificial Sequence
  Description of Artificial Sequence: Synthetic oligonucleotide
gaauuagucaaaaguaacc

SEQ ID NO: 1688864 - RNA, 19 nt, Artificial Sequence
  Description of Artificial Sequence: Synthetic oligonucleotide
uuugaguccuauaacuccc

SEQ ID NO: 1688865 - RNA, 19 nt, Artificial Sequence
  Description of Artificial Sequence: Synthetic oligonucleotide
uucacguugucuauuaccu

SEQ ID NO: 1688866 - RNA, 19 nt, Artificial Sequence
  Description of Artificial Sequence: Synthetic oligonucleotide
aauggauaccgcuagguuu

SEQ ID NO: 1688867 - RNA, 19 nt, Artificial Sequence
  Description of Artificial Sequence: Synthetic oligonucleotide
uaccuagauaguuauaaca

SEQ ID NO: 1688868 - RNA, 19 nt, Artificial Sequence
  Description of Artificial Sequence: Synthetic oligonucleotide
agaauuagucaaaaguaac

SEQ ID NO: 1688869 - RNA, 19 nt, Artificial Sequence
  Description of Artificial Sequence: Synthetic oligonucleotide
uucacagcaacucuuugga

SEQ ID NO: 1688870 - RNA, 19 nt, Artificial Sequence
  Description of Artificial Sequence: Synthetic oligonucleotide
uagauaguuauaacagggc

SEQ ID NO: 1688871 - RNA, 19 nt, Artificial Sequence
  Description of Artificial Sequence: Synthetic oligonucleotide
uagcuaauguccccgagag

SEQ ID NO: 1688872 - RNA, 19 nt, Artificial Sequence
  Description of Artificial Sequence: Synthetic oligonucleotide
agaggagagagagagugcc

SEQ ID NO: 1688873 - RNA, 19 nt, Artificial Sequence
  Description of Artificial Sequence: Synthetic oligonucleotide
ugugacuuagcaaauucaa

SEQ ID NO: 1688874 - RNA, 19 nt, Artificial Sequence
  Description of Artificial Sequence: Synthetic oligonucleotide
uuucacguugucuauuacc

SEQ ID NO: 1688875 - RNA, 19 nt, Artificial Sequence
  Description of Artificial Sequence: Synthetic oligonucleotide
ccuaagaaaggaaugaagc

SEQ ID NO: 1688876 - RNA, 19 nt, Artificial Sequence
  Description of Artificial Sequence: Synthetic oligonucleotide
uuagccucaaauauccuau

SEQ ID NO: 1688877 - RNA, 19 nt, Artificial Sequence
  Description of Artificial Sequence: Synthetic oligonucleotide
gauaguuauaacagggcug

SEQ ID NO: 1688878 - RNA, 19 nt, Artificial Sequence
  Description of Artificial Sequence: Synthetic oligonucleotide
uagacaacucucaaugcca

SEQ ID NO: 1688879 - RNA, 19 nt, Artificial Sequence
  Description of Artificial Sequence: Synthetic oligonucleotide
ucacaauggauaccgcuag

SEQ ID NO: 1688880 - RNA, 19 nt, Artificial Sequence
  Description of Artificial Sequence: Synthetic oligonucleotide
auguuugguuccuacaaag

SEQ ID NO: 1688881 - RNA, 19 nt, Artificial Sequence
  Description of Artificial Sequence: Synthetic oligonucleotide
ugcucauugugacuuagca

SEQ ID NO: 1688882 - RNA, 19 nt, Artificial Sequence
  Description of Artificial Sequence: Synthetic oligonucleotide
cuucacagcaacucuuugg

SEQ ID NO: 1688883 - RNA, 19 nt, Artificial Sequence
  Description of Artificial Sequence: Synthetic oligonucleotide
caauccauugccacugugg

SEQ ID NO: 1688884 - RNA, 19 nt, Artificial Sequence
  Description of Artificial Sequence: Synthetic oligonucleotide
aacagaccacccauggugc

SEQ ID NO: 1688885 - RNA, 19 nt, Artificial Sequence
  Description of Artificial Sequence: Synthetic oligonucleotide
cucauugugacuuagcaaa

SEQ ID NO: 1688886 - RNA, 19 nt, Artificial Sequence
  Description of Artificial Sequence: Synthetic oligonucleotide
uuaguagccaaaccgacuu

SEQ ID NO: 1688887 - RNA, 19 nt, Artificial Sequence
  Description of Artificial Sequence: Synthetic oligonucleotide
augguauacacagggaacg

SEQ ID NO: 1688888 - RNA, 19 nt, Artificial Sequence
  Description of Artificial Sequence: Synthetic oligonucleotide
acuugcauuaaggaaggac

SEQ ID NO: 1688889 - RNA, 19 nt, Artificial Sequence
  Description of Artificial Sequence: Synthetic oligonucleotide
auuaaggaaggacuuacau

SEQ ID NO: 1688890 - RNA, 19 nt, Artificial Sequence
  Description of Artificial Sequence: Synthetic oligonucleotide
uuauuauccuuucccauau

SEQ ID NO: 1688891 - RNA, 19 nt, Artificial Sequence
  Description of Artificial Sequence: Synthetic oligonucleotide
uugguuccuacaaagcaug

SEQ ID NO: 1688892 - RNA, 19 nt, Artificial Sequence
  Description of Artificial Sequence: Synthetic oligonucleotide
ugcuauguacccaagugaa

SEQ ID NO: 1688893 - RNA, 19 nt, Artificial Sequence
  Description of Artificial Sequence: Synthetic oligonucleotide
uguuugguuccuacaaagc

SEQ ID NO: 1688894 - RNA, 19 nt, Artificial Sequence
  Description of Artificial Sequence: Synthetic oligonucleotide
accuagauaguuauaacag

SEQ ID NO: 1688895 - RNA, 19 nt, Artificial Sequence
  Description of Artificial Sequence: Synthetic oligonucleotide
uccuacaaagcauguuugg

SEQ ID NO: 1688896 - RNA, 19 nt, Artificial Sequence
  Description of Artificial Sequence: Synthetic oligonucleotide
guauacacagggaacgugg

SEQ ID NO: 1688897 - RNA, 19 nt, Artificial Sequence
  Description of Artificial Sequence: Synthetic oligonucleotide
uuagcuaauguccccgaga

SEQ ID NO: 1688898 - RNA, 19 nt, Artificial Sequence
  Description of Artificial Sequence: Synthetic oligonucleotide
cacguugucuauuaccuag

SEQ ID NO: 1688899 - RNA, 19 nt, Artificial Sequence
  Description of Artificial Sequence: Synthetic oligonucleotide
ucgacagauagucuucagc

SEQ ID NO: 1688900 - RNA, 19 nt, Artificial Sequence
  Description of Artificial Sequence: Synthetic oligonucleotide
aaaguaaccuuaguagcca

SEQ ID NO: 1688901 - RNA, 19 nt, Artificial Sequence
  Description of Artificial Sequence: Synthetic oligonucleotide
aaccagacaucugaauaac

SEQ ID NO: 1688902 - RNA, 19 nt, Artificial Sequence
  Description of Artificial Sequence: Synthetic oligonucleotide
agcucucaaauuuaacuug

SEQ ID NO: 1688903 - RNA, 19 nt, Artificial Sequence
  Description of Artificial Sequence: Synthetic oligonucleotide
uugugacuuagcaaauuca

SEQ ID NO: 1688904 - RNA, 19 nt, Artificial Sequence
  Description of Artificial Sequence: Synthetic oligonucleotide
agugauugaucaaaaucgg

SEQ ID NO: 1688905 - RNA, 19 nt, Artificial Sequence
  Description of Artificial Sequence: Synthetic oligonucleotide
aguccuauaacuccccaga

SEQ ID NO: 1688906 - RNA, 19 nt, Artificial Sequence
  Description of Artificial Sequence: Synthetic oligonucleotide
cacagcaacucuuuggaac

SEQ ID NO: 1688907 - RNA, 19 nt, Artificial Sequence
  Description of Artificial Sequence: Synthetic oligonucleotide
aagacugcgaucacaaggu

SEQ ID NO: 1688908 - RNA, 19 nt, Artificial Sequence
  Description of Artificial Sequence: Synthetic oligonucleotide
uuuagccucaaauauccua

SEQ ID NO: 1688909 - RNA, 19 nt, Artificial Sequence
  Description of Artificial Sequence: Synthetic oligonucleotide
ucacaagguaguaaauuaa

SEQ ID NO: 1688910 - RNA, 19 nt, Artificial Sequence
  Description of Artificial Sequence: Synthetic oligonucleotide
caugguauacacagggaac

SEQ ID NO: 1688911 - RNA, 19 nt, Artificial Sequence
  Description of Artificial Sequence: Synthetic oligonucleotide
agacaucugaauaacagcu

SEQ ID NO: 1688912 - RNA, 19 nt, Artificial Sequence
  Description of Artificial Sequence: Synthetic oligonucleotide
aucacaagguaguaaauua

SEQ ID NO: 1688913 - RNA, 19 nt, Artificial Sequence
  Description of Artificial Sequence: Synthetic oligonucleotide
uaaccuuaguagccaaacc

SEQ ID NO: 1688914 - RNA, 19 nt, Artificial Sequence
  Description of Artificial Sequence: Synthetic oligonucleotide
uuacaagugauugaucaaa

SEQ ID NO: 1688915 - RNA, 19 nt, Artificial Sequence
  Description of Artificial Sequence: Synthetic oligonucleotide
uuauuaugccacauuuguc

SEQ ID NO: 1688916 - RNA, 19 nt, Artificial Sequence
  Description of Artificial Sequence: Synthetic oligonucleotide
aaaauacuagacaauccau

SEQ ID NO: 1688917 - RNA, 19 nt, Artificial Sequence
  Description of Artificial Sequence: Synthetic oligonucleotide
gcuaauguccccgagagcc

SEQ ID NO: 1688918 - RNA, 19 nt, Artificial Sequence
  Description of Artificial Sequence: Synthetic oligonucleotide
ucuuauuauccuuucccau

SEQ ID NO: 1688919 - RNA, 19 nt, Artificial Sequence
  Description of Artificial Sequence: Synthetic oligonucleotide
cagcucuuaaaugacagag

SEQ ID NO: 1688920 - RNA, 19 nt, Artificial Sequence
  Description of Artificial Sequence: Synthetic oligonucleotide
aaauacuagacaauccauu

SEQ ID NO: 1688921 - RNA, 19 nt, Artificial Sequence
  Description of Artificial Sequence: Synthetic oligonucleotide
cugccagugacuagaaaag

SEQ ID NO: 1688922 - RNA, 19 nt, Artificial Sequence
  Description of Artificial Sequence: Synthetic oligonucleotide
caaaccgacuugaagaaca

SEQ ID NO: 1688923 - RNA, 19 nt, Artificial Sequence
  Description of Artificial Sequence: Synthetic oligonucleotide
cuugcauuaaggaaggacu

SEQ ID NO: 1688924 - RNA, 19 nt, Artificial Sequence
  Description of Artificial Sequence: Synthetic oligonucleotide
aaugcucauugugacuuag

SEQ ID NO: 1688925 - RNA, 19 nt, Artificial Sequence
  Description of Artificial Sequence: Synthetic oligonucleotide
aagaggagagagagagugc

SEQ ID NO: 1688926 - RNA, 19 nt, Artificial Sequence
  Description of Artificial Sequence: Synthetic oligonucleotide
gaguuagcuaauguccccg

SEQ ID NO: 1688927 - RNA, 19 nt, Artificial Sequence
  Description of Artificial Sequence: Synthetic oligonucleotide
caaaaucgggaauaagcuc

SEQ ID NO: 1688928 - RNA, 19 nt, Artificial Sequence
  Description of Artificial Sequence: Synthetic oligonucleotide
uugaucaaaaucgggaaua

SEQ ID NO: 1688929 - RNA, 19 nt, Artificial Sequence
  Description of Artificial Sequence: Synthetic oligonucleotide
aacguggcuacauccacaa

SEQ ID NO: 1688930 - RNA, 19 nt, Artificial Sequence
  Description of Artificial Sequence: Synthetic oligonucleotide
aacuccccagaauuaguca

SEQ ID NO: 1688931 - RNA, 19 nt, Artificial Sequence
  Description of Artificial Sequence: Synthetic oligonucleotide
uuucuagacuccuagucuu

SEQ ID NO: 1688932 - RNA, 19 nt, Artificial Sequence
  Description of Artificial Sequence: Synthetic oligonucleotide
uagacaauccauugccacu

SEQ ID NO: 1688933 - RNA, 19 nt, Artificial Sequence
  Description of Artificial Sequence: Synthetic oligonucleotide
aaacaaccugaaacagacc

SEQ ID NO: 1688934 - RNA, 19 nt, Artificial Sequence
  Description of Artificial Sequence: Synthetic oligonucleotide
uaacuccccagaauuaguc

SEQ ID NO: 1688935 - RNA, 19 nt, Artificial Sequence
  Description of Artificial Sequence: Synthetic oligonucleotide
cagugacuagaaaagcagc

SEQ ID NO: 1688936 - RNA, 19 nt, Artificial Sequence
  Description of Artificial Sequence: Synthetic oligonucleotide
ugcuuggcaacaaaccaaa

SEQ ID NO: 1688937 - RNA, 19 nt, Artificial Sequence
  Description of Artificial Sequence: Synthetic oligonucleotide
aaaccgacuugaagaacac

SEQ ID NO: 1688938 - RNA, 19 nt, Artificial Sequence
  Description of Artificial Sequence: Synthetic oligonucleotide
agugcaagauuuaaaauua

SEQ ID NO: 1688939 - RNA, 19 nt, Artificial Sequence
  Description of Artificial Sequence: Synthetic oligonucleotide
uagucuuuacagcuaacuu

SEQ ID NO: 1688940 - RNA, 19 nt, Artificial Sequence
  Description of Artificial Sequence: Synthetic oligonucleotide
caaccugaaacagaccacc

SEQ ID NO: 1688941 - RNA, 19 nt, Artificial Sequence
  Description of Artificial Sequence: Synthetic oligonucleotide
guaguaaauuaacuggaaa

SEQ ID NO: 1688942 - RNA, 19 nt, Artificial Sequence
  Description of Artificial Sequence: Synthetic oligonucleotide
uguggggauguuugguucc

SEQ ID NO: 1688943 - RNA, 19 nt, Artificial Sequence
  Description of Artificial Sequence: Synthetic oligonucleotide
aacuuugggagaaaaugaa

SEQ ID NO: 1688944 - RNA, 19 nt, Artificial Sequence
  Description of Artificial Sequence: Synthetic oligonucleotide
augcccaccaacucuuguc

SEQ ID NO: 1688945 - RNA, 19 nt, Artificial Sequence
  Description of Artificial Sequence: Synthetic oligonucleotide
gaguccuauaacuccccag

SEQ ID NO: 1688946 - RNA, 19 nt, Artificial Sequence
  Description of Artificial Sequence: Synthetic oligonucleotide
uuaagacugcgaucacaag

SEQ ID NO: 1688947 - RNA, 19 nt, Artificial Sequence
  Description of Artificial Sequence: Synthetic oligonucleotide
uauguacccaagugaaguc

SEQ ID NO: 1688948 - RNA, 19 nt, Artificial Sequence
  Description of Artificial Sequence: Synthetic oligonucleotide
agacaauccauugccacug

SEQ ID NO: 1688949 - RNA, 19 nt, Artificial Sequence
  Description of Artificial Sequence: Synthetic oligonucleotide
agacgguauagacaacucu

SEQ ID NO: 1688950 - RNA, 19 nt, Artificial Sequence
  Description of Artificial Sequence: Synthetic oligonucleotide
uccuagucuuuacagcuaa

SEQ ID NO: 1688951 - RNA, 19 nt, Artificial Sequence
  Description of Artificial Sequence: Synthetic oligonucleotide
ugucuauuaccuagauagu

SEQ ID NO: 1688952 - RNA, 19 nt, Artificial Sequence
  Description of Artificial Sequence: Synthetic oligonucleotide
aaugcccaccaacucuugu

SEQ ID NO: 1688953 - RNA, 19 nt, Artificial Sequence
  Description of Artificial Sequence: Synthetic oligonucleotide
aagcauguuugguucacuu

SEQ ID NO: 1688954 - RNA, 19 nt, Artificial Sequence
  Description of Artificial Sequence: Synthetic oligonucleotide
acaagguaguaaauuaacu

SEQ ID NO: 1688955 - RNA, 19 nt, Artificial Sequence
  Description of Artificial Sequence: Synthetic oligonucleotide
ccuuccauccccuaguuug

SEQ ID NO: 1688956 - RNA, 19 nt, Artificial Sequence
  Description of Artificial Sequence: Synthetic oligonucleotide
gagagggaugcucagagcu

SEQ ID NO: 1688957 - RNA, 19 nt, Artificial Sequence
  Description of Artificial Sequence: Synthetic oligonucleotide
auuaugccacauuugucau

SEQ ID NO: 1688958 - RNA, 19 nt, Artificial Sequence
  Description of Artificial Sequence: Synthetic oligonucleotide
agguaguaaauuaacugga

SEQ ID NO: 1688959 - RNA, 19 nt, Artificial Sequence
  Description of Artificial Sequence: Synthetic oligonucleotide
agcuaauguccccgagagc

SEQ ID NO: 1688960 - RNA, 19 nt, Artificial Sequence
  Description of Artificial Sequence: Synthetic oligonucleotide
cuuauuauccuuucccaua

SEQ ID NO: 1688961 - RNA, 19 nt, Artificial Sequence
  Description of Artificial Sequence: Synthetic oligonucleotide
gacuugaagaacacuaaaa

SEQ ID NO: 1688962 - RNA, 19 nt, Artificial Sequence
  Description of Artificial Sequence: Synthetic oligonucleotide
cagagcucgacagauaguc

SEQ ID NO: 1688963 - RNA, 19 nt, Artificial Sequence
  Description of Artificial Sequence: Synthetic oligonucleotide
auuuaucaccugcuuggca

SEQ ID NO: 1688964 - RNA, 19 nt, Artificial Sequence
  Description of Artificial Sequence: Synthetic oligonucleotide
acaagguaugacacagugg

SEQ ID NO: 1688965 - RNA, 19 nt, Artificial Sequence
  Description of Artificial Sequence: Synthetic oligonucleotide
uacagcuaacuuccagcug

SEQ ID NO: 1688966 - RNA, 19 nt, Artificial Sequence
  Description of Artificial Sequence: Synthetic oligonucleotide
acaaccugaaacagaccac

SEQ ID NO: 1688967 - RNA, 19 nt, Artificial Sequence
  Description of Artificial Sequence: Synthetic oligonucleotide
agagccuaagaaaggaaug

SEQ ID NO: 1688968 - RNA, 19 nt, Artificial Sequence
  Description of Artificial Sequence: Synthetic oligonucleotide
uugguucacuuuguuauac

SEQ ID NO: 1688969 - RNA, 19 nt, Artificial Sequence
  Description of Artificial Sequence: Synthetic oligonucleotide
aaauaaccagacaucugaa

SEQ ID NO: 1688970 - RNA, 19 nt, Artificial Sequence
  Description of Artificial Sequence: Synthetic oligonucleotide
gauguuugguuccuacaaa

SEQ ID NO: 1688971 - RNA, 19 nt, Artificial Sequence
  Description of Artificial Sequence: Synthetic oligonucleotide
acugcgaucacaagguagu

SEQ ID NO: 1688972 - RNA, 19 nt, Artificial Sequence
  Description of Artificial Sequence: Synthetic oligonucleotide
aaguaaccuuaguagccaa

SEQ ID NO: 1688973 - RNA, 19 nt, Artificial Sequence
  Description of Artificial Sequence: Synthetic oligonucleotide
guuagcuaauguccccgag

SEQ ID NO: 1688974 - RNA, 19 nt, Artificial Sequence
  Description of Artificial Sequence: Synthetic oligonucleotide
acaauggauaccgcuaggu

SEQ ID NO: 1688975 - RNA, 19 nt, Artificial Sequence
  Description of Artificial Sequence: Synthetic oligonucleotide
cucaaauuuaacuugcauu

SEQ ID NO: 1688976 - RNA, 19 nt, Artificial Sequence
  Description of Artificial Sequence: Synthetic oligonucleotide
gagccuaagaaaggaauga

SEQ ID NO: 1688977 - RNA, 19 nt, Artificial Sequence
  Description of Artificial Sequence: Synthetic oligonucleotide
gaggauccggagaagggcc

SEQ ID NO: 1688978 - RNA, 19 nt, Artificial Sequence
  Description of Artificial Sequence: Synthetic oligonucleotide
uuaucaccugcuuggcaac

SEQ ID NO: 1688979 - RNA, 19 nt, Artificial Sequence
  Description of Artificial Sequence: Synthetic oligonucleotide
uacacagggaacguggcua

SEQ ID NO: 1688980 - RNA, 19 nt, Artificial Sequence
  Description of Artificial Sequence: Synthetic oligonucleotide
aaugacagaguuagcuaau

SEQ ID NO: 1688981 - RNA, 19 nt, Artificial Sequence
  Description of Artificial Sequence: Synthetic oligonucleotide
aguagccaaaccgacuuga

SEQ ID NO: 1688982 - RNA, 19 nt, Artificial Sequence
  Description of Artificial Sequence: Synthetic oligonucleotide
uuugguucacuuuguuaua

SEQ ID NO: 1688983 - RNA, 19 nt, Artificial Sequence
  Description of Artificial Sequence: Synthetic oligonucleotide
uauuaccuagauaguuaua

SEQ ID NO: 1688984 - RNA, 19 nt, Artificial Sequence
  Description of Artificial Sequence: Synthetic oligonucleotide
aguuauaacagggcugcau

SEQ ID NO: 1688985 - RNA, 19 nt, Artificial Sequence
  Description of Artificial Sequence: Synthetic oligonucleotide
ugccagugacuagaaaagc

SEQ ID NO: 1688986 - RNA, 19 nt, Artificial Sequence
  Description of Artificial Sequence: Synthetic oligonucleotide
uaguagccaaaccgacuug

SEQ ID NO: 1688987 - RNA, 19 nt, Artificial Sequence
  Description of Artificial Sequence: Synthetic oligonucleotide
aaagcauguuugguucacu

SEQ ID NO: 1688988 - RNA, 19 nt, Artificial Sequence
  Description of Artificial Sequence: Synthetic oligonucleotide
uaacuuccagcugcuaugu

SEQ ID NO: 1688989 - RNA, 19 nt, Artificial Sequence
  Description of Artificial Sequence: Synthetic oligonucleotide
ugguucacuuuguuauacu

SEQ ID NO: 1688990 - RNA, 19 nt, Artificial Sequence
  Description of Artificial Sequence: Synthetic oligonucleotide
cacaauggauaccgcuagg

SEQ ID NO: 1688991 - RNA, 19 nt, Artificial Sequence
  Description of Artificial Sequence: Synthetic oligonucleotide
aguuagcuaauguccccga

SEQ ID NO: 1688992 - RNA, 19 nt, Artificial Sequence
  Description of Artificial Sequence: Synthetic oligonucleotide
cacacuaggccccuuucuc

SEQ ID NO: 1688993 - RNA, 19 nt, Artificial Sequence
  Description of Artificial Sequence: Synthetic oligonucleotide
accuuaguagccaaaccga

SEQ ID NO: 1688994 - RNA, 19 nt, Artificial Sequence
  Description of Artificial Sequence: Synthetic oligonucleotide
cugcuauguacccaaguga

SEQ ID NO: 1688995 - RNA, 19 nt, Artificial Sequence
  Description of Artificial Sequence: Synthetic oligonucleotide
gugacuuagcaaauucaac

SEQ ID NO: 1688996 - RNA, 19 nt, Artificial Sequence
  Description of Artificial Sequence: Synthetic oligonucleotide
ccauccccuaguuugauug

SEQ ID NO: 1688997 - RNA, 19 nt, Artificial Sequence
  Description of Artificial Sequence: Synthetic oligonucleotide
augacagaguuagcuaaug

SEQ ID NO: 1688998 - RNA, 19 nt, Artificial Sequence
  Description of Artificial Sequence: Synthetic oligonucleotide
ccccaugguauacacaggg

SEQ ID NO: 1688999 - RNA, 19 nt, Artificial Sequence
  Description of Artificial Sequence: Synthetic oligonucleotide
cuuucuagacuccuagucu

SEQ ID NO: 1689000 - RNA, 19 nt, Artificial Sequence
  Description of Artificial Sequence: Synthetic oligonucleotide
acaaaagggcagagggcac

SEQ ID NO: 1689001 - RNA, 19 nt, Artificial Sequence
  Description of Artificial Sequence: Synthetic oligonucleotide
agaaggcacaaaagggcag

SEQ ID NO: 1689002 - RNA, 19 nt, Artificial Sequence
  Description of Artificial Sequence: Synthetic oligonucleotide
aucgggaauaagcucucaa

SEQ ID NO: 1689003 - RNA, 19 nt, Artificial Sequence
  Description of Artificial Sequence: Synthetic oligonucleotide
cauuaaggaaggacuuaca

SEQ ID NO: 1689004 - RNA, 19 nt, Artificial Sequence
  Description of Artificial Sequence: Synthetic oligonucleotide
ggauguuugguuccuacaa

SEQ ID NO: 1689005 - RNA, 19 nt, Artificial Sequence
  Description of Artificial Sequence: Synthetic oligonucleotide
ugguuccuacaaagcaugu

SEQ ID NO: 1689006 - RNA, 19 nt, Artificial Sequence
  Description of Artificial Sequence: Synthetic oligonucleotide
cuauguacccaagugaagu

SEQ ID NO: 1689007 - RNA, 19 nt, Artificial Sequence
  Description of Artificial Sequence: Synthetic oligonucleotide
aaggacucggagagggaug

SEQ ID NO: 1689008 - RNA, 19 nt, Artificial Sequence
  Description of Artificial Sequence: Synthetic oligonucleotide
agcauguuugguucacuuu

SEQ ID NO: 1689009 - RNA, 19 nt, Artificial Sequence
  Description of Artificial Sequence: Synthetic oligonucleotide
gugacuagaaaagcagcuc

SEQ ID NO: 1689010 - RNA, 19 nt, Artificial Sequence
  Description of Artificial Sequence: Synthetic oligonucleotide
aucacaauggauaccgcua

SEQ ID NO: 1689011 - RNA, 19 nt, Artificial Sequence
  Description of Artificial Sequence: Synthetic oligonucleotide
ugcauuaaggaaggacuua

SEQ ID NO: 1689012 - RNA, 19 nt, Artificial Sequence
  Description of Artificial Sequence: Synthetic oligonucleotide
cuauuaccuagauaguuau

SEQ ID NO: 1689013 - RNA, 19 nt, Artificial Sequence
  Description of Artificial Sequence: Synthetic oligonucleotide
gcucucaaauuuaacuugc

SEQ ID NO: 1689014 - RNA, 19 nt, Artificial Sequence
  Description of Artificial Sequence: Synthetic oligonucleotide
agcucgacagauagucuuc

SEQ ID NO: 1689015 - RNA, 19 nt, Artificial Sequence
  Description of Artificial Sequence: Synthetic oligonucleotide
cauuccuuaagacugcgau

SEQ ID NO: 1689016 - RNA, 19 nt, Artificial Sequence
  Description of Artificial Sequence: Synthetic oligonucleotide
ugcgaucacaagguaguaa

SEQ ID NO: 1689017 - RNA, 19 nt, Artificial Sequence
  Description of Artificial Sequence: Synthetic oligonucleotide
auauggccagaauuauuuu

SEQ ID NO: 1689018 - RNA, 19 nt, Artificial Sequence
  Description of Artificial Sequence: Synthetic oligonucleotide
ccaacucuuguccaauggc

SEQ ID NO: 1689019 - RNA, 19 nt, Artificial Sequence
  Description of Artificial Sequence: Synthetic oligonucleotide
acgguauagacaacucuca

SEQ ID NO: 1689020 - RNA, 19 nt, Artificial Sequence
  Description of Artificial Sequence: Synthetic oligonucleotide
agagggaugcucagagcuc

SEQ ID NO: 1689021 - RNA, 19 nt, Artificial Sequence
  Description of Artificial Sequence: Synthetic oligonucleotide
guggcuacauccacaagga

SEQ ID NO: 1689022 - RNA, 19 nt, Artificial Sequence
  Description of Artificial Sequence: Synthetic oligonucleotide
gcauuaaggaaggacuuac

SEQ ID NO: 1689023 - RNA, 19 nt, Artificial Sequence
  Description of Artificial Sequence: Synthetic oligonucleotide
cucgacagauagucuucag

SEQ ID NO: 1689024 - RNA, 19 nt, Artificial Sequence
  Description of Artificial Sequence: Synthetic oligonucleotide
uccacacuaggccccuuuc

SEQ ID NO: 1689025 - RNA, 19 nt, Artificial Sequence
  Description of Artificial Sequence: Synthetic oligonucleotide
auggauaccgcuagguuuu

SEQ ID NO: 1689026 - RNA, 19 nt, Artificial Sequence
  Description of Artificial Sequence: Synthetic oligonucleotide
agcucuuaaaugacagagu

SEQ ID NO: 1689027 - RNA, 19 nt, Artificial Sequence
  Description of Artificial Sequence: Synthetic oligonucleotide
aggauccggagaagggccc

SEQ ID NO: 1689028 - RNA, 19 nt, Artificial Sequence
  Description of Artificial Sequence: Synthetic oligonucleotide
ucacagcaacucuuuggaa

SEQ ID NO: 1689029 - RNA, 19 nt, Artificial Sequence
  Description of Artificial Sequence: Synthetic oligonucleotide
gcgaucacaagguaguaaa

SEQ ID NO: 1689030 - RNA, 19 nt, Artificial Sequence
  Description of Artificial Sequence: Synthetic oligonucleotide
auaacuccccagaauuagu

SEQ ID NO: 1689031 - RNA, 19 nt, Artificial Sequence
  Description of Artificial Sequence: Synthetic oligonucleotide
uacccaagugaaguccaca

SEQ ID NO: 1689032 - RNA, 19 nt, Artificial Sequence
  Description of Artificial Sequence: Synthetic oligonucleotide
aaccgacuugaagaacacu

SEQ ID NO: 1689033 - RNA, 19 nt, Artificial Sequence
  Description of Artificial Sequence: Synthetic oligonucleotide
guugucuauuaccuagaua

SEQ ID NO: 1689034 - RNA, 19 nt, Artificial Sequence
  Description of Artificial Sequence: Synthetic oligonucleotide
cugcuuggcaacaaaccaa

SEQ ID NO: 1689035 - RNA, 19 nt, Artificial Sequence
  Description of Artificial Sequence: Synthetic oligonucleotide
caacucuuguccaauggcu

SEQ ID NO: 1689036 - RNA, 19 nt, Artificial Sequence
  Description of Artificial Sequence: Synthetic oligonucleotide
agcaauguccuugcacaca

SEQ ID NO: 1689037 - RNA, 19 nt, Artificial Sequence
  Description of Artificial Sequence: Synthetic oligonucleotide
cuuaguagccaaaccgacu

SEQ ID NO: 1689038 - RNA, 19 nt, Artificial Sequence
  Description of Artificial Sequence: Synthetic oligonucleotide
uauuauccuuucccauauu

SEQ ID NO: 1689039 - RNA, 19 nt, Artificial Sequence
  Description of Artificial Sequence: Synthetic oligonucleotide
ggcccugaugacuuuggcc

SEQ ID NO: 1689040 - RNA, 19 nt, Artificial Sequence
  Description of Artificial Sequence: Synthetic oligonucleotide
caucacaauggauaccgcu

SEQ ID NO: 1689041 - RNA, 19 nt, Artificial Sequence
  Description of Artificial Sequence: Synthetic oligonucleotide
aaucgggaauaagcucuca

SEQ ID NO: 1689042 - RNA, 19 nt, Artificial Sequence
  Description of Artificial Sequence: Synthetic oligonucleotide
ucacguugucuauuaccua

SEQ ID NO: 1689043 - RNA, 19 nt, Artificial Sequence
  Description of Artificial Sequence: Synthetic oligonucleotide
gcccagacgguauagacaa

SEQ ID NO: 1689044 - RNA, 19 nt, Artificial Sequence
  Description of Artificial Sequence: Synthetic oligonucleotide
uccccagaauuagucaaaa

SEQ ID NO: 1689045 - RNA, 19 nt, Artificial Sequence
  Description of Artificial Sequence: Synthetic oligonucleotide
gguauacacagggaacgug

SEQ ID NO: 1689046 - RNA, 19 nt, Artificial Sequence
  Description of Artificial Sequence: Synthetic oligonucleotide
guccccgagagccuaagaa

SEQ ID NO: 1689047 - RNA, 19 nt, Artificial Sequence
  Description of Artificial Sequence: Synthetic oligonucleotide
cuuguccaauggcuacaag

SEQ ID NO: 1689048 - RNA, 19 nt, Artificial Sequence
  Description of Artificial Sequence: Synthetic oligonucleotide
agccuaagaaaggaaugaa

SEQ ID NO: 1689049 - RNA, 19 nt, Artificial Sequence
  Description of Artificial Sequence: Synthetic oligonucleotide
agucuccaagcugaagaca

SEQ ID NO: 1689050 - RNA, 19 nt, Artificial Sequence
  Description of Artificial Sequence: Synthetic oligonucleotide
cuacaaagcauguuugguu

SEQ ID NO: 1689051 - RNA, 19 nt, Artificial Sequence
  Description of Artificial Sequence: Synthetic oligonucleotide
uaucaccugcuuggcaaca

SEQ ID NO: 1689052 - RNA, 19 nt, Artificial Sequence
  Description of Artificial Sequence: Synthetic oligonucleotide
cuagucuuuacagcuaacu

SEQ ID NO: 1689053 - RNA, 19 nt, Artificial Sequence
  Description of Artificial Sequence: Synthetic oligonucleotide
cucggagagggaugcucag

SEQ ID NO: 1689054 - RNA, 19 nt, Artificial Sequence
  Description of Artificial Sequence: Synthetic oligonucleotide
cuuccauccccuaguuuga

SEQ ID NO: 1689055 - RNA, 19 nt, Artificial Sequence
  Description of Artificial Sequence: Synthetic oligonucleotide
aggaaugaagccacagcaa

SEQ ID NO: 1689056 - RNA, 19 nt, Artificial Sequence
  Description of Artificial Sequence: Synthetic oligonucleotide
uccccucuguuuucuuucu

SEQ ID NO: 1689057 - RNA, 19 nt, Artificial Sequence
  Description of Artificial Sequence: Synthetic oligonucleotide
cagggcugcauuaaaauuu

SEQ ID NO: 1689058 - RNA, 19 nt, Artificial Sequence
  Description of Artificial Sequence: Synthetic oligonucleotide
ggauggcauuccuuaagac

SEQ ID NO: 1689059 - RNA, 19 nt, Artificial Sequence
  Description of Artificial Sequence: Synthetic oligonucleotide
uugcccaauauggccagaa

SEQ ID NO: 1689060 - RNA, 19 nt, Artificial Sequence
  Description of Artificial Sequence: Synthetic oligonucleotide
ugcccaauauggccagaau

SEQ ID NO: 1689061 - RNA, 19 nt, Artificial Sequence
  Description of Artificial Sequence: Synthetic oligonucleotide
cccaauauggccagaauua

SEQ ID NO: 1689062 - RNA, 19 nt, Artificial Sequence
  Description of Artificial Sequence: Synthetic oligonucleotide
uagccucaaauauccuaua

SEQ ID NO: 1689063 - RNA, 19 nt, Artificial Sequence
  Description of Artificial Sequence: Synthetic oligonucleotide
gguaguaaauuaacuggaa

SEQ ID NO: 1689064 - RNA, 19 nt, Artificial Sequence
  Description of Artificial Sequence: Synthetic oligonucleotide
gagcucgacagauagucuu

SEQ ID NO: 1689065 - RNA, 19 nt, Artificial Sequence
  Description of Artificial Sequence: Synthetic oligonucleotide
acucggagagggaugcuca

SEQ ID NO: 1689066 - RNA, 19 nt, Artificial Sequence
  Description of Artificial Sequence: Synthetic oligonucleotide
uguguggagaaggcacaaa

SEQ ID NO: 1689067 - RNA, 19 nt, Artificial Sequence
  Description of Artificial Sequence: Synthetic oligonucleotide
uaauguccccgagagccua

SEQ ID NO: 1689068 - RNA, 19 nt, Artificial Sequence
  Description of Artificial Sequence: Synthetic oligonucleotide
agacaacucucaaugccau

SEQ ID NO: 1689069 - RNA, 19 nt, Artificial Sequence
  Description of Artificial Sequence: Synthetic oligonucleotide
aacuugcauuaaggaagga

SEQ ID NO: 1689070 - RNA, 19 nt, Artificial Sequence
  Description of Artificial Sequence: Synthetic oligonucleotide
ccaagugaaguccacacua

SEQ ID NO: 1689071 - RNA, 19 nt, Artificial Sequence
  Description of Artificial Sequence: Synthetic oligonucleotide
ggggauguuugguuccuac

SEQ ID NO: 1689072 - RNA, 19 nt, Artificial Sequence
  Description of Artificial Sequence: Synthetic oligonucleotide
guccuauaacuccccagaa

SEQ ID NO: 1689073 - RNA, 19 nt, Artificial Sequence
  Description of Artificial Sequence: Synthetic oligonucleotide
ggcauuccuuaagacugcg

SEQ ID NO: 1689074 - RNA, 19 nt, Artificial Sequence
  Description of Artificial Sequence: Synthetic oligonucleotide
gcuauguacccaagugaag

SEQ ID NO: 1689075 - RNA, 19 nt, Artificial Sequence
  Description of Artificial Sequence: Synthetic oligonucleotide
gucuauuaccuagauaguu

SEQ ID NO: 1689076 - RNA, 19 nt, Artificial Sequence
  Description of Artificial Sequence: Synthetic oligonucleotide
cuaggccccuuucuccuuc

SEQ ID NO: 1689077 - RNA, 19 nt, Artificial Sequence
  Description of Artificial Sequence: Synthetic oligonucleotide
cauguuugguucacuuugu

SEQ ID NO: 1689078 - RNA, 19 nt, Artificial Sequence
  Description of Artificial Sequence: Synthetic oligonucleotide
gcucauugugacuuagcaa

SEQ ID NO: 1689079 - RNA, 19 nt, Artificial Sequence
  Description of Artificial Sequence: Synthetic oligonucleotide
ccaugguauacacagggaa

SEQ ID NO: 1689080 - RNA, 19 nt, Artificial Sequence
  Description of Artificial Sequence: Synthetic oligonucleotide
gaauaacagcugaugcacu

SEQ ID NO: 1689081 - RNA, 19 nt, Artificial Sequence
  Description of Artificial Sequence: Synthetic oligonucleotide
cagggaacguggcuacauc

SEQ ID NO: 1689082 - RNA, 19 nt, Artificial Sequence
  Description of Artificial Sequence: Synthetic oligonucleotide
acguugucuauuaccuaga

SEQ ID NO: 1689083 - RNA, 19 nt, Artificial Sequence
  Description of Artificial Sequence: Synthetic oligonucleotide
ccacccauggugccaaaag

SEQ ID NO: 1689084 - RNA, 19 nt, Artificial Sequence
  Description of Artificial Sequence: Synthetic oligonucleotide
gccaaaccgacuugaagaa

SEQ ID NO: 1689085 - RNA, 19 nt, Artificial Sequence
  Description of Artificial Sequence: Synthetic oligonucleotide
agagcucgacagauagucu

SEQ ID NO: 1689086 - RNA, 19 nt, Artificial Sequence
  Description of Artificial Sequence: Synthetic oligonucleotide
gggaauaagcucucaaauu

SEQ ID NO: 1689087 - RNA, 19 nt, Artificial Sequence
  Description of Artificial Sequence: Synthetic oligonucleotide
acguggcuacauccacaag

SEQ ID NO: 1689088 - RNA, 19 nt, Artificial Sequence
  Description of Artificial Sequence: Synthetic oligonucleotide
gcaacucuuuggaacacuc

SEQ ID NO: 1689089 - RNA, 19 nt, Artificial Sequence
  Description of Artificial Sequence: Synthetic oligonucleotide
ugcgcccagacgguauaga

SEQ ID NO: 1689090 - RNA, 19 nt, Artificial Sequence
  Description of Artificial Sequence: Synthetic oligonucleotide
cucuuguccaauggcuaca

SEQ ID NO: 1689091 - RNA, 19 nt, Artificial Sequence
  Description of Artificial Sequence: Synthetic oligonucleotide
gcuaacuuccagcugcuau

SEQ ID NO: 1689092 - RNA, 19 nt, Artificial Sequence
  Description of Artificial Sequence: Synthetic oligonucleotide
gggcacaucugagaacaug

SEQ ID NO: 1689093 - RNA, 19 nt, Artificial Sequence
  Description of Artificial Sequence: Synthetic oligonucleotide
aauguccccgagagccuaa

SEQ ID NO: 1689094 - RNA, 19 nt, Artificial Sequence
  Description of Artificial Sequence: Synthetic oligonucleotide
caucugaauaacagcugau

SEQ ID NO: 1689095 - RNA, 19 nt, Artificial Sequence
  Description of Artificial Sequence: Synthetic oligonucleotide
ccccagaauuagucaaaag

SEQ ID NO: 1689096 - RNA, 19 nt, Artificial Sequence
  Description of Artificial Sequence: Synthetic oligonucleotide
caguggcugcgcccagacg

SEQ ID NO: 1689097 - RNA, 19 nt, Artificial Sequence
  Description of Artificial Sequence: Synthetic oligonucleotide
guacccaagugaaguccac

SEQ ID NO: 1689098 - RNA, 19 nt, Artificial Sequence
  Description of Artificial Sequence: Synthetic oligonucleotide
caacucucaaugccauuua

SEQ ID NO: 1689099 - RNA, 19 nt, Artificial Sequence
  Description of Artificial Sequence: Synthetic oligonucleotide
gcgcccagacgguauagac

SEQ ID NO: 1689100 - RNA, 19 nt, Artificial Sequence
  Description of Artificial Sequence: Synthetic oligonucleotide
cuaauguccccgagagccu

SEQ ID NO: 1689101 - RNA, 19 nt, Artificial Sequence
  Description of Artificial Sequence: Synthetic oligonucleotide
guagccaaaccgacuugaa

SEQ ID NO: 1689102 - RNA, 19 nt, Artificial Sequence
  Description of Artificial Sequence: Synthetic oligonucleotide
caaagaggagagagagagu

SEQ ID NO: 1689103 - RNA, 19 nt, Artificial Sequence
  Description of Artificial Sequence: Synthetic oligonucleotide
ccuagucuuuacagcuaac

SEQ ID NO: 1689104 - RNA, 19 nt, Artificial Sequence
  Description of Artificial Sequence: Synthetic oligonucleotide
caauggauaccgcuagguu

SEQ ID NO: 1689105 - RNA, 19 nt, Artificial Sequence
  Description of Artificial Sequence: Synthetic oligonucleotide
caauggcuacaagguauga

SEQ ID NO: 1689106 - RNA, 19 nt, Artificial Sequence
  Description of Artificial Sequence: Synthetic oligonucleotide
ccgacuugaagaacacuaa

SEQ ID NO: 1689107 - RNA, 19 nt, Artificial Sequence
  Description of Artificial Sequence: Synthetic oligonucleotide
ccuuaagacugcgaucaca

SEQ ID NO: 1689108 - RNA, 19 nt, Artificial Sequence
  Description of Artificial Sequence: Synthetic oligonucleotide
auccggagaagggcccuga

SEQ ID NO: 1689109 - RNA, 19 nt, Artificial Sequence
  Description of Artificial Sequence: Synthetic oligonucleotide
ccaaaccgacuugaagaac

SEQ ID NO: 1689110 - RNA, 19 nt, Artificial Sequence
  Description of Artificial Sequence: Synthetic oligonucleotide
cugcgcccagacgguauag

SEQ ID NO: 1689111 - RNA, 19 nt, Artificial Sequence
  Description of Artificial Sequence: Synthetic oligonucleotide
gcucuaagagauaaugauu

SEQ ID NO: 1689112 - RNA, 19 nt, Artificial Sequence
  Description of Artificial Sequence: Synthetic oligonucleotide
ccggagaagggcccugaug

SEQ ID NO: 1689113 - RNA, 19 nt, Artificial Sequence
  Description of Artificial Sequence: Synthetic oligonucleotide
accacccauggugccaaaa

SEQ ID NO: 1689114 - RNA, 19 nt, Artificial Sequence
  Description of Artificial Sequence: Synthetic oligonucleotide
cauccccuaguuugauugu

SEQ ID NO: 1689115 - RNA, 19 nt, Artificial Sequence
  Description of Artificial Sequence: Synthetic oligonucleotide
ccgagagccuaagaaagga

SEQ ID NO: 1689116 - RNA, 19 nt, Artificial Sequence
  Description of Artificial Sequence: Synthetic oligonucleotide
gcucgacagauagucuuca

SEQ ID NO: 1689117 - RNA, 19 nt, Artificial Sequence
  Description of Artificial Sequence: Synthetic oligonucleotide
cccaugguauacacaggga

SEQ ID NO: 1689118 - RNA, 19 nt, Artificial Sequence
  Description of Artificial Sequence: Synthetic oligonucleotide
cauugugacuuagcaaauu

SEQ ID NO: 1689119 - RNA, 19 nt, Artificial Sequence
  Description of Artificial Sequence: Synthetic oligonucleotide
cagugucaaagaggagaga

SEQ ID NO: 1689120 - RNA, 19 nt, Artificial Sequence
  Description of Artificial Sequence: Synthetic oligonucleotide
ggagguggauggcauuccu

SEQ ID NO: 1689121 - RNA, 19 nt, Artificial Sequence
  Description of Artificial Sequence: Synthetic oligonucleotide
cagcuaacuuccagcugcu

SEQ ID NO: 1689122 - RNA, 19 nt, Artificial Sequence
  Description of Artificial Sequence: Synthetic oligonucleotide
agcuaacuuccagcugcua

SEQ ID NO: 1689123 - RNA, 19 nt, Artificial Sequence
  Description of Artificial Sequence: Synthetic oligonucleotide
gcccaccaacucuugucca

SEQ ID NO: 1689124 - RNA, 19 nt, Artificial Sequence
  Description of Artificial Sequence: Synthetic oligonucleotide
gcauuccuuaagacugcga

SEQ ID NO: 1689125 - RNA, 19 nt, Artificial Sequence
  Description of Artificial Sequence: Synthetic oligonucleotide
gagguggauggcauuccuu

SEQ ID NO: 1689126 - RNA, 19 nt, Artificial Sequence
  Description of Artificial Sequence: Synthetic oligonucleotide
ccacaaggacucggagagg

SEQ ID NO: 1689127 - RNA, 19 nt, Artificial Sequence
  Description of Artificial Sequence: Synthetic oligonucleotide
guggggauguuugguuccu

SEQ ID NO: 1689128 - RNA, 19 nt, Artificial Sequence
  Description of Artificial Sequence: Synthetic oligonucleotide
cgcccagacgguauagaca

SEQ ID NO: 1689129 - RNA, 19 nt, Artificial Sequence
  Description of Artificial Sequence: Synthetic oligonucleotide
gguuccuacaaagcauguu

SEQ ID NO: 1689130 - RNA, 19 nt, Artificial Sequence
  Description of Artificial Sequence: Synthetic oligonucleotide
cugcgaucacaagguagua

SEQ ID NO: 1689131 - RNA, 19 nt, Artificial Sequence
  Description of Artificial Sequence: Synthetic oligonucleotide
uggcugcgcccagacggua

SEQ ID NO: 1689132 - RNA, 19 nt, Artificial Sequence
  Description of Artificial Sequence: Synthetic oligonucleotide
cccagacgguauagacaac

SEQ ID NO: 1689133 - RNA, 19 nt, Artificial Sequence
  Description of Artificial Sequence: Synthetic oligonucleotide
caauguccuugcacacaau

SEQ ID NO: 1689134 - RNA, 19 nt, Artificial Sequence
  Description of Artificial Sequence: Synthetic oligonucleotide
gaccacccauggugccaaa

SEQ ID NO: 1689135 - RNA, 19 nt, Artificial Sequence
  Description of Artificial Sequence: Synthetic oligonucleotide
gcugcgcccagacgguaua

SEQ ID NO: 1689136 - RNA, 19 nt, Artificial Sequence
  Description of Artificial Sequence: Synthetic oligonucleotide
guggcugcgcccagacggu

SEQ ID NO: 1689137 - RNA, 19 nt, Artificial Sequence
  Description of Artificial Sequence: Synthetic oligonucleotide
cguugucuauuaccuagau

SEQ ID NO: 1689138 - RNA, 19 nt, Artificial Sequence
  Description of Artificial Sequence: Synthetic oligonucleotide
ggcugcgcccagacgguau

SEQ ID NO: 1689139 - RNA, 19 nt, Artificial Sequence
  Description of Artificial Sequence: Synthetic oligonucleotide
ggacucggagagggaugcu

SEQ ID NO: 1689140 - RNA, 19 nt, Artificial Sequence
  Description of Artificial Sequence: Synthetic oligonucleotide
aauuaaagcaaaccuaucc

SEQ ID NO: 1689141 - RNA, 19 nt, Artificial Sequence
  Description of Artificial Sequence: Synthetic oligonucleotide
aaaccuaucccaaacaugc

SEQ ID NO: 1689142 - RNA, 19 nt, Artificial Sequence
  Description of Artificial Sequence: Synthetic oligonucleotide
auuaaagcaaaccuauccc

SEQ ID NO: 1689143 - RNA, 19 nt, Artificial Sequence
  Description of Artificial Sequence: Synthetic oligonucleotide
aauuagcagacauuggagg

SEQ ID NO: 1689144 - RNA, 19 nt, Artificial Sequence
  Description of Artificial Sequence: Synthetic oligonucleotide
uuuuaguugugccucaacg

SEQ ID NO: 1689145 - RNA, 19 nt, Artificial Sequence
  Description of Artificial Sequence: Synthetic oligonucleotide
aaaaucauuccagaccucc

SEQ ID NO: 1689146 - RNA, 19 nt, Artificial Sequence
  Description of Artificial Sequence: Synthetic oligonucleotide
aaguagucccuuuacagac

SEQ ID NO: 1689147 - RNA, 19 nt, Artificial Sequence
  Description of Artificial Sequence: Synthetic oligonucleotide
uaugcaagaaauuagcaga

SEQ ID NO: 1689148 - RNA, 19 nt, Artificial Sequence
  Description of Artificial Sequence: Synthetic oligonucleotide
acaauaguagcucuggagg

SEQ ID NO: 1689149 - RNA, 19 nt, Artificial Sequence
  Description of Artificial Sequence: Synthetic oligonucleotide
auaaaaucauuccagaccu

SEQ ID NO: 1689150 - RNA, 19 nt, Artificial Sequence
  Description of Artificial Sequence: Synthetic oligonucleotide
aaacacaaguaccagagca

SEQ ID NO: 1689151 - RNA, 19 nt, Artificial Sequence
  Description of Artificial Sequence: Synthetic oligonucleotide
cauaaaaucauuccagacc

SEQ ID NO: 1689152 - RNA, 19 nt, Artificial Sequence
  Description of Artificial Sequence: Synthetic oligonucleotide
agagcugaaaccuggaggg

SEQ ID NO: 1689153 - RNA, 19 nt, Artificial Sequence
  Description of Artificial Sequence: Synthetic oligonucleotide
aaugagauccauguacugg

SEQ ID NO: 1689154 - RNA, 19 nt, Artificial Sequence
  Description of Artificial Sequence: Synthetic oligonucleotide
aaucauuccagaccuccac

SEQ ID NO: 1689155 - RNA, 19 nt, Artificial Sequence
  Description of Artificial Sequence: Synthetic oligonucleotide
uugguugauaaaauguugc

SEQ ID NO: 1689156 - RNA, 19 nt, Artificial Sequence
  Description of Artificial Sequence: Synthetic oligonucleotide
aguguuaggagguaccggg

SEQ ID NO: 1689157 - RNA, 19 nt, Artificial Sequence
  Description of Artificial Sequence: Synthetic oligonucleotide
aaaguagucccuuuacaga

SEQ ID NO: 1689158 - RNA, 19 nt, Artificial Sequence
  Description of Artificial Sequence: Synthetic oligonucleotide
uuuaguugugccucaacgc

SEQ ID NO: 1689159 - RNA, 19 nt, Artificial Sequence
  Description of Artificial Sequence: Synthetic oligonucleotide
uuaaaaguagucccuuuac

SEQ ID NO: 1689160 - RNA, 19 nt, Artificial Sequence
  Description of Artificial Sequence: Synthetic oligonucleotide
aaggcuuuauuaaaaguag

SEQ ID NO: 1689161 - RNA, 19 nt, Artificial Sequence
  Description of Artificial Sequence: Synthetic oligonucleotide
auuccguacagcuugguug

SEQ ID NO: 1689162 - RNA, 19 nt, Artificial Sequence
  Description of Artificial Sequence: Synthetic oligonucleotide
auuccagaccuccacauag

SEQ ID NO: 1689163 - RNA, 19 nt, Artificial Sequence
  Description of Artificial Sequence: Synthetic oligonucleotide
agucccuuuacagacagac

SEQ ID NO: 1689164 - RNA, 19 nt, Artificial Sequence
  Description of Artificial Sequence: Synthetic oligonucleotide
ucauaaaaucauuccagac

SEQ ID NO: 1689165 - RNA, 19 nt, Artificial Sequence
  Description of Artificial Sequence: Synthetic oligonucleotide
cacaacagaacccacuacc

SEQ ID NO: 1689166 - RNA, 19 nt, Artificial Sequence
  Description of Artificial Sequence: Synthetic oligonucleotide
uaaaauguugcuugcgccu

SEQ ID NO: 1689167 - RNA, 19 nt, Artificial Sequence
  Description of Artificial Sequence: Synthetic oligonucleotide
cagacagacacacacacac

SEQ ID NO: 1689168 - RNA, 19 nt, Artificial Sequence
  Description of Artificial Sequence: Synthetic oligonucleotide
gacacacacacacacacac

SEQ ID NO: 1689169 - RNA, 19 nt, Artificial Sequence
  Description of Artificial Sequence: Synthetic oligonucleotide
gucagggucguccagagcc

SEQ ID NO: 1689170 - RNA, 19 nt, Artificial Sequence
  Description of Artificial Sequence: Synthetic oligonucleotide
uguugcuugcgccuggaag

SEQ ID NO: 1689171 - RNA, 19 nt, Artificial Sequence
  Description of Artificial Sequence: Synthetic oligonucleotide
aaaccuggaggggucaggc

SEQ ID NO: 1689172 - RNA, 19 nt, Artificial Sequence
  Description of Artificial Sequence: Synthetic oligonucleotide
cagaggagaaauuaaagca

SEQ ID NO: 1689173 - RNA, 19 nt, Artificial Sequence
  Description of Artificial Sequence: Synthetic oligonucleotide
cuugguugauaaaauguug

SEQ ID NO: 1689174 - RNA, 19 nt, Artificial Sequence
  Description of Artificial Sequence: Synthetic oligonucleotide
gacagacacacacacacac

SEQ ID NO: 1689175 - RNA, 19 nt, Artificial Sequence
  Description of Artificial Sequence: Synthetic oligonucleotide
ugauaaaauguugcuugcg

SEQ ID NO: 1689176 - RNA, 19 nt, Artificial Sequence
  Description of Artificial Sequence: Synthetic oligonucleotide
gaagcugagacccucuuca

SEQ ID NO: 1689177 - RNA, 19 nt, Artificial Sequence
  Description of Artificial Sequence: Synthetic oligonucleotide
guugcuugcgccuggaagc

SEQ ID NO: 1689178 - RNA, 19 nt, Artificial Sequence
  Description of Artificial Sequence: Synthetic oligonucleotide
cuugcuccucuccagagcg

SEQ ID NO: 1689179 - RNA, 19 nt, Artificial Sequence
  Description of Artificial Sequence: Synthetic oligonucleotide
uccagagcgguucauaaaa

SEQ ID NO: 1689180 - RNA, 19 nt, Artificial Sequence
  Description of Artificial Sequence: Synthetic oligonucleotide
agaacccacuaccagcugg

SEQ ID NO: 1689181 - RNA, 19 nt, Artificial Sequence
  Description of Artificial Sequence: Synthetic oligonucleotide
agacauuggaggucucggc

SEQ ID NO: 1689182 - RNA, 19 nt, Artificial Sequence
  Description of Artificial Sequence: Synthetic oligonucleotide
aacacaaguaccagagcag

SEQ ID NO: 1689183 - RNA, 19 nt, Artificial Sequence
  Description of Artificial Sequence: Synthetic oligonucleotide
agcauggcgguguacacag

SEQ ID NO: 1689184 - RNA, 19 nt, Artificial Sequence
  Description of Artificial Sequence: Synthetic oligonucleotide
aacgcuucagaggagaaau

SEQ ID NO: 1689185 - RNA, 19 nt, Artificial Sequence
  Description of Artificial Sequence: Synthetic oligonucleotide
guaggcagacaauaguagc

SEQ ID NO: 1689186 - RNA, 19 nt, Artificial Sequence
  Description of Artificial Sequence: Synthetic oligonucleotide
auuaaaaguagucccuuua

SEQ ID NO: 1689187 - RNA, 19 nt, Artificial Sequence
  Description of Artificial Sequence: Synthetic oligonucleotide
cacacacacacacacacac

SEQ ID NO: 1689188 - RNA, 19 nt, Artificial Sequence
  Description of Artificial Sequence: Synthetic oligonucleotide
auucugaaaguaugcaaga

SEQ ID NO: 1689189 - RNA, 19 nt, Artificial Sequence
  Description of Artificial Sequence: Synthetic oligonucleotide
gaagaacgccagcagacgc

SEQ ID NO: 1689190 - RNA, 19 nt, Artificial Sequence
  Description of Artificial Sequence: Synthetic oligonucleotide
agcugagacccucuucacc

SEQ ID NO: 1689191 - RNA, 19 nt, Artificial Sequence
  Description of Artificial Sequence: Synthetic oligonucleotide
uguuaggagguaccgggug

SEQ ID NO: 1689192 - RNA, 19 nt, Artificial Sequence
  Description of Artificial Sequence: Synthetic oligonucleotide
cagacacacacacacacac

SEQ ID NO: 1689193 - RNA, 19 nt, Artificial Sequence
  Description of Artificial Sequence: Synthetic oligonucleotide
accugugaaccaccgagcg

SEQ ID NO: 1689194 - RNA, 19 nt, Artificial Sequence
  Description of Artificial Sequence: Synthetic oligonucleotide
ugcgccuggaagcugagac

SEQ ID NO: 1689195 - RNA, 19 nt, Artificial Sequence
  Description of Artificial Sequence: Synthetic oligonucleotide
ugguugauaaaauguugcu

SEQ ID NO: 1689196 - RNA, 19 nt, Artificial Sequence
  Description of Artificial Sequence: Synthetic oligonucleotide
ggagaaauuaaagcaaacc

SEQ ID NO: 1689197 - RNA, 19 nt, Artificial Sequence
  Description of Artificial Sequence: Synthetic oligonucleotide
aauaguagcucuggaggca

SEQ ID NO: 1689198 - RNA, 19 nt, Artificial Sequence
  Description of Artificial Sequence: Synthetic oligonucleotide
agcaccaaggcuuuauuaa

SEQ ID NO: 1689199 - RNA, 19 nt, Artificial Sequence
  Description of Artificial Sequence: Synthetic oligonucleotide
ugccucaacgcuucagagg

SEQ ID NO: 1689200 - RNA, 19 nt, Artificial Sequence
  Description of Artificial Sequence: Synthetic oligonucleotide
gacggcgugaagcagcagc

SEQ ID NO: 1689201 - RNA, 19 nt, Artificial Sequence
  Description of Artificial Sequence: Synthetic oligonucleotide
augcaagaaauuagcagac

SEQ ID NO: 1689202 - RNA, 19 nt, Artificial Sequence
  Description of Artificial Sequence: Synthetic oligonucleotide
uccagcaguguuaggaggu

SEQ ID NO: 1689203 - RNA, 19 nt, Artificial Sequence
  Description of Artificial Sequence: Synthetic oligonucleotide
guagucccuuuacagacag

SEQ ID NO: 1689204 - RNA, 19 nt, Artificial Sequence
  Description of Artificial Sequence: Synthetic oligonucleotide
uggaggucucggcagggcg

SEQ ID NO: 1689205 - RNA, 19 nt, Artificial Sequence
  Description of Artificial Sequence: Synthetic oligonucleotide
gagguguaaaagcuggguc

SEQ ID NO: 1689206 - RNA, 19 nt, Artificial Sequence
  Description of Artificial Sequence: Synthetic oligonucleotide
uagguggcauuacugcaag

SEQ ID NO: 1689207 - RNA, 19 nt, Artificial Sequence
  Description of Artificial Sequence: Synthetic oligonucleotide
uguucugauucugaaagua

SEQ ID NO: 1689208 - RNA, 19 nt, Artificial Sequence
  Description of Artificial Sequence: Synthetic oligonucleotide
cugugaaccaccgagcgug

SEQ ID NO: 1689209 - RNA, 19 nt, Artificial Sequence
  Description of Artificial Sequence: Synthetic oligonucleotide
gagaagaacgccagcagac

SEQ ID NO: 1689210 - RNA, 19 nt, Artificial Sequence
  Description of Artificial Sequence: Synthetic oligonucleotide
accuaucccaaacaugcca

SEQ ID NO: 1689211 - RNA, 19 nt, Artificial Sequence
  Description of Artificial Sequence: Synthetic oligonucleotide
cauguacuggcagacggcg

SEQ ID NO: 1689212 - RNA, 19 nt, Artificial Sequence
  Description of Artificial Sequence: Synthetic oligonucleotide
aaccuaucccaaacaugcc

SEQ ID NO: 1689213 - RNA, 19 nt, Artificial Sequence
  Description of Artificial Sequence: Synthetic oligonucleotide
agagcgguucauaaaauca

SEQ ID NO: 1689214 - RNA, 19 nt, Artificial Sequence
  Description of Artificial Sequence: Synthetic oligonucleotide
agauccauguacuggcaga

SEQ ID NO: 1689215 - RNA, 19 nt, Artificial Sequence
  Description of Artificial Sequence: Synthetic oligonucleotide
uacgaggcugcccugugca

SEQ ID NO: 1689216 - RNA, 19 nt, Artificial Sequence
  Description of Artificial Sequence: Synthetic oligonucleotide
ugaguccuagagaggacca

SEQ ID NO: 1689217 - RNA, 19 nt, Artificial Sequence
  Description of Artificial Sequence: Synthetic oligonucleotide
agcuugguugauaaaaugu

SEQ ID NO: 1689218 - RNA, 19 nt, Artificial Sequence
  Description of Artificial Sequence: Synthetic oligonucleotide
uggcauuacugcaagccuc

SEQ ID NO: 1689219 - RNA, 19 nt, Artificial Sequence
  Description of Artificial Sequence: Synthetic oligonucleotide
ccuagagaggaccagacac

SEQ ID NO: 1689220 - RNA, 19 nt, Artificial Sequence
  Description of Artificial Sequence: Synthetic oligonucleotide
agaagaacgccagcagacg

SEQ ID NO: 1689221 - RNA, 19 nt, Artificial Sequence
  Description of Artificial Sequence: Synthetic oligonucleotide
uauuaaaaguagucccuuu

SEQ ID NO: 1689222 - RNA, 19 nt, Artificial Sequence
  Description of Artificial Sequence: Synthetic oligonucleotide
cacacacacacacacaaga

SEQ ID NO: 1689223 - RNA, 19 nt, Artificial Sequence
  Description of Artificial Sequence: Synthetic oligonucleotide
acagccuggggagacacgg

SEQ ID NO: 1689224 - RNA, 19 nt, Artificial Sequence
  Description of Artificial Sequence: Synthetic oligonucleotide
cauuacugcaagccucugc

SEQ ID NO: 1689225 - RNA, 19 nt, Artificial Sequence
  Description of Artificial Sequence: Synthetic oligonucleotide
caagacaaagugcccuggg

SEQ ID NO: 1689226 - RNA, 19 nt, Artificial Sequence
  Description of Artificial Sequence: Synthetic oligonucleotide
acgccugaagcacucauga

SEQ ID NO: 1689227 - RNA, 19 nt, Artificial Sequence
  Description of Artificial Sequence: Synthetic oligonucleotide
ugagguguaaaagcugggu

SEQ ID NO: 1689228 - RNA, 19 nt, Artificial Sequence
  Description of Artificial Sequence: Synthetic oligonucleotide
acacacacacacacaagac

SEQ ID NO: 1689229 - RNA, 19 nt, Artificial Sequence
  Description of Artificial Sequence: Synthetic oligonucleotide
cuccaaacgcugcagacuc

SEQ ID NO: 1689230 - RNA, 19 nt, Artificial Sequence
  Description of Artificial Sequence: Synthetic oligonucleotide
aggaccagacaccuccauc

SEQ ID NO: 1689231 - RNA, 19 nt, Artificial Sequence
  Description of Artificial Sequence: Synthetic oligonucleotide
caggcgacggcugauacgc

SEQ ID NO: 1689232 - RNA, 19 nt, Artificial Sequence
  Description of Artificial Sequence: Synthetic oligonucleotide
gcuguuguccagcauggcg

SEQ ID NO: 1689233 - RNA, 19 nt, Artificial Sequence
  Description of Artificial Sequence: Synthetic oligonucleotide
agacucuuccgucccuugg

SEQ ID NO: 1689234 - RNA, 19 nt, Artificial Sequence
  Description of Artificial Sequence: Synthetic oligonucleotide
cauugcugauccagguagg

SEQ ID NO: 1689235 - RNA, 19 nt, Artificial Sequence
  Description of Artificial Sequence: Synthetic oligonucleotide
cuggcagacggcgugaagc

SEQ ID NO: 1689236 - RNA, 19 nt, Artificial Sequence
  Description of Artificial Sequence: Synthetic oligonucleotide
cacucaugagguguaaaag

SEQ ID NO: 1689237 - RNA, 19 nt, Artificial Sequence
  Description of Artificial Sequence: Synthetic oligonucleotide
ugugaaccaccgagcgugg

SEQ ID NO: 1689238 - RNA, 19 nt, Artificial Sequence
  Description of Artificial Sequence: Synthetic oligonucleotide
acaugccaaaggucucccc

SEQ ID NO: 1689239 - RNA, 19 nt, Artificial Sequence
  Description of Artificial Sequence: Synthetic oligonucleotide
caacagaacccacuaccag

SEQ ID NO: 1689240 - RNA, 19 nt, Artificial Sequence
  Description of Artificial Sequence: Synthetic oligonucleotide
aggcagacaauaguagcuc

SEQ ID NO: 1689241 - RNA, 19 nt, Artificial Sequence
  Description of Artificial Sequence: Synthetic oligonucleotide
acacaagacaaagugcccu

SEQ ID NO: 1689242 - RNA, 19 nt, Artificial Sequence
  Description of Artificial Sequence: Synthetic oligonucleotide
aggggucacaacagaaccc

SEQ ID NO: 1689243 - RNA, 19 nt, Artificial Sequence
  Description of Artificial Sequence: Synthetic oligonucleotide
cugcgcuugagcacggacc

SEQ ID NO: 1689244 - RNA, 19 nt, Artificial Sequence
  Description of Artificial Sequence: Synthetic oligonucleotide
acacacacacacaagacaa

SEQ ID NO: 1689245 - RNA, 19 nt, Artificial Sequence
  Description of Artificial Sequence: Synthetic oligonucleotide
cucccgaagagaagugggg

SEQ ID NO: 1689246 - RNA, 19 nt, Artificial Sequence
  Description of Artificial Sequence: Synthetic oligonucleotide
cugaguccuagagaggacc

SEQ ID NO: 1689247 - RNA, 19 nt, Artificial Sequence
  Description of Artificial Sequence: Synthetic oligonucleotide
uggcgguguacacagccug

SEQ ID NO: 1689248 - RNA, 19 nt, Artificial Sequence
  Description of Artificial Sequence: Synthetic oligonucleotide
cuccagcaguguuaggagg

SEQ ID NO: 1689249 - RNA, 19 nt, Artificial Sequence
  Description of Artificial Sequence: Synthetic oligonucleotide
gguggcauuacugcaagcc

SEQ ID NO: 1689250 - RNA, 19 nt, Artificial Sequence
  Description of Artificial Sequence: Synthetic oligonucleotide
gacucccgaagagaagugg

SEQ ID NO: 1689251 - RNA, 19 nt, Artificial Sequence
  Description of Artificial Sequence: Synthetic oligonucleotide
agggcgagucagcagguag

SEQ ID NO: 1689252 - RNA, 19 nt, Artificial Sequence
  Description of Artificial Sequence: Synthetic oligonucleotide
uuuccaucgggaugcggcu

SEQ ID NO: 1689253 - RNA, 19 nt, Artificial Sequence
  Description of Artificial Sequence: Synthetic oligonucleotide
aaaucauuccagaccucca

SEQ ID NO: 1689254 - RNA, 19 nt, Artificial Sequence
  Description of Artificial Sequence: Synthetic oligonucleotide
cagcuugguugauaaaaug

SEQ ID NO: 1689255 - RNA, 19 nt, Artificial Sequence
  Description of Artificial Sequence: Synthetic oligonucleotide
aguugugccucaacgcuuc

SEQ ID NO: 1689256 - RNA, 19 nt, Artificial Sequence
  Description of Artificial Sequence: Synthetic oligonucleotide
uuagcagacauuggagguc

SEQ ID NO: 1689257 - RNA, 19 nt, Artificial Sequence
  Description of Artificial Sequence: Synthetic oligonucleotide
cuucaucugccuccggccc

SEQ ID NO: 1689258 - RNA, 19 nt, Artificial Sequence
  Description of Artificial Sequence: Synthetic oligonucleotide
cagacauuggaggucucgg

SEQ ID NO: 1689259 - RNA, 19 nt, Artificial Sequence
  Description of Artificial Sequence: Synthetic oligonucleotide
cauagguggcauuacugca

SEQ ID NO: 1689260 - RNA, 19 nt, Artificial Sequence
  Description of Artificial Sequence: Synthetic oligonucleotide
gacacggagaagaacgcca

SEQ ID NO: 1689261 - RNA, 19 nt, Artificial Sequence
  Description of Artificial Sequence: Synthetic oligonucleotide
cacacacacacacaagaca

SEQ ID NO: 1689262 - RNA, 19 nt, Artificial Sequence
  Description of Artificial Sequence: Synthetic oligonucleotide
cacacacacacacacacaa

SEQ ID NO: 1689263 - RNA, 19 nt, Artificial Sequence
  Description of Artificial Sequence: Synthetic oligonucleotide
uccagguaggcagacaaua

SEQ ID NO: 1689264 - RNA, 19 nt, Artificial Sequence
  Description of Artificial Sequence: Synthetic oligonucleotide
ccgaauuccguacagcuug

SEQ ID NO: 1689265 - RNA, 19 nt, Artificial Sequence
  Description of Artificial Sequence: Synthetic oligonucleotide
accggguguucuccaaacg

SEQ ID NO: 1689266 - RNA, 19 nt, Artificial Sequence
  Description of Artificial Sequence: Synthetic oligonucleotide
gaaaccuggaggggucagg

SEQ ID NO: 1689267 - RNA, 19 nt, Artificial Sequence
  Description of Artificial Sequence: Synthetic oligonucleotide
ugagacccucuucaccugu

SEQ ID NO: 1689268 - RNA, 19 nt, Artificial Sequence
  Description of Artificial Sequence: Synthetic oligonucleotide
ggcuuuauuaaaaguaguc

SEQ ID NO: 1689269 - RNA, 19 nt, Artificial Sequence
  Description of Artificial Sequence: Synthetic oligonucleotide
acggagaagaacgccagca

SEQ ID NO: 1689270 - RNA, 19 nt, Artificial Sequence
  Description of Artificial Sequence: Synthetic oligonucleotide
aagaacgccagcagacgcu

SEQ ID NO: 1689271 - RNA, 19 nt, Artificial Sequence
  Description of Artificial Sequence: Synthetic oligonucleotide
ugugcaagcugggccauga

SEQ ID NO: 1689272 - RNA, 19 nt, Artificial Sequence
  Description of Artificial Sequence: Synthetic oligonucleotide
gccucaacgcuucagagga

SEQ ID NO: 1689273 - RNA, 19 nt, Artificial Sequence
  Description of Artificial Sequence: Synthetic oligonucleotide
gaaggggcagccuggcuuc

SEQ ID NO: 1689274 - RNA, 19 nt, Artificial Sequence
  Description of Artificial Sequence: Synthetic oligonucleotide
ucaacgcuucagaggagaa

SEQ ID NO: 1689275 - RNA, 19 nt, Artificial Sequence
  Description of Artificial Sequence: Synthetic oligonucleotide
uggcagacggcgugaagca

SEQ ID NO: 1689276 - RNA, 19 nt, Artificial Sequence
  Description of Artificial Sequence: Synthetic oligonucleotide
gaggcugcccugugcaagc

SEQ ID NO: 1689277 - RNA, 19 nt, Artificial Sequence
  Description of Artificial Sequence: Synthetic oligonucleotide
agguaggggcuccaccauc

SEQ ID NO: 1689278 - RNA, 19 nt, Artificial Sequence
  Description of Artificial Sequence: Synthetic oligonucleotide
agguccgaauuccguacag

SEQ ID NO: 1689279 - RNA, 19 nt, Artificial Sequence
  Description of Artificial Sequence: Synthetic oligonucleotide
uaguugugccucaacgcuu

SEQ ID NO: 1689280 - RNA, 19 nt, Artificial Sequence
  Description of Artificial Sequence: Synthetic oligonucleotide
aucgggaugcggcugcgcu

SEQ ID NO: 1689281 - RNA, 19 nt, Artificial Sequence
  Description of Artificial Sequence: Synthetic oligonucleotide
uccgaauuccguacagcuu

SEQ ID NO: 1689282 - RNA, 19 nt, Artificial Sequence
  Description of Artificial Sequence: Synthetic oligonucleotide
caggguuuccaucgggaug

SEQ ID NO: 1689283 - RNA, 19 nt, Artificial Sequence
  Description of Artificial Sequence: Synthetic oligonucleotide
aauguugcuugcgccugga

SEQ ID NO: 1689284 - RNA, 19 nt, Artificial Sequence
  Description of Artificial Sequence: Synthetic oligonucleotide
uggcacuagguguuuuagu

SEQ ID NO: 1689285 - RNA, 19 nt, Artificial Sequence
  Description of Artificial Sequence: Synthetic oligonucleotide
uaccggguguucuccaaac

SEQ ID NO: 1689286 - RNA, 19 nt, Artificial Sequence
  Description of Artificial Sequence: Synthetic oligonucleotide
cugucuccagcaguguuag

SEQ ID NO: 1689287 - RNA, 19 nt, Artificial Sequence
  Description of Artificial Sequence: Synthetic oligonucleotide
ggucuccccacccaaacac

SEQ ID NO: 1689288 - RNA, 19 nt, Artificial Sequence
  Description of Artificial Sequence: Synthetic oligonucleotide
augagguguaaaagcuggg

SEQ ID NO: 1689289 - RNA, 19 nt, Artificial Sequence
  Description of Artificial Sequence: Synthetic oligonucleotide
ugaaaccuggaggggucag

SEQ ID NO: 1689290 - RNA, 19 nt, Artificial Sequence
  Description of Artificial Sequence: Synthetic oligonucleotide
caguguuaggagguaccgg

SEQ ID NO: 1689291 - RNA, 19 nt, Artificial Sequence
  Description of Artificial Sequence: Synthetic oligonucleotide
aggcuuuauuaaaaguagu

SEQ ID NO: 1689292 - RNA, 19 nt, Artificial Sequence
  Description of Artificial Sequence: Synthetic oligonucleotide
cgguucauaaaaucauucc

SEQ ID NO: 1689293 - RNA, 19 nt, Artificial Sequence
  Description of Artificial Sequence: Synthetic oligonucleotide
agaucagcugaguccuaga

SEQ ID NO: 1689294 - RNA, 19 nt, Artificial Sequence
  Description of Artificial Sequence: Synthetic oligonucleotide
ugacgguugcugaccuuca

SEQ ID NO: 1689295 - RNA, 19 nt, Artificial Sequence
  Description of Artificial Sequence: Synthetic oligonucleotide
gcugauacgccugaagcac

SEQ ID NO: 1689296 - RNA, 19 nt, Artificial Sequence
  Description of Artificial Sequence: Synthetic oligonucleotide
auagguggcauuacugcaa

SEQ ID NO: 1689297 - RNA, 19 nt, Artificial Sequence
  Description of Artificial Sequence: Synthetic oligonucleotide
gaaccaccgagcgugggca

SEQ ID NO: 1689298 - RNA, 19 nt, Artificial Sequence
  Description of Artificial Sequence: Synthetic oligonucleotide
acacggagaagaacgccag

SEQ ID NO: 1689299 - RNA, 19 nt, Artificial Sequence
  Description of Artificial Sequence: Synthetic oligonucleotide
accagguccgaauuccgua

SEQ ID NO: 1689300 - RNA, 19 nt, Artificial Sequence
  Description of Artificial Sequence: Synthetic oligonucleotide
gcaguguuaggagguaccg

SEQ ID NO: 1689301 - RNA, 19 nt, Artificial Sequence
  Description of Artificial Sequence: Synthetic oligonucleotide
uguuuuaguugugccucaa

SEQ ID NO: 1689302 - RNA, 19 nt, Artificial Sequence
  Description of Artificial Sequence: Synthetic oligonucleotide
auccauguacuggcagacg

SEQ ID NO: 1689303 - RNA, 19 nt, Artificial Sequence
  Description of Artificial Sequence: Synthetic oligonucleotide
auacgccugaagcacucau

SEQ ID NO: 1689304 - RNA, 19 nt, Artificial Sequence
  Description of Artificial Sequence: Synthetic oligonucleotide
gagguaccggguguucucc

SEQ ID NO: 1689305 - RNA, 19 nt, Artificial Sequence
  Description of Artificial Sequence: Synthetic oligonucleotide
cauccuccagguagcggag

SEQ ID NO: 1689306 - RNA, 19 nt, Artificial Sequence
  Description of Artificial Sequence: Synthetic oligonucleotide
gugacgguugcugaccuuc

SEQ ID NO: 1689307 - RNA, 19 nt, Artificial Sequence
  Description of Artificial Sequence: Synthetic oligonucleotide
ucucggcagggcgagucag

SEQ ID NO: 1689308 - RNA, 19 nt, Artificial Sequence
  Description of Artificial Sequence: Synthetic oligonucleotide
gguagcggagcacucguuc

SEQ ID NO: 1689309 - RNA, 19 nt, Artificial Sequence
  Description of Artificial Sequence: Synthetic oligonucleotide
uccaaacgcugcagacucu

SEQ ID NO: 1689310 - RNA, 19 nt, Artificial Sequence
  Description of Artificial Sequence: Synthetic oligonucleotide
acacacacacacacacaag

SEQ ID NO: 1689311 - RNA, 19 nt, Artificial Sequence
  Description of Artificial Sequence: Synthetic oligonucleotide
cuacgaggcugcccugugc

SEQ ID NO: 1689312 - RNA, 19 nt, Artificial Sequence
  Description of Artificial Sequence: Synthetic oligonucleotide
aggucuccccacccaaaca

SEQ ID NO: 1689313 - RNA, 19 nt, Artificial Sequence
  Description of Artificial Sequence: Synthetic oligonucleotide
acuggcagacggcgugaag

SEQ ID NO: 1689314 - RNA, 19 nt, Artificial Sequence
  Description of Artificial Sequence: Synthetic oligonucleotide
cugaagcacucaugaggug

SEQ ID NO: 1689315 - RNA, 19 nt, Artificial Sequence
  Description of Artificial Sequence: Synthetic oligonucleotide
acagacacacacacacaca

SEQ ID NO: 1689316 - RNA, 19 nt, Artificial Sequence
  Description of Artificial Sequence: Synthetic oligonucleotide
ggagcacucguucuugcuc

SEQ ID NO: 1689317 - RNA, 19 nt, Artificial Sequence
  Description of Artificial Sequence: Synthetic oligonucleotide
ccggguguucuccaaacgc

SEQ ID NO: 1689318 - RNA, 19 nt, Artificial Sequence
  Description of Artificial Sequence: Synthetic oligonucleotide
uccgucccuuggcuuuggg

SEQ ID NO: 1689319 - RNA, 19 nt, Artificial Sequence
  Description of Artificial Sequence: Synthetic oligonucleotide
gaggucucggcagggcgag

SEQ ID NO: 1689320 - RNA, 19 nt, Artificial Sequence
  Description of Artificial Sequence: Synthetic oligonucleotide
cucaacgcuucagaggaga

SEQ ID NO: 1689321 - RNA, 19 nt, Artificial Sequence
  Description of Artificial Sequence: Synthetic oligonucleotide
cacggagaagaacgccagc

SEQ ID NO: 1689322 - RNA, 19 nt, Artificial Sequence
  Description of Artificial Sequence: Synthetic oligonucleotide
ugucuccagcaguguuagg

SEQ ID NO: 1689323 - RNA, 19 nt, Artificial Sequence
  Description of Artificial Sequence: Synthetic oligonucleotide
gcugagacccucuucaccu

SEQ ID NO: 1689324 - RNA, 19 nt, Artificial Sequence
  Description of Artificial Sequence: Synthetic oligonucleotide
uggaagcugagacccucuu

SEQ ID NO: 1689325 - RNA, 19 nt, Artificial Sequence
  Description of Artificial Sequence: Synthetic oligonucleotide
gcagacauuggaggucucg

SEQ ID NO: 1689326 - RNA, 19 nt, Artificial Sequence
  Description of Artificial Sequence: Synthetic oligonucleotide
guccuagagaggaccagac

SEQ ID NO: 1689327 - RNA, 19 nt, Artificial Sequence
  Description of Artificial Sequence: Synthetic oligonucleotide
aaaggucuccccacccaaa

SEQ ID NO: 1689328 - RNA, 19 nt, Artificial Sequence
  Description of Artificial Sequence: Synthetic oligonucleotide
ucccaacucuccaggguuu

SEQ ID NO: 1689329 - RNA, 19 nt, Artificial Sequence
  Description of Artificial Sequence: Synthetic oligonucleotide
caucauugcugauccaggu

SEQ ID NO: 1689330 - RNA, 19 nt, Artificial Sequence
  Description of Artificial Sequence: Synthetic oligonucleotide
uuggaggucucggcagggc

SEQ ID NO: 1689331 - RNA, 19 nt, Artificial Sequence
  Description of Artificial Sequence: Synthetic oligonucleotide
ucuccgccuguccuccccu

SEQ ID NO: 1689332 - RNA, 19 nt, Artificial Sequence
  Description of Artificial Sequence: Synthetic oligonucleotide
caaaggucuccccacccaa

SEQ ID NO: 1689333 - RNA, 19 nt, Artificial Sequence
  Description of Artificial Sequence: Synthetic oligonucleotide
aaagugcccuggggagauc

SEQ ID NO: 1689334 - RNA, 19 nt, Artificial Sequence
  Description of Artificial Sequence: Synthetic oligonucleotide
caaacgcugcagacucuuc

SEQ ID NO: 1689335 - RNA, 19 nt, Artificial Sequence
  Description of Artificial Sequence: Synthetic oligonucleotide
uagcggagcacucguucuu

SEQ ID NO: 1689336 - RNA, 19 nt, Artificial Sequence
  Description of Artificial Sequence: Synthetic oligonucleotide
auggccugcagccgggguu

SEQ ID NO: 1689337 - RNA, 19 nt, Artificial Sequence
  Description of Artificial Sequence: Synthetic oligonucleotide
uuccaucgggaugcggcug

SEQ ID NO: 1689338 - RNA, 19 nt, Artificial Sequence
  Description of Artificial Sequence: Synthetic oligonucleotide
gcagacaauaguagcucug

SEQ ID NO: 1689339 - RNA, 19 nt, Artificial Sequence
  Description of Artificial Sequence: Synthetic oligonucleotide
ccuucgcuugcccuggccc

SEQ ID NO: 1689340 - RNA, 19 nt, Artificial Sequence
  Description of Artificial Sequence: Synthetic oligonucleotide
gagcacggaccgcaggcga

SEQ ID NO: 1689341 - RNA, 19 nt, Artificial Sequence
  Description of Artificial Sequence: Synthetic oligonucleotide
agacacacacacacacaca

SEQ ID NO: 1689342 - RNA, 19 nt, Artificial Sequence
  Description of Artificial Sequence: Synthetic oligonucleotide
agacagacacacacacaca

SEQ ID NO: 1689343 - RNA, 19 nt, Artificial Sequence
  Description of Artificial Sequence: Synthetic oligonucleotide
ggggucacaacagaaccca

SEQ ID NO: 1689344 - RNA, 19 nt, Artificial Sequence
  Description of Artificial Sequence: Synthetic oligonucleotide
cccaaacaugccaaagguc

SEQ ID NO: 1689345 - RNA, 19 nt, Artificial Sequence
  Description of Artificial Sequence: Synthetic oligonucleotide
cacagccuggggagacacg

SEQ ID NO: 1689346 - RNA, 19 nt, Artificial Sequence
  Description of Artificial Sequence: Synthetic oligonucleotide
ccagguccgaauuccguac

SEQ ID NO: 1689347 - RNA, 19 nt, Artificial Sequence
  Description of Artificial Sequence: Synthetic oligonucleotide
acggaccgcaggcgacggc

SEQ ID NO: 1689348 - RNA, 19 nt, Artificial Sequence
  Description of Artificial Sequence: Synthetic oligonucleotide
gagcgguucauaaaaucau

SEQ ID NO: 1689349 - RNA, 19 nt, Artificial Sequence
  Description of Artificial Sequence: Synthetic oligonucleotide
gagacccucuucaccugug

SEQ ID NO: 1689350 - RNA, 19 nt, Artificial Sequence
  Description of Artificial Sequence: Synthetic oligonucleotide
cuugcgccuggaagcugag

SEQ ID NO: 1689351 - RNA, 19 nt, Artificial Sequence
  Description of Artificial Sequence: Synthetic oligonucleotide
gcaggcgacggcugauacg

SEQ ID NO: 1689352 - RNA, 19 nt, Artificial Sequence
  Description of Artificial Sequence: Synthetic oligonucleotide
gggcgagucagcagguagg

SEQ ID NO: 1689353 - RNA, 19 nt, Artificial Sequence
  Description of Artificial Sequence: Synthetic oligonucleotide
cggcugauacgccugaagc

SEQ ID NO: 1689354 - RNA, 19 nt, Artificial Sequence
  Description of Artificial Sequence: Synthetic oligonucleotide
cagccgggguugcagcccg

SEQ ID NO: 1689355 - RNA, 19 nt, Artificial Sequence
  Description of Artificial Sequence: Synthetic oligonucleotide
acacacacacacacacaca

SEQ ID NO: 1689356 - RNA, 19 nt, Artificial Sequence
  Description of Artificial Sequence: Synthetic oligonucleotide
ggcugaaaugagauccaug

SEQ ID NO: 1689357 - RNA, 19 nt, Artificial Sequence
  Description of Artificial Sequence: Synthetic oligonucleotide
guagcggagcacucguucu

SEQ ID NO: 1689358 - RNA, 19 nt, Artificial Sequence
  Description of Artificial Sequence: Synthetic oligonucleotide
gcggcugcgcuugagcacg

SEQ ID NO: 1689359 - RNA, 19 nt, Artificial Sequence
  Description of Artificial Sequence: Synthetic oligonucleotide
gccaaaggucuccccaccc

SEQ ID NO: 1689360 - RNA, 19 nt, Artificial Sequence
  Description of Artificial Sequence: Synthetic oligonucleotide
cacacacacacaagacaaa

SEQ ID NO: 1689361 - RNA, 19 nt, Artificial Sequence
  Description of Artificial Sequence: Synthetic oligonucleotide
gcagacggcgugaagcagc

SEQ ID NO: 1689362 - RNA, 19 nt, Artificial Sequence
  Description of Artificial Sequence: Synthetic oligonucleotide
gauacgccugaagcacuca

SEQ ID NO: 1689363 - RNA, 19 nt, Artificial Sequence
  Description of Artificial Sequence: Synthetic oligonucleotide
cagcaguguuaggagguac

SEQ ID NO: 1689364 - RNA, 19 nt, Artificial Sequence
  Description of Artificial Sequence: Synthetic oligonucleotide
gcaaaccuaucccaaacau

SEQ ID NO: 1689365 - RNA, 19 nt, Artificial Sequence
  Description of Artificial Sequence: Synthetic oligonucleotide
ccuaucccaaacaugccaa

SEQ ID NO: 1689366 - RNA, 19 nt, Artificial Sequence
  Description of Artificial Sequence: Synthetic oligonucleotide
ggcgugaagcagcagccuc

SEQ ID NO: 1689367 - RNA, 19 nt, Artificial Sequence
  Description of Artificial Sequence: Synthetic oligonucleotide
gacgcuccucccaacucuc

SEQ ID NO: 1689368 - RNA, 19 nt, Artificial Sequence
  Description of Artificial Sequence: Synthetic oligonucleotide
agcacucaugagguguaaa

SEQ ID NO: 1689369 - RNA, 19 nt, Artificial Sequence
  Description of Artificial Sequence: Synthetic oligonucleotide
ggagguaccggguguucuc

SEQ ID NO: 1689370 - RNA, 19 nt, Artificial Sequence
  Description of Artificial Sequence: Synthetic oligonucleotide
ggcgguguacacagccugg

SEQ ID NO: 1689371 - RNA, 19 nt, Artificial Sequence
  Description of Artificial Sequence: Synthetic oligonucleotide
cguacagcuugguugauaa

SEQ ID NO: 1689372 - RNA, 19 nt, Artificial Sequence
  Description of Artificial Sequence: Synthetic oligonucleotide
auggcgguguacacagccu

SEQ ID NO: 1689373 - RNA, 19 nt, Artificial Sequence
  Description of Artificial Sequence: Synthetic oligonucleotide
cgaauuccguacagcuugg

SEQ ID NO: 1689374 - RNA, 19 nt, Artificial Sequence
  Description of Artificial Sequence: Synthetic oligonucleotide
gcgguguacacagccuggg

SEQ ID NO: 1689375 - RNA, 19 nt, Artificial Sequence
  Description of Artificial Sequence: Synthetic oligonucleotide
guaccggguguucuccaaa

SEQ ID NO: 1689376 - RNA, 19 nt, Artificial Sequence
  Description of Artificial Sequence: Synthetic oligonucleotide
ggggcuacgaggcugcccu

SEQ ID NO: 1689377 - RNA, 19 nt, Artificial Sequence
  Description of Artificial Sequence: Synthetic oligonucleotide
ggguguucugauucugaaa

SEQ ID NO: 1689378 - RNA, 19 nt, Artificial Sequence
  Description of Artificial Sequence: Synthetic oligonucleotide
ucgggaugcggcugcgcuu

SEQ ID NO: 1689379 - RNA, 19 nt, Artificial Sequence
  Description of Artificial Sequence: Synthetic oligonucleotide
cauuccagaccuccacaua

SEQ ID NO: 1689380 - RNA, 19 nt, Artificial Sequence
  Description of Artificial Sequence: Synthetic oligonucleotide
gaacgccagcagacgcucc

SEQ ID NO: 1689381 - RNA, 19 nt, Artificial Sequence
  Description of Artificial Sequence: Synthetic oligonucleotide
cagguccgaauuccguaca

SEQ ID NO: 1689382 - RNA, 19 nt, Artificial Sequence
  Description of Artificial Sequence: Synthetic oligonucleotide
cgccuggaagcugagaccc

SEQ ID NO: 1689383 - RNA, 19 nt, Artificial Sequence
  Description of Artificial Sequence: Synthetic oligonucleotide
auguugcuugcgccuggaa

SEQ ID NO: 1689384 - RNA, 19 nt, Artificial Sequence
  Description of Artificial Sequence: Synthetic oligonucleotide
cugcaagccucugcaaaga

SEQ ID NO: 1689385 - RNA, 19 nt, Artificial Sequence
  Description of Artificial Sequence: Synthetic oligonucleotide
gcaggaaguccaggugacg

SEQ ID NO: 1689386 - RNA, 19 nt, Artificial Sequence
  Description of Artificial Sequence: Synthetic oligonucleotide
auguacuggcagacggcgu

SEQ ID NO: 1689387 - RNA, 19 nt, Artificial Sequence
  Description of Artificial Sequence: Synthetic oligonucleotide
ggcagacaauaguagcucu

SEQ ID NO: 1689388 - RNA, 19 nt, Artificial Sequence
  Description of Artificial Sequence: Synthetic oligonucleotide
cugauacgccugaagcacu

SEQ ID NO: 1689389 - RNA, 19 nt, Artificial Sequence
  Description of Artificial Sequence: Synthetic oligonucleotide
guacagcuugguugauaaa

SEQ ID NO: 1689390 - RNA, 19 nt, Artificial Sequence
  Description of Artificial Sequence: Synthetic oligonucleotide
cacggaccgcaggcgacgg

SEQ ID NO: 1689391 - RNA, 19 nt, Artificial Sequence
  Description of Artificial Sequence: Synthetic oligonucleotide
gcaccagguccgaauuccg

SEQ ID NO: 1689392 - RNA, 19 nt, Artificial Sequence
  Description of Artificial Sequence: Synthetic oligonucleotide
uacuggcagacggcgugaa

SEQ ID NO: 1689393 - RNA, 19 nt, Artificial Sequence
  Description of Artificial Sequence: Synthetic oligonucleotide
gaccgcaggcgacggcuga

SEQ ID NO: 1689394 - RNA, 19 nt, Artificial Sequence
  Description of Artificial Sequence: Synthetic oligonucleotide
ugcuugcgccuggaagcug

SEQ ID NO: 1689395 - RNA, 19 nt, Artificial Sequence
  Description of Artificial Sequence: Synthetic oligonucleotide
cgggguugcagcccggccg

SEQ ID NO: 1689396 - RNA, 19 nt, Artificial Sequence
  Description of Artificial Sequence: Synthetic oligonucleotide
gcuacgaggcugcccugug

SEQ ID NO: 1689397 - RNA, 19 nt, Artificial Sequence
  Description of Artificial Sequence: Synthetic oligonucleotide
gcuugguugauaaaauguu

SEQ ID NO: 1689398 - RNA, 19 nt, Artificial Sequence
  Description of Artificial Sequence: Synthetic oligonucleotide
cuccccucggccaggccca

SEQ ID NO: 1689399 - RNA, 19 nt, Artificial Sequence
  Description of Artificial Sequence: Synthetic oligonucleotide
cugaaaccuggagggguca

SEQ ID NO: 1689400 - RNA, 19 nt, Artificial Sequence
  Description of Artificial Sequence: Synthetic oligonucleotide
gggcagccuggcuuccgcg

SEQ ID NO: 1689401 - RNA, 19 nt, Artificial Sequence
  Description of Artificial Sequence: Synthetic oligonucleotide
ccgucccuuggcuuugggc

SEQ ID NO: 1689402 - RNA, 19 nt, Artificial Sequence
  Description of Artificial Sequence: Synthetic oligonucleotide
agcagacauuggaggucuc

SEQ ID NO: 1689403 - RNA, 19 nt, Artificial Sequence
  Description of Artificial Sequence: Synthetic oligonucleotide
gucucggcagggcgaguca

SEQ ID NO: 1689404 - RNA, 19 nt, Artificial Sequence
  Description of Artificial Sequence: Synthetic oligonucleotide
cuucgcuugcccuggcccu

SEQ ID NO: 1689405 - RNA, 19 nt, Artificial Sequence
  Description of Artificial Sequence: Synthetic oligonucleotide
gucaggcaggggucacaac

SEQ ID NO: 1689406 - RNA, 19 nt, Artificial Sequence
  Description of Artificial Sequence: Synthetic oligonucleotide
caacgcuucagaggagaaa

SEQ ID NO: 1689407 - RNA, 19 nt, Artificial Sequence
  Description of Artificial Sequence: Synthetic oligonucleotide
acgaggcugcccugugcaa

SEQ ID NO: 1689408 - RNA, 19 nt, Artificial Sequence
  Description of Artificial Sequence: Synthetic oligonucleotide
cccacuaccagcuggcacu

SEQ ID NO: 1689409 - RNA, 19 nt, Artificial Sequence
  Description of Artificial Sequence: Synthetic oligonucleotide
guacuggcagacggcguga

SEQ ID NO: 1689410 - RNA, 19 nt, Artificial Sequence
  Description of Artificial Sequence: Synthetic oligonucleotide
cagcauggcgguguacaca

SEQ ID NO: 1689411 - RNA, 19 nt, Artificial Sequence
  Description of Artificial Sequence: Synthetic oligonucleotide
guguaaaagcuggguccuc

SEQ ID NO: 1689412 - RNA, 19 nt, Artificial Sequence
  Description of Artificial Sequence: Synthetic oligonucleotide
caucgggaugcggcugcgc

SEQ ID NO: 1689413 - RNA, 19 nt, Artificial Sequence
  Description of Artificial Sequence: Synthetic oligonucleotide
cccugugcaagcugggcca

SEQ ID NO: 1689414 - RNA, 19 nt, Artificial Sequence
  Description of Artificial Sequence: Synthetic oligonucleotide
ggacucccgaagagaagug

SEQ ID NO: 1689415 - RNA, 19 nt, Artificial Sequence
  Description of Artificial Sequence: Synthetic oligonucleotide
ccgucagggucguccagag

SEQ ID NO: 1689416 - RNA, 19 nt, Artificial Sequence
  Description of Artificial Sequence: Synthetic oligonucleotide
gcacggaccgcaggcgacg

SEQ ID NO: 1689417 - RNA, 19 nt, Artificial Sequence
  Description of Artificial Sequence: Synthetic oligonucleotide
gcggagcacucguucuugc

SEQ ID NO: 1689418 - RNA, 19 nt, Artificial Sequence
  Description of Artificial Sequence: Synthetic oligonucleotide
aggcccacgcccuggccuu

SEQ ID NO: 1689419 - RNA, 19 nt, Artificial Sequence
  Description of Artificial Sequence: Synthetic oligonucleotide
ggggcagccuggcuuccgc

SEQ ID NO: 1689420 - RNA, 19 nt, Artificial Sequence
  Description of Artificial Sequence: Synthetic oligonucleotide
ggcauuacugcaagccucu

SEQ ID NO: 1689421 - RNA, 19 nt, Artificial Sequence
  Description of Artificial Sequence: Synthetic oligonucleotide
ggcagacggcgugaagcag

SEQ ID NO: 1689422 - RNA, 19 nt, Artificial Sequence
  Description of Artificial Sequence: Synthetic oligonucleotide
gcuugcgccuggaagcuga

SEQ ID NO: 1689423 - RNA, 19 nt, Artificial Sequence
  Description of Artificial Sequence: Synthetic oligonucleotide
gguaccggguguucuccaa

SEQ ID NO: 1689424 - RNA, 19 nt, Artificial Sequence
  Description of Artificial Sequence: Synthetic oligonucleotide
ggucucggcagggcgaguc

SEQ ID NO: 1689425 - RNA, 19 nt, Artificial Sequence
  Description of Artificial Sequence: Synthetic oligonucleotide
gaggaccagacaccuccau

SEQ ID NO: 1689426 - RNA, 19 nt, Artificial Sequence
  Description of Artificial Sequence: Synthetic oligonucleotide
gaauuccguacagcuuggu

SEQ ID NO: 1689427 - RNA, 19 nt, Artificial Sequence
  Description of Artificial Sequence: Synthetic oligonucleotide
ccuggaagcugagacccuc

SEQ ID NO: 1689428 - RNA, 19 nt, Artificial Sequence
  Description of Artificial Sequence: Synthetic oligonucleotide
ccuccggcccuccagguca

SEQ ID NO: 1689429 - RNA, 19 nt, Artificial Sequence
  Description of Artificial Sequence: Synthetic oligonucleotide
ggaggucucggcagggcga

SEQ ID NO: 1689430 - RNA, 19 nt, Artificial Sequence
  Description of Artificial Sequence: Synthetic oligonucleotide
gcgagucagcagguagggg

SEQ ID NO: 1689431 - RNA, 19 nt, Artificial Sequence
  Description of Artificial Sequence: Synthetic oligonucleotide
gacgguugcugaccuucau

SEQ ID NO: 1689432 - RNA, 19 nt, Artificial Sequence
  Description of Artificial Sequence: Synthetic oligonucleotide
cccuggggagaucagcuga

SEQ ID NO: 1689433 - RNA, 19 nt, Artificial Sequence
  Description of Artificial Sequence: Synthetic oligonucleotide
guguuaggagguaccgggu

SEQ ID NO: 1689434 - RNA, 19 nt, Artificial Sequence
  Description of Artificial Sequence: Synthetic oligonucleotide
caccagguccgaauuccgu

SEQ ID NO: 1689435 - RNA, 19 nt, Artificial Sequence
  Description of Artificial Sequence: Synthetic oligonucleotide
ccucaacgcuucagaggag

SEQ ID NO: 1689436 - RNA, 19 nt, Artificial Sequence
  Description of Artificial Sequence: Synthetic oligonucleotide
gcgacggcugauacgccug

SEQ ID NO: 1689437 - RNA, 19 nt, Artificial Sequence
  Description of Artificial Sequence: Synthetic oligonucleotide
ccaacucuccaggguuucc

SEQ ID NO: 1689438 - RNA, 19 nt, Artificial Sequence
  Description of Artificial Sequence: Synthetic oligonucleotide
cugugcaagcugggccaug

SEQ ID NO: 1689439 - RNA, 19 nt, Artificial Sequence
  Description of Artificial Sequence: Synthetic oligonucleotide
ggucaggcaggggucacaa

SEQ ID NO: 1689440 - RNA, 19 nt, Artificial Sequence
  Description of Artificial Sequence: Synthetic oligonucleotide
uccguacagcuugguugau

SEQ ID NO: 1689441 - RNA, 19 nt, Artificial Sequence
  Description of Artificial Sequence: Synthetic oligonucleotide
ggcgacggcugauacgccu

SEQ ID NO: 1689442 - RNA, 19 nt, Artificial Sequence
  Description of Artificial Sequence: Synthetic oligonucleotide
acgcuucagaggagaaauu

SEQ ID NO: 1689443 - RNA, 19 nt, Artificial Sequence
  Description of Artificial Sequence: Synthetic oligonucleotide
cacuaccagcuggcacuag

SEQ ID NO: 1689444 - RNA, 19 nt, Artificial Sequence
  Description of Artificial Sequence: Synthetic oligonucleotide
gccuucgcuugcccuggcc

SEQ ID NO: 1689445 - RNA, 19 nt, Artificial Sequence
  Description of Artificial Sequence: Synthetic oligonucleotide
cuccgccuguccuccccuc

SEQ ID NO: 1689446 - RNA, 19 nt, Artificial Sequence
  Description of Artificial Sequence: Synthetic oligonucleotide
uccgggccgccgucagggu

SEQ ID NO: 1689447 - RNA, 19 nt, Artificial Sequence
  Description of Artificial Sequence: Synthetic oligonucleotide
gggcaccagguccgaauuc

SEQ ID NO: 1689448 - RNA, 19 nt, Artificial Sequence
  Description of Artificial Sequence: Synthetic oligonucleotide
gcauuacugcaagccucug

SEQ ID NO: 1689449 - RNA, 19 nt, Artificial Sequence
  Description of Artificial Sequence: Synthetic oligonucleotide
aggucagcacuggcugaaa

SEQ ID NO: 1689450 - RNA, 19 nt, Artificial Sequence
  Description of Artificial Sequence: Synthetic oligonucleotide
gacggcugauacgccugaa

SEQ ID NO: 1689451 - RNA, 19 nt, Artificial Sequence
  Description of Artificial Sequence: Synthetic oligonucleotide
ggaugcggcugcgcuugag

SEQ ID NO: 1689452 - RNA, 19 nt, Artificial Sequence
  Description of Artificial Sequence: Synthetic oligonucleotide
agccuggaaggggcagccu

SEQ ID NO: 1689453 - RNA, 19 nt, Artificial Sequence
  Description of Artificial Sequence: Synthetic oligonucleotide
gcgugggcaggcagccugg

SEQ ID NO: 1689454 - RNA, 19 nt, Artificial Sequence
  Description of Artificial Sequence: Synthetic oligonucleotide
cgagcgugggcaggcagcc

SEQ ID NO: 1689455 - RNA, 19 nt, Artificial Sequence
  Description of Artificial Sequence: Synthetic oligonucleotide
ccaccgagcgugggcaggc

SEQ ID NO: 1689456 - RNA, 19 nt, Artificial Sequence
  Description of Artificial Sequence: Synthetic oligonucleotide
cacgcccuggccuucgcuu

SEQ ID NO: 1689457 - RNA, 19 nt, Artificial Sequence
  Description of Artificial Sequence: Synthetic oligonucleotide
ccacauagguggcauuacu

SEQ ID NO: 1689458 - RNA, 19 nt, Artificial Sequence
  Description of Artificial Sequence: Synthetic oligonucleotide
agguagcggagcacucguu

SEQ ID NO: 1689459 - RNA, 19 nt, Artificial Sequence
  Description of Artificial Sequence: Synthetic oligonucleotide
cgcuucagaggagaaauua

SEQ ID NO: 1689460 - RNA, 19 nt, Artificial Sequence
  Description of Artificial Sequence: Synthetic oligonucleotide
cgggaugcggcugcgcuug

SEQ ID NO: 1689461 - RNA, 19 nt, Artificial Sequence
  Description of Artificial Sequence: Synthetic oligonucleotide
cccaacucuccaggguuuc

SEQ ID NO: 1689462 - RNA, 19 nt, Artificial Sequence
  Description of Artificial Sequence: Synthetic oligonucleotide
cgcaggcgacggcugauac

SEQ ID NO: 1689463 - RNA, 19 nt, Artificial Sequence
  Description of Artificial Sequence: Synthetic oligonucleotide
cauggccugcagccggggu

SEQ ID NO: 1689464 - RNA, 19 nt, Artificial Sequence
  Description of Artificial Sequence: Synthetic oligonucleotide
gcgugaagcagcagccucu

SEQ ID NO: 1689465 - RNA, 19 nt, Artificial Sequence
  Description of Artificial Sequence: Synthetic oligonucleotide
ccaucgggaugcggcugcg

SEQ ID NO: 1689466 - RNA, 19 nt, Artificial Sequence
  Description of Artificial Sequence: Synthetic oligonucleotide
gggcuacgaggcugcccug

SEQ ID NO: 1689467 - RNA, 19 nt, Artificial Sequence
  Description of Artificial Sequence: Synthetic oligonucleotide
agccgggguugcagcccgg

SEQ ID NO: 1689468 - RNA, 19 nt, Artificial Sequence
  Description of Artificial Sequence: Synthetic oligonucleotide
cggguguucuccaaacgcu

SEQ ID NO: 1689469 - RNA, 19 nt, Artificial Sequence
  Description of Artificial Sequence: Synthetic oligonucleotide
cuggguccucucuccgccu

SEQ ID NO: 1689470 - RNA, 19 nt, Artificial Sequence
  Description of Artificial Sequence: Synthetic oligonucleotide
ccagagcgguucauaaaau

SEQ ID NO: 1689471 - RNA, 19 nt, Artificial Sequence
  Description of Artificial Sequence: Synthetic oligonucleotide
cuggggagaucagcugagu

SEQ ID NO: 1689472 - RNA, 19 nt, Artificial Sequence
  Description of Artificial Sequence: Synthetic oligonucleotide
ccugugaaccaccgagcgu

SEQ ID NO: 1689473 - RNA, 19 nt, Artificial Sequence
  Description of Artificial Sequence: Synthetic oligonucleotide
ccucccaacucuccagggu

SEQ ID NO: 1689474 - RNA, 19 nt, Artificial Sequence
  Description of Artificial Sequence: Synthetic oligonucleotide
ggcuacgaggcugcccugu

SEQ ID NO: 1689475 - RNA, 19 nt, Artificial Sequence
  Description of Artificial Sequence: Synthetic oligonucleotide
gcgcuugagcacggaccgc

SEQ ID NO: 1689476 - RNA, 19 nt, Artificial Sequence
  Description of Artificial Sequence: Synthetic oligonucleotide
caccgagcgugggcaggca

SEQ ID NO: 1689477 - RNA, 19 nt, Artificial Sequence
  Description of Artificial Sequence: Synthetic oligonucleotide
ggagaucagcugaguccua

SEQ ID NO: 1689478 - RNA, 19 nt, Artificial Sequence
  Description of Artificial Sequence: Synthetic oligonucleotide
ccaaacgcugcagacucuu

SEQ ID NO: 1689479 - RNA, 19 nt, Artificial Sequence
  Description of Artificial Sequence: Synthetic oligonucleotide
ggugacgguugcugaccuu

SEQ ID NO: 1689480 - RNA, 19 nt, Artificial Sequence
  Description of Artificial Sequence: Synthetic oligonucleotide
gcagacucuuccgucccuu

SEQ ID NO: 1689481 - RNA, 19 nt, Artificial Sequence
  Description of Artificial Sequence: Synthetic oligonucleotide
ccguacagcuugguugaua

SEQ ID NO: 1689482 - RNA, 19 nt, Artificial Sequence
  Description of Artificial Sequence: Synthetic oligonucleotide
cggcugcgcuugagcacgg

SEQ ID NO: 1689483 - RNA, 19 nt, Artificial Sequence
  Description of Artificial Sequence: Synthetic oligonucleotide
cgacggcugauacgccuga

SEQ ID NO: 1689484 - RNA, 19 nt, Artificial Sequence
  Description of Artificial Sequence: Synthetic oligonucleotide
ccggcccuccaggucagca

SEQ ID NO: 1689485 - RNA, 19 nt, Artificial Sequence
  Description of Artificial Sequence: Synthetic oligonucleotide
ggucguccagagccaccau

SEQ ID NO: 1689486 - RNA, 19 nt, Artificial Sequence
  Description of Artificial Sequence: Synthetic oligonucleotide
ggcugcgcuugagcacgga

SEQ ID NO: 1689487 - RNA, 19 nt, Artificial Sequence
  Description of Artificial Sequence: Synthetic oligonucleotide
ccacuaccagcuggcacua

SEQ ID NO: 1689488 - RNA, 19 nt, Artificial Sequence
  Description of Artificial Sequence: Synthetic oligonucleotide
cggaccgcaggcgacggcu

SEQ ID NO: 1689489 - RNA, 19 nt, Artificial Sequence
  Description of Artificial Sequence: Synthetic oligonucleotide
gggucgccuccgggccgcc

SEQ ID NO: 1689490 - RNA, 19 nt, Artificial Sequence
  Description of Artificial Sequence: Synthetic oligonucleotide
ccacgcccuggccuucgcu

SEQ ID NO: 1689491 - RNA, 19 nt, Artificial Sequence
  Description of Artificial Sequence: Synthetic oligonucleotide
ccgcaggcgacggcugaua

SEQ ID NO: 1689492 - RNA, 19 nt, Artificial Sequence
  Description of Artificial Sequence: Synthetic oligonucleotide
cggcgugaagcagcagccu

SEQ ID NO: 1689493 - RNA, 19 nt, Artificial Sequence
  Description of Artificial Sequence: Synthetic oligonucleotide
cgccuccgggccgccguca

SEQ ID NO: 1689494 - RNA, 19 nt, Artificial Sequence
  Description of Artificial Sequence: Synthetic oligonucleotide
aaaagaauaagguaagagg

SEQ ID NO: 1689495 - RNA, 19 nt, Artificial Sequence
  Description of Artificial Sequence: Synthetic oligonucleotide
aaauguacaauuccagagc

SEQ ID NO: 1689496 - RNA, 19 nt, Artificial Sequence
  Description of Artificial Sequence: Synthetic oligonucleotide
aaggaugacaacuuccucc

SEQ ID NO: 1689497 - RNA, 19 nt, Artificial Sequence
  Description of Artificial Sequence: Synthetic oligonucleotide
ucuagaaagacaaagggca

SEQ ID NO: 1689498 - RNA, 19 nt, Artificial Sequence
  Description of Artificial Sequence: Synthetic oligonucleotide
aagcaucacaaccagaggc

SEQ ID NO: 1689499 - RNA, 19 nt, Artificial Sequence
  Description of Artificial Sequence: Synthetic oligonucleotide
uuacauaugauacaaggga

SEQ ID NO: 1689500 - RNA, 19 nt, Artificial Sequence
  Description of Artificial Sequence: Synthetic oligonucleotide
ucucuagaaagacaaaggg

SEQ ID NO: 1689501 - RNA, 19 nt, Artificial Sequence
  Description of Artificial Sequence: Synthetic oligonucleotide
uaaauguacaauuccagag

SEQ ID NO: 1689502 - RNA, 19 nt, Artificial Sequence
  Description of Artificial Sequence: Synthetic oligonucleotide
uuagccuccaauuuguagg

SEQ ID NO: 1689503 - RNA, 19 nt, Artificial Sequence
  Description of Artificial Sequence: Synthetic oligonucleotide
uacaacauaaccuauaaua

SEQ ID NO: 1689504 - RNA, 19 nt, Artificial Sequence
  Description of Artificial Sequence: Synthetic oligonucleotide
uguaaaagaauaagguaag

SEQ ID NO: 1689505 - RNA, 19 nt, Artificial Sequence
  Description of Artificial Sequence: Synthetic oligonucleotide
uaaggaacuagagaaagcg

SEQ ID NO: 1689506 - RNA, 19 nt, Artificial Sequence
  Description of Artificial Sequence: Synthetic oligonucleotide
aauguacaauuccagagcu

SEQ ID NO: 1689507 - RNA, 19 nt, Artificial Sequence
  Description of Artificial Sequence: Synthetic oligonucleotide
uugucaaugaccuggaacu

SEQ ID NO: 1689508 - RNA, 19 nt, Artificial Sequence
  Description of Artificial Sequence: Synthetic oligonucleotide
aauguuuacauaugauaca

SEQ ID NO: 1689509 - RNA, 19 nt, Artificial Sequence
  Description of Artificial Sequence: Synthetic oligonucleotide
agacuaaggaacuagagaa

SEQ ID NO: 1689510 - RNA, 19 nt, Artificial Sequence
  Description of Artificial Sequence: Synthetic oligonucleotide
acaacauaaccuauaauac

SEQ ID NO: 1689511 - RNA, 19 nt, Artificial Sequence
  Description of Artificial Sequence: Synthetic oligonucleotide
ucuggaacagaccucacug

SEQ ID NO: 1689512 - RNA, 19 nt, Artificial Sequence
  Description of Artificial Sequence: Synthetic oligonucleotide
aaauaaauguacaauucca

SEQ ID NO: 1689513 - RNA, 19 nt, Artificial Sequence
  Description of Artificial Sequence: Synthetic oligonucleotide
ugauggcagacacagagcc

SEQ ID NO: 1689514 - RNA, 19 nt, Artificial Sequence
  Description of Artificial Sequence: Synthetic oligonucleotide
acucucacugacuauuagc

SEQ ID NO: 1689515 - RNA, 19 nt, Artificial Sequence
  Description of Artificial Sequence: Synthetic oligonucleotide
uaaccuauaauacaauguu

SEQ ID NO: 1689516 - RNA, 19 nt, Artificial Sequence
  Description of Artificial Sequence: Synthetic oligonucleotide
uacauaugauacaagggac

SEQ ID NO: 1689517 - RNA, 19 nt, Artificial Sequence
  Description of Artificial Sequence: Synthetic oligonucleotide
cucucacugacuauuagcc

SEQ ID NO: 1689518 - RNA, 19 nt, Artificial Sequence
  Description of Artificial Sequence: Synthetic oligonucleotide
auacccagagaucuugggc

SEQ ID NO: 1689519 - RNA, 19 nt, Artificial Sequence
  Description of Artificial Sequence: Synthetic oligonucleotide
uacacacacacacacacac

SEQ ID NO: 1689520 - RNA, 19 nt, Artificial Sequence
  Description of Artificial Sequence: Synthetic oligonucleotide
auaaauguacaauuccaga

SEQ ID NO: 1689521 - RNA, 19 nt, Artificial Sequence
  Description of Artificial Sequence: Synthetic oligonucleotide
aaaccaggaguguaaaaga

SEQ ID NO: 1689522 - RNA, 19 nt, Artificial Sequence
  Description of Artificial Sequence: Synthetic oligonucleotide
cucuagaaagacaaagggc

SEQ ID NO: 1689523 - RNA, 19 nt, Artificial Sequence
  Description of Artificial Sequence: Synthetic oligonucleotide
uggaacagaccucacuggg

SEQ ID NO: 1689524 - RNA, 19 nt, Artificial Sequence
  Description of Artificial Sequence: Synthetic oligonucleotide
acugcuguauaaaagggac

SEQ ID NO: 1689525 - RNA, 19 nt, Artificial Sequence
  Description of Artificial Sequence: Synthetic oligonucleotide
aucuugggcacacacguac

SEQ ID NO: 1689526 - RNA, 19 nt, Artificial Sequence
  Description of Artificial Sequence: Synthetic oligonucleotide
ugauacaagggacuuuccc

SEQ ID NO: 1689527 - RNA, 19 nt, Artificial Sequence
  Description of Artificial Sequence: Synthetic oligonucleotide
cauaaccuauaauacaaug

SEQ ID NO: 1689528 - RNA, 19 nt, Artificial Sequence
  Description of Artificial Sequence: Synthetic oligonucleotide
acacacacacacuaaggcg

SEQ ID NO: 1689529 - RNA, 19 nt, Artificial Sequence
  Description of Artificial Sequence: Synthetic oligonucleotide
ugcaauugauggcagacac

SEQ ID NO: 1689530 - RNA, 19 nt, Artificial Sequence
  Description of Artificial Sequence: Synthetic oligonucleotide
uguauaaaagggacuguac

SEQ ID NO: 1689531 - RNA, 19 nt, Artificial Sequence
  Description of Artificial Sequence: Synthetic oligonucleotide
auacaagggacuuucccuc

SEQ ID NO: 1689532 - RNA, 19 nt, Artificial Sequence
  Description of Artificial Sequence: Synthetic oligonucleotide
agagaucuugggcacacac

SEQ ID NO: 1689533 - RNA, 19 nt, Artificial Sequence
  Description of Artificial Sequence: Synthetic oligonucleotide
ucuagcuucucacuggcac

SEQ ID NO: 1689534 - RNA, 19 nt, Artificial Sequence
  Description of Artificial Sequence: Synthetic oligonucleotide
uaaaagggacuguacaaca

SEQ ID NO: 1689535 - RNA, 19 nt, Artificial Sequence
  Description of Artificial Sequence: Synthetic oligonucleotide
guuguguagaagcagagga

SEQ ID NO: 1689536 - RNA, 19 nt, Artificial Sequence
  Description of Artificial Sequence: Synthetic oligonucleotide
aggauggacaggcuugugc

SEQ ID NO: 1689537 - RNA, 19 nt, Artificial Sequence
  Description of Artificial Sequence: Synthetic oligonucleotide
aguguaaaagaauaaggua

SEQ ID NO: 1689538 - RNA, 19 nt, Artificial Sequence
  Description of Artificial Sequence: Synthetic oligonucleotide
aacugacgcacauaggccu

SEQ ID NO: 1689539 - RNA, 19 nt, Artificial Sequence
  Description of Artificial Sequence: Synthetic oligonucleotide
aauaagguaagaggaccuc

SEQ ID NO: 1689540 - RNA, 19 nt, Artificial Sequence
  Description of Artificial Sequence: Synthetic oligonucleotide
uccaauuuguaggagagcu

SEQ ID NO: 1689541 - RNA, 19 nt, Artificial Sequence
  Description of Artificial Sequence: Synthetic oligonucleotide
acuaaggaacuagagaaag

SEQ ID NO: 1689542 - RNA, 19 nt, Artificial Sequence
  Description of Artificial Sequence: Synthetic oligonucleotide
guaagaggaccucagcagg

SEQ ID NO: 1689543 - RNA, 19 nt, Artificial Sequence
  Description of Artificial Sequence: Synthetic oligonucleotide
cacacguacacacacacac

SEQ ID NO: 1689544 - RNA, 19 nt, Artificial Sequence
  Description of Artificial Sequence: Synthetic oligonucleotide
ugagggguuacugaagagg

SEQ ID NO: 1689545 - RNA, 19 nt, Artificial Sequence
  Description of Artificial Sequence: Synthetic oligonucleotide
uacaauuccagagcuuugg

SEQ ID NO: 1689546 - RNA, 19 nt, Artificial Sequence
  Description of Artificial Sequence: Synthetic oligonucleotide
agaucuugggcacacacgu

SEQ ID NO: 1689547 - RNA, 19 nt, Artificial Sequence
  Description of Artificial Sequence: Synthetic oligonucleotide
ugcuguauaaaagggacug

SEQ ID NO: 1689548 - RNA, 19 nt, Artificial Sequence
  Description of Artificial Sequence: Synthetic oligonucleotide
ggaacugacgcacauaggc

SEQ ID NO: 1689549 - RNA, 19 nt, Artificial Sequence
  Description of Artificial Sequence: Synthetic oligonucleotide
uaugauacaagggacuuuc

SEQ ID NO: 1689550 - RNA, 19 nt, Artificial Sequence
  Description of Artificial Sequence: Synthetic oligonucleotide
ugguguggcauguuugugg

SEQ ID NO: 1689551 - RNA, 19 nt, Artificial Sequence
  Description of Artificial Sequence: Synthetic oligonucleotide
uggggcaagcaucacaacc

SEQ ID NO: 1689552 - RNA, 19 nt, Artificial Sequence
  Description of Artificial Sequence: Synthetic oligonucleotide
agagaaagcggaugagggg

SEQ ID NO: 1689553 - RNA, 19 nt, Artificial Sequence
  Description of Artificial Sequence: Synthetic oligonucleotide
gauagcauggucaccauca

SEQ ID NO: 1689554 - RNA, 19 nt, Artificial Sequence
  Description of Artificial Sequence: Synthetic oligonucleotide
cuagaaacuccaucucugg

SEQ ID NO: 1689555 - RNA, 19 nt, Artificial Sequence
  Description of Artificial Sequence: Synthetic oligonucleotide
auuagccuccaauuuguag

SEQ ID NO: 1689556 - RNA, 19 nt, Artificial Sequence
  Description of Artificial Sequence: Synthetic oligonucleotide
ggaguguaaaagaauaagg

SEQ ID NO: 1689557 - RNA, 19 nt, Artificial Sequence
  Description of Artificial Sequence: Synthetic oligonucleotide
cacacacacacacuaaggc

SEQ ID NO: 1689558 - RNA, 19 nt, Artificial Sequence
  Description of Artificial Sequence: Synthetic oligonucleotide
gagacuaaggaacuagaga

SEQ ID NO: 1689559 - RNA, 19 nt, Artificial Sequence
  Description of Artificial Sequence: Synthetic oligonucleotide
uuuugucaggaacugcugu

SEQ ID NO: 1689560 - RNA, 19 nt, Artificial Sequence
  Description of Artificial Sequence: Synthetic oligonucleotide
gcaagcaacagccaagggg

SEQ ID NO: 1689561 - RNA, 19 nt, Artificial Sequence
  Description of Artificial Sequence: Synthetic oligonucleotide
ugcaaagugcuugagugcc

SEQ ID NO: 1689562 - RNA, 19 nt, Artificial Sequence
  Description of Artificial Sequence: Synthetic oligonucleotide
gauugugcaauugauggca

SEQ ID NO: 1689563 - RNA, 19 nt, Artificial Sequence
  Description of Artificial Sequence: Synthetic oligonucleotide
gggaaagauguccaggugg

SEQ ID NO: 1689564 - RNA, 19 nt, Artificial Sequence
  Description of Artificial Sequence: Synthetic oligonucleotide
aggaguguaaaagaauaag

SEQ ID NO: 1689565 - RNA, 19 nt, Artificial Sequence
  Description of Artificial Sequence: Synthetic oligonucleotide
agucuagaaacuccaucuc

SEQ ID NO: 1689566 - RNA, 19 nt, Artificial Sequence
  Description of Artificial Sequence: Synthetic oligonucleotide
cuaaggaacuagagaaagc

SEQ ID NO: 1689567 - RNA, 19 nt, Artificial Sequence
  Description of Artificial Sequence: Synthetic oligonucleotide
aaggaacuagagaaagcgg

SEQ ID NO: 1689568 - RNA, 19 nt, Artificial Sequence
  Description of Artificial Sequence: Synthetic oligonucleotide
aggaaggaugacaacuucc

SEQ ID NO: 1689569 - RNA, 19 nt, Artificial Sequence
  Description of Artificial Sequence: Synthetic oligonucleotide
ucagaaaccaggaguguaa

SEQ ID NO: 1689570 - RNA, 19 nt, Artificial Sequence
  Description of Artificial Sequence: Synthetic oligonucleotide
cacacacacacacacacac

SEQ ID NO: 1689571 - RNA, 19 nt, Artificial Sequence
  Description of Artificial Sequence: Synthetic oligonucleotide
cuagaaagacaaagggcag

SEQ ID NO: 1689572 - RNA, 19 nt, Artificial Sequence
  Description of Artificial Sequence: Synthetic oligonucleotide
ucgaagaggagauucuggu

SEQ ID NO: 1689573 - RNA, 19 nt, Artificial Sequence
  Description of Artificial Sequence: Synthetic oligonucleotide
aacuccaucucuggaacag

SEQ ID NO: 1689574 - RNA, 19 nt, Artificial Sequence
  Description of Artificial Sequence: Synthetic oligonucleotide
aaggcacaggggcugcucg

SEQ ID NO: 1689575 - RNA, 19 nt, Artificial Sequence
  Description of Artificial Sequence: Synthetic oligonucleotide
uggucaacccaacuccucc

SEQ ID NO: 1689576 - RNA, 19 nt, Artificial Sequence
  Description of Artificial Sequence: Synthetic oligonucleotide
agcagagucuagaaacucc

SEQ ID NO: 1689577 - RNA, 19 nt, Artificial Sequence
  Description of Artificial Sequence: Synthetic oligonucleotide
acuaaggcggcucccagug

SEQ ID NO: 1689578 - RNA, 19 nt, Artificial Sequence
  Description of Artificial Sequence: Synthetic oligonucleotide
aagagcagucagcaguugu

SEQ ID NO: 1689579 - RNA, 19 nt, Artificial Sequence
  Description of Artificial Sequence: Synthetic oligonucleotide
cucgaagaggagauucugg

SEQ ID NO: 1689580 - RNA, 19 nt, Artificial Sequence
  Description of Artificial Sequence: Synthetic oligonucleotide
ucaccucuccauuaugggc

SEQ ID NO: 1689581 - RNA, 19 nt, Artificial Sequence
  Description of Artificial Sequence: Synthetic oligonucleotide
aggauggggagguaugguc

SEQ ID NO: 1689582 - RNA, 19 nt, Artificial Sequence
  Description of Artificial Sequence: Synthetic oligonucleotide
gggacuguacaacauaacc

SEQ ID NO: 1689583 - RNA, 19 nt, Artificial Sequence
  Description of Artificial Sequence: Synthetic oligonucleotide
uggcuauuuugucaggaac

SEQ ID NO: 1689584 - RNA, 19 nt, Artificial Sequence
  Description of Artificial Sequence: Synthetic oligonucleotide
aagaggagauucugguugu

SEQ ID NO: 1689585 - RNA, 19 nt, Artificial Sequence
  Description of Artificial Sequence: Synthetic oligonucleotide
gauacaagggacuuucccu

SEQ ID NO: 1689586 - RNA, 19 nt, Artificial Sequence
  Description of Artificial Sequence: Synthetic oligonucleotide
ugugcaauugauggcagac

SEQ ID NO: 1689587 - RNA, 19 nt, Artificial Sequence
  Description of Artificial Sequence: Synthetic oligonucleotide
uccuccuuagcagugagac

SEQ ID NO: 1689588 - RNA, 19 nt, Artificial Sequence
  Description of Artificial Sequence: Synthetic oligonucleotide
uccaccuuugacucucuag

SEQ ID NO: 1689589 - RNA, 19 nt, Artificial Sequence
  Description of Artificial Sequence: Synthetic oligonucleotide
aggaugacaacuuccuccu

SEQ ID NO: 1689590 - RNA, 19 nt, Artificial Sequence
  Description of Artificial Sequence: Synthetic oligonucleotide
ugacuauuagccuccaauu

SEQ ID NO: 1689591 - RNA, 19 nt, Artificial Sequence
  Description of Artificial Sequence: Synthetic oligonucleotide
caacauaaccuauaauaca

SEQ ID NO: 1689592 - RNA, 19 nt, Artificial Sequence
  Description of Artificial Sequence: Synthetic oligonucleotide
gguuggucaacccaacucc

SEQ ID NO: 1689593 - RNA, 19 nt, Artificial Sequence
  Description of Artificial Sequence: Synthetic oligonucleotide
cacguacacacacacacac

SEQ ID NO: 1689594 - RNA, 19 nt, Artificial Sequence
  Description of Artificial Sequence: Synthetic oligonucleotide
acgcacauaggccuugguc

SEQ ID NO: 1689595 - RNA, 19 nt, Artificial Sequence
  Description of Artificial Sequence: Synthetic oligonucleotide
guuguugagggcaucgugc

SEQ ID NO: 1689596 - RNA, 19 nt, Artificial Sequence
  Description of Artificial Sequence: Synthetic oligonucleotide
ugggcugcgggauagcaug

SEQ ID NO: 1689597 - RNA, 19 nt, Artificial Sequence
  Description of Artificial Sequence: Synthetic oligonucleotide
uggagacuaaggaacuaga

SEQ ID NO: 1689598 - RNA, 19 nt, Artificial Sequence
  Description of Artificial Sequence: Synthetic oligonucleotide
aacugccccagguacugag

SEQ ID NO: 1689599 - RNA, 19 nt, Artificial Sequence
  Description of Artificial Sequence: Synthetic oligonucleotide
uaagaggaccucagcagga

SEQ ID NO: 1689600 - RNA, 19 nt, Artificial Sequence
  Description of Artificial Sequence: Synthetic oligonucleotide
auagcauggucaccaucac

SEQ ID NO: 1689601 - RNA, 19 nt, Artificial Sequence
  Description of Artificial Sequence: Synthetic oligonucleotide
gaguguaaaagaauaaggu

SEQ ID NO: 1689602 - RNA, 19 nt, Artificial Sequence
  Description of Artificial Sequence: Synthetic oligonucleotide
cacacacacacacacuaag

SEQ ID NO: 1689603 - RNA, 19 nt, Artificial Sequence
  Description of Artificial Sequence: Synthetic oligonucleotide
agggcaucgugcaaagugc

SEQ ID NO: 1689604 - RNA, 19 nt, Artificial Sequence
  Description of Artificial Sequence: Synthetic oligonucleotide
ugguuggucaacccaacuc

SEQ ID NO: 1689605 - RNA, 19 nt, Artificial Sequence
  Description of Artificial Sequence: Synthetic oligonucleotide
ucccagugccuccauaccc

SEQ ID NO: 1689606 - RNA, 19 nt, Artificial Sequence
  Description of Artificial Sequence: Synthetic oligonucleotide
aggaacuagagaaagcgga

SEQ ID NO: 1689607 - RNA, 19 nt, Artificial Sequence
  Description of Artificial Sequence: Synthetic oligonucleotide
gagaucuugggcacacacg

SEQ ID NO: 1689608 - RNA, 19 nt, Artificial Sequence
  Description of Artificial Sequence: Synthetic oligonucleotide
agauccaccuuugacucuc

SEQ ID NO: 1689609 - RNA, 19 nt, Artificial Sequence
  Description of Artificial Sequence: Synthetic oligonucleotide
accuauaauacaauguuua

SEQ ID NO: 1689610 - RNA, 19 nt, Artificial Sequence
  Description of Artificial Sequence: Synthetic oligonucleotide
cacacacguacacacacac

SEQ ID NO: 1689611 - RNA, 19 nt, Artificial Sequence
  Description of Artificial Sequence: Synthetic oligonucleotide
gaggucagaaaccaggagu

SEQ ID NO: 1689612 - RNA, 19 nt, Artificial Sequence
  Description of Artificial Sequence: Synthetic oligonucleotide
acaccgcugcaucccaucc

SEQ ID NO: 1689613 - RNA, 19 nt, Artificial Sequence
  Description of Artificial Sequence: Synthetic oligonucleotide
gaacuagagaaagcggaug

SEQ ID NO: 1689614 - RNA, 19 nt, Artificial Sequence
  Description of Artificial Sequence: Synthetic oligonucleotide
agggacuuucccucuuugg

SEQ ID NO: 1689615 - RNA, 19 nt, Artificial Sequence
  Description of Artificial Sequence: Synthetic oligonucleotide
agaggucagaaaccaggag

SEQ ID NO: 1689616 - RNA, 19 nt, Artificial Sequence
  Description of Artificial Sequence: Synthetic oligonucleotide
gaacugacgcacauaggcc

SEQ ID NO: 1689617 - RNA, 19 nt, Artificial Sequence
  Description of Artificial Sequence: Synthetic oligonucleotide
auucugguuggucaaccca

SEQ ID NO: 1689618 - RNA, 19 nt, Artificial Sequence
  Description of Artificial Sequence: Synthetic oligonucleotide
caagcaacagccaaggggu

SEQ ID NO: 1689619 - RNA, 19 nt, Artificial Sequence
  Description of Artificial Sequence: Synthetic oligonucleotide
cuuaggcagccuaagccug

SEQ ID NO: 1689620 - RNA, 19 nt, Artificial Sequence
  Description of Artificial Sequence: Synthetic oligonucleotide
ugaccuggaacugacgcac

SEQ ID NO: 1689621 - RNA, 19 nt, Artificial Sequence
  Description of Artificial Sequence: Synthetic oligonucleotide
aaagcggaugagggguuac

SEQ ID NO: 1689622 - RNA, 19 nt, Artificial Sequence
  Description of Artificial Sequence: Synthetic oligonucleotide
auuaugggcugcgggauag

SEQ ID NO: 1689623 - RNA, 19 nt, Artificial Sequence
  Description of Artificial Sequence: Synthetic oligonucleotide
acauaugauacaagggacu

SEQ ID NO: 1689624 - RNA, 19 nt, Artificial Sequence
  Description of Artificial Sequence: Synthetic oligonucleotide
ucaacccaacuccuccuug

SEQ ID NO: 1689625 - RNA, 19 nt, Artificial Sequence
  Description of Artificial Sequence: Synthetic oligonucleotide
uaggccuuggucugcaggu

SEQ ID NO: 1689626 - RNA, 19 nt, Artificial Sequence
  Description of Artificial Sequence: Synthetic oligonucleotide
cuuguaggacaggaagugg

SEQ ID NO: 1689627 - RNA, 19 nt, Artificial Sequence
  Description of Artificial Sequence: Synthetic oligonucleotide
acagauugugcaauugaug

SEQ ID NO: 1689628 - RNA, 19 nt, Artificial Sequence
  Description of Artificial Sequence: Synthetic oligonucleotide
acacacacacacacuaagg

SEQ ID NO: 1689629 - RNA, 19 nt, Artificial Sequence
  Description of Artificial Sequence: Synthetic oligonucleotide
ggcuugugcauucugguug

SEQ ID NO: 1689630 - RNA, 19 nt, Artificial Sequence
  Description of Artificial Sequence: Synthetic oligonucleotide
cauucugguuggucaaccc

SEQ ID NO: 1689631 - RNA, 19 nt, Artificial Sequence
  Description of Artificial Sequence: Synthetic oligonucleotide
auaagguaagaggaccuca

SEQ ID NO: 1689632 - RNA, 19 nt, Artificial Sequence
  Description of Artificial Sequence: Synthetic oligonucleotide
aagggacuguacaacauaa

SEQ ID NO: 1689633 - RNA, 19 nt, Artificial Sequence
  Description of Artificial Sequence: Synthetic oligonucleotide
agauucugguugucaauga

SEQ ID NO: 1689634 - RNA, 19 nt, Artificial Sequence
  Description of Artificial Sequence: Synthetic oligonucleotide
cuuagcagugagacacccc

SEQ ID NO: 1689635 - RNA, 19 nt, Artificial Sequence
  Description of Artificial Sequence: Synthetic oligonucleotide
aaccuauaauacaauguuu

SEQ ID NO: 1689636 - RNA, 19 nt, Artificial Sequence
  Description of Artificial Sequence: Synthetic oligonucleotide
ugcgggauagcauggucac

SEQ ID NO: 1689637 - RNA, 19 nt, Artificial Sequence
  Description of Artificial Sequence: Synthetic oligonucleotide
ucucacuggcacauaccca

SEQ ID NO: 1689638 - RNA, 19 nt, Artificial Sequence
  Description of Artificial Sequence: Synthetic oligonucleotide
caguuguguagaagcagag

SEQ ID NO: 1689639 - RNA, 19 nt, Artificial Sequence
  Description of Artificial Sequence: Synthetic oligonucleotide
aaaagggacuguacaacau

SEQ ID NO: 1689640 - RNA, 19 nt, Artificial Sequence
  Description of Artificial Sequence: Synthetic oligonucleotide
auacccagcugcgaucugg

SEQ ID NO: 1689641 - RNA, 19 nt, Artificial Sequence
  Description of Artificial Sequence: Synthetic oligonucleotide
cuauuuugucaggaacugc

SEQ ID NO: 1689642 - RNA, 19 nt, Artificial Sequence
  Description of Artificial Sequence: Synthetic oligonucleotide
ucuugggcacacacguaca

SEQ ID NO: 1689643 - RNA, 19 nt, Artificial Sequence
  Description of Artificial Sequence: Synthetic oligonucleotide
gauggggagguauggucac

SEQ ID NO: 1689644 - RNA, 19 nt, Artificial Sequence
  Description of Artificial Sequence: Synthetic oligonucleotide
aaccaggaguguaaaagaa

SEQ ID NO: 1689645 - RNA, 19 nt, Artificial Sequence
  Description of Artificial Sequence: Synthetic oligonucleotide
ugccccugacuccugacac

SEQ ID NO: 1689646 - RNA, 19 nt, Artificial Sequence
  Description of Artificial Sequence: Synthetic oligonucleotide
augaccuggaacugacgca

SEQ ID NO: 1689647 - RNA, 19 nt, Artificial Sequence
  Description of Artificial Sequence: Synthetic oligonucleotide
aucaccacuagcagcuggg

SEQ ID NO: 1689648 - RNA, 19 nt, Artificial Sequence
  Description of Artificial Sequence: Synthetic oligonucleotide
accuuugacucucuagaaa

SEQ ID NO: 1689649 - RNA, 19 nt, Artificial Sequence
  Description of Artificial Sequence: Synthetic oligonucleotide
agauggacagauugugcaa

SEQ ID NO: 1689650 - RNA, 19 nt, Artificial Sequence
  Description of Artificial Sequence: Synthetic oligonucleotide
gaggaaggaugacaacuuc

SEQ ID NO: 1689651 - RNA, 19 nt, Artificial Sequence
  Description of Artificial Sequence: Synthetic oligonucleotide
augagggguuacugaagag

SEQ ID NO: 1689652 - RNA, 19 nt, Artificial Sequence
  Description of Artificial Sequence: Synthetic oligonucleotide
gagguauggucaccucucc

SEQ ID NO: 1689653 - RNA, 19 nt, Artificial Sequence
  Description of Artificial Sequence: Synthetic oligonucleotide
cuaagccuguguuucccug

SEQ ID NO: 1689654 - RNA, 19 nt, Artificial Sequence
  Description of Artificial Sequence: Synthetic oligonucleotide
uggacagauugugcaauug

SEQ ID NO: 1689655 - RNA, 19 nt, Artificial Sequence
  Description of Artificial Sequence: Synthetic oligonucleotide
gccuuaggcagccuaagcc

SEQ ID NO: 1689656 - RNA, 19 nt, Artificial Sequence
  Description of Artificial Sequence: Synthetic oligonucleotide
cacacacuaaggcggcucc

SEQ ID NO: 1689657 - RNA, 19 nt, Artificial Sequence
  Description of Artificial Sequence: Synthetic oligonucleotide
uuaggcagccuaagccugu

SEQ ID NO: 1689658 - RNA, 19 nt, Artificial Sequence
  Description of Artificial Sequence: Synthetic oligonucleotide
gcuugugcauucugguugg

SEQ ID NO: 1689659 - RNA, 19 nt, Artificial Sequence
  Description of Artificial Sequence: Synthetic oligonucleotide
uacaagggacuuucccucu

SEQ ID NO: 1689660 - RNA, 19 nt, Artificial Sequence
  Description of Artificial Sequence: Synthetic oligonucleotide
augauacaagggacuuucc

SEQ ID NO: 1689661 - RNA, 19 nt, Artificial Sequence
  Description of Artificial Sequence: Synthetic oligonucleotide
acccaacuccuccuuguag

SEQ ID NO: 1689662 - RNA, 19 nt, Artificial Sequence
  Description of Artificial Sequence: Synthetic oligonucleotide
ccagcugcgaucugggagg

SEQ ID NO: 1689663 - RNA, 19 nt, Artificial Sequence
  Description of Artificial Sequence: Synthetic oligonucleotide
caaugaccuggaacugacg

SEQ ID NO: 1689664 - RNA, 19 nt, Artificial Sequence
  Description of Artificial Sequence: Synthetic oligonucleotide
uuguggcuauuuugucagg

SEQ ID NO: 1689665 - RNA, 19 nt, Artificial Sequence
  Description of Artificial Sequence: Synthetic oligonucleotide
ggagacuaaggaacuagag

SEQ ID NO: 1689666 - RNA, 19 nt, Artificial Sequence
  Description of Artificial Sequence: Synthetic oligonucleotide
gagagguauggggaccagg

SEQ ID NO: 1689667 - RNA, 19 nt, Artificial Sequence
  Description of Artificial Sequence: Synthetic oligonucleotide
ugacaacuuccuccuuagc

SEQ ID NO: 1689668 - RNA, 19 nt, Artificial Sequence
  Description of Artificial Sequence: Synthetic oligonucleotide
cuugggcacacacguacac

SEQ ID NO: 1689669 - RNA, 19 nt, Artificial Sequence
  Description of Artificial Sequence: Synthetic oligonucleotide
cuugggaagcagagucuag

SEQ ID NO: 1689670 - RNA, 19 nt, Artificial Sequence
  Description of Artificial Sequence: Synthetic oligonucleotide
uccuuagcagugagacacc

SEQ ID NO: 1689671 - RNA, 19 nt, Artificial Sequence
  Description of Artificial Sequence: Synthetic oligonucleotide
acacacacuaaggcggcuc

SEQ ID NO: 1689672 - RNA, 19 nt, Artificial Sequence
  Description of Artificial Sequence: Synthetic oligonucleotide
gagaaagcggaugaggggu

SEQ ID NO: 1689673 - RNA, 19 nt, Artificial Sequence
  Description of Artificial Sequence: Synthetic oligonucleotide
cuuugacucucuagaaaga

SEQ ID NO: 1689674 - RNA, 19 nt, Artificial Sequence
  Description of Artificial Sequence: Synthetic oligonucleotide
ucuccauuaugggcugcgg

SEQ ID NO: 1689675 - RNA, 19 nt, Artificial Sequence
  Description of Artificial Sequence: Synthetic oligonucleotide
aguggggcaagcaucacaa

SEQ ID NO: 1689676 - RNA, 19 nt, Artificial Sequence
  Description of Artificial Sequence: Synthetic oligonucleotide
uugugcaauugauggcaga

SEQ ID NO: 1689677 - RNA, 19 nt, Artificial Sequence
  Description of Artificial Sequence: Synthetic oligonucleotide
cacauacccagagaucuug

SEQ ID NO: 1689678 - RNA, 19 nt, Artificial Sequence
  Description of Artificial Sequence: Synthetic oligonucleotide
gagcucgaagaggagauuc

SEQ ID NO: 1689679 - RNA, 19 nt, Artificial Sequence
  Description of Artificial Sequence: Synthetic oligonucleotide
cuauuagccuccaauuugu

SEQ ID NO: 1689680 - RNA, 19 nt, Artificial Sequence
  Description of Artificial Sequence: Synthetic oligonucleotide
auuuugucaggaacugcug

SEQ ID NO: 1689681 - RNA, 19 nt, Artificial Sequence
  Description of Artificial Sequence: Synthetic oligonucleotide
uuaaagcuacaggguuggg

SEQ ID NO: 1689682 - RNA, 19 nt, Artificial Sequence
  Description of Artificial Sequence: Synthetic oligonucleotide
uguuucccugagcaucuuc

SEQ ID NO: 1689683 - RNA, 19 nt, Artificial Sequence
  Description of Artificial Sequence: Synthetic oligonucleotide
cacacacacacacacacua

SEQ ID NO: 1689684 - RNA, 19 nt, Artificial Sequence
  Description of Artificial Sequence: Synthetic oligonucleotide
cguacacacacacacacac

SEQ ID NO: 1689685 - RNA, 19 nt, Artificial Sequence
  Description of Artificial Sequence: Synthetic oligonucleotide
ugcucggucucuugcccag

SEQ ID NO: 1689686 - RNA, 19 nt, Artificial Sequence
  Description of Artificial Sequence: Synthetic oligonucleotide
gacaggcuugugcauucug

SEQ ID NO: 1689687 - RNA, 19 nt, Artificial Sequence
  Description of Artificial Sequence: Synthetic oligonucleotide
uuggucaacccaacuccuc

SEQ ID NO: 1689688 - RNA, 19 nt, Artificial Sequence
  Description of Artificial Sequence: Synthetic oligonucleotide
gcuauuuugucaggaacug

SEQ ID NO: 1689689 - RNA, 19 nt, Artificial Sequence
  Description of Artificial Sequence: Synthetic oligonucleotide
gaccucagcaggauggaca

SEQ ID NO: 1689690 - RNA, 19 nt, Artificial Sequence
  Description of Artificial Sequence: Synthetic oligonucleotide
acauacccagagaucuugg

SEQ ID NO: 1689691 - RNA, 19 nt, Artificial Sequence
  Description of Artificial Sequence: Synthetic oligonucleotide
auuuguaggagagcucgaa

SEQ ID NO: 1689692 - RNA, 19 nt, Artificial Sequence
  Description of Artificial Sequence: Synthetic oligonucleotide
uauuagccuccaauuugua

SEQ ID NO: 1689693 - RNA, 19 nt, Artificial Sequence
  Description of Artificial Sequence: Synthetic oligonucleotide
ucacucucacugacuauua

SEQ ID NO: 1689694 - RNA, 19 nt, Artificial Sequence
  Description of Artificial Sequence: Synthetic oligonucleotide
gguuguugagggcaucgug

SEQ ID NO: 1689695 - RNA, 19 nt, Artificial Sequence
  Description of Artificial Sequence: Synthetic oligonucleotide
cacucucacugacuauuag

SEQ ID NO: 1689696 - RNA, 19 nt, Artificial Sequence
  Description of Artificial Sequence: Synthetic oligonucleotide
acacacuaaggcggcuccc

SEQ ID NO: 1689697 - RNA, 19 nt, Artificial Sequence
  Description of Artificial Sequence: Synthetic oligonucleotide
gacuauuagccuccaauuu

SEQ ID NO: 1689698 - RNA, 19 nt, Artificial Sequence
  Description of Artificial Sequence: Synthetic oligonucleotide
uccauacccagcugcgauc

SEQ ID NO: 1689699 - RNA, 19 nt, Artificial Sequence
  Description of Artificial Sequence: Synthetic oligonucleotide
caaccagaggcaagcaaca

SEQ ID NO: 1689700 - RNA, 19 nt, Artificial Sequence
  Description of Artificial Sequence: Synthetic oligonucleotide
cugacuauuagccuccaau

SEQ ID NO: 1689701 - RNA, 19 nt, Artificial Sequence
  Description of Artificial Sequence: Synthetic oligonucleotide
gacuaaggaacuagagaaa

SEQ ID NO: 1689702 - RNA, 19 nt, Artificial Sequence
  Description of Artificial Sequence: Synthetic oligonucleotide
agguauggucaccucucca

SEQ ID NO: 1689703 - RNA, 19 nt, Artificial Sequence
  Description of Artificial Sequence: Synthetic oligonucleotide
gccccagguacugagaucc

SEQ ID NO: 1689704 - RNA, 19 nt, Artificial Sequence
  Description of Artificial Sequence: Synthetic oligonucleotide
uugggcacacacguacaca

SEQ ID NO: 1689705 - RNA, 19 nt, Artificial Sequence
  Description of Artificial Sequence: Synthetic oligonucleotide
cugcgggauagcaugguca

SEQ ID NO: 1689706 - RNA, 19 nt, Artificial Sequence
  Description of Artificial Sequence: Synthetic oligonucleotide
aacccaacuccuccuugua

SEQ ID NO: 1689707 - RNA, 19 nt, Artificial Sequence
  Description of Artificial Sequence: Synthetic oligonucleotide
cagccuaagccuguguuuc

SEQ ID NO: 1689708 - RNA, 19 nt, Artificial Sequence
  Description of Artificial Sequence: Synthetic oligonucleotide
uggggagguauggucaccu

SEQ ID NO: 1689709 - RNA, 19 nt, Artificial Sequence
  Description of Artificial Sequence: Synthetic oligonucleotide
ggggugaagacagauggac

SEQ ID NO: 1689710 - RNA, 19 nt, Artificial Sequence
  Description of Artificial Sequence: Synthetic oligonucleotide
caggaguguaaaagaauaa

SEQ ID NO: 1689711 - RNA, 19 nt, Artificial Sequence
  Description of Artificial Sequence: Synthetic oligonucleotide
guugagggcaucgugcaaa

SEQ ID NO: 1689712 - RNA, 19 nt, Artificial Sequence
  Description of Artificial Sequence: Synthetic oligonucleotide
agccagaggaaggaugaca

SEQ ID NO: 1689713 - RNA, 19 nt, Artificial Sequence
  Description of Artificial Sequence: Synthetic oligonucleotide
ucccauccacugucaggcg

SEQ ID NO: 1689714 - RNA, 19 nt, Artificial Sequence
  Description of Artificial Sequence: Synthetic oligonucleotide
ugacgcacauaggccuugg

SEQ ID NO: 1689715 - RNA, 19 nt, Artificial Sequence
  Description of Artificial Sequence: Synthetic oligonucleotide
gguacugagauccaccuuu

SEQ ID NO: 1689716 - RNA, 19 nt, Artificial Sequence
  Description of Artificial Sequence: Synthetic oligonucleotide
ucccucuuuggguuuuaaa

SEQ ID NO: 1689717 - RNA, 19 nt, Artificial Sequence
  Description of Artificial Sequence: Synthetic oligonucleotide
acauaaccuauaauacaau

SEQ ID NO: 1689718 - RNA, 19 nt, Artificial Sequence
  Description of Artificial Sequence: Synthetic oligonucleotide
caccucuccauuaugggcu

SEQ ID NO: 1689719 - RNA, 19 nt, Artificial Sequence
  Description of Artificial Sequence: Synthetic oligonucleotide
gucaaugaccuggaacuga

SEQ ID NO: 1689720 - RNA, 19 nt, Artificial Sequence
  Description of Artificial Sequence: Synthetic oligonucleotide
aaguggcuccaggggaaag

SEQ ID NO: 1689721 - RNA, 19 nt, Artificial Sequence
  Description of Artificial Sequence: Synthetic oligonucleotide
cuccaauuuguaggagagc

SEQ ID NO: 1689722 - RNA, 19 nt, Artificial Sequence
  Description of Artificial Sequence: Synthetic oligonucleotide
agcggaugagggguuacug

SEQ ID NO: 1689723 - RNA, 19 nt, Artificial Sequence
  Description of Artificial Sequence: Synthetic oligonucleotide
gacaccgcugcaucccauc

SEQ ID NO: 1689724 - RNA, 19 nt, Artificial Sequence
  Description of Artificial Sequence: Synthetic oligonucleotide
auggacagauugugcaauu

SEQ ID NO: 1689725 - RNA, 19 nt, Artificial Sequence
  Description of Artificial Sequence: Synthetic oligonucleotide
cagaggaaggaugacaacu

SEQ ID NO: 1689726 - RNA, 19 nt, Artificial Sequence
  Description of Artificial Sequence: Synthetic oligonucleotide
guacugagauccaccuuug

SEQ ID NO: 1689727 - RNA, 19 nt, Artificial Sequence
  Description of Artificial Sequence: Synthetic oligonucleotide
cucggucucuugcccagag

SEQ ID NO: 1689728 - RNA, 19 nt, Artificial Sequence
  Description of Artificial Sequence: Synthetic oligonucleotide
aguggcuccaggggaaaga

SEQ ID NO: 1689729 - RNA, 19 nt, Artificial Sequence
  Description of Artificial Sequence: Synthetic oligonucleotide
ccaggaguguaaaagaaua

SEQ ID NO: 1689730 - RNA, 19 nt, Artificial Sequence
  Description of Artificial Sequence: Synthetic oligonucleotide
gcaacagccaagggguggg

SEQ ID NO: 1689731 - RNA, 19 nt, Artificial Sequence
  Description of Artificial Sequence: Synthetic oligonucleotide
ugcauucugguuggucaac

SEQ ID NO: 1689732 - RNA, 19 nt, Artificial Sequence
  Description of Artificial Sequence: Synthetic oligonucleotide
aagcggaugagggguuacu

SEQ ID NO: 1689733 - RNA, 19 nt, Artificial Sequence
  Description of Artificial Sequence: Synthetic oligonucleotide
gaagagcagucagcaguug

SEQ ID NO: 1689734 - RNA, 19 nt, Artificial Sequence
  Description of Artificial Sequence: Synthetic oligonucleotide
ucggucucuugcccagaga

SEQ ID NO: 1689735 - RNA, 19 nt, Artificial Sequence
  Description of Artificial Sequence: Synthetic oligonucleotide
cugucaggcggaggcaggg

SEQ ID NO: 1689736 - RNA, 19 nt, Artificial Sequence
  Description of Artificial Sequence: Synthetic oligonucleotide
cacugucaggcggaggcag

SEQ ID NO: 1689737 - RNA, 19 nt, Artificial Sequence
  Description of Artificial Sequence: Synthetic oligonucleotide
ccccgugagaagcaguggg

SEQ ID NO: 1689738 - RNA, 19 nt, Artificial Sequence
  Description of Artificial Sequence: Synthetic oligonucleotide
ggacuguacaacauaaccu

SEQ ID NO: 1689739 - RNA, 19 nt, Artificial Sequence
  Description of Artificial Sequence: Synthetic oligonucleotide
ccaccuuugacucucuaga

SEQ ID NO: 1689740 - RNA, 19 nt, Artificial Sequence
  Description of Artificial Sequence: Synthetic oligonucleotide
gauggacagauugugcaau

SEQ ID NO: 1689741 - RNA, 19 nt, Artificial Sequence
  Description of Artificial Sequence: Synthetic oligonucleotide
ggggcaagcaucacaacca

SEQ ID NO: 1689742 - RNA, 19 nt, Artificial Sequence
  Description of Artificial Sequence: Synthetic oligonucleotide
gcucccagugccuccauac

SEQ ID NO: 1689743 - RNA, 19 nt, Artificial Sequence
  Description of Artificial Sequence: Synthetic oligonucleotide
gacuuucccucuuuggguu

SEQ ID NO: 1689744 - RNA, 19 nt, Artificial Sequence
  Description of Artificial Sequence: Synthetic oligonucleotide
agcagucagcaguugugua

SEQ ID NO: 1689745 - RNA, 19 nt, Artificial Sequence
  Description of Artificial Sequence: Synthetic oligonucleotide
cggucucuugcccagagag

SEQ ID NO: 1689746 - RNA, 19 nt, Artificial Sequence
  Description of Artificial Sequence: Synthetic oligonucleotide
gccaaggaccuaugugggg

SEQ ID NO: 1689747 - RNA, 19 nt, Artificial Sequence
  Description of Artificial Sequence: Synthetic oligonucleotide
gucagaaaccaggagugua

SEQ ID NO: 1689748 - RNA, 19 nt, Artificial Sequence
  Description of Artificial Sequence: Synthetic oligonucleotide
ugaugguggggaggccucc

SEQ ID NO: 1689749 - RNA, 19 nt, Artificial Sequence
  Description of Artificial Sequence: Synthetic oligonucleotide
cccgugagaagcagugggg

SEQ ID NO: 1689750 - RNA, 19 nt, Artificial Sequence
  Description of Artificial Sequence: Synthetic oligonucleotide
ggcaagcaacagccaaggg

SEQ ID NO: 1689751 - RNA, 19 nt, Artificial Sequence
  Description of Artificial Sequence: Synthetic oligonucleotide
ggagguauggucaccucuc

SEQ ID NO: 1689752 - RNA, 19 nt, Artificial Sequence
  Description of Artificial Sequence: Synthetic oligonucleotide
acacguacacacacacaca

SEQ ID NO: 1689753 - RNA, 19 nt, Artificial Sequence
  Description of Artificial Sequence: Synthetic oligonucleotide
ggucucuugcccagagagg

SEQ ID NO: 1689754 - RNA, 19 nt, Artificial Sequence
  Description of Artificial Sequence: Synthetic oligonucleotide
ggauggggagguaugguca

SEQ ID NO: 1689755 - RNA, 19 nt, Artificial Sequence
  Description of Artificial Sequence: Synthetic oligonucleotide
acugacuauuagccuccaa

SEQ ID NO: 1689756 - RNA, 19 nt, Artificial Sequence
  Description of Artificial Sequence: Synthetic oligonucleotide
acaagggacuuucccucuu

SEQ ID NO: 1689757 - RNA, 19 nt, Artificial Sequence
  Description of Artificial Sequence: Synthetic oligonucleotide
gugcaauugauggcagaca

SEQ ID NO: 1689758 - RNA, 19 nt, Artificial Sequence
  Description of Artificial Sequence: Synthetic oligonucleotide
gagagcucgaagaggagau

SEQ ID NO: 1689759 - RNA, 19 nt, Artificial Sequence
  Description of Artificial Sequence: Synthetic oligonucleotide
cccauccacugucaggcgg

SEQ ID NO: 1689760 - RNA, 19 nt, Artificial Sequence
  Description of Artificial Sequence: Synthetic oligonucleotide
cagaccucacugggaaggc

SEQ ID NO: 1689761 - RNA, 19 nt, Artificial Sequence
  Description of Artificial Sequence: Synthetic oligonucleotide
ggcuauuuugucaggaacu

SEQ ID NO: 1689762 - RNA, 19 nt, Artificial Sequence
  Description of Artificial Sequence: Synthetic oligonucleotide
uggcagacacagagccaga

SEQ ID NO: 1689763 - RNA, 19 nt, Artificial Sequence
  Description of Artificial Sequence: Synthetic oligonucleotide
guguuucccuguguuuccc

SEQ ID NO: 1689764 - RNA, 19 nt, Artificial Sequence
  Description of Artificial Sequence: Synthetic oligonucleotide
guacacacacacacacaca

SEQ ID NO: 1689765 - RNA, 19 nt, Artificial Sequence
  Description of Artificial Sequence: Synthetic oligonucleotide
ggcagacacagagccagag

SEQ ID NO: 1689766 - RNA, 19 nt, Artificial Sequence
  Description of Artificial Sequence: Synthetic oligonucleotide
acacacacacacacacaca

SEQ ID NO: 1689767 - RNA, 19 nt, Artificial Sequence
  Description of Artificial Sequence: Synthetic oligonucleotide
gguauggucaccucuccau

SEQ ID NO: 1689768 - RNA, 19 nt, Artificial Sequence
  Description of Artificial Sequence: Synthetic oligonucleotide
acacacacacacacacacu

SEQ ID NO: 1689769 - RNA, 19 nt, Artificial Sequence
  Description of Artificial Sequence: Synthetic oligonucleotide
auggacaggcuugugcauu

SEQ ID NO: 1689770 - RNA, 19 nt, Artificial Sequence
  Description of Artificial Sequence: Synthetic oligonucleotide
aaacugccccagguacuga

SEQ ID NO: 1689771 - RNA, 19 nt, Artificial Sequence
  Description of Artificial Sequence: Synthetic oligonucleotide
ggcuccaggggaaagaugu

SEQ ID NO: 1689772 - RNA, 19 nt, Artificial Sequence
  Description of Artificial Sequence: Synthetic oligonucleotide
gcauucugguuggucaacc

SEQ ID NO: 1689773 - RNA, 19 nt, Artificial Sequence
  Description of Artificial Sequence: Synthetic oligonucleotide
cauaugauacaagggacuu

SEQ ID NO: 1689774 - RNA, 19 nt, Artificial Sequence
  Description of Artificial Sequence: Synthetic oligonucleotide
aggugaugguggggaggcc

SEQ ID NO: 1689775 - RNA, 19 nt, Artificial Sequence
  Description of Artificial Sequence: Synthetic oligonucleotide
agucagcaguuguguagaa

SEQ ID NO: 1689776 - RNA, 19 nt, Artificial Sequence
  Description of Artificial Sequence: Synthetic oligonucleotide
ggccuuaggcagccuaagc

SEQ ID NO: 1689777 - RNA, 19 nt, Artificial Sequence
  Description of Artificial Sequence: Synthetic oligonucleotide
caguggggcaagcaucaca

SEQ ID NO: 1689778 - RNA, 19 nt, Artificial Sequence
  Description of Artificial Sequence: Synthetic oligonucleotide
gaaggcacaggggcugcuc

SEQ ID NO: 1689779 - RNA, 19 nt, Artificial Sequence
  Description of Artificial Sequence: Synthetic oligonucleotide
gugguguggcauguuugug

SEQ ID NO: 1689780 - RNA, 19 nt, Artificial Sequence
  Description of Artificial Sequence: Synthetic oligonucleotide
acguacacacacacacaca

SEQ ID NO: 1689781 - RNA, 19 nt, Artificial Sequence
  Description of Artificial Sequence: Synthetic oligonucleotide
agagagguauggggaccag

SEQ ID NO: 1689782 - RNA, 19 nt, Artificial Sequence
  Description of Artificial Sequence: Synthetic oligonucleotide
ggacuuucccucuuugggu

SEQ ID NO: 1689783 - RNA, 19 nt, Artificial Sequence
  Description of Artificial Sequence: Synthetic oligonucleotide
acacacguacacacacaca

SEQ ID NO: 1689784 - RNA, 19 nt, Artificial Sequence
  Description of Artificial Sequence: Synthetic oligonucleotide
gauggacaggcuugugcau

SEQ ID NO: 1689785 - RNA, 19 nt, Artificial Sequence
  Description of Artificial Sequence: Synthetic oligonucleotide
acacacacacacacacuaa

SEQ ID NO: 1689786 - RNA, 19 nt, Artificial Sequence
  Description of Artificial Sequence: Synthetic oligonucleotide
gacuccugacaccgcugca

SEQ ID NO: 1689787 - RNA, 19 nt, Artificial Sequence
  Description of Artificial Sequence: Synthetic oligonucleotide
agccuccaauuuguaggag

SEQ ID NO: 1689788 - RNA, 19 nt, Artificial Sequence
  Description of Artificial Sequence: Synthetic oligonucleotide
cagagagguauggggacca

SEQ ID NO: 1689789 - RNA, 19 nt, Artificial Sequence
  Description of Artificial Sequence: Synthetic oligonucleotide
uccagagcuuuggguaaaa

SEQ ID NO: 1689790 - RNA, 19 nt, Artificial Sequence
  Description of Artificial Sequence: Synthetic oligonucleotide
ccaggggaaagauguccag

SEQ ID NO: 1689791 - RNA, 19 nt, Artificial Sequence
  Description of Artificial Sequence: Synthetic oligonucleotide
ccugacaccgcugcauccc

SEQ ID NO: 1689792 - RNA, 19 nt, Artificial Sequence
  Description of Artificial Sequence: Synthetic oligonucleotide
ggaacagaccucacuggga

SEQ ID NO: 1689793 - RNA, 19 nt, Artificial Sequence
  Description of Artificial Sequence: Synthetic oligonucleotide
gcggaugagggguuacuga

SEQ ID NO: 1689794 - RNA, 19 nt, Artificial Sequence
  Description of Artificial Sequence: Synthetic oligonucleotide
ccgugagaagcaguggggc

SEQ ID NO: 1689795 - RNA, 19 nt, Artificial Sequence
  Description of Artificial Sequence: Synthetic oligonucleotide
cugacgcacauaggccuug

SEQ ID NO: 1689796 - RNA, 19 nt, Artificial Sequence
  Description of Artificial Sequence: Synthetic oligonucleotide
cauggucaccaucaccacu

SEQ ID NO: 1689797 - RNA, 19 nt, Artificial Sequence
  Description of Artificial Sequence: Synthetic oligonucleotide
gguggggaggccuccaugu

SEQ ID NO: 1689798 - RNA, 19 nt, Artificial Sequence
  Description of Artificial Sequence: Synthetic oligonucleotide
ugagggcaucgugcaaagu

SEQ ID NO: 1689799 - RNA, 19 nt, Artificial Sequence
  Description of Artificial Sequence: Synthetic oligonucleotide
gaugguggggaggccucca

SEQ ID NO: 1689800 - RNA, 19 nt, Artificial Sequence
  Description of Artificial Sequence: Synthetic oligonucleotide
caggugccaaggaccuaug

SEQ ID NO: 1689801 - RNA, 19 nt, Artificial Sequence
  Description of Artificial Sequence: Synthetic oligonucleotide
cagaaaccaggaguguaaa

SEQ ID NO: 1689802 - RNA, 19 nt, Artificial Sequence
  Description of Artificial Sequence: Synthetic oligonucleotide
gaaagcggaugagggguua

SEQ ID NO: 1689803 - RNA, 19 nt, Artificial Sequence
  Description of Artificial Sequence: Synthetic oligonucleotide
cucacucucacugacuauu

SEQ ID NO: 1689804 - RNA, 19 nt, Artificial Sequence
  Description of Artificial Sequence: Synthetic oligonucleotide
ggaggccuccauguccagg

SEQ ID NO: 1689805 - RNA, 19 nt, Artificial Sequence
  Description of Artificial Sequence: Synthetic oligonucleotide
guggggcaagcaucacaac

SEQ ID NO: 1689806 - RNA, 19 nt, Artificial Sequence
  Description of Artificial Sequence: Synthetic oligonucleotide
agaaagcggaugagggguu

SEQ ID NO: 1689807 - RNA, 19 nt, Artificial Sequence
  Description of Artificial Sequence: Synthetic oligonucleotide
ccuuaggcagccuaagccu

SEQ ID NO: 1689808 - RNA, 19 nt, Artificial Sequence
  Description of Artificial Sequence: Synthetic oligonucleotide
cugcucggucucuugccca

SEQ ID NO: 1689809 - RNA, 19 nt, Artificial Sequence
  Description of Artificial Sequence: Synthetic oligonucleotide
guauggggaccaggugccc

SEQ ID NO: 1689810 - RNA, 19 nt, Artificial Sequence
  Description of Artificial Sequence: Synthetic oligonucleotide
cauuaugggcugcgggaua

SEQ ID NO: 1689811 - RNA, 19 nt, Artificial Sequence
  Description of Artificial Sequence: Synthetic oligonucleotide
gggagguauggucaccucu

SEQ ID NO: 1689812 - RNA, 19 nt, Artificial Sequence
  Description of Artificial Sequence: Synthetic oligonucleotide
uucccucuuuggguuuuaa

SEQ ID NO: 1689813 - RNA, 19 nt, Artificial Sequence
  Description of Artificial Sequence: Synthetic oligonucleotide
cuugagugccaggugccaa

SEQ ID NO: 1689814 - RNA, 19 nt, Artificial Sequence
  Description of Artificial Sequence: Synthetic oligonucleotide
gcaauugauggcagacaca

SEQ ID NO: 1689815 - RNA, 19 nt, Artificial Sequence
  Description of Artificial Sequence: Synthetic oligonucleotide
gaucuugggcacacacgua

SEQ ID NO: 1689816 - RNA, 19 nt, Artificial Sequence
  Description of Artificial Sequence: Synthetic oligonucleotide
acugacgcacauaggccuu

SEQ ID NO: 1689817 - RNA, 19 nt, Artificial Sequence
  Description of Artificial Sequence: Synthetic oligonucleotide
gcugcgggauagcaugguc

SEQ ID NO: 1689818 - RNA, 19 nt, Artificial Sequence
  Description of Artificial Sequence: Synthetic oligonucleotide
agggccuuaggcagccuaa

SEQ ID NO: 1689819 - RNA, 19 nt, Artificial Sequence
  Description of Artificial Sequence: Synthetic oligonucleotide
cuccauacccagcugcgau

SEQ ID NO: 1689820 - RNA, 19 nt, Artificial Sequence
  Description of Artificial Sequence: Synthetic oligonucleotide
agagcucgaagaggagauu

SEQ ID NO: 1689821 - RNA, 19 nt, Artificial Sequence
  Description of Artificial Sequence: Synthetic oligonucleotide
gaccuggaacugacgcaca

SEQ ID NO: 1689822 - RNA, 19 nt, Artificial Sequence
  Description of Artificial Sequence: Synthetic oligonucleotide
augggcugcgggauagcau

SEQ ID NO: 1689823 - RNA, 19 nt, Artificial Sequence
  Description of Artificial Sequence: Synthetic oligonucleotide
ggggaggccuccaugucca

SEQ ID NO: 1689824 - RNA, 19 nt, Artificial Sequence
  Description of Artificial Sequence: Synthetic oligonucleotide
uuucccucuuuggguuuua

SEQ ID NO: 1689825 - RNA, 19 nt, Artificial Sequence
  Description of Artificial Sequence: Synthetic oligonucleotide
gccccugacuccugacacc

SEQ ID NO: 1689826 - RNA, 19 nt, Artificial Sequence
  Description of Artificial Sequence: Synthetic oligonucleotide
ggggcgcuuccuuccuucc

SEQ ID NO: 1689827 - RNA, 19 nt, Artificial Sequence
  Description of Artificial Sequence: Synthetic oligonucleotide
ggucaacccaacuccuccu

SEQ ID NO: 1689828 - RNA, 19 nt, Artificial Sequence
  Description of Artificial Sequence: Synthetic oligonucleotide
gaagacagauggacagauu

SEQ ID NO: 1689829 - RNA, 19 nt, Artificial Sequence
  Description of Artificial Sequence: Synthetic oligonucleotide
gacgcacauaggccuuggu

SEQ ID NO: 1689830 - RNA, 19 nt, Artificial Sequence
  Description of Artificial Sequence: Synthetic oligonucleotide
cacuaaggcggcucccagu

SEQ ID NO: 1689831 - RNA, 19 nt, Artificial Sequence
  Description of Artificial Sequence: Synthetic oligonucleotide
gguugucaaugaccuggaa

SEQ ID NO: 1689832 - RNA, 19 nt, Artificial Sequence
  Description of Artificial Sequence: Synthetic oligonucleotide
gggcugcgggauagcaugg

SEQ ID NO: 1689833 - RNA, 19 nt, Artificial Sequence
  Description of Artificial Sequence: Synthetic oligonucleotide
cagagucuagaaacuccau

SEQ ID NO: 1689834 - RNA, 19 nt, Artificial Sequence
  Description of Artificial Sequence: Synthetic oligonucleotide
cagggccuuaggcagccua

SEQ ID NO: 1689835 - RNA, 19 nt, Artificial Sequence
  Description of Artificial Sequence: Synthetic oligonucleotide
cggaugagggguuacugaa

SEQ ID NO: 1689836 - RNA, 19 nt, Artificial Sequence
  Description of Artificial Sequence: Synthetic oligonucleotide
ggacaggaaguggcuccag

SEQ ID NO: 1689837 - RNA, 19 nt, Artificial Sequence
  Description of Artificial Sequence: Synthetic oligonucleotide
ggagugguguggcauguuu

SEQ ID NO: 1689838 - RNA, 19 nt, Artificial Sequence
  Description of Artificial Sequence: Synthetic oligonucleotide
cugccccagguacugagau

SEQ ID NO: 1689839 - RNA, 19 nt, Artificial Sequence
  Description of Artificial Sequence: Synthetic oligonucleotide
ggcagccuaagccuguguu

SEQ ID NO: 1689840 - RNA, 19 nt, Artificial Sequence
  Description of Artificial Sequence: Synthetic oligonucleotide
ggggagguauggucaccuc

SEQ ID NO: 1689841 - RNA, 19 nt, Artificial Sequence
  Description of Artificial Sequence: Synthetic oligonucleotide
gcagccuaagccuguguuu

SEQ ID NO: 1689842 - RNA, 19 nt, Artificial Sequence
  Description of Artificial Sequence: Synthetic oligonucleotide
cacugacuauuagccucca

SEQ ID NO: 1689843 - RNA, 19 nt, Artificial Sequence
  Description of Artificial Sequence: Synthetic oligonucleotide
caagggacuuucccucuuu

SEQ ID NO: 1689844 - RNA, 19 nt, Artificial Sequence
  Description of Artificial Sequence: Synthetic oligonucleotide
gcgggauagcauggucacc

SEQ ID NO: 1689845 - RNA, 19 nt, Artificial Sequence
  Description of Artificial Sequence: Synthetic oligonucleotide
ggucagaaaccaggagugu

SEQ ID NO: 1689846 - RNA, 19 nt, Artificial Sequence
  Description of Artificial Sequence: Synthetic oligonucleotide
cccugacuccugacaccgc

SEQ ID NO: 1689847 - RNA, 19 nt, Artificial Sequence
  Description of Artificial Sequence: Synthetic oligonucleotide
gcaggauggacaggcuugu

SEQ ID NO: 1689848 - RNA, 19 nt, Artificial Sequence
  Description of Artificial Sequence: Synthetic oligonucleotide
ccauacccagcugcgaucu

SEQ ID NO: 1689849 - RNA, 19 nt, Artificial Sequence
  Description of Artificial Sequence: Synthetic oligonucleotide
ccuaagccuguguuucccu

SEQ ID NO: 1689850 - RNA, 19 nt, Artificial Sequence
  Description of Artificial Sequence: Synthetic oligonucleotide
ccaggugccaaggaccuau

SEQ ID NO: 1689851 - RNA, 19 nt, Artificial Sequence
  Description of Artificial Sequence: Synthetic oligonucleotide
cacacacacuaaggcggcu

SEQ ID NO: 1689852 - RNA, 19 nt, Artificial Sequence
  Description of Artificial Sequence: Synthetic oligonucleotide
ccuccauacccagcugcga

SEQ ID NO: 1689853 - RNA, 19 nt, Artificial Sequence
  Description of Artificial Sequence: Synthetic oligonucleotide
cuugugcauucugguuggu

SEQ ID NO: 1689854 - RNA, 19 nt, Artificial Sequence
  Description of Artificial Sequence: Synthetic oligonucleotide
ccauuaugggcugcgggau

SEQ ID NO: 1689855 - RNA, 19 nt, Artificial Sequence
  Description of Artificial Sequence: Synthetic oligonucleotide
ggggagugguguggcaugu

SEQ ID NO: 1689856 - RNA, 19 nt, Artificial Sequence
  Description of Artificial Sequence: Synthetic oligonucleotide
ccuggaacugacgcacaua

SEQ ID NO: 1689857 - RNA, 19 nt, Artificial Sequence
  Description of Artificial Sequence: Synthetic oligonucleotide
gggcgcuuccuuccuuccu

SEQ ID NO: 1689858 - RNA, 19 nt, Artificial Sequence
  Description of Artificial Sequence: Synthetic oligonucleotide
gcucggucucuugcccaga

SEQ ID NO: 1689859 - RNA, 19 nt, Artificial Sequence
  Description of Artificial Sequence: Synthetic oligonucleotide
ggcugcgggauagcauggu

SEQ ID NO: 1689860 - RNA, 19 nt, Artificial Sequence
  Description of Artificial Sequence: Synthetic oligonucleotide
gcacauacccagagaucuu

SEQ ID NO: 1689861 - RNA, 19 nt, Artificial Sequence
  Description of Artificial Sequence: Synthetic oligonucleotide
ccccucacucucacugacu

SEQ ID NO: 1689862 - RNA, 19 nt, Artificial Sequence
  Description of Artificial Sequence: Synthetic oligonucleotide
guguuucccugagcaucuu

SEQ ID NO: 1689863 - RNA, 19 nt, Artificial Sequence
  Description of Artificial Sequence: Synthetic oligonucleotide
gccaggugccaaggaccua

SEQ ID NO: 1689864 - RNA, 19 nt, Artificial Sequence
  Description of Artificial Sequence: Synthetic oligonucleotide
gggagugguguggcauguu

SEQ ID NO: 1689865 - RNA, 19 nt, Artificial Sequence
  Description of Artificial Sequence: Synthetic oligonucleotide
gcagggccuuaggcagccu

SEQ ID NO: 1689866 - RNA, 19 nt, Artificial Sequence
  Description of Artificial Sequence: Synthetic oligonucleotide
uuuaaugaggcccugaggg

SEQ ID NO: 1689867 - RNA, 19 nt, Artificial Sequence
  Description of Artificial Sequence: Synthetic oligonucleotide
ucaagucacauucauaggc

SEQ ID NO: 1689868 - RNA, 19 nt, Artificial Sequence
  Description of Artificial Sequence: Synthetic oligonucleotide
aaagaauucgcagacagca

SEQ ID NO: 1689869 - RNA, 19 nt, Artificial Sequence
  Description of Artificial Sequence: Synthetic oligonucleotide
ugaauuuacaagagggucc

SEQ ID NO: 1689870 - RNA, 19 nt, Artificial Sequence
  Description of Artificial Sequence: Synthetic oligonucleotide
agguaauucacacaaauga

SEQ ID NO: 1689871 - RNA, 19 nt, Artificial Sequence
  Description of Artificial Sequence: Synthetic oligonucleotide
uuuucuaggcucaaggaug

SEQ ID NO: 1689872 - RNA, 19 nt, Artificial Sequence
  Description of Artificial Sequence: Synthetic oligonucleotide
aaugacagcacagaguuug

SEQ ID NO: 1689873 - RNA, 19 nt, Artificial Sequence
  Description of Artificial Sequence: Synthetic oligonucleotide
gaugauuuccugcauggcg

SEQ ID NO: 1689874 - RNA, 19 nt, Artificial Sequence
  Description of Artificial Sequence: Synthetic oligonucleotide
cauguaagaacucacacug

SEQ ID NO: 1689875 - RNA, 19 nt, Artificial Sequence
  Description of Artificial Sequence: Synthetic oligonucleotide
aacuugauaugguccacgc

SEQ ID NO: 1689876 - RNA, 19 nt, Artificial Sequence
  Description of Artificial Sequence: Synthetic oligonucleotide
ucauacucauguaagaacu

SEQ ID NO: 1689877 - RNA, 19 nt, Artificial Sequence
  Description of Artificial Sequence: Synthetic oligonucleotide
aaaguauucuuguaacuga

SEQ ID NO: 1689878 - RNA, 19 nt, Artificial Sequence
  Description of Artificial Sequence: Synthetic oligonucleotide
ugaaugacagcacagaguu

SEQ ID NO: 1689879 - RNA, 19 nt, Artificial Sequence
  Description of Artificial Sequence: Synthetic oligonucleotide
acauuuucuaggcucaagg

SEQ ID NO: 1689880 - RNA, 19 nt, Artificial Sequence
  Description of Artificial Sequence: Synthetic oligonucleotide
uggucugcagcacugaccg

SEQ ID NO: 1689881 - RNA, 19 nt, Artificial Sequence
  Description of Artificial Sequence: Synthetic oligonucleotide
aaaaguagcacucgggcau

SEQ ID NO: 1689882 - RNA, 19 nt, Artificial Sequence
  Description of Artificial Sequence: Synthetic oligonucleotide
uuuaaucaacuucauaaaa

SEQ ID NO: 1689883 - RNA, 19 nt, Artificial Sequence
  Description of Artificial Sequence: Synthetic oligonucleotide
aagaacucacacugguccc

SEQ ID NO: 1689884 - RNA, 19 nt, Artificial Sequence
  Description of Artificial Sequence: Synthetic oligonucleotide
uccaagucgaacuugauau

SEQ ID NO: 1689885 - RNA, 19 nt, Artificial Sequence
  Description of Artificial Sequence: Synthetic oligonucleotide
aaucccacgagguaauuca

SEQ ID NO: 1689886 - RNA, 19 nt, Artificial Sequence
  Description of Artificial Sequence: Synthetic oligonucleotide
aagucacauucauaggcac

SEQ ID NO: 1689887 - RNA, 19 nt, Artificial Sequence
  Description of Artificial Sequence: Synthetic oligonucleotide
guaaaaguagcacucgggc

SEQ ID NO: 1689888 - RNA, 19 nt, Artificial Sequence
  Description of Artificial Sequence: Synthetic oligonucleotide
uguaagaacucacacuggu

SEQ ID NO: 1689889 - RNA, 19 nt, Artificial Sequence
  Description of Artificial Sequence: Synthetic oligonucleotide
cauaggcacagcuugaggc

SEQ ID NO: 1689890 - RNA, 19 nt, Artificial Sequence
  Description of Artificial Sequence: Synthetic oligonucleotide
uguuuaaugaggcccugag

SEQ ID NO: 1689891 - RNA, 19 nt, Artificial Sequence
  Description of Artificial Sequence: Synthetic oligonucleotide
augaauuuacaagaggguc

SEQ ID NO: 1689892 - RNA, 19 nt, Artificial Sequence
  Description of Artificial Sequence: Synthetic oligonucleotide
cugagaaaggccaaaugcc

SEQ ID NO: 1689893 - RNA, 19 nt, Artificial Sequence
  Description of Artificial Sequence: Synthetic oligonucleotide
aacuuggaguaaaaguagc

SEQ ID NO: 1689894 - RNA, 19 nt, Artificial Sequence
  Description of Artificial Sequence: Synthetic oligonucleotide
ugcaugaccccaaugaccu

SEQ ID NO: 1689895 - RNA, 19 nt, Artificial Sequence
  Description of Artificial Sequence: Synthetic oligonucleotide
aaaucuagggugcaugaau

SEQ ID NO: 1689896 - RNA, 19 nt, Artificial Sequence
  Description of Artificial Sequence: Synthetic oligonucleotide
uugauaugguccacgcugg

SEQ ID NO: 1689897 - RNA, 19 nt, Artificial Sequence
  Description of Artificial Sequence: Synthetic oligonucleotide
ugucuucucaccacuaaug

SEQ ID NO: 1689898 - RNA, 19 nt, Artificial Sequence
  Description of Artificial Sequence: Synthetic oligonucleotide
uuggaguaaaaguagcacu

SEQ ID NO: 1689899 - RNA, 19 nt, Artificial Sequence
  Description of Artificial Sequence: Synthetic oligonucleotide
uggaguaaaaguagcacuc

SEQ ID NO: 1689900 - RNA, 19 nt, Artificial Sequence
  Description of Artificial Sequence: Synthetic oligonucleotide
uuaaugaggcccugagggg

SEQ ID NO: 1689901 - RNA, 19 nt, Artificial Sequence
  Description of Artificial Sequence: Synthetic oligonucleotide
acugcuagccaucuuccac

SEQ ID NO: 1689902 - RNA, 19 nt, Artificial Sequence
  Description of Artificial Sequence: Synthetic oligonucleotide
uaaaaguagcacucgggca

SEQ ID NO: 1689903 - RNA, 19 nt, Artificial Sequence
  Description of Artificial Sequence: Synthetic oligonucleotide
cuuggauaggcccacuugc

SEQ ID NO: 1689904 - RNA, 19 nt, Artificial Sequence
  Description of Artificial Sequence: Synthetic oligonucleotide
acaugauccacccauccug

SEQ ID NO: 1689905 - RNA, 19 nt, Artificial Sequence
  Description of Artificial Sequence: Synthetic oligonucleotide
gcaugaauuuacaagaggg

SEQ ID NO: 1689906 - RNA, 19 nt, Artificial Sequence
  Description of Artificial Sequence: Synthetic oligonucleotide
gaagcaagcccagaaaagc

SEQ ID NO: 1689907 - RNA, 19 nt, Artificial Sequence
  Description of Artificial Sequence: Synthetic oligonucleotide
uuuggugcaucuguuggcg

SEQ ID NO: 1689908 - RNA, 19 nt, Artificial Sequence
  Description of Artificial Sequence: Synthetic oligonucleotide
ugggucagcuaguuaaagg

SEQ ID NO: 1689909 - RNA, 19 nt, Artificial Sequence
  Description of Artificial Sequence: Synthetic oligonucleotide
ucgaacuugauauggucca

SEQ ID NO: 1689910 - RNA, 19 nt, Artificial Sequence
  Description of Artificial Sequence: Synthetic oligonucleotide
gaacuuggaguaaaaguag

SEQ ID NO: 1689911 - RNA, 19 nt, Artificial Sequence
  Description of Artificial Sequence: Synthetic oligonucleotide
ggugcaugaauuuacaaga

SEQ ID NO: 1689912 - RNA, 19 nt, Artificial Sequence
  Description of Artificial Sequence: Synthetic oligonucleotide
auucgcagacagcagcccc

SEQ ID NO: 1689913 - RNA, 19 nt, Artificial Sequence
  Description of Artificial Sequence: Synthetic oligonucleotide
aguaaaaguagcacucggg

SEQ ID NO: 1689914 - RNA, 19 nt, Artificial Sequence
  Description of Artificial Sequence: Synthetic oligonucleotide
caagucgaacuugauaugg

SEQ ID NO: 1689915 - RNA, 19 nt, Artificial Sequence
  Description of Artificial Sequence: Synthetic oligonucleotide
cucauguaagaacucacac

SEQ ID NO: 1689916 - RNA, 19 nt, Artificial Sequence
  Description of Artificial Sequence: Synthetic oligonucleotide
ucaaaucuagggugcauga

SEQ ID NO: 1689917 - RNA, 19 nt, Artificial Sequence
  Description of Artificial Sequence: Synthetic oligonucleotide
caagugacuugcuccaacg

SEQ ID NO: 1689918 - RNA, 19 nt, Artificial Sequence
  Description of Artificial Sequence: Synthetic oligonucleotide
augauuuccugcauggcgg

SEQ ID NO: 1689919 - RNA, 19 nt, Artificial Sequence
  Description of Artificial Sequence: Synthetic oligonucleotide
gucagcuaguuaaaggugg

SEQ ID NO: 1689920 - RNA, 19 nt, Artificial Sequence
  Description of Artificial Sequence: Synthetic oligonucleotide
cugguguuuaaugaggccc

SEQ ID NO: 1689921 - RNA, 19 nt, Artificial Sequence
  Description of Artificial Sequence: Synthetic oligonucleotide
uccacacaggaccaagaag

SEQ ID NO: 1689922 - RNA, 19 nt, Artificial Sequence
  Description of Artificial Sequence: Synthetic oligonucleotide
uauucuuguaacugaacuu

SEQ ID NO: 1689923 - RNA, 19 nt, Artificial Sequence
  Description of Artificial Sequence: Synthetic oligonucleotide
gaguuugcuuggcaggagg

SEQ ID NO: 1689924 - RNA, 19 nt, Artificial Sequence
  Description of Artificial Sequence: Synthetic oligonucleotide
aaaugacucuccgagugug

SEQ ID NO: 1689925 - RNA, 19 nt, Artificial Sequence
  Description of Artificial Sequence: Synthetic oligonucleotide
ugauccacccauccugucc

SEQ ID NO: 1689926 - RNA, 19 nt, Artificial Sequence
  Description of Artificial Sequence: Synthetic oligonucleotide
aguagaugcuccaaguuug

SEQ ID NO: 1689927 - RNA, 19 nt, Artificial Sequence
  Description of Artificial Sequence: Synthetic oligonucleotide
auuuacaagagggucccuc

SEQ ID NO: 1689928 - RNA, 19 nt, Artificial Sequence
  Description of Artificial Sequence: Synthetic oligonucleotide
uggcggaauggacacaugc

SEQ ID NO: 1689929 - RNA, 19 nt, Artificial Sequence
  Description of Artificial Sequence: Synthetic oligonucleotide
auaugguccacgcuggcga

SEQ ID NO: 1689930 - RNA, 19 nt, Artificial Sequence
  Description of Artificial Sequence: Synthetic oligonucleotide
gucauacucauguaagaac

SEQ ID NO: 1689931 - RNA, 19 nt, Artificial Sequence
  Description of Artificial Sequence: Synthetic oligonucleotide
uucaaaucuagggugcaug

SEQ ID NO: 1689932 - RNA, 19 nt, Artificial Sequence
  Description of Artificial Sequence: Synthetic oligonucleotide
guaggcgcagcucaccugg

SEQ ID NO: 1689933 - RNA, 19 nt, Artificial Sequence
  Description of Artificial Sequence: Synthetic oligonucleotide
ucuucucaccacuaaugug

SEQ ID NO: 1689934 - RNA, 19 nt, Artificial Sequence
  Description of Artificial Sequence: Synthetic oligonucleotide
cuaggcucaaggaugggug

SEQ ID NO: 1689935 - RNA, 19 nt, Artificial Sequence
  Description of Artificial Sequence: Synthetic oligonucleotide
cuagggugcaugaauuuac

SEQ ID NO: 1689936 - RNA, 19 nt, Artificial Sequence
  Description of Artificial Sequence: Synthetic oligonucleotide
uguagcaagugacuugcuc

SEQ ID NO: 1689937 - RNA, 19 nt, Artificial Sequence
  Description of Artificial Sequence: Synthetic oligonucleotide
acuuguagcaagugacuug

SEQ ID NO: 1689938 - RNA, 19 nt, Artificial Sequence
  Description of Artificial Sequence: Synthetic oligonucleotide
gaccccaaugaccugcggg

SEQ ID NO: 1689939 - RNA, 19 nt, Artificial Sequence
  Description of Artificial Sequence: Synthetic oligonucleotide
agaagcacagcccuuccca

SEQ ID NO: 1689940 - RNA, 19 nt, Artificial Sequence
  Description of Artificial Sequence: Synthetic oligonucleotide
uuagccaguguuugcacac

SEQ ID NO: 1689941 - RNA, 19 nt, Artificial Sequence
  Description of Artificial Sequence: Synthetic oligonucleotide
gauggguucacauuuucua

SEQ ID NO: 1689942 - RNA, 19 nt, Artificial Sequence
  Description of Artificial Sequence: Synthetic oligonucleotide
cuuggaguaaaaguagcac

SEQ ID NO: 1689943 - RNA, 19 nt, Artificial Sequence
  Description of Artificial Sequence: Synthetic oligonucleotide
cacacaacugucuucucac

SEQ ID NO: 1689944 - RNA, 19 nt, Artificial Sequence
  Description of Artificial Sequence: Synthetic oligonucleotide
uuuguuggaggcugugucu

SEQ ID NO: 1689945 - RNA, 19 nt, Artificial Sequence
  Description of Artificial Sequence: Synthetic oligonucleotide
gaacuugauaugguccacg

SEQ ID NO: 1689946 - RNA, 19 nt, Artificial Sequence
  Description of Artificial Sequence: Synthetic oligonucleotide
caguucaaaucuagggugc

SEQ ID NO: 1689947 - RNA, 19 nt, Artificial Sequence
  Description of Artificial Sequence: Synthetic oligonucleotide
acacggagaaagcaggcug

SEQ ID NO: 1689948 - RNA, 19 nt, Artificial Sequence
  Description of Artificial Sequence: Synthetic oligonucleotide
uuacaagagggucccucag

SEQ ID NO: 1689949 - RNA, 19 nt, Artificial Sequence
  Description of Artificial Sequence: Synthetic oligonucleotide
uguuugcacacaacugucu

SEQ ID NO: 1689950 - RNA, 19 nt, Artificial Sequence
  Description of Artificial Sequence: Synthetic oligonucleotide
uuggauaggcccacuugcc

SEQ ID NO: 1689951 - RNA, 19 nt, Artificial Sequence
  Description of Artificial Sequence: Synthetic oligonucleotide
gcaguucaaaucuagggug

SEQ ID NO: 1689952 - RNA, 19 nt, Artificial Sequence
  Description of Artificial Sequence: Synthetic oligonucleotide
uuugacucugcaugacccc

SEQ ID NO: 1689953 - RNA, 19 nt, Artificial Sequence
  Description of Artificial Sequence: Synthetic oligonucleotide
guuuugacucugcaugacc

SEQ ID NO: 1689954 - RNA, 19 nt, Artificial Sequence
  Description of Artificial Sequence: Synthetic oligonucleotide
gauaugguccacgcuggcg

SEQ ID NO: 1689955 - RNA, 19 nt, Artificial Sequence
  Description of Artificial Sequence: Synthetic oligonucleotide
agccccacaugauccaccc

SEQ ID NO: 1689956 - RNA, 19 nt, Artificial Sequence
  Description of Artificial Sequence: Synthetic oligonucleotide
cugcaugaccccaaugacc

SEQ ID NO: 1689957 - RNA, 19 nt, Artificial Sequence
  Description of Artificial Sequence: Synthetic oligonucleotide
uuagcugcccuccccaccu

SEQ ID NO: 1689958 - RNA, 19 nt, Artificial Sequence
  Description of Artificial Sequence: Synthetic oligonucleotide
uucccaacuucucucuccc

SEQ ID NO: 1689959 - RNA, 19 nt, Artificial Sequence
  Description of Artificial Sequence: Synthetic oligonucleotide
cuggacacggagaaagcag

SEQ ID NO: 1689960 - RNA, 19 nt, Artificial Sequence
  Description of Artificial Sequence: Synthetic oligonucleotide
ugguguuuaaugaggcccu

SEQ ID NO: 1689961 - RNA, 19 nt, Artificial Sequence
  Description of Artificial Sequence: Synthetic oligonucleotide
ccuuguucaagucacauuc

SEQ ID NO: 1689962 - RNA, 19 nt, Artificial Sequence
  Description of Artificial Sequence: Synthetic oligonucleotide
caucuguuggcguaguguc

SEQ ID NO: 1689963 - RNA, 19 nt, Artificial Sequence
  Description of Artificial Sequence: Synthetic oligonucleotide
guauucuuguaacugaacu

SEQ ID NO: 1689964 - RNA, 19 nt, Artificial Sequence
  Description of Artificial Sequence: Synthetic oligonucleotide
uggauaggcccacuugccc

SEQ ID NO: 1689965 - RNA, 19 nt, Artificial Sequence
  Description of Artificial Sequence: Synthetic oligonucleotide
aguauucuuguaacugaac

SEQ ID NO: 1689966 - RNA, 19 nt, Artificial Sequence
  Description of Artificial Sequence: Synthetic oligonucleotide
caagagggcagugugcacg

SEQ ID NO: 1689967 - RNA, 19 nt, Artificial Sequence
  Description of Artificial Sequence: Synthetic oligonucleotide
agcuaguuaaagguggucu

SEQ ID NO: 1689968 - RNA, 19 nt, Artificial Sequence
  Description of Artificial Sequence: Synthetic oligonucleotide
augacucuccgagugugcc

SEQ ID NO: 1689969 - RNA, 19 nt, Artificial Sequence
  Description of Artificial Sequence: Synthetic oligonucleotide
cacggagaaagcaggcugg

SEQ ID NO: 1689970 - RNA, 19 nt, Artificial Sequence
  Description of Artificial Sequence: Synthetic oligonucleotide
auaggcacagcuugaggcu

SEQ ID NO: 1689971 - RNA, 19 nt, Artificial Sequence
  Description of Artificial Sequence: Synthetic oligonucleotide
gaauucgcagacagcagcc

SEQ ID NO: 1689972 - RNA, 19 nt, Artificial Sequence
  Description of Artificial Sequence: Synthetic oligonucleotide
augucauacucauguaaga

SEQ ID NO: 1689973 - RNA, 19 nt, Artificial Sequence
  Description of Artificial Sequence: Synthetic oligonucleotide
uuugucuggaagcgcuccc

SEQ ID NO: 1689974 - RNA, 19 nt, Artificial Sequence
  Description of Artificial Sequence: Synthetic oligonucleotide
uugcacacaacugucuucu

SEQ ID NO: 1689975 - RNA, 19 nt, Artificial Sequence
  Description of Artificial Sequence: Synthetic oligonucleotide
cacaggaccaagaagcaca

SEQ ID NO: 1689976 - RNA, 19 nt, Artificial Sequence
  Description of Artificial Sequence: Synthetic oligonucleotide
cuaguuaaagguggucugc

SEQ ID NO: 1689977 - RNA, 19 nt, Artificial Sequence
  Description of Artificial Sequence: Synthetic oligonucleotide
ucagcuaguuaaagguggu

SEQ ID NO: 1689978 - RNA, 19 nt, Artificial Sequence
  Description of Artificial Sequence: Synthetic oligonucleotide
uguucaagucacauucaua

SEQ ID NO: 1689979 - RNA, 19 nt, Artificial Sequence
  Description of Artificial Sequence: Synthetic oligonucleotide
cuaauguggcggaauggac

SEQ ID NO: 1689980 - RNA, 19 nt, Artificial Sequence
  Description of Artificial Sequence: Synthetic oligonucleotide
gucgaacuugauauggucc

SEQ ID NO: 1689981 - RNA, 19 nt, Artificial Sequence
  Description of Artificial Sequence: Synthetic oligonucleotide
cacgagguaauucacacaa

SEQ ID NO: 1689982 - RNA, 19 nt, Artificial Sequence
  Description of Artificial Sequence: Synthetic oligonucleotide
acaggggucugaaugacag

SEQ ID NO: 1689983 - RNA, 19 nt, Artificial Sequence
  Description of Artificial Sequence: Synthetic oligonucleotide
ggugcugguguuuaaugag

SEQ ID NO: 1689984 - RNA, 19 nt, Artificial Sequence
  Description of Artificial Sequence: Synthetic oligonucleotide
aagaauucgcagacagcag

SEQ ID NO: 1689985 - RNA, 19 nt, Artificial Sequence
  Description of Artificial Sequence: Synthetic oligonucleotide
uccccaagagggcagugug

SEQ ID NO: 1689986 - RNA, 19 nt, Artificial Sequence
  Description of Artificial Sequence: Synthetic oligonucleotide
aaaggccaaaugcccuuug

SEQ ID NO: 1689987 - RNA, 19 nt, Artificial Sequence
  Description of Artificial Sequence: Synthetic oligonucleotide
gacucuccgagugugccgg

SEQ ID NO: 1689988 - RNA, 19 nt, Artificial Sequence
  Description of Artificial Sequence: Synthetic oligonucleotide
uccucuuagccaguguuug

SEQ ID NO: 1689989 - RNA, 19 nt, Artificial Sequence
  Description of Artificial Sequence: Synthetic oligonucleotide
cuccaaguuugucuggaag

SEQ ID NO: 1689990 - RNA, 19 nt, Artificial Sequence
  Description of Artificial Sequence: Synthetic oligonucleotide
gccaaaugcccuuuggugc

SEQ ID NO: 1689991 - RNA, 19 nt, Artificial Sequence
  Description of Artificial Sequence: Synthetic oligonucleotide
auacucauguaagaacuca

SEQ ID NO: 1689992 - RNA, 19 nt, Artificial Sequence
  Description of Artificial Sequence: Synthetic oligonucleotide
uagggugcaugaauuuaca

SEQ ID NO: 1689993 - RNA, 19 nt, Artificial Sequence
  Description of Artificial Sequence: Synthetic oligonucleotide
gugacuugcuccaacggcc

SEQ ID NO: 1689994 - RNA, 19 nt, Artificial Sequence
  Description of Artificial Sequence: Synthetic oligonucleotide
cuuauccaugccagggaag

SEQ ID NO: 1689995 - RNA, 19 nt, Artificial Sequence
  Description of Artificial Sequence: Synthetic oligonucleotide
aggagguaggcgcagcuca

SEQ ID NO: 1689996 - RNA, 19 nt, Artificial Sequence
  Description of Artificial Sequence: Synthetic oligonucleotide
gguaauucacacaaaugac

SEQ ID NO: 1689997 - RNA, 19 nt, Artificial Sequence
  Description of Artificial Sequence: Synthetic oligonucleotide
aaugcccuuuggugcaucu

SEQ ID NO: 1689998 - RNA, 19 nt, Artificial Sequence
  Description of Artificial Sequence: Synthetic oligonucleotide
aaucuagggugcaugaauu

SEQ ID NO: 1689999 - RNA, 19 nt, Artificial Sequence
  Description of Artificial Sequence: Synthetic oligonucleotide
ucuguuggcguaguguccu

SEQ ID NO: 1690000 - RNA, 19 nt, Artificial Sequence
  Description of Artificial Sequence: Synthetic oligonucleotide
ugugccggugccugcacag

SEQ ID NO: 1690001 - RNA, 19 nt, Artificial Sequence
  Description of Artificial Sequence: Synthetic oligonucleotide
acacugguccccuuucuug

SEQ ID NO: 1690002 - RNA, 19 nt, Artificial Sequence
  Description of Artificial Sequence: Synthetic oligonucleotide
ucucuuagcugcccucccc

SEQ ID NO: 1690003 - RNA, 19 nt, Artificial Sequence
  Description of Artificial Sequence: Synthetic oligonucleotide
cauacucauguaagaacuc

SEQ ID NO: 1690004 - RNA, 19 nt, Artificial Sequence
  Description of Artificial Sequence: Synthetic oligonucleotide
uccacgcuggcgaugauuu

SEQ ID NO: 1690005 - RNA, 19 nt, Artificial Sequence
  Description of Artificial Sequence: Synthetic oligonucleotide
ggaacugcuagccaucuuc

SEQ ID NO: 1690006 - RNA, 19 nt, Artificial Sequence
  Description of Artificial Sequence: Synthetic oligonucleotide
ugauuuccugcauggcggc

SEQ ID NO: 1690007 - RNA, 19 nt, Artificial Sequence
  Description of Artificial Sequence: Synthetic oligonucleotide
ugacucuccgagugugccg

SEQ ID NO: 1690008 - RNA, 19 nt, Artificial Sequence
  Description of Artificial Sequence: Synthetic oligonucleotide
gugaagcaagcccagaaaa

SEQ ID NO: 1690009 - RNA, 19 nt, Artificial Sequence
  Description of Artificial Sequence: Synthetic oligonucleotide
aagcccagaaaagcagcuc

SEQ ID NO: 1690010 - RNA, 19 nt, Artificial Sequence
  Description of Artificial Sequence: Synthetic oligonucleotide
uaguuaaagguggucugca

SEQ ID NO: 1690011 - RNA, 19 nt, Artificial Sequence
  Description of Artificial Sequence: Synthetic oligonucleotide
guaauucacacaaaugacu

SEQ ID NO: 1690012 - RNA, 19 nt, Artificial Sequence
  Description of Artificial Sequence: Synthetic oligonucleotide
ucuaggcucaaggaugggu

SEQ ID NO: 1690013 - RNA, 19 nt, Artificial Sequence
  Description of Artificial Sequence: Synthetic oligonucleotide
gaacugcuagccaucuucc

SEQ ID NO: 1690014 - RNA, 19 nt, Artificial Sequence
  Description of Artificial Sequence: Synthetic oligonucleotide
accgaaggugaagcaagcc

SEQ ID NO: 1690015 - RNA, 19 nt, Artificial Sequence
  Description of Artificial Sequence: Synthetic oligonucleotide
aacugcuagccaucuucca

SEQ ID NO: 1690016 - RNA, 19 nt, Artificial Sequence
  Description of Artificial Sequence: Synthetic oligonucleotide
aggggaccgaacuuggagu

SEQ ID NO: 1690017 - RNA, 19 nt, Artificial Sequence
  Description of Artificial Sequence: Synthetic oligonucleotide
ggaguaaaaguagcacucg

SEQ ID NO: 1690018 - RNA, 19 nt, Artificial Sequence
  Description of Artificial Sequence: Synthetic oligonucleotide
ucuuagccaguguuugcac

SEQ ID NO: 1690019 - RNA, 19 nt, Artificial Sequence
  Description of Artificial Sequence: Synthetic oligonucleotide
ucuccgagugugccggugc

SEQ ID NO: 1690020 - RNA, 19 nt, Artificial Sequence
  Description of Artificial Sequence: Synthetic oligonucleotide
aggcaguagaugcuccaag

SEQ ID NO: 1690021 - RNA, 19 nt, Artificial Sequence
  Description of Artificial Sequence: Synthetic oligonucleotide
gaaggugaagcaagcccag

SEQ ID NO: 1690022 - RNA, 19 nt, Artificial Sequence
  Description of Artificial Sequence: Synthetic oligonucleotide
cucagggcagaaucccacg

SEQ ID NO: 1690023 - RNA, 19 nt, Artificial Sequence
  Description of Artificial Sequence: Synthetic oligonucleotide
ugauaugguccacgcuggc

SEQ ID NO: 1690024 - RNA, 19 nt, Artificial Sequence
  Description of Artificial Sequence: Synthetic oligonucleotide
gcuaguuaaagguggucug

SEQ ID NO: 1690025 - RNA, 19 nt, Artificial Sequence
  Description of Artificial Sequence: Synthetic oligonucleotide
ucucaccacuaauguggcg

SEQ ID NO: 1690026 - RNA, 19 nt, Artificial Sequence
  Description of Artificial Sequence: Synthetic oligonucleotide
ucccacgagguaauucaca

SEQ ID NO: 1690027 - RNA, 19 nt, Artificial Sequence
  Description of Artificial Sequence: Synthetic oligonucleotide
acuuggaguaaaaguagca

SEQ ID NO: 1690028 - RNA, 19 nt, Artificial Sequence
  Description of Artificial Sequence: Synthetic oligonucleotide
ucuagggugcaugaauuua

SEQ ID NO: 1690029 - RNA, 19 nt, Artificial Sequence
  Description of Artificial Sequence: Synthetic oligonucleotide
acuugauaugguccacgcu

SEQ ID NO: 1690030 - RNA, 19 nt, Artificial Sequence
  Description of Artificial Sequence: Synthetic oligonucleotide
cacgcuggcgaugauuucc

SEQ ID NO: 1690031 - RNA, 19 nt, Artificial Sequence
  Description of Artificial Sequence: Synthetic oligonucleotide
aacuuggauaggcccacuu

SEQ ID NO: 1690032 - RNA, 19 nt, Artificial Sequence
  Description of Artificial Sequence: Synthetic oligonucleotide
cacggcgaucuccaagucg

SEQ ID NO: 1690033 - RNA, 19 nt, Artificial Sequence
  Description of Artificial Sequence: Synthetic oligonucleotide
ggccaaaugcccuuuggug

SEQ ID NO: 1690034 - RNA, 19 nt, Artificial Sequence
  Description of Artificial Sequence: Synthetic oligonucleotide
ucaaggauggguggccucu

SEQ ID NO: 1690035 - RNA, 19 nt, Artificial Sequence
  Description of Artificial Sequence: Synthetic oligonucleotide
aggugaagcaagcccagaa

SEQ ID NO: 1690036 - RNA, 19 nt, Artificial Sequence
  Description of Artificial Sequence: Synthetic oligonucleotide
aagucgaacuugauauggu

SEQ ID NO: 1690037 - RNA, 19 nt, Artificial Sequence
  Description of Artificial Sequence: Synthetic oligonucleotide
cacuaauguggcggaaugg

SEQ ID NO: 1690038 - RNA, 19 nt, Artificial Sequence
  Description of Artificial Sequence: Synthetic oligonucleotide
aggccaaaugcccuuuggu

SEQ ID NO: 1690039 - RNA, 19 nt, Artificial Sequence
  Description of Artificial Sequence: Synthetic oligonucleotide
accgaacuuggaguaaaag

SEQ ID NO: 1690040 - RNA, 19 nt, Artificial Sequence
  Description of Artificial Sequence: Synthetic oligonucleotide
cuuagcugcccuccccacc

SEQ ID NO: 1690041 - RNA, 19 nt, Artificial Sequence
  Description of Artificial Sequence: Synthetic oligonucleotide
acggagaaagcaggcuggc

SEQ ID NO: 1690042 - RNA, 19 nt, Artificial Sequence
  Description of Artificial Sequence: Synthetic oligonucleotide
caagaagcacagcccuucc

SEQ ID NO: 1690043 - RNA, 19 nt, Artificial Sequence
  Description of Artificial Sequence: Synthetic oligonucleotide
aggcucaaggauggguggc

SEQ ID NO: 1690044 - RNA, 19 nt, Artificial Sequence
  Description of Artificial Sequence: Synthetic oligonucleotide
uguuggaggcugugucugc

SEQ ID NO: 1690045 - RNA, 19 nt, Artificial Sequence
  Description of Artificial Sequence: Synthetic oligonucleotide
guuugucuggaagcgcucc

SEQ ID NO: 1690046 - RNA, 19 nt, Artificial Sequence
  Description of Artificial Sequence: Synthetic oligonucleotide
gaucuccaagucgaacuug

SEQ ID NO: 1690047 - RNA, 19 nt, Artificial Sequence
  Description of Artificial Sequence: Synthetic oligonucleotide
augacagcacagaguuugc

SEQ ID NO: 1690048 - RNA, 19 nt, Artificial Sequence
  Description of Artificial Sequence: Synthetic oligonucleotide
ugcuccaacggccgggguc

SEQ ID NO: 1690049 - RNA, 19 nt, Artificial Sequence
  Description of Artificial Sequence: Synthetic oligonucleotide
aaaugcccuuuggugcauc

SEQ ID NO: 1690050 - RNA, 19 nt, Artificial Sequence
  Description of Artificial Sequence: Synthetic oligonucleotide
acggcgaucuccaagucga

SEQ ID NO: 1690051 - RNA, 19 nt, Artificial Sequence
  Description of Artificial Sequence: Synthetic oligonucleotide
cuuagccaguguuugcaca

SEQ ID NO: 1690052 - RNA, 19 nt, Artificial Sequence
  Description of Artificial Sequence: Synthetic oligonucleotide
cacacaaaugacucuccga

SEQ ID NO: 1690053 - RNA, 19 nt, Artificial Sequence
  Description of Artificial Sequence: Synthetic oligonucleotide
agcccuucccaacuucucu

SEQ ID NO: 1690054 - RNA, 19 nt, Artificial Sequence
  Description of Artificial Sequence: Synthetic oligonucleotide
ugcaucuguuggcguagug

SEQ ID NO: 1690055 - RNA, 19 nt, Artificial Sequence
  Description of Artificial Sequence: Synthetic oligonucleotide
cacaacugucuucucacca

SEQ ID NO: 1690056 - RNA, 19 nt, Artificial Sequence
  Description of Artificial Sequence: Synthetic oligonucleotide
augggcaguucaaaucuag

SEQ ID NO: 1690057 - RNA, 19 nt, Artificial Sequence
  Description of Artificial Sequence: Synthetic oligonucleotide
gauuuccugcauggcggcg

SEQ ID NO: 1690058 - RNA, 19 nt, Artificial Sequence
  Description of Artificial Sequence: Synthetic oligonucleotide
augauccacccauccuguc

SEQ ID NO: 1690059 - RNA, 19 nt, Artificial Sequence
  Description of Artificial Sequence: Synthetic oligonucleotide
ccgaaggugaagcaagccc

SEQ ID NO: 1690060 - RNA, 19 nt, Artificial Sequence
  Description of Artificial Sequence: Synthetic oligonucleotide
agcgcucccuuguucaagu

SEQ ID NO: 1690061 - RNA, 19 nt, Artificial Sequence
  Description of Artificial Sequence: Synthetic oligonucleotide
gacuugcuccaacggccgg

SEQ ID NO: 1690062 - RNA, 19 nt, Artificial Sequence
  Description of Artificial Sequence: Synthetic oligonucleotide
aguucaaaucuagggugca

SEQ ID NO: 1690063 - RNA, 19 nt, Artificial Sequence
  Description of Artificial Sequence: Synthetic oligonucleotide
guaagaacucacacugguc

SEQ ID NO: 1690064 - RNA, 19 nt, Artificial Sequence
  Description of Artificial Sequence: Synthetic oligonucleotide
ugcacaggggaccgaacuu

SEQ ID NO: 1690065 - RNA, 19 nt, Artificial Sequence
  Description of Artificial Sequence: Synthetic oligonucleotide
cucacaccgcucuccgccg

SEQ ID NO: 1690066 - RNA, 19 nt, Artificial Sequence
  Description of Artificial Sequence: Synthetic oligonucleotide
ucccaugggcaguucaaau

SEQ ID NO: 1690067 - RNA, 19 nt, Artificial Sequence
  Description of Artificial Sequence: Synthetic oligonucleotide
aagcgcucccuuguucaag

SEQ ID NO: 1690068 - RNA, 19 nt, Artificial Sequence
  Description of Artificial Sequence: Synthetic oligonucleotide
agguaggcgcagcucaccu

SEQ ID NO: 1690069 - RNA, 19 nt, Artificial Sequence
  Description of Artificial Sequence: Synthetic oligonucleotide
cagaaaagcagcucagccu

SEQ ID NO: 1690070 - RNA, 19 nt, Artificial Sequence
  Description of Artificial Sequence: Synthetic oligonucleotide
agggugcaugaauuuacaa

SEQ ID NO: 1690071 - RNA, 19 nt, Artificial Sequence
  Description of Artificial Sequence: Synthetic oligonucleotide
cacauuuucuaggcucaag

SEQ ID NO: 1690072 - RNA, 19 nt, Artificial Sequence
  Description of Artificial Sequence: Synthetic oligonucleotide
aucuagggugcaugaauuu

SEQ ID NO: 1690073 - RNA, 19 nt, Artificial Sequence
  Description of Artificial Sequence: Synthetic oligonucleotide
cugaaugacagcacagagu

SEQ ID NO: 1690074 - RNA, 19 nt, Artificial Sequence
  Description of Artificial Sequence: Synthetic oligonucleotide
uucuugcacaguccucuua

SEQ ID NO: 1690075 - RNA, 19 nt, Artificial Sequence
  Description of Artificial Sequence: Synthetic oligonucleotide
cgaacuuggaguaaaagua

SEQ ID NO: 1690076 - RNA, 19 nt, Artificial Sequence
  Description of Artificial Sequence: Synthetic oligonucleotide
ggcaguucaaaucuagggu

SEQ ID NO: 1690077 - RNA, 19 nt, Artificial Sequence
  Description of Artificial Sequence: Synthetic oligonucleotide
aauuuacaagagggucccu

SEQ ID NO: 1690078 - RNA, 19 nt, Artificial Sequence
  Description of Artificial Sequence: Synthetic oligonucleotide
gcuggcgaugauuuccugc

SEQ ID NO: 1690079 - RNA, 19 nt, Artificial Sequence
  Description of Artificial Sequence: Synthetic oligonucleotide
gggucagcuaguuaaaggu

SEQ ID NO: 1690080 - RNA, 19 nt, Artificial Sequence
  Description of Artificial Sequence: Synthetic oligonucleotide
agucacauucauaggcaca

SEQ ID NO: 1690081 - RNA, 19 nt, Artificial Sequence
  Description of Artificial Sequence: Synthetic oligonucleotide
cccgacuuauccaugccag

SEQ ID NO: 1690082 - RNA, 19 nt, Artificial Sequence
  Description of Artificial Sequence: Synthetic oligonucleotide
caccucacaccgcucuccg

SEQ ID NO: 1690083 - RNA, 19 nt, Artificial Sequence
  Description of Artificial Sequence: Synthetic oligonucleotide
gcagguugcaggugauggg

SEQ ID NO: 1690084 - RNA, 19 nt, Artificial Sequence
  Description of Artificial Sequence: Synthetic oligonucleotide
cucuuagccaguguuugca

SEQ ID NO: 1690085 - RNA, 19 nt, Artificial Sequence
  Description of Artificial Sequence: Synthetic oligonucleotide
agaguuugcuuggcaggag

SEQ ID NO: 1690086 - RNA, 19 nt, Artificial Sequence
  Description of Artificial Sequence: Synthetic oligonucleotide
aucccacgagguaauucac

SEQ ID NO: 1690087 - RNA, 19 nt, Artificial Sequence
  Description of Artificial Sequence: Synthetic oligonucleotide
ugguccccuuucuugcaca

SEQ ID NO: 1690088 - RNA, 19 nt, Artificial Sequence
  Description of Artificial Sequence: Synthetic oligonucleotide
guguuugcacacaacuguc

SEQ ID NO: 1690089 - RNA, 19 nt, Artificial Sequence
  Description of Artificial Sequence: Synthetic oligonucleotide
ucccuuguucaagucacau

SEQ ID NO: 1690090 - RNA, 19 nt, Artificial Sequence
  Description of Artificial Sequence: Synthetic oligonucleotide
accacacuuguagcaagug

SEQ ID NO: 1690091 - RNA, 19 nt, Artificial Sequence
  Description of Artificial Sequence: Synthetic oligonucleotide
uuguagcaagugacuugcu

SEQ ID NO: 1690092 - RNA, 19 nt, Artificial Sequence
  Description of Artificial Sequence: Synthetic oligonucleotide
cugggucagcuaguuaaag

SEQ ID NO: 1690093 - RNA, 19 nt, Artificial Sequence
  Description of Artificial Sequence: Synthetic oligonucleotide
ggauaggcccacuugccca

SEQ ID NO: 1690094 - RNA, 19 nt, Artificial Sequence
  Description of Artificial Sequence: Synthetic oligonucleotide
aggcccugaggggaacugc

SEQ ID NO: 1690095 - RNA, 19 nt, Artificial Sequence
  Description of Artificial Sequence: Synthetic oligonucleotide
ccucacaccgcucuccgcc

SEQ ID NO: 1690096 - RNA, 19 nt, Artificial Sequence
  Description of Artificial Sequence: Synthetic oligonucleotide
gaggggaacugcuagccau

SEQ ID NO: 1690097 - RNA, 19 nt, Artificial Sequence
  Description of Artificial Sequence: Synthetic oligonucleotide
uuggugcaucuguuggcgu

SEQ ID NO: 1690098 - RNA, 19 nt, Artificial Sequence
  Description of Artificial Sequence: Synthetic oligonucleotide
ugcuuuguuggaggcugug

SEQ ID NO: 1690099 - RNA, 19 nt, Artificial Sequence
  Description of Artificial Sequence: Synthetic oligonucleotide
uucuaggcucaaggauggg

SEQ ID NO: 1690100 - RNA, 19 nt, Artificial Sequence
  Description of Artificial Sequence: Synthetic oligonucleotide
gucucuuagcugcccuccc

SEQ ID NO: 1690101 - RNA, 19 nt, Artificial Sequence
  Description of Artificial Sequence: Synthetic oligonucleotide
aggggaacugcuagccauc

SEQ ID NO: 1690102 - RNA, 19 nt, Artificial Sequence
  Description of Artificial Sequence: Synthetic oligonucleotide
uaugguccacgcuggcgau

SEQ ID NO: 1690103 - RNA, 19 nt, Artificial Sequence
  Description of Artificial Sequence: Synthetic oligonucleotide
accacuaauguggcggaau

SEQ ID NO: 1690104 - RNA, 19 nt, Artificial Sequence
  Description of Artificial Sequence: Synthetic oligonucleotide
cucuuagcugcccucccca

SEQ ID NO: 1690105 - RNA, 19 nt, Artificial Sequence
  Description of Artificial Sequence: Synthetic oligonucleotide
aaugaccugcggggcucuc

SEQ ID NO: 1690106 - RNA, 19 nt, Artificial Sequence
  Description of Artificial Sequence: Synthetic oligonucleotide
acaccgcucuccgccgucc

SEQ ID NO: 1690107 - RNA, 19 nt, Artificial Sequence
  Description of Artificial Sequence: Synthetic oligonucleotide
gugugcacggaguccaaaa

SEQ ID NO: 1690108 - RNA, 19 nt, Artificial Sequence
  Description of Artificial Sequence: Synthetic oligonucleotide
aaguagcacucgggcaucu

SEQ ID NO: 1690109 - RNA, 19 nt, Artificial Sequence
  Description of Artificial Sequence: Synthetic oligonucleotide
cucaaggauggguggccuc

SEQ ID NO: 1690110 - RNA, 19 nt, Artificial Sequence
  Description of Artificial Sequence: Synthetic oligonucleotide
cuccgagugugccggugcc

SEQ ID NO: 1690111 - RNA, 19 nt, Artificial Sequence
  Description of Artificial Sequence: Synthetic oligonucleotide
ggugccugcacaggggacc

SEQ ID NO: 1690112 - RNA, 19 nt, Artificial Sequence
  Description of Artificial Sequence: Synthetic oligonucleotide
gcaagugacuugcuccaac

SEQ ID NO: 1690113 - RNA, 19 nt, Artificial Sequence
  Description of Artificial Sequence: Synthetic oligonucleotide
cggaauggacacaugcccc

SEQ ID NO: 1690114 - RNA, 19 nt, Artificial Sequence
  Description of Artificial Sequence: Synthetic oligonucleotide
ccacuaauguggcggaaug

SEQ ID NO: 1690115 - RNA, 19 nt, Artificial Sequence
  Description of Artificial Sequence: Synthetic oligonucleotide
cgacuuauccaugccaggg

SEQ ID NO: 1690116 - RNA, 19 nt, Artificial Sequence
  Description of Artificial Sequence: Synthetic oligonucleotide
acagcccuucccaacuucu

SEQ ID NO: 1690117 - RNA, 19 nt, Artificial Sequence
  Description of Artificial Sequence: Synthetic oligonucleotide
cccaugggcaguucaaauc

SEQ ID NO: 1690118 - RNA, 19 nt, Artificial Sequence
  Description of Artificial Sequence: Synthetic oligonucleotide
gcagaaucccacgagguaa

SEQ ID NO: 1690119 - RNA, 19 nt, Artificial Sequence
  Description of Artificial Sequence: Synthetic oligonucleotide
ccaagucgaacuugauaug

SEQ ID NO: 1690120 - RNA, 19 nt, Artificial Sequence
  Description of Artificial Sequence: Synthetic oligonucleotide
ccacuugcccagcagguug

SEQ ID NO: 1690121 - RNA, 19 nt, Artificial Sequence
  Description of Artificial Sequence: Synthetic oligonucleotide
aggcccacuugcccagcag

SEQ ID NO: 1690122 - RNA, 19 nt, Artificial Sequence
  Description of Artificial Sequence: Synthetic oligonucleotide
gcgaucuccaagucgaacu

SEQ ID NO: 1690123 - RNA, 19 nt, Artificial Sequence
  Description of Artificial Sequence: Synthetic oligonucleotide
uaggcacagcuugaggcuu

SEQ ID NO: 1690124 - RNA, 19 nt, Artificial Sequence
  Description of Artificial Sequence: Synthetic oligonucleotide
ugggauccugacacuucua

SEQ ID NO: 1690125 - RNA, 19 nt, Artificial Sequence
  Description of Artificial Sequence: Synthetic oligonucleotide
ccaaaugcccuuuggugca

SEQ ID NO: 1690126 - RNA, 19 nt, Artificial Sequence
  Description of Artificial Sequence: Synthetic oligonucleotide
caguagaugcuccaaguuu

SEQ ID NO: 1690127 - RNA, 19 nt, Artificial Sequence
  Description of Artificial Sequence: Synthetic oligonucleotide
ccgacuuauccaugccagg

SEQ ID NO: 1690128 - RNA, 19 nt, Artificial Sequence
  Description of Artificial Sequence: Synthetic oligonucleotide
gcuguugucacuguccacu

SEQ ID NO: 1690129 - RNA, 19 nt, Artificial Sequence
  Description of Artificial Sequence: Synthetic oligonucleotide
ucagcuggacacggagaaa

SEQ ID NO: 1690130 - RNA, 19 nt, Artificial Sequence
  Description of Artificial Sequence: Synthetic oligonucleotide
ccgaacuuggaguaaaagu

SEQ ID NO: 1690131 - RNA, 19 nt, Artificial Sequence
  Description of Artificial Sequence: Synthetic oligonucleotide
ugcgccccgagcuguugcu

SEQ ID NO: 1690132 - RNA, 19 nt, Artificial Sequence
  Description of Artificial Sequence: Synthetic oligonucleotide
gcuccaacggccggggucc

SEQ ID NO: 1690133 - RNA, 19 nt, Artificial Sequence
  Description of Artificial Sequence: Synthetic oligonucleotide
gcacaggggaccgaacuug

SEQ ID NO: 1690134 - RNA, 19 nt, Artificial Sequence
  Description of Artificial Sequence: Synthetic oligonucleotide
cacaggggucugaaugaca

SEQ ID NO: 1690135 - RNA, 19 nt, Artificial Sequence
  Description of Artificial Sequence: Synthetic oligonucleotide
cagcuaguuaaaggugguc

SEQ ID NO: 1690136 - RNA, 19 nt, Artificial Sequence
  Description of Artificial Sequence: Synthetic oligonucleotide
cacaaaugacucuccgagu

SEQ ID NO: 1690137 - RNA, 19 nt, Artificial Sequence
  Description of Artificial Sequence: Synthetic oligonucleotide
gguaggcgcagcucaccug

SEQ ID NO: 1690138 - RNA, 19 nt, Artificial Sequence
  Description of Artificial Sequence: Synthetic oligonucleotide
gguucccaugggcaguuca

SEQ ID NO: 1690139 - RNA, 19 nt, Artificial Sequence
  Description of Artificial Sequence: Synthetic oligonucleotide
cacugcuguuuugacucug

SEQ ID NO: 1690140 - RNA, 19 nt, Artificial Sequence
  Description of Artificial Sequence: Synthetic oligonucleotide
caaaucuagggugcaugaa

SEQ ID NO: 1690141 - RNA, 19 nt, Artificial Sequence
  Description of Artificial Sequence: Synthetic oligonucleotide
ucaccugggucagcuaguu

SEQ ID NO: 1690142 - RNA, 19 nt, Artificial Sequence
  Description of Artificial Sequence: Synthetic oligonucleotide
ccaagaagcacagcccuuc

SEQ ID NO: 1690143 - RNA, 19 nt, Artificial Sequence
  Description of Artificial Sequence: Synthetic oligonucleotide
ggacacggagaaagcaggc

SEQ ID NO: 1690144 - RNA, 19 nt, Artificial Sequence
  Description of Artificial Sequence: Synthetic oligonucleotide
gcagugugcacggagucca

SEQ ID NO: 1690145 - RNA, 19 nt, Artificial Sequence
  Description of Artificial Sequence: Synthetic oligonucleotide
cugcgccccgagcuguugc

SEQ ID NO: 1690146 - RNA, 19 nt, Artificial Sequence
  Description of Artificial Sequence: Synthetic oligonucleotide
cagcccuucccaacuucuc

SEQ ID NO: 1690147 - RNA, 19 nt, Artificial Sequence
  Description of Artificial Sequence: Synthetic oligonucleotide
uugccacaggcagcuuuca

SEQ ID NO: 1690148 - RNA, 19 nt, Artificial Sequence
  Description of Artificial Sequence: Synthetic oligonucleotide
gcuggacacggagaaagca

SEQ ID NO: 1690149 - RNA, 19 nt, Artificial Sequence
  Description of Artificial Sequence: Synthetic oligonucleotide
gagugugccggugccugca

SEQ ID NO: 1690150 - RNA, 19 nt, Artificial Sequence
  Description of Artificial Sequence: Synthetic oligonucleotide
aacggccgggguccccggu

SEQ ID NO: 1690151 - RNA, 19 nt, Artificial Sequence
  Description of Artificial Sequence: Synthetic oligonucleotide
gguguuuaaugaggcccug

SEQ ID NO: 1690152 - RNA, 19 nt, Artificial Sequence
  Description of Artificial Sequence: Synthetic oligonucleotide
ggccaggccaggcaguaga

SEQ ID NO: 1690153 - RNA, 19 nt, Artificial Sequence
  Description of Artificial Sequence: Synthetic oligonucleotide
ccgagcuguugcuccacgg

SEQ ID NO: 1690154 - RNA, 19 nt, Artificial Sequence
  Description of Artificial Sequence: Synthetic oligonucleotide
ggcucaaggauggguggcc

SEQ ID NO: 1690155 - RNA, 19 nt, Artificial Sequence
  Description of Artificial Sequence: Synthetic oligonucleotide
aggcgcagcucaccugggu

SEQ ID NO: 1690156 - RNA, 19 nt, Artificial Sequence
  Description of Artificial Sequence: Synthetic oligonucleotide
ggcgcagcucaccuggguc

SEQ ID NO: 1690157 - RNA, 19 nt, Artificial Sequence
  Description of Artificial Sequence: Synthetic oligonucleotide
ccaugggcaguucaaaucu

SEQ ID NO: 1690158 - RNA, 19 nt, Artificial Sequence
  Description of Artificial Sequence: Synthetic oligonucleotide
caaggauggguggccucug

SEQ ID NO: 1690159 - RNA, 19 nt, Artificial Sequence
  Description of Artificial Sequence: Synthetic oligonucleotide
ggcagaaucccacgaggua

SEQ ID NO: 1690160 - RNA, 19 nt, Artificial Sequence
  Description of Artificial Sequence: Synthetic oligonucleotide
caggagguaggcgcagcuc

SEQ ID NO: 1690161 - RNA, 19 nt, Artificial Sequence
  Description of Artificial Sequence: Synthetic oligonucleotide
gaccgaacuuggaguaaaa

SEQ ID NO: 1690162 - RNA, 19 nt, Artificial Sequence
  Description of Artificial Sequence: Synthetic oligonucleotide
cuuugccacaggcagcuuu

SEQ ID NO: 1690163 - RNA, 19 nt, Artificial Sequence
  Description of Artificial Sequence: Synthetic oligonucleotide
ggggaccgaacuuggagua

SEQ ID NO: 1690164 - RNA, 19 nt, Artificial Sequence
  Description of Artificial Sequence: Synthetic oligonucleotide
uugcuccaacggccggggu

SEQ ID NO: 1690165 - RNA, 19 nt, Artificial Sequence
  Description of Artificial Sequence: Synthetic oligonucleotide
cucccuuguucaagucaca

SEQ ID NO: 1690166 - RNA, 19 nt, Artificial Sequence
  Description of Artificial Sequence: Synthetic oligonucleotide
guagaugcuccaaguuugu

SEQ ID NO: 1690167 - RNA, 19 nt, Artificial Sequence
  Description of Artificial Sequence: Synthetic oligonucleotide
gguucacauuuucuaggcu

SEQ ID NO: 1690168 - RNA, 19 nt, Artificial Sequence
  Description of Artificial Sequence: Synthetic oligonucleotide
caggaccaagaagcacagc

SEQ ID NO: 1690169 - RNA, 19 nt, Artificial Sequence
  Description of Artificial Sequence: Synthetic oligonucleotide
acgagguaauucacacaaa

SEQ ID NO: 1690170 - RNA, 19 nt, Artificial Sequence
  Description of Artificial Sequence: Synthetic oligonucleotide
cuccgccguccccuccucg

SEQ ID NO: 1690171 - RNA, 19 nt, Artificial Sequence
  Description of Artificial Sequence: Synthetic oligonucleotide
gguggccucugcaugccac

SEQ ID NO: 1690172 - RNA, 19 nt, Artificial Sequence
  Description of Artificial Sequence: Synthetic oligonucleotide
cucuccgagugugccggug

SEQ ID NO: 1690173 - RNA, 19 nt, Artificial Sequence
  Description of Artificial Sequence: Synthetic oligonucleotide
caacggccgggguccccgg

SEQ ID NO: 1690174 - RNA, 19 nt, Artificial Sequence
  Description of Artificial Sequence: Synthetic oligonucleotide
ggaccgaacuuggaguaaa

SEQ ID NO: 1690175 - RNA, 19 nt, Artificial Sequence
  Description of Artificial Sequence: Synthetic oligonucleotide
gcaucuguuggcguagugu

SEQ ID NO: 1690176 - RNA, 19 nt, Artificial Sequence
  Description of Artificial Sequence: Synthetic oligonucleotide
caccgcucuccgccguccc

SEQ ID NO: 1690177 - RNA, 19 nt, Artificial Sequence
  Description of Artificial Sequence: Synthetic oligonucleotide
aucuuccacacaggaccaa

SEQ ID NO: 1690178 - RNA, 19 nt, Artificial Sequence
  Description of Artificial Sequence: Synthetic oligonucleotide
caggugauggguucacauu

SEQ ID NO: 1690179 - RNA, 19 nt, Artificial Sequence
  Description of Artificial Sequence: Synthetic oligonucleotide
acucuccgagugugccggu

SEQ ID NO: 1690180 - RNA, 19 nt, Artificial Sequence
  Description of Artificial Sequence: Synthetic oligonucleotide
agguugcaggugauggguu

SEQ ID NO: 1690181 - RNA, 19 nt, Artificial Sequence
  Description of Artificial Sequence: Synthetic oligonucleotide
guucaaaucuagggugcau

SEQ ID NO: 1690182 - RNA, 19 nt, Artificial Sequence
  Description of Artificial Sequence: Synthetic oligonucleotide
cucaccugggucagcuagu

SEQ ID NO: 1690183 - RNA, 19 nt, Artificial Sequence
  Description of Artificial Sequence: Synthetic oligonucleotide
cacaccgcucuccgccguc

SEQ ID NO: 1690184 - RNA, 19 nt, Artificial Sequence
  Description of Artificial Sequence: Synthetic oligonucleotide
ccaacggccgggguccccg

SEQ ID NO: 1690185 - RNA, 19 nt, Artificial Sequence
  Description of Artificial Sequence: Synthetic oligonucleotide
gccggugccugcacagggg

SEQ ID NO: 1690186 - RNA, 19 nt, Artificial Sequence
  Description of Artificial Sequence: Synthetic oligonucleotide
uccaacggccggggucccc

SEQ ID NO: 1690187 - RNA, 19 nt, Artificial Sequence
  Description of Artificial Sequence: Synthetic oligonucleotide
gcacucgggcaucuugguc

SEQ ID NO: 1690188 - RNA, 19 nt, Artificial Sequence
  Description of Artificial Sequence: Synthetic oligonucleotide
ccaagagggcagugugcac

SEQ ID NO: 1690189 - RNA, 19 nt, Artificial Sequence
  Description of Artificial Sequence: Synthetic oligonucleotide
ccaaugaccugcggggcuc

SEQ ID NO: 1690190 - RNA, 19 nt, Artificial Sequence
  Description of Artificial Sequence: Synthetic oligonucleotide
cgagguaauucacacaaau

SEQ ID NO: 1690191 - RNA, 19 nt, Artificial Sequence
  Description of Artificial Sequence: Synthetic oligonucleotide
aguagcacucgggcaucuu

SEQ ID NO: 1690192 - RNA, 19 nt, Artificial Sequence
  Description of Artificial Sequence: Synthetic oligonucleotide
ccacgagguaauucacaca

SEQ ID NO: 1690193 - RNA, 19 nt, Artificial Sequence
  Description of Artificial Sequence: Synthetic oligonucleotide
cccgagcuguugcuccacg

SEQ ID NO: 1690194 - RNA, 19 nt, Artificial Sequence
  Description of Artificial Sequence: Synthetic oligonucleotide
guucccugcacugcuguuu

SEQ ID NO: 1690195 - RNA, 19 nt, Artificial Sequence
  Description of Artificial Sequence: Synthetic oligonucleotide
ccgagugugccggugccug

SEQ ID NO: 1690196 - RNA, 19 nt, Artificial Sequence
  Description of Artificial Sequence: Synthetic oligonucleotide
ccacaggggucugaaugac

SEQ ID NO: 1690197 - RNA, 19 nt, Artificial Sequence
  Description of Artificial Sequence: Synthetic oligonucleotide
acggccgggguccccgguu

SEQ ID NO: 1690198 - RNA, 19 nt, Artificial Sequence
  Description of Artificial Sequence: Synthetic oligonucleotide
ccccgacuuauccaugcca

SEQ ID NO: 1690199 - RNA, 19 nt, Artificial Sequence
  Description of Artificial Sequence: Synthetic oligonucleotide
gggcagaaucccacgaggu

SEQ ID NO: 1690200 - RNA, 19 nt, Artificial Sequence
  Description of Artificial Sequence: Synthetic oligonucleotide
cgccccgagcuguugcucc

SEQ ID NO: 1690201 - RNA, 19 nt, Artificial Sequence
  Description of Artificial Sequence: Synthetic oligonucleotide
guccucuuagccaguguuu

SEQ ID NO: 1690202 - RNA, 19 nt, Artificial Sequence
  Description of Artificial Sequence: Synthetic oligonucleotide
cugugucugcugugguagu

SEQ ID NO: 1690203 - RNA, 19 nt, Artificial Sequence
  Description of Artificial Sequence: Synthetic oligonucleotide
ugccugcacaggggaccga

SEQ ID NO: 1690204 - RNA, 19 nt, Artificial Sequence
  Description of Artificial Sequence: Synthetic oligonucleotide
cagugugcacggaguccaa

SEQ ID NO: 1690205 - RNA, 19 nt, Artificial Sequence
  Description of Artificial Sequence: Synthetic oligonucleotide
cuccccaagagggcagugu

SEQ ID NO: 1690206 - RNA, 19 nt, Artificial Sequence
  Description of Artificial Sequence: Synthetic oligonucleotide
cuccaacggccgggguccc

SEQ ID NO: 1690207 - RNA, 19 nt, Artificial Sequence
  Description of Artificial Sequence: Synthetic oligonucleotide
ccacccauccuguccaggu

SEQ ID NO: 1690208 - RNA, 19 nt, Artificial Sequence
  Description of Artificial Sequence: Synthetic oligonucleotide
cacaguccucuuagccagu

SEQ ID NO: 1690209 - RNA, 19 nt, Artificial Sequence
  Description of Artificial Sequence: Synthetic oligonucleotide
caccacuaauguggcggaa

SEQ ID NO: 1690210 - RNA, 19 nt, Artificial Sequence
  Description of Artificial Sequence: Synthetic oligonucleotide
ggucugcagcacugaccga

SEQ ID NO: 1690211 - RNA, 19 nt, Artificial Sequence
  Description of Artificial Sequence: Synthetic oligonucleotide
gggaccgaacuuggaguaa

SEQ ID NO: 1690212 - RNA, 19 nt, Artificial Sequence
  Description of Artificial Sequence: Synthetic oligonucleotide
ccggugccugcacagggga

SEQ ID NO: 1690213 - RNA, 19 nt, Artificial Sequence
  Description of Artificial Sequence: Synthetic oligonucleotide
caccugggucagcuaguua

SEQ ID NO: 1690214 - RNA, 19 nt, Artificial Sequence
  Description of Artificial Sequence: Synthetic oligonucleotide
gguccccgguucccugcac

SEQ ID NO: 1690215 - RNA, 19 nt, Artificial Sequence
  Description of Artificial Sequence: Synthetic oligonucleotide
ggguccccgguucccugca

SEQ ID NO: 1690216 - RNA, 19 nt, Artificial Sequence
  Description of Artificial Sequence: Synthetic oligonucleotide
ggcccugaggggaacugcu

SEQ ID NO: 1690217 - RNA, 19 nt, Artificial Sequence
  Description of Artificial Sequence: Synthetic oligonucleotide
gccugcacaggggaccgaa

SEQ ID NO: 1690218 - RNA, 19 nt, Artificial Sequence
  Description of Artificial Sequence: Synthetic oligonucleotide
gcgcucccuuguucaaguc

SEQ ID NO: 1690219 - RNA, 19 nt, Artificial Sequence
  Description of Artificial Sequence: Synthetic oligonucleotide
ccacggcgaucuccaaguc

SEQ ID NO: 1690220 - RNA, 19 nt, Artificial Sequence
  Description of Artificial Sequence: Synthetic oligonucleotide
ccccgguucccugcacugc

SEQ ID NO: 1690221 - RNA, 19 nt, Artificial Sequence
  Description of Artificial Sequence: Synthetic oligonucleotide
guccacgcuggcgaugauu

SEQ ID NO: 1690222 - RNA, 19 nt, Artificial Sequence
  Description of Artificial Sequence: Synthetic oligonucleotide
cugcggggcucucugcuuu

SEQ ID NO: 1690223 - RNA, 19 nt, Artificial Sequence
  Description of Artificial Sequence: Synthetic oligonucleotide
gugcaucuguuggcguagu

SEQ ID NO: 1690224 - RNA, 19 nt, Artificial Sequence
  Description of Artificial Sequence: Synthetic oligonucleotide
caaaugcccuuuggugcau

SEQ ID NO: 1690225 - RNA, 19 nt, Artificial Sequence
  Description of Artificial Sequence: Synthetic oligonucleotide
cccaaugaccugcggggcu

SEQ ID NO: 1690226 - RNA, 19 nt, Artificial Sequence
  Description of Artificial Sequence: Synthetic oligonucleotide
gccccacaugauccaccca

SEQ ID NO: 1690227 - RNA, 19 nt, Artificial Sequence
  Description of Artificial Sequence: Synthetic oligonucleotide
cggugccugcacaggggac

SEQ ID NO: 1690228 - RNA, 19 nt, Artificial Sequence
  Description of Artificial Sequence: Synthetic oligonucleotide
cgccguccccuccucgccc

SEQ ID NO: 1690229 - RNA, 19 nt, Artificial Sequence
  Description of Artificial Sequence: Synthetic oligonucleotide
ccacugagaaaggccaaau

SEQ ID NO: 1690230 - RNA, 19 nt, Artificial Sequence
  Description of Artificial Sequence: Synthetic oligonucleotide
cgaucuccaagucgaacuu

SEQ ID NO: 1690231 - RNA, 19 nt, Artificial Sequence
  Description of Artificial Sequence: Synthetic oligonucleotide
gcgccccgagcuguugcuc

SEQ ID NO: 1690232 - RNA, 19 nt, Artificial Sequence
  Description of Artificial Sequence: Synthetic oligonucleotide
cgcucuccgccguccccuc

SEQ ID NO: 1690233 - RNA, 19 nt, Artificial Sequence
  Description of Artificial Sequence: Synthetic oligonucleotide
gggucccucagggcagaau

SEQ ID NO: 1690234 - RNA, 19 nt, Artificial Sequence
  Description of Artificial Sequence: Synthetic oligonucleotide
ccugcggggcucucugcuu

SEQ ID NO: 1690235 - RNA, 19 nt, Artificial Sequence
  Description of Artificial Sequence: Synthetic oligonucleotide
gcggggcucucugcuuugu

SEQ ID NO: 1690236 - RNA, 19 nt, Artificial Sequence
  Description of Artificial Sequence: Synthetic oligonucleotide
gguccacgcuggcgaugau

SEQ ID NO: 1690237 - RNA, 19 nt, Artificial Sequence
  Description of Artificial Sequence: Synthetic oligonucleotide
uguaauaucucugagaacu

SEQ ID NO: 1690238 - RNA, 19 nt, Artificial Sequence
  Description of Artificial Sequence: Synthetic oligonucleotide
aagaacaugccucugaagu

SEQ ID NO: 1690239 - RNA, 19 nt, Artificial Sequence
  Description of Artificial Sequence: Synthetic oligonucleotide
gaugggauaguccugcugg

SEQ ID NO: 1690240 - RNA, 19 nt, Artificial Sequence
  Description of Artificial Sequence: Synthetic oligonucleotide
aaggugaguagcuaccugg

SEQ ID NO: 1690241 - RNA, 19 nt, Artificial Sequence
  Description of Artificial Sequence: Synthetic oligonucleotide
auaggcaccgagcauagcg

SEQ ID NO: 1690242 - RNA, 19 nt, Artificial Sequence
  Description of Artificial Sequence: Synthetic oligonucleotide
aagaggauagccuuccuga

SEQ ID NO: 1690243 - RNA, 19 nt, Artificial Sequence
  Description of Artificial Sequence: Synthetic oligonucleotide
uuaaagaggguccgaagcc

SEQ ID NO: 1690244 - RNA, 19 nt, Artificial Sequence
  Description of Artificial Sequence: Synthetic oligonucleotide
ucaaguuguaauaucucug

SEQ ID NO: 1690245 - RNA, 19 nt, Artificial Sequence
  Description of Artificial Sequence: Synthetic oligonucleotide
uuugcuguagcuucggucu

SEQ ID NO: 1690246 - RNA, 19 nt, Artificial Sequence
  Description of Artificial Sequence: Synthetic oligonucleotide
uucuuuauggugcugggga

SEQ ID NO: 1690247 - RNA, 19 nt, Artificial Sequence
  Description of Artificial Sequence: Synthetic oligonucleotide
uuugcaauaggcaccgagc

SEQ ID NO: 1690248 - RNA, 19 nt, Artificial Sequence
  Description of Artificial Sequence: Synthetic oligonucleotide
ucuuugggaaucaaguugu

SEQ ID NO: 1690249 - RNA, 19 nt, Artificial Sequence
  Description of Artificial Sequence: Synthetic oligonucleotide
aacaccaaggccccucucg

SEQ ID NO: 1690250 - RNA, 19 nt, Artificial Sequence
  Description of Artificial Sequence: Synthetic oligonucleotide
aggaaguuaaaagcgaugg

SEQ ID NO: 1690251 - RNA, 19 nt, Artificial Sequence
  Description of Artificial Sequence: Synthetic oligonucleotide
uguagcuucggucugcggc

SEQ ID NO: 1690252 - RNA, 19 nt, Artificial Sequence
  Description of Artificial Sequence: Synthetic oligonucleotide
uugguagcacuuaacagcc

SEQ ID NO: 1690253 - RNA, 19 nt, Artificial Sequence
  Description of Artificial Sequence: Synthetic oligonucleotide
guuguaauaucucugagaa

SEQ ID NO: 1690254 - RNA, 19 nt, Artificial Sequence
  Description of Artificial Sequence: Synthetic oligonucleotide
guuaaagaggguccgaagc

SEQ ID NO: 1690255 - RNA, 19 nt, Artificial Sequence
  Description of Artificial Sequence: Synthetic oligonucleotide
aagguggaggucuuagccg

SEQ ID NO: 1690256 - RNA, 19 nt, Artificial Sequence
  Description of Artificial Sequence: Synthetic oligonucleotide
uugaacuuugcaauaggca

SEQ ID NO: 1690257 - RNA, 19 nt, Artificial Sequence
  Description of Artificial Sequence: Synthetic oligonucleotide
uguugguagcacuuaacag

SEQ ID NO: 1690258 - RNA, 19 nt, Artificial Sequence
  Description of Artificial Sequence: Synthetic oligonucleotide
ucggccauacucaagacac

SEQ ID NO: 1690259 - RNA, 19 nt, Artificial Sequence
  Description of Artificial Sequence: Synthetic oligonucleotide
uccauuguuaagguggagg

SEQ ID NO: 1690260 - RNA, 19 nt, Artificial Sequence
  Description of Artificial Sequence: Synthetic oligonucleotide
uccauguuaaagagggucc

SEQ ID NO: 1690261 - RNA, 19 nt, Artificial Sequence
  Description of Artificial Sequence: Synthetic oligonucleotide
cuuucuggaaguaagagaa

SEQ ID NO: 1690262 - RNA, 19 nt, Artificial Sequence
  Description of Artificial Sequence: Synthetic oligonucleotide
aacuuugcaauaggcaccg

SEQ ID NO: 1690263 - RNA, 19 nt, Artificial Sequence
  Description of Artificial Sequence: Synthetic oligonucleotide
uuagccgaaacccagucuc

SEQ ID NO: 1690264 - RNA, 19 nt, Artificial Sequence
  Description of Artificial Sequence: Synthetic oligonucleotide
aguaagagaaggcugcugu

SEQ ID NO: 1690265 - RNA, 19 nt, Artificial Sequence
  Description of Artificial Sequence: Synthetic oligonucleotide
ugaagugaggaaguguggg

SEQ ID NO: 1690266 - RNA, 19 nt, Artificial Sequence
  Description of Artificial Sequence: Synthetic oligonucleotide
ugagaguccccauucuugg

SEQ ID NO: 1690267 - RNA, 19 nt, Artificial Sequence
  Description of Artificial Sequence: Synthetic oligonucleotide
aaaagcaccccaaggaaag

SEQ ID NO: 1690268 - RNA, 19 nt, Artificial Sequence
  Description of Artificial Sequence: Synthetic oligonucleotide
agucucaugagauucauuu

SEQ ID NO: 1690269 - RNA, 19 nt, Artificial Sequence
  Description of Artificial Sequence: Synthetic oligonucleotide
guagcagacucccaagugg

SEQ ID NO: 1690270 - RNA, 19 nt, Artificial Sequence
  Description of Artificial Sequence: Synthetic oligonucleotide
uggacucaaacccauacaa

SEQ ID NO: 1690271 - RNA, 19 nt, Artificial Sequence
  Description of Artificial Sequence: Synthetic oligonucleotide
aaaagcgauggcaacacug

SEQ ID NO: 1690272 - RNA, 19 nt, Artificial Sequence
  Description of Artificial Sequence: Synthetic oligonucleotide
aggucugggaagaacaugc

SEQ ID NO: 1690273 - RNA, 19 nt, Artificial Sequence
  Description of Artificial Sequence: Synthetic oligonucleotide
cauacucaagacacaagcc

SEQ ID NO: 1690274 - RNA, 19 nt, Artificial Sequence
  Description of Artificial Sequence: Synthetic oligonucleotide
ugguaaaagaggauagccu

SEQ ID NO: 1690275 - RNA, 19 nt, Artificial Sequence
  Description of Artificial Sequence: Synthetic oligonucleotide
uacucaagacacaagccca

SEQ ID NO: 1690276 - RNA, 19 nt, Artificial Sequence
  Description of Artificial Sequence: Synthetic oligonucleotide
uugggaaucaaguuguaau

SEQ ID NO: 1690277 - RNA, 19 nt, Artificial Sequence
  Description of Artificial Sequence: Synthetic oligonucleotide
agcauagcgguacugagcu

SEQ ID NO: 1690278 - RNA, 19 nt, Artificial Sequence
  Description of Artificial Sequence: Synthetic oligonucleotide
caugagauucauuuccaag

SEQ ID NO: 1690279 - RNA, 19 nt, Artificial Sequence
  Description of Artificial Sequence: Synthetic oligonucleotide
aggggaaguugucugaagg

SEQ ID NO: 1690280 - RNA, 19 nt, Artificial Sequence
  Description of Artificial Sequence: Synthetic oligonucleotide
ugugcuuugcuguagcuuc

SEQ ID NO: 1690281 - RNA, 19 nt, Artificial Sequence
  Description of Artificial Sequence: Synthetic oligonucleotide
aguggaaucugcuuugaga

SEQ ID NO: 1690282 - RNA, 19 nt, Artificial Sequence
  Description of Artificial Sequence: Synthetic oligonucleotide
uugagaguccccauucuug

SEQ ID NO: 1690283 - RNA, 19 nt, Artificial Sequence
  Description of Artificial Sequence: Synthetic oligonucleotide
uugcaauaggcaccgagca

SEQ ID NO: 1690284 - RNA, 19 nt, Artificial Sequence
  Description of Artificial Sequence: Synthetic oligonucleotide
agugguaaaagaggauagc

SEQ ID NO: 1690285 - RNA, 19 nt, Artificial Sequence
  Description of Artificial Sequence: Synthetic oligonucleotide
aagugguaaaagaggauag

SEQ ID NO: 1690286 - RNA, 19 nt, Artificial Sequence
  Description of Artificial Sequence: Synthetic oligonucleotide
uaaaagaggauagccuucc

SEQ ID NO: 1690287 - RNA, 19 nt, Artificial Sequence
  Description of Artificial Sequence: Synthetic oligonucleotide
aacccauacaaaucugccu

SEQ ID NO: 1690288 - RNA, 19 nt, Artificial Sequence
  Description of Artificial Sequence: Synthetic oligonucleotide
uguuaaagaggguccgaag

SEQ ID NO: 1690289 - RNA, 19 nt, Artificial Sequence
  Description of Artificial Sequence: Synthetic oligonucleotide
ugaggcaugagggaggccc

SEQ ID NO: 1690290 - RNA, 19 nt, Artificial Sequence
  Description of Artificial Sequence: Synthetic oligonucleotide
gaggucuuagccgaaaccc

SEQ ID NO: 1690291 - RNA, 19 nt, Artificial Sequence
  Description of Artificial Sequence: Synthetic oligonucleotide
agauucauuuccaaggaug

SEQ ID NO: 1690292 - RNA, 19 nt, Artificial Sequence
  Description of Artificial Sequence: Synthetic oligonucleotide
uccucugaacaccaaggcc

SEQ ID NO: 1690293 - RNA, 19 nt, Artificial Sequence
  Description of Artificial Sequence: Synthetic oligonucleotide
uuaaaagcgauggcaacac

SEQ ID NO: 1690294 - RNA, 19 nt, Artificial Sequence
  Description of Artificial Sequence: Synthetic oligonucleotide
gagggguucuucuuggccc

SEQ ID NO: 1690295 - RNA, 19 nt, Artificial Sequence
  Description of Artificial Sequence: Synthetic oligonucleotide
ucucaagccagagucugcg

SEQ ID NO: 1690296 - RNA, 19 nt, Artificial Sequence
  Description of Artificial Sequence: Synthetic oligonucleotide
agaacaugccucugaagug

SEQ ID NO: 1690297 - RNA, 19 nt, Artificial Sequence
  Description of Artificial Sequence: Synthetic oligonucleotide
ucuuuauggugcuggggag

SEQ ID NO: 1690298 - RNA, 19 nt, Artificial Sequence
  Description of Artificial Sequence: Synthetic oligonucleotide
cuuugcaauaggcaccgag

SEQ ID NO: 1690299 - RNA, 19 nt, Artificial Sequence
  Description of Artificial Sequence: Synthetic oligonucleotide
uuccucugaacaccaaggc

SEQ ID NO: 1690300 - RNA, 19 nt, Artificial Sequence
  Description of Artificial Sequence: Synthetic oligonucleotide
cucagggucugacaaagag

SEQ ID NO: 1690301 - RNA, 19 nt, Artificial Sequence
  Description of Artificial Sequence: Synthetic oligonucleotide
ucucucucaggcuccauug

SEQ ID NO: 1690302 - RNA, 19 nt, Artificial Sequence
  Description of Artificial Sequence: Synthetic oligonucleotide
cauagcgguacugagcuag

SEQ ID NO: 1690303 - RNA, 19 nt, Artificial Sequence
  Description of Artificial Sequence: Synthetic oligonucleotide
aaagcaccccaaggaaagc

SEQ ID NO: 1690304 - RNA, 19 nt, Artificial Sequence
  Description of Artificial Sequence: Synthetic oligonucleotide
agcacuuaacagccucgcc

SEQ ID NO: 1690305 - RNA, 19 nt, Artificial Sequence
  Description of Artificial Sequence: Synthetic oligonucleotide
agaguugcuggauggaagu

SEQ ID NO: 1690306 - RNA, 19 nt, Artificial Sequence
  Description of Artificial Sequence: Synthetic oligonucleotide
caaguuguaauaucucuga

SEQ ID NO: 1690307 - RNA, 19 nt, Artificial Sequence
  Description of Artificial Sequence: Synthetic oligonucleotide
uuaagguggaggucuuagc

SEQ ID NO: 1690308 - RNA, 19 nt, Artificial Sequence
  Description of Artificial Sequence: Synthetic oligonucleotide
aaagcgauggcaacacuga

SEQ ID NO: 1690309 - RNA, 19 nt, Artificial Sequence
  Description of Artificial Sequence: Synthetic oligonucleotide
ugaggccaguguauguggg

SEQ ID NO: 1690310 - RNA, 19 nt, Artificial Sequence
  Description of Artificial Sequence: Synthetic oligonucleotide
ugggaaucaaguuguaaua

SEQ ID NO: 1690311 - RNA, 19 nt, Artificial Sequence
  Description of Artificial Sequence: Synthetic oligonucleotide
gaaguugucugaagggcag

SEQ ID NO: 1690312 - RNA, 19 nt, Artificial Sequence
  Description of Artificial Sequence: Synthetic oligonucleotide
ucucguagcagacucccaa

SEQ ID NO: 1690313 - RNA, 19 nt, Artificial Sequence
  Description of Artificial Sequence: Synthetic oligonucleotide
gaaagcuugggccucucuc

SEQ ID NO: 1690314 - RNA, 19 nt, Artificial Sequence
  Description of Artificial Sequence: Synthetic oligonucleotide
ucuguccccaggaaguuaa

SEQ ID NO: 1690315 - RNA, 19 nt, Artificial Sequence
  Description of Artificial Sequence: Synthetic oligonucleotide
agguugaugggcccugggg

SEQ ID NO: 1690316 - RNA, 19 nt, Artificial Sequence
  Description of Artificial Sequence: Synthetic oligonucleotide
acccauacaaaucugccuu

SEQ ID NO: 1690317 - RNA, 19 nt, Artificial Sequence
  Description of Artificial Sequence: Synthetic oligonucleotide
guucaggcuacagagggag

SEQ ID NO: 1690318 - RNA, 19 nt, Artificial Sequence
  Description of Artificial Sequence: Synthetic oligonucleotide
uagacacugcccucugccg

SEQ ID NO: 1690319 - RNA, 19 nt, Artificial Sequence
  Description of Artificial Sequence: Synthetic oligonucleotide
agcgauggcaacacugagc

SEQ ID NO: 1690320 - RNA, 19 nt, Artificial Sequence
  Description of Artificial Sequence: Synthetic oligonucleotide
ugacaaagagcuugaacuu

SEQ ID NO: 1690321 - RNA, 19 nt, Artificial Sequence
  Description of Artificial Sequence: Synthetic oligonucleotide
guuaaaagcgauggcaaca

SEQ ID NO: 1690322 - RNA, 19 nt, Artificial Sequence
  Description of Artificial Sequence: Synthetic oligonucleotide
guuaagguggaggucuuag

SEQ ID NO: 1690323 - RNA, 19 nt, Artificial Sequence
  Description of Artificial Sequence: Synthetic oligonucleotide
aaagaggguccgaagccuc

SEQ ID NO: 1690324 - RNA, 19 nt, Artificial Sequence
  Description of Artificial Sequence: Synthetic oligonucleotide
ggaaguaagagaaggcugc

SEQ ID NO: 1690325 - RNA, 19 nt, Artificial Sequence
  Description of Artificial Sequence: Synthetic oligonucleotide
aacacugagcugaaagagu

SEQ ID NO: 1690326 - RNA, 19 nt, Artificial Sequence
  Description of Artificial Sequence: Synthetic oligonucleotide
uuugagaguccccauucuu

SEQ ID NO: 1690327 - RNA, 19 nt, Artificial Sequence
  Description of Artificial Sequence: Synthetic oligonucleotide
ucuuagccgaaacccaguc

SEQ ID NO: 1690328 - RNA, 19 nt, Artificial Sequence
  Description of Artificial Sequence: Synthetic oligonucleotide
aaacccagucucaugagau

SEQ ID NO: 1690329 - RNA, 19 nt, Artificial Sequence
  Description of Artificial Sequence: Synthetic oligonucleotide
aaagaguugcuggauggaa

SEQ ID NO: 1690330 - RNA, 19 nt, Artificial Sequence
  Description of Artificial Sequence: Synthetic oligonucleotide
ucucucaagccagagucug

SEQ ID NO: 1690331 - RNA, 19 nt, Artificial Sequence
  Description of Artificial Sequence: Synthetic oligonucleotide
cugagaacucucucucagg

SEQ ID NO: 1690332 - RNA, 19 nt, Artificial Sequence
  Description of Artificial Sequence: Synthetic oligonucleotide
ugaguagcuaccuggccuc

SEQ ID NO: 1690333 - RNA, 19 nt, Artificial Sequence
  Description of Artificial Sequence: Synthetic oligonucleotide
cugaaagaguugcuggaug

SEQ ID NO: 1690334 - RNA, 19 nt, Artificial Sequence
  Description of Artificial Sequence: Synthetic oligonucleotide
gcacuuaacagccucgccc

SEQ ID NO: 1690335 - RNA, 19 nt, Artificial Sequence
  Description of Artificial Sequence: Synthetic oligonucleotide
agaguccccauucuuggcu

SEQ ID NO: 1690336 - RNA, 19 nt, Artificial Sequence
  Description of Artificial Sequence: Synthetic oligonucleotide
acacaagcccacauuguac

SEQ ID NO: 1690337 - RNA, 19 nt, Artificial Sequence
  Description of Artificial Sequence: Synthetic oligonucleotide
cuuuauggugcuggggagg

SEQ ID NO: 1690338 - RNA, 19 nt, Artificial Sequence
  Description of Artificial Sequence: Synthetic oligonucleotide
agguauuucacugcucucu

SEQ ID NO: 1690339 - RNA, 19 nt, Artificial Sequence
  Description of Artificial Sequence: Synthetic oligonucleotide
acccagucucaugagauuc

SEQ ID NO: 1690340 - RNA, 19 nt, Artificial Sequence
  Description of Artificial Sequence: Synthetic oligonucleotide
agcugaaagaguugcugga

SEQ ID NO: 1690341 - RNA, 19 nt, Artificial Sequence
  Description of Artificial Sequence: Synthetic oligonucleotide
uaaagaggguccgaagccu

SEQ ID NO: 1690342 - RNA, 19 nt, Artificial Sequence
  Description of Artificial Sequence: Synthetic oligonucleotide
ucaagacacaagcccacau

SEQ ID NO: 1690343 - RNA, 19 nt, Artificial Sequence
  Description of Artificial Sequence: Synthetic oligonucleotide
acauuguacugugcuuugc

SEQ ID NO: 1690344 - RNA, 19 nt, Artificial Sequence
  Description of Artificial Sequence: Synthetic oligonucleotide
auucauuuccaaggauggg

SEQ ID NO: 1690345 - RNA, 19 nt, Artificial Sequence
  Description of Artificial Sequence: Synthetic oligonucleotide
agcuugaacuuugcaauag

SEQ ID NO: 1690346 - RNA, 19 nt, Artificial Sequence
  Description of Artificial Sequence: Synthetic oligonucleotide
cccaaggaaagcuugggcc

SEQ ID NO: 1690347 - RNA, 19 nt, Artificial Sequence
  Description of Artificial Sequence: Synthetic oligonucleotide
caggaaguuaaaagcgaug

SEQ ID NO: 1690348 - RNA, 19 nt, Artificial Sequence
  Description of Artificial Sequence: Synthetic oligonucleotide
gaacaugccucugaaguga

SEQ ID NO: 1690349 - RNA, 19 nt, Artificial Sequence
  Description of Artificial Sequence: Synthetic oligonucleotide
cugagcuaggcuguggccc

SEQ ID NO: 1690350 - RNA, 19 nt, Artificial Sequence
  Description of Artificial Sequence: Synthetic oligonucleotide
aauaggcaccgagcauagc

SEQ ID NO: 1690351 - RNA, 19 nt, Artificial Sequence
  Description of Artificial Sequence: Synthetic oligonucleotide
cuucauguucucugucccc

SEQ ID NO: 1690352 - RNA, 19 nt, Artificial Sequence
  Description of Artificial Sequence: Synthetic oligonucleotide
caauaggcaccgagcauag

SEQ ID NO: 1690353 - RNA, 19 nt, Artificial Sequence
  Description of Artificial Sequence: Synthetic oligonucleotide
agcugcugacuguugguag

SEQ ID NO: 1690354 - RNA, 19 nt, Artificial Sequence
  Description of Artificial Sequence: Synthetic oligonucleotide
ucaugagauucauuuccaa

SEQ ID NO: 1690355 - RNA, 19 nt, Artificial Sequence
  Description of Artificial Sequence: Synthetic oligonucleotide
cuguugguagcacuuaaca

SEQ ID NO: 1690356 - RNA, 19 nt, Artificial Sequence
  Description of Artificial Sequence: Synthetic oligonucleotide
acuguugguagcacuuaac

SEQ ID NO: 1690357 - RNA, 19 nt, Artificial Sequence
  Description of Artificial Sequence: Synthetic oligonucleotide
ugggaugugaaguccccac

SEQ ID NO: 1690358 - RNA, 19 nt, Artificial Sequence
  Description of Artificial Sequence: Synthetic oligonucleotide
ucguagcagacucccaagu

SEQ ID NO: 1690359 - RNA, 19 nt, Artificial Sequence
  Description of Artificial Sequence: Synthetic oligonucleotide
cucugaacaccaaggcccc

SEQ ID NO: 1690360 - RNA, 19 nt, Artificial Sequence
  Description of Artificial Sequence: Synthetic oligonucleotide
guagcacuuaacagccucg

SEQ ID NO: 1690361 - RNA, 19 nt, Artificial Sequence
  Description of Artificial Sequence: Synthetic oligonucleotide
aggguccgaagccucuccc

SEQ ID NO: 1690362 - RNA, 19 nt, Artificial Sequence
  Description of Artificial Sequence: Synthetic oligonucleotide
uucaggcuacagagggagg

SEQ ID NO: 1690363 - RNA, 19 nt, Artificial Sequence
  Description of Artificial Sequence: Synthetic oligonucleotide
uguucaggcuacagaggga

SEQ ID NO: 1690364 - RNA, 19 nt, Artificial Sequence
  Description of Artificial Sequence: Synthetic oligonucleotide
aggugaguagcuaccuggc

SEQ ID NO: 1690365 - RNA, 19 nt, Artificial Sequence
  Description of Artificial Sequence: Synthetic oligonucleotide
uuugggaaucaaguuguaa

SEQ ID NO: 1690366 - RNA, 19 nt, Artificial Sequence
  Description of Artificial Sequence: Synthetic oligonucleotide
ucucaggcuccauuguuaa

SEQ ID NO: 1690367 - RNA, 19 nt, Artificial Sequence
  Description of Artificial Sequence: Synthetic oligonucleotide
cuucaguccugucaugguc

SEQ ID NO: 1690368 - RNA, 19 nt, Artificial Sequence
  Description of Artificial Sequence: Synthetic oligonucleotide
aguccccauucuuggcugc

SEQ ID NO: 1690369 - RNA, 19 nt, Artificial Sequence
  Description of Artificial Sequence: Synthetic oligonucleotide
ggaaguuaaaagcgauggc

SEQ ID NO: 1690370 - RNA, 19 nt, Artificial Sequence
  Description of Artificial Sequence: Synthetic oligonucleotide
cagacucccaaguggaauc

SEQ ID NO: 1690371 - RNA, 19 nt, Artificial Sequence
  Description of Artificial Sequence: Synthetic oligonucleotide
cuucuuuauggugcugggg

SEQ ID NO: 1690372 - RNA, 19 nt, Artificial Sequence
  Description of Artificial Sequence: Synthetic oligonucleotide
ugaacaccaaggccccucu

SEQ ID NO: 1690373 - RNA, 19 nt, Artificial Sequence
  Description of Artificial Sequence: Synthetic oligonucleotide
uaaaagcgauggcaacacu

SEQ ID NO: 1690374 - RNA, 19 nt, Artificial Sequence
  Description of Artificial Sequence: Synthetic oligonucleotide
gcuugaacuuugcaauagg

SEQ ID NO: 1690375 - RNA, 19 nt, Artificial Sequence
  Description of Artificial Sequence: Synthetic oligonucleotide
ucguucccugucuucaugu

SEQ ID NO: 1690376 - RNA, 19 nt, Artificial Sequence
  Description of Artificial Sequence: Synthetic oligonucleotide
gacacaagcccacauugua

SEQ ID NO: 1690377 - RNA, 19 nt, Artificial Sequence
  Description of Artificial Sequence: Synthetic oligonucleotide
ccccaggaaguuaaaagcg

SEQ ID NO: 1690378 - RNA, 19 nt, Artificial Sequence
  Description of Artificial Sequence: Synthetic oligonucleotide
agguguggcuccuugguaa

SEQ ID NO: 1690379 - RNA, 19 nt, Artificial Sequence
  Description of Artificial Sequence: Synthetic oligonucleotide
guauuucacugcucucugc

SEQ ID NO: 1690380 - RNA, 19 nt, Artificial Sequence
  Description of Artificial Sequence: Synthetic oligonucleotide
uccgaagccucucccgggc

SEQ ID NO: 1690381 - RNA, 19 nt, Artificial Sequence
  Description of Artificial Sequence: Synthetic oligonucleotide
cauguucucuguccccagg

SEQ ID NO: 1690382 - RNA, 19 nt, Artificial Sequence
  Description of Artificial Sequence: Synthetic oligonucleotide
cacuuaacagccucgccca

SEQ ID NO: 1690383 - RNA, 19 nt, Artificial Sequence
  Description of Artificial Sequence: Synthetic oligonucleotide
ugcaauaggcaccgagcau

SEQ ID NO: 1690384 - RNA, 19 nt, Artificial Sequence
  Description of Artificial Sequence: Synthetic oligonucleotide
uggccacuucugcagagga

SEQ ID NO: 1690385 - RNA, 19 nt, Artificial Sequence
  Description of Artificial Sequence: Synthetic oligonucleotide
uggaggucuuagccgaaac

SEQ ID NO: 1690386 - RNA, 19 nt, Artificial Sequence
  Description of Artificial Sequence: Synthetic oligonucleotide
ucaggaagucaaaguuacu

SEQ ID NO: 1690387 - RNA, 19 nt, Artificial Sequence
  Description of Artificial Sequence: Synthetic oligonucleotide
ugggaguggggaagucagg

SEQ ID NO: 1690388 - RNA, 19 nt, Artificial Sequence
  Description of Artificial Sequence: Synthetic oligonucleotide
cucguagcagacucccaag

SEQ ID NO: 1690389 - RNA, 19 nt, Artificial Sequence
  Description of Artificial Sequence: Synthetic oligonucleotide
gagcauagcgguacugagc

SEQ ID NO: 1690390 - RNA, 19 nt, Artificial Sequence
  Description of Artificial Sequence: Synthetic oligonucleotide
cagaggaggccaagguucc

SEQ ID NO: 1690391 - RNA, 19 nt, Artificial Sequence
  Description of Artificial Sequence: Synthetic oligonucleotide
ccucucucaagccagaguc

SEQ ID NO: 1690392 - RNA, 19 nt, Artificial Sequence
  Description of Artificial Sequence: Synthetic oligonucleotide
guaaaagaggauagccuuc

SEQ ID NO: 1690393 - RNA, 19 nt, Artificial Sequence
  Description of Artificial Sequence: Synthetic oligonucleotide
auaucucugagaacucucu

SEQ ID NO: 1690394 - RNA, 19 nt, Artificial Sequence
  Description of Artificial Sequence: Synthetic oligonucleotide
cuugaggcaugagggaggc

SEQ ID NO: 1690395 - RNA, 19 nt, Artificial Sequence
  Description of Artificial Sequence: Synthetic oligonucleotide
caagauggccacuucugca

SEQ ID NO: 1690396 - RNA, 19 nt, Artificial Sequence
  Description of Artificial Sequence: Synthetic oligonucleotide
uagcacuuaacagccucgc

SEQ ID NO: 1690397 - RNA, 19 nt, Artificial Sequence
  Description of Artificial Sequence: Synthetic oligonucleotide
acaagcccacauuguacug

SEQ ID NO: 1690398 - RNA, 19 nt, Artificial Sequence
  Description of Artificial Sequence: Synthetic oligonucleotide
caagugguaaaagaggaua

SEQ ID NO: 1690399 - RNA, 19 nt, Artificial Sequence
  Description of Artificial Sequence: Synthetic oligonucleotide
gguagcacuuaacagccuc

SEQ ID NO: 1690400 - RNA, 19 nt, Artificial Sequence
  Description of Artificial Sequence: Synthetic oligonucleotide
ucucucaggcuccauuguu

SEQ ID NO: 1690401 - RNA, 19 nt, Artificial Sequence
  Description of Artificial Sequence: Synthetic oligonucleotide
caugccucugaagugagga

SEQ ID NO: 1690402 - RNA, 19 nt, Artificial Sequence
  Description of Artificial Sequence: Synthetic oligonucleotide
ugcuuugagaguccccauu

SEQ ID NO: 1690403 - RNA, 19 nt, Artificial Sequence
  Description of Artificial Sequence: Synthetic oligonucleotide
gcgguacugagcuaggcug

SEQ ID NO: 1690404 - RNA, 19 nt, Artificial Sequence
  Description of Artificial Sequence: Synthetic oligonucleotide
uugccugggaugugaaguc

SEQ ID NO: 1690405 - RNA, 19 nt, Artificial Sequence
  Description of Artificial Sequence: Synthetic oligonucleotide
ggaggucuuagccgaaacc

SEQ ID NO: 1690406 - RNA, 19 nt, Artificial Sequence
  Description of Artificial Sequence: Synthetic oligonucleotide
uagccgaaacccagucuca

SEQ ID NO: 1690407 - RNA, 19 nt, Artificial Sequence
  Description of Artificial Sequence: Synthetic oligonucleotide
aacccagucucaugagauu

SEQ ID NO: 1690408 - RNA, 19 nt, Artificial Sequence
  Description of Artificial Sequence: Synthetic oligonucleotide
gggaaguugucugaagggc

SEQ ID NO: 1690409 - RNA, 19 nt, Artificial Sequence
  Description of Artificial Sequence: Synthetic oligonucleotide
cauagacacugcccucugc

SEQ ID NO: 1690410 - RNA, 19 nt, Artificial Sequence
  Description of Artificial Sequence: Synthetic oligonucleotide
gccaaagguauuucacugc

SEQ ID NO: 1690411 - RNA, 19 nt, Artificial Sequence
  Description of Artificial Sequence: Synthetic oligonucleotide
acaccaaggccccucucgu

SEQ ID NO: 1690412 - RNA, 19 nt, Artificial Sequence
  Description of Artificial Sequence: Synthetic oligonucleotide
uucccugaggccaguguau

SEQ ID NO: 1690413 - RNA, 19 nt, Artificial Sequence
  Description of Artificial Sequence: Synthetic oligonucleotide
cucaagccagagucugcgg

SEQ ID NO: 1690414 - RNA, 19 nt, Artificial Sequence
  Description of Artificial Sequence: Synthetic oligonucleotide
ugugucguucccugucuuc

SEQ ID NO: 1690415 - RNA, 19 nt, Artificial Sequence
  Description of Artificial Sequence: Synthetic oligonucleotide
gguccgaagccucucccgg

SEQ ID NO: 1690416 - RNA, 19 nt, Artificial Sequence
  Description of Artificial Sequence: Synthetic oligonucleotide
uugcuguagcuucggucug

SEQ ID NO: 1690417 - RNA, 19 nt, Artificial Sequence
  Description of Artificial Sequence: Synthetic oligonucleotide
cucucaagccagagucugc

SEQ ID NO: 1690418 - RNA, 19 nt, Artificial Sequence
  Description of Artificial Sequence: Synthetic oligonucleotide
acugugcuuugcuguagcu

SEQ ID NO: 1690419 - RNA, 19 nt, Artificial Sequence
  Description of Artificial Sequence: Synthetic oligonucleotide
acuuaacagccucgcccag

SEQ ID NO: 1690420 - RNA, 19 nt, Artificial Sequence
  Description of Artificial Sequence: Synthetic oligonucleotide
gaagugaggaagugugggu

SEQ ID NO: 1690421 - RNA, 19 nt, Artificial Sequence
  Description of Artificial Sequence: Synthetic oligonucleotide
gaacucucucucaggcucc

SEQ ID NO: 1690422 - RNA, 19 nt, Artificial Sequence
  Description of Artificial Sequence: Synthetic oligonucleotide
accccaaggaaagcuuggg

SEQ ID NO: 1690423 - RNA, 19 nt, Artificial Sequence
  Description of Artificial Sequence: Synthetic oligonucleotide
ucagguugaugggcccugg

SEQ ID NO: 1690424 - RNA, 19 nt, Artificial Sequence
  Description of Artificial Sequence: Synthetic oligonucleotide
gguucuucuuggcccagcc

SEQ ID NO: 1690425 - RNA, 19 nt, Artificial Sequence
  Description of Artificial Sequence: Synthetic oligonucleotide
cauuguuaagguggagguc

SEQ ID NO: 1690426 - RNA, 19 nt, Artificial Sequence
  Description of Artificial Sequence: Synthetic oligonucleotide
agggguucuucuuggccca

SEQ ID NO: 1690427 - RNA, 19 nt, Artificial Sequence
  Description of Artificial Sequence: Synthetic oligonucleotide
gaggcaugagggaggcccg

SEQ ID NO: 1690428 - RNA, 19 nt, Artificial Sequence
  Description of Artificial Sequence: Synthetic oligonucleotide
gcuuugagaguccccauuc

SEQ ID NO: 1690429 - RNA, 19 nt, Artificial Sequence
  Description of Artificial Sequence: Synthetic oligonucleotide
cacugagcugaaagaguug

SEQ ID NO: 1690430 - RNA, 19 nt, Artificial Sequence
  Description of Artificial Sequence: Synthetic oligonucleotide
ccagauuccucugaacacc

SEQ ID NO: 1690431 - RNA, 19 nt, Artificial Sequence
  Description of Artificial Sequence: Synthetic oligonucleotide
auggccacuucugcagagg

SEQ ID NO: 1690432 - RNA, 19 nt, Artificial Sequence
  Description of Artificial Sequence: Synthetic oligonucleotide
ggucuuagccgaaacccag

SEQ ID NO: 1690433 - RNA, 19 nt, Artificial Sequence
  Description of Artificial Sequence: Synthetic oligonucleotide
gaagccucucccgggccgg

SEQ ID NO: 1690434 - RNA, 19 nt, Artificial Sequence
  Description of Artificial Sequence: Synthetic oligonucleotide
guccgaagccucucccggg

SEQ ID NO: 1690435 - RNA, 19 nt, Artificial Sequence
  Description of Artificial Sequence: Synthetic oligonucleotide
ggugaguagcuaccuggcc

SEQ ID NO: 1690436 - RNA, 19 nt, Artificial Sequence
  Description of Artificial Sequence: Synthetic oligonucleotide
ugccugggaugugaagucc

SEQ ID NO: 1690437 - RNA, 19 nt, Artificial Sequence
  Description of Artificial Sequence: Synthetic oligonucleotide
gcugcugacuguugguagc

SEQ ID NO: 1690438 - RNA, 19 nt, Artificial Sequence
  Description of Artificial Sequence: Synthetic oligonucleotide
aggggugccucggccauac

SEQ ID NO: 1690439 - RNA, 19 nt, Artificial Sequence
  Description of Artificial Sequence: Synthetic oligonucleotide
ccauguuaaagaggguccg

SEQ ID NO: 1690440 - RNA, 19 nt, Artificial Sequence
  Description of Artificial Sequence: Synthetic oligonucleotide
ccaagauggccacuucugc

SEQ ID NO: 1690441 - RNA, 19 nt, Artificial Sequence
  Description of Artificial Sequence: Synthetic oligonucleotide
cucuaggggaagagccuug

SEQ ID NO: 1690442 - RNA, 19 nt, Artificial Sequence
  Description of Artificial Sequence: Synthetic oligonucleotide
gucaaaguuacugggcucu

SEQ ID NO: 1690443 - RNA, 19 nt, Artificial Sequence
  Description of Artificial Sequence: Synthetic oligonucleotide
uguccccaggaaguuaaaa

SEQ ID NO: 1690444 - RNA, 19 nt, Artificial Sequence
  Description of Artificial Sequence: Synthetic oligonucleotide
agacuucaguccugucaug

SEQ ID NO: 1690445 - RNA, 19 nt, Artificial Sequence
  Description of Artificial Sequence: Synthetic oligonucleotide
gagcuugaacuuugcaaua

SEQ ID NO: 1690446 - RNA, 19 nt, Artificial Sequence
  Description of Artificial Sequence: Synthetic oligonucleotide
gucguucccugucuucaug

SEQ ID NO: 1690447 - RNA, 19 nt, Artificial Sequence
  Description of Artificial Sequence: Synthetic oligonucleotide
ucccuggcuggcuccaaga

SEQ ID NO: 1690448 - RNA, 19 nt, Artificial Sequence
  Description of Artificial Sequence: Synthetic oligonucleotide
uuguuaagguggaggucuu

SEQ ID NO: 1690449 - RNA, 19 nt, Artificial Sequence
  Description of Artificial Sequence: Synthetic oligonucleotide
gcgauggcaacacugagcu

SEQ ID NO: 1690450 - RNA, 19 nt, Artificial Sequence
  Description of Artificial Sequence: Synthetic oligonucleotide
ucgcccagauuccucugaa

SEQ ID NO: 1690451 - RNA, 19 nt, Artificial Sequence
  Description of Artificial Sequence: Synthetic oligonucleotide
auagcgguacugagcuagg

SEQ ID NO: 1690452 - RNA, 19 nt, Artificial Sequence
  Description of Artificial Sequence: Synthetic oligonucleotide
ggaaguugucugaagggca

SEQ ID NO: 1690453 - RNA, 19 nt, Artificial Sequence
  Description of Artificial Sequence: Synthetic oligonucleotide
aggcuccauuguuaaggug

SEQ ID NO: 1690454 - RNA, 19 nt, Artificial Sequence
  Description of Artificial Sequence: Synthetic oligonucleotide
gggaagaacaugccucuga

SEQ ID NO: 1690455 - RNA, 19 nt, Artificial Sequence
  Description of Artificial Sequence: Synthetic oligonucleotide
ugcggccugcuucagcaua

SEQ ID NO: 1690456 - RNA, 19 nt, Artificial Sequence
  Description of Artificial Sequence: Synthetic oligonucleotide
guagcuucggucugcggcu

SEQ ID NO: 1690457 - RNA, 19 nt, Artificial Sequence
  Description of Artificial Sequence: Synthetic oligonucleotide
aggucuuagccgaaaccca

SEQ ID NO: 1690458 - RNA, 19 nt, Artificial Sequence
  Description of Artificial Sequence: Synthetic oligonucleotide
agaggguccgaagccucuc

SEQ ID NO: 1690459 - RNA, 19 nt, Artificial Sequence
  Description of Artificial Sequence: Synthetic oligonucleotide
cccagauuccucugaacac

SEQ ID NO: 1690460 - RNA, 19 nt, Artificial Sequence
  Description of Artificial Sequence: Synthetic oligonucleotide
ugguagcacuuaacagccu

SEQ ID NO: 1690461 - RNA, 19 nt, Artificial Sequence
  Description of Artificial Sequence: Synthetic oligonucleotide
gcuugaggcaugagggagg

SEQ ID NO: 1690462 - RNA, 19 nt, Artificial Sequence
  Description of Artificial Sequence: Synthetic oligonucleotide
guacugugcuuugcuguag

SEQ ID NO: 1690463 - RNA, 19 nt, Artificial Sequence
  Description of Artificial Sequence: Synthetic oligonucleotide
ugccucggccauacucaag

SEQ ID NO: 1690464 - RNA, 19 nt, Artificial Sequence
  Description of Artificial Sequence: Synthetic oligonucleotide
guagcuaccuggccuccuc

SEQ ID NO: 1690465 - RNA, 19 nt, Artificial Sequence
  Description of Artificial Sequence: Synthetic oligonucleotide
ggaugggauaguccugcug

SEQ ID NO: 1690466 - RNA, 19 nt, Artificial Sequence
  Description of Artificial Sequence: Synthetic oligonucleotide
aguggggaagucaggucug

SEQ ID NO: 1690467 - RNA, 19 nt, Artificial Sequence
  Description of Artificial Sequence: Synthetic oligonucleotide
uugcuggauggaagucaca

SEQ ID NO: 1690468 - RNA, 19 nt, Artificial Sequence
  Description of Artificial Sequence: Synthetic oligonucleotide
gagauucauuuccaaggau

SEQ ID NO: 1690469 - RNA, 19 nt, Artificial Sequence
  Description of Artificial Sequence: Synthetic oligonucleotide
ugggaagaacaugccucug

SEQ ID NO: 1690470 - RNA, 19 nt, Artificial Sequence
  Description of Artificial Sequence: Synthetic oligonucleotide
agacucccaaguggaaucu

SEQ ID NO: 1690471 - RNA, 19 nt, Artificial Sequence
  Description of Artificial Sequence: Synthetic oligonucleotide
cugaggucccuaggggugc

SEQ ID NO: 1690472 - RNA, 19 nt, Artificial Sequence
  Description of Artificial Sequence: Synthetic oligonucleotide
caaaguuacugggcucuuc

SEQ ID NO: 1690473 - RNA, 19 nt, Artificial Sequence
  Description of Artificial Sequence: Synthetic oligonucleotide
cucugagaacucucucuca

SEQ ID NO: 1690474 - RNA, 19 nt, Artificial Sequence
  Description of Artificial Sequence: Synthetic oligonucleotide
cugaacaccaaggccccuc

SEQ ID NO: 1690475 - RNA, 19 nt, Artificial Sequence
  Description of Artificial Sequence: Synthetic oligonucleotide
ggguccgaagccucucccg

SEQ ID NO: 1690476 - RNA, 19 nt, Artificial Sequence
  Description of Artificial Sequence: Synthetic oligonucleotide
uagcgguacugagcuaggc

SEQ ID NO: 1690477 - RNA, 19 nt, Artificial Sequence
  Description of Artificial Sequence: Synthetic oligonucleotide
gccucggccauacucaaga

SEQ ID NO: 1690478 - RNA, 19 nt, Artificial Sequence
  Description of Artificial Sequence: Synthetic oligonucleotide
gguucaggccagcucucag

SEQ ID NO: 1690479 - RNA, 19 nt, Artificial Sequence
  Description of Artificial Sequence: Synthetic oligonucleotide
cucucaggcuccauuguua

SEQ ID NO: 1690480 - RNA, 19 nt, Artificial Sequence
  Description of Artificial Sequence: Synthetic oligonucleotide
guugucugaagggcagcac

SEQ ID NO: 1690481 - RNA, 19 nt, Artificial Sequence
  Description of Artificial Sequence: Synthetic oligonucleotide
aaggccccucucguagcag

SEQ ID NO: 1690482 - RNA, 19 nt, Artificial Sequence
  Description of Artificial Sequence: Synthetic oligonucleotide
cccucugccgcucaggguc

SEQ ID NO: 1690483 - RNA, 19 nt, Artificial Sequence
  Description of Artificial Sequence: Synthetic oligonucleotide
ccgaaacccagucucauga

SEQ ID NO: 1690484 - RNA, 19 nt, Artificial Sequence
  Description of Artificial Sequence: Synthetic oligonucleotide
gcaauaggcaccgagcaua

SEQ ID NO: 1690485 - RNA, 19 nt, Artificial Sequence
  Description of Artificial Sequence: Synthetic oligonucleotide
gaaguaagagaaggcugcu

SEQ ID NO: 1690486 - RNA, 19 nt, Artificial Sequence
  Description of Artificial Sequence: Synthetic oligonucleotide
cagccaaagguauuucacu

SEQ ID NO: 1690487 - RNA, 19 nt, Artificial Sequence
  Description of Artificial Sequence: Synthetic oligonucleotide
cauguuaaagaggguccga

SEQ ID NO: 1690488 - RNA, 19 nt, Artificial Sequence
  Description of Artificial Sequence: Synthetic oligonucleotide
uggacuugucuuguucauu

SEQ ID NO: 1690489 - RNA, 19 nt, Artificial Sequence
  Description of Artificial Sequence: Synthetic oligonucleotide
cuguagcuucggucugcgg

SEQ ID NO: 1690490 - RNA, 19 nt, Artificial Sequence
  Description of Artificial Sequence: Synthetic oligonucleotide
ggggaagucaggucuggga

SEQ ID NO: 1690491 - RNA, 19 nt, Artificial Sequence
  Description of Artificial Sequence: Synthetic oligonucleotide
ggucccuaggggugccucg

SEQ ID NO: 1690492 - RNA, 19 nt, Artificial Sequence
  Description of Artificial Sequence: Synthetic oligonucleotide
caacaggguguucaggcua

SEQ ID NO: 1690493 - RNA, 19 nt, Artificial Sequence
  Description of Artificial Sequence: Synthetic oligonucleotide
ccaagguucccagugcuug

SEQ ID NO: 1690494 - RNA, 19 nt, Artificial Sequence
  Description of Artificial Sequence: Synthetic oligonucleotide
ccugaggucccuaggggug

SEQ ID NO: 1690495 - RNA, 19 nt, Artificial Sequence
  Description of Artificial Sequence: Synthetic oligonucleotide
ggugccucggccauacuca

SEQ ID NO: 1690496 - RNA, 19 nt, Artificial Sequence
  Description of Artificial Sequence: Synthetic oligonucleotide
ucccuaggggugccucggc

SEQ ID NO: 1690497 - RNA, 19 nt, Artificial Sequence
  Description of Artificial Sequence: Synthetic oligonucleotide
acaugccucugaagugagg

SEQ ID NO: 1690498 - RNA, 19 nt, Artificial Sequence
  Description of Artificial Sequence: Synthetic oligonucleotide
caggguguucaggcuacag

SEQ ID NO: 1690499 - RNA, 19 nt, Artificial Sequence
  Description of Artificial Sequence: Synthetic oligonucleotide
ccuuggacuugucuuguuc

SEQ ID NO: 1690500 - RNA, 19 nt, Artificial Sequence
  Description of Artificial Sequence: Synthetic oligonucleotide
cauucuuggcugccagcca

SEQ ID NO: 1690501 - RNA, 19 nt, Artificial Sequence
  Description of Artificial Sequence: Synthetic oligonucleotide
gaguagcuaccuggccucc

SEQ ID NO: 1690502 - RNA, 19 nt, Artificial Sequence
  Description of Artificial Sequence: Synthetic oligonucleotide
uuauggugcuggggaggug

SEQ ID NO: 1690503 - RNA, 19 nt, Artificial Sequence
  Description of Artificial Sequence: Synthetic oligonucleotide
ucaaaguuacugggcucuu

SEQ ID NO: 1690504 - RNA, 19 nt, Artificial Sequence
  Description of Artificial Sequence: Synthetic oligonucleotide
uggggaggugcugaagguu

SEQ ID NO: 1690505 - RNA, 19 nt, Artificial Sequence
  Description of Artificial Sequence: Synthetic oligonucleotide
agccuuggacuugucuugu

SEQ ID NO: 1690506 - RNA, 19 nt, Artificial Sequence
  Description of Artificial Sequence: Synthetic oligonucleotide
gaacaccaaggccccucuc

SEQ ID NO: 1690507 - RNA, 19 nt, Artificial Sequence
  Description of Artificial Sequence: Synthetic oligonucleotide
ggacuugucuuguucauuu

SEQ ID NO: 1690508 - RNA, 19 nt, Artificial Sequence
  Description of Artificial Sequence: Synthetic oligonucleotide
cgagcauagcgguacugag

SEQ ID NO: 1690509 - RNA, 19 nt, Artificial Sequence
  Description of Artificial Sequence: Synthetic oligonucleotide
ccucucguagcagacuccc

SEQ ID NO: 1690510 - RNA, 19 nt, Artificial Sequence
  Description of Artificial Sequence: Synthetic oligonucleotide
ggccucaguugucuuugcc

SEQ ID NO: 1690511 - RNA, 19 nt, Artificial Sequence
  Description of Artificial Sequence: Synthetic oligonucleotide
agcuaggcuguggcccugg

SEQ ID NO: 1690512 - RNA, 19 nt, Artificial Sequence
  Description of Artificial Sequence: Synthetic oligonucleotide
ggaguggggaagucagguc

SEQ ID NO: 1690513 - RNA, 19 nt, Artificial Sequence
  Description of Artificial Sequence: Synthetic oligonucleotide
cuuugagaguccccauucu

SEQ ID NO: 1690514 - RNA, 19 nt, Artificial Sequence
  Description of Artificial Sequence: Synthetic oligonucleotide
cugacuguugguagcacuu

SEQ ID NO: 1690515 - RNA, 19 nt, Artificial Sequence
  Description of Artificial Sequence: Synthetic oligonucleotide
cauuuccaaggaugggaua

SEQ ID NO: 1690516 - RNA, 19 nt, Artificial Sequence
  Description of Artificial Sequence: Synthetic oligonucleotide
aguagcuaccuggccuccu

SEQ ID NO: 1690517 - RNA, 19 nt, Artificial Sequence
  Description of Artificial Sequence: Synthetic oligonucleotide
cuuagccgaaacccagucu

SEQ ID NO: 1690518 - RNA, 19 nt, Artificial Sequence
  Description of Artificial Sequence: Synthetic oligonucleotide
ucugaacaccaaggccccu

SEQ ID NO: 1690519 - RNA, 19 nt, Artificial Sequence
  Description of Artificial Sequence: Synthetic oligonucleotide
accgagcauagcgguacug

SEQ ID NO: 1690520 - RNA, 19 nt, Artificial Sequence
  Description of Artificial Sequence: Synthetic oligonucleotide
gccauacucaagacacaag

SEQ ID NO: 1690521 - RNA, 19 nt, Artificial Sequence
  Description of Artificial Sequence: Synthetic oligonucleotide
ggucugggaagaacaugcc

SEQ ID NO: 1690522 - RNA, 19 nt, Artificial Sequence
  Description of Artificial Sequence: Synthetic oligonucleotide
caaguggaaucugcuuuga

SEQ ID NO: 1690523 - RNA, 19 nt, Artificial Sequence
  Description of Artificial Sequence: Synthetic oligonucleotide
gccgaaacccagucucaug

SEQ ID NO: 1690524 - RNA, 19 nt, Artificial Sequence
  Description of Artificial Sequence: Synthetic oligonucleotide
cguagcagacucccaagug

SEQ ID NO: 1690525 - RNA, 19 nt, Artificial Sequence
  Description of Artificial Sequence: Synthetic oligonucleotide
gggagguucaggccagcuc

SEQ ID NO: 1690526 - RNA, 19 nt, Artificial Sequence
  Description of Artificial Sequence: Synthetic oligonucleotide
agccgaaacccagucucau

SEQ ID NO: 1690527 - RNA, 19 nt, Artificial Sequence
  Description of Artificial Sequence: Synthetic oligonucleotide
cucgcccagauuccucuga

SEQ ID NO: 1690528 - RNA, 19 nt, Artificial Sequence
  Description of Artificial Sequence: Synthetic oligonucleotide
gccgcucagggucugacaa

SEQ ID NO: 1690529 - RNA, 19 nt, Artificial Sequence
  Description of Artificial Sequence: Synthetic oligonucleotide
cugcugacuguugguagca

SEQ ID NO: 1690530 - RNA, 19 nt, Artificial Sequence
  Description of Artificial Sequence: Synthetic oligonucleotide
caaggccccucucguagca

SEQ ID NO: 1690531 - RNA, 19 nt, Artificial Sequence
  Description of Artificial Sequence: Synthetic oligonucleotide
ccaaagguauuucacugcu

SEQ ID NO: 1690532 - RNA, 19 nt, Artificial Sequence
  Description of Artificial Sequence: Synthetic oligonucleotide
agcaccccaaggaaagcuu

SEQ ID NO: 1690533 - RNA, 19 nt, Artificial Sequence
  Description of Artificial Sequence: Synthetic oligonucleotide
aggcacuugccaacagggu

SEQ ID NO: 1690534 - RNA, 19 nt, Artificial Sequence
  Description of Artificial Sequence: Synthetic oligonucleotide
agggagguucaggccagcu

SEQ ID NO: 1690535 - RNA, 19 nt, Artificial Sequence
  Description of Artificial Sequence: Synthetic oligonucleotide
gggaaucaaguuguaauau

SEQ ID NO: 1690536 - RNA, 19 nt, Artificial Sequence
  Description of Artificial Sequence: Synthetic oligonucleotide
acuugccaacaggguguuc

SEQ ID NO: 1690537 - RNA, 19 nt, Artificial Sequence
  Description of Artificial Sequence: Synthetic oligonucleotide
caggcuccauuguuaaggu

SEQ ID NO: 1690538 - RNA, 19 nt, Artificial Sequence
  Description of Artificial Sequence: Synthetic oligonucleotide
guccccauucuuggcugcc

SEQ ID NO: 1690539 - RNA, 19 nt, Artificial Sequence
  Description of Artificial Sequence: Synthetic oligonucleotide
cucucucaagccagagucu

SEQ ID NO: 1690540 - RNA, 19 nt, Artificial Sequence
  Description of Artificial Sequence: Synthetic oligonucleotide
ugguucccugaggccagug

SEQ ID NO: 1690541 - RNA, 19 nt, Artificial Sequence
  Description of Artificial Sequence: Synthetic oligonucleotide
gccuugguucccugaggcc

SEQ ID NO: 1690542 - RNA, 19 nt, Artificial Sequence
  Description of Artificial Sequence: Synthetic oligonucleotide
ggcugccaagugguaaaag

SEQ ID NO: 1690543 - RNA, 19 nt, Artificial Sequence
  Description of Artificial Sequence: Synthetic oligonucleotide
agccucgcccagauuccuc

SEQ ID NO: 1690544 - RNA, 19 nt, Artificial Sequence
  Description of Artificial Sequence: Synthetic oligonucleotide
cgaaacccagucucaugag

SEQ ID NO: 1690545 - RNA, 19 nt, Artificial Sequence
  Description of Artificial Sequence: Synthetic oligonucleotide
gacuugucuuguucauuuu

SEQ ID NO: 1690546 - RNA, 19 nt, Artificial Sequence
  Description of Artificial Sequence: Synthetic oligonucleotide
gccugggaugugaaguccc

SEQ ID NO: 1690547 - RNA, 19 nt, Artificial Sequence
  Description of Artificial Sequence: Synthetic oligonucleotide
caagcccacauuguacugu

SEQ ID NO: 1690548 - RNA, 19 nt, Artificial Sequence
  Description of Artificial Sequence: Synthetic oligonucleotide
ccaaggccccucucguagc

SEQ ID NO: 1690549 - RNA, 19 nt, Artificial Sequence
  Description of Artificial Sequence: Synthetic oligonucleotide
ggccugcuucagcauagac

SEQ ID NO: 1690550 - RNA, 19 nt, Artificial Sequence
  Description of Artificial Sequence: Synthetic oligonucleotide
gguguggcuccuugguaaa

SEQ ID NO: 1690551 - RNA, 19 nt, Artificial Sequence
  Description of Artificial Sequence: Synthetic oligonucleotide
cuuccauguuaaagagggu

SEQ ID NO: 1690552 - RNA, 19 nt, Artificial Sequence
  Description of Artificial Sequence: Synthetic oligonucleotide
gcugacuguugguagcacu

SEQ ID NO: 1690553 - RNA, 19 nt, Artificial Sequence
  Description of Artificial Sequence: Synthetic oligonucleotide
ccuccucuaggggaagagc

SEQ ID NO: 1690554 - RNA, 19 nt, Artificial Sequence
  Description of Artificial Sequence: Synthetic oligonucleotide
cgcucagggucugacaaag

SEQ ID NO: 1690555 - RNA, 19 nt, Artificial Sequence
  Description of Artificial Sequence: Synthetic oligonucleotide
auggcaacacugagcugaa

SEQ ID NO: 1690556 - RNA, 19 nt, Artificial Sequence
  Description of Artificial Sequence: Synthetic oligonucleotide
ccaguguaugugggagugg

SEQ ID NO: 1690557 - RNA, 19 nt, Artificial Sequence
  Description of Artificial Sequence: Synthetic oligonucleotide
agcagacucccaaguggaa

SEQ ID NO: 1690558 - RNA, 19 nt, Artificial Sequence
  Description of Artificial Sequence: Synthetic oligonucleotide
agauuccucugaacaccaa

SEQ ID NO: 1690559 - RNA, 19 nt, Artificial Sequence
  Description of Artificial Sequence: Synthetic oligonucleotide
gugccucggccauacucaa

SEQ ID NO: 1690560 - RNA, 19 nt, Artificial Sequence
  Description of Artificial Sequence: Synthetic oligonucleotide
cccucucguagcagacucc

SEQ ID NO: 1690561 - RNA, 19 nt, Artificial Sequence
  Description of Artificial Sequence: Synthetic oligonucleotide
gcacuugccaacagggugu

SEQ ID NO: 1690562 - RNA, 19 nt, Artificial Sequence
  Description of Artificial Sequence: Synthetic oligonucleotide
cauacaaaucugccuucuu

SEQ ID NO: 1690563 - RNA, 19 nt, Artificial Sequence
  Description of Artificial Sequence: Synthetic oligonucleotide
cagguguggcuccuuggua

SEQ ID NO: 1690564 - RNA, 19 nt, Artificial Sequence
  Description of Artificial Sequence: Synthetic oligonucleotide
cccuaggggugccucggcc

SEQ ID NO: 1690565 - RNA, 19 nt, Artificial Sequence
  Description of Artificial Sequence: Synthetic oligonucleotide
acaggguguucaggcuaca

SEQ ID NO: 1690566 - RNA, 19 nt, Artificial Sequence
  Description of Artificial Sequence: Synthetic oligonucleotide
cccagucucaugagauuca

SEQ ID NO: 1690567 - RNA, 19 nt, Artificial Sequence
  Description of Artificial Sequence: Synthetic oligonucleotide
ggcccgaggcacuugccaa

SEQ ID NO: 1690568 - RNA, 19 nt, Artificial Sequence
  Description of Artificial Sequence: Synthetic oligonucleotide
aggcaugagggaggcccga

SEQ ID NO: 1690569 - RNA, 19 nt, Artificial Sequence
  Description of Artificial Sequence: Synthetic oligonucleotide
agucugcggccugcuucag

SEQ ID NO: 1690570 - RNA, 19 nt, Artificial Sequence
  Description of Artificial Sequence: Synthetic oligonucleotide
ccucggccauacucaagac

SEQ ID NO: 1690571 - RNA, 19 nt, Artificial Sequence
  Description of Artificial Sequence: Synthetic oligonucleotide
gcccgaggcacuugccaac

SEQ ID NO: 1690572 - RNA, 19 nt, Artificial Sequence
  Description of Artificial Sequence: Synthetic oligonucleotide
aagccucucccgggccggu

SEQ ID NO: 1690573 - RNA, 19 nt, Artificial Sequence
  Description of Artificial Sequence: Synthetic oligonucleotide
cccgggccgguucauuccc

SEQ ID NO: 1690574 - RNA, 19 nt, Artificial Sequence
  Description of Artificial Sequence: Synthetic oligonucleotide
cccaaguggaaucugcuuu

SEQ ID NO: 1690575 - RNA, 19 nt, Artificial Sequence
  Description of Artificial Sequence: Synthetic oligonucleotide
agcuucggucugcggcuuu

SEQ ID NO: 1690576 - RNA, 19 nt, Artificial Sequence
  Description of Artificial Sequence: Synthetic oligonucleotide
ccgagcauagcgguacuga

SEQ ID NO: 1690577 - RNA, 19 nt, Artificial Sequence
  Description of Artificial Sequence: Synthetic oligonucleotide
uagcuucggucugcggcuu

SEQ ID NO: 1690578 - RNA, 19 nt, Artificial Sequence
  Description of Artificial Sequence: Synthetic oligonucleotide
ggguucuucuuggcccagc

SEQ ID NO: 1690579 - RNA, 19 nt, Artificial Sequence
  Description of Artificial Sequence: Synthetic oligonucleotide
gcugaaagaguugcuggau

SEQ ID NO: 1690580 - RNA, 19 nt, Artificial Sequence
  Description of Artificial Sequence: Synthetic oligonucleotide
gggaggugcugaagguuuc

SEQ ID NO: 1690581 - RNA, 19 nt, Artificial Sequence
  Description of Artificial Sequence: Synthetic oligonucleotide
caccaaggccccucucgua

SEQ ID NO: 1690582 - RNA, 19 nt, Artificial Sequence
  Description of Artificial Sequence: Synthetic oligonucleotide
gccucugaagugaggaagu

SEQ ID NO: 1690583 - RNA, 19 nt, Artificial Sequence
  Description of Artificial Sequence: Synthetic oligonucleotide
cugugcuuugcuguagcuu

SEQ ID NO: 1690584 - RNA, 19 nt, Artificial Sequence
  Description of Artificial Sequence: Synthetic oligonucleotide
guguggcuccuugguaaaa

SEQ ID NO: 1690585 - RNA, 19 nt, Artificial Sequence
  Description of Artificial Sequence: Synthetic oligonucleotide
gugcuggggaggugcugaa

SEQ ID NO: 1690586 - RNA, 19 nt, Artificial Sequence
  Description of Artificial Sequence: Synthetic oligonucleotide
gggccgguucauuccccac

SEQ ID NO: 1690587 - RNA, 19 nt, Artificial Sequence
  Description of Artificial Sequence: Synthetic oligonucleotide
gggcucccuggcuggcucc

SEQ ID NO: 1690588 - RNA, 19 nt, Artificial Sequence
  Description of Artificial Sequence: Synthetic oligonucleotide
gcagacucccaaguggaau

SEQ ID NO: 1690589 - RNA, 19 nt, Artificial Sequence
  Description of Artificial Sequence: Synthetic oligonucleotide
agggaggcccgaggcacuu

SEQ ID NO: 1690590 - RNA, 19 nt, Artificial Sequence
  Description of Artificial Sequence: Synthetic oligonucleotide
cuaggcuguggcccuggau

SEQ ID NO: 1690591 - RNA, 19 nt, Artificial Sequence
  Description of Artificial Sequence: Synthetic oligonucleotide
ccgaggcacuugccaacag

SEQ ID NO: 1690592 - RNA, 19 nt, Artificial Sequence
  Description of Artificial Sequence: Synthetic oligonucleotide
cugcuuugagaguccccau

SEQ ID NO: 1690593 - RNA, 19 nt, Artificial Sequence
  Description of Artificial Sequence: Synthetic oligonucleotide
ccauacaaaucugccuucu

SEQ ID NO: 1690594 - RNA, 19 nt, Artificial Sequence
  Description of Artificial Sequence: Synthetic oligonucleotide
ggucagguugaugggcccu

SEQ ID NO: 1690595 - RNA, 19 nt, Artificial Sequence
  Description of Artificial Sequence: Synthetic oligonucleotide
cgcccagauuccucugaac

SEQ ID NO: 1690596 - RNA, 19 nt, Artificial Sequence
  Description of Artificial Sequence: Synthetic oligonucleotide
ggucugcggcuuucuggaa

SEQ ID NO: 1690597 - RNA, 19 nt, Artificial Sequence
  Description of Artificial Sequence: Synthetic oligonucleotide
gcuaggcuguggcccugga

SEQ ID NO: 1690598 - RNA, 19 nt, Artificial Sequence
  Description of Artificial Sequence: Synthetic oligonucleotide
gcuaccuggccuccucuuu

SEQ ID NO: 1690599 - RNA, 19 nt, Artificial Sequence
  Description of Artificial Sequence: Synthetic oligonucleotide
cacugcccucugccgcuca

SEQ ID NO: 1690600 - RNA, 19 nt, Artificial Sequence
  Description of Artificial Sequence: Synthetic oligonucleotide
cugugucguucccugucuu

SEQ ID NO: 1690601 - RNA, 19 nt, Artificial Sequence
  Description of Artificial Sequence: Synthetic oligonucleotide
gguggaggucuuagccgaa

SEQ ID NO: 1690602 - RNA, 19 nt, Artificial Sequence
  Description of Artificial Sequence: Synthetic oligonucleotide
cuucggucugcggcuuucu

SEQ ID NO: 1690603 - RNA, 19 nt, Artificial Sequence
  Description of Artificial Sequence: Synthetic oligonucleotide
guccugucauggucagguu

SEQ ID NO: 1690604 - RNA, 19 nt, Artificial Sequence
  Description of Artificial Sequence: Synthetic oligonucleotide
gcauagcgguacugagcua

SEQ ID NO: 1690605 - RNA, 19 nt, Artificial Sequence
  Description of Artificial Sequence: Synthetic oligonucleotide
caccgagcauagcgguacu

SEQ ID NO: 1690606 - RNA, 19 nt, Artificial Sequence
  Description of Artificial Sequence: Synthetic oligonucleotide
cccgaggcacuugccaaca

SEQ ID NO: 1690607 - RNA, 19 nt, Artificial Sequence
  Description of Artificial Sequence: Synthetic oligonucleotide
gaggucccuaggggugccu

SEQ ID NO: 1690608 - RNA, 19 nt, Artificial Sequence
  Description of Artificial Sequence: Synthetic oligonucleotide
cggccauacucaagacaca

SEQ ID NO: 1690609 - RNA, 19 nt, Artificial Sequence
  Description of Artificial Sequence: Synthetic oligonucleotide
ccucucccgggccgguuca

SEQ ID NO: 1690610 - RNA, 19 nt, Artificial Sequence
  Description of Artificial Sequence: Synthetic oligonucleotide
cugcggcuuucuggaagua

SEQ ID NO: 1690611 - RNA, 19 nt, Artificial Sequence
  Description of Artificial Sequence: Synthetic oligonucleotide
agccucucccgggccgguu

SEQ ID NO: 1690612 - RNA, 19 nt, Artificial Sequence
  Description of Artificial Sequence: Synthetic oligonucleotide
cacuugccaacaggguguu

SEQ ID NO: 1690613 - RNA, 19 nt, Artificial Sequence
  Description of Artificial Sequence: Synthetic oligonucleotide
ccgcucagggucugacaaa

SEQ ID NO: 1690614 - RNA, 19 nt, Artificial Sequence
  Description of Artificial Sequence: Synthetic oligonucleotide
ccagucucaugagauucau

SEQ ID NO: 1690615 - RNA, 19 nt, Artificial Sequence
  Description of Artificial Sequence: Synthetic oligonucleotide
cccugaggccaguguaugu

SEQ ID NO: 1690616 - RNA, 19 nt, Artificial Sequence
  Description of Artificial Sequence: Synthetic oligonucleotide
cgggccgguucauucccca

SEQ ID NO: 1690617 - RNA, 19 nt, Artificial Sequence
  Description of Artificial Sequence: Synthetic oligonucleotide
cguucccugucuucauguu

SEQ ID NO: 1690618 - RNA, 19 nt, Artificial Sequence
  Description of Artificial Sequence: Synthetic oligonucleotide
cucucccgggccgguucau

SEQ ID NO: 1690619 - RNA, 19 nt, Artificial Sequence
  Description of Artificial Sequence: Synthetic oligonucleotide
uguuacuuguugcagaugg

SEQ ID NO: 1690620 - RNA, 19 nt, Artificial Sequence
  Description of Artificial Sequence: Synthetic oligonucleotide
aaaugauuugacuugagaa

SEQ ID NO: 1690621 - RNA, 19 nt, Artificial Sequence
  Description of Artificial Sequence: Synthetic oligonucleotide
uucugguuaauucagggag

SEQ ID NO: 1690622 - RNA, 19 nt, Artificial Sequence
  Description of Artificial Sequence: Synthetic oligonucleotide
uuugggugaauacaaaggc

SEQ ID NO: 1690623 - RNA, 19 nt, Artificial Sequence
  Description of Artificial Sequence: Synthetic oligonucleotide
agauggauauuugacaucc

SEQ ID NO: 1690624 - RNA, 19 nt, Artificial Sequence
  Description of Artificial Sequence: Synthetic oligonucleotide
uuuggcugcaucauaggcg

SEQ ID NO: 1690625 - RNA, 19 nt, Artificial Sequence
  Description of Artificial Sequence: Synthetic oligonucleotide
ucuucuguaagcucuagug

SEQ ID NO: 1690626 - RNA, 19 nt, Artificial Sequence
  Description of Artificial Sequence: Synthetic oligonucleotide
cuaaguagcacuuggcugc

SEQ ID NO: 1690627 - RNA, 19 nt, Artificial Sequence
  Description of Artificial Sequence: Synthetic oligonucleotide
ugucaguuggaucacagca

SEQ ID NO: 1690628 - RNA, 19 nt, Artificial Sequence
  Description of Artificial Sequence: Synthetic oligonucleotide
ugugaagcaagacaaggca

SEQ ID NO: 1690629 - RNA, 19 nt, Artificial Sequence
  Description of Artificial Sequence: Synthetic oligonucleotide
ugagguguagcuccgaagc

SEQ ID NO: 1690630 - RNA, 19 nt, Artificial Sequence
  Description of Artificial Sequence: Synthetic oligonucleotide
acugugaguggacucaagc

SEQ ID NO: 1690631 - RNA, 19 nt, Artificial Sequence
  Description of Artificial Sequence: Synthetic oligonucleotide
aguagauuccugcaugagg

SEQ ID NO: 1690632 - RNA, 19 nt, Artificial Sequence
  Description of Artificial Sequence: Synthetic oligonucleotide
cauuacaggagccacuugg

SEQ ID NO: 1690633 - RNA, 19 nt, Artificial Sequence
  Description of Artificial Sequence: Synthetic oligonucleotide
gaugugaagcaagacaagg

SEQ ID NO: 1690634 - RNA, 19 nt, Artificial Sequence
  Description of Artificial Sequence: Synthetic oligonucleotide
ucugagguugggaagguag

SEQ ID NO: 1690635 - RNA, 19 nt, Artificial Sequence
  Description of Artificial Sequence: Synthetic oligonucleotide
ucauacacuuuguggaugg

SEQ ID NO: 1690636 - RNA, 19 nt, Artificial Sequence
  Description of Artificial Sequence: Synthetic oligonucleotide
ucuguaagcucuagugugg

SEQ ID NO: 1690637 - RNA, 19 nt, Artificial Sequence
  Description of Artificial Sequence: Synthetic oligonucleotide
acacucaagguacugcgcc

SEQ ID NO: 1690638 - RNA, 19 nt, Artificial Sequence
  Description of Artificial Sequence: Synthetic oligonucleotide
uggauauuugacauccugc

SEQ ID NO: 1690639 - RNA, 19 nt, Artificial Sequence
  Description of Artificial Sequence: Synthetic oligonucleotide
uucuguaagcucuagugug

SEQ ID NO: 1690640 - RNA, 19 nt, Artificial Sequence
  Description of Artificial Sequence: Synthetic oligonucleotide
uccguugaagaucagggug

SEQ ID NO: 1690641 - RNA, 19 nt, Artificial Sequence
  Description of Artificial Sequence: Synthetic oligonucleotide
cuuuauacucucuggaaac

SEQ ID NO: 1690642 - RNA, 19 nt, Artificial Sequence
  Description of Artificial Sequence: Synthetic oligonucleotide
gguuaauucagggagagag

SEQ ID NO: 1690643 - RNA, 19 nt, Artificial Sequence
  Description of Artificial Sequence: Synthetic oligonucleotide
agcuacuggugccacagcc

SEQ ID NO: 1690644 - RNA, 19 nt, Artificial Sequence
  Description of Artificial Sequence: Synthetic oligonucleotide
acuuugggugaauacaaag

SEQ ID NO: 1690645 - RNA, 19 nt, Artificial Sequence
  Description of Artificial Sequence: Synthetic oligonucleotide
gaaagcagguaagaggccg

SEQ ID NO: 1690646 - RNA, 19 nt, Artificial Sequence
  Description of Artificial Sequence: Synthetic oligonucleotide
gucaugacagacaugaagc

SEQ ID NO: 1690647 - RNA, 19 nt, Artificial Sequence
  Description of Artificial Sequence: Synthetic oligonucleotide
gugugacacagcuuuaugg

SEQ ID NO: 1690648 - RNA, 19 nt, Artificial Sequence
  Description of Artificial Sequence: Synthetic oligonucleotide
agcacaucuggaaagggcc

SEQ ID NO: 1690649 - RNA, 19 nt, Artificial Sequence
  Description of Artificial Sequence: Synthetic oligonucleotide
uaagaggccgccuugacau

SEQ ID NO: 1690650 - RNA, 19 nt, Artificial Sequence
  Description of Artificial Sequence: Synthetic oligonucleotide
uaaggcuugagaaggcuug

SEQ ID NO: 1690651 - RNA, 19 nt, Artificial Sequence
  Description of Artificial Sequence: Synthetic oligonucleotide
acuugugugacacagcuuu

SEQ ID NO: 1690652 - RNA, 19 nt, Artificial Sequence
  Description of Artificial Sequence: Synthetic oligonucleotide
acagacuuugggugaauac

SEQ ID NO: 1690653 - RNA, 19 nt, Artificial Sequence
  Description of Artificial Sequence: Synthetic oligonucleotide
uauacucucuggaaacuca

SEQ ID NO: 1690654 - RNA, 19 nt, Artificial Sequence
  Description of Artificial Sequence: Synthetic oligonucleotide
guggacucaagcuucaccc

SEQ ID NO: 1690655 - RNA, 19 nt, Artificial Sequence
  Description of Artificial Sequence: Synthetic oligonucleotide
gauccuaggaaacacagcu

SEQ ID NO: 1690656 - RNA, 19 nt, Artificial Sequence
  Description of Artificial Sequence: Synthetic oligonucleotide
aacuuuggcugcaucauag

SEQ ID NO: 1690657 - RNA, 19 nt, Artificial Sequence
  Description of Artificial Sequence: Synthetic oligonucleotide
cauacugauccuaggaaac

SEQ ID NO: 1690658 - RNA, 19 nt, Artificial Sequence
  Description of Artificial Sequence: Synthetic oligonucleotide
uuacaggagccacuugggg

SEQ ID NO: 1690659 - RNA, 19 nt, Artificial Sequence
  Description of Artificial Sequence: Synthetic oligonucleotide
uccuaaguagcacuuggcu

SEQ ID NO: 1690660 - RNA, 19 nt, Artificial Sequence
  Description of Artificial Sequence: Synthetic oligonucleotide
cugacugagaagaaagcug

SEQ ID NO: 1690661 - RNA, 19 nt, Artificial Sequence
  Description of Artificial Sequence: Synthetic oligonucleotide
gaaaugauuugacuugaga

SEQ ID NO: 1690662 - RNA, 19 nt, Artificial Sequence
  Description of Artificial Sequence: Synthetic oligonucleotide
auggauauuugacauccug

SEQ ID NO: 1690663 - RNA, 19 nt, Artificial Sequence
  Description of Artificial Sequence: Synthetic oligonucleotide
aacggggucaucagggcgc

SEQ ID NO: 1690664 - RNA, 19 nt, Artificial Sequence
  Description of Artificial Sequence: Synthetic oligonucleotide
agcacuuggcugcaauagc

SEQ ID NO: 1690665 - RNA, 19 nt, Artificial Sequence
  Description of Artificial Sequence: Synthetic oligonucleotide
gauggaaagcagguaagag

SEQ ID NO: 1690666 - RNA, 19 nt, Artificial Sequence
  Description of Artificial Sequence: Synthetic oligonucleotide
ucagaacggggucaucagg

SEQ ID NO: 1690667 - RNA, 19 nt, Artificial Sequence
  Description of Artificial Sequence: Synthetic oligonucleotide
cugguuugcuccauuacag

SEQ ID NO: 1690668 - RNA, 19 nt, Artificial Sequence
  Description of Artificial Sequence: Synthetic oligonucleotide
aaggcuugagucgacgguc

SEQ ID NO: 1690669 - RNA, 19 nt, Artificial Sequence
  Description of Artificial Sequence: Synthetic oligonucleotide
cagaacggggucaucaggg

SEQ ID NO: 1690670 - RNA, 19 nt, Artificial Sequence
  Description of Artificial Sequence: Synthetic oligonucleotide
augugaagcaagacaaggc

SEQ ID NO: 1690671 - RNA, 19 nt, Artificial Sequence
  Description of Artificial Sequence: Synthetic oligonucleotide
ugcaauagcguaguggcca

SEQ ID NO: 1690672 - RNA, 19 nt, Artificial Sequence
  Description of Artificial Sequence: Synthetic oligonucleotide
guagcuccgaagcacagcc

SEQ ID NO: 1690673 - RNA, 19 nt, Artificial Sequence
  Description of Artificial Sequence: Synthetic oligonucleotide
ugacacagcuuuauggccu

SEQ ID NO: 1690674 - RNA, 19 nt, Artificial Sequence
  Description of Artificial Sequence: Synthetic oligonucleotide
ugggugaauacaaaggcuu

SEQ ID NO: 1690675 - RNA, 19 nt, Artificial Sequence
  Description of Artificial Sequence: Synthetic oligonucleotide
augauuugacuugagaagu

SEQ ID NO: 1690676 - RNA, 19 nt, Artificial Sequence
  Description of Artificial Sequence: Synthetic oligonucleotide
guuggcucagcauugccag

SEQ ID NO: 1690677 - RNA, 19 nt, Artificial Sequence
  Description of Artificial Sequence: Synthetic oligonucleotide
uugggugaauacaaaggcu

SEQ ID NO: 1690678 - RNA, 19 nt, Artificial Sequence
  Description of Artificial Sequence: Synthetic oligonucleotide
ucucucuggggacaccacg

SEQ ID NO: 1690679 - RNA, 19 nt, Artificial Sequence
  Description of Artificial Sequence: Synthetic oligonucleotide
ucugguuaauucagggaga

SEQ ID NO: 1690680 - RNA, 19 nt, Artificial Sequence
  Description of Artificial Sequence: Synthetic oligonucleotide
gcugcaauagcguaguggc

SEQ ID NO: 1690681 - RNA, 19 nt, Artificial Sequence
  Description of Artificial Sequence: Synthetic oligonucleotide
accacguaaggcuugagaa

SEQ ID NO: 1690682 - RNA, 19 nt, Artificial Sequence
  Description of Artificial Sequence: Synthetic oligonucleotide
caucauaggcggaaguggc

SEQ ID NO: 1690683 - RNA, 19 nt, Artificial Sequence
  Description of Artificial Sequence: Synthetic oligonucleotide
uguuggcucagcauugcca

SEQ ID NO: 1690684 - RNA, 19 nt, Artificial Sequence
  Description of Artificial Sequence: Synthetic oligonucleotide
gacacugugacccgaugug

SEQ ID NO: 1690685 - RNA, 19 nt, Artificial Sequence
  Description of Artificial Sequence: Synthetic oligonucleotide
agaaggcuugagucgacgg

SEQ ID NO: 1690686 - RNA, 19 nt, Artificial Sequence
  Description of Artificial Sequence: Synthetic oligonucleotide
aauagcguaguggccaucu

SEQ ID NO: 1690687 - RNA, 19 nt, Artificial Sequence
  Description of Artificial Sequence: Synthetic oligonucleotide
gagucgacggucuugguga

SEQ ID NO: 1690688 - RNA, 19 nt, Artificial Sequence
  Description of Artificial Sequence: Synthetic oligonucleotide
agaaagcugucacaacuug

SEQ ID NO: 1690689 - RNA, 19 nt, Artificial Sequence
  Description of Artificial Sequence: Synthetic oligonucleotide
agaacggggucaucagggc

SEQ ID NO: 1690690 - RNA, 19 nt, Artificial Sequence
  Description of Artificial Sequence: Synthetic oligonucleotide
ugaagggaguguuacuugu

SEQ ID NO: 1690691 - RNA, 19 nt, Artificial Sequence
  Description of Artificial Sequence: Synthetic oligonucleotide
acauacugauccuaggaaa

SEQ ID NO: 1690692 - RNA, 19 nt, Artificial Sequence
  Description of Artificial Sequence: Synthetic oligonucleotide
ugaguagauuccugcauga

SEQ ID NO: 1690693 - RNA, 19 nt, Artificial Sequence
  Description of Artificial Sequence: Synthetic oligonucleotide
uuguggauggaaagcaggu

SEQ ID NO: 1690694 - RNA, 19 nt, Artificial Sequence
  Description of Artificial Sequence: Synthetic oligonucleotide
ugguuugcuccauuacagg

SEQ ID NO: 1690695 - RNA, 19 nt, Artificial Sequence
  Description of Artificial Sequence: Synthetic oligonucleotide
agcugucacaacuugugug

SEQ ID NO: 1690696 - RNA, 19 nt, Artificial Sequence
  Description of Artificial Sequence: Synthetic oligonucleotide
ucucuguagaaaugauuug

SEQ ID NO: 1690697 - RNA, 19 nt, Artificial Sequence
  Description of Artificial Sequence: Synthetic oligonucleotide
ugugugacacagcuuuaug

SEQ ID NO: 1690698 - RNA, 19 nt, Artificial Sequence
  Description of Artificial Sequence: Synthetic oligonucleotide
ucgacggucuuggugaggg

SEQ ID NO: 1690699 - RNA, 19 nt, Artificial Sequence
  Description of Artificial Sequence: Synthetic oligonucleotide
agccacacacuauagccag

SEQ ID NO: 1690700 - RNA, 19 nt, Artificial Sequence
  Description of Artificial Sequence: Synthetic oligonucleotide
cuuggcugcaauagcguag

SEQ ID NO: 1690701 - RNA, 19 nt, Artificial Sequence
  Description of Artificial Sequence: Synthetic oligonucleotide
uguugcagauggauauuug

SEQ ID NO: 1690702 - RNA, 19 nt, Artificial Sequence
  Description of Artificial Sequence: Synthetic oligonucleotide
aguuccacagcuucauaca

SEQ ID NO: 1690703 - RNA, 19 nt, Artificial Sequence
  Description of Artificial Sequence: Synthetic oligonucleotide
ugauccuaggaaacacagc

SEQ ID NO: 1690704 - RNA, 19 nt, Artificial Sequence
  Description of Artificial Sequence: Synthetic oligonucleotide
acggcccacagccacacac

SEQ ID NO: 1690705 - RNA, 19 nt, Artificial Sequence
  Description of Artificial Sequence: Synthetic oligonucleotide
acagcuuuauggccucugg

SEQ ID NO: 1690706 - RNA, 19 nt, Artificial Sequence
  Description of Artificial Sequence: Synthetic oligonucleotide
ugacccgaugugaagcaag

SEQ ID NO: 1690707 - RNA, 19 nt, Artificial Sequence
  Description of Artificial Sequence: Synthetic oligonucleotide
aucagggcgcagccgagcc

SEQ ID NO: 1690708 - RNA, 19 nt, Artificial Sequence
  Description of Artificial Sequence: Synthetic oligonucleotide
gaacggggucaucagggcg

SEQ ID NO: 1690709 - RNA, 19 nt, Artificial Sequence
  Description of Artificial Sequence: Synthetic oligonucleotide
ugagcgaggcugcaucucc

SEQ ID NO: 1690710 - RNA, 19 nt, Artificial Sequence
  Description of Artificial Sequence: Synthetic oligonucleotide
aguguuacuuguugcagau

SEQ ID NO: 1690711 - RNA, 19 nt, Artificial Sequence
  Description of Artificial Sequence: Synthetic oligonucleotide
ugacagacaugaagcagca

SEQ ID NO: 1690712 - RNA, 19 nt, Artificial Sequence
  Description of Artificial Sequence: Synthetic oligonucleotide
uucagaacggggucaucag

SEQ ID NO: 1690713 - RNA, 19 nt, Artificial Sequence
  Description of Artificial Sequence: Synthetic oligonucleotide
cugaguagauuccugcaug

SEQ ID NO: 1690714 - RNA, 19 nt, Artificial Sequence
  Description of Artificial Sequence: Synthetic oligonucleotide
augagggugaaguucccug

SEQ ID NO: 1690715 - RNA, 19 nt, Artificial Sequence
  Description of Artificial Sequence: Synthetic oligonucleotide
aggccuuuauacucucugg

SEQ ID NO: 1690716 - RNA, 19 nt, Artificial Sequence
  Description of Artificial Sequence: Synthetic oligonucleotide
gaaguggcuccuaaguagc

SEQ ID NO: 1690717 - RNA, 19 nt, Artificial Sequence
  Description of Artificial Sequence: Synthetic oligonucleotide
uuuauacucucuggaaacu

SEQ ID NO: 1690718 - RNA, 19 nt, Artificial Sequence
  Description of Artificial Sequence: Synthetic oligonucleotide
guugcagauggauauuuga

SEQ ID NO: 1690719 - RNA, 19 nt, Artificial Sequence
  Description of Artificial Sequence: Synthetic oligonucleotide
gacauacugauccuaggaa

SEQ ID NO: 1690720 - RNA, 19 nt, Artificial Sequence
  Description of Artificial Sequence: Synthetic oligonucleotide
uagcacuuggcugcaauag

SEQ ID NO: 1690721 - RNA, 19 nt, Artificial Sequence
  Description of Artificial Sequence: Synthetic oligonucleotide
auuacaggagccacuuggg

SEQ ID NO: 1690722 - RNA, 19 nt, Artificial Sequence
  Description of Artificial Sequence: Synthetic oligonucleotide
ggauauuugacauccugca

SEQ ID NO: 1690723 - RNA, 19 nt, Artificial Sequence
  Description of Artificial Sequence: Synthetic oligonucleotide
gucacaacuugugugacac

SEQ ID NO: 1690724 - RNA, 19 nt, Artificial Sequence
  Description of Artificial Sequence: Synthetic oligonucleotide
uugggaagguagcugcucu

SEQ ID NO: 1690725 - RNA, 19 nt, Artificial Sequence
  Description of Artificial Sequence: Synthetic oligonucleotide
guaguucaugugugcaggg

SEQ ID NO: 1690726 - RNA, 19 nt, Artificial Sequence
  Description of Artificial Sequence: Synthetic oligonucleotide
gugacacagcuuuauggcc

SEQ ID NO: 1690727 - RNA, 19 nt, Artificial Sequence
  Description of Artificial Sequence: Synthetic oligonucleotide
uucauacacuuuguggaug

SEQ ID NO: 1690728 - RNA, 19 nt, Artificial Sequence
  Description of Artificial Sequence: Synthetic oligonucleotide
agguacagguccuucagaa

SEQ ID NO: 1690729 - RNA, 19 nt, Artificial Sequence
  Description of Artificial Sequence: Synthetic oligonucleotide
agguguagcuccgaagcac

SEQ ID NO: 1690730 - RNA, 19 nt, Artificial Sequence
  Description of Artificial Sequence: Synthetic oligonucleotide
gaaacucagcuauucucuc

SEQ ID NO: 1690731 - RNA, 19 nt, Artificial Sequence
  Description of Artificial Sequence: Synthetic oligonucleotide
cucacuuucuccugcuaug

SEQ ID NO: 1690732 - RNA, 19 nt, Artificial Sequence
  Description of Artificial Sequence: Synthetic oligonucleotide
uagcguaguggccaucucu

SEQ ID NO: 1690733 - RNA, 19 nt, Artificial Sequence
  Description of Artificial Sequence: Synthetic oligonucleotide
uguuuccuggcugggauca

SEQ ID NO: 1690734 - RNA, 19 nt, Artificial Sequence
  Description of Artificial Sequence: Synthetic oligonucleotide
gguaguucaugugugcagg

SEQ ID NO: 1690735 - RNA, 19 nt, Artificial Sequence
  Description of Artificial Sequence: Synthetic oligonucleotide
agcuuuauggccucuggua

SEQ ID NO: 1690736 - RNA, 19 nt, Artificial Sequence
  Description of Artificial Sequence: Synthetic oligonucleotide
ugugacccgaugugaagca

SEQ ID NO: 1690737 - RNA, 19 nt, Artificial Sequence
  Description of Artificial Sequence: Synthetic oligonucleotide
gaucacagcaucuuuccgu

SEQ ID NO: 1690738 - RNA, 19 nt, Artificial Sequence
  Description of Artificial Sequence: Synthetic oligonucleotide
uacuuguugcagauggaua

SEQ ID NO: 1690739 - RNA, 19 nt, Artificial Sequence
  Description of Artificial Sequence: Synthetic oligonucleotide
uucugagcgaggcugcauc

SEQ ID NO: 1690740 - RNA, 19 nt, Artificial Sequence
  Description of Artificial Sequence: Synthetic oligonucleotide
gaguguuacuuguugcaga

SEQ ID NO: 1690741 - RNA, 19 nt, Artificial Sequence
  Description of Artificial Sequence: Synthetic oligonucleotide
uuauacucucuggaaacuc

SEQ ID NO: 1690742 - RNA, 19 nt, Artificial Sequence
  Description of Artificial Sequence: Synthetic oligonucleotide
cugguuaauucagggagag

SEQ ID NO: 1690743 - RNA, 19 nt, Artificial Sequence
  Description of Artificial Sequence: Synthetic oligonucleotide
uguaagcucuaguguggcc

SEQ ID NO: 1690744 - RNA, 19 nt, Artificial Sequence
  Description of Artificial Sequence: Synthetic oligonucleotide
cuccuaaguagcacuuggc

SEQ ID NO: 1690745 - RNA, 19 nt, Artificial Sequence
  Description of Artificial Sequence: Synthetic oligonucleotide
gcuccuaaguagcacuugg

SEQ ID NO: 1690746 - RNA, 19 nt, Artificial Sequence
  Description of Artificial Sequence: Synthetic oligonucleotide
agcucuaguguggccauac

SEQ ID NO: 1690747 - RNA, 19 nt, Artificial Sequence
  Description of Artificial Sequence: Synthetic oligonucleotide
guguccacacucaagguac

SEQ ID NO: 1690748 - RNA, 19 nt, Artificial Sequence
  Description of Artificial Sequence: Synthetic oligonucleotide
uuccguugaagaucagggu

SEQ ID NO: 1690749 - RNA, 19 nt, Artificial Sequence
  Description of Artificial Sequence: Synthetic oligonucleotide
cagaacuuuggcugcauca

SEQ ID NO: 1690750 - RNA, 19 nt, Artificial Sequence
  Description of Artificial Sequence: Synthetic oligonucleotide
caagacaaggcagcacucc

SEQ ID NO: 1690751 - RNA, 19 nt, Artificial Sequence
  Description of Artificial Sequence: Synthetic oligonucleotide
cuacuggugccacagccac

SEQ ID NO: 1690752 - RNA, 19 nt, Artificial Sequence
  Description of Artificial Sequence: Synthetic oligonucleotide
ugucacaacuugugugaca

SEQ ID NO: 1690753 - RNA, 19 nt, Artificial Sequence
  Description of Artificial Sequence: Synthetic oligonucleotide
gagaaggcuugagucgacg

SEQ ID NO: 1690754 - RNA, 19 nt, Artificial Sequence
  Description of Artificial Sequence: Synthetic oligonucleotide
ccuaaguagcacuuggcug

SEQ ID NO: 1690755 - RNA, 19 nt, Artificial Sequence
  Description of Artificial Sequence: Synthetic oligonucleotide
aucacagcaucuuuccguu

SEQ ID NO: 1690756 - RNA, 19 nt, Artificial Sequence
  Description of Artificial Sequence: Synthetic oligonucleotide
cugagguguagcuccgaag

SEQ ID NO: 1690757 - RNA, 19 nt, Artificial Sequence
  Description of Artificial Sequence: Synthetic oligonucleotide
cacacucaagguacugcgc

SEQ ID NO: 1690758 - RNA, 19 nt, Artificial Sequence
  Description of Artificial Sequence: Synthetic oligonucleotide
uggugccacagccacgaga

SEQ ID NO: 1690759 - RNA, 19 nt, Artificial Sequence
  Description of Artificial Sequence: Synthetic oligonucleotide
cauaggcggaaguggcucc

SEQ ID NO: 1690760 - RNA, 19 nt, Artificial Sequence
  Description of Artificial Sequence: Synthetic oligonucleotide
ggaaccccagcucagguac

SEQ ID NO: 1690761 - RNA, 19 nt, Artificial Sequence
  Description of Artificial Sequence: Synthetic oligonucleotide
ucauaggcggaaguggcuc

SEQ ID NO: 1690762 - RNA, 19 nt, Artificial Sequence
  Description of Artificial Sequence: Synthetic oligonucleotide
agauuccugcaugagggug

SEQ ID NO: 1690763 - RNA, 19 nt, Artificial Sequence
  Description of Artificial Sequence: Synthetic oligonucleotide
ugagguugggaagguagcu

SEQ ID NO: 1690764 - RNA, 19 nt, Artificial Sequence
  Description of Artificial Sequence: Synthetic oligonucleotide
aguagcacuuggcugcaau

SEQ ID NO: 1690765 - RNA, 19 nt, Artificial Sequence
  Description of Artificial Sequence: Synthetic oligonucleotide
ucugagcgaggcugcaucu

SEQ ID NO: 1690766 - RNA, 19 nt, Artificial Sequence
  Description of Artificial Sequence: Synthetic oligonucleotide
cuauagccagcuacuggug

SEQ ID NO: 1690767 - RNA, 19 nt, Artificial Sequence
  Description of Artificial Sequence: Synthetic oligonucleotide
gaguagauuccugcaugag

SEQ ID NO: 1690768 - RNA, 19 nt, Artificial Sequence
  Description of Artificial Sequence: Synthetic oligonucleotide
guucacggcaccaggacac

SEQ ID NO: 1690769 - RNA, 19 nt, Artificial Sequence
  Description of Artificial Sequence: Synthetic oligonucleotide
cagacuuugggugaauaca

SEQ ID NO: 1690770 - RNA, 19 nt, Artificial Sequence
  Description of Artificial Sequence: Synthetic oligonucleotide
ccacacucaagguacugcg

SEQ ID NO: 1690771 - RNA, 19 nt, Artificial Sequence
  Description of Artificial Sequence: Synthetic oligonucleotide
uccauuacaggagccacuu

SEQ ID NO: 1690772 - RNA, 19 nt, Artificial Sequence
  Description of Artificial Sequence: Synthetic oligonucleotide
agacuuugggugaauacaa

SEQ ID NO: 1690773 - RNA, 19 nt, Artificial Sequence
  Description of Artificial Sequence: Synthetic oligonucleotide
agggccaggccuuuauacu

SEQ ID NO: 1690774 - RNA, 19 nt, Artificial Sequence
  Description of Artificial Sequence: Synthetic oligonucleotide
ucaugugugcagggucugg

SEQ ID NO: 1690775 - RNA, 19 nt, Artificial Sequence
  Description of Artificial Sequence: Synthetic oligonucleotide
auagcguaguggccaucuc

SEQ ID NO: 1690776 - RNA, 19 nt, Artificial Sequence
  Description of Artificial Sequence: Synthetic oligonucleotide
ggcugcaauagcguagugg

SEQ ID NO: 1690777 - RNA, 19 nt, Artificial Sequence
  Description of Artificial Sequence: Synthetic oligonucleotide
cagauggauauuugacauc

SEQ ID NO: 1690778 - RNA, 19 nt, Artificial Sequence
  Description of Artificial Sequence: Synthetic oligonucleotide
guaagaggccgccuugaca

SEQ ID NO: 1690779 - RNA, 19 nt, Artificial Sequence
  Description of Artificial Sequence: Synthetic oligonucleotide
cugcaauagcguaguggcc

SEQ ID NO: 1690780 - RNA, 19 nt, Artificial Sequence
  Description of Artificial Sequence: Synthetic oligonucleotide
uagauuccugcaugagggu

SEQ ID NO: 1690781 - RNA, 19 nt, Artificial Sequence
  Description of Artificial Sequence: Synthetic oligonucleotide
guuaauucagggagagaga

SEQ ID NO: 1690782 - RNA, 19 nt, Artificial Sequence
  Description of Artificial Sequence: Synthetic oligonucleotide
aaccccagcucagguacag

SEQ ID NO: 1690783 - RNA, 19 nt, Artificial Sequence
  Description of Artificial Sequence: Synthetic oligonucleotide
ggaucacagcaucuuuccg

SEQ ID NO: 1690784 - RNA, 19 nt, Artificial Sequence
  Description of Artificial Sequence: Synthetic oligonucleotide
uuuauggccucugguaguu

SEQ ID NO: 1690785 - RNA, 19 nt, Artificial Sequence
  Description of Artificial Sequence: Synthetic oligonucleotide
cuguucugagcgaggcugc

SEQ ID NO: 1690786 - RNA, 19 nt, Artificial Sequence
  Description of Artificial Sequence: Synthetic oligonucleotide
cacagcaucuuuccguuga

SEQ ID NO: 1690787 - RNA, 19 nt, Artificial Sequence
  Description of Artificial Sequence: Synthetic oligonucleotide
ucccugagguguagcuccg

SEQ ID NO: 1690788 - RNA, 19 nt, Artificial Sequence
  Description of Artificial Sequence: Synthetic oligonucleotide
cuguaagcucuaguguggc

SEQ ID NO: 1690789 - RNA, 19 nt, Artificial Sequence
  Description of Artificial Sequence: Synthetic oligonucleotide
uuguugcagauggauauuu

SEQ ID NO: 1690790 - RNA, 19 nt, Artificial Sequence
  Description of Artificial Sequence: Synthetic oligonucleotide
gugaguggacucaagcuuc

SEQ ID NO: 1690791 - RNA, 19 nt, Artificial Sequence
  Description of Artificial Sequence: Synthetic oligonucleotide
gacacagcuuuauggccuc

SEQ ID NO: 1690792 - RNA, 19 nt, Artificial Sequence
  Description of Artificial Sequence: Synthetic oligonucleotide
aaggcuugagaaggcuuga

SEQ ID NO: 1690793 - RNA, 19 nt, Artificial Sequence
  Description of Artificial Sequence: Synthetic oligonucleotide
caacuugugugacacagcu

SEQ ID NO: 1690794 - RNA, 19 nt, Artificial Sequence
  Description of Artificial Sequence: Synthetic oligonucleotide
ggaguguuacuuguugcag

SEQ ID NO: 1690795 - RNA, 19 nt, Artificial Sequence
  Description of Artificial Sequence: Synthetic oligonucleotide
uguccacacucaagguacu

SEQ ID NO: 1690796 - RNA, 19 nt, Artificial Sequence
  Description of Artificial Sequence: Synthetic oligonucleotide
gagguguagcuccgaagca

SEQ ID NO: 1690797 - RNA, 19 nt, Artificial Sequence
  Description of Artificial Sequence: Synthetic oligonucleotide
ugcaaggcggcccgacacu

SEQ ID NO: 1690798 - RNA, 19 nt, Artificial Sequence
  Description of Artificial Sequence: Synthetic oligonucleotide
uaguucaugugugcagggu

SEQ ID NO: 1690799 - RNA, 19 nt, Artificial Sequence
  Description of Artificial Sequence: Synthetic oligonucleotide
agccuuggcaacugcaaua

SEQ ID NO: 1690800 - RNA, 19 nt, Artificial Sequence
  Description of Artificial Sequence: Synthetic oligonucleotide
cugcaucucaggguucacg

SEQ ID NO: 1690801 - RNA, 19 nt, Artificial Sequence
  Description of Artificial Sequence: Synthetic oligonucleotide
uguggauggaaagcaggua

SEQ ID NO: 1690802 - RNA, 19 nt, Artificial Sequence
  Description of Artificial Sequence: Synthetic oligonucleotide
uaaguagcacuuggcugca

SEQ ID NO: 1690803 - RNA, 19 nt, Artificial Sequence
  Description of Artificial Sequence: Synthetic oligonucleotide
uucaugugugcagggucug

SEQ ID NO: 1690804 - RNA, 19 nt, Artificial Sequence
  Description of Artificial Sequence: Synthetic oligonucleotide
aguuggaucacagcaucuu

SEQ ID NO: 1690805 - RNA, 19 nt, Artificial Sequence
  Description of Artificial Sequence: Synthetic oligonucleotide
augugugcagggucuggca

SEQ ID NO: 1690806 - RNA, 19 nt, Artificial Sequence
  Description of Artificial Sequence: Synthetic oligonucleotide
cacaucuggaaagggccag

SEQ ID NO: 1690807 - RNA, 19 nt, Artificial Sequence
  Description of Artificial Sequence: Synthetic oligonucleotide
agacaaggcagcacuccag

SEQ ID NO: 1690808 - RNA, 19 nt, Artificial Sequence
  Description of Artificial Sequence: Synthetic oligonucleotide
uccugcuauggaagccagc

SEQ ID NO: 1690809 - RNA, 19 nt, Artificial Sequence
  Description of Artificial Sequence: Synthetic oligonucleotide
gggaguguuacuuguugca

SEQ ID NO: 1690810 - RNA, 19 nt, Artificial Sequence
  Description of Artificial Sequence: Synthetic oligonucleotide
gaaggcuugagucgacggu

SEQ ID NO: 1690811 - RNA, 19 nt, Artificial Sequence
  Description of Artificial Sequence: Synthetic oligonucleotide
cuguuggcucagcauugcc

SEQ ID NO: 1690812 - RNA, 19 nt, Artificial Sequence
  Description of Artificial Sequence: Synthetic oligonucleotide
uggggacaccacguaaggc

SEQ ID NO: 1690813 - RNA, 19 nt, Artificial Sequence
  Description of Artificial Sequence: Synthetic oligonucleotide
ucacagcaucuuuccguug

SEQ ID NO: 1690814 - RNA, 19 nt, Artificial Sequence
  Description of Artificial Sequence: Synthetic oligonucleotide
cuguagaaaugauuugacu

SEQ ID NO: 1690815 - RNA, 19 nt, Artificial Sequence
  Description of Artificial Sequence: Synthetic oligonucleotide
gggcugaguagauuccugc

SEQ ID NO: 1690816 - RNA, 19 nt, Artificial Sequence
  Description of Artificial Sequence: Synthetic oligonucleotide
ggccuuuauacucucugga

SEQ ID NO: 1690817 - RNA, 19 nt, Artificial Sequence
  Description of Artificial Sequence: Synthetic oligonucleotide
agucgacggucuuggugag

SEQ ID NO: 1690818 - RNA, 19 nt, Artificial Sequence
  Description of Artificial Sequence: Synthetic oligonucleotide
gacucaagcuucacccuca

SEQ ID NO: 1690819 - RNA, 19 nt, Artificial Sequence
  Description of Artificial Sequence: Synthetic oligonucleotide
acccgaugugaagcaagac

SEQ ID NO: 1690820 - RNA, 19 nt, Artificial Sequence
  Description of Artificial Sequence: Synthetic oligonucleotide
ccacguaaggcuugagaag

SEQ ID NO: 1690821 - RNA, 19 nt, Artificial Sequence
  Description of Artificial Sequence: Synthetic oligonucleotide
gaacuuuggcugcaucaua

SEQ ID NO: 1690822 - RNA, 19 nt, Artificial Sequence
  Description of Artificial Sequence: Synthetic oligonucleotide
cuaguguggccauacuucu

SEQ ID NO: 1690823 - RNA, 19 nt, Artificial Sequence
  Description of Artificial Sequence: Synthetic oligonucleotide
cagguaagaggccgccuug

SEQ ID NO: 1690824 - RNA, 19 nt, Artificial Sequence
  Description of Artificial Sequence: Synthetic oligonucleotide
uggaaccccagcucaggua

SEQ ID NO: 1690825 - RNA, 19 nt, Artificial Sequence
  Description of Artificial Sequence: Synthetic oligonucleotide
ucuuuccguugaagaucag

SEQ ID NO: 1690826 - RNA, 19 nt, Artificial Sequence
  Description of Artificial Sequence: Synthetic oligonucleotide
ccaggcaggauccacugug

SEQ ID NO: 1690827 - RNA, 19 nt, Artificial Sequence
  Description of Artificial Sequence: Synthetic oligonucleotide
cugugaguggacucaagcu

SEQ ID NO: 1690828 - RNA, 19 nt, Artificial Sequence
  Description of Artificial Sequence: Synthetic oligonucleotide
ugguuaauucagggagaga

SEQ ID NO: 1690829 - RNA, 19 nt, Artificial Sequence
  Description of Artificial Sequence: Synthetic oligonucleotide
gacagacaugaagcagcag

SEQ ID NO: 1690830 - RNA, 19 nt, Artificial Sequence
  Description of Artificial Sequence: Synthetic oligonucleotide
uguucugagcgaggcugca

SEQ ID NO: 1690831 - RNA, 19 nt, Artificial Sequence
  Description of Artificial Sequence: Synthetic oligonucleotide
aaguggcuccuaaguagca

SEQ ID NO: 1690832 - RNA, 19 nt, Artificial Sequence
  Description of Artificial Sequence: Synthetic oligonucleotide
ggaaacucagcuauucucu

SEQ ID NO: 1690833 - RNA, 19 nt, Artificial Sequence
  Description of Artificial Sequence: Synthetic oligonucleotide
gacccgaugugaagcaaga

SEQ ID NO: 1690834 - RNA, 19 nt, Artificial Sequence
  Description of Artificial Sequence: Synthetic oligonucleotide
cacugugaguggacucaag

SEQ ID NO: 1690835 - RNA, 19 nt, Artificial Sequence
  Description of Artificial Sequence: Synthetic oligonucleotide
caccacguaaggcuugaga

SEQ ID NO: 1690836 - RNA, 19 nt, Artificial Sequence
  Description of Artificial Sequence: Synthetic oligonucleotide
ccuuuauacucucuggaaa

SEQ ID NO: 1690837 - RNA, 19 nt, Artificial Sequence
  Description of Artificial Sequence: Synthetic oligonucleotide
cugguaguucaugugugca

SEQ ID NO: 1690838 - RNA, 19 nt, Artificial Sequence
  Description of Artificial Sequence: Synthetic oligonucleotide
auugccagggucaggucau

SEQ ID NO: 1690839 - RNA, 19 nt, Artificial Sequence
  Description of Artificial Sequence: Synthetic oligonucleotide
cugucacaacuugugugac

SEQ ID NO: 1690840 - RNA, 19 nt, Artificial Sequence
  Description of Artificial Sequence: Synthetic oligonucleotide
ggacucaagcuucacccuc

SEQ ID NO: 1690841 - RNA, 19 nt, Artificial Sequence
  Description of Artificial Sequence: Synthetic oligonucleotide
uagccagcuacuggugcca

SEQ ID NO: 1690842 - RNA, 19 nt, Artificial Sequence
  Description of Artificial Sequence: Synthetic oligonucleotide
guuacuuguugcagaugga

SEQ ID NO: 1690843 - RNA, 19 nt, Artificial Sequence
  Description of Artificial Sequence: Synthetic oligonucleotide
caagguacugcgccacaca

SEQ ID NO: 1690844 - RNA, 19 nt, Artificial Sequence
  Description of Artificial Sequence: Synthetic oligonucleotide
guagcacuuggcugcaaua

SEQ ID NO: 1690845 - RNA, 19 nt, Artificial Sequence
  Description of Artificial Sequence: Synthetic oligonucleotide
gcuauucucucauuugccu

SEQ ID NO: 1690846 - RNA, 19 nt, Artificial Sequence
  Description of Artificial Sequence: Synthetic oligonucleotide
aggauccacugugagugga

SEQ ID NO: 1690847 - RNA, 19 nt, Artificial Sequence
  Description of Artificial Sequence: Synthetic oligonucleotide
guugggaagguagcugcuc

SEQ ID NO: 1690848 - RNA, 19 nt, Artificial Sequence
  Description of Artificial Sequence: Synthetic oligonucleotide
cuccgggguguccacacuc

SEQ ID NO: 1690849 - RNA, 19 nt, Artificial Sequence
  Description of Artificial Sequence: Synthetic oligonucleotide
uagcuccgaagcacagccu

SEQ ID NO: 1690850 - RNA, 19 nt, Artificial Sequence
  Description of Artificial Sequence: Synthetic oligonucleotide
cacucaagguacugcgcca

SEQ ID NO: 1690851 - RNA, 19 nt, Artificial Sequence
  Description of Artificial Sequence: Synthetic oligonucleotide
cccgaugugaagcaagaca

SEQ ID NO: 1690852 - RNA, 19 nt, Artificial Sequence
  Description of Artificial Sequence: Synthetic oligonucleotide
aggcuugagaaggcuugag

SEQ ID NO: 1690853 - RNA, 19 nt, Artificial Sequence
  Description of Artificial Sequence: Synthetic oligonucleotide
cuuuauggccucugguagu

SEQ ID NO: 1690854 - RNA, 19 nt, Artificial Sequence
  Description of Artificial Sequence: Synthetic oligonucleotide
gacuuugggugaauacaaa

SEQ ID NO: 1690855 - RNA, 19 nt, Artificial Sequence
  Description of Artificial Sequence: Synthetic oligonucleotide
agguaagaggccgccuuga

SEQ ID NO: 1690856 - RNA, 19 nt, Artificial Sequence
  Description of Artificial Sequence: Synthetic oligonucleotide
cagcaucuuuccguugaag

SEQ ID NO: 1690857 - RNA, 19 nt, Artificial Sequence
  Description of Artificial Sequence: Synthetic oligonucleotide
uccuucagaacggggucau

SEQ ID NO: 1690858 - RNA, 19 nt, Artificial Sequence
  Description of Artificial Sequence: Synthetic oligonucleotide
ggcugaguagauuccugca

SEQ ID NO: 1690859 - RNA, 19 nt, Artificial Sequence
  Description of Artificial Sequence: Synthetic oligonucleotide
gacaccacguaaggcuuga

SEQ ID NO: 1690860 - RNA, 19 nt, Artificial Sequence
  Description of Artificial Sequence: Synthetic oligonucleotide
cagugcuggcacagccucc

SEQ ID NO: 1690861 - RNA, 19 nt, Artificial Sequence
  Description of Artificial Sequence: Synthetic oligonucleotide
gccuuuauacucucuggaa

SEQ ID NO: 1690862 - RNA, 19 nt, Artificial Sequence
  Description of Artificial Sequence: Synthetic oligonucleotide
aacuugugugacacagcuu

SEQ ID NO: 1690863 - RNA, 19 nt, Artificial Sequence
  Description of Artificial Sequence: Synthetic oligonucleotide
cacagcuuuauggccucug

SEQ ID NO: 1690864 - RNA, 19 nt, Artificial Sequence
  Description of Artificial Sequence: Synthetic oligonucleotide
ccagcuacuggugccacag

SEQ ID NO: 1690865 - RNA, 19 nt, Artificial Sequence
  Description of Artificial Sequence: Synthetic oligonucleotide
guucaugugugcagggucu

SEQ ID NO: 1690866 - RNA, 19 nt, Artificial Sequence
  Description of Artificial Sequence: Synthetic oligonucleotide
ugugagucuucugguuaau

SEQ ID NO: 1690867 - RNA, 19 nt, Artificial Sequence
  Description of Artificial Sequence: Synthetic oligonucleotide
gaaagggccaggccuuuau

SEQ ID NO: 1690868 - RNA, 19 nt, Artificial Sequence
  Description of Artificial Sequence: Synthetic oligonucleotide
ggcggaaguggcuccuaag

SEQ ID NO: 1690869 - RNA, 19 nt, Artificial Sequence
  Description of Artificial Sequence: Synthetic oligonucleotide
gacggucuuggugagggcu

SEQ ID NO: 1690870 - RNA, 19 nt, Artificial Sequence
  Description of Artificial Sequence: Synthetic oligonucleotide
guguuacuuguugcagaug

SEQ ID NO: 1690871 - RNA, 19 nt, Artificial Sequence
  Description of Artificial Sequence: Synthetic oligonucleotide
auaggcggaaguggcuccu

SEQ ID NO: 1690872 - RNA, 19 nt, Artificial Sequence
  Description of Artificial Sequence: Synthetic oligonucleotide
ggcugguuugcuccauuac

SEQ ID NO: 1690873 - RNA, 19 nt, Artificial Sequence
  Description of Artificial Sequence: Synthetic oligonucleotide
guuggaucacagcaucuuu

SEQ ID NO: 1690874 - RNA, 19 nt, Artificial Sequence
  Description of Artificial Sequence: Synthetic oligonucleotide
ggguucacggcaccaggac

SEQ ID NO: 1690875 - RNA, 19 nt, Artificial Sequence
  Description of Artificial Sequence: Synthetic oligonucleotide
uugagucgacggucuuggu

SEQ ID NO: 1690876 - RNA, 19 nt, Artificial Sequence
  Description of Artificial Sequence: Synthetic oligonucleotide
agccagcuacuggugccac

SEQ ID NO: 1690877 - RNA, 19 nt, Artificial Sequence
  Description of Artificial Sequence: Synthetic oligonucleotide
cucucuggggacaccacgu

SEQ ID NO: 1690878 - RNA, 19 nt, Artificial Sequence
  Description of Artificial Sequence: Synthetic oligonucleotide
cuggaaacucagcuauucu

SEQ ID NO: 1690879 - RNA, 19 nt, Artificial Sequence
  Description of Artificial Sequence: Synthetic oligonucleotide
gcuccauuacaggagccac

SEQ ID NO: 1690880 - RNA, 19 nt, Artificial Sequence
  Description of Artificial Sequence: Synthetic oligonucleotide
cugcaauagcuucucugua

SEQ ID NO: 1690881 - RNA, 19 nt, Artificial Sequence
  Description of Artificial Sequence: Synthetic oligonucleotide
aggcuugagucgacggucu

SEQ ID NO: 1690882 - RNA, 19 nt, Artificial Sequence
  Description of Artificial Sequence: Synthetic oligonucleotide
cgaagcacagccugcagca

SEQ ID NO: 1690883 - RNA, 19 nt, Artificial Sequence
  Description of Artificial Sequence: Synthetic oligonucleotide
aucuccuuuucuggccaga

SEQ ID NO: 1690884 - RNA, 19 nt, Artificial Sequence
  Description of Artificial Sequence: Synthetic oligonucleotide
uuauggccucugguaguuc

SEQ ID NO: 1690885 - RNA, 19 nt, Artificial Sequence
  Description of Artificial Sequence: Synthetic oligonucleotide
ggcaaggcuuccacggccc

SEQ ID NO: 1690886 - RNA, 19 nt, Artificial Sequence
  Description of Artificial Sequence: Synthetic oligonucleotide
gagccuuggcaacugcaau

SEQ ID NO: 1690887 - RNA, 19 nt, Artificial Sequence
  Description of Artificial Sequence: Synthetic oligonucleotide
gcuugagucgacggucuug

SEQ ID NO: 1690888 - RNA, 19 nt, Artificial Sequence
  Description of Artificial Sequence: Synthetic oligonucleotide
aggcggaaguggcuccuaa

SEQ ID NO: 1690889 - RNA, 19 nt, Artificial Sequence
  Description of Artificial Sequence: Synthetic oligonucleotide
gaguggacucaagcuucac

SEQ ID NO: 1690890 - RNA, 19 nt, Artificial Sequence
  Description of Artificial Sequence: Synthetic oligonucleotide
gucaguuggaucacagcau

SEQ ID NO: 1690891 - RNA, 19 nt, Artificial Sequence
  Description of Artificial Sequence: Synthetic oligonucleotide
agcucacuuucuccugcua

SEQ ID NO: 1690892 - RNA, 19 nt, Artificial Sequence
  Description of Artificial Sequence: Synthetic oligonucleotide
ggacacugugacccgaugu

SEQ ID NO: 1690893 - RNA, 19 nt, Artificial Sequence
  Description of Artificial Sequence: Synthetic oligonucleotide
gccgccuugacauacugau

SEQ ID NO: 1690894 - RNA, 19 nt, Artificial Sequence
  Description of Artificial Sequence: Synthetic oligonucleotide
gucgacggucuuggugagg

SEQ ID NO: 1690895 - RNA, 19 nt, Artificial Sequence
  Description of Artificial Sequence: Synthetic oligonucleotide
cagcuacuggugccacagc

SEQ ID NO: 1690896 - RNA, 19 nt, Artificial Sequence
  Description of Artificial Sequence: Synthetic oligonucleotide
cacuuggcugcaauagcgu

SEQ ID NO: 1690897 - RNA, 19 nt, Artificial Sequence
  Description of Artificial Sequence: Synthetic oligonucleotide
cugucugaagggaguguua

SEQ ID NO: 1690898 - RNA, 19 nt, Artificial Sequence
  Description of Artificial Sequence: Synthetic oligonucleotide
cugagcgaggcugcaucuc

SEQ ID NO: 1690899 - RNA, 19 nt, Artificial Sequence
  Description of Artificial Sequence: Synthetic oligonucleotide
ggcuugagaaggcuugagu

SEQ ID NO: 1690900 - RNA, 19 nt, Artificial Sequence
  Description of Artificial Sequence: Synthetic oligonucleotide
gcggaaguggcuccuaagu

SEQ ID NO: 1690901 - RNA, 19 nt, Artificial Sequence
  Description of Artificial Sequence: Synthetic oligonucleotide
gcuacuggugccacagcca

SEQ ID NO: 1690902 - RNA, 19 nt, Artificial Sequence
  Description of Artificial Sequence: Synthetic oligonucleotide
gcugaguagauuccugcau

SEQ ID NO: 1690903 - RNA, 19 nt, Artificial Sequence
  Description of Artificial Sequence: Synthetic oligonucleotide
ggauccacugugaguggac

SEQ ID NO: 1690904 - RNA, 19 nt, Artificial Sequence
  Description of Artificial Sequence: Synthetic oligonucleotide
guaaggcuugagaaggcuu

SEQ ID NO: 1690905 - RNA, 19 nt, Artificial Sequence
  Description of Artificial Sequence: Synthetic oligonucleotide
uugccagggucaggucaug

SEQ ID NO: 1690906 - RNA, 19 nt, Artificial Sequence
  Description of Artificial Sequence: Synthetic oligonucleotide
cagcuuuauggccucuggu

SEQ ID NO: 1690907 - RNA, 19 nt, Artificial Sequence
  Description of Artificial Sequence: Synthetic oligonucleotide
aaguagcacuuggcugcaa

SEQ ID NO: 1690908 - RNA, 19 nt, Artificial Sequence
  Description of Artificial Sequence: Synthetic oligonucleotide
ccuguuggcucagcauugc

SEQ ID NO: 1690909 - RNA, 19 nt, Artificial Sequence
  Description of Artificial Sequence: Synthetic oligonucleotide
cuuccacggcccacagcca

SEQ ID NO: 1690910 - RNA, 19 nt, Artificial Sequence
  Description of Artificial Sequence: Synthetic oligonucleotide
gaaccccagcucagguaca

SEQ ID NO: 1690911 - RNA, 19 nt, Artificial Sequence
  Description of Artificial Sequence: Synthetic oligonucleotide
gcucuguuuccuggcuggg

SEQ ID NO: 1690912 - RNA, 19 nt, Artificial Sequence
  Description of Artificial Sequence: Synthetic oligonucleotide
caauagcguaguggccauc

SEQ ID NO: 1690913 - RNA, 19 nt, Artificial Sequence
  Description of Artificial Sequence: Synthetic oligonucleotide
gcaaggcggcccgacacug

SEQ ID NO: 1690914 - RNA, 19 nt, Artificial Sequence
  Description of Artificial Sequence: Synthetic oligonucleotide
gaagggaguguuacuuguu

SEQ ID NO: 1690915 - RNA, 19 nt, Artificial Sequence
  Description of Artificial Sequence: Synthetic oligonucleotide
ggacaccacguaaggcuug

SEQ ID NO: 1690916 - RNA, 19 nt, Artificial Sequence
  Description of Artificial Sequence: Synthetic oligonucleotide
acacagcuuuauggccucu

SEQ ID NO: 1690917 - RNA, 19 nt, Artificial Sequence
  Description of Artificial Sequence: Synthetic oligonucleotide
cucugugagucuucugguu

SEQ ID NO: 1690918 - RNA, 19 nt, Artificial Sequence
  Description of Artificial Sequence: Synthetic oligonucleotide
acggggucaucagggcgca

SEQ ID NO: 1690919 - RNA, 19 nt, Artificial Sequence
  Description of Artificial Sequence: Synthetic oligonucleotide
ccauuacaggagccacuug

SEQ ID NO: 1690920 - RNA, 19 nt, Artificial Sequence
  Description of Artificial Sequence: Synthetic oligonucleotide
ggccucugguaguucaugu

SEQ ID NO: 1690921 - RNA, 19 nt, Artificial Sequence
  Description of Artificial Sequence: Synthetic oligonucleotide
cuggugccacagccacgag

SEQ ID NO: 1690922 - RNA, 19 nt, Artificial Sequence
  Description of Artificial Sequence: Synthetic oligonucleotide
gugacccgaugugaagcaa

SEQ ID NO: 1690923 - RNA, 19 nt, Artificial Sequence
  Description of Artificial Sequence: Synthetic oligonucleotide
uaggcggaaguggcuccua

SEQ ID NO: 1690924 - RNA, 19 nt, Artificial Sequence
  Description of Artificial Sequence: Synthetic oligonucleotide
cgggguguccacacucaag

SEQ ID NO: 1690925 - RNA, 19 nt, Artificial Sequence
  Description of Artificial Sequence: Synthetic oligonucleotide
gcagguaagaggccgccuu

SEQ ID NO: 1690926 - RNA, 19 nt, Artificial Sequence
  Description of Artificial Sequence: Synthetic oligonucleotide
cuuguugcagauggauauu

SEQ ID NO: 1690927 - RNA, 19 nt, Artificial Sequence
  Description of Artificial Sequence: Synthetic oligonucleotide
gcccgacacugcuccgggg

SEQ ID NO: 1690928 - RNA, 19 nt, Artificial Sequence
  Description of Artificial Sequence: Synthetic oligonucleotide
gccgagccuuggcaacugc

SEQ ID NO: 1690929 - RNA, 19 nt, Artificial Sequence
  Description of Artificial Sequence: Synthetic oligonucleotide
cagcucacuuucuccugcu

SEQ ID NO: 1690930 - RNA, 19 nt, Artificial Sequence
  Description of Artificial Sequence: Synthetic oligonucleotide
caacugcaauagcuucucu

SEQ ID NO: 1690931 - RNA, 19 nt, Artificial Sequence
  Description of Artificial Sequence: Synthetic oligonucleotide
gagcgaggcugcaucuccu

SEQ ID NO: 1690932 - RNA, 19 nt, Artificial Sequence
  Description of Artificial Sequence: Synthetic oligonucleotide
gcauugccagggucagguc

SEQ ID NO: 1690933 - RNA, 19 nt, Artificial Sequence
  Description of Artificial Sequence: Synthetic oligonucleotide
ggguguccacacucaaggu

SEQ ID NO: 1690934 - RNA, 19 nt, Artificial Sequence
  Description of Artificial Sequence: Synthetic oligonucleotide
gcaauagcguaguggccau

SEQ ID NO: 1690935 - RNA, 19 nt, Artificial Sequence
  Description of Artificial Sequence: Synthetic oligonucleotide
ccugagguguagcuccgaa

SEQ ID NO: 1690936 - RNA, 19 nt, Artificial Sequence
  Description of Artificial Sequence: Synthetic oligonucleotide
cugcgccacacagcacauc

SEQ ID NO: 1690937 - RNA, 19 nt, Artificial Sequence
  Description of Artificial Sequence: Synthetic oligonucleotide
ggaagguagcugcucuguu

SEQ ID NO: 1690938 - RNA, 19 nt, Artificial Sequence
  Description of Artificial Sequence: Synthetic oligonucleotide
gccagcuacuggugccaca

SEQ ID NO: 1690939 - RNA, 19 nt, Artificial Sequence
  Description of Artificial Sequence: Synthetic oligonucleotide
cucugagguugggaaggua

SEQ ID NO: 1690940 - RNA, 19 nt, Artificial Sequence
  Description of Artificial Sequence: Synthetic oligonucleotide
ggcagcacuccagcacauc

SEQ ID NO: 1690941 - RNA, 19 nt, Artificial Sequence
  Description of Artificial Sequence: Synthetic oligonucleotide
gaggccgccuugacauacu

SEQ ID NO: 1690942 - RNA, 19 nt, Artificial Sequence
  Description of Artificial Sequence: Synthetic oligonucleotide
ggccaggccuuuauacucu

SEQ ID NO: 1690943 - RNA, 19 nt, Artificial Sequence
  Description of Artificial Sequence: Synthetic oligonucleotide
ggccgccuugacauacuga

SEQ ID NO: 1690944 - RNA, 19 nt, Artificial Sequence
  Description of Artificial Sequence: Synthetic oligonucleotide
gucuuggugagggcugguu

SEQ ID NO: 1690945 - RNA, 19 nt, Artificial Sequence
  Description of Artificial Sequence: Synthetic oligonucleotide
ccacggcccacagccacac

SEQ ID NO: 1690946 - RNA, 19 nt, Artificial Sequence
  Description of Artificial Sequence: Synthetic oligonucleotide
gcguaguggccaucucucu

SEQ ID NO: 1690947 - RNA, 19 nt, Artificial Sequence
  Description of Artificial Sequence: Synthetic oligonucleotide
cagggucuggcagugucuu

SEQ ID NO: 1690948 - RNA, 19 nt, Artificial Sequence
  Description of Artificial Sequence: Synthetic oligonucleotide
cccgacacugcuccggggu

SEQ ID NO: 1690949 - RNA, 19 nt, Artificial Sequence
  Description of Artificial Sequence: Synthetic oligonucleotide
agggcgcagccgagccuug

SEQ ID NO: 1690950 - RNA, 19 nt, Artificial Sequence
  Description of Artificial Sequence: Synthetic oligonucleotide
cagggcgcagccgagccuu

SEQ ID NO: 1690951 - RNA, 19 nt, Artificial Sequence
  Description of Artificial Sequence: Synthetic oligonucleotide
ggaaagggccaggccuuua

SEQ ID NO: 1690952 - RNA, 19 nt, Artificial Sequence
  Description of Artificial Sequence: Synthetic oligonucleotide
cguugaagaucagggugaa

SEQ ID NO: 1690953 - RNA, 19 nt, Artificial Sequence
  Description of Artificial Sequence: Synthetic oligonucleotide
cacggcccacagccacaca

SEQ ID NO: 1690954 - RNA, 19 nt, Artificial Sequence
  Description of Artificial Sequence: Synthetic oligonucleotide
ggcugggaucaucucuguu

SEQ ID NO: 1690955 - RNA, 19 nt, Artificial Sequence
  Description of Artificial Sequence: Synthetic oligonucleotide
cguaaggcuugagaaggcu

SEQ ID NO: 1690956 - RNA, 19 nt, Artificial Sequence
  Description of Artificial Sequence: Synthetic oligonucleotide
guuuccuggcugggaucau

SEQ ID NO: 1690957 - RNA, 19 nt, Artificial Sequence
  Description of Artificial Sequence: Synthetic oligonucleotide
ccacugugaguggacucaa

SEQ ID NO: 1690958 - RNA, 19 nt, Artificial Sequence
  Description of Artificial Sequence: Synthetic oligonucleotide
ccgggguguccacacucaa

SEQ ID NO: 1690959 - RNA, 19 nt, Artificial Sequence
  Description of Artificial Sequence: Synthetic oligonucleotide
gcuccgggguguccacacu

SEQ ID NO: 1690960 - RNA, 19 nt, Artificial Sequence
  Description of Artificial Sequence: Synthetic oligonucleotide
cccugagguguagcuccga

SEQ ID NO: 1690961 - RNA, 19 nt, Artificial Sequence
  Description of Artificial Sequence: Synthetic oligonucleotide
cgacacugcuccggggugu

SEQ ID NO: 1690962 - RNA, 19 nt, Artificial Sequence
  Description of Artificial Sequence: Synthetic oligonucleotide
aaaauauuaagcuacagga

SEQ ID NO: 1690963 - RNA, 19 nt, Artificial Sequence
  Description of Artificial Sequence: Synthetic oligonucleotide
aauauuaagcuacaggaac

SEQ ID NO: 1690964 - RNA, 19 nt, Artificial Sequence
  Description of Artificial Sequence: Synthetic oligonucleotide
uuuauaucaucccaaaugg

SEQ ID NO: 1690965 - RNA, 19 nt, Artificial Sequence
  Description of Artificial Sequence: Synthetic oligonucleotide
uuagcuucuauuuauaagc

SEQ ID NO: 1690966 - RNA, 19 nt, Artificial Sequence
  Description of Artificial Sequence: Synthetic oligonucleotide
uuaagcuacaggaacaggg

SEQ ID NO: 1690967 - RNA, 19 nt, Artificial Sequence
  Description of Artificial Sequence: Synthetic oligonucleotide
aaugccacggccaauaccc

SEQ ID NO: 1690968 - RNA, 19 nt, Artificial Sequence
  Description of Artificial Sequence: Synthetic oligonucleotide
uauaucaucccaaauggag

SEQ ID NO: 1690969 - RNA, 19 nt, Artificial Sequence
  Description of Artificial Sequence: Synthetic oligonucleotide
aaucacacaccacugguac

SEQ ID NO: 1690970 - RNA, 19 nt, Artificial Sequence
  Description of Artificial Sequence: Synthetic oligonucleotide
auagcuguaaggcaaugcc

SEQ ID NO: 1690971 - RNA, 19 nt, Artificial Sequence
  Description of Artificial Sequence: Synthetic oligonucleotide
guuuauaucaucccaaaug

SEQ ID NO: 1690972 - RNA, 19 nt, Artificial Sequence
  Description of Artificial Sequence: Synthetic oligonucleotide
ugacucaugucaaaggagg

SEQ ID NO: 1690973 - RNA, 19 nt, Artificial Sequence
  Description of Artificial Sequence: Synthetic oligonucleotide
uauaggggagacaagaucu

SEQ ID NO: 1690974 - RNA, 19 nt, Artificial Sequence
  Description of Artificial Sequence: Synthetic oligonucleotide
ucuaaggguguccagauug

SEQ ID NO: 1690975 - RNA, 19 nt, Artificial Sequence
  Description of Artificial Sequence: Synthetic oligonucleotide
uuuauaagcacuuuucaau

SEQ ID NO: 1690976 - RNA, 19 nt, Artificial Sequence
  Description of Artificial Sequence: Synthetic oligonucleotide
aauaguccuggacugggcg

SEQ ID NO: 1690977 - RNA, 19 nt, Artificial Sequence
  Description of Artificial Sequence: Synthetic oligonucleotide
cuuuguuccaccgagacag

SEQ ID NO: 1690978 - RNA, 19 nt, Artificial Sequence
  Description of Artificial Sequence: Synthetic oligonucleotide
accgucuacauccugaagg

SEQ ID NO: 1690979 - RNA, 19 nt, Artificial Sequence
  Description of Artificial Sequence: Synthetic oligonucleotide
aagcuuaggaucuuggggu

SEQ ID NO: 1690980 - RNA, 19 nt, Artificial Sequence
  Description of Artificial Sequence: Synthetic oligonucleotide
acaaagaauccucagguug

SEQ ID NO: 1690981 - RNA, 19 nt, Artificial Sequence
  Description of Artificial Sequence: Synthetic oligonucleotide
uuaaacaaagaauccucag

SEQ ID NO: 1690982 - RNA, 19 nt, Artificial Sequence
  Description of Artificial Sequence: Synthetic oligonucleotide
uuggccuucuuaaacaaag

SEQ ID NO: 1690983 - RNA, 19 nt, Artificial Sequence
  Description of Artificial Sequence: Synthetic oligonucleotide
auuagcuucuauuuauaag

SEQ ID NO: 1690984 - RNA, 19 nt, Artificial Sequence
  Description of Artificial Sequence: Synthetic oligonucleotide
aaggucacaggaugguagc

SEQ ID NO: 1690985 - RNA, 19 nt, Artificial Sequence
  Description of Artificial Sequence: Synthetic oligonucleotide
uuuuauaggggagacaaga

SEQ ID NO: 1690986 - RNA, 19 nt, Artificial Sequence
  Description of Artificial Sequence: Synthetic oligonucleotide
aagggcauagcccaaagaa

SEQ ID NO: 1690987 - RNA, 19 nt, Artificial Sequence
  Description of Artificial Sequence: Synthetic oligonucleotide
uugaccagcacaucuagcc

SEQ ID NO: 1690988 - RNA, 19 nt, Artificial Sequence
  Description of Artificial Sequence: Synthetic oligonucleotide
acagggaaaaccaaggcac

SEQ ID NO: 1690989 - RNA, 19 nt, Artificial Sequence
  Description of Artificial Sequence: Synthetic oligonucleotide
cuauuuauaagcacuuuuc

SEQ ID NO: 1690990 - RNA, 19 nt, Artificial Sequence
  Description of Artificial Sequence: Synthetic oligonucleotide
aaaauaguccuggacuggg

SEQ ID NO: 1690991 - RNA, 19 nt, Artificial Sequence
  Description of Artificial Sequence: Synthetic oligonucleotide
cugaagcaaaauauuaagc

SEQ ID NO: 1690992 - RNA, 19 nt, Artificial Sequence
  Description of Artificial Sequence: Synthetic oligonucleotide
uuugguuuggccuucuuaa

SEQ ID NO: 1690993 - RNA, 19 nt, Artificial Sequence
  Description of Artificial Sequence: Synthetic oligonucleotide
ugggcgaccgucuacaucc

SEQ ID NO: 1690994 - RNA, 19 nt, Artificial Sequence
  Description of Artificial Sequence: Synthetic oligonucleotide
gaacauaugcugcagcccc

SEQ ID NO: 1690995 - RNA, 19 nt, Artificial Sequence
  Description of Artificial Sequence: Synthetic oligonucleotide
auacacagagcacaaguag

SEQ ID NO: 1690996 - RNA, 19 nt, Artificial Sequence
  Description of Artificial Sequence: Synthetic oligonucleotide
ucuauuuauaagcacuuuu

SEQ ID NO: 1690997 - RNA, 19 nt, Artificial Sequence
  Description of Artificial Sequence: Synthetic oligonucleotide
cuuugcauagcuguaaggc

SEQ ID NO: 1690998 - RNA, 19 nt, Artificial Sequence
  Description of Artificial Sequence: Synthetic oligonucleotide
caagcuuaggaucuugggg

SEQ ID NO: 1690999 - RNA, 19 nt, Artificial Sequence
  Description of Artificial Sequence: Synthetic oligonucleotide
gagacaaccacgaugaguc

SEQ ID NO: 1691000 - RNA, 19 nt, Artificial Sequence
  Description of Artificial Sequence: Synthetic oligonucleotide
gacaccguagcucaugggc

SEQ ID NO: 1691001 - RNA, 19 nt, Artificial Sequence
  Description of Artificial Sequence: Synthetic oligonucleotide
uacugaagcaaaauauuaa

SEQ ID NO: 1691002 - RNA, 19 nt, Artificial Sequence
  Description of Artificial Sequence: Synthetic oligonucleotide
cacacuuggcccuucauag

SEQ ID NO: 1691003 - RNA, 19 nt, Artificial Sequence
  Description of Artificial Sequence: Synthetic oligonucleotide
ugaaucacacaccacuggu

SEQ ID NO: 1691004 - RNA, 19 nt, Artificial Sequence
  Description of Artificial Sequence: Synthetic oligonucleotide
auugcggccagugauguac

SEQ ID NO: 1691005 - RNA, 19 nt, Artificial Sequence
  Description of Artificial Sequence: Synthetic oligonucleotide
ugucaaaggaggauaucug

SEQ ID NO: 1691006 - RNA, 19 nt, Artificial Sequence
  Description of Artificial Sequence: Synthetic oligonucleotide
uaagcuacaggaacaggga

SEQ ID NO: 1691007 - RNA, 19 nt, Artificial Sequence
  Description of Artificial Sequence: Synthetic oligonucleotide
uauuaagcuacaggaacag

SEQ ID NO: 1691008 - RNA, 19 nt, Artificial Sequence
  Description of Artificial Sequence: Synthetic oligonucleotide
acaccacugguacacaccg

SEQ ID NO: 1691009 - RNA, 19 nt, Artificial Sequence
  Description of Artificial Sequence: Synthetic oligonucleotide
gacuccaugacaccguagc

SEQ ID NO: 1691010 - RNA, 19 nt, Artificial Sequence
  Description of Artificial Sequence: Synthetic oligonucleotide
uuauaggggagacaagauc

SEQ ID NO: 1691011 - RNA, 19 nt, Artificial Sequence
  Description of Artificial Sequence: Synthetic oligonucleotide
ugacaauccacuugggcac

SEQ ID NO: 1691012 - RNA, 19 nt, Artificial Sequence
  Description of Artificial Sequence: Synthetic oligonucleotide
uuauaucaucccaaaugga

SEQ ID NO: 1691013 - RNA, 19 nt, Artificial Sequence
  Description of Artificial Sequence: Synthetic oligonucleotide
gugacaauccacuugggca

SEQ ID NO: 1691014 - RNA, 19 nt, Artificial Sequence
  Description of Artificial Sequence: Synthetic oligonucleotide
aguucuguuugcaccaacc

SEQ ID NO: 1691015 - RNA, 19 nt, Artificial Sequence
  Description of Artificial Sequence: Synthetic oligonucleotide
uagagggugacaauccacu

SEQ ID NO: 1691016 - RNA, 19 nt, Artificial Sequence
  Description of Artificial Sequence: Synthetic oligonucleotide
gaacucacuaggcagccgc

SEQ ID NO: 1691017 - RNA, 19 nt, Artificial Sequence
  Description of Artificial Sequence: Synthetic oligonucleotide
gucaaaggaggauaucugc

SEQ ID NO: 1691018 - RNA, 19 nt, Artificial Sequence
  Description of Artificial Sequence: Synthetic oligonucleotide
uugcauagcuguaaggcaa

SEQ ID NO: 1691019 - RNA, 19 nt, Artificial Sequence
  Description of Artificial Sequence: Synthetic oligonucleotide
cuugaaucacacaccacug

SEQ ID NO: 1691020 - RNA, 19 nt, Artificial Sequence
  Description of Artificial Sequence: Synthetic oligonucleotide
cucaggauugucuggacac

SEQ ID NO: 1691021 - RNA, 19 nt, Artificial Sequence
  Description of Artificial Sequence: Synthetic oligonucleotide
gagaaauuugguuuggccu

SEQ ID NO: 1691022 - RNA, 19 nt, Artificial Sequence
  Description of Artificial Sequence: Synthetic oligonucleotide
cuuaaacaaagaauccuca

SEQ ID NO: 1691023 - RNA, 19 nt, Artificial Sequence
  Description of Artificial Sequence: Synthetic oligonucleotide
aggagguuagaauuugcug

SEQ ID NO: 1691024 - RNA, 19 nt, Artificial Sequence
  Description of Artificial Sequence: Synthetic oligonucleotide
uuuauaggggagacaagau

SEQ ID NO: 1691025 - RNA, 19 nt, Artificial Sequence
  Description of Artificial Sequence: Synthetic oligonucleotide
aaauaguccuggacugggc

SEQ ID NO: 1691026 - RNA, 19 nt, Artificial Sequence
  Description of Artificial Sequence: Synthetic oligonucleotide
uguaaggcaaugccacggc

SEQ ID NO: 1691027 - RNA, 19 nt, Artificial Sequence
  Description of Artificial Sequence: Synthetic oligonucleotide
ugcuuugcauagcuguaag

SEQ ID NO: 1691028 - RNA, 19 nt, Artificial Sequence
  Description of Artificial Sequence: Synthetic oligonucleotide
uguacacuguggcaccugc

SEQ ID NO: 1691029 - RNA, 19 nt, Artificial Sequence
  Description of Artificial Sequence: Synthetic oligonucleotide
uguagagggugacaaucca

SEQ ID NO: 1691030 - RNA, 19 nt, Artificial Sequence
  Description of Artificial Sequence: Synthetic oligonucleotide
uucccacucaagcuuagga

SEQ ID NO: 1691031 - RNA, 19 nt, Artificial Sequence
  Description of Artificial Sequence: Synthetic oligonucleotide
uaucaggccaggagguuag

SEQ ID NO: 1691032 - RNA, 19 nt, Artificial Sequence
  Description of Artificial Sequence: Synthetic oligonucleotide
augacaccguagcucaugg

SEQ ID NO: 1691033 - RNA, 19 nt, Artificial Sequence
  Description of Artificial Sequence: Synthetic oligonucleotide
uguuccaccgagacaggcc

SEQ ID NO: 1691034 - RNA, 19 nt, Artificial Sequence
  Description of Artificial Sequence: Synthetic oligonucleotide
acgaugaguccuuugccag

SEQ ID NO: 1691035 - RNA, 19 nt, Artificial Sequence
  Description of Artificial Sequence: Synthetic oligonucleotide
agguacuucccagaauggc

SEQ ID NO: 1691036 - RNA, 19 nt, Artificial Sequence
  Description of Artificial Sequence: Synthetic oligonucleotide
cauuguuuauaucauccca

SEQ ID NO: 1691037 - RNA, 19 nt, Artificial Sequence
  Description of Artificial Sequence: Synthetic oligonucleotide
auauuaagcuacaggaaca

SEQ ID NO: 1691038 - RNA, 19 nt, Artificial Sequence
  Description of Artificial Sequence: Synthetic oligonucleotide
uagcuguaaggcaaugcca

SEQ ID NO: 1691039 - RNA, 19 nt, Artificial Sequence
  Description of Artificial Sequence: Synthetic oligonucleotide
ugaacauaugcugcagccc

SEQ ID NO: 1691040 - RNA, 19 nt, Artificial Sequence
  Description of Artificial Sequence: Synthetic oligonucleotide
aguagcucuaagggugucc

SEQ ID NO: 1691041 - RNA, 19 nt, Artificial Sequence
  Description of Artificial Sequence: Synthetic oligonucleotide
guucuguuugcaccaaccc

SEQ ID NO: 1691042 - RNA, 19 nt, Artificial Sequence
  Description of Artificial Sequence: Synthetic oligonucleotide
ugucacacgcaguuuugcc

SEQ ID NO: 1691043 - RNA, 19 nt, Artificial Sequence
  Description of Artificial Sequence: Synthetic oligonucleotide
guuccaccgagacaggccc

SEQ ID NO: 1691044 - RNA, 19 nt, Artificial Sequence
  Description of Artificial Sequence: Synthetic oligonucleotide
gucacacgcaguuuugccc

SEQ ID NO: 1691045 - RNA, 19 nt, Artificial Sequence
  Description of Artificial Sequence: Synthetic oligonucleotide
cuguucccgaucaacuugc

SEQ ID NO: 1691046 - RNA, 19 nt, Artificial Sequence
  Description of Artificial Sequence: Synthetic oligonucleotide
auaucugccgcagacgcug

SEQ ID NO: 1691047 - RNA, 19 nt, Artificial Sequence
  Description of Artificial Sequence: Synthetic oligonucleotide
aaggaggauaucugccgca

SEQ ID NO: 1691048 - RNA, 19 nt, Artificial Sequence
  Description of Artificial Sequence: Synthetic oligonucleotide
cuaaggguguccagauugc

SEQ ID NO: 1691049 - RNA, 19 nt, Artificial Sequence
  Description of Artificial Sequence: Synthetic oligonucleotide
uagcucaugggcacaguca

SEQ ID NO: 1691050 - RNA, 19 nt, Artificial Sequence
  Description of Artificial Sequence: Synthetic oligonucleotide
ggauaucugccgcagacgc

SEQ ID NO: 1691051 - RNA, 19 nt, Artificial Sequence
  Description of Artificial Sequence: Synthetic oligonucleotide
gguaccaucagccgugccc

SEQ ID NO: 1691052 - RNA, 19 nt, Artificial Sequence
  Description of Artificial Sequence: Synthetic oligonucleotide
agaccuguauuugaggacu

SEQ ID NO: 1691053 - RNA, 19 nt, Artificial Sequence
  Description of Artificial Sequence: Synthetic oligonucleotide
auuaagcuacaggaacagg

SEQ ID NO: 1691054 - RNA, 19 nt, Artificial Sequence
  Description of Artificial Sequence: Synthetic oligonucleotide
cagccagucugucacacgc

SEQ ID NO: 1691055 - RNA, 19 nt, Artificial Sequence
  Description of Artificial Sequence: Synthetic oligonucleotide
ugccuuugagaaauuuggu

SEQ ID NO: 1691056 - RNA, 19 nt, Artificial Sequence
  Description of Artificial Sequence: Synthetic oligonucleotide
ugccacucauuucugggcu

SEQ ID NO: 1691057 - RNA, 19 nt, Artificial Sequence
  Description of Artificial Sequence: Synthetic oligonucleotide
uugccacucauuucugggc

SEQ ID NO: 1691058 - RNA, 19 nt, Artificial Sequence
  Description of Artificial Sequence: Synthetic oligonucleotide
gucacaggaugguagcacc

SEQ ID NO: 1691059 - RNA, 19 nt, Artificial Sequence
  Description of Artificial Sequence: Synthetic oligonucleotide
uaaggguguccagauugcg

SEQ ID NO: 1691060 - RNA, 19 nt, Artificial Sequence
  Description of Artificial Sequence: Synthetic oligonucleotide
uugccagcugguaccauca

SEQ ID NO: 1691061 - RNA, 19 nt, Artificial Sequence
  Description of Artificial Sequence: Synthetic oligonucleotide
acggccaauaccccuggag

SEQ ID NO: 1691062 - RNA, 19 nt, Artificial Sequence
  Description of Artificial Sequence: Synthetic oligonucleotide
uugggcacacggaggaagc

SEQ ID NO: 1691063 - RNA, 19 nt, Artificial Sequence
  Description of Artificial Sequence: Synthetic oligonucleotide
uucauaggaggaagugggu

SEQ ID NO: 1691064 - RNA, 19 nt, Artificial Sequence
  Description of Artificial Sequence: Synthetic oligonucleotide
agaagcugcuuuguuccac

SEQ ID NO: 1691065 - RNA, 19 nt, Artificial Sequence
  Description of Artificial Sequence: Synthetic oligonucleotide
gcugcuuuguuccaccgag

SEQ ID NO: 1691066 - RNA, 19 nt, Artificial Sequence
  Description of Artificial Sequence: Synthetic oligonucleotide
agagacaaccacgaugagu

SEQ ID NO: 1691067 - RNA, 19 nt, Artificial Sequence
  Description of Artificial Sequence: Synthetic oligonucleotide
ucaaugagaagaggaccug

SEQ ID NO: 1691068 - RNA, 19 nt, Artificial Sequence
  Description of Artificial Sequence: Synthetic oligonucleotide
auacugaagcaaaauauua

SEQ ID NO: 1691069 - RNA, 19 nt, Artificial Sequence
  Description of Artificial Sequence: Synthetic oligonucleotide
aagaauccucagguugauc

SEQ ID NO: 1691070 - RNA, 19 nt, Artificial Sequence
  Description of Artificial Sequence: Synthetic oligonucleotide
aagagacaaccacgaugag

SEQ ID NO: 1691071 - RNA, 19 nt, Artificial Sequence
  Description of Artificial Sequence: Synthetic oligonucleotide
guugccaaggccaccacac

SEQ ID NO: 1691072 - RNA, 19 nt, Artificial Sequence
  Description of Artificial Sequence: Synthetic oligonucleotide
auagcgccgagcaagguca

SEQ ID NO: 1691073 - RNA, 19 nt, Artificial Sequence
  Description of Artificial Sequence: Synthetic oligonucleotide
caucuagccgcccuugcug

SEQ ID NO: 1691074 - RNA, 19 nt, Artificial Sequence
  Description of Artificial Sequence: Synthetic oligonucleotide
cagguacuucccagaaugg

SEQ ID NO: 1691075 - RNA, 19 nt, Artificial Sequence
  Description of Artificial Sequence: Synthetic oligonucleotide
guaaggcaaugccacggcc

SEQ ID NO: 1691076 - RNA, 19 nt, Artificial Sequence
  Description of Artificial Sequence: Synthetic oligonucleotide
cuugcuguucccgaucaac

SEQ ID NO: 1691077 - RNA, 19 nt, Artificial Sequence
  Description of Artificial Sequence: Synthetic oligonucleotide
cacauagcugacuccauga

SEQ ID NO: 1691078 - RNA, 19 nt, Artificial Sequence
  Description of Artificial Sequence: Synthetic oligonucleotide
cauugaacauaugcugcag

SEQ ID NO: 1691079 - RNA, 19 nt, Artificial Sequence
  Description of Artificial Sequence: Synthetic oligonucleotide
aggauaucugccgcagacg

SEQ ID NO: 1691080 - RNA, 19 nt, Artificial Sequence
  Description of Artificial Sequence: Synthetic oligonucleotide
uucaccaguucuguuugca

SEQ ID NO: 1691081 - RNA, 19 nt, Artificial Sequence
  Description of Artificial Sequence: Synthetic oligonucleotide
guuuugcccacaccauaag

SEQ ID NO: 1691082 - RNA, 19 nt, Artificial Sequence
  Description of Artificial Sequence: Synthetic oligonucleotide
ugcccacaccauaagggac

SEQ ID NO: 1691083 - RNA, 19 nt, Artificial Sequence
  Description of Artificial Sequence: Synthetic oligonucleotide
guaccaucagccgugcccc

SEQ ID NO: 1691084 - RNA, 19 nt, Artificial Sequence
  Description of Artificial Sequence: Synthetic oligonucleotide
cucaaugagaagaggaccu

SEQ ID NO: 1691085 - RNA, 19 nt, Artificial Sequence
  Description of Artificial Sequence: Synthetic oligonucleotide
guuagaauuugcuggugua

SEQ ID NO: 1691086 - RNA, 19 nt, Artificial Sequence
  Description of Artificial Sequence: Synthetic oligonucleotide
uccagauugcggccaguga

SEQ ID NO: 1691087 - RNA, 19 nt, Artificial Sequence
  Description of Artificial Sequence: Synthetic oligonucleotide
uucgccagaccuguauuug

SEQ ID NO: 1691088 - RNA, 19 nt, Artificial Sequence
  Description of Artificial Sequence: Synthetic oligonucleotide
ggagacaugugaaagggca

SEQ ID NO: 1691089 - RNA, 19 nt, Artificial Sequence
  Description of Artificial Sequence: Synthetic oligonucleotide
agccucaaugagaagagga

SEQ ID NO: 1691090 - RNA, 19 nt, Artificial Sequence
  Description of Artificial Sequence: Synthetic oligonucleotide
caaugccacggccaauacc

SEQ ID NO: 1691091 - RNA, 19 nt, Artificial Sequence
  Description of Artificial Sequence: Synthetic oligonucleotide
ugacaccguagcucauggg

SEQ ID NO: 1691092 - RNA, 19 nt, Artificial Sequence
  Description of Artificial Sequence: Synthetic oligonucleotide
guguagagggugacaaucc

SEQ ID NO: 1691093 - RNA, 19 nt, Artificial Sequence
  Description of Artificial Sequence: Synthetic oligonucleotide
ugacuccaugacaccguag

SEQ ID NO: 1691094 - RNA, 19 nt, Artificial Sequence
  Description of Artificial Sequence: Synthetic oligonucleotide
ugcauagcuguaaggcaau

SEQ ID NO: 1691095 - RNA, 19 nt, Artificial Sequence
  Description of Artificial Sequence: Synthetic oligonucleotide
aaagaauccucagguugau

SEQ ID NO: 1691096 - RNA, 19 nt, Artificial Sequence
  Description of Artificial Sequence: Synthetic oligonucleotide
gcuugaaucacacaccacu

SEQ ID NO: 1691097 - RNA, 19 nt, Artificial Sequence
  Description of Artificial Sequence: Synthetic oligonucleotide
cacgaugaguccuuugcca

SEQ ID NO: 1691098 - RNA, 19 nt, Artificial Sequence
  Description of Artificial Sequence: Synthetic oligonucleotide
acgcaguuuugcccacacc

SEQ ID NO: 1691099 - RNA, 19 nt, Artificial Sequence
  Description of Artificial Sequence: Synthetic oligonucleotide
guagcucaugggcacaguc

SEQ ID NO: 1691100 - RNA, 19 nt, Artificial Sequence
  Description of Artificial Sequence: Synthetic oligonucleotide
cccaaauggaggcagguac

SEQ ID NO: 1691101 - RNA, 19 nt, Artificial Sequence
  Description of Artificial Sequence: Synthetic oligonucleotide
gcuuugcauagcuguaagg

SEQ ID NO: 1691102 - RNA, 19 nt, Artificial Sequence
  Description of Artificial Sequence: Synthetic oligonucleotide
uugguuuggccuucuuaaa

SEQ ID NO: 1691103 - RNA, 19 nt, Artificial Sequence
  Description of Artificial Sequence: Synthetic oligonucleotide
uguucgccagaccuguauu

SEQ ID NO: 1691104 - RNA, 19 nt, Artificial Sequence
  Description of Artificial Sequence: Synthetic oligonucleotide
ucgccagaccuguauuuga

SEQ ID NO: 1691105 - RNA, 19 nt, Artificial Sequence
  Description of Artificial Sequence: Synthetic oligonucleotide
aucuagccgcccuugcugu

SEQ ID NO: 1691106 - RNA, 19 nt, Artificial Sequence
  Description of Artificial Sequence: Synthetic oligonucleotide
gaguccaacauuguuuaua

SEQ ID NO: 1691107 - RNA, 19 nt, Artificial Sequence
  Description of Artificial Sequence: Synthetic oligonucleotide
gcuguucccgaucaacuug

SEQ ID NO: 1691108 - RNA, 19 nt, Artificial Sequence
  Description of Artificial Sequence: Synthetic oligonucleotide
uucuauuuauaagcacuuu

SEQ ID NO: 1691109 - RNA, 19 nt, Artificial Sequence
  Description of Artificial Sequence: Synthetic oligonucleotide
gcucaaagaggcuuuucac

SEQ ID NO: 1691110 - RNA, 19 nt, Artificial Sequence
  Description of Artificial Sequence: Synthetic oligonucleotide
ggccaauaccccuggaggc

SEQ ID NO: 1691111 - RNA, 19 nt, Artificial Sequence
  Description of Artificial Sequence: Synthetic oligonucleotide
gcuguaaggcaaugccacg

SEQ ID NO: 1691112 - RNA, 19 nt, Artificial Sequence
  Description of Artificial Sequence: Synthetic oligonucleotide
ucccgaucaacuugcucaa

SEQ ID NO: 1691113 - RNA, 19 nt, Artificial Sequence
  Description of Artificial Sequence: Synthetic oligonucleotide
guagagggugacaauccac

SEQ ID NO: 1691114 - RNA, 19 nt, Artificial Sequence
  Description of Artificial Sequence: Synthetic oligonucleotide
ugccccauacacagagcac

SEQ ID NO: 1691115 - RNA, 19 nt, Artificial Sequence
  Description of Artificial Sequence: Synthetic oligonucleotide
guagcucuaagggugucca

SEQ ID NO: 1691116 - RNA, 19 nt, Artificial Sequence
  Description of Artificial Sequence: Synthetic oligonucleotide
caccauaagggacauugaa

SEQ ID NO: 1691117 - RNA, 19 nt, Artificial Sequence
  Description of Artificial Sequence: Synthetic oligonucleotide
caugacaccguagcucaug

SEQ ID NO: 1691118 - RNA, 19 nt, Artificial Sequence
  Description of Artificial Sequence: Synthetic oligonucleotide
ccgucuacauccugaaggc

SEQ ID NO: 1691119 - RNA, 19 nt, Artificial Sequence
  Description of Artificial Sequence: Synthetic oligonucleotide
gaccgucuacauccugaag

SEQ ID NO: 1691120 - RNA, 19 nt, Artificial Sequence
  Description of Artificial Sequence: Synthetic oligonucleotide
cccacucaagcuuaggauc

SEQ ID NO: 1691121 - RNA, 19 nt, Artificial Sequence
  Description of Artificial Sequence: Synthetic oligonucleotide
guaguggccucugagucca

SEQ ID NO: 1691122 - RNA, 19 nt, Artificial Sequence
  Description of Artificial Sequence: Synthetic oligonucleotide
ggcuuauugauggugcuca

SEQ ID NO: 1691123 - RNA, 19 nt, Artificial Sequence
  Description of Artificial Sequence: Synthetic oligonucleotide
gguaggaggucagccaucc

SEQ ID NO: 1691124 - RNA, 19 nt, Artificial Sequence
  Description of Artificial Sequence: Synthetic oligonucleotide
cacaucuagccgcccuugc

SEQ ID NO: 1691125 - RNA, 19 nt, Artificial Sequence
  Description of Artificial Sequence: Synthetic oligonucleotide
gccagaccuguauuugagg

SEQ ID NO: 1691126 - RNA, 19 nt, Artificial Sequence
  Description of Artificial Sequence: Synthetic oligonucleotide
agacaugugaaagggcaua

SEQ ID NO: 1691127 - RNA, 19 nt, Artificial Sequence
  Description of Artificial Sequence: Synthetic oligonucleotide
agagggugacaauccacuu

SEQ ID NO: 1691128 - RNA, 19 nt, Artificial Sequence
  Description of Artificial Sequence: Synthetic oligonucleotide
acaauccacuugggcacac

SEQ ID NO: 1691129 - RNA, 19 nt, Artificial Sequence
  Description of Artificial Sequence: Synthetic oligonucleotide
acaccguagcucaugggca

SEQ ID NO: 1691130 - RNA, 19 nt, Artificial Sequence
  Description of Artificial Sequence: Synthetic oligonucleotide
caaaggcauuauugaccag

SEQ ID NO: 1691131 - RNA, 19 nt, Artificial Sequence
  Description of Artificial Sequence: Synthetic oligonucleotide
uguucccgaucaacuugcu

SEQ ID NO: 1691132 - RNA, 19 nt, Artificial Sequence
  Description of Artificial Sequence: Synthetic oligonucleotide
ugccacggccaauaccccu

SEQ ID NO: 1691133 - RNA, 19 nt, Artificial Sequence
  Description of Artificial Sequence: Synthetic oligonucleotide
cacgcaguuuugcccacac

SEQ ID NO: 1691134 - RNA, 19 nt, Artificial Sequence
  Description of Artificial Sequence: Synthetic oligonucleotide
cauaggaggaaguggguau

SEQ ID NO: 1691135 - RNA, 19 nt, Artificial Sequence
  Description of Artificial Sequence: Synthetic oligonucleotide
uggcuuauugauggugcuc

SEQ ID NO: 1691136 - RNA, 19 nt, Artificial Sequence
  Description of Artificial Sequence: Synthetic oligonucleotide
ugcucaggauugucuggac

SEQ ID NO: 1691137 - RNA, 19 nt, Artificial Sequence
  Description of Artificial Sequence: Synthetic oligonucleotide
agggcauagcccaaagaaa

SEQ ID NO: 1691138 - RNA, 19 nt, Artificial Sequence
  Description of Artificial Sequence: Synthetic oligonucleotide
gacugggcgaccgucuaca

SEQ ID NO: 1691139 - RNA, 19 nt, Artificial Sequence
  Description of Artificial Sequence: Synthetic oligonucleotide
ccagaccuguauuugagga

SEQ ID NO: 1691140 - RNA, 19 nt, Artificial Sequence
  Description of Artificial Sequence: Synthetic oligonucleotide
agguuagaauuugcuggug

SEQ ID NO: 1691141 - RNA, 19 nt, Artificial Sequence
  Description of Artificial Sequence: Synthetic oligonucleotide
ugcaccaacccuggccaca

SEQ ID NO: 1691142 - RNA, 19 nt, Artificial Sequence
  Description of Artificial Sequence: Synthetic oligonucleotide
aguggguaugugagaagcu

SEQ ID NO: 1691143 - RNA, 19 nt, Artificial Sequence
  Description of Artificial Sequence: Synthetic oligonucleotide
ugaguccaacauuguuuau

SEQ ID NO: 1691144 - RNA, 19 nt, Artificial Sequence
  Description of Artificial Sequence: Synthetic oligonucleotide
gguuagaauuugcuggugu

SEQ ID NO: 1691145 - RNA, 19 nt, Artificial Sequence
  Description of Artificial Sequence: Synthetic oligonucleotide
aacucacuaggcagccgcu

SEQ ID NO: 1691146 - RNA, 19 nt, Artificial Sequence
  Description of Artificial Sequence: Synthetic oligonucleotide
agcacaucuagccgcccuu

SEQ ID NO: 1691147 - RNA, 19 nt, Artificial Sequence
  Description of Artificial Sequence: Synthetic oligonucleotide
caggagguuagaauuugcu

SEQ ID NO: 1691148 - RNA, 19 nt, Artificial Sequence
  Description of Artificial Sequence: Synthetic oligonucleotide
caauccacuugggcacacg

SEQ ID NO: 1691149 - RNA, 19 nt, Artificial Sequence
  Description of Artificial Sequence: Synthetic oligonucleotide
uggacugggcgaccgucua

SEQ ID NO: 1691150 - RNA, 19 nt, Artificial Sequence
  Description of Artificial Sequence: Synthetic oligonucleotide
uuccaccgagacaggccca

SEQ ID NO: 1691151 - RNA, 19 nt, Artificial Sequence
  Description of Artificial Sequence: Synthetic oligonucleotide
cggccaauaccccuggagg

SEQ ID NO: 1691152 - RNA, 19 nt, Artificial Sequence
  Description of Artificial Sequence: Synthetic oligonucleotide
cgcaguuuugcccacacca

SEQ ID NO: 1691153 - RNA, 19 nt, Artificial Sequence
  Description of Artificial Sequence: Synthetic oligonucleotide
ccaggagguuagaauuugc

SEQ ID NO: 1691154 - RNA, 19 nt, Artificial Sequence
  Description of Artificial Sequence: Synthetic oligonucleotide
ugguaccaucagccgugcc

SEQ ID NO: 1691155 - RNA, 19 nt, Artificial Sequence
  Description of Artificial Sequence: Synthetic oligonucleotide
cauaagggacauugaacau

SEQ ID NO: 1691156 - RNA, 19 nt, Artificial Sequence
  Description of Artificial Sequence: Synthetic oligonucleotide
gacgcugccuuugggcuuc

SEQ ID NO: 1691157 - RNA, 19 nt, Artificial Sequence
  Description of Artificial Sequence: Synthetic oligonucleotide
guccaacauuguuuauauc

SEQ ID NO: 1691158 - RNA, 19 nt, Artificial Sequence
  Description of Artificial Sequence: Synthetic oligonucleotide
guagcaccuucccacucaa

SEQ ID NO: 1691159 - RNA, 19 nt, Artificial Sequence
  Description of Artificial Sequence: Synthetic oligonucleotide
cugccaugacucaugucaa

SEQ ID NO: 1691160 - RNA, 19 nt, Artificial Sequence
  Description of Artificial Sequence: Synthetic oligonucleotide
ccgugccccauacacagag

SEQ ID NO: 1691161 - RNA, 19 nt, Artificial Sequence
  Description of Artificial Sequence: Synthetic oligonucleotide
acaaccacgaugaguccuu

SEQ ID NO: 1691162 - RNA, 19 nt, Artificial Sequence
  Description of Artificial Sequence: Synthetic oligonucleotide
gcacaaagaauggaccaga

SEQ ID NO: 1691163 - RNA, 19 nt, Artificial Sequence
  Description of Artificial Sequence: Synthetic oligonucleotide
ugcggccagugauguacac

SEQ ID NO: 1691164 - RNA, 19 nt, Artificial Sequence
  Description of Artificial Sequence: Synthetic oligonucleotide
caguuuugcccacaccaua

SEQ ID NO: 1691165 - RNA, 19 nt, Artificial Sequence
  Description of Artificial Sequence: Synthetic oligonucleotide
gccccauacacagagcaca

SEQ ID NO: 1691166 - RNA, 19 nt, Artificial Sequence
  Description of Artificial Sequence: Synthetic oligonucleotide
cugggcgaccgucuacauc

SEQ ID NO: 1691167 - RNA, 19 nt, Artificial Sequence
  Description of Artificial Sequence: Synthetic oligonucleotide
ucuguucgccagaccugua

SEQ ID NO: 1691168 - RNA, 19 nt, Artificial Sequence
  Description of Artificial Sequence: Synthetic oligonucleotide
auaggggagacaagaucuu

SEQ ID NO: 1691169 - RNA, 19 nt, Artificial Sequence
  Description of Artificial Sequence: Synthetic oligonucleotide
cuagccgcccuugcuguuc

SEQ ID NO: 1691170 - RNA, 19 nt, Artificial Sequence
  Description of Artificial Sequence: Synthetic oligonucleotide
cacacgcaguuuugcccac

SEQ ID NO: 1691171 - RNA, 19 nt, Artificial Sequence
  Description of Artificial Sequence: Synthetic oligonucleotide
agacaggcccagccaccug

SEQ ID NO: 1691172 - RNA, 19 nt, Artificial Sequence
  Description of Artificial Sequence: Synthetic oligonucleotide
gccauagcgccgagcaagg

SEQ ID NO: 1691173 - RNA, 19 nt, Artificial Sequence
  Description of Artificial Sequence: Synthetic oligonucleotide
cugguaccaucagccgugc

SEQ ID NO: 1691174 - RNA, 19 nt, Artificial Sequence
  Description of Artificial Sequence: Synthetic oligonucleotide
cugcuuuguuccaccgaga

SEQ ID NO: 1691175 - RNA, 19 nt, Artificial Sequence
  Description of Artificial Sequence: Synthetic oligonucleotide
ggguguccagauugcggcc

SEQ ID NO: 1691176 - RNA, 19 nt, Artificial Sequence
  Description of Artificial Sequence: Synthetic oligonucleotide
uaccaucagccgugcccca

SEQ ID NO: 1691177 - RNA, 19 nt, Artificial Sequence
  Description of Artificial Sequence: Synthetic oligonucleotide
gauguacacuguggcaccu

SEQ ID NO: 1691178 - RNA, 19 nt, Artificial Sequence
  Description of Artificial Sequence: Synthetic oligonucleotide
gccuucuuaaacaaagaau

SEQ ID NO: 1691179 - RNA, 19 nt, Artificial Sequence
  Description of Artificial Sequence: Synthetic oligonucleotide
gcgccgagcaaggucacag

SEQ ID NO: 1691180 - RNA, 19 nt, Artificial Sequence
  Description of Artificial Sequence: Synthetic oligonucleotide
gcaccagucaccacacaca

SEQ ID NO: 1691181 - RNA, 19 nt, Artificial Sequence
  Description of Artificial Sequence: Synthetic oligonucleotide
ucuagccgcccuugcuguu

SEQ ID NO: 1691182 - RNA, 19 nt, Artificial Sequence
  Description of Artificial Sequence: Synthetic oligonucleotide
uagcgccgagcaaggucac

SEQ ID NO: 1691183 - RNA, 19 nt, Artificial Sequence
  Description of Artificial Sequence: Synthetic oligonucleotide
cugacuccaugacaccgua

SEQ ID NO: 1691184 - RNA, 19 nt, Artificial Sequence
  Description of Artificial Sequence: Synthetic oligonucleotide
guucgccagaccuguauuu

SEQ ID NO: 1691185 - RNA, 19 nt, Artificial Sequence
  Description of Artificial Sequence: Synthetic oligonucleotide
uguccagauugcggccagu

SEQ ID NO: 1691186 - RNA, 19 nt, Artificial Sequence
  Description of Artificial Sequence: Synthetic oligonucleotide
cagguaggaggucagccau

SEQ ID NO: 1691187 - RNA, 19 nt, Artificial Sequence
  Description of Artificial Sequence: Synthetic oligonucleotide
ggaggauaucugccgcaga

SEQ ID NO: 1691188 - RNA, 19 nt, Artificial Sequence
  Description of Artificial Sequence: Synthetic oligonucleotide
gcccacaccauaagggaca

SEQ ID NO: 1691189 - RNA, 19 nt, Artificial Sequence
  Description of Artificial Sequence: Synthetic oligonucleotide
gccaauaccccuggaggca

SEQ ID NO: 1691190 - RNA, 19 nt, Artificial Sequence
  Description of Artificial Sequence: Synthetic oligonucleotide
auaccccuggaggcaccag

SEQ ID NO: 1691191 - RNA, 19 nt, Artificial Sequence
  Description of Artificial Sequence: Synthetic oligonucleotide
gccacggccaauaccccug

SEQ ID NO: 1691192 - RNA, 19 nt, Artificial Sequence
  Description of Artificial Sequence: Synthetic oligonucleotide
cacucauuucugggcuuuc

SEQ ID NO: 1691193 - RNA, 19 nt, Artificial Sequence
  Description of Artificial Sequence: Synthetic oligonucleotide
ccaauaccccuggaggcac

SEQ ID NO: 1691194 - RNA, 19 nt, Artificial Sequence
  Description of Artificial Sequence: Synthetic oligonucleotide
gcgaccgucuacauccuga

SEQ ID NO: 1691195 - RNA, 19 nt, Artificial Sequence
  Description of Artificial Sequence: Synthetic oligonucleotide
acacgcaguuuugcccaca

SEQ ID NO: 1691196 - RNA, 19 nt, Artificial Sequence
  Description of Artificial Sequence: Synthetic oligonucleotide
gggcaguagcucuaagggu

SEQ ID NO: 1691197 - RNA, 19 nt, Artificial Sequence
  Description of Artificial Sequence: Synthetic oligonucleotide
gugaaagggcauagcccaa

SEQ ID NO: 1691198 - RNA, 19 nt, Artificial Sequence
  Description of Artificial Sequence: Synthetic oligonucleotide
ccagauugcggccagugau

SEQ ID NO: 1691199 - RNA, 19 nt, Artificial Sequence
  Description of Artificial Sequence: Synthetic oligonucleotide
ggcuugaaucacacaccac

SEQ ID NO: 1691200 - RNA, 19 nt, Artificial Sequence
  Description of Artificial Sequence: Synthetic oligonucleotide
cuguucgccagaccuguau

SEQ ID NO: 1691201 - RNA, 19 nt, Artificial Sequence
  Description of Artificial Sequence: Synthetic oligonucleotide
ggacugggcgaccgucuac

SEQ ID NO: 1691202 - RNA, 19 nt, Artificial Sequence
  Description of Artificial Sequence: Synthetic oligonucleotide
ugccgcagacgcugccuuu

SEQ ID NO: 1691203 - RNA, 19 nt, Artificial Sequence
  Description of Artificial Sequence: Synthetic oligonucleotide
cccauacacagagcacaag

SEQ ID NO: 1691204 - RNA, 19 nt, Artificial Sequence
  Description of Artificial Sequence: Synthetic oligonucleotide
ggcgaccgucuacauccug

SEQ ID NO: 1691205 - RNA, 19 nt, Artificial Sequence
  Description of Artificial Sequence: Synthetic oligonucleotide
ccccaagggacugugccuc

SEQ ID NO: 1691206 - RNA, 19 nt, Artificial Sequence
  Description of Artificial Sequence: Synthetic oligonucleotide
gcucaugggcacagucagc

SEQ ID NO: 1691207 - RNA, 19 nt, Artificial Sequence
  Description of Artificial Sequence: Synthetic oligonucleotide
agcgccgagcaaggucaca

SEQ ID NO: 1691208 - RNA, 19 nt, Artificial Sequence
  Description of Artificial Sequence: Synthetic oligonucleotide
ccgcagacgcugccuuugg

SEQ ID NO: 1691209 - RNA, 19 nt, Artificial Sequence
  Description of Artificial Sequence: Synthetic oligonucleotide
guacacuguggcaccugcu

SEQ ID NO: 1691210 - RNA, 19 nt, Artificial Sequence
  Description of Artificial Sequence: Synthetic oligonucleotide
gaccuguauuugaggacuu

SEQ ID NO: 1691211 - RNA, 19 nt, Artificial Sequence
  Description of Artificial Sequence: Synthetic oligonucleotide
gcugacuccaugacaccgu

SEQ ID NO: 1691212 - RNA, 19 nt, Artificial Sequence
  Description of Artificial Sequence: Synthetic oligonucleotide
gcaguuuugcccacaccau

SEQ ID NO: 1691213 - RNA, 19 nt, Artificial Sequence
  Description of Artificial Sequence: Synthetic oligonucleotide
cuacauccugaaggccaua

SEQ ID NO: 1691214 - RNA, 19 nt, Artificial Sequence
  Description of Artificial Sequence: Synthetic oligonucleotide
cgaccgucuacauccugaa

SEQ ID NO: 1691215 - RNA, 19 nt, Artificial Sequence
  Description of Artificial Sequence: Synthetic oligonucleotide
gguaucaggccaggagguu

SEQ ID NO: 1691216 - RNA, 19 nt, Artificial Sequence
  Description of Artificial Sequence: Synthetic oligonucleotide
ccgcccuugcuguucccga

SEQ ID NO: 1691217 - RNA, 19 nt, Artificial Sequence
  Description of Artificial Sequence: Synthetic oligonucleotide
ccaccgagacaggcccagc

SEQ ID NO: 1691218 - RNA, 19 nt, Artificial Sequence
  Description of Artificial Sequence: Synthetic oligonucleotide
caaccacgaugaguccuuu

SEQ ID NO: 1691219 - RNA, 19 nt, Artificial Sequence
  Description of Artificial Sequence: Synthetic oligonucleotide
gccgugccccauacacaga

SEQ ID NO: 1691220 - RNA, 19 nt, Artificial Sequence
  Description of Artificial Sequence: Synthetic oligonucleotide
ccacucauuucugggcuuu

SEQ ID NO: 1691221 - RNA, 19 nt, Artificial Sequence
  Description of Artificial Sequence: Synthetic oligonucleotide
cccgaucaacuugcucaaa

SEQ ID NO: 1691222 - RNA, 19 nt, Artificial Sequence
  Description of Artificial Sequence: Synthetic oligonucleotide
ccaugacaccguagcucau

SEQ ID NO: 1691223 - RNA, 19 nt, Artificial Sequence
  Description of Artificial Sequence: Synthetic oligonucleotide
gggcgaccgucuacauccu

SEQ ID NO: 1691224 - RNA, 19 nt, Artificial Sequence
  Description of Artificial Sequence: Synthetic oligonucleotide
ccauagcgccgagcaaggu

SEQ ID NO: 1691225 - RNA, 19 nt, Artificial Sequence
  Description of Artificial Sequence: Synthetic oligonucleotide
cgcccuugcuguucccgau

SEQ ID NO: 1691226 - RNA, 19 nt, Artificial Sequence
  Description of Artificial Sequence: Synthetic oligonucleotide
aaucauaauauauauaagc

SEQ ID NO: 1691227 - RNA, 19 nt, Artificial Sequence
  Description of Artificial Sequence: Synthetic oligonucleotide
aauaacacaaauuuuacuc

SEQ ID NO: 1691228 - RNA, 19 nt, Artificial Sequence
  Description of Artificial Sequence: Synthetic oligonucleotide
uuucuaguaauauagaccg

SEQ ID NO: 1691229 - RNA, 19 nt, Artificial Sequence
  Description of Artificial Sequence: Synthetic oligonucleotide
uuuaugacuuguuucaugg

SEQ ID NO: 1691230 - RNA, 19 nt, Artificial Sequence
  Description of Artificial Sequence: Synthetic oligonucleotide
uaaauaaugagguaacuug

SEQ ID NO: 1691231 - RNA, 19 nt, Artificial Sequence
  Description of Artificial Sequence: Synthetic oligonucleotide
acaguaguaaaauaccacc

SEQ ID NO: 1691232 - RNA, 19 nt, Artificial Sequence
  Description of Artificial Sequence: Synthetic oligonucleotide
auaacacaaauuuuacucc

SEQ ID NO: 1691233 - RNA, 19 nt, Artificial Sequence
  Description of Artificial Sequence: Synthetic oligonucleotide
aacaauucauuuucauugc

SEQ ID NO: 1691234 - RNA, 19 nt, Artificial Sequence
  Description of Artificial Sequence: Synthetic oligonucleotide
aaugucaaacucuacacug

SEQ ID NO: 1691235 - RNA, 19 nt, Artificial Sequence
  Description of Artificial Sequence: Synthetic oligonucleotide
auuaacuguacacauguac

SEQ ID NO: 1691236 - RNA, 19 nt, Artificial Sequence
  Description of Artificial Sequence: Synthetic oligonucleotide
uuuucuaguaauauagacc

SEQ ID NO: 1691237 - RNA, 19 nt, Artificial Sequence
  Description of Artificial Sequence: Synthetic oligonucleotide
uauauaagcaauagaauac

SEQ ID NO: 1691238 - RNA, 19 nt, Artificial Sequence
  Description of Artificial Sequence: Synthetic oligonucleotide
ucuggaaagucucacacgg

SEQ ID NO: 1691239 - RNA, 19 nt, Artificial Sequence
  Description of Artificial Sequence: Synthetic oligonucleotide
aaauugucuaaguugcuuc

SEQ ID NO: 1691240 - RNA, 19 nt, Artificial Sequence
  Description of Artificial Sequence: Synthetic oligonucleotide
aaugagguaacuuguuuuc

SEQ ID NO: 1691241 - RNA, 19 nt, Artificial Sequence
  Description of Artificial Sequence: Synthetic oligonucleotide
cuaaucuuuauccugacag

SEQ ID NO: 1691242 - RNA, 19 nt, Artificial Sequence
  Description of Artificial Sequence: Synthetic oligonucleotide
uaauuuuccacuuucagaa

SEQ ID NO: 1691243 - RNA, 19 nt, Artificial Sequence
  Description of Artificial Sequence: Synthetic oligonucleotide
aaaguagaaacaccucuac

SEQ ID NO: 1691244 - RNA, 19 nt, Artificial Sequence
  Description of Artificial Sequence: Synthetic oligonucleotide
agcaauagaauacauuuuc

SEQ ID NO: 1691245 - RNA, 19 nt, Artificial Sequence
  Description of Artificial Sequence: Synthetic oligonucleotide
uuucauuggagaaagaaaa

SEQ ID NO: 1691246 - RNA, 19 nt, Artificial Sequence
  Description of Artificial Sequence: Synthetic oligonucleotide
uaauuaacuguacacaugu

SEQ ID NO: 1691247 - RNA, 19 nt, Artificial Sequence
  Description of Artificial Sequence: Synthetic oligonucleotide
auuucuaucagcccuuugg

SEQ ID NO: 1691248 - RNA, 19 nt, Artificial Sequence
  Description of Artificial Sequence: Synthetic oligonucleotide
uucucuaaguucaaaaccc

SEQ ID NO: 1691249 - RNA, 19 nt, Artificial Sequence
  Description of Artificial Sequence: Synthetic oligonucleotide
cuuggucuaaucuuuaucc

SEQ ID NO: 1691250 - RNA, 19 nt, Artificial Sequence
  Description of Artificial Sequence: Synthetic oligonucleotide
uaagcaauagaauacauuu

SEQ ID NO: 1691251 - RNA, 19 nt, Artificial Sequence
  Description of Artificial Sequence: Synthetic oligonucleotide
uuaguaauuaacuguacac

SEQ ID NO: 1691252 - RNA, 19 nt, Artificial Sequence
  Description of Artificial Sequence: Synthetic oligonucleotide
aguaauauagaccgauuuc

SEQ ID NO: 1691253 - RNA, 19 nt, Artificial Sequence
  Description of Artificial Sequence: Synthetic oligonucleotide
uauuauacucuaauuuucc

SEQ ID NO: 1691254 - RNA, 19 nt, Artificial Sequence
  Description of Artificial Sequence: Synthetic oligonucleotide
aacauucuaugcuuggauc

SEQ ID NO: 1691255 - RNA, 19 nt, Artificial Sequence
  Description of Artificial Sequence: Synthetic oligonucleotide
auauauaagcaauagaaua

SEQ ID NO: 1691256 - RNA, 19 nt, Artificial Sequence
  Description of Artificial Sequence: Synthetic oligonucleotide
ucuucugucauccaucucu

SEQ ID NO: 1691257 - RNA, 19 nt, Artificial Sequence
  Description of Artificial Sequence: Synthetic oligonucleotide
agaaucuaggcucugcugg

SEQ ID NO: 1691258 - RNA, 19 nt, Artificial Sequence
  Description of Artificial Sequence: Synthetic oligonucleotide
aaaaucaaacaagacuggg

SEQ ID NO: 1691259 - RNA, 19 nt, Artificial Sequence
  Description of Artificial Sequence: Synthetic oligonucleotide
ugcaaauuagauuuaacaa

SEQ ID NO: 1691260 - RNA, 19 nt, Artificial Sequence
  Description of Artificial Sequence: Synthetic oligonucleotide
ucuaaguucaaaacccaag

SEQ ID NO: 1691261 - RNA, 19 nt, Artificial Sequence
  Description of Artificial Sequence: Synthetic oligonucleotide
uaugacuuguuucaugggc

SEQ ID NO: 1691262 - RNA, 19 nt, Artificial Sequence
  Description of Artificial Sequence: Synthetic oligonucleotide
ucuuuuauccauuccuggg

SEQ ID NO: 1691263 - RNA, 19 nt, Artificial Sequence
  Description of Artificial Sequence: Synthetic oligonucleotide
acugggaaaauucagggug

SEQ ID NO: 1691264 - RNA, 19 nt, Artificial Sequence
  Description of Artificial Sequence: Synthetic oligonucleotide
uuuucuugcugacuaaggc

SEQ ID NO: 1691265 - RNA, 19 nt, Artificial Sequence
  Description of Artificial Sequence: Synthetic oligonucleotide
uuuaucuaaauuagcauua

SEQ ID NO: 1691266 - RNA, 19 nt, Artificial Sequence
  Description of Artificial Sequence: Synthetic oligonucleotide
uaaauuagcauuauuucuu

SEQ ID NO: 1691267 - RNA, 19 nt, Artificial Sequence
  Description of Artificial Sequence: Synthetic oligonucleotide
ucuaaaaggaauagauucu

SEQ ID NO: 1691268 - RNA, 19 nt, Artificial Sequence
  Description of Artificial Sequence: Synthetic oligonucleotide
uauacucuaauuuuccacu

SEQ ID NO: 1691269 - RNA, 19 nt, Artificial Sequence
  Description of Artificial Sequence: Synthetic oligonucleotide
ucuuuauccugacagcucc

SEQ ID NO: 1691270 - RNA, 19 nt, Artificial Sequence
  Description of Artificial Sequence: Synthetic oligonucleotide
aauagauucuucgaagucu

SEQ ID NO: 1691271 - RNA, 19 nt, Artificial Sequence
  Description of Artificial Sequence: Synthetic oligonucleotide
acaaauuuuacuccugucu

SEQ ID NO: 1691272 - RNA, 19 nt, Artificial Sequence
  Description of Artificial Sequence: Synthetic oligonucleotide
guauauaucaucuaauuua

SEQ ID NO: 1691273 - RNA, 19 nt, Artificial Sequence
  Description of Artificial Sequence: Synthetic oligonucleotide
aaaggaauagauucuucga

SEQ ID NO: 1691274 - RNA, 19 nt, Artificial Sequence
  Description of Artificial Sequence: Synthetic oligonucleotide
aacuugauggacaaaguag

SEQ ID NO: 1691275 - RNA, 19 nt, Artificial Sequence
  Description of Artificial Sequence: Synthetic oligonucleotide
aaauaccaccaauacuaac

SEQ ID NO: 1691276 - RNA, 19 nt, Artificial Sequence
  Description of Artificial Sequence: Synthetic oligonucleotide
aaguucaaaacccaagaau

SEQ ID NO: 1691277 - RNA, 19 nt, Artificial Sequence
  Description of Artificial Sequence: Synthetic oligonucleotide
ucauaauauauauaagcaa

SEQ ID NO: 1691278 - RNA, 19 nt, Artificial Sequence
  Description of Artificial Sequence: Synthetic oligonucleotide
guagcuaucagaaucuagg

SEQ ID NO: 1691279 - RNA, 19 nt, Artificial Sequence
  Description of Artificial Sequence: Synthetic oligonucleotide
agagaaaguaacuuuaaaa

SEQ ID NO: 1691280 - RNA, 19 nt, Artificial Sequence
  Description of Artificial Sequence: Synthetic oligonucleotide
uggguauucucuaaguuca

SEQ ID NO: 1691281 - RNA, 19 nt, Artificial Sequence
  Description of Artificial Sequence: Synthetic oligonucleotide
ucugaugucgucuuuuaug

SEQ ID NO: 1691282 - RNA, 19 nt, Artificial Sequence
  Description of Artificial Sequence: Synthetic oligonucleotide
uuguuuucuacaacaugcg

SEQ ID NO: 1691283 - RNA, 19 nt, Artificial Sequence
  Description of Artificial Sequence: Synthetic oligonucleotide
uguaguucaccauuuuaag

SEQ ID NO: 1691284 - RNA, 19 nt, Artificial Sequence
  Description of Artificial Sequence: Synthetic oligonucleotide
uauagaccgauuucuauca

SEQ ID NO: 1691285 - RNA, 19 nt, Artificial Sequence
  Description of Artificial Sequence: Synthetic oligonucleotide
uggagaaccuuuuaaaagu

SEQ ID NO: 1691286 - RNA, 19 nt, Artificial Sequence
  Description of Artificial Sequence: Synthetic oligonucleotide
ucuguguaagucuggaaag

SEQ ID NO: 1691287 - RNA, 19 nt, Artificial Sequence
  Description of Artificial Sequence: Synthetic oligonucleotide
uuuucauuggagaaagaaa

SEQ ID NO: 1691288 - RNA, 19 nt, Artificial Sequence
  Description of Artificial Sequence: Synthetic oligonucleotide
aaaugucaaacucuacacu

SEQ ID NO: 1691289 - RNA, 19 nt, Artificial Sequence
  Description of Artificial Sequence: Synthetic oligonucleotide
uuucuuuuauccauuccug

SEQ ID NO: 1691290 - RNA, 19 nt, Artificial Sequence
  Description of Artificial Sequence: Synthetic oligonucleotide
uauucucuaaguucaaaac

SEQ ID NO: 1691291 - RNA, 19 nt, Artificial Sequence
  Description of Artificial Sequence: Synthetic oligonucleotide
aguaauuaacuguacacau

SEQ ID NO: 1691292 - RNA, 19 nt, Artificial Sequence
  Description of Artificial Sequence: Synthetic oligonucleotide
auuauuuucuugcugacua

SEQ ID NO: 1691293 - RNA, 19 nt, Artificial Sequence
  Description of Artificial Sequence: Synthetic oligonucleotide
ucuaucagcccuuuggaga

SEQ ID NO: 1691294 - RNA, 19 nt, Artificial Sequence
  Description of Artificial Sequence: Synthetic oligonucleotide
uuauacucuaauuuuccac

SEQ ID NO: 1691295 - RNA, 19 nt, Artificial Sequence
  Description of Artificial Sequence: Synthetic oligonucleotide
auaccaccaauacuaacac

SEQ ID NO: 1691296 - RNA, 19 nt, Artificial Sequence
  Description of Artificial Sequence: Synthetic oligonucleotide
aguucaccauuuuaaguac

SEQ ID NO: 1691297 - RNA, 19 nt, Artificial Sequence
  Description of Artificial Sequence: Synthetic oligonucleotide
acugauaguagcuaucaga

SEQ ID NO: 1691298 - RNA, 19 nt, Artificial Sequence
  Description of Artificial Sequence: Synthetic oligonucleotide
ucaaacauucuaugcuugg

SEQ ID NO: 1691299 - RNA, 19 nt, Artificial Sequence
  Description of Artificial Sequence: Synthetic oligonucleotide
uccacuuucagaacuagaa

SEQ ID NO: 1691300 - RNA, 19 nt, Artificial Sequence
  Description of Artificial Sequence: Synthetic oligonucleotide
aaaauucagggugguaugg

SEQ ID NO: 1691301 - RNA, 19 nt, Artificial Sequence
  Description of Artificial Sequence: Synthetic oligonucleotide
aucaucuaauuuauuauac

SEQ ID NO: 1691302 - RNA, 19 nt, Artificial Sequence
  Description of Artificial Sequence: Synthetic oligonucleotide
cauaagcugguaaauaaug

SEQ ID NO: 1691303 - RNA, 19 nt, Artificial Sequence
  Description of Artificial Sequence: Synthetic oligonucleotide
agcuuuaucaucccuuguc

SEQ ID NO: 1691304 - RNA, 19 nt, Artificial Sequence
  Description of Artificial Sequence: Synthetic oligonucleotide
aguagaaacaccucuacuu

SEQ ID NO: 1691305 - RNA, 19 nt, Artificial Sequence
  Description of Artificial Sequence: Synthetic oligonucleotide
ugagccaggauuauuuucu

SEQ ID NO: 1691306 - RNA, 19 nt, Artificial Sequence
  Description of Artificial Sequence: Synthetic oligonucleotide
auugacucaucccaaagga

SEQ ID NO: 1691307 - RNA, 19 nt, Artificial Sequence
  Description of Artificial Sequence: Synthetic oligonucleotide
uaguucaccauuuuaagua

SEQ ID NO: 1691308 - RNA, 19 nt, Artificial Sequence
  Description of Artificial Sequence: Synthetic oligonucleotide
aaggaauagauucuucgaa

SEQ ID NO: 1691309 - RNA, 19 nt, Artificial Sequence
  Description of Artificial Sequence: Synthetic oligonucleotide
aucauaauauauauaagca

SEQ ID NO: 1691310 - RNA, 19 nt, Artificial Sequence
  Description of Artificial Sequence: Synthetic oligonucleotide
aauugucuaaguugcuuca

SEQ ID NO: 1691311 - RNA, 19 nt, Artificial Sequence
  Description of Artificial Sequence: Synthetic oligonucleotide
aaacccaagaauugacuca

SEQ ID NO: 1691312 - RNA, 19 nt, Artificial Sequence
  Description of Artificial Sequence: Synthetic oligonucleotide
aaucagagaaaguaacuuu

SEQ ID NO: 1691313 - RNA, 19 nt, Artificial Sequence
  Description of Artificial Sequence: Synthetic oligonucleotide
aaauaaugagguaacuugu

SEQ ID NO: 1691314 - RNA, 19 nt, Artificial Sequence
  Description of Artificial Sequence: Synthetic oligonucleotide
uuguuaguaauuaacugua

SEQ ID NO: 1691315 - RNA, 19 nt, Artificial Sequence
  Description of Artificial Sequence: Synthetic oligonucleotide
aaucuuuauccugacagcu

SEQ ID NO: 1691316 - RNA, 19 nt, Artificial Sequence
  Description of Artificial Sequence: Synthetic oligonucleotide
uuuaaguacaugauuucua

SEQ ID NO: 1691317 - RNA, 19 nt, Artificial Sequence
  Description of Artificial Sequence: Synthetic oligonucleotide
uuaaguacaugauuucuau

SEQ ID NO: 1691318 - RNA, 19 nt, Artificial Sequence
  Description of Artificial Sequence: Synthetic oligonucleotide
agaccgauuucuaucagcc

SEQ ID NO: 1691319 - RNA, 19 nt, Artificial Sequence
  Description of Artificial Sequence: Synthetic oligonucleotide
aaacauucuaugcuuggau

SEQ ID NO: 1691320 - RNA, 19 nt, Artificial Sequence
  Description of Artificial Sequence: Synthetic oligonucleotide
uaugcuuggaucuucuguc

SEQ ID NO: 1691321 - RNA, 19 nt, Artificial Sequence
  Description of Artificial Sequence: Synthetic oligonucleotide
gaaacaaucucucgugaac

SEQ ID NO: 1691322 - RNA, 19 nt, Artificial Sequence
  Description of Artificial Sequence: Synthetic oligonucleotide
uaguaauuaacuguacaca

SEQ ID NO: 1691323 - RNA, 19 nt, Artificial Sequence
  Description of Artificial Sequence: Synthetic oligonucleotide
uucuacaacaugcgaacug

SEQ ID NO: 1691324 - RNA, 19 nt, Artificial Sequence
  Description of Artificial Sequence: Synthetic oligonucleotide
gaaaauucagggugguaug

SEQ ID NO: 1691325 - RNA, 19 nt, Artificial Sequence
  Description of Artificial Sequence: Synthetic oligonucleotide
uggaaagucucacacggga

SEQ ID NO: 1691326 - RNA, 19 nt, Artificial Sequence
  Description of Artificial Sequence: Synthetic oligonucleotide
ugguaaauaaugagguaac

SEQ ID NO: 1691327 - RNA, 19 nt, Artificial Sequence
  Description of Artificial Sequence: Synthetic oligonucleotide
uuaucaucccuugucuugg

SEQ ID NO: 1691328 - RNA, 19 nt, Artificial Sequence
  Description of Artificial Sequence: Synthetic oligonucleotide
uaucaucuaauuuauuaua

SEQ ID NO: 1691329 - RNA, 19 nt, Artificial Sequence
  Description of Artificial Sequence: Synthetic oligonucleotide
aaaucagagaaaguaacuu

SEQ ID NO: 1691330 - RNA, 19 nt, Artificial Sequence
  Description of Artificial Sequence: Synthetic oligonucleotide
caagaauugacucauccca

SEQ ID NO: 1691331 - RNA, 19 nt, Artificial Sequence
  Description of Artificial Sequence: Synthetic oligonucleotide
uagacugcuguguaguuca

SEQ ID NO: 1691332 - RNA, 19 nt, Artificial Sequence
  Description of Artificial Sequence: Synthetic oligonucleotide
acaacaugcgaacuguugu

SEQ ID NO: 1691333 - RNA, 19 nt, Artificial Sequence
  Description of Artificial Sequence: Synthetic oligonucleotide
aauucagggugguauggcu

SEQ ID NO: 1691334 - RNA, 19 nt, Artificial Sequence
  Description of Artificial Sequence: Synthetic oligonucleotide
aaacaaucucucgugaacu

SEQ ID NO: 1691335 - RNA, 19 nt, Artificial Sequence
  Description of Artificial Sequence: Synthetic oligonucleotide
uuguaaaugucaaacucua

SEQ ID NO: 1691336 - RNA, 19 nt, Artificial Sequence
  Description of Artificial Sequence: Synthetic oligonucleotide
cugcaaauuagauuuaaca

SEQ ID NO: 1691337 - RNA, 19 nt, Artificial Sequence
  Description of Artificial Sequence: Synthetic oligonucleotide
aacaaucucucgugaacug

SEQ ID NO: 1691338 - RNA, 19 nt, Artificial Sequence
  Description of Artificial Sequence: Synthetic oligonucleotide
uguuuucuacaacaugcga

SEQ ID NO: 1691339 - RNA, 19 nt, Artificial Sequence
  Description of Artificial Sequence: Synthetic oligonucleotide
aaguagaaacaccucuacu

SEQ ID NO: 1691340 - RNA, 19 nt, Artificial Sequence
  Description of Artificial Sequence: Synthetic oligonucleotide
uacaacaugcgaacuguug

SEQ ID NO: 1691341 - RNA, 19 nt, Artificial Sequence
  Description of Artificial Sequence: Synthetic oligonucleotide
ucuaguaauauagaccgau

SEQ ID NO: 1691342 - RNA, 19 nt, Artificial Sequence
  Description of Artificial Sequence: Synthetic oligonucleotide
guuaguaauuaacuguaca

SEQ ID NO: 1691343 - RNA, 19 nt, Artificial Sequence
  Description of Artificial Sequence: Synthetic oligonucleotide
aaagucucacacgggaauc

SEQ ID NO: 1691344 - RNA, 19 nt, Artificial Sequence
  Description of Artificial Sequence: Synthetic oligonucleotide
cauuaacacacaacaguag

SEQ ID NO: 1691345 - RNA, 19 nt, Artificial Sequence
  Description of Artificial Sequence: Synthetic oligonucleotide
accgauuucuaucagcccu

SEQ ID NO: 1691346 - RNA, 19 nt, Artificial Sequence
  Description of Artificial Sequence: Synthetic oligonucleotide
aaaguauauaucaucuaau

SEQ ID NO: 1691347 - RNA, 19 nt, Artificial Sequence
  Description of Artificial Sequence: Synthetic oligonucleotide
cucgugaacugauaguagc

SEQ ID NO: 1691348 - RNA, 19 nt, Artificial Sequence
  Description of Artificial Sequence: Synthetic oligonucleotide
auuauacucuaauuuucca

SEQ ID NO: 1691349 - RNA, 19 nt, Artificial Sequence
  Description of Artificial Sequence: Synthetic oligonucleotide
ucucucuguaauuaugggu

SEQ ID NO: 1691350 - RNA, 19 nt, Artificial Sequence
  Description of Artificial Sequence: Synthetic oligonucleotide
ucucacacgggaaucuuug

SEQ ID NO: 1691351 - RNA, 19 nt, Artificial Sequence
  Description of Artificial Sequence: Synthetic oligonucleotide
caccauuuuaaguacauga

SEQ ID NO: 1691352 - RNA, 19 nt, Artificial Sequence
  Description of Artificial Sequence: Synthetic oligonucleotide
uggucuaaucuuuauccug

SEQ ID NO: 1691353 - RNA, 19 nt, Artificial Sequence
  Description of Artificial Sequence: Synthetic oligonucleotide
aaacaccucuacuuaagaa

SEQ ID NO: 1691354 - RNA, 19 nt, Artificial Sequence
  Description of Artificial Sequence: Synthetic oligonucleotide
aucuaaauuagcauuauuu

SEQ ID NO: 1691355 - RNA, 19 nt, Artificial Sequence
  Description of Artificial Sequence: Synthetic oligonucleotide
aguaguaaaauaccaccaa

SEQ ID NO: 1691356 - RNA, 19 nt, Artificial Sequence
  Description of Artificial Sequence: Synthetic oligonucleotide
aacugauaguagcuaucag

SEQ ID NO: 1691357 - RNA, 19 nt, Artificial Sequence
  Description of Artificial Sequence: Synthetic oligonucleotide
aucucucgugaacugauag

SEQ ID NO: 1691358 - RNA, 19 nt, Artificial Sequence
  Description of Artificial Sequence: Synthetic oligonucleotide
auauaagcaauagaauaca

SEQ ID NO: 1691359 - RNA, 19 nt, Artificial Sequence
  Description of Artificial Sequence: Synthetic oligonucleotide
uugcucaaacauucuaugc

SEQ ID NO: 1691360 - RNA, 19 nt, Artificial Sequence
  Description of Artificial Sequence: Synthetic oligonucleotide
auucuucgaagucuggucu

SEQ ID NO: 1691361 - RNA, 19 nt, Artificial Sequence
  Description of Artificial Sequence: Synthetic oligonucleotide
ugucuaaguugcuucauuc

SEQ ID NO: 1691362 - RNA, 19 nt, Artificial Sequence
  Description of Artificial Sequence: Synthetic oligonucleotide
aucuaauuuauuauacucu

SEQ ID NO: 1691363 - RNA, 19 nt, Artificial Sequence
  Description of Artificial Sequence: Synthetic oligonucleotide
uaaugagguaacuuguuuu

SEQ ID NO: 1691364 - RNA, 19 nt, Artificial Sequence
  Description of Artificial Sequence: Synthetic oligonucleotide
uguuaguaauuaacuguac

SEQ ID NO: 1691365 - RNA, 19 nt, Artificial Sequence
  Description of Artificial Sequence: Synthetic oligonucleotide
gauucuucgaagucugguc

SEQ ID NO: 1691366 - RNA, 19 nt, Artificial Sequence
  Description of Artificial Sequence: Synthetic oligonucleotide
caagacugggaaaauucag

SEQ ID NO: 1691367 - RNA, 19 nt, Artificial Sequence
  Description of Artificial Sequence: Synthetic oligonucleotide
gaauagauucuucgaaguc

SEQ ID NO: 1691368 - RNA, 19 nt, Artificial Sequence
  Description of Artificial Sequence: Synthetic oligonucleotide
cucaucuggcuuuuguuag

SEQ ID NO: 1691369 - RNA, 19 nt, Artificial Sequence
  Description of Artificial Sequence: Synthetic oligonucleotide
gucuuuaucuaaauuagca

SEQ ID NO: 1691370 - RNA, 19 nt, Artificial Sequence
  Description of Artificial Sequence: Synthetic oligonucleotide
uucuaugagcaaacaauuc

SEQ ID NO: 1691371 - RNA, 19 nt, Artificial Sequence
  Description of Artificial Sequence: Synthetic oligonucleotide
ucauaagcugguaaauaau

SEQ ID NO: 1691372 - RNA, 19 nt, Artificial Sequence
  Description of Artificial Sequence: Synthetic oligonucleotide
ucuaaucuuuauccugaca

SEQ ID NO: 1691373 - RNA, 19 nt, Artificial Sequence
  Description of Artificial Sequence: Synthetic oligonucleotide
aaaauugucuaaguugcuu

SEQ ID NO: 1691374 - RNA, 19 nt, Artificial Sequence
  Description of Artificial Sequence: Synthetic oligonucleotide
ucuuggucuaaucuuuauc

SEQ ID NO: 1691375 - RNA, 19 nt, Artificial Sequence
  Description of Artificial Sequence: Synthetic oligonucleotide
accucuacuuaagaaaauc

SEQ ID NO: 1691376 - RNA, 19 nt, Artificial Sequence
  Description of Artificial Sequence: Synthetic oligonucleotide
cugauaguagcuaucagaa

SEQ ID NO: 1691377 - RNA, 19 nt, Artificial Sequence
  Description of Artificial Sequence: Synthetic oligonucleotide
uucuaucagcccuuuggag

SEQ ID NO: 1691378 - RNA, 19 nt, Artificial Sequence
  Description of Artificial Sequence: Synthetic oligonucleotide
ucucgugaacugauaguag

SEQ ID NO: 1691379 - RNA, 19 nt, Artificial Sequence
  Description of Artificial Sequence: Synthetic oligonucleotide
caugcgaacuguugugugg

SEQ ID NO: 1691380 - RNA, 19 nt, Artificial Sequence
  Description of Artificial Sequence: Synthetic oligonucleotide
uaaaaguauauaucaucua

SEQ ID NO: 1691381 - RNA, 19 nt, Artificial Sequence
  Description of Artificial Sequence: Synthetic oligonucleotide
ugcuuguaaaugucaaacu

SEQ ID NO: 1691382 - RNA, 19 nt, Artificial Sequence
  Description of Artificial Sequence: Synthetic oligonucleotide
guuucaugggcacuggcac

SEQ ID NO: 1691383 - RNA, 19 nt, Artificial Sequence
  Description of Artificial Sequence: Synthetic oligonucleotide
uguguaguucaccauuuua

SEQ ID NO: 1691384 - RNA, 19 nt, Artificial Sequence
  Description of Artificial Sequence: Synthetic oligonucleotide
uaauauagaccgauuucua

SEQ ID NO: 1691385 - RNA, 19 nt, Artificial Sequence
  Description of Artificial Sequence: Synthetic oligonucleotide
gagguaacuuguuuucuac

SEQ ID NO: 1691386 - RNA, 19 nt, Artificial Sequence
  Description of Artificial Sequence: Synthetic oligonucleotide
ugaacugauaguagcuauc

SEQ ID NO: 1691387 - RNA, 19 nt, Artificial Sequence
  Description of Artificial Sequence: Synthetic oligonucleotide
gaagucuggucucccacag

SEQ ID NO: 1691388 - RNA, 19 nt, Artificial Sequence
  Description of Artificial Sequence: Synthetic oligonucleotide
acuugauggacaaaguaga

SEQ ID NO: 1691389 - RNA, 19 nt, Artificial Sequence
  Description of Artificial Sequence: Synthetic oligonucleotide
ucgugaacugauaguagcu

SEQ ID NO: 1691390 - RNA, 19 nt, Artificial Sequence
  Description of Artificial Sequence: Synthetic oligonucleotide
uagaccgauuucuaucagc

SEQ ID NO: 1691391 - RNA, 19 nt, Artificial Sequence
  Description of Artificial Sequence: Synthetic oligonucleotide
uucaccauuuuaaguacau

SEQ ID NO: 1691392 - RNA, 19 nt, Artificial Sequence
  Description of Artificial Sequence: Synthetic oligonucleotide
cugaugucgucuuuuauga

SEQ ID NO: 1691393 - RNA, 19 nt, Artificial Sequence
  Description of Artificial Sequence: Synthetic oligonucleotide
agcugguaaauaaugaggu

SEQ ID NO: 1691394 - RNA, 19 nt, Artificial Sequence
  Description of Artificial Sequence: Synthetic oligonucleotide
gaaucuaggcucugcuggc

SEQ ID NO: 1691395 - RNA, 19 nt, Artificial Sequence
  Description of Artificial Sequence: Synthetic oligonucleotide
auaaugagguaacuuguuu

SEQ ID NO: 1691396 - RNA, 19 nt, Artificial Sequence
  Description of Artificial Sequence: Synthetic oligonucleotide
uacuaacacaaauucuaaa

SEQ ID NO: 1691397 - RNA, 19 nt, Artificial Sequence
  Description of Artificial Sequence: Synthetic oligonucleotide
ucuguaauuauggguuuca

SEQ ID NO: 1691398 - RNA, 19 nt, Artificial Sequence
  Description of Artificial Sequence: Synthetic oligonucleotide
cucaaacauucuaugcuug

SEQ ID NO: 1691399 - RNA, 19 nt, Artificial Sequence
  Description of Artificial Sequence: Synthetic oligonucleotide
uuggucuaaucuuuauccu

SEQ ID NO: 1691400 - RNA, 19 nt, Artificial Sequence
  Description of Artificial Sequence: Synthetic oligonucleotide
uggcacugucauacgaggg

SEQ ID NO: 1691401 - RNA, 19 nt, Artificial Sequence
  Description of Artificial Sequence: Synthetic oligonucleotide
gaugucgucuuuuaugacu

SEQ ID NO: 1691402 - RNA, 19 nt, Artificial Sequence
  Description of Artificial Sequence: Synthetic oligonucleotide
auagauucuucgaagucug

SEQ ID NO: 1691403 - RNA, 19 nt, Artificial Sequence
  Description of Artificial Sequence: Synthetic oligonucleotide
cucauaagcugguaaauaa

SEQ ID NO: 1691404 - RNA, 19 nt, Artificial Sequence
  Description of Artificial Sequence: Synthetic oligonucleotide
auaguagcuaucagaaucu

SEQ ID NO: 1691405 - RNA, 19 nt, Artificial Sequence
  Description of Artificial Sequence: Synthetic oligonucleotide
caacaguaguaaaauacca

SEQ ID NO: 1691406 - RNA, 19 nt, Artificial Sequence
  Description of Artificial Sequence: Synthetic oligonucleotide
uaugagcaaacaauucauu

SEQ ID NO: 1691407 - RNA, 19 nt, Artificial Sequence
  Description of Artificial Sequence: Synthetic oligonucleotide
guaauauagaccgauuucu

SEQ ID NO: 1691408 - RNA, 19 nt, Artificial Sequence
  Description of Artificial Sequence: Synthetic oligonucleotide
acugcaaauuagauuuaac

SEQ ID NO: 1691409 - RNA, 19 nt, Artificial Sequence
  Description of Artificial Sequence: Synthetic oligonucleotide
cuuguaaaugucaaacucu

SEQ ID NO: 1691410 - RNA, 19 nt, Artificial Sequence
  Description of Artificial Sequence: Synthetic oligonucleotide
agaaacaaucucucgugaa

SEQ ID NO: 1691411 - RNA, 19 nt, Artificial Sequence
  Description of Artificial Sequence: Synthetic oligonucleotide
uuuuaccucaucuggcuuu

SEQ ID NO: 1691412 - RNA, 19 nt, Artificial Sequence
  Description of Artificial Sequence: Synthetic oligonucleotide
uagauucuucgaagucugg

SEQ ID NO: 1691413 - RNA, 19 nt, Artificial Sequence
  Description of Artificial Sequence: Synthetic oligonucleotide
uugucuuggucuaaucuuu

SEQ ID NO: 1691414 - RNA, 19 nt, Artificial Sequence
  Description of Artificial Sequence: Synthetic oligonucleotide
aauaaugagguaacuuguu

SEQ ID NO: 1691415 - RNA, 19 nt, Artificial Sequence
  Description of Artificial Sequence: Synthetic oligonucleotide
gaacugauaguagcuauca

SEQ ID NO: 1691416 - RNA, 19 nt, Artificial Sequence
  Description of Artificial Sequence: Synthetic oligonucleotide
gaccccagcuuuaucaucc

SEQ ID NO: 1691417 - RNA, 19 nt, Artificial Sequence
  Description of Artificial Sequence: Synthetic oligonucleotide
aacccaagaauugacucau

SEQ ID NO: 1691418 - RNA, 19 nt, Artificial Sequence
  Description of Artificial Sequence: Synthetic oligonucleotide
ugaggcugcuucauguuuc

SEQ ID NO: 1691419 - RNA, 19 nt, Artificial Sequence
  Description of Artificial Sequence: Synthetic oligonucleotide
aacaugcgaacuguugugu

SEQ ID NO: 1691420 - RNA, 19 nt, Artificial Sequence
  Description of Artificial Sequence: Synthetic oligonucleotide
uucucuucugaugucgucu

SEQ ID NO: 1691421 - RNA, 19 nt, Artificial Sequence
  Description of Artificial Sequence: Synthetic oligonucleotide
ucuuuuaugcuuggauugu

SEQ ID NO: 1691422 - RNA, 19 nt, Artificial Sequence
  Description of Artificial Sequence: Synthetic oligonucleotide
guuuucuacaacaugcgaa

SEQ ID NO: 1691423 - RNA, 19 nt, Artificial Sequence
  Description of Artificial Sequence: Synthetic oligonucleotide
agaaacaccucuacuuaag

SEQ ID NO: 1691424 - RNA, 19 nt, Artificial Sequence
  Description of Artificial Sequence: Synthetic oligonucleotide
cugguaaauaaugagguaa

SEQ ID NO: 1691425 - RNA, 19 nt, Artificial Sequence
  Description of Artificial Sequence: Synthetic oligonucleotide
ugagguaacuuguuuucua

SEQ ID NO: 1691426 - RNA, 19 nt, Artificial Sequence
  Description of Artificial Sequence: Synthetic oligonucleotide
uucuaugcuuggaucuucu

SEQ ID NO: 1691427 - RNA, 19 nt, Artificial Sequence
  Description of Artificial Sequence: Synthetic oligonucleotide
gagaaacaaucucucguga

SEQ ID NO: 1691428 - RNA, 19 nt, Artificial Sequence
  Description of Artificial Sequence: Synthetic oligonucleotide
uuauuuucuugcugacuaa

SEQ ID NO: 1691429 - RNA, 19 nt, Artificial Sequence
  Description of Artificial Sequence: Synthetic oligonucleotide
uguguaagucuggaaaguc

SEQ ID NO: 1691430 - RNA, 19 nt, Artificial Sequence
  Description of Artificial Sequence: Synthetic oligonucleotide
uuuccuuccuccagguguc

SEQ ID NO: 1691431 - RNA, 19 nt, Artificial Sequence
  Description of Artificial Sequence: Synthetic oligonucleotide
caacaugcgaacuguugug

SEQ ID NO: 1691432 - RNA, 19 nt, Artificial Sequence
  Description of Artificial Sequence: Synthetic oligonucleotide
ugacuuguuucaugggcac

SEQ ID NO: 1691433 - RNA, 19 nt, Artificial Sequence
  Description of Artificial Sequence: Synthetic oligonucleotide
cauugcaacuugauggaca

SEQ ID NO: 1691434 - RNA, 19 nt, Artificial Sequence
  Description of Artificial Sequence: Synthetic oligonucleotide
ucucucgugaacugauagu

SEQ ID NO: 1691435 - RNA, 19 nt, Artificial Sequence
  Description of Artificial Sequence: Synthetic oligonucleotide
uucuaguaauauagaccga

SEQ ID NO: 1691436 - RNA, 19 nt, Artificial Sequence
  Description of Artificial Sequence: Synthetic oligonucleotide
accaauacuaacacaaauu

SEQ ID NO: 1691437 - RNA, 19 nt, Artificial Sequence
  Description of Artificial Sequence: Synthetic oligonucleotide
acacgggaaucuuugcuca

SEQ ID NO: 1691438 - RNA, 19 nt, Artificial Sequence
  Description of Artificial Sequence: Synthetic oligonucleotide
ucgaagucuggucucccac

SEQ ID NO: 1691439 - RNA, 19 nt, Artificial Sequence
  Description of Artificial Sequence: Synthetic oligonucleotide
agaauugacucaucccaaa

SEQ ID NO: 1691440 - RNA, 19 nt, Artificial Sequence
  Description of Artificial Sequence: Synthetic oligonucleotide
guagaaacaccucuacuua

SEQ ID NO: 1691441 - RNA, 19 nt, Artificial Sequence
  Description of Artificial Sequence: Synthetic oligonucleotide
uuaucuaaauuagcauuau

SEQ ID NO: 1691442 - RNA, 19 nt, Artificial Sequence
  Description of Artificial Sequence: Synthetic oligonucleotide
uagcauuauuucuuuuauc

SEQ ID NO: 1691443 - RNA, 19 nt, Artificial Sequence
  Description of Artificial Sequence: Synthetic oligonucleotide
agguaacuuguuuucuaca

SEQ ID NO: 1691444 - RNA, 19 nt, Artificial Sequence
  Description of Artificial Sequence: Synthetic oligonucleotide
aagaauugacucaucccaa

SEQ ID NO: 1691445 - RNA, 19 nt, Artificial Sequence
  Description of Artificial Sequence: Synthetic oligonucleotide
auucuaugcuuggaucuuc

SEQ ID NO: 1691446 - RNA, 19 nt, Artificial Sequence
  Description of Artificial Sequence: Synthetic oligonucleotide
auagaccgauuucuaucag

SEQ ID NO: 1691447 - RNA, 19 nt, Artificial Sequence
  Description of Artificial Sequence: Synthetic oligonucleotide
ucucauaagcugguaaaua

SEQ ID NO: 1691448 - RNA, 19 nt, Artificial Sequence
  Description of Artificial Sequence: Synthetic oligonucleotide
acaugcgaacuguugugug

SEQ ID NO: 1691449 - RNA, 19 nt, Artificial Sequence
  Description of Artificial Sequence: Synthetic oligonucleotide
aguagcuaucagaaucuag

SEQ ID NO: 1691450 - RNA, 19 nt, Artificial Sequence
  Description of Artificial Sequence: Synthetic oligonucleotide
ugucauacgagggcagcug

SEQ ID NO: 1691451 - RNA, 19 nt, Artificial Sequence
  Description of Artificial Sequence: Synthetic oligonucleotide
cacaaauucuaaaaggaau

SEQ ID NO: 1691452 - RNA, 19 nt, Artificial Sequence
  Description of Artificial Sequence: Synthetic oligonucleotide
gucuaaguugcuucauuca

SEQ ID NO: 1691453 - RNA, 19 nt, Artificial Sequence
  Description of Artificial Sequence: Synthetic oligonucleotide
ucuaugcuuggaucuucug

SEQ ID NO: 1691454 - RNA, 19 nt, Artificial Sequence
  Description of Artificial Sequence: Synthetic oligonucleotide
aucuuuauccugacagcuc

SEQ ID NO: 1691455 - RNA, 19 nt, Artificial Sequence
  Description of Artificial Sequence: Synthetic oligonucleotide
aucuaggcucugcuggcuc

SEQ ID NO: 1691456 - RNA, 19 nt, Artificial Sequence
  Description of Artificial Sequence: Synthetic oligonucleotide
uuucaugggcacuggcacu

SEQ ID NO: 1691457 - RNA, 19 nt, Artificial Sequence
  Description of Artificial Sequence: Synthetic oligonucleotide
ccaagaauugacucauccc

SEQ ID NO: 1691458 - RNA, 19 nt, Artificial Sequence
  Description of Artificial Sequence: Synthetic oligonucleotide
cuggaaagucucacacggg

SEQ ID NO: 1691459 - RNA, 19 nt, Artificial Sequence
  Description of Artificial Sequence: Synthetic oligonucleotide
aagucucacacgggaaucu

SEQ ID NO: 1691460 - RNA, 19 nt, Artificial Sequence
  Description of Artificial Sequence: Synthetic oligonucleotide
auaagcaauagaauacauu

SEQ ID NO: 1691461 - RNA, 19 nt, Artificial Sequence
  Description of Artificial Sequence: Synthetic oligonucleotide
ugauaguagcuaucagaau

SEQ ID NO: 1691462 - RNA, 19 nt, Artificial Sequence
  Description of Artificial Sequence: Synthetic oligonucleotide
auuggagaaagaaaacauu

SEQ ID NO: 1691463 - RNA, 19 nt, Artificial Sequence
  Description of Artificial Sequence: Synthetic oligonucleotide
guguaguucaccauuuuaa

SEQ ID NO: 1691464 - RNA, 19 nt, Artificial Sequence
  Description of Artificial Sequence: Synthetic oligonucleotide
aucaucccuugucuugguc

SEQ ID NO: 1691465 - RNA, 19 nt, Artificial Sequence
  Description of Artificial Sequence: Synthetic oligonucleotide
gacaaaguagaaacaccuc

SEQ ID NO: 1691466 - RNA, 19 nt, Artificial Sequence
  Description of Artificial Sequence: Synthetic oligonucleotide
auacucuaauuuuccacuu

SEQ ID NO: 1691467 - RNA, 19 nt, Artificial Sequence
  Description of Artificial Sequence: Synthetic oligonucleotide
ugcuggcucucauaagcug

SEQ ID NO: 1691468 - RNA, 19 nt, Artificial Sequence
  Description of Artificial Sequence: Synthetic oligonucleotide
gauuucuaucagcccuuug

SEQ ID NO: 1691469 - RNA, 19 nt, Artificial Sequence
  Description of Artificial Sequence: Synthetic oligonucleotide
accauuuuaaguacaugau

SEQ ID NO: 1691470 - RNA, 19 nt, Artificial Sequence
  Description of Artificial Sequence: Synthetic oligonucleotide
acacaaauucuaaaaggaa

SEQ ID NO: 1691471 - RNA, 19 nt, Artificial Sequence
  Description of Artificial Sequence: Synthetic oligonucleotide
cauuggagaaagaaaacau

SEQ ID NO: 1691472 - RNA, 19 nt, Artificial Sequence
  Description of Artificial Sequence: Synthetic oligonucleotide
gucauacgagggcagcugc

SEQ ID NO: 1691473 - RNA, 19 nt, Artificial Sequence
  Description of Artificial Sequence: Synthetic oligonucleotide
uuucuacaacaugcgaacu

SEQ ID NO: 1691474 - RNA, 19 nt, Artificial Sequence
  Description of Artificial Sequence: Synthetic oligonucleotide
gaccgauuucuaucagccc

SEQ ID NO: 1691475 - RNA, 19 nt, Artificial Sequence
  Description of Artificial Sequence: Synthetic oligonucleotide
acuggcacugucauacgag

SEQ ID NO: 1691476 - RNA, 19 nt, Artificial Sequence
  Description of Artificial Sequence: Synthetic oligonucleotide
caggccugaccauucuucc

SEQ ID NO: 1691477 - RNA, 19 nt, Artificial Sequence
  Description of Artificial Sequence: Synthetic oligonucleotide
ucaucuggcuuuuguuagu

SEQ ID NO: 1691478 - RNA, 19 nt, Artificial Sequence
  Description of Artificial Sequence: Synthetic oligonucleotide
uccugucuuuaucuaaauu

SEQ ID NO: 1691479 - RNA, 19 nt, Artificial Sequence
  Description of Artificial Sequence: Synthetic oligonucleotide
cuucugucauccaucucuc

SEQ ID NO: 1691480 - RNA, 19 nt, Artificial Sequence
  Description of Artificial Sequence: Synthetic oligonucleotide
ggcacugucauacgagggc

SEQ ID NO: 1691481 - RNA, 19 nt, Artificial Sequence
  Description of Artificial Sequence: Synthetic oligonucleotide
acaccucuacuuaagaaaa

SEQ ID NO: 1691482 - RNA, 19 nt, Artificial Sequence
  Description of Artificial Sequence: Synthetic oligonucleotide
guaguucaccauuuuaagu

SEQ ID NO: 1691483 - RNA, 19 nt, Artificial Sequence
  Description of Artificial Sequence: Synthetic oligonucleotide
uccaucucucuguaauuau

SEQ ID NO: 1691484 - RNA, 19 nt, Artificial Sequence
  Description of Artificial Sequence: Synthetic oligonucleotide
cucucuguaauuauggguu

SEQ ID NO: 1691485 - RNA, 19 nt, Artificial Sequence
  Description of Artificial Sequence: Synthetic oligonucleotide
uucugaugucgucuuuuau

SEQ ID NO: 1691486 - RNA, 19 nt, Artificial Sequence
  Description of Artificial Sequence: Synthetic oligonucleotide
acacacaacaguaguaaaa

SEQ ID NO: 1691487 - RNA, 19 nt, Artificial Sequence
  Description of Artificial Sequence: Synthetic oligonucleotide
ugucguccuucucuucuga

SEQ ID NO: 1691488 - RNA, 19 nt, Artificial Sequence
  Description of Artificial Sequence: Synthetic oligonucleotide
uucgaagucuggucuccca

SEQ ID NO: 1691489 - RNA, 19 nt, Artificial Sequence
  Description of Artificial Sequence: Synthetic oligonucleotide
gaaagucucacacgggaau

SEQ ID NO: 1691490 - RNA, 19 nt, Artificial Sequence
  Description of Artificial Sequence: Synthetic oligonucleotide
ugucuuggucuaaucuuua

SEQ ID NO: 1691491 - RNA, 19 nt, Artificial Sequence
  Description of Artificial Sequence: Synthetic oligonucleotide
uaccaccaauacuaacaca

SEQ ID NO: 1691492 - RNA, 19 nt, Artificial Sequence
  Description of Artificial Sequence: Synthetic oligonucleotide
uguguggaucuguguaagu

SEQ ID NO: 1691493 - RNA, 19 nt, Artificial Sequence
  Description of Artificial Sequence: Synthetic oligonucleotide
auacgagggcagcugcuug

SEQ ID NO: 1691494 - RNA, 19 nt, Artificial Sequence
  Description of Artificial Sequence: Synthetic oligonucleotide
cucacacgggaaucuuugc

SEQ ID NO: 1691495 - RNA, 19 nt, Artificial Sequence
  Description of Artificial Sequence: Synthetic oligonucleotide
acaaucucucgugaacuga

SEQ ID NO: 1691496 - RNA, 19 nt, Artificial Sequence
  Description of Artificial Sequence: Synthetic oligonucleotide
ucucuguaauuauggguuu

SEQ ID NO: 1691497 - RNA, 19 nt, Artificial Sequence
  Description of Artificial Sequence: Synthetic oligonucleotide
aaucuaggcucugcuggcu

SEQ ID NO: 1691498 - RNA, 19 nt, Artificial Sequence
  Description of Artificial Sequence: Synthetic oligonucleotide
cuaugagcaaacaauucau

SEQ ID NO: 1691499 - RNA, 19 nt, Artificial Sequence
  Description of Artificial Sequence: Synthetic oligonucleotide
cuugauggacaaaguagaa

SEQ ID NO: 1691500 - RNA, 19 nt, Artificial Sequence
  Description of Artificial Sequence: Synthetic oligonucleotide
ucccaaaggauuuccucuu

SEQ ID NO: 1691501 - RNA, 19 nt, Artificial Sequence
  Description of Artificial Sequence: Synthetic oligonucleotide
auucagggugguauggcug

SEQ ID NO: 1691502 - RNA, 19 nt, Artificial Sequence
  Description of Artificial Sequence: Synthetic oligonucleotide
guguggaucuguguaaguc

SEQ ID NO: 1691503 - RNA, 19 nt, Artificial Sequence
  Description of Artificial Sequence: Synthetic oligonucleotide
ucauugcaacuugauggac

SEQ ID NO: 1691504 - RNA, 19 nt, Artificial Sequence
  Description of Artificial Sequence: Synthetic oligonucleotide
augagguaacuuguuuucu

SEQ ID NO: 1691505 - RNA, 19 nt, Artificial Sequence
  Description of Artificial Sequence: Synthetic oligonucleotide
ggauuauuuucuugcugac

SEQ ID NO: 1691506 - RNA, 19 nt, Artificial Sequence
  Description of Artificial Sequence: Synthetic oligonucleotide
guaaauaaugagguaacuu

SEQ ID NO: 1691507 - RNA, 19 nt, Artificial Sequence
  Description of Artificial Sequence: Synthetic oligonucleotide
ucuugugcuuacguucuuc

SEQ ID NO: 1691508 - RNA, 19 nt, Artificial Sequence
  Description of Artificial Sequence: Synthetic oligonucleotide
gucuaaucuuuauccugac

SEQ ID NO: 1691509 - RNA, 19 nt, Artificial Sequence
  Description of Artificial Sequence: Synthetic oligonucleotide
ggaauagauucuucgaagu

SEQ ID NO: 1691510 - RNA, 19 nt, Artificial Sequence
  Description of Artificial Sequence: Synthetic oligonucleotide
cgaugcuuuauuuucucag

SEQ ID NO: 1691511 - RNA, 19 nt, Artificial Sequence
  Description of Artificial Sequence: Synthetic oligonucleotide
uccauuccuggguauucuc

SEQ ID NO: 1691512 - RNA, 19 nt, Artificial Sequence
  Description of Artificial Sequence: Synthetic oligonucleotide
ggucuaaucuuuauccuga

SEQ ID NO: 1691513 - RNA, 19 nt, Artificial Sequence
  Description of Artificial Sequence: Synthetic oligonucleotide
aauuaacuguacacaugua

SEQ ID NO: 1691514 - RNA, 19 nt, Artificial Sequence
  Description of Artificial Sequence: Synthetic oligonucleotide
cucuaaguucaaaacccaa

SEQ ID NO: 1691515 - RNA, 19 nt, Artificial Sequence
  Description of Artificial Sequence: Synthetic oligonucleotide
augcgaacuguugugugga

SEQ ID NO: 1691516 - RNA, 19 nt, Artificial Sequence
  Description of Artificial Sequence: Synthetic oligonucleotide
agggugguauggcuguaga

SEQ ID NO: 1691517 - RNA, 19 nt, Artificial Sequence
  Description of Artificial Sequence: Synthetic oligonucleotide
cuaugcuuggaucuucugu

SEQ ID NO: 1691518 - RNA, 19 nt, Artificial Sequence
  Description of Artificial Sequence: Synthetic oligonucleotide
cucucgugaacugauagua

SEQ ID NO: 1691519 - RNA, 19 nt, Artificial Sequence
  Description of Artificial Sequence: Synthetic oligonucleotide
caaacauucuaugcuugga

SEQ ID NO: 1691520 - RNA, 19 nt, Artificial Sequence
  Description of Artificial Sequence: Synthetic oligonucleotide
uuuauccugacagcuccuu

SEQ ID NO: 1691521 - RNA, 19 nt, Artificial Sequence
  Description of Artificial Sequence: Synthetic oligonucleotide
ugggaaaauucaggguggu

SEQ ID NO: 1691522 - RNA, 19 nt, Artificial Sequence
  Description of Artificial Sequence: Synthetic oligonucleotide
acugugugagccaggauua

SEQ ID NO: 1691523 - RNA, 19 nt, Artificial Sequence
  Description of Artificial Sequence: Synthetic oligonucleotide
ggaaaauucagggugguau

SEQ ID NO: 1691524 - RNA, 19 nt, Artificial Sequence
  Description of Artificial Sequence: Synthetic oligonucleotide
cuacacugugugagccagg

SEQ ID NO: 1691525 - RNA, 19 nt, Artificial Sequence
  Description of Artificial Sequence: Synthetic oligonucleotide
ggacaaaguagaaacaccu

SEQ ID NO: 1691526 - RNA, 19 nt, Artificial Sequence
  Description of Artificial Sequence: Synthetic oligonucleotide
uuuaccucaucuggcuuuu

SEQ ID NO: 1691527 - RNA, 19 nt, Artificial Sequence
  Description of Artificial Sequence: Synthetic oligonucleotide
uggcuguagacugcugugu

SEQ ID NO: 1691528 - RNA, 19 nt, Artificial Sequence
  Description of Artificial Sequence: Synthetic oligonucleotide
uaucaucccuugucuuggu

SEQ ID NO: 1691529 - RNA, 19 nt, Artificial Sequence
  Description of Artificial Sequence: Synthetic oligonucleotide
cucuguaauuauggguuuc

SEQ ID NO: 1691530 - RNA, 19 nt, Artificial Sequence
  Description of Artificial Sequence: Synthetic oligonucleotide
auccaucucucuguaauua

SEQ ID NO: 1691531 - RNA, 19 nt, Artificial Sequence
  Description of Artificial Sequence: Synthetic oligonucleotide
guaagucuggaaagucuca

SEQ ID NO: 1691532 - RNA, 19 nt, Artificial Sequence
  Description of Artificial Sequence: Synthetic oligonucleotide
acuaaggcucaggggaaca

SEQ ID NO: 1691533 - RNA, 19 nt, Artificial Sequence
  Description of Artificial Sequence: Synthetic oligonucleotide
gcucucauaagcugguaaa

SEQ ID NO: 1691534 - RNA, 19 nt, Artificial Sequence
  Description of Artificial Sequence: Synthetic oligonucleotide
cauuccuggguauucucua

SEQ ID NO: 1691535 - RNA, 19 nt, Artificial Sequence
  Description of Artificial Sequence: Synthetic oligonucleotide
cuucgaagucuggucuccc

SEQ ID NO: 1691536 - RNA, 19 nt, Artificial Sequence
  Description of Artificial Sequence: Synthetic oligonucleotide
aggccugaccauucuucca

SEQ ID NO: 1691537 - RNA, 19 nt, Artificial Sequence
  Description of Artificial Sequence: Synthetic oligonucleotide
ggaucuucugucauccauc

SEQ ID NO: 1691538 - RNA, 19 nt, Artificial Sequence
  Description of Artificial Sequence: Synthetic oligonucleotide
auccauuccuggguauucu

SEQ ID NO: 1691539 - RNA, 19 nt, Artificial Sequence
  Description of Artificial Sequence: Synthetic oligonucleotide
gcuuuaucaucccuugucu

SEQ ID NO: 1691540 - RNA, 19 nt, Artificial Sequence
  Description of Artificial Sequence: Synthetic oligonucleotide
aaucucucgugaacugaua

SEQ ID NO: 1691541 - RNA, 19 nt, Artificial Sequence
  Description of Artificial Sequence: Synthetic oligonucleotide
guguaagucuggaaagucu

SEQ ID NO: 1691542 - RNA, 19 nt, Artificial Sequence
  Description of Artificial Sequence: Synthetic oligonucleotide
uaguagcuaucagaaucua

SEQ ID NO: 1691543 - RNA, 19 nt, Artificial Sequence
  Description of Artificial Sequence: Synthetic oligonucleotide
cacuggcacugucauacga

SEQ ID NO: 1691544 - RNA, 19 nt, Artificial Sequence
  Description of Artificial Sequence: Synthetic oligonucleotide
cuaguaauauagaccgauu

SEQ ID NO: 1691545 - RNA, 19 nt, Artificial Sequence
  Description of Artificial Sequence: Synthetic oligonucleotide
uucuugugcuuacguucuu

SEQ ID NO: 1691546 - RNA, 19 nt, Artificial Sequence
  Description of Artificial Sequence: Synthetic oligonucleotide
gagaaccuuuuaaaaguau

SEQ ID NO: 1691547 - RNA, 19 nt, Artificial Sequence
  Description of Artificial Sequence: Synthetic oligonucleotide
ggcucucauaagcugguaa

SEQ ID NO: 1691548 - RNA, 19 nt, Artificial Sequence
  Description of Artificial Sequence: Synthetic oligonucleotide
ugcgaacuguuguguggau

SEQ ID NO: 1691549 - RNA, 19 nt, Artificial Sequence
  Description of Artificial Sequence: Synthetic oligonucleotide
cagggugguauggcuguag

SEQ ID NO: 1691550 - RNA, 19 nt, Artificial Sequence
  Description of Artificial Sequence: Synthetic oligonucleotide
cugaccauucuuccaaaau

SEQ ID NO: 1691551 - RNA, 19 nt, Artificial Sequence
  Description of Artificial Sequence: Synthetic oligonucleotide
gggugguauggcuguagac

SEQ ID NO: 1691552 - RNA, 19 nt, Artificial Sequence
  Description of Artificial Sequence: Synthetic oligonucleotide
gcaauagaauacauuuucu

SEQ ID NO: 1691553 - RNA, 19 nt, Artificial Sequence
  Description of Artificial Sequence: Synthetic oligonucleotide
agacugcuguguaguucac

SEQ ID NO: 1691554 - RNA, 19 nt, Artificial Sequence
  Description of Artificial Sequence: Synthetic oligonucleotide
gcugguaaauaaugaggua

SEQ ID NO: 1691555 - RNA, 19 nt, Artificial Sequence
  Description of Artificial Sequence: Synthetic oligonucleotide
acgggaaucuuugcucaaa

SEQ ID NO: 1691556 - RNA, 19 nt, Artificial Sequence
  Description of Artificial Sequence: Synthetic oligonucleotide
gucuggucucccacaggcc

SEQ ID NO: 1691557 - RNA, 19 nt, Artificial Sequence
  Description of Artificial Sequence: Synthetic oligonucleotide
cuguaauuauggguuucaa

SEQ ID NO: 1691558 - RNA, 19 nt, Artificial Sequence
  Description of Artificial Sequence: Synthetic oligonucleotide
ggaaagucucacacgggaa

SEQ ID NO: 1691559 - RNA, 19 nt, Artificial Sequence
  Description of Artificial Sequence: Synthetic oligonucleotide
agucucacacgggaaucuu

SEQ ID NO: 1691560 - RNA, 19 nt, Artificial Sequence
  Description of Artificial Sequence: Synthetic oligonucleotide
gcacuggcacugucauacg

SEQ ID NO: 1691561 - RNA, 19 nt, Artificial Sequence
  Description of Artificial Sequence: Synthetic oligonucleotide
gucuuggucuaaucuuuau

SEQ ID NO: 1691562 - RNA, 19 nt, Artificial Sequence
  Description of Artificial Sequence: Synthetic oligonucleotide
caucuggcuuuuguuagua

SEQ ID NO: 1691563 - RNA, 19 nt, Artificial Sequence
  Description of Artificial Sequence: Synthetic oligonucleotide
cugcuggcucucauaagcu

SEQ ID NO: 1691564 - RNA, 19 nt, Artificial Sequence
  Description of Artificial Sequence: Synthetic oligonucleotide
cgggaaucuuugcucaaac

SEQ ID NO: 1691565 - RNA, 19 nt, Artificial Sequence
  Description of Artificial Sequence: Synthetic oligonucleotide
gggcagcugcuuguaaaug

SEQ ID NO: 1691566 - RNA, 19 nt, Artificial Sequence
  Description of Artificial Sequence: Synthetic oligonucleotide
cugaccccagcuuuaucau

SEQ ID NO: 1691567 - RNA, 19 nt, Artificial Sequence
  Description of Artificial Sequence: Synthetic oligonucleotide
cacgggaaucuuugcucaa

SEQ ID NO: 1691568 - RNA, 19 nt, Artificial Sequence
  Description of Artificial Sequence: Synthetic oligonucleotide
gcgaacuguuguguggauc

SEQ ID NO: 1691569 - RNA, 19 nt, Artificial Sequence
  Description of Artificial Sequence: Synthetic oligonucleotide
ccaggugucguccuucucu

SEQ ID NO: 1691570 - RNA, 19 nt, Artificial Sequence
  Description of Artificial Sequence: Synthetic oligonucleotide
uggcucucauaagcuggua

SEQ ID NO: 1691571 - RNA, 19 nt, Artificial Sequence
  Description of Artificial Sequence: Synthetic oligonucleotide
cuacaacaugcgaacuguu

SEQ ID NO: 1691572 - RNA, 19 nt, Artificial Sequence
  Description of Artificial Sequence: Synthetic oligonucleotide
cugucauacgagggcagcu

SEQ ID NO: 1691573 - RNA, 19 nt, Artificial Sequence
  Description of Artificial Sequence: Synthetic oligonucleotide
caccucuacuuaagaaaau

SEQ ID NO: 1691574 - RNA, 19 nt, Artificial Sequence
  Description of Artificial Sequence: Synthetic oligonucleotide
acgagggcagcugcuugua

SEQ ID NO: 1691575 - RNA, 19 nt, Artificial Sequence
  Description of Artificial Sequence: Synthetic oligonucleotide
cagcuuuaucaucccuugu

SEQ ID NO: 1691576 - RNA, 19 nt, Artificial Sequence
  Description of Artificial Sequence: Synthetic oligonucleotide
gucguccuucucuucugau

SEQ ID NO: 1691577 - RNA, 19 nt, Artificial Sequence
  Description of Artificial Sequence: Synthetic oligonucleotide
caggugucguccuucucuu

SEQ ID NO: 1691578 - RNA, 19 nt, Artificial Sequence
  Description of Artificial Sequence: Synthetic oligonucleotide
cgaagucuggucucccaca

SEQ ID NO: 1691579 - RNA, 19 nt, Artificial Sequence
  Description of Artificial Sequence: Synthetic oligonucleotide
cauacgagggcagcugcuu

SEQ ID NO: 1691580 - RNA, 19 nt, Artificial Sequence
  Description of Artificial Sequence: Synthetic oligonucleotide
gggaaaauucaggguggua

SEQ ID NO: 1691581 - RNA, 19 nt, Artificial Sequence
  Description of Artificial Sequence: Synthetic oligonucleotide
cgugaacugauaguagcua

SEQ ID NO: 1691582 - RNA, 19 nt, Artificial Sequence
  Description of Artificial Sequence: Synthetic oligonucleotide
ccgauuucuaucagcccuu

SEQ ID NO: 1691583 - RNA, 19 nt, Artificial Sequence
  Description of Artificial Sequence: Synthetic oligonucleotide
gcucaggggaacagguuuu

SEQ ID NO: 1691584 - RNA, 19 nt, Artificial Sequence
  Description of Artificial Sequence: Synthetic oligonucleotide
aauaaaagccggcacuugc

SEQ ID NO: 1691585 - RNA, 19 nt, Artificial Sequence
  Description of Artificial Sequence: Synthetic oligonucleotide
auucuuaucaaguauucac

SEQ ID NO: 1691586 - RNA, 19 nt, Artificial Sequence
  Description of Artificial Sequence: Synthetic oligonucleotide
agacagaguaucuugaagc

SEQ ID NO: 1691587 - RNA, 19 nt, Artificial Sequence
  Description of Artificial Sequence: Synthetic oligonucleotide
uaaagaacguccuaacucg

SEQ ID NO: 1691588 - RNA, 19 nt, Artificial Sequence
  Description of Artificial Sequence: Synthetic oligonucleotide
uguccuuugauucuuauca

SEQ ID NO: 1691589 - RNA, 19 nt, Artificial Sequence
  Description of Artificial Sequence: Synthetic oligonucleotide
uuuaggagagaaaugugcg

SEQ ID NO: 1691590 - RNA, 19 nt, Artificial Sequence
  Description of Artificial Sequence: Synthetic oligonucleotide
uccuguguaauaaaagccg

SEQ ID NO: 1691591 - RNA, 19 nt, Artificial Sequence
  Description of Artificial Sequence: Synthetic oligonucleotide
uuaaagaacguccuaacuc

SEQ ID NO: 1691592 - RNA, 19 nt, Artificial Sequence
  Description of Artificial Sequence: Synthetic oligonucleotide
ucaaguaagccuaucacga

SEQ ID NO: 1691593 - RNA, 19 nt, Artificial Sequence
  Description of Artificial Sequence: Synthetic oligonucleotide
aaaauagucuccgaugcuc

SEQ ID NO: 1691594 - RNA, 19 nt, Artificial Sequence
  Description of Artificial Sequence: Synthetic oligonucleotide
uguaauaaaagccggcacu

SEQ ID NO: 1691595 - RNA, 19 nt, Artificial Sequence
  Description of Artificial Sequence: Synthetic oligonucleotide
auaauagcuguucaaguag

SEQ ID NO: 1691596 - RNA, 19 nt, Artificial Sequence
  Description of Artificial Sequence: Synthetic oligonucleotide
aucaaguaagccuaucacg

SEQ ID NO: 1691597 - RNA, 19 nt, Artificial Sequence
  Description of Artificial Sequence: Synthetic oligonucleotide
auuuaggagagaaaugugc

SEQ ID NO: 1691598 - RNA, 19 nt, Artificial Sequence
  Description of Artificial Sequence: Synthetic oligonucleotide
uuaaugucagaucaucuga

SEQ ID NO: 1691599 - RNA, 19 nt, Artificial Sequence
  Description of Artificial Sequence: Synthetic oligonucleotide
aaguaagccuaucacgagg

SEQ ID NO: 1691600 - RNA, 19 nt, Artificial Sequence
  Description of Artificial Sequence: Synthetic oligonucleotide
ugggcaauugggaaaauag

SEQ ID NO: 1691601 - RNA, 19 nt, Artificial Sequence
  Description of Artificial Sequence: Synthetic oligonucleotide
ucaaguauucacaccuugg

SEQ ID NO: 1691602 - RNA, 19 nt, Artificial Sequence
  Description of Artificial Sequence: Synthetic oligonucleotide
auuaaugucagaucaucug

SEQ ID NO: 1691603 - RNA, 19 nt, Artificial Sequence
  Description of Artificial Sequence: Synthetic oligonucleotide
cuuuguauagcacaggguc

SEQ ID NO: 1691604 - RNA, 19 nt, Artificial Sequence
  Description of Artificial Sequence: Synthetic oligonucleotide
aguaucuugaagcggauug

SEQ ID NO: 1691605 - RNA, 19 nt, Artificial Sequence
  Description of Artificial Sequence: Synthetic oligonucleotide
ucaguuucccaccacacgc

SEQ ID NO: 1691606 - RNA, 19 nt, Artificial Sequence
  Description of Artificial Sequence: Synthetic oligonucleotide
agaacguccuaacucgugc

SEQ ID NO: 1691607 - RNA, 19 nt, Artificial Sequence
  Description of Artificial Sequence: Synthetic oligonucleotide
caaauaaaucuuuguauag

SEQ ID NO: 1691608 - RNA, 19 nt, Artificial Sequence
  Description of Artificial Sequence: Synthetic oligonucleotide
gacagaguaucuugaagcg

SEQ ID NO: 1691609 - RNA, 19 nt, Artificial Sequence
  Description of Artificial Sequence: Synthetic oligonucleotide
uuagagacagaguaucuug

SEQ ID NO: 1691610 - RNA, 19 nt, Artificial Sequence
  Description of Artificial Sequence: Synthetic oligonucleotide
uucuuaucaaguauucaca

SEQ ID NO: 1691611 - RNA, 19 nt, Artificial Sequence
  Description of Artificial Sequence: Synthetic oligonucleotide
uugagaaagcccuaucuug

SEQ ID NO: 1691612 - RNA, 19 nt, Artificial Sequence
  Description of Artificial Sequence: Synthetic oligonucleotide
uagauaauagcuguucaag

SEQ ID NO: 1691613 - RNA, 19 nt, Artificial Sequence
  Description of Artificial Sequence: Synthetic oligonucleotide
gaugcucugacauagcguc

SEQ ID NO: 1691614 - RNA, 19 nt, Artificial Sequence
  Description of Artificial Sequence: Synthetic oligonucleotide
uuugaugguaccucugcag

SEQ ID NO: 1691615 - RNA, 19 nt, Artificial Sequence
  Description of Artificial Sequence: Synthetic oligonucleotide
aguauucacaccuuggaaa

SEQ ID NO: 1691616 - RNA, 19 nt, Artificial Sequence
  Description of Artificial Sequence: Synthetic oligonucleotide
ucuuaucaaguauucacac

SEQ ID NO: 1691617 - RNA, 19 nt, Artificial Sequence
  Description of Artificial Sequence: Synthetic oligonucleotide
uguucuuccauugguagag

SEQ ID NO: 1691618 - RNA, 19 nt, Artificial Sequence
  Description of Artificial Sequence: Synthetic oligonucleotide
acagcaaaagcauuugaca

SEQ ID NO: 1691619 - RNA, 19 nt, Artificial Sequence
  Description of Artificial Sequence: Synthetic oligonucleotide
agucuuugcacacaaccag

SEQ ID NO: 1691620 - RNA, 19 nt, Artificial Sequence
  Description of Artificial Sequence: Synthetic oligonucleotide
ucugacucuauuuccucgg

SEQ ID NO: 1691621 - RNA, 19 nt, Artificial Sequence
  Description of Artificial Sequence: Synthetic oligonucleotide
uuuguauagcacaggguca

SEQ ID NO: 1691622 - RNA, 19 nt, Artificial Sequence
  Description of Artificial Sequence: Synthetic oligonucleotide
aagccuaucacgaggucgc

SEQ ID NO: 1691623 - RNA, 19 nt, Artificial Sequence
  Description of Artificial Sequence: Synthetic oligonucleotide
ugucaaauguugagaaagc

SEQ ID NO: 1691624 - RNA, 19 nt, Artificial Sequence
  Description of Artificial Sequence: Synthetic oligonucleotide
uaagccuaucacgaggucg

SEQ ID NO: 1691625 - RNA, 19 nt, Artificial Sequence
  Description of Artificial Sequence: Synthetic oligonucleotide
agggucacuuuccugaagg

SEQ ID NO: 1691626 - RNA, 19 nt, Artificial Sequence
  Description of Artificial Sequence: Synthetic oligonucleotide
ugagaaagcccuaucuugu

SEQ ID NO: 1691627 - RNA, 19 nt, Artificial Sequence
  Description of Artificial Sequence: Synthetic oligonucleotide
auugggaaaauagucuccg

SEQ ID NO: 1691628 - RNA, 19 nt, Artificial Sequence
  Description of Artificial Sequence: Synthetic oligonucleotide
agcggauugacucggaucu

SEQ ID NO: 1691629 - RNA, 19 nt, Artificial Sequence
  Description of Artificial Sequence: Synthetic oligonucleotide
aaugucagaucaucugacu

SEQ ID NO: 1691630 - RNA, 19 nt, Artificial Sequence
  Description of Artificial Sequence: Synthetic oligonucleotide
ggaaaauagucuccgaugc

SEQ ID NO: 1691631 - RNA, 19 nt, Artificial Sequence
  Description of Artificial Sequence: Synthetic oligonucleotide
uguguaauaaaagccggca

SEQ ID NO: 1691632 - RNA, 19 nt, Artificial Sequence
  Description of Artificial Sequence: Synthetic oligonucleotide
aagcggauugacucggauc

SEQ ID NO: 1691633 - RNA, 19 nt, Artificial Sequence
  Description of Artificial Sequence: Synthetic oligonucleotide
aaaccacuuggcgugcucc

SEQ ID NO: 1691634 - RNA, 19 nt, Artificial Sequence
  Description of Artificial Sequence: Synthetic oligonucleotide
aguugcucaguuucccacc

SEQ ID NO: 1691635 - RNA, 19 nt, Artificial Sequence
  Description of Artificial Sequence: Synthetic oligonucleotide
ucaucggucccauuuagga

SEQ ID NO: 1691636 - RNA, 19 nt, Artificial Sequence
  Description of Artificial Sequence: Synthetic oligonucleotide
uuggccaacaaacucuugu

SEQ ID NO: 1691637 - RNA, 19 nt, Artificial Sequence
  Description of Artificial Sequence: Synthetic oligonucleotide
agauaauagcuguucaagu

SEQ ID NO: 1691638 - RNA, 19 nt, Artificial Sequence
  Description of Artificial Sequence: Synthetic oligonucleotide
cucggaucuuuuaagaaug

SEQ ID NO: 1691639 - RNA, 19 nt, Artificial Sequence
  Description of Artificial Sequence: Synthetic oligonucleotide
acucuauuuccucggcugc

SEQ ID NO: 1691640 - RNA, 19 nt, Artificial Sequence
  Description of Artificial Sequence: Synthetic oligonucleotide
gauaauagcuguucaagua

SEQ ID NO: 1691641 - RNA, 19 nt, Artificial Sequence
  Description of Artificial Sequence: Synthetic oligonucleotide
cuugaagcggauugacucg

SEQ ID NO: 1691642 - RNA, 19 nt, Artificial Sequence
  Description of Artificial Sequence: Synthetic oligonucleotide
uugacucggaucuuuuaag

SEQ ID NO: 1691643 - RNA, 19 nt, Artificial Sequence
  Description of Artificial Sequence: Synthetic oligonucleotide
uuaggagagaaaugugcgc

SEQ ID NO: 1691644 - RNA, 19 nt, Artificial Sequence
  Description of Artificial Sequence: Synthetic oligonucleotide
ugauucuuaucaaguauuc

SEQ ID NO: 1691645 - RNA, 19 nt, Artificial Sequence
  Description of Artificial Sequence: Synthetic oligonucleotide
gguccuacauaguagaagc

SEQ ID NO: 1691646 - RNA, 19 nt, Artificial Sequence
  Description of Artificial Sequence: Synthetic oligonucleotide
uuguucuuccggauuaaug

SEQ ID NO: 1691647 - RNA, 19 nt, Artificial Sequence
  Description of Artificial Sequence: Synthetic oligonucleotide
uuaacagcaucguacuccu

SEQ ID NO: 1691648 - RNA, 19 nt, Artificial Sequence
  Description of Artificial Sequence: Synthetic oligonucleotide
acauaguagaagccggcuc

SEQ ID NO: 1691649 - RNA, 19 nt, Artificial Sequence
  Description of Artificial Sequence: Synthetic oligonucleotide
aaguauucacaccuuggaa

SEQ ID NO: 1691650 - RNA, 19 nt, Artificial Sequence
  Description of Artificial Sequence: Synthetic oligonucleotide
aaaagccggcacuugcaag

SEQ ID NO: 1691651 - RNA, 19 nt, Artificial Sequence
  Description of Artificial Sequence: Synthetic oligonucleotide
acaugucaaauguugagaa

SEQ ID NO: 1691652 - RNA, 19 nt, Artificial Sequence
  Description of Artificial Sequence: Synthetic oligonucleotide
cacagcaaaagcauuugac

SEQ ID NO: 1691653 - RNA, 19 nt, Artificial Sequence
  Description of Artificial Sequence: Synthetic oligonucleotide
uuccgcaucaaguaagccu

SEQ ID NO: 1691654 - RNA, 19 nt, Artificial Sequence
  Description of Artificial Sequence: Synthetic oligonucleotide
uugacaucaucacuguguc

SEQ ID NO: 1691655 - RNA, 19 nt, Artificial Sequence
  Description of Artificial Sequence: Synthetic oligonucleotide
agaaagcccuaucuuguuc

SEQ ID NO: 1691656 - RNA, 19 nt, Artificial Sequence
  Description of Artificial Sequence: Synthetic oligonucleotide
agccauggaucaucggucc

SEQ ID NO: 1691657 - RNA, 19 nt, Artificial Sequence
  Description of Artificial Sequence: Synthetic oligonucleotide
aucggucccauuuaggaga

SEQ ID NO: 1691658 - RNA, 19 nt, Artificial Sequence
  Description of Artificial Sequence: Synthetic oligonucleotide
uccgcaucaaguaagccua

SEQ ID NO: 1691659 - RNA, 19 nt, Artificial Sequence
  Description of Artificial Sequence: Synthetic oligonucleotide
ucggaucuuuuaagaaugg

SEQ ID NO: 1691660 - RNA, 19 nt, Artificial Sequence
  Description of Artificial Sequence: Synthetic oligonucleotide
uguguccuguguaauaaaa

SEQ ID NO: 1691661 - RNA, 19 nt, Artificial Sequence
  Description of Artificial Sequence: Synthetic oligonucleotide
caucaaguaagccuaucac

SEQ ID NO: 1691662 - RNA, 19 nt, Artificial Sequence
  Description of Artificial Sequence: Synthetic oligonucleotide
uucccaguugcucaguuuc

SEQ ID NO: 1691663 - RNA, 19 nt, Artificial Sequence
  Description of Artificial Sequence: Synthetic oligonucleotide
cugagguagauaauagcug

SEQ ID NO: 1691664 - RNA, 19 nt, Artificial Sequence
  Description of Artificial Sequence: Synthetic oligonucleotide
aaggacaauggccacguuu

SEQ ID NO: 1691665 - RNA, 19 nt, Artificial Sequence
  Description of Artificial Sequence: Synthetic oligonucleotide
ugucgcacaaauaaaucuu

SEQ ID NO: 1691666 - RNA, 19 nt, Artificial Sequence
  Description of Artificial Sequence: Synthetic oligonucleotide
ugggaaaauagucuccgau

SEQ ID NO: 1691667 - RNA, 19 nt, Artificial Sequence
  Description of Artificial Sequence: Synthetic oligonucleotide
aguguuuccuuucgccaac

SEQ ID NO: 1691668 - RNA, 19 nt, Artificial Sequence
  Description of Artificial Sequence: Synthetic oligonucleotide
ugcacaauuggugacucug

SEQ ID NO: 1691669 - RNA, 19 nt, Artificial Sequence
  Description of Artificial Sequence: Synthetic oligonucleotide
augguaccucugcagaugg

SEQ ID NO: 1691670 - RNA, 19 nt, Artificial Sequence
  Description of Artificial Sequence: Synthetic oligonucleotide
uuaggagacaauccaggau

SEQ ID NO: 1691671 - RNA, 19 nt, Artificial Sequence
  Description of Artificial Sequence: Synthetic oligonucleotide
uaggagagaaaugugcgca

SEQ ID NO: 1691672 - RNA, 19 nt, Artificial Sequence
  Description of Artificial Sequence: Synthetic oligonucleotide
ucucagcccgccaucacag

SEQ ID NO: 1691673 - RNA, 19 nt, Artificial Sequence
  Description of Artificial Sequence: Synthetic oligonucleotide
ugcgcucucgucuucuggg

SEQ ID NO: 1691674 - RNA, 19 nt, Artificial Sequence
  Description of Artificial Sequence: Synthetic oligonucleotide
auugacucggaucuuuuaa

SEQ ID NO: 1691675 - RNA, 19 nt, Artificial Sequence
  Description of Artificial Sequence: Synthetic oligonucleotide
acgccugacguccugucgc

SEQ ID NO: 1691676 - RNA, 19 nt, Artificial Sequence
  Description of Artificial Sequence: Synthetic oligonucleotide
agguagauaauagcuguuc

SEQ ID NO: 1691677 - RNA, 19 nt, Artificial Sequence
  Description of Artificial Sequence: Synthetic oligonucleotide
gaugaacgggagcacuggg

SEQ ID NO: 1691678 - RNA, 19 nt, Artificial Sequence
  Description of Artificial Sequence: Synthetic oligonucleotide
ucccauuuaggagagaaau

SEQ ID NO: 1691679 - RNA, 19 nt, Artificial Sequence
  Description of Artificial Sequence: Synthetic oligonucleotide
ucuuuuaagaaugggcaau

SEQ ID NO: 1691680 - RNA, 19 nt, Artificial Sequence
  Description of Artificial Sequence: Synthetic oligonucleotide
ucuuccgcaucaaguaagc

SEQ ID NO: 1691681 - RNA, 19 nt, Artificial Sequence
  Description of Artificial Sequence: Synthetic oligonucleotide
uggaucaucggucccauuu

SEQ ID NO: 1691682 - RNA, 19 nt, Artificial Sequence
  Description of Artificial Sequence: Synthetic oligonucleotide
ucugacauagcgucauccu

SEQ ID NO: 1691683 - RNA, 19 nt, Artificial Sequence
  Description of Artificial Sequence: Synthetic oligonucleotide
ugacucggaucuuuuaaga

SEQ ID NO: 1691684 - RNA, 19 nt, Artificial Sequence
  Description of Artificial Sequence: Synthetic oligonucleotide
uccugucgcacaaauaaau

SEQ ID NO: 1691685 - RNA, 19 nt, Artificial Sequence
  Description of Artificial Sequence: Synthetic oligonucleotide
uugcaaguugcugaggaug

SEQ ID NO: 1691686 - RNA, 19 nt, Artificial Sequence
  Description of Artificial Sequence: Synthetic oligonucleotide
cauuuaggagagaaaugug

SEQ ID NO: 1691687 - RNA, 19 nt, Artificial Sequence
  Description of Artificial Sequence: Synthetic oligonucleotide
aggagagaaaugugcgcac

SEQ ID NO: 1691688 - RNA, 19 nt, Artificial Sequence
  Description of Artificial Sequence: Synthetic oligonucleotide
cacaauuggugacucugcg

SEQ ID NO: 1691689 - RNA, 19 nt, Artificial Sequence
  Description of Artificial Sequence: Synthetic oligonucleotide
aaaugugcgcacugugccu

SEQ ID NO: 1691690 - RNA, 19 nt, Artificial Sequence
  Description of Artificial Sequence: Synthetic oligonucleotide
gaucaucggucccauuuag

SEQ ID NO: 1691691 - RNA, 19 nt, Artificial Sequence
  Description of Artificial Sequence: Synthetic oligonucleotide
aggguucuugcuugcaagg

SEQ ID NO: 1691692 - RNA, 19 nt, Artificial Sequence
  Description of Artificial Sequence: Synthetic oligonucleotide
ggaucuuuuaagaaugggc

SEQ ID NO: 1691693 - RNA, 19 nt, Artificial Sequence
  Description of Artificial Sequence: Synthetic oligonucleotide
ucgcacaaauaaaucuuug

SEQ ID NO: 1691694 - RNA, 19 nt, Artificial Sequence
  Description of Artificial Sequence: Synthetic oligonucleotide
acaggaaggacaauggcca

SEQ ID NO: 1691695 - RNA, 19 nt, Artificial Sequence
  Description of Artificial Sequence: Synthetic oligonucleotide
cuguguaauaaaagccggc

SEQ ID NO: 1691696 - RNA, 19 nt, Artificial Sequence
  Description of Artificial Sequence: Synthetic oligonucleotide
ucccuuaucucgucuuccg

SEQ ID NO: 1691697 - RNA, 19 nt, Artificial Sequence
  Description of Artificial Sequence: Synthetic oligonucleotide
uuuuaagaaugggcaauug

SEQ ID NO: 1691698 - RNA, 19 nt, Artificial Sequence
  Description of Artificial Sequence: Synthetic oligonucleotide
aauguugagaaagcccuau

SEQ ID NO: 1691699 - RNA, 19 nt, Artificial Sequence
  Description of Artificial Sequence: Synthetic oligonucleotide
gagacaauccaggauuggc

SEQ ID NO: 1691700 - RNA, 19 nt, Artificial Sequence
  Description of Artificial Sequence: Synthetic oligonucleotide
acucggaucuuuuaagaau

SEQ ID NO: 1691701 - RNA, 19 nt, Artificial Sequence
  Description of Artificial Sequence: Synthetic oligonucleotide
aacguccuaacucgugcug

SEQ ID NO: 1691702 - RNA, 19 nt, Artificial Sequence
  Description of Artificial Sequence: Synthetic oligonucleotide
guccuguguaauaaaagcc

SEQ ID NO: 1691703 - RNA, 19 nt, Artificial Sequence
  Description of Artificial Sequence: Synthetic oligonucleotide
ucuguuuaacagcaucgua

SEQ ID NO: 1691704 - RNA, 19 nt, Artificial Sequence
  Description of Artificial Sequence: Synthetic oligonucleotide
gucaaauguugagaaagcc

SEQ ID NO: 1691705 - RNA, 19 nt, Artificial Sequence
  Description of Artificial Sequence: Synthetic oligonucleotide
uugaagcggauugacucgg

SEQ ID NO: 1691706 - RNA, 19 nt, Artificial Sequence
  Description of Artificial Sequence: Synthetic oligonucleotide
ugcucaguuucccaccaca

SEQ ID NO: 1691707 - RNA, 19 nt, Artificial Sequence
  Description of Artificial Sequence: Synthetic oligonucleotide
uccgcaauuguucuuccau

SEQ ID NO: 1691708 - RNA, 19 nt, Artificial Sequence
  Description of Artificial Sequence: Synthetic oligonucleotide
cacuuaggagacaauccag

SEQ ID NO: 1691709 - RNA, 19 nt, Artificial Sequence
  Description of Artificial Sequence: Synthetic oligonucleotide
cagaguaucuugaagcgga

SEQ ID NO: 1691710 - RNA, 19 nt, Artificial Sequence
  Description of Artificial Sequence: Synthetic oligonucleotide
cgcacugugccuuugaugg

SEQ ID NO: 1691711 - RNA, 19 nt, Artificial Sequence
  Description of Artificial Sequence: Synthetic oligonucleotide
cucaguuucccaccacacg

SEQ ID NO: 1691712 - RNA, 19 nt, Artificial Sequence
  Description of Artificial Sequence: Synthetic oligonucleotide
gagagaaaugugcgcacug

SEQ ID NO: 1691713 - RNA, 19 nt, Artificial Sequence
  Description of Artificial Sequence: Synthetic oligonucleotide
aucuuuuaagaaugggcaa

SEQ ID NO: 1691714 - RNA, 19 nt, Artificial Sequence
  Description of Artificial Sequence: Synthetic oligonucleotide
acagaguaucuugaagcgg

SEQ ID NO: 1691715 - RNA, 19 nt, Artificial Sequence
  Description of Artificial Sequence: Synthetic oligonucleotide
acaauccaggauuggcauc

SEQ ID NO: 1691716 - RNA, 19 nt, Artificial Sequence
  Description of Artificial Sequence: Synthetic oligonucleotide
cuuucgccaacacaguauc

SEQ ID NO: 1691717 - RNA, 19 nt, Artificial Sequence
  Description of Artificial Sequence: Synthetic oligonucleotide
uccuucgguucccaguugc

SEQ ID NO: 1691718 - RNA, 19 nt, Artificial Sequence
  Description of Artificial Sequence: Synthetic oligonucleotide
aggauuugacgcugaacug

SEQ ID NO: 1691719 - RNA, 19 nt, Artificial Sequence
  Description of Artificial Sequence: Synthetic oligonucleotide
guguaauaaaagccggcac

SEQ ID NO: 1691720 - RNA, 19 nt, Artificial Sequence
  Description of Artificial Sequence: Synthetic oligonucleotide
uccuaacucgugcugcgug

SEQ ID NO: 1691721 - RNA, 19 nt, Artificial Sequence
  Description of Artificial Sequence: Synthetic oligonucleotide
caaguaagccuaucacgag

SEQ ID NO: 1691722 - RNA, 19 nt, Artificial Sequence
  Description of Artificial Sequence: Synthetic oligonucleotide
uuccggauuaaugucagau

SEQ ID NO: 1691723 - RNA, 19 nt, Artificial Sequence
  Description of Artificial Sequence: Synthetic oligonucleotide
auguugagaaagcccuauc

SEQ ID NO: 1691724 - RNA, 19 nt, Artificial Sequence
  Description of Artificial Sequence: Synthetic oligonucleotide
guagcuuccgcaauuguuc

SEQ ID NO: 1691725 - RNA, 19 nt, Artificial Sequence
  Description of Artificial Sequence: Synthetic oligonucleotide
cacaguaucaaucaggguu

SEQ ID NO: 1691726 - RNA, 19 nt, Artificial Sequence
  Description of Artificial Sequence: Synthetic oligonucleotide
aauuguucuuccauuggua

SEQ ID NO: 1691727 - RNA, 19 nt, Artificial Sequence
  Description of Artificial Sequence: Synthetic oligonucleotide
guagauaauagcuguucaa

SEQ ID NO: 1691728 - RNA, 19 nt, Artificial Sequence
  Description of Artificial Sequence: Synthetic oligonucleotide
cacagggucacuuuccuga

SEQ ID NO: 1691729 - RNA, 19 nt, Artificial Sequence
  Description of Artificial Sequence: Synthetic oligonucleotide
uucuuccauugguagagcu

SEQ ID NO: 1691730 - RNA, 19 nt, Artificial Sequence
  Description of Artificial Sequence: Synthetic oligonucleotide
ucaaguagaugaggguacc

SEQ ID NO: 1691731 - RNA, 19 nt, Artificial Sequence
  Description of Artificial Sequence: Synthetic oligonucleotide
caaguauucacaccuugga

SEQ ID NO: 1691732 - RNA, 19 nt, Artificial Sequence
  Description of Artificial Sequence: Synthetic oligonucleotide
ucagcccgccaucacagca

SEQ ID NO: 1691733 - RNA, 19 nt, Artificial Sequence
  Description of Artificial Sequence: Synthetic oligonucleotide
uucuguuuaacagcaucgu

SEQ ID NO: 1691734 - RNA, 19 nt, Artificial Sequence
  Description of Artificial Sequence: Synthetic oligonucleotide
aacucgugcugcguguguc

SEQ ID NO: 1691735 - RNA, 19 nt, Artificial Sequence
  Description of Artificial Sequence: Synthetic oligonucleotide
acguccuaacucgugcugc

SEQ ID NO: 1691736 - RNA, 19 nt, Artificial Sequence
  Description of Artificial Sequence: Synthetic oligonucleotide
caucggucccauuuaggag

SEQ ID NO: 1691737 - RNA, 19 nt, Artificial Sequence
  Description of Artificial Sequence: Synthetic oligonucleotide
gaagggaguuucugaauga

SEQ ID NO: 1691738 - RNA, 19 nt, Artificial Sequence
  Description of Artificial Sequence: Synthetic oligonucleotide
uaucuugaagcggauugac

SEQ ID NO: 1691739 - RNA, 19 nt, Artificial Sequence
  Description of Artificial Sequence: Synthetic oligonucleotide
ugacucuauuuccucggcu

SEQ ID NO: 1691740 - RNA, 19 nt, Artificial Sequence
  Description of Artificial Sequence: Synthetic oligonucleotide
uccggauuaaugucagauc

SEQ ID NO: 1691741 - RNA, 19 nt, Artificial Sequence
  Description of Artificial Sequence: Synthetic oligonucleotide
gaaagcccuaucuuguucu

SEQ ID NO: 1691742 - RNA, 19 nt, Artificial Sequence
  Description of Artificial Sequence: Synthetic oligonucleotide
cuuaggagacaauccagga

SEQ ID NO: 1691743 - RNA, 19 nt, Artificial Sequence
  Description of Artificial Sequence: Synthetic oligonucleotide
uauuuccucggcugccugc

SEQ ID NO: 1691744 - RNA, 19 nt, Artificial Sequence
  Description of Artificial Sequence: Synthetic oligonucleotide
acgauggacaccucucugu

SEQ ID NO: 1691745 - RNA, 19 nt, Artificial Sequence
  Description of Artificial Sequence: Synthetic oligonucleotide
uaucacgaggucgcugacg

SEQ ID NO: 1691746 - RNA, 19 nt, Artificial Sequence
  Description of Artificial Sequence: Synthetic oligonucleotide
uucgccaacacaguaucaa

SEQ ID NO: 1691747 - RNA, 19 nt, Artificial Sequence
  Description of Artificial Sequence: Synthetic oligonucleotide
gaacgggagcacugggagg

SEQ ID NO: 1691748 - RNA, 19 nt, Artificial Sequence
  Description of Artificial Sequence: Synthetic oligonucleotide
aguaagccuaucacgaggu

SEQ ID NO: 1691749 - RNA, 19 nt, Artificial Sequence
  Description of Artificial Sequence: Synthetic oligonucleotide
ucgcugacgguccuguagu

SEQ ID NO: 1691750 - RNA, 19 nt, Artificial Sequence
  Description of Artificial Sequence: Synthetic oligonucleotide
uuuccugaagggaguuucu

SEQ ID NO: 1691751 - RNA, 19 nt, Artificial Sequence
  Description of Artificial Sequence: Synthetic oligonucleotide
cucugacauagcgucaucc

SEQ ID NO: 1691752 - RNA, 19 nt, Artificial Sequence
  Description of Artificial Sequence: Synthetic oligonucleotide
ggcaauugggaaaauaguc

SEQ ID NO: 1691753 - RNA, 19 nt, Artificial Sequence
  Description of Artificial Sequence: Synthetic oligonucleotide
ucggucccauuuaggagag

SEQ ID NO: 1691754 - RNA, 19 nt, Artificial Sequence
  Description of Artificial Sequence: Synthetic oligonucleotide
aucacagcaaaagcauuug

SEQ ID NO: 1691755 - RNA, 19 nt, Artificial Sequence
  Description of Artificial Sequence: Synthetic oligonucleotide
auagcgucauccuucgguu

SEQ ID NO: 1691756 - RNA, 19 nt, Artificial Sequence
  Description of Artificial Sequence: Synthetic oligonucleotide
uauucacaccuuggaaacc

SEQ ID NO: 1691757 - RNA, 19 nt, Artificial Sequence
  Description of Artificial Sequence: Synthetic oligonucleotide
ggcacuugcaaguugcuga

SEQ ID NO: 1691758 - RNA, 19 nt, Artificial Sequence
  Description of Artificial Sequence: Synthetic oligonucleotide
gauuugacgcugaacuguc

SEQ ID NO: 1691759 - RNA, 19 nt, Artificial Sequence
  Description of Artificial Sequence: Synthetic oligonucleotide
guuaaagaacguccuaacu

SEQ ID NO: 1691760 - RNA, 19 nt, Artificial Sequence
  Description of Artificial Sequence: Synthetic oligonucleotide
uuguccuuugauucuuauc

SEQ ID NO: 1691761 - RNA, 19 nt, Artificial Sequence
  Description of Artificial Sequence: Synthetic oligonucleotide
gacucggaucuuuuaagaa

SEQ ID NO: 1691762 - RNA, 19 nt, Artificial Sequence
  Description of Artificial Sequence: Synthetic oligonucleotide
agcaucucagcccgccauc

SEQ ID NO: 1691763 - RNA, 19 nt, Artificial Sequence
  Description of Artificial Sequence: Synthetic oligonucleotide
gucgcugacgguccuguag

SEQ ID NO: 1691764 - RNA, 19 nt, Artificial Sequence
  Description of Artificial Sequence: Synthetic oligonucleotide
gacgccugacguccugucg

SEQ ID NO: 1691765 - RNA, 19 nt, Artificial Sequence
  Description of Artificial Sequence: Synthetic oligonucleotide
cuccgaugcucugacauag

SEQ ID NO: 1691766 - RNA, 19 nt, Artificial Sequence
  Description of Artificial Sequence: Synthetic oligonucleotide
uagucuccgaugcucugac

SEQ ID NO: 1691767 - RNA, 19 nt, Artificial Sequence
  Description of Artificial Sequence: Synthetic oligonucleotide
uggcacuuaggagacaauc

SEQ ID NO: 1691768 - RNA, 19 nt, Artificial Sequence
  Description of Artificial Sequence: Synthetic oligonucleotide
aagaacguccuaacucgug

SEQ ID NO: 1691769 - RNA, 19 nt, Artificial Sequence
  Description of Artificial Sequence: Synthetic oligonucleotide
gauuaaugucagaucaucu

SEQ ID NO: 1691770 - RNA, 19 nt, Artificial Sequence
  Description of Artificial Sequence: Synthetic oligonucleotide
aaagaacguccuaacucgu

SEQ ID NO: 1691771 - RNA, 19 nt, Artificial Sequence
  Description of Artificial Sequence: Synthetic oligonucleotide
uaucaaguauucacaccuu

SEQ ID NO: 1691772 - RNA, 19 nt, Artificial Sequence
  Description of Artificial Sequence: Synthetic oligonucleotide
ggaggccaguuaaagaacg

SEQ ID NO: 1691773 - RNA, 19 nt, Artificial Sequence
  Description of Artificial Sequence: Synthetic oligonucleotide
gucuuccgcaucaaguaag

SEQ ID NO: 1691774 - RNA, 19 nt, Artificial Sequence
  Description of Artificial Sequence: Synthetic oligonucleotide
uugggaaaauagucuccga

SEQ ID NO: 1691775 - RNA, 19 nt, Artificial Sequence
  Description of Artificial Sequence: Synthetic oligonucleotide
ugcuugcaaggucuguggu

SEQ ID NO: 1691776 - RNA, 19 nt, Artificial Sequence
  Description of Artificial Sequence: Synthetic oligonucleotide
ugacaucaucacugugucc

SEQ ID NO: 1691777 - RNA, 19 nt, Artificial Sequence
  Description of Artificial Sequence: Synthetic oligonucleotide
cacacaugucaaauguuga

SEQ ID NO: 1691778 - RNA, 19 nt, Artificial Sequence
  Description of Artificial Sequence: Synthetic oligonucleotide
agagagggcgcacagucuu

SEQ ID NO: 1691779 - RNA, 19 nt, Artificial Sequence
  Description of Artificial Sequence: Synthetic oligonucleotide
caucacacaugucaaaugu

SEQ ID NO: 1691780 - RNA, 19 nt, Artificial Sequence
  Description of Artificial Sequence: Synthetic oligonucleotide
acacgauggacaccucucu

SEQ ID NO: 1691781 - RNA, 19 nt, Artificial Sequence
  Description of Artificial Sequence: Synthetic oligonucleotide
acuguguccuguguaauaa

SEQ ID NO: 1691782 - RNA, 19 nt, Artificial Sequence
  Description of Artificial Sequence: Synthetic oligonucleotide
cagccauggaucaucgguc

SEQ ID NO: 1691783 - RNA, 19 nt, Artificial Sequence
  Description of Artificial Sequence: Synthetic oligonucleotide
uccuuucgccaacacagua

SEQ ID NO: 1691784 - RNA, 19 nt, Artificial Sequence
  Description of Artificial Sequence: Synthetic oligonucleotide
agagaaaugugcgcacugu

SEQ ID NO: 1691785 - RNA, 19 nt, Artificial Sequence
  Description of Artificial Sequence: Synthetic oligonucleotide
ucgguucccaguugcucag

SEQ ID NO: 1691786 - RNA, 19 nt, Artificial Sequence
  Description of Artificial Sequence: Synthetic oligonucleotide
gcucagguuagagacagag

SEQ ID NO: 1691787 - RNA, 19 nt, Artificial Sequence
  Description of Artificial Sequence: Synthetic oligonucleotide
uguuuccuuucgccaacac

SEQ ID NO: 1691788 - RNA, 19 nt, Artificial Sequence
  Description of Artificial Sequence: Synthetic oligonucleotide
gcacaaauaaaucuuugua

SEQ ID NO: 1691789 - RNA, 19 nt, Artificial Sequence
  Description of Artificial Sequence: Synthetic oligonucleotide
cauaguagaagccggcucu

SEQ ID NO: 1691790 - RNA, 19 nt, Artificial Sequence
  Description of Artificial Sequence: Synthetic oligonucleotide
ggccaguuaaagaacgucc

SEQ ID NO: 1691791 - RNA, 19 nt, Artificial Sequence
  Description of Artificial Sequence: Synthetic oligonucleotide
ggcacuuaggagacaaucc

SEQ ID NO: 1691792 - RNA, 19 nt, Artificial Sequence
  Description of Artificial Sequence: Synthetic oligonucleotide
agauugcccuggcacuuag

SEQ ID NO: 1691793 - RNA, 19 nt, Artificial Sequence
  Description of Artificial Sequence: Synthetic oligonucleotide
caauccaggauuggcauca

SEQ ID NO: 1691794 - RNA, 19 nt, Artificial Sequence
  Description of Artificial Sequence: Synthetic oligonucleotide
cugucgcacaaauaaaucu

SEQ ID NO: 1691795 - RNA, 19 nt, Artificial Sequence
  Description of Artificial Sequence: Synthetic oligonucleotide
uugcaaguucuuucuuccu

SEQ ID NO: 1691796 - RNA, 19 nt, Artificial Sequence
  Description of Artificial Sequence: Synthetic oligonucleotide
ugguaccucugcagauggg

SEQ ID NO: 1691797 - RNA, 19 nt, Artificial Sequence
  Description of Artificial Sequence: Synthetic oligonucleotide
ccggauuaaugucagauca

SEQ ID NO: 1691798 - RNA, 19 nt, Artificial Sequence
  Description of Artificial Sequence: Synthetic oligonucleotide
aucaucggucccauuuagg

SEQ ID NO: 1691799 - RNA, 19 nt, Artificial Sequence
  Description of Artificial Sequence: Synthetic oligonucleotide
acacgcaaagcaggccacc

SEQ ID NO: 1691800 - RNA, 19 nt, Artificial Sequence
  Description of Artificial Sequence: Synthetic oligonucleotide
cuuccgcaauuguucuucc

SEQ ID NO: 1691801 - RNA, 19 nt, Artificial Sequence
  Description of Artificial Sequence: Synthetic oligonucleotide
aaagcccuaucuuguucuu

SEQ ID NO: 1691802 - RNA, 19 nt, Artificial Sequence
  Description of Artificial Sequence: Synthetic oligonucleotide
gcaucaaguaagccuauca

SEQ ID NO: 1691803 - RNA, 19 nt, Artificial Sequence
  Description of Artificial Sequence: Synthetic oligonucleotide
cugugguuucuguuuaaca

SEQ ID NO: 1691804 - RNA, 19 nt, Artificial Sequence
  Description of Artificial Sequence: Synthetic oligonucleotide
uccuguagcuuccgcaauu

SEQ ID NO: 1691805 - RNA, 19 nt, Artificial Sequence
  Description of Artificial Sequence: Synthetic oligonucleotide
gucugcaugcucagguuag

SEQ ID NO: 1691806 - RNA, 19 nt, Artificial Sequence
  Description of Artificial Sequence: Synthetic oligonucleotide
gcacuuaggagacaaucca

SEQ ID NO: 1691807 - RNA, 19 nt, Artificial Sequence
  Description of Artificial Sequence: Synthetic oligonucleotide
guugcucaguuucccacca

SEQ ID NO: 1691808 - RNA, 19 nt, Artificial Sequence
  Description of Artificial Sequence: Synthetic oligonucleotide
cauagcgucauccuucggu

SEQ ID NO: 1691809 - RNA, 19 nt, Artificial Sequence
  Description of Artificial Sequence: Synthetic oligonucleotide
gggaagacgccugacgucc

SEQ ID NO: 1691810 - RNA, 19 nt, Artificial Sequence
  Description of Artificial Sequence: Synthetic oligonucleotide
ucgccaacacaguaucaau

SEQ ID NO: 1691811 - RNA, 19 nt, Artificial Sequence
  Description of Artificial Sequence: Synthetic oligonucleotide
acgaggucgcugacggucc

SEQ ID NO: 1691812 - RNA, 19 nt, Artificial Sequence
  Description of Artificial Sequence: Synthetic oligonucleotide
uuaucucgucuuccgcauc

SEQ ID NO: 1691813 - RNA, 19 nt, Artificial Sequence
  Description of Artificial Sequence: Synthetic oligonucleotide
uccgaugcucugacauagc

SEQ ID NO: 1691814 - RNA, 19 nt, Artificial Sequence
  Description of Artificial Sequence: Synthetic oligonucleotide
auagucuccgaugcucuga

SEQ ID NO: 1691815 - RNA, 19 nt, Artificial Sequence
  Description of Artificial Sequence: Synthetic oligonucleotide
acacaguaucaaucagggu

SEQ ID NO: 1691816 - RNA, 19 nt, Artificial Sequence
  Description of Artificial Sequence: Synthetic oligonucleotide
agacgccugacguccuguc

SEQ ID NO: 1691817 - RNA, 19 nt, Artificial Sequence
  Description of Artificial Sequence: Synthetic oligonucleotide
auaguagaagccggcucug

SEQ ID NO: 1691818 - RNA, 19 nt, Artificial Sequence
  Description of Artificial Sequence: Synthetic oligonucleotide
ugcucugacauagcgucau

SEQ ID NO: 1691819 - RNA, 19 nt, Artificial Sequence
  Description of Artificial Sequence: Synthetic oligonucleotide
gauugacucggaucuuuua

SEQ ID NO: 1691820 - RNA, 19 nt, Artificial Sequence
  Description of Artificial Sequence: Synthetic oligonucleotide
ugaagcggauugacucgga

SEQ ID NO: 1691821 - RNA, 19 nt, Artificial Sequence
  Description of Artificial Sequence: Synthetic oligonucleotide
ugggaagacgccugacguc

SEQ ID NO: 1691822 - RNA, 19 nt, Artificial Sequence
  Description of Artificial Sequence: Synthetic oligonucleotide
uaacucgugcugcgugugu

SEQ ID NO: 1691823 - RNA, 19 nt, Artificial Sequence
  Description of Artificial Sequence: Synthetic oligonucleotide
gaagacgccugacguccug

SEQ ID NO: 1691824 - RNA, 19 nt, Artificial Sequence
  Description of Artificial Sequence: Synthetic oligonucleotide
guaucuugaagcggauuga

SEQ ID NO: 1691825 - RNA, 19 nt, Artificial Sequence
  Description of Artificial Sequence: Synthetic oligonucleotide
gaaaccacuuggcgugcuc

SEQ ID NO: 1691826 - RNA, 19 nt, Artificial Sequence
  Description of Artificial Sequence: Synthetic oligonucleotide
agggcgcacagucuuugca

SEQ ID NO: 1691827 - RNA, 19 nt, Artificial Sequence
  Description of Artificial Sequence: Synthetic oligonucleotide
gguucuugcuugcaagguc

SEQ ID NO: 1691828 - RNA, 19 nt, Artificial Sequence
  Description of Artificial Sequence: Synthetic oligonucleotide
aggaugaacgggagcacug

SEQ ID NO: 1691829 - RNA, 19 nt, Artificial Sequence
  Description of Artificial Sequence: Synthetic oligonucleotide
guugagaaagcccuaucuu

SEQ ID NO: 1691830 - RNA, 19 nt, Artificial Sequence
  Description of Artificial Sequence: Synthetic oligonucleotide
ccgaugcucugacauagcg

SEQ ID NO: 1691831 - RNA, 19 nt, Artificial Sequence
  Description of Artificial Sequence: Synthetic oligonucleotide
cacacgcaaagcaggccac

SEQ ID NO: 1691832 - RNA, 19 nt, Artificial Sequence
  Description of Artificial Sequence: Synthetic oligonucleotide
agggaguuucugaaugaug

SEQ ID NO: 1691833 - RNA, 19 nt, Artificial Sequence
  Description of Artificial Sequence: Synthetic oligonucleotide
auuuccucggcugccugcu

SEQ ID NO: 1691834 - RNA, 19 nt, Artificial Sequence
  Description of Artificial Sequence: Synthetic oligonucleotide
ggaugaacgggagcacugg

SEQ ID NO: 1691835 - RNA, 19 nt, Artificial Sequence
  Description of Artificial Sequence: Synthetic oligonucleotide
gggucacuuuccugaaggg

SEQ ID NO: 1691836 - RNA, 19 nt, Artificial Sequence
  Description of Artificial Sequence: Synthetic oligonucleotide
ucuccgaugcucugacaua

SEQ ID NO: 1691837 - RNA, 19 nt, Artificial Sequence
  Description of Artificial Sequence: Synthetic oligonucleotide
agcuggugacaggaaggac

SEQ ID NO: 1691838 - RNA, 19 nt, Artificial Sequence
  Description of Artificial Sequence: Synthetic oligonucleotide
cgaaaugcacaauugguga

SEQ ID NO: 1691839 - RNA, 19 nt, Artificial Sequence
  Description of Artificial Sequence: Synthetic oligonucleotide
gauugcccuggcacuuagg

SEQ ID NO: 1691840 - RNA, 19 nt, Artificial Sequence
  Description of Artificial Sequence: Synthetic oligonucleotide
acauagcgucauccuucgg

SEQ ID NO: 1691841 - RNA, 19 nt, Artificial Sequence
  Description of Artificial Sequence: Synthetic oligonucleotide
uuccuguagcuuccgcaau

SEQ ID NO: 1691842 - RNA, 19 nt, Artificial Sequence
  Description of Artificial Sequence: Synthetic oligonucleotide
cuuccgcaucaaguaagcc

SEQ ID NO: 1691843 - RNA, 19 nt, Artificial Sequence
  Description of Artificial Sequence: Synthetic oligonucleotide
aucuugaagcggauugacu

SEQ ID NO: 1691844 - RNA, 19 nt, Artificial Sequence
  Description of Artificial Sequence: Synthetic oligonucleotide
aagacgccugacguccugu

SEQ ID NO: 1691845 - RNA, 19 nt, Artificial Sequence
  Description of Artificial Sequence: Synthetic oligonucleotide
gugggaagacgccugacgu

SEQ ID NO: 1691846 - RNA, 19 nt, Artificial Sequence
  Description of Artificial Sequence: Synthetic oligonucleotide
ccugucgcacaaauaaauc

SEQ ID NO: 1691847 - RNA, 19 nt, Artificial Sequence
  Description of Artificial Sequence: Synthetic oligonucleotide
ucugcaugcucagguuaga

SEQ ID NO: 1691848 - RNA, 19 nt, Artificial Sequence
  Description of Artificial Sequence: Synthetic oligonucleotide
cuaacucgugcugcgugug

SEQ ID NO: 1691849 - RNA, 19 nt, Artificial Sequence
  Description of Artificial Sequence: Synthetic oligonucleotide
ugcgugugucugcaugcuc

SEQ ID NO: 1691850 - RNA, 19 nt, Artificial Sequence
  Description of Artificial Sequence: Synthetic oligonucleotide
caguguuuccuuucgccaa

SEQ ID NO: 1691851 - RNA, 19 nt, Artificial Sequence
  Description of Artificial Sequence: Synthetic oligonucleotide
agcacugggaggccaguua

SEQ ID NO: 1691852 - RNA, 19 nt, Artificial Sequence
  Description of Artificial Sequence: Synthetic oligonucleotide
guaauaaaagccggcacuu

SEQ ID NO: 1691853 - RNA, 19 nt, Artificial Sequence
  Description of Artificial Sequence: Synthetic oligonucleotide
gcaauugggaaaauagucu

SEQ ID NO: 1691854 - RNA, 19 nt, Artificial Sequence
  Description of Artificial Sequence: Synthetic oligonucleotide
gaacguccuaacucgugcu

SEQ ID NO: 1691855 - RNA, 19 nt, Artificial Sequence
  Description of Artificial Sequence: Synthetic oligonucleotide
acgcaaagcaggccacccu

SEQ ID NO: 1691856 - RNA, 19 nt, Artificial Sequence
  Description of Artificial Sequence: Synthetic oligonucleotide
ccuaucuuguucuuccgga

SEQ ID NO: 1691857 - RNA, 19 nt, Artificial Sequence
  Description of Artificial Sequence: Synthetic oligonucleotide
agagggcgcacagucuuug

SEQ ID NO: 1691858 - RNA, 19 nt, Artificial Sequence
  Description of Artificial Sequence: Synthetic oligonucleotide
gucuccgaugcucugacau

SEQ ID NO: 1691859 - RNA, 19 nt, Artificial Sequence
  Description of Artificial Sequence: Synthetic oligonucleotide
ccuaucacgaggucgcuga

SEQ ID NO: 1691860 - RNA, 19 nt, Artificial Sequence
  Description of Artificial Sequence: Synthetic oligonucleotide
uggaaaccacuuggcgugc

SEQ ID NO: 1691861 - RNA, 19 nt, Artificial Sequence
  Description of Artificial Sequence: Synthetic oligonucleotide
uggugacucugcgcucucg

SEQ ID NO: 1691862 - RNA, 19 nt, Artificial Sequence
  Description of Artificial Sequence: Synthetic oligonucleotide
cgcaauuguucuuccauug

SEQ ID NO: 1691863 - RNA, 19 nt, Artificial Sequence
  Description of Artificial Sequence: Synthetic oligonucleotide
ggagacaauccaggauugg

SEQ ID NO: 1691864 - RNA, 19 nt, Artificial Sequence
  Description of Artificial Sequence: Synthetic oligonucleotide
uugcucaguuucccaccac

SEQ ID NO: 1691865 - RNA, 19 nt, Artificial Sequence
  Description of Artificial Sequence: Synthetic oligonucleotide
cccuaucuuguucuuccgg

SEQ ID NO: 1691866 - RNA, 19 nt, Artificial Sequence
  Description of Artificial Sequence: Synthetic oligonucleotide
caguuucccaccacacgca

SEQ ID NO: 1691867 - RNA, 19 nt, Artificial Sequence
  Description of Artificial Sequence: Synthetic oligonucleotide
uagcgucauccuucgguuc

SEQ ID NO: 1691868 - RNA, 19 nt, Artificial Sequence
  Description of Artificial Sequence: Synthetic oligonucleotide
augcacaauuggugacucu

SEQ ID NO: 1691869 - RNA, 19 nt, Artificial Sequence
  Description of Artificial Sequence: Synthetic oligonucleotide
guaagccuaucacgagguc

SEQ ID NO: 1691870 - RNA, 19 nt, Artificial Sequence
  Description of Artificial Sequence: Synthetic oligonucleotide
cugugccuuugaugguacc

SEQ ID NO: 1691871 - RNA, 19 nt, Artificial Sequence
  Description of Artificial Sequence: Synthetic oligonucleotide
ccuuaucucgucuuccgca

SEQ ID NO: 1691872 - RNA, 19 nt, Artificial Sequence
  Description of Artificial Sequence: Synthetic oligonucleotide
guucuuccauugguagagc

SEQ ID NO: 1691873 - RNA, 19 nt, Artificial Sequence
  Description of Artificial Sequence: Synthetic oligonucleotide
cuaucacgaggucgcugac

SEQ ID NO: 1691874 - RNA, 19 nt, Artificial Sequence
  Description of Artificial Sequence: Synthetic oligonucleotide
auccuucgguucccaguug

SEQ ID NO: 1691875 - RNA, 19 nt, Artificial Sequence
  Description of Artificial Sequence: Synthetic oligonucleotide
cuuaucucgucuuccgcau

SEQ ID NO: 1691876 - RNA, 19 nt, Artificial Sequence
  Description of Artificial Sequence: Synthetic oligonucleotide
caucguacuccuguucaga

SEQ ID NO: 1691877 - RNA, 19 nt, Artificial Sequence
  Description of Artificial Sequence: Synthetic oligonucleotide
ggauuugacgcugaacugu

SEQ ID NO: 1691878 - RNA, 19 nt, Artificial Sequence
  Description of Artificial Sequence: Synthetic oligonucleotide
cagcaucguacuccuguuc

SEQ ID NO: 1691879 - RNA, 19 nt, Artificial Sequence
  Description of Artificial Sequence: Synthetic oligonucleotide
augggcaauugggaaaaua

SEQ ID NO: 1691880 - RNA, 19 nt, Artificial Sequence
  Description of Artificial Sequence: Synthetic oligonucleotide
gcuuccgcaauuguucuuc

SEQ ID NO: 1691881 - RNA, 19 nt, Artificial Sequence
  Description of Artificial Sequence: Synthetic oligonucleotide
guagagcugcaaugucauc

SEQ ID NO: 1691882 - RNA, 19 nt, Artificial Sequence
  Description of Artificial Sequence: Synthetic oligonucleotide
agaugaggguacccagcuu

SEQ ID NO: 1691883 - RNA, 19 nt, Artificial Sequence
  Description of Artificial Sequence: Synthetic oligonucleotide
uugcaaggucugugguuuc

SEQ ID NO: 1691884 - RNA, 19 nt, Artificial Sequence
  Description of Artificial Sequence: Synthetic oligonucleotide
ggucacuuuccugaaggga

SEQ ID NO: 1691885 - RNA, 19 nt, Artificial Sequence
  Description of Artificial Sequence: Synthetic oligonucleotide
cucagcccgccaucacagc

SEQ ID NO: 1691886 - RNA, 19 nt, Artificial Sequence
  Description of Artificial Sequence: Synthetic oligonucleotide
gcacaauuggugacucugc

SEQ ID NO: 1691887 - RNA, 19 nt, Artificial Sequence
  Description of Artificial Sequence: Synthetic oligonucleotide
gugacucugcgcucucguc

SEQ ID NO: 1691888 - RNA, 19 nt, Artificial Sequence
  Description of Artificial Sequence: Synthetic oligonucleotide
cguccugucgcacaaauaa

SEQ ID NO: 1691889 - RNA, 19 nt, Artificial Sequence
  Description of Artificial Sequence: Synthetic oligonucleotide
cuugcaaggucugugguuu

SEQ ID NO: 1691890 - RNA, 19 nt, Artificial Sequence
  Description of Artificial Sequence: Synthetic oligonucleotide
ccgccaucacagcaaaagc

SEQ ID NO: 1691891 - RNA, 19 nt, Artificial Sequence
  Description of Artificial Sequence: Synthetic oligonucleotide
auuugacgcugaacugucu

SEQ ID NO: 1691892 - RNA, 19 nt, Artificial Sequence
  Description of Artificial Sequence: Synthetic oligonucleotide
cagcucagcuggugacagg

SEQ ID NO: 1691893 - RNA, 19 nt, Artificial Sequence
  Description of Artificial Sequence: Synthetic oligonucleotide
agccggcacuugcaaguug

SEQ ID NO: 1691894 - RNA, 19 nt, Artificial Sequence
  Description of Artificial Sequence: Synthetic oligonucleotide
caucucagcccgccaucac

SEQ ID NO: 1691895 - RNA, 19 nt, Artificial Sequence
  Description of Artificial Sequence: Synthetic oligonucleotide
gccggcacuugcaaguugc

SEQ ID NO: 1691896 - RNA, 19 nt, Artificial Sequence
  Description of Artificial Sequence: Synthetic oligonucleotide
gaagcggauugacucggau

SEQ ID NO: 1691897 - RNA, 19 nt, Artificial Sequence
  Description of Artificial Sequence: Synthetic oligonucleotide
gcccuaucuuguucuuccg

SEQ ID NO: 1691898 - RNA, 19 nt, Artificial Sequence
  Description of Artificial Sequence: Synthetic oligonucleotide
agucuccgaugcucugaca

SEQ ID NO: 1691899 - RNA, 19 nt, Artificial Sequence
  Description of Artificial Sequence: Synthetic oligonucleotide
gagaaagcccuaucuuguu

SEQ ID NO: 1691900 - RNA, 19 nt, Artificial Sequence
  Description of Artificial Sequence: Synthetic oligonucleotide
agaguaucuugaagcggau

SEQ ID NO: 1691901 - RNA, 19 nt, Artificial Sequence
  Description of Artificial Sequence: Synthetic oligonucleotide
cugacguccugucgcacaa

SEQ ID NO: 1691902 - RNA, 19 nt, Artificial Sequence
  Description of Artificial Sequence: Synthetic oligonucleotide
aggucgcugacgguccugu

SEQ ID NO: 1691903 - RNA, 19 nt, Artificial Sequence
  Description of Artificial Sequence: Synthetic oligonucleotide
gcgcacugugccuuugaug

SEQ ID NO: 1691904 - RNA, 19 nt, Artificial Sequence
  Description of Artificial Sequence: Synthetic oligonucleotide
ggaucaucggucccauuua

SEQ ID NO: 1691905 - RNA, 19 nt, Artificial Sequence
  Description of Artificial Sequence: Synthetic oligonucleotide
gcgcucucgucuucugggg

SEQ ID NO: 1691906 - RNA, 19 nt, Artificial Sequence
  Description of Artificial Sequence: Synthetic oligonucleotide
aagccggcacuugcaaguu

SEQ ID NO: 1691907 - RNA, 19 nt, Artificial Sequence
  Description of Artificial Sequence: Synthetic oligonucleotide
cuguguccuguguaauaaa

SEQ ID NO: 1691908 - RNA, 19 nt, Artificial Sequence
  Description of Artificial Sequence: Synthetic oligonucleotide
cggaucuuuuaagaauggg

SEQ ID NO: 1691909 - RNA, 19 nt, Artificial Sequence
  Description of Artificial Sequence: Synthetic oligonucleotide
cccuuaucucgucuuccgc

SEQ ID NO: 1691910 - RNA, 19 nt, Artificial Sequence
  Description of Artificial Sequence: Synthetic oligonucleotide
agcccgccaucacagcaaa

SEQ ID NO: 1691911 - RNA, 19 nt, Artificial Sequence
  Description of Artificial Sequence: Synthetic oligonucleotide
cgccaacacaguaucaauc

SEQ ID NO: 1691912 - RNA, 19 nt, Artificial Sequence
  Description of Artificial Sequence: Synthetic oligonucleotide
gcgugugucugcaugcuca

SEQ ID NO: 1691913 - RNA, 19 nt, Artificial Sequence
  Description of Artificial Sequence: Synthetic oligonucleotide
gggaggccaguuaaagaac

SEQ ID NO: 1691914 - RNA, 19 nt, Artificial Sequence
  Description of Artificial Sequence: Synthetic oligonucleotide
cauccuucgguucccaguu

SEQ ID NO: 1691915 - RNA, 19 nt, Artificial Sequence
  Description of Artificial Sequence: Synthetic oligonucleotide
cagguccuacauaguagaa

SEQ ID NO: 1691916 - RNA, 19 nt, Artificial Sequence
  Description of Artificial Sequence: Synthetic oligonucleotide
ccacuuggcgugcuccacc

SEQ ID NO: 1691917 - RNA, 19 nt, Artificial Sequence
  Description of Artificial Sequence: Synthetic oligonucleotide
cuugcaaguugcugaggau

SEQ ID NO: 1691918 - RNA, 19 nt, Artificial Sequence
  Description of Artificial Sequence: Synthetic oligonucleotide
ggaaggacaauggccacgu

SEQ ID NO: 1691919 - RNA, 19 nt, Artificial Sequence
  Description of Artificial Sequence: Synthetic oligonucleotide
guccugucgcacaaauaaa

SEQ ID NO: 1691920 - RNA, 19 nt, Artificial Sequence
  Description of Artificial Sequence: Synthetic oligonucleotide
gguagagcugcaaugucau

SEQ ID NO: 1691921 - RNA, 19 nt, Artificial Sequence
  Description of Artificial Sequence: Synthetic oligonucleotide
augcucugacauagcguca

SEQ ID NO: 1691922 - RNA, 19 nt, Artificial Sequence
  Description of Artificial Sequence: Synthetic oligonucleotide
gaggccaguuaaagaacgu

SEQ ID NO: 1691923 - RNA, 19 nt, Artificial Sequence
  Description of Artificial Sequence: Synthetic oligonucleotide
uccagacucccagcaucuc

SEQ ID NO: 1691924 - RNA, 19 nt, Artificial Sequence
  Description of Artificial Sequence: Synthetic oligonucleotide
guguuuccuuucgccaaca

SEQ ID NO: 1691925 - RNA, 19 nt, Artificial Sequence
  Description of Artificial Sequence: Synthetic oligonucleotide
gccaguuaaagaacguccu

SEQ ID NO: 1691926 - RNA, 19 nt, Artificial Sequence
  Description of Artificial Sequence: Synthetic oligonucleotide
gguuagagacagaguaucu

SEQ ID NO: 1691927 - RNA, 19 nt, Artificial Sequence
  Description of Artificial Sequence: Synthetic oligonucleotide
gggcaauugggaaaauagu

SEQ ID NO: 1691928 - RNA, 19 nt, Artificial Sequence
  Description of Artificial Sequence: Synthetic oligonucleotide
cagcccgccaucacagcaa

SEQ ID NO: 1691929 - RNA, 19 nt, Artificial Sequence
  Description of Artificial Sequence: Synthetic oligonucleotide
gcgcacagucuuugcacac

SEQ ID NO: 1691930 - RNA, 19 nt, Artificial Sequence
  Description of Artificial Sequence: Synthetic oligonucleotide
gugcgcacugugccuuuga

SEQ ID NO: 1691931 - RNA, 19 nt, Artificial Sequence
  Description of Artificial Sequence: Synthetic oligonucleotide
ggugacucugcgcucucgu

SEQ ID NO: 1691932 - RNA, 19 nt, Artificial Sequence
  Description of Artificial Sequence: Synthetic oligonucleotide
ugacguccugucgcacaaa

SEQ ID NO: 1691933 - RNA, 19 nt, Artificial Sequence
  Description of Artificial Sequence: Synthetic oligonucleotide
ggagagaaaugugcgcacu

SEQ ID NO: 1691934 - RNA, 19 nt, Artificial Sequence
  Description of Artificial Sequence: Synthetic oligonucleotide
auggaucaucggucccauu

SEQ ID NO: 1691935 - RNA, 19 nt, Artificial Sequence
  Description of Artificial Sequence: Synthetic oligonucleotide
cgcacaaauaaaucuuugu

SEQ ID NO: 1691936 - RNA, 19 nt, Artificial Sequence
  Description of Artificial Sequence: Synthetic oligonucleotide
ccugacguccugucgcaca

SEQ ID NO: 1691937 - RNA, 19 nt, Artificial Sequence
  Description of Artificial Sequence: Synthetic oligonucleotide
agccuaucacgaggucgcu

SEQ ID NO: 1691938 - RNA, 19 nt, Artificial Sequence
  Description of Artificial Sequence: Synthetic oligonucleotide
ccaguuaaagaacguccua

SEQ ID NO: 1691939 - RNA, 19 nt, Artificial Sequence
  Description of Artificial Sequence: Synthetic oligonucleotide
ccuggcacuuaggagacaa

SEQ ID NO: 1691940 - RNA, 19 nt, Artificial Sequence
  Description of Artificial Sequence: Synthetic oligonucleotide
gcaucucagcccgccauca

SEQ ID NO: 1691941 - RNA, 19 nt, Artificial Sequence
  Description of Artificial Sequence: Synthetic oligonucleotide
gccuaucacgaggucgcug

SEQ ID NO: 1691942 - RNA, 19 nt, Artificial Sequence
  Description of Artificial Sequence: Synthetic oligonucleotide
ccauggaucaucgguccca

SEQ ID NO: 1691943 - RNA, 19 nt, Artificial Sequence
  Description of Artificial Sequence: Synthetic oligonucleotide
cuguagcuuccgcaauugu

SEQ ID NO: 1691944 - RNA, 19 nt, Artificial Sequence
  Description of Artificial Sequence: Synthetic oligonucleotide
ccuuucgccaacacaguau

SEQ ID NO: 1691945 - RNA, 19 nt, Artificial Sequence
  Description of Artificial Sequence: Synthetic oligonucleotide
gcuugcaaggucugugguu

SEQ ID NO: 1691946 - RNA, 19 nt, Artificial Sequence
  Description of Artificial Sequence: Synthetic oligonucleotide
ccuaacucgugcugcgugu

SEQ ID NO: 1691947 - RNA, 19 nt, Artificial Sequence
  Description of Artificial Sequence: Synthetic oligonucleotide
ggguucuugcuugcaaggu

SEQ ID NO: 1691948 - RNA, 19 nt, Artificial Sequence
  Description of Artificial Sequence: Synthetic oligonucleotide
gaaggacaauggccacguu

SEQ ID NO: 1691949 - RNA, 19 nt, Artificial Sequence
  Description of Artificial Sequence: Synthetic oligonucleotide
guccuaacucgugcugcgu

SEQ ID NO: 1691950 - RNA, 19 nt, Artificial Sequence
  Description of Artificial Sequence: Synthetic oligonucleotide
cgucuuccgcaucaaguaa

SEQ ID NO: 1691951 - RNA, 19 nt, Artificial Sequence
  Description of Artificial Sequence: Synthetic oligonucleotide
cuggcacuuaggagacaau

SEQ ID NO: 1691952 - RNA, 19 nt, Artificial Sequence
  Description of Artificial Sequence: Synthetic oligonucleotide
cgaugcucugacauagcgu

SEQ ID NO: 1691953 - RNA, 19 nt, Artificial Sequence
  Description of Artificial Sequence: Synthetic oligonucleotide
ggauugacucggaucuuuu

SEQ ID NO: 1691954 - RNA, 19 nt, Artificial Sequence
  Description of Artificial Sequence: Synthetic oligonucleotide
cugcgugugucugcaugcu

SEQ ID NO: 1691955 - RNA, 19 nt, Artificial Sequence
  Description of Artificial Sequence: Synthetic oligonucleotide
gagagggcgcacagucuuu

SEQ ID NO: 1691956 - RNA, 19 nt, Artificial Sequence
  Description of Artificial Sequence: Synthetic oligonucleotide
cgcaucaaguaagccuauc

SEQ ID NO: 1691957 - RNA, 19 nt, Artificial Sequence
  Description of Artificial Sequence: Synthetic oligonucleotide
ccagauggccacagggaau

SEQ ID NO: 1691958 - RNA, 19 nt, Artificial Sequence
  Description of Artificial Sequence: Synthetic oligonucleotide
ccgcaauuguucuuccauu

SEQ ID NO: 1691959 - RNA, 19 nt, Artificial Sequence
  Description of Artificial Sequence: Synthetic oligonucleotide
gccugacguccugucgcac

SEQ ID NO: 1691960 - RNA, 19 nt, Artificial Sequence
  Description of Artificial Sequence: Synthetic oligonucleotide
ggucgcugacgguccugua

SEQ ID NO: 1691961 - RNA, 19 nt, Artificial Sequence
  Description of Artificial Sequence: Synthetic oligonucleotide
ggaagacgccugacguccu

SEQ ID NO: 1691962 - RNA, 19 nt, Artificial Sequence
  Description of Artificial Sequence: Synthetic oligonucleotide
acccugucuccagguccua

SEQ ID NO: 1691963 - RNA, 19 nt, Artificial Sequence
  Description of Artificial Sequence: Synthetic oligonucleotide
cgccugacguccugucgca

SEQ ID NO: 1691964 - RNA, 19 nt, Artificial Sequence
  Description of Artificial Sequence: Synthetic oligonucleotide
ccgcaucaaguaagccuau

SEQ ID NO: 1691965 - RNA, 19 nt, Artificial Sequence
  Description of Artificial Sequence: Synthetic oligonucleotide
cggauugacucggaucuuu

SEQ ID NO: 1691966 - RNA, 19 nt, Artificial Sequence
  Description of Artificial Sequence: Synthetic oligonucleotide
gcggauugacucggaucuu

SEQ ID NO: 1691967 - RNA, 19 nt, Artificial Sequence
  Description of Artificial Sequence: Synthetic oligonucleotide
cccuggcacuuaggagaca

SEQ ID NO: 1691968 - RNA, 19 nt, Artificial Sequence
  Description of Artificial Sequence: Synthetic oligonucleotide
cgaggucgcugacgguccu

SEQ ID NO: 1691969 - RNA, 19 nt, Artificial Sequence
  Description of Artificial Sequence: Synthetic oligonucleotide
cggucccauuuaggagaga

SEQ ID NO: 1691970 - RNA, 19 nt, Artificial Sequence
  Description of Artificial Sequence: Synthetic oligonucleotide
cgguucccaguugcucagu

SEQ ID NO: 1691971 - RNA, 19 nt, Artificial Sequence
  Description of Artificial Sequence: Synthetic oligonucleotide
  modified_base (5)..(5): a, c, u, g, unknown or other
agaanagccagacucagcc

SEQ ID NO: 1691972 - RNA, 19 nt, Artificial Sequence
  Description of Artificial Sequence: Synthetic oligonucleotide
uccauuaccagucacaugc

SEQ ID NO: 1691973 - RNA, 19 nt, Artificial Sequence
  Description of Artificial Sequence: Synthetic oligonucleotide
guauagaggacacagaagg

SEQ ID NO: 1691974 - RNA, 19 nt, Artificial Sequence
  Description of Artificial Sequence: Synthetic oligonucleotide
  modified_base (9)..(9): a, c, u, g, unknown or other
ugugagaanagccagacuc

SEQ ID NO: 1691975 - RNA, 19 nt, Artificial Sequence
  Description of Artificial Sequence: Synthetic oligonucleotide
auacacuucaauguaaggc

SEQ ID NO: 1691976 - RNA, 19 nt, Artificial Sequence
  Description of Artificial Sequence: Synthetic oligonucleotide
  modified_base (3)..(3): a, c, u, g, unknown or other
aanagccagacucagcccu

SEQ ID NO: 1691977 - RNA, 19 nt, Artificial Sequence
  Description of Artificial Sequence: Synthetic oligonucleotide
uguuguagagcccagccug

SEQ ID NO: 1691978 - RNA, 19 nt, Artificial Sequence
  Description of Artificial Sequence: Synthetic oligonucleotide
accucgaacagccaugccc

SEQ ID NO: 1691979 - RNA, 19 nt, Artificial Sequence
  Description of Artificial Sequence: Synthetic oligonucleotide
acuguuguagagcccagcc

SEQ ID NO: 1691980 - RNA, 19 nt, Artificial Sequence
  Description of Artificial Sequence: Synthetic oligonucleotide
agagcagcuaccuuagagg

SEQ ID NO: 1691981 - RNA, 19 nt, Artificial Sequence
  Description of Artificial Sequence: Synthetic oligonucleotide
acuaggaggaaggaaaugg

SEQ ID NO: 1691982 - RNA, 19 nt, Artificial Sequence
  Description of Artificial Sequence: Synthetic oligonucleotide
  modified_base (2)..(2): a, c, u, g, unknown or other
gnaaccagaaucccagugc

SEQ ID NO: 1691983 - RNA, 19 nt, Artificial Sequence
  Description of Artificial Sequence: Synthetic oligonucleotide
uauccagccaggaaccacg

SEQ ID NO: 1691984 - RNA, 19 nt, Artificial Sequence
  Description of Artificial Sequence: Synthetic oligonucleotide
gaaucuuccagcaucggcc

SEQ ID NO: 1691985 - RNA, 19 nt, Artificial Sequence
  Description of Artificial Sequence: Synthetic oligonucleotide
agagcgagauaccuggugg

SEQ ID NO: 1691986 - RNA, 19 nt, Artificial Sequence
  Description of Artificial Sequence: Synthetic oligonucleotide
gaaguguucgggaugaggc

SEQ ID NO: 1691987 - RNA, 19 nt, Artificial Sequence
  Description of Artificial Sequence: Synthetic oligonucleotide
agaaucccagugcagacuc

SEQ ID NO: 1691988 - RNA, 19 nt, Artificial Sequence
  Description of Artificial Sequence: Synthetic oligonucleotide
uuugcgauauccaggcagc

SEQ ID NO: 1691989 - RNA, 19 nt, Artificial Sequence
  Description of Artificial Sequence: Synthetic oligonucleotide
auuaccagucacaugcacc

SEQ ID NO: 1691990 - RNA, 19 nt, Artificial Sequence
  Description of Artificial Sequence: Synthetic oligonucleotide
guuugcgauauccaggcag

SEQ ID NO: 1691991 - RNA, 19 nt, Artificial Sequence
  Description of Artificial Sequence: Synthetic oligonucleotide
acacagaaggcuccaaccg

SEQ ID NO: 1691992 - RNA, 19 nt, Artificial Sequence
  Description of Artificial Sequence: Synthetic oligonucleotide
uuaccagucacaugcaccu

SEQ ID NO: 1691993 - RNA, 19 nt, Artificial Sequence
  Description of Artificial Sequence: Synthetic oligonucleotide
accggaaucuuccagcauc

SEQ ID NO: 1691994 - RNA, 19 nt, Artificial Sequence
  Description of Artificial Sequence: Synthetic oligonucleotide
aaguccuaagugccugggc

SEQ ID NO: 1691995 - RNA, 19 nt, Artificial Sequence
  Description of Artificial Sequence: Synthetic oligonucleotide
gacacagaaggcuccaacc

SEQ ID NO: 1691996 - RNA, 19 nt, Artificial Sequence
  Description of Artificial Sequence: Synthetic oligonucleotide
agccaugcccaugagaacc

SEQ ID NO: 1691997 - RNA, 19 nt, Artificial Sequence
  Description of Artificial Sequence: Synthetic oligonucleotide
uucaauguaaggcacuguu

SEQ ID NO: 1691998 - RNA, 19 nt, Artificial Sequence
  Description of Artificial Sequence: Synthetic oligonucleotide
  modified_base (7)..(7): a, c, u, g, unknown or other
ugagaanagccagacucag

SEQ ID NO: 1691999 - RNA, 19 nt, Artificial Sequence
  Description of Artificial Sequence: Synthetic oligonucleotide
gcugcuaggacccagcccg

SEQ ID NO: 1692000 - RNA, 19 nt, Artificial Sequence
  Description of Artificial Sequence: Synthetic oligonucleotide
cucguauccagccaggaac

SEQ ID NO: 1692001 - RNA, 19 nt, Artificial Sequence
  Description of Artificial Sequence: Synthetic oligonucleotide
agucguggugucaagaugg

SEQ ID NO: 1692002 - RNA, 19 nt, Artificial Sequence
  Description of Artificial Sequence: Synthetic oligonucleotide
gaaggaaaugggcuucucc

SEQ ID NO: 1692003 - RNA, 19 nt, Artificial Sequence
  Description of Artificial Sequence: Synthetic oligonucleotide
  modified_base (16)..(16): a, c, u, g, unknown or other
augguggugugagaanagc

SEQ ID NO: 1692004 - RNA, 19 nt, Artificial Sequence
  Description of Artificial Sequence: Synthetic oligonucleotide
aauacagugaguggcugcu

SEQ ID NO: 1692005 - RNA, 19 nt, Artificial Sequence
  Description of Artificial Sequence: Synthetic oligonucleotide
cugauagaggcagugacag

SEQ ID NO: 1692006 - RNA, 19 nt, Artificial Sequence
  Description of Artificial Sequence: Synthetic oligonucleotide
uguaaggcacuguuguaga

SEQ ID NO: 1692007 - RNA, 19 nt, Artificial Sequence
  Description of Artificial Sequence: Synthetic oligonucleotide
uuaucuuccugacccucag

SEQ ID NO: 1692008 - RNA, 19 nt, Artificial Sequence
  Description of Artificial Sequence: Synthetic oligonucleotide
aguccuaagugccugggca

SEQ ID NO: 1692009 - RNA, 19 nt, Artificial Sequence
  Description of Artificial Sequence: Synthetic oligonucleotide
uauagaggacacagaaggu

SEQ ID NO: 1692010 - RNA, 19 nt, Artificial Sequence
  Description of Artificial Sequence: Synthetic oligonucleotide
aggcaaacggcacucgggg

SEQ ID NO: 1692011 - RNA, 19 nt, Artificial Sequence
  Description of Artificial Sequence: Synthetic oligonucleotide
aagcagagcagcuaccuua

SEQ ID NO: 1692012 - RNA, 19 nt, Artificial Sequence
  Description of Artificial Sequence: Synthetic oligonucleotide
gaaggcuccaaccggaauc

SEQ ID NO: 1692013 - RNA, 19 nt, Artificial Sequence
  Description of Artificial Sequence: Synthetic oligonucleotide
augcugaugacagagcgag

SEQ ID NO: 1692014 - RNA, 19 nt, Artificial Sequence
  Description of Artificial Sequence: Synthetic oligonucleotide
aaaugggcuucucccacug

SEQ ID NO: 1692015 - RNA, 19 nt, Artificial Sequence
  Description of Artificial Sequence: Synthetic oligonucleotide
ucaccucacauuuaucuuc

SEQ ID NO: 1692016 - RNA, 19 nt, Artificial Sequence
  Description of Artificial Sequence: Synthetic oligonucleotide
ucguauccagccaggaacc

SEQ ID NO: 1692017 - RNA, 19 nt, Artificial Sequence
  Description of Artificial Sequence: Synthetic oligonucleotide
auguaaggcacuguuguag

SEQ ID NO: 1692018 - RNA, 19 nt, Artificial Sequence
  Description of Artificial Sequence: Synthetic oligonucleotide
gaauacagugaguggcugc

SEQ ID NO: 1692019 - RNA, 19 nt, Artificial Sequence
  Description of Artificial Sequence: Synthetic oligonucleotide
gauggggaaggcuccaccc

SEQ ID NO: 1692020 - RNA, 19 nt, Artificial Sequence
  Description of Artificial Sequence: Synthetic oligonucleotide
ucacauuuaucuuccugac

SEQ ID NO: 1692021 - RNA, 19 nt, Artificial Sequence
  Description of Artificial Sequence: Synthetic oligonucleotide
augcaccucguauccagcc

SEQ ID NO: 1692022 - RNA, 19 nt, Artificial Sequence
  Description of Artificial Sequence: Synthetic oligonucleotide
uuccugacccucaguauag

SEQ ID NO: 1692023 - RNA, 19 nt, Artificial Sequence
  Description of Artificial Sequence: Synthetic oligonucleotide
  modified_base (4)..(4): a, c, u, g, unknown or other
gaanagccagacucagccc

SEQ ID NO: 1692024 - RNA, 19 nt, Artificial Sequence
  Description of Artificial Sequence: Synthetic oligonucleotide
ucuaaguccuaagugccug

SEQ ID NO: 1692025 - RNA, 19 nt, Artificial Sequence
  Description of Artificial Sequence: Synthetic oligonucleotide
gacacagaagguuccagga

SEQ ID NO: 1692026 - RNA, 19 nt, Artificial Sequence
  Description of Artificial Sequence: Synthetic oligonucleotide
uaagugccugggcaggcgg

SEQ ID NO: 1692027 - RNA, 19 nt, Artificial Sequence
  Description of Artificial Sequence: Synthetic oligonucleotide
acaugcaccucguauccag

SEQ ID NO: 1692028 - RNA, 19 nt, Artificial Sequence
  Description of Artificial Sequence: Synthetic oligonucleotide
gaucaguggaggccagugg

SEQ ID NO: 1692029 - RNA, 19 nt, Artificial Sequence
  Description of Artificial Sequence: Synthetic oligonucleotide
gggucuaaguccuaagugc

SEQ ID NO: 1692030 - RNA, 19 nt, Artificial Sequence
  Description of Artificial Sequence: Synthetic oligonucleotide
aaccacguccccuccucac

SEQ ID NO: 1692031 - RNA, 19 nt, Artificial Sequence
  Description of Artificial Sequence: Synthetic oligonucleotide
uccaaccggaaucuuccag

SEQ ID NO: 1692032 - RNA, 19 nt, Artificial Sequence
  Description of Artificial Sequence: Synthetic oligonucleotide
uaaggcacuguuguagagc

SEQ ID NO: 1692033 - RNA, 19 nt, Artificial Sequence
  Description of Artificial Sequence: Synthetic oligonucleotide
aaguguucgggaugaggca

SEQ ID NO: 1692034 - RNA, 19 nt, Artificial Sequence
  Description of Artificial Sequence: Synthetic oligonucleotide
cacagaaggcuccaaccgg

SEQ ID NO: 1692035 - RNA, 19 nt, Artificial Sequence
  Description of Artificial Sequence: Synthetic oligonucleotide
ugguugagccacauuccag

SEQ ID NO: 1692036 - RNA, 19 nt, Artificial Sequence
  Description of Artificial Sequence: Synthetic oligonucleotide
agaaguguucgggaugagg

SEQ ID NO: 1692037 - RNA, 19 nt, Artificial Sequence
  Description of Artificial Sequence: Synthetic oligonucleotide
ugacagagcgagauaccug

SEQ ID NO: 1692038 - RNA, 19 nt, Artificial Sequence
  Description of Artificial Sequence: Synthetic oligonucleotide
gagcagcuaccuuagagga

SEQ ID NO: 1692039 - RNA, 19 nt, Artificial Sequence
  Description of Artificial Sequence: Synthetic oligonucleotide
ucucgugcggcacgaggcg

SEQ ID NO: 1692040 - RNA, 19 nt, Artificial Sequence
  Description of Artificial Sequence: Synthetic oligonucleotide
gguugagccacauuccagc

SEQ ID NO: 1692041 - RNA, 19 nt, Artificial Sequence
  Description of Artificial Sequence: Synthetic oligonucleotide
agagcggcgguucucccgg

SEQ ID NO: 1692042 - RNA, 19 nt, Artificial Sequence
  Description of Artificial Sequence: Synthetic oligonucleotide
agaggacacagaagguucc

SEQ ID NO: 1692043 - RNA, 19 nt, Artificial Sequence
  Description of Artificial Sequence: Synthetic oligonucleotide
agucacaugcaccucguau

SEQ ID NO: 1692044 - RNA, 19 nt, Artificial Sequence
  Description of Artificial Sequence: Synthetic oligonucleotide
cucacgacacagaaggcuc

SEQ ID NO: 1692045 - RNA, 19 nt, Artificial Sequence
  Description of Artificial Sequence: Synthetic oligonucleotide
gcuaccuuagaggagcucg

SEQ ID NO: 1692046 - RNA, 19 nt, Artificial Sequence
  Description of Artificial Sequence: Synthetic oligonucleotide
cacauuuaucuuccugacc

SEQ ID NO: 1692047 - RNA, 19 nt, Artificial Sequence
  Description of Artificial Sequence: Synthetic oligonucleotide
agugcagacuccauuacca

SEQ ID NO: 1692048 - RNA, 19 nt, Artificial Sequence
  Description of Artificial Sequence: Synthetic oligonucleotide
ugauggggaaggcuccacc

SEQ ID NO: 1692049 - RNA, 19 nt, Artificial Sequence
  Description of Artificial Sequence: Synthetic oligonucleotide
uaaguccuaagugccuggg

SEQ ID NO: 1692050 - RNA, 19 nt, Artificial Sequence
  Description of Artificial Sequence: Synthetic oligonucleotide
aguguucgggaugaggcag

SEQ ID NO: 1692051 - RNA, 19 nt, Artificial Sequence
  Description of Artificial Sequence: Synthetic oligonucleotide
caguauagaggacacagaa

SEQ ID NO: 1692052 - RNA, 19 nt, Artificial Sequence
  Description of Artificial Sequence: Synthetic oligonucleotide
auggggaaggcuccacccg

SEQ ID NO: 1692053 - RNA, 19 nt, Artificial Sequence
  Description of Artificial Sequence: Synthetic oligonucleotide
cccaugagaacccaggggc

SEQ ID NO: 1692054 - RNA, 19 nt, Artificial Sequence
  Description of Artificial Sequence: Synthetic oligonucleotide
ucacgacacagaaggcucc

SEQ ID NO: 1692055 - RNA, 19 nt, Artificial Sequence
  Description of Artificial Sequence: Synthetic oligonucleotide
caggcaaacggcacucggg

SEQ ID NO: 1692056 - RNA, 19 nt, Artificial Sequence
  Description of Artificial Sequence: Synthetic oligonucleotide
agcgagauaccugguggcc

SEQ ID NO: 1692057 - RNA, 19 nt, Artificial Sequence
  Description of Artificial Sequence: Synthetic oligonucleotide
auaccugguggcccugugg

SEQ ID NO: 1692058 - RNA, 19 nt, Artificial Sequence
  Description of Artificial Sequence: Synthetic oligonucleotide
  modified_base (12)..(12): a, c, u, g, unknown or other
uggugugagaanagccaga

SEQ ID NO: 1692059 - RNA, 19 nt, Artificial Sequence
  Description of Artificial Sequence: Synthetic oligonucleotide
aaucccagugcagacucca

SEQ ID NO: 1692060 - RNA, 19 nt, Artificial Sequence
  Description of Artificial Sequence: Synthetic oligonucleotide
ugcagacuccauuaccagu

SEQ ID NO: 1692061 - RNA, 19 nt, Artificial Sequence
  Description of Artificial Sequence: Synthetic oligonucleotide
uugacgcgcguccucagcu

SEQ ID NO: 1692062 - RNA, 19 nt, Artificial Sequence
  Description of Artificial Sequence: Synthetic oligonucleotide
  modified_base (3)..(3): a, c, u, g, unknown or other
ggnaaccagaaucccagug

SEQ ID NO: 1692063 - RNA, 19 nt, Artificial Sequence
  Description of Artificial Sequence: Synthetic oligonucleotide
gcaaacggcacucggggcg

SEQ ID NO: 1692064 - RNA, 19 nt, Artificial Sequence
  Description of Artificial Sequence: Synthetic oligonucleotide
aggaaaugggcuucuccca

SEQ ID NO: 1692065 - RNA, 19 nt, Artificial Sequence
  Description of Artificial Sequence: Synthetic oligonucleotide
aggaagaaguguucgggau

SEQ ID NO: 1692066 - RNA, 19 nt, Artificial Sequence
  Description of Artificial Sequence: Synthetic oligonucleotide
ugucagaggugcgaggcug

SEQ ID NO: 1692067 - RNA, 19 nt, Artificial Sequence
  Description of Artificial Sequence: Synthetic oligonucleotide
accacuaggaggaaggaaa

SEQ ID NO: 1692068 - RNA, 19 nt, Artificial Sequence
  Description of Artificial Sequence: Synthetic oligonucleotide
  modified_base (17)..(17): a, c, u, g, unknown or other
gaugguggugugagaanag

SEQ ID NO: 1692069 - RNA, 19 nt, Artificial Sequence
  Description of Artificial Sequence: Synthetic oligonucleotide
cuaccuuagaggagcucgc

SEQ ID NO: 1692070 - RNA, 19 nt, Artificial Sequence
  Description of Artificial Sequence: Synthetic oligonucleotide
guaaggcacuguuguagag

SEQ ID NO: 1692071 - RNA, 19 nt, Artificial Sequence
  Description of Artificial Sequence: Synthetic oligonucleotide
auagaggacacagaagguu

SEQ ID NO: 1692072 - RNA, 19 nt, Artificial Sequence
  Description of Artificial Sequence: Synthetic oligonucleotide
gagcgagauaccugguggc

SEQ ID NO: 1692073 - RNA, 19 nt, Artificial Sequence
  Description of Artificial Sequence: Synthetic oligonucleotide
guucucgugcggcacgagg

SEQ ID NO: 1692074 - RNA, 19 nt, Artificial Sequence
  Description of Artificial Sequence: Synthetic oligonucleotide
aggggccucccucagacug

SEQ ID NO: 1692075 - RNA, 19 nt, Artificial Sequence
  Description of Artificial Sequence: Synthetic oligonucleotide
gucagguugacgcgcgucc

SEQ ID NO: 1692076 - RNA, 19 nt, Artificial Sequence
  Description of Artificial Sequence: Synthetic oligonucleotide
acagaagguuccaggaguc

SEQ ID NO: 1692077 - RNA, 19 nt, Artificial Sequence
  Description of Artificial Sequence: Synthetic oligonucleotide
agagucguggugucaagau

SEQ ID NO: 1692078 - RNA, 19 nt, Artificial Sequence
  Description of Artificial Sequence: Synthetic oligonucleotide
uccuaagugccugggcagg

SEQ ID NO: 1692079 - RNA, 19 nt, Artificial Sequence
  Description of Artificial Sequence: Synthetic oligonucleotide
gaugacagagcgagauacc

SEQ ID NO: 1692080 - RNA, 19 nt, Artificial Sequence
  Description of Artificial Sequence: Synthetic oligonucleotide
accagaaucccagugcaga

SEQ ID NO: 1692081 - RNA, 19 nt, Artificial Sequence
  Description of Artificial Sequence: Synthetic oligonucleotide
cauuaccagucacaugcac

SEQ ID NO: 1692082 - RNA, 19 nt, Artificial Sequence
  Description of Artificial Sequence: Synthetic oligonucleotide
uggggaaggcuccacccga

SEQ ID NO: 1692083 - RNA, 19 nt, Artificial Sequence
  Description of Artificial Sequence: Synthetic oligonucleotide
ugcaccucguauccagcca

SEQ ID NO: 1692084 - RNA, 19 nt, Artificial Sequence
  Description of Artificial Sequence: Synthetic oligonucleotide
  modified_base (5)..(5): a, c, u, g, unknown or other
ggggnaaccagaaucccag

SEQ ID NO: 1692085 - RNA, 19 nt, Artificial Sequence
  Description of Artificial Sequence: Synthetic oligonucleotide
guccuaagugccugggcag

SEQ ID NO: 1692086 - RNA, 19 nt, Artificial Sequence
  Description of Artificial Sequence: Synthetic oligonucleotide
ggggucuaaguccuaagug

SEQ ID NO: 1692087 - RNA, 19 nt, Artificial Sequence
  Description of Artificial Sequence: Synthetic oligonucleotide
agcgccagguccgaggcgg

SEQ ID NO: 1692088 - RNA, 19 nt, Artificial Sequence
  Description of Artificial Sequence: Synthetic oligonucleotide
  modified_base (6)..(6): a, c, u, g, unknown or other
gagaanagccagacucagc

SEQ ID NO: 1692089 - RNA, 19 nt, Artificial Sequence
  Description of Artificial Sequence: Synthetic oligonucleotide
guaggcggggcaaagccag

SEQ ID NO: 1692090 - RNA, 19 nt, Artificial Sequence
  Description of Artificial Sequence: Synthetic oligonucleotide
acugucuucaggaggccag

SEQ ID NO: 1692091 - RNA, 19 nt, Artificial Sequence
  Description of Artificial Sequence: Synthetic oligonucleotide
cagccaggaaccacguccc

SEQ ID NO: 1692092 - RNA, 19 nt, Artificial Sequence
  Description of Artificial Sequence: Synthetic oligonucleotide
cuaccucgaacagccaugc

SEQ ID NO: 1692093 - RNA, 19 nt, Artificial Sequence
  Description of Artificial Sequence: Synthetic oligonucleotide
uccacccgagaguucagcu

SEQ ID NO: 1692094 - RNA, 19 nt, Artificial Sequence
  Description of Artificial Sequence: Synthetic oligonucleotide
aaggcuccacccgagaguu

SEQ ID NO: 1692095 - RNA, 19 nt, Artificial Sequence
  Description of Artificial Sequence: Synthetic oligonucleotide
agaggcagugacagagucg

SEQ ID NO: 1692096 - RNA, 19 nt, Artificial Sequence
  Description of Artificial Sequence: Synthetic oligonucleotide
acuccauuaccagucacau

SEQ ID NO: 1692097 - RNA, 19 nt, Artificial Sequence
  Description of Artificial Sequence: Synthetic oligonucleotide
ccaaccggaaucuuccagc

SEQ ID NO: 1692098 - RNA, 19 nt, Artificial Sequence
  Description of Artificial Sequence: Synthetic oligonucleotide
gcggcggucagguugacgc

SEQ ID NO: 1692099 - RNA, 19 nt, Artificial Sequence
  Description of Artificial Sequence: Synthetic oligonucleotide
agcagcuacaggaacucug

SEQ ID NO: 1692100 - RNA, 19 nt, Artificial Sequence
  Description of Artificial Sequence: Synthetic oligonucleotide
  modified_base (2)..(2): a, c, u, g, unknown or other
anagccagacucagcccug

SEQ ID NO: 1692101 - RNA, 19 nt, Artificial Sequence
  Description of Artificial Sequence: Synthetic oligonucleotide
caugcaccucguauccagc

SEQ ID NO: 1692102 - RNA, 19 nt, Artificial Sequence
  Description of Artificial Sequence: Synthetic oligonucleotide
gaagcguucucgugcggca

SEQ ID NO: 1692103 - RNA, 19 nt, Artificial Sequence
  Description of Artificial Sequence: Synthetic oligonucleotide
acagguaggggaggugccg

SEQ ID NO: 1692104 - RNA, 19 nt, Artificial Sequence
  Description of Artificial Sequence: Synthetic oligonucleotide
aggcggaugcugaugacag

SEQ ID NO: 1692105 - RNA, 19 nt, Artificial Sequence
  Description of Artificial Sequence: Synthetic oligonucleotide
uguuugcgauauccaggca

SEQ ID NO: 1692106 - RNA, 19 nt, Artificial Sequence
  Description of Artificial Sequence: Synthetic oligonucleotide
gcgauauccaggcagcuuc

SEQ ID NO: 1692107 - RNA, 19 nt, Artificial Sequence
  Description of Artificial Sequence: Synthetic oligonucleotide
  modified_base (11)..(11): a, c, u, g, unknown or other
ggugugagaanagccagac

SEQ ID NO: 1692108 - RNA, 19 nt, Artificial Sequence
  Description of Artificial Sequence: Synthetic oligonucleotide
auuccccgcggccccagcg

SEQ ID NO: 1692109 - RNA, 19 nt, Artificial Sequence
  Description of Artificial Sequence: Synthetic oligonucleotide
gaggcagugacagagucgu

SEQ ID NO: 1692110 - RNA, 19 nt, Artificial Sequence
  Description of Artificial Sequence: Synthetic oligonucleotide
aaccagaaucccagugcag

SEQ ID NO: 1692111 - RNA, 19 nt, Artificial Sequence
  Description of Artificial Sequence: Synthetic oligonucleotide
uccucacgacacagaaggc

SEQ ID NO: 1692112 - RNA, 19 nt, Artificial Sequence
  Description of Artificial Sequence: Synthetic oligonucleotide
  modified_base (8)..(8): a, c, u, g, unknown or other
gugagaanagccagacuca

SEQ ID NO: 1692113 - RNA, 19 nt, Artificial Sequence
  Description of Artificial Sequence: Synthetic oligonucleotide
agucccuggaagcguucuc

SEQ ID NO: 1692114 - RNA, 19 nt, Artificial Sequence
  Description of Artificial Sequence: Synthetic oligonucleotide
caugcccaugagaacccag

SEQ ID NO: 1692115 - RNA, 19 nt, Artificial Sequence
  Description of Artificial Sequence: Synthetic oligonucleotide
cagagcgagauaccuggug

SEQ ID NO: 1692116 - RNA, 19 nt, Artificial Sequence
  Description of Artificial Sequence: Synthetic oligonucleotide
agcccuggaucaguggagg

SEQ ID NO: 1692117 - RNA, 19 nt, Artificial Sequence
  Description of Artificial Sequence: Synthetic oligonucleotide
ggaaaugggcuucucccac

SEQ ID NO: 1692118 - RNA, 19 nt, Artificial Sequence
  Description of Artificial Sequence: Synthetic oligonucleotide
cccacuguuugcgauaucc

SEQ ID NO: 1692119 - RNA, 19 nt, Artificial Sequence
  Description of Artificial Sequence: Synthetic oligonucleotide
cagacucagcccuggauca

SEQ ID NO: 1692120 - RNA, 19 nt, Artificial Sequence
  Description of Artificial Sequence: Synthetic oligonucleotide
ugcggauuccccgcggccc

SEQ ID NO: 1692121 - RNA, 19 nt, Artificial Sequence
  Description of Artificial Sequence: Synthetic oligonucleotide
acagaaggcuccaaccgga

SEQ ID NO: 1692122 - RNA, 19 nt, Artificial Sequence
  Description of Artificial Sequence: Synthetic oligonucleotide
cuaagugccugggcaggcg

SEQ ID NO: 1692123 - RNA, 19 nt, Artificial Sequence
  Description of Artificial Sequence: Synthetic oligonucleotide
gacagcggcucccgggcag

SEQ ID NO: 1692124 - RNA, 19 nt, Artificial Sequence
  Description of Artificial Sequence: Synthetic oligonucleotide
aucuuccagcaucggcccg

SEQ ID NO: 1692125 - RNA, 19 nt, Artificial Sequence
  Description of Artificial Sequence: Synthetic oligonucleotide
gacgcgcguccucagcugc

SEQ ID NO: 1692126 - RNA, 19 nt, Artificial Sequence
  Description of Artificial Sequence: Synthetic oligonucleotide
gcggaugcugaugacagag

SEQ ID NO: 1692127 - RNA, 19 nt, Artificial Sequence
  Description of Artificial Sequence: Synthetic oligonucleotide
ugggcugucagaggugcga

SEQ ID NO: 1692128 - RNA, 19 nt, Artificial Sequence
  Description of Artificial Sequence: Synthetic oligonucleotide
ugcggcacgaggcgugcca

SEQ ID NO: 1692129 - RNA, 19 nt, Artificial Sequence
  Description of Artificial Sequence: Synthetic oligonucleotide
gcuacaggaacucuguccu

SEQ ID NO: 1692130 - RNA, 19 nt, Artificial Sequence
  Description of Artificial Sequence: Synthetic oligonucleotide
caaccggaaucuuccagca

SEQ ID NO: 1692131 - RNA, 19 nt, Artificial Sequence
  Description of Artificial Sequence: Synthetic oligonucleotide
gacagagucguggugucaa

SEQ ID NO: 1692132 - RNA, 19 nt, Artificial Sequence
  Description of Artificial Sequence: Synthetic oligonucleotide
caaacggcacucggggcgg

SEQ ID NO: 1692133 - RNA, 19 nt, Artificial Sequence
  Description of Artificial Sequence: Synthetic oligonucleotide
aaccggaaucuuccagcau

SEQ ID NO: 1692134 - RNA, 19 nt, Artificial Sequence
  Description of Artificial Sequence: Synthetic oligonucleotide
cugguugagccacauucca

SEQ ID NO: 1692135 - RNA, 19 nt, Artificial Sequence
  Description of Artificial Sequence: Synthetic oligonucleotide
ccggaaucuuccagcaucg

SEQ ID NO: 1692136 - RNA, 19 nt, Artificial Sequence
  Description of Artificial Sequence: Synthetic oligonucleotide
  modified_base (8)..(8): a, c, u, g, unknown or other
cccggggnaaccagaaucc

SEQ ID NO: 1692137 - RNA, 19 nt, Artificial Sequence
  Description of Artificial Sequence: Synthetic oligonucleotide
gaggucaccucacauuuau

SEQ ID NO: 1692138 - RNA, 19 nt, Artificial Sequence
  Description of Artificial Sequence: Synthetic oligonucleotide
gcuccaaccggaaucuucc

SEQ ID NO: 1692139 - RNA, 19 nt, Artificial Sequence
  Description of Artificial Sequence: Synthetic oligonucleotide
aagaaguguucgggaugag

SEQ ID NO: 1692140 - RNA, 19 nt, Artificial Sequence
  Description of Artificial Sequence: Synthetic oligonucleotide
guugacgcgcguccucagc

SEQ ID NO: 1692141 - RNA, 19 nt, Artificial Sequence
  Description of Artificial Sequence: Synthetic oligonucleotide
cacagaagguuccaggagu

SEQ ID NO: 1692142 - RNA, 19 nt, Artificial Sequence
  Description of Artificial Sequence: Synthetic oligonucleotide
cuccauuaccagucacaug

SEQ ID NO: 1692143 - RNA, 19 nt, Artificial Sequence
  Description of Artificial Sequence: Synthetic oligonucleotide
ucgugcggcacgaggcgug

SEQ ID NO: 1692144 - RNA, 19 nt, Artificial Sequence
  Description of Artificial Sequence: Synthetic oligonucleotide
ucccagugcagacuccauu

SEQ ID NO: 1692145 - RNA, 19 nt, Artificial Sequence
  Description of Artificial Sequence: Synthetic oligonucleotide
aagccagagcggcgguucu

SEQ ID NO: 1692146 - RNA, 19 nt, Artificial Sequence
  Description of Artificial Sequence: Synthetic oligonucleotide
gagaauacagugaguggcu

SEQ ID NO: 1692147 - RNA, 19 nt, Artificial Sequence
  Description of Artificial Sequence: Synthetic oligonucleotide
aggggaggugccgagguca

SEQ ID NO: 1692148 - RNA, 19 nt, Artificial Sequence
  Description of Artificial Sequence: Synthetic oligonucleotide
gaaggcuccacccgagagu

SEQ ID NO: 1692149 - RNA, 19 nt, Artificial Sequence
  Description of Artificial Sequence: Synthetic oligonucleotide
agaaggcuccaaccggaau

SEQ ID NO: 1692150 - RNA, 19 nt, Artificial Sequence
  Description of Artificial Sequence: Synthetic oligonucleotide
cagcccuggaucaguggag

SEQ ID NO: 1692151 - RNA, 19 nt, Artificial Sequence
  Description of Artificial Sequence: Synthetic oligonucleotide
ucgaacagccaugcccaug

SEQ ID NO: 1692152 - RNA, 19 nt, Artificial Sequence
  Description of Artificial Sequence: Synthetic oligonucleotide
cuuagaggagcucgcagcu

SEQ ID NO: 1692153 - RNA, 19 nt, Artificial Sequence
  Description of Artificial Sequence: Synthetic oligonucleotide
ugacgcgcguccucagcug

SEQ ID NO: 1692154 - RNA, 19 nt, Artificial Sequence
  Description of Artificial Sequence: Synthetic oligonucleotide
ccagacucagcccuggauc

SEQ ID NO: 1692155 - RNA, 19 nt, Artificial Sequence
  Description of Artificial Sequence: Synthetic oligonucleotide
ugcugaugacagagcgaga

SEQ ID NO: 1692156 - RNA, 19 nt, Artificial Sequence
  Description of Artificial Sequence: Synthetic oligonucleotide
aaacggcacucggggcggc

SEQ ID NO: 1692157 - RNA, 19 nt, Artificial Sequence
  Description of Artificial Sequence: Synthetic oligonucleotide
gggcaggaagaaguguucg

SEQ ID NO: 1692158 - RNA, 19 nt, Artificial Sequence
  Description of Artificial Sequence: Synthetic oligonucleotide
guguucgggaugaggcagg

SEQ ID NO: 1692159 - RNA, 19 nt, Artificial Sequence
  Description of Artificial Sequence: Synthetic oligonucleotide
ccagcugcgcgcuggagcc

SEQ ID NO: 1692160 - RNA, 19 nt, Artificial Sequence
  Description of Artificial Sequence: Synthetic oligonucleotide
agcaucggcccgccucuuc

SEQ ID NO: 1692161 - RNA, 19 nt, Artificial Sequence
  Description of Artificial Sequence: Synthetic oligonucleotide
  modified_base (19)..(19): a, c, u, g, unknown or other
cuaggacccagcccggggn

SEQ ID NO: 1692162 - RNA, 19 nt, Artificial Sequence
  Description of Artificial Sequence: Synthetic oligonucleotide
cccugauagaggcagugac

SEQ ID NO: 1692163 - RNA, 19 nt, Artificial Sequence
  Description of Artificial Sequence: Synthetic oligonucleotide
ugccgaggucaccucacau

SEQ ID NO: 1692164 - RNA, 19 nt, Artificial Sequence
  Description of Artificial Sequence: Synthetic oligonucleotide
ggcacuguuguagagccca

SEQ ID NO: 1692165 - RNA, 19 nt, Artificial Sequence
  Description of Artificial Sequence: Synthetic oligonucleotide
uccuccggacgcgagggca

SEQ ID NO: 1692166 - RNA, 19 nt, Artificial Sequence
  Description of Artificial Sequence: Synthetic oligonucleotide
aguggcugcuaggacccag

SEQ ID NO: 1692167 - RNA, 19 nt, Artificial Sequence
  Description of Artificial Sequence: Synthetic oligonucleotide
uaccucgaacagccaugcc

SEQ ID NO: 1692168 - RNA, 19 nt, Artificial Sequence
  Description of Artificial Sequence: Synthetic oligonucleotide
ugcgcgcuggagccgggug

SEQ ID NO: 1692169 - RNA, 19 nt, Artificial Sequence
  Description of Artificial Sequence: Synthetic oligonucleotide
  modified_base (9)..(9): a, c, u, g, unknown or other
gcccggggnaaccagaauc

SEQ ID NO: 1692170 - RNA, 19 nt, Artificial Sequence
  Description of Artificial Sequence: Synthetic oligonucleotide
ccaugagaacccaggggcc

SEQ ID NO: 1692171 - RNA, 19 nt, Artificial Sequence
  Description of Artificial Sequence: Synthetic oligonucleotide
cacuguuguagagcccagc

SEQ ID NO: 1692172 - RNA, 19 nt, Artificial Sequence
  Description of Artificial Sequence: Synthetic oligonucleotide
ggaucaguggaggccagug

SEQ ID NO: 1692173 - RNA, 19 nt, Artificial Sequence
  Description of Artificial Sequence: Synthetic oligonucleotide
gcuaggacccagcccgggg

SEQ ID NO: 1692174 - RNA, 19 nt, Artificial Sequence
  Description of Artificial Sequence: Synthetic oligonucleotide
cucgaggucgcgggguggg

SEQ ID NO: 1692175 - RNA, 19 nt, Artificial Sequence
  Description of Artificial Sequence: Synthetic oligonucleotide
ggaagcguucucgugcggc

SEQ ID NO: 1692176 - RNA, 19 nt, Artificial Sequence
  Description of Artificial Sequence: Synthetic oligonucleotide
gcugguugagccacauucc

SEQ ID NO: 1692177 - RNA, 19 nt, Artificial Sequence
  Description of Artificial Sequence: Synthetic oligonucleotide
ugacagagucgugguguca

SEQ ID NO: 1692178 - RNA, 19 nt, Artificial Sequence
  Description of Artificial Sequence: Synthetic oligonucleotide
ccugacccucaguauagag

SEQ ID NO: 1692179 - RNA, 19 nt, Artificial Sequence
  Description of Artificial Sequence: Synthetic oligonucleotide
cagugacagagucguggug

SEQ ID NO: 1692180 - RNA, 19 nt, Artificial Sequence
  Description of Artificial Sequence: Synthetic oligonucleotide
aggaaccacguccccuccu

SEQ ID NO: 1692181 - RNA, 19 nt, Artificial Sequence
  Description of Artificial Sequence: Synthetic oligonucleotide
uugcgauauccaggcagcu

SEQ ID NO: 1692182 - RNA, 19 nt, Artificial Sequence
  Description of Artificial Sequence: Synthetic oligonucleotide
uggagccgggugcggauuc

SEQ ID NO: 1692183 - RNA, 19 nt, Artificial Sequence
  Description of Artificial Sequence: Synthetic oligonucleotide
gcuccaguagggccagggg

SEQ ID NO: 1692184 - RNA, 19 nt, Artificial Sequence
  Description of Artificial Sequence: Synthetic oligonucleotide
agcagaagcagagcagcua

SEQ ID NO: 1692185 - RNA, 19 nt, Artificial Sequence
  Description of Artificial Sequence: Synthetic oligonucleotide
cagugaguggcugcuagga

SEQ ID NO: 1692186 - RNA, 19 nt, Artificial Sequence
  Description of Artificial Sequence: Synthetic oligonucleotide
gcuaccucgaacagccaug

SEQ ID NO: 1692187 - RNA, 19 nt, Artificial Sequence
  Description of Artificial Sequence: Synthetic oligonucleotide
ggcggagucccuggaagcg

SEQ ID NO: 1692188 - RNA, 19 nt, Artificial Sequence
  Description of Artificial Sequence: Synthetic oligonucleotide
agguugacgcgcguccuca

SEQ ID NO: 1692189 - RNA, 19 nt, Artificial Sequence
  Description of Artificial Sequence: Synthetic oligonucleotide
ugcgauauccaggcagcuu

SEQ ID NO: 1692190 - RNA, 19 nt, Artificial Sequence
  Description of Artificial Sequence: Synthetic oligonucleotide
ucgcggggugggcugucag

SEQ ID NO: 1692191 - RNA, 19 nt, Artificial Sequence
  Description of Artificial Sequence: Synthetic oligonucleotide
gagcucgcagcuccugcca

SEQ ID NO: 1692192 - RNA, 19 nt, Artificial Sequence
  Description of Artificial Sequence: Synthetic oligonucleotide
cccucaguauagaggacac

SEQ ID NO: 1692193 - RNA, 19 nt, Artificial Sequence
  Description of Artificial Sequence: Synthetic oligonucleotide
uaggggaggugccgagguc

SEQ ID NO: 1692194 - RNA, 19 nt, Artificial Sequence
  Description of Artificial Sequence: Synthetic oligonucleotide
ggcaaacggcacucggggc

SEQ ID NO: 1692195 - RNA, 19 nt, Artificial Sequence
  Description of Artificial Sequence: Synthetic oligonucleotide
gacgcgagggcagcagcac

SEQ ID NO: 1692196 - RNA, 19 nt, Artificial Sequence
  Description of Artificial Sequence: Synthetic oligonucleotide
cacgaggcgugccacccuc

SEQ ID NO: 1692197 - RNA, 19 nt, Artificial Sequence
  Description of Artificial Sequence: Synthetic oligonucleotide
cagguaggcggggcaaagc

SEQ ID NO: 1692198 - RNA, 19 nt, Artificial Sequence
  Description of Artificial Sequence: Synthetic oligonucleotide
cguacaggcagugacacca

SEQ ID NO: 1692199 - RNA, 19 nt, Artificial Sequence
  Description of Artificial Sequence: Synthetic oligonucleotide
cauuuaucuuccugacccu

SEQ ID NO: 1692200 - RNA, 19 nt, Artificial Sequence
  Description of Artificial Sequence: Synthetic oligonucleotide
gcaucggcccgccucuucc

SEQ ID NO: 1692201 - RNA, 19 nt, Artificial Sequence
  Description of Artificial Sequence: Synthetic oligonucleotide
guaggggaggugccgaggu

SEQ ID NO: 1692202 - RNA, 19 nt, Artificial Sequence
  Description of Artificial Sequence: Synthetic oligonucleotide
gguaggggaggugccgagg

SEQ ID NO: 1692203 - RNA, 19 nt, Artificial Sequence
  Description of Artificial Sequence: Synthetic oligonucleotide
gccgggugcggauuccccg

SEQ ID NO: 1692204 - RNA, 19 nt, Artificial Sequence
  Description of Artificial Sequence: Synthetic oligonucleotide
cacccgccaggccucgagg

SEQ ID NO: 1692205 - RNA, 19 nt, Artificial Sequence
  Description of Artificial Sequence: Synthetic oligonucleotide
agccgggugcggauucccc

SEQ ID NO: 1692206 - RNA, 19 nt, Artificial Sequence
  Description of Artificial Sequence: Synthetic oligonucleotide
gugcggauuccccgcggcc

SEQ ID NO: 1692207 - RNA, 19 nt, Artificial Sequence
  Description of Artificial Sequence: Synthetic oligonucleotide
cagcuacaggaacucuguc

SEQ ID NO: 1692208 - RNA, 19 nt, Artificial Sequence
  Description of Artificial Sequence: Synthetic oligonucleotide
cuccacccgagaguucagc

SEQ ID NO: 1692209 - RNA, 19 nt, Artificial Sequence
  Description of Artificial Sequence: Synthetic oligonucleotide
ggcugcuaggacccagccc

SEQ ID NO: 1692210 - RNA, 19 nt, Artificial Sequence
  Description of Artificial Sequence: Synthetic oligonucleotide
caggcgacagcggcucccg

SEQ ID NO: 1692211 - RNA, 19 nt, Artificial Sequence
  Description of Artificial Sequence: Synthetic oligonucleotide
  modified_base (10)..(10): a, c, u, g, unknown or other
agcccggggnaaccagaau

SEQ ID NO: 1692212 - RNA, 19 nt, Artificial Sequence
  Description of Artificial Sequence: Synthetic oligonucleotide
gcuccuggcuaccucgaac

SEQ ID NO: 1692213 - RNA, 19 nt, Artificial Sequence
  Description of Artificial Sequence: Synthetic oligonucleotide
ucccucagacuggcacagg

SEQ ID NO: 1692214 - RNA, 19 nt, Artificial Sequence
  Description of Artificial Sequence: Synthetic oligonucleotide
accucguauccagccagga

SEQ ID NO: 1692215 - RNA, 19 nt, Artificial Sequence
  Description of Artificial Sequence: Synthetic oligonucleotide
gccccagcgagccaggcga

SEQ ID NO: 1692216 - RNA, 19 nt, Artificial Sequence
  Description of Artificial Sequence: Synthetic oligonucleotide
  modified_base (15)..(15): a, c, u, g, unknown or other
gacccagcccggggnaacc

SEQ ID NO: 1692217 - RNA, 19 nt, Artificial Sequence
  Description of Artificial Sequence: Synthetic oligonucleotide
gcgacagcggcucccgggc

SEQ ID NO: 1692218 - RNA, 19 nt, Artificial Sequence
  Description of Artificial Sequence: Synthetic oligonucleotide
ggcggcggcacugacgccc

SEQ ID NO: 1692219 - RNA, 19 nt, Artificial Sequence
  Description of Artificial Sequence: Synthetic oligonucleotide
agcucgcagcuccugccaa

SEQ ID NO: 1692220 - RNA, 19 nt, Artificial Sequence
  Description of Artificial Sequence: Synthetic oligonucleotide
gaggagcucgcagcuccug

SEQ ID NO: 1692221 - RNA, 19 nt, Artificial Sequence
  Description of Artificial Sequence: Synthetic oligonucleotide
ucgcagcuccugccaaguc

SEQ ID NO: 1692222 - RNA, 19 nt, Artificial Sequence
  Description of Artificial Sequence: Synthetic oligonucleotide
uccagguaggcggggcaaa

SEQ ID NO: 1692223 - RNA, 19 nt, Artificial Sequence
  Description of Artificial Sequence: Synthetic oligonucleotide
gauuccccgcggccccagc

SEQ ID NO: 1692224 - RNA, 19 nt, Artificial Sequence
  Description of Artificial Sequence: Synthetic oligonucleotide
gcugaugacagagcgagau

SEQ ID NO: 1692225 - RNA, 19 nt, Artificial Sequence
  Description of Artificial Sequence: Synthetic oligonucleotide
cagcgagccaggcgacagc

SEQ ID NO: 1692226 - RNA, 19 nt, Artificial Sequence
  Description of Artificial Sequence: Synthetic oligonucleotide
cugaugacagagcgagaua

SEQ ID NO: 1692227 - RNA, 19 nt, Artificial Sequence
  Description of Artificial Sequence: Synthetic oligonucleotide
gagccgggugcggauuccc

SEQ ID NO: 1692228 - RNA, 19 nt, Artificial Sequence
  Description of Artificial Sequence: Synthetic oligonucleotide
gguugacgcgcguccucag

SEQ ID NO: 1692229 - RNA, 19 nt, Artificial Sequence
  Description of Artificial Sequence: Synthetic oligonucleotide
guacaggcagugacaccac

SEQ ID NO: 1692230 - RNA, 19 nt, Artificial Sequence
  Description of Artificial Sequence: Synthetic oligonucleotide
cacguccccuccucacgac

SEQ ID NO: 1692231 - RNA, 19 nt, Artificial Sequence
  Description of Artificial Sequence: Synthetic oligonucleotide
ccugaugguggugugagaa

SEQ ID NO: 1692232 - RNA, 19 nt, Artificial Sequence
  Description of Artificial Sequence: Synthetic oligonucleotide
aggcgacagcggcucccgg

SEQ ID NO: 1692233 - RNA, 19 nt, Artificial Sequence
  Description of Artificial Sequence: Synthetic oligonucleotide
ggcggucagguugacgcgc

SEQ ID NO: 1692234 - RNA, 19 nt, Artificial Sequence
  Description of Artificial Sequence: Synthetic oligonucleotide
gugggcugucagaggugcg

SEQ ID NO: 1692235 - RNA, 19 nt, Artificial Sequence
  Description of Artificial Sequence: Synthetic oligonucleotide
  modified_base (14)..(14): a, c, u, g, unknown or other
acccagcccggggnaacca

SEQ ID NO: 1692236 - RNA, 19 nt, Artificial Sequence
  Description of Artificial Sequence: Synthetic oligonucleotide
acagagcgagauaccuggu

SEQ ID NO: 1692237 - RNA, 19 nt, Artificial Sequence
  Description of Artificial Sequence: Synthetic oligonucleotide
agcuccuggcuaccucgaa

SEQ ID NO: 1692238 - RNA, 19 nt, Artificial Sequence
  Description of Artificial Sequence: Synthetic oligonucleotide
gcucgcagcuccugccaag

SEQ ID NO: 1692239 - RNA, 19 nt, Artificial Sequence
  Description of Artificial Sequence: Synthetic oligonucleotide
  modified_base (7)..(7): a, c, u, g, unknown or other
ccggggnaaccagaauccc

SEQ ID NO: 1692240 - RNA, 19 nt, Artificial Sequence
  Description of Artificial Sequence: Synthetic oligonucleotide
gcggcgguucucccggcgg

SEQ ID NO: 1692241 - RNA, 19 nt, Artificial Sequence
  Description of Artificial Sequence: Synthetic oligonucleotide
gucuaaguccuaagugccu

SEQ ID NO: 1692242 - RNA, 19 nt, Artificial Sequence
  Description of Artificial Sequence: Synthetic oligonucleotide
ccacccgagaguucagcuc

SEQ ID NO: 1692243 - RNA, 19 nt, Artificial Sequence
  Description of Artificial Sequence: Synthetic oligonucleotide
gucguggugucaagaugga

SEQ ID NO: 1692244 - RNA, 19 nt, Artificial Sequence
  Description of Artificial Sequence: Synthetic oligonucleotide
gguaggcggggcaaagcca

SEQ ID NO: 1692245 - RNA, 19 nt, Artificial Sequence
  Description of Artificial Sequence: Synthetic oligonucleotide
ugggagggagcuggccccu

SEQ ID NO: 1692246 - RNA, 19 nt, Artificial Sequence
  Description of Artificial Sequence: Synthetic oligonucleotide
gcagugacagagucguggu

SEQ ID NO: 1692247 - RNA, 19 nt, Artificial Sequence
  Description of Artificial Sequence: Synthetic oligonucleotide
gagcagaagcagagcagcu

SEQ ID NO: 1692248 - RNA, 19 nt, Artificial Sequence
  Description of Artificial Sequence: Synthetic oligonucleotide
cgcgagggcagcagcaccc

SEQ ID NO: 1692249 - RNA, 19 nt, Artificial Sequence
  Description of Artificial Sequence: Synthetic oligonucleotide
ccuaagugccugggcaggc

SEQ ID NO: 1692250 - RNA, 19 nt, Artificial Sequence
  Description of Artificial Sequence: Synthetic oligonucleotide
gaggugcgaggcugcugga

SEQ ID NO: 1692251 - RNA, 19 nt, Artificial Sequence
  Description of Artificial Sequence: Synthetic oligonucleotide
  modified_base (11)..(11): a, c, u, g, unknown or other
cagcccggggnaaccagaa

SEQ ID NO: 1692252 - RNA, 19 nt, Artificial Sequence
  Description of Artificial Sequence: Synthetic oligonucleotide
gggugcggauuccccgcgg

SEQ ID NO: 1692253 - RNA, 19 nt, Artificial Sequence
  Description of Artificial Sequence: Synthetic oligonucleotide
gugccgaggucaccucaca

SEQ ID NO: 1692254 - RNA, 19 nt, Artificial Sequence
  Description of Artificial Sequence: Synthetic oligonucleotide
ucgaggucgcggggugggc

SEQ ID NO: 1692255 - RNA, 19 nt, Artificial Sequence
  Description of Artificial Sequence: Synthetic oligonucleotide
auacagugaguggcugcua

SEQ ID NO: 1692256 - RNA, 19 nt, Artificial Sequence
  Description of Artificial Sequence: Synthetic oligonucleotide
cagguaggggaggugccga

SEQ ID NO: 1692257 - RNA, 19 nt, Artificial Sequence
  Description of Artificial Sequence: Synthetic oligonucleotide
uccggacgcgagggcagca

SEQ ID NO: 1692258 - RNA, 19 nt, Artificial Sequence
  Description of Artificial Sequence: Synthetic oligonucleotide
gcggucagguugacgcgcg

SEQ ID NO: 1692259 - RNA, 19 nt, Artificial Sequence
  Description of Artificial Sequence: Synthetic oligonucleotide
ggggaaggcuccacccgag

SEQ ID NO: 1692260 - RNA, 19 nt, Artificial Sequence
  Description of Artificial Sequence: Synthetic oligonucleotide
cuccggacgcgagggcagc

SEQ ID NO: 1692261 - RNA, 19 nt, Artificial Sequence
  Description of Artificial Sequence: Synthetic oligonucleotide
  modified_base (16)..(16): a, c, u, g, unknown or other
ggacccagcccggggnaac

SEQ ID NO: 1692262 - RNA, 19 nt, Artificial Sequence
  Description of Artificial Sequence: Synthetic oligonucleotide
cacaugcaccucguaucca

SEQ ID NO: 1692263 - RNA, 19 nt, Artificial Sequence
  Description of Artificial Sequence: Synthetic oligonucleotide
gcagcuacaggaacucugu

SEQ ID NO: 1692264 - RNA, 19 nt, Artificial Sequence
  Description of Artificial Sequence: Synthetic oligonucleotide
ggcgguucucccggcggcg

SEQ ID NO: 1692265 - RNA, 19 nt, Artificial Sequence
  Description of Artificial Sequence: Synthetic oligonucleotide
gcguccucagcugcagcag

SEQ ID NO: 1692266 - RNA, 19 nt, Artificial Sequence
  Description of Artificial Sequence: Synthetic oligonucleotide
ggucagguugacgcgcguc

SEQ ID NO: 1692267 - RNA, 19 nt, Artificial Sequence
  Description of Artificial Sequence: Synthetic oligonucleotide
cccuggaagcguucucgug

SEQ ID NO: 1692268 - RNA, 19 nt, Artificial Sequence
  Description of Artificial Sequence: Synthetic oligonucleotide
ggcuaccucgaacagccau

SEQ ID NO: 1692269 - RNA, 19 nt, Artificial Sequence
  Description of Artificial Sequence: Synthetic oligonucleotide
ccauuaccagucacaugca

SEQ ID NO: 1692270 - RNA, 19 nt, Artificial Sequence
  Description of Artificial Sequence: Synthetic oligonucleotide
ggaaggaaaugggcuucuc

SEQ ID NO: 1692271 - RNA, 19 nt, Artificial Sequence
  Description of Artificial Sequence: Synthetic oligonucleotide
cggccguacaggcagugac

SEQ ID NO: 1692272 - RNA, 19 nt, Artificial Sequence
  Description of Artificial Sequence: Synthetic oligonucleotide
cccuggcggccguacaggc

SEQ ID NO: 1692273 - RNA, 19 nt, Artificial Sequence
  Description of Artificial Sequence: Synthetic oligonucleotide
  modified_base (13)..(13): a, c, u, g, unknown or other
cccagcccggggnaaccag

SEQ ID NO: 1692274 - RNA, 19 nt, Artificial Sequence
  Description of Artificial Sequence: Synthetic oligonucleotide
  modified_base (4)..(4): a, c, u, g, unknown or other
gggnaaccagaaucccagu

SEQ ID NO: 1692275 - RNA, 19 nt, Artificial Sequence
  Description of Artificial Sequence: Synthetic oligonucleotide
ggaccacuaggaggaagga

SEQ ID NO: 1692276 - RNA, 19 nt, Artificial Sequence
  Description of Artificial Sequence: Synthetic oligonucleotide
cguccccuccucacgacac

SEQ ID NO: 1692277 - RNA, 19 nt, Artificial Sequence
  Description of Artificial Sequence: Synthetic oligonucleotide
ccagguaggcggggcaaag

SEQ ID NO: 1692278 - RNA, 19 nt, Artificial Sequence
  Description of Artificial Sequence: Synthetic oligonucleotide
gccucgaggucgcggggug

SEQ ID NO: 1692279 - RNA, 19 nt, Artificial Sequence
  Description of Artificial Sequence: Synthetic oligonucleotide
ccacccucuccuccuccgg

SEQ ID NO: 1692280 - RNA, 19 nt, Artificial Sequence
  Description of Artificial Sequence: Synthetic oligonucleotide
ggcccagauacacuucaau

SEQ ID NO: 1692281 - RNA, 19 nt, Artificial Sequence
  Description of Artificial Sequence: Synthetic oligonucleotide
cggggcggcggucagguug

SEQ ID NO: 1692282 - RNA, 19 nt, Artificial Sequence
  Description of Artificial Sequence: Synthetic oligonucleotide
  modified_base (6)..(6): a, c, u, g, unknown or other
cggggnaaccagaauccca

SEQ ID NO: 1692283 - RNA, 19 nt, Artificial Sequence
  Description of Artificial Sequence: Synthetic oligonucleotide
augcccugauagaggcagu

SEQ ID NO: 1692284 - RNA, 19 nt, Artificial Sequence
  Description of Artificial Sequence: Synthetic oligonucleotide
aggcccagauacacuucaa

SEQ ID NO: 1692285 - RNA, 19 nt, Artificial Sequence
  Description of Artificial Sequence: Synthetic oligonucleotide
gcucccgggcaggaagaag

SEQ ID NO: 1692286 - RNA, 19 nt, Artificial Sequence
  Description of Artificial Sequence: Synthetic oligonucleotide
cagcugcgcgcuggagccg

SEQ ID NO: 1692287 - RNA, 19 nt, Artificial Sequence
  Description of Artificial Sequence: Synthetic oligonucleotide
ccucacgacacagaaggcu

SEQ ID NO: 1692288 - RNA, 19 nt, Artificial Sequence
  Description of Artificial Sequence: Synthetic oligonucleotide
ggcggcggucagguugacg

SEQ ID NO: 1692289 - RNA, 19 nt, Artificial Sequence
  Description of Artificial Sequence: Synthetic oligonucleotide
ccaggcgacagcggcuccc

SEQ ID NO: 1692290 - RNA, 19 nt, Artificial Sequence
  Description of Artificial Sequence: Synthetic oligonucleotide
gcgguucucccggcggcgg

SEQ ID NO: 1692291 - RNA, 19 nt, Artificial Sequence
  Description of Artificial Sequence: Synthetic oligonucleotide
ggagccgggugcggauucc

SEQ ID NO: 1692292 - RNA, 19 nt, Artificial Sequence
  Description of Artificial Sequence: Synthetic oligonucleotide
aggcagugacagagucgug

SEQ ID NO: 1692293 - RNA, 19 nt, Artificial Sequence
  Description of Artificial Sequence: Synthetic oligonucleotide
acgaggcgugccacccucu

SEQ ID NO: 1692294 - RNA, 19 nt, Artificial Sequence
  Description of Artificial Sequence: Synthetic oligonucleotide
cucgcagcuccugccaagu

SEQ ID NO: 1692295 - RNA, 19 nt, Artificial Sequence
  Description of Artificial Sequence: Synthetic oligonucleotide
gcccugauagaggcaguga

SEQ ID NO: 1692296 - RNA, 19 nt, Artificial Sequence
  Description of Artificial Sequence: Synthetic oligonucleotide
  modified_base (12)..(12): a, c, u, g, unknown or other
ccagcccggggnaaccaga

SEQ ID NO: 1692297 - RNA, 19 nt, Artificial Sequence
  Description of Artificial Sequence: Synthetic oligonucleotide
aggucgcggggugggcugu

SEQ ID NO: 1692298 - RNA, 19 nt, Artificial Sequence
  Description of Artificial Sequence: Synthetic oligonucleotide
cagucacaugcaccucgua

SEQ ID NO: 1692299 - RNA, 19 nt, Artificial Sequence
  Description of Artificial Sequence: Synthetic oligonucleotide
cgcguccucagcugcagca

SEQ ID NO: 1692300 - RNA, 19 nt, Artificial Sequence
  Description of Artificial Sequence: Synthetic oligonucleotide
cagggccaauggcugcaaa

SEQ ID NO: 1692301 - RNA, 19 nt, Artificial Sequence
  Description of Artificial Sequence: Synthetic oligonucleotide
cugucuucaggaggccagu

SEQ ID NO: 1692302 - RNA, 19 nt, Artificial Sequence
  Description of Artificial Sequence: Synthetic oligonucleotide
acgcgcguccucagcugca

SEQ ID NO: 1692303 - RNA, 19 nt, Artificial Sequence
  Description of Artificial Sequence: Synthetic oligonucleotide
cggcggucagguugacgcg

SEQ ID NO: 1692304 - RNA, 19 nt, Artificial Sequence
  Description of Artificial Sequence: Synthetic oligonucleotide
ggauuccccgcggccccag

SEQ ID NO: 1692305 - RNA, 19 nt, Artificial Sequence
  Description of Artificial Sequence: Synthetic oligonucleotide
ggcggccguacaggcagug

SEQ ID NO: 1692306 - RNA, 19 nt, Artificial Sequence
  Description of Artificial Sequence: Synthetic oligonucleotide
ccucgaggucgcggggugg

SEQ ID NO: 1692307 - RNA, 19 nt, Artificial Sequence
  Description of Artificial Sequence: Synthetic oligonucleotide
gugcggcacgaggcgugcc

SEQ ID NO: 1692308 - RNA, 19 nt, Artificial Sequence
  Description of Artificial Sequence: Synthetic oligonucleotide
caucggcccgccucuuccu

SEQ ID NO: 1692309 - RNA, 19 nt, Artificial Sequence
  Description of Artificial Sequence: Synthetic oligonucleotide
ggagucccuggaagcguuc

SEQ ID NO: 1692310 - RNA, 19 nt, Artificial Sequence
  Description of Artificial Sequence: Synthetic oligonucleotide
ccacuaggaggaaggaaau

SEQ ID NO: 1692311 - RNA, 19 nt, Artificial Sequence
  Description of Artificial Sequence: Synthetic oligonucleotide
cccagccugagaauacagu

SEQ ID NO: 1692312 - RNA, 19 nt, Artificial Sequence
  Description of Artificial Sequence: Synthetic oligonucleotide
gcgcguccucagcugcagc

SEQ ID NO: 1692313 - RNA, 19 nt, Artificial Sequence
  Description of Artificial Sequence: Synthetic oligonucleotide
ggcgugccacccucuccuc

SEQ ID NO: 1692314 - RNA, 19 nt, Artificial Sequence
  Description of Artificial Sequence: Synthetic oligonucleotide
cucgaacagccaugcccau

SEQ ID NO: 1692315 - RNA, 19 nt, Artificial Sequence
  Description of Artificial Sequence: Synthetic oligonucleotide
gucgcggggugggcuguca

SEQ ID NO: 1692316 - RNA, 19 nt, Artificial Sequence
  Description of Artificial Sequence: Synthetic oligonucleotide
gccaggcgacagcggcucc

SEQ ID NO: 1692317 - RNA, 19 nt, Artificial Sequence
  Description of Artificial Sequence: Synthetic oligonucleotide
gcggcacgaggcgugccac

SEQ ID NO: 1692318 - RNA, 19 nt, Artificial Sequence
  Description of Artificial Sequence: Synthetic oligonucleotide
gcguucucgugcggcacga

SEQ ID NO: 1692319 - RNA, 19 nt, Artificial Sequence
  Description of Artificial Sequence: Synthetic oligonucleotide
ccggacgcgagggcagcag

SEQ ID NO: 1692320 - RNA, 19 nt, Artificial Sequence
  Description of Artificial Sequence: Synthetic oligonucleotide
cucgugcggcacgaggcgu

SEQ ID NO: 1692321 - RNA, 19 nt, Artificial Sequence
  Description of Artificial Sequence: Synthetic oligonucleotide
cggcgguucucccggcggc

SEQ ID NO: 1692322 - RNA, 19 nt, Artificial Sequence
  Description of Artificial Sequence: Synthetic oligonucleotide
gcggcggcacugacgcccc

SEQ ID NO: 1692323 - RNA, 19 nt, Artificial Sequence
  Description of Artificial Sequence: Synthetic oligonucleotide
cagcagcuacaggaacucu

SEQ ID NO: 1692324 - RNA, 19 nt, Artificial Sequence
  Description of Artificial Sequence: Synthetic oligonucleotide
cgaggcgugccacccucuc

SEQ ID NO: 1692325 - RNA, 19 nt, Artificial Sequence
  Description of Artificial Sequence: Synthetic oligonucleotide
cggcacgaggcgugccacc

SEQ ID NO: 1692326 - RNA, 19 nt, Artificial Sequence
  Description of Artificial Sequence: Synthetic oligonucleotide
cgugcggcacgaggcgugc

SEQ ID NO: 1692327 - RNA, 19 nt, Artificial Sequence
  Description of Artificial Sequence: Synthetic oligonucleotide
gcggccguacaggcaguga

SEQ ID NO: 1692328 - RNA, 19 nt, Artificial Sequence
  Description of Artificial Sequence: Synthetic oligonucleotide
gcggagucccuggaagcgu

SEQ ID NO: 1692329 - RNA, 19 nt, Artificial Sequence
  Description of Artificial Sequence: Synthetic oligonucleotide
ccgagaguucagcuccagu

SEQ ID NO: 1692330 - RNA, 19 nt, Artificial Sequence
  Description of Artificial Sequence: Synthetic oligonucleotide
cgcgcguccucagcugcag

SEQ ID NO: 1692331 - RNA, 19 nt, Artificial Sequence
  Description of Artificial Sequence: Synthetic oligonucleotide
gccagguccgaggcggagu

SEQ ID NO: 1692332 - RNA, 19 nt, Artificial Sequence
  Description of Artificial Sequence: Synthetic oligonucleotide
cguucucgugcggcacgag

SEQ ID NO: 1692333 - RNA, 19 nt, Artificial Sequence
  Description of Artificial Sequence: Synthetic oligonucleotide
ggccucgaggucgcggggu

SEQ ID NO: 1692334 - RNA, 19 nt, Artificial Sequence
  Description of Artificial Sequence: Synthetic oligonucleotide
ccgaggcggagucccugga

SEQ ID NO: 1692335 - RNA, 19 nt, Artificial Sequence
  Description of Artificial Sequence: Synthetic oligonucleotide
gcacgaggcgugccacccu

SEQ ID NO: 1692336 - RNA, 19 nt, Artificial Sequence
  Description of Artificial Sequence: Synthetic oligonucleotide
cgcggggugggcugucaga

SEQ ID NO: 1692337 - RNA, 19 nt, Artificial Sequence
  Description of Artificial Sequence: Synthetic oligonucleotide
ggucgcggggugggcuguc

SEQ ID NO: 1692338 - RNA, 19 nt, Artificial Sequence
  Description of Artificial Sequence: Synthetic oligonucleotide
cgacagcggcucccgggca

SEQ ID NO: 1692339 - RNA, 19 nt, Artificial Sequence
  Description of Artificial Sequence: Synthetic oligonucleotide
cugcgcgcuggagccgggu

SEQ ID NO: 1692340 - RNA, 19 nt, Artificial Sequence
  Description of Artificial Sequence: Synthetic oligonucleotide
cggagucccuggaagcguu

SEQ ID NO: 1692341 - RNA, 19 nt, Artificial Sequence
  Description of Artificial Sequence: Synthetic oligonucleotide
cgaggucgcggggugggcu

SEQ ID NO: 1692342 - RNA, 19 nt, Artificial Sequence
  Description of Artificial Sequence: Synthetic oligonucleotide
gggcggcggucagguugac

SEQ ID NO: 1692343 - RNA, 19 nt, Artificial Sequence
  Description of Artificial Sequence: Synthetic oligonucleotide
cggucagguugacgcgcgu

SEQ ID NO: 1692344 - RNA, 19 nt, Artificial Sequence
  Description of Artificial Sequence: Synthetic oligonucleotide
ccgcggccccagcgagcca

SEQ ID NO: 1692345 - RNA, 19 nt, Artificial Sequence
  Description of Artificial Sequence: Synthetic oligonucleotide
aauacagugaauucuauuc

SEQ ID NO: 1692346 - RNA, 19 nt, Artificial Sequence
  Description of Artificial Sequence: Synthetic oligonucleotide
aaaauaggauuuuaauccc

SEQ ID NO: 1692347 - RNA, 19 nt, Artificial Sequence
  Description of Artificial Sequence: Synthetic oligonucleotide
gaaaauugaauuuucuggg

SEQ ID NO: 1692348 - RNA, 19 nt, Artificial Sequence
  Description of Artificial Sequence: Synthetic oligonucleotide
uuagcuuuaaauaauuagc

SEQ ID NO: 1692349 - RNA, 19 nt, Artificial Sequence
  Description of Artificial Sequence: Synthetic oligonucleotide
ugcacaaaacuucugagcg

SEQ ID NO: 1692350 - RNA, 19 nt, Artificial Sequence
  Description of Artificial Sequence: Synthetic oligonucleotide
agaacuuucagccugucac

SEQ ID NO: 1692351 - RNA, 19 nt, Artificial Sequence
  Description of Artificial Sequence: Synthetic oligonucleotide
aagagucuaaagcaaaccg

SEQ ID NO: 1692352 - RNA, 19 nt, Artificial Sequence
  Description of Artificial Sequence: Synthetic oligonucleotide
ugaggugucaguuaaaaug

SEQ ID NO: 1692353 - RNA, 19 nt, Artificial Sequence
  Description of Artificial Sequence: Synthetic oligonucleotide
aaaggaguaacacaguggu

SEQ ID NO: 1692354 - RNA, 19 nt, Artificial Sequence
  Description of Artificial Sequence: Synthetic oligonucleotide
aaagacuuccacugcaugg

SEQ ID NO: 1692355 - RNA, 19 nt, Artificial Sequence
  Description of Artificial Sequence: Synthetic oligonucleotide
uaaauaauuagcauagauc

SEQ ID NO: 1692356 - RNA, 19 nt, Artificial Sequence
  Description of Artificial Sequence: Synthetic oligonucleotide
aauucuauucauuuccaug

SEQ ID NO: 1692357 - RNA, 19 nt, Artificial Sequence
  Description of Artificial Sequence: Synthetic oligonucleotide
gacacauuagcauaggggc

SEQ ID NO: 1692358 - RNA, 19 nt, Artificial Sequence
  Description of Artificial Sequence: Synthetic oligonucleotide
uauccuuugagguuaauga

SEQ ID NO: 1692359 - RNA, 19 nt, Artificial Sequence
  Description of Artificial Sequence: Synthetic oligonucleotide
aauaucacaagucucugaa

SEQ ID NO: 1692360 - RNA, 19 nt, Artificial Sequence
  Description of Artificial Sequence: Synthetic oligonucleotide
aacccuuuauccuuugagg

SEQ ID NO: 1692361 - RNA, 19 nt, Artificial Sequence
  Description of Artificial Sequence: Synthetic oligonucleotide
uaaaggaguaacacagugg

SEQ ID NO: 1692362 - RNA, 19 nt, Artificial Sequence
  Description of Artificial Sequence: Synthetic oligonucleotide
uagcuuuaaauaauuagca

SEQ ID NO: 1692363 - RNA, 19 nt, Artificial Sequence
  Description of Artificial Sequence: Synthetic oligonucleotide
uccuaagucaccaauacau

SEQ ID NO: 1692364 - RNA, 19 nt, Artificial Sequence
  Description of Artificial Sequence: Synthetic oligonucleotide
uaucacaagucucugaagu

SEQ ID NO: 1692365 - RNA, 19 nt, Artificial Sequence
  Description of Artificial Sequence: Synthetic oligonucleotide
uaauuagcauagaucaugc

SEQ ID NO: 1692366 - RNA, 19 nt, Artificial Sequence
  Description of Artificial Sequence: Synthetic oligonucleotide
uuuguaaaggaguaacaca

SEQ ID NO: 1692367 - RNA, 19 nt, Artificial Sequence
  Description of Artificial Sequence: Synthetic oligonucleotide
ucaaaguccucucgaagcg

SEQ ID NO: 1692368 - RNA, 19 nt, Artificial Sequence
  Description of Artificial Sequence: Synthetic oligonucleotide
ugucaguuaaaaugcagag

SEQ ID NO: 1692369 - RNA, 19 nt, Artificial Sequence
  Description of Artificial Sequence: Synthetic oligonucleotide
guuaaugauguauguaucc

SEQ ID NO: 1692370 - RNA, 19 nt, Artificial Sequence
  Description of Artificial Sequence: Synthetic oligonucleotide
ugucuauuucuccagaggu

SEQ ID NO: 1692371 - RNA, 19 nt, Artificial Sequence
  Description of Artificial Sequence: Synthetic oligonucleotide
gagauauaggaacaggcug

SEQ ID NO: 1692372 - RNA, 19 nt, Artificial Sequence
  Description of Artificial Sequence: Synthetic oligonucleotide
agauauaggaacaggcugc

SEQ ID NO: 1692373 - RNA, 19 nt, Artificial Sequence
  Description of Artificial Sequence: Synthetic oligonucleotide
ucuuggaaauuccaacuag

SEQ ID NO: 1692374 - RNA, 19 nt, Artificial Sequence
  Description of Artificial Sequence: Synthetic oligonucleotide
uugagguuaaugauguaug

SEQ ID NO: 1692375 - RNA, 19 nt, Artificial Sequence
  Description of Artificial Sequence: Synthetic oligonucleotide
gauguauguauccuaaguc

SEQ ID NO: 1692376 - RNA, 19 nt, Artificial Sequence
  Description of Artificial Sequence: Synthetic oligonucleotide
uacaucucacaauacagug

SEQ ID NO: 1692377 - RNA, 19 nt, Artificial Sequence
  Description of Artificial Sequence: Synthetic oligonucleotide
cugagauauaggaacaggc

SEQ ID NO: 1692378 - RNA, 19 nt, Artificial Sequence
  Description of Artificial Sequence: Synthetic oligonucleotide
auuuuaaucccugaggugu

SEQ ID NO: 1692379 - RNA, 19 nt, Artificial Sequence
  Description of Artificial Sequence: Synthetic oligonucleotide
agagacgaaguacagagca

SEQ ID NO: 1692380 - RNA, 19 nt, Artificial Sequence
  Description of Artificial Sequence: Synthetic oligonucleotide
uguauguauccuaagucac

SEQ ID NO: 1692381 - RNA, 19 nt, Artificial Sequence
  Description of Artificial Sequence: Synthetic oligonucleotide
ugauguauguauccuaagu

SEQ ID NO: 1692382 - RNA, 19 nt, Artificial Sequence
  Description of Artificial Sequence: Synthetic oligonucleotide
ugagauauaggaacaggcu

SEQ ID NO: 1692383 - RNA, 19 nt, Artificial Sequence
  Description of Artificial Sequence: Synthetic oligonucleotide
gagguaagagucuaaagca

SEQ ID NO: 1692384 - RNA, 19 nt, Artificial Sequence
  Description of Artificial Sequence: Synthetic oligonucleotide
uuuuguaaaggaguaacac

SEQ ID NO: 1692385 - RNA, 19 nt, Artificial Sequence
  Description of Artificial Sequence: Synthetic oligonucleotide
aguaguagcgguuuaggcu

SEQ ID NO: 1692386 - RNA, 19 nt, Artificial Sequence
  Description of Artificial Sequence: Synthetic oligonucleotide
uauccuaagucaccaauac

SEQ ID NO: 1692387 - RNA, 19 nt, Artificial Sequence
  Description of Artificial Sequence: Synthetic oligonucleotide
aauugaauuuucuggguua

SEQ ID NO: 1692388 - RNA, 19 nt, Artificial Sequence
  Description of Artificial Sequence: Synthetic oligonucleotide
auuacuaaggcggccaagg

SEQ ID NO: 1692389 - RNA, 19 nt, Artificial Sequence
  Description of Artificial Sequence: Synthetic oligonucleotide
agguuaaugauguauguau

SEQ ID NO: 1692390 - RNA, 19 nt, Artificial Sequence
  Description of Artificial Sequence: Synthetic oligonucleotide
guaaaggaguaacacagug

SEQ ID NO: 1692391 - RNA, 19 nt, Artificial Sequence
  Description of Artificial Sequence: Synthetic oligonucleotide
uaacacagugguaagucug

SEQ ID NO: 1692392 - RNA, 19 nt, Artificial Sequence
  Description of Artificial Sequence: Synthetic oligonucleotide
aaaagacuuccacugcaug

SEQ ID NO: 1692393 - RNA, 19 nt, Artificial Sequence
  Description of Artificial Sequence: Synthetic oligonucleotide
ucaccaauacaucucacaa

SEQ ID NO: 1692394 - RNA, 19 nt, Artificial Sequence
  Description of Artificial Sequence: Synthetic oligonucleotide
ucugcacaaaacuucugag

SEQ ID NO: 1692395 - RNA, 19 nt, Artificial Sequence
  Description of Artificial Sequence: Synthetic oligonucleotide
ucuccaaaauggaaggaca

SEQ ID NO: 1692396 - RNA, 19 nt, Artificial Sequence
  Description of Artificial Sequence: Synthetic oligonucleotide
aacacagugguaagucugc

SEQ ID NO: 1692397 - RNA, 19 nt, Artificial Sequence
  Description of Artificial Sequence: Synthetic oligonucleotide
uucugagcgccucagaacu

SEQ ID NO: 1692398 - RNA, 19 nt, Artificial Sequence
  Description of Artificial Sequence: Synthetic oligonucleotide
agacgaaguacagagcagc

SEQ ID NO: 1692399 - RNA, 19 nt, Artificial Sequence
  Description of Artificial Sequence: Synthetic oligonucleotide
acucucuauuccuggaggc

SEQ ID NO: 1692400 - RNA, 19 nt, Artificial Sequence
  Description of Artificial Sequence: Synthetic oligonucleotide
gaggugucaguuaaaaugc

SEQ ID NO: 1692401 - RNA, 19 nt, Artificial Sequence
  Description of Artificial Sequence: Synthetic oligonucleotide
ucuaaagcaaaccguccug

SEQ ID NO: 1692402 - RNA, 19 nt, Artificial Sequence
  Description of Artificial Sequence: Synthetic oligonucleotide
uuucugagauauaggaaca

SEQ ID NO: 1692403 - RNA, 19 nt, Artificial Sequence
  Description of Artificial Sequence: Synthetic oligonucleotide
ugaauucuauucauuucca

SEQ ID NO: 1692404 - RNA, 19 nt, Artificial Sequence
  Description of Artificial Sequence: Synthetic oligonucleotide
aaaguccucucgaagcggc

SEQ ID NO: 1692405 - RNA, 19 nt, Artificial Sequence
  Description of Artificial Sequence: Synthetic oligonucleotide
ugcccguucauccagauuu

SEQ ID NO: 1692406 - RNA, 19 nt, Artificial Sequence
  Description of Artificial Sequence: Synthetic oligonucleotide
gauccucauuacuaaggcg

SEQ ID NO: 1692407 - RNA, 19 nt, Artificial Sequence
  Description of Artificial Sequence: Synthetic oligonucleotide
uuaguaguagcgguuuagg

SEQ ID NO: 1692408 - RNA, 19 nt, Artificial Sequence
  Description of Artificial Sequence: Synthetic oligonucleotide
aauaggauuuuaaucccug

SEQ ID NO: 1692409 - RNA, 19 nt, Artificial Sequence
  Description of Artificial Sequence: Synthetic oligonucleotide
ugucacaucacugucacau

SEQ ID NO: 1692410 - RNA, 19 nt, Artificial Sequence
  Description of Artificial Sequence: Synthetic oligonucleotide
caugcuaucucaauuaaaa

SEQ ID NO: 1692411 - RNA, 19 nt, Artificial Sequence
  Description of Artificial Sequence: Synthetic oligonucleotide
uuugagguuaaugauguau

SEQ ID NO: 1692412 - RNA, 19 nt, Artificial Sequence
  Description of Artificial Sequence: Synthetic oligonucleotide
aaagcaaaccguccugcca

SEQ ID NO: 1692413 - RNA, 19 nt, Artificial Sequence
  Description of Artificial Sequence: Synthetic oligonucleotide
ugugccuuaguaguagcgg

SEQ ID NO: 1692414 - RNA, 19 nt, Artificial Sequence
  Description of Artificial Sequence: Synthetic oligonucleotide
uuucucuccggacacauua

SEQ ID NO: 1692415 - RNA, 19 nt, Artificial Sequence
  Description of Artificial Sequence: Synthetic oligonucleotide
auucauuuccaugaaugag

SEQ ID NO: 1692416 - RNA, 19 nt, Artificial Sequence
  Description of Artificial Sequence: Synthetic oligonucleotide
uguauccuaagucaccaau

SEQ ID NO: 1692417 - RNA, 19 nt, Artificial Sequence
  Description of Artificial Sequence: Synthetic oligonucleotide
aaugauguauguauccuaa

SEQ ID NO: 1692418 - RNA, 19 nt, Artificial Sequence
  Description of Artificial Sequence: Synthetic oligonucleotide
guaguagcgguuuaggcuc

SEQ ID NO: 1692419 - RNA, 19 nt, Artificial Sequence
  Description of Artificial Sequence: Synthetic oligonucleotide
aaaacuucugagcgccuca

SEQ ID NO: 1692420 - RNA, 19 nt, Artificial Sequence
  Description of Artificial Sequence: Synthetic oligonucleotide
cuuguucaaaguccucucg

SEQ ID NO: 1692421 - RNA, 19 nt, Artificial Sequence
  Description of Artificial Sequence: Synthetic oligonucleotide
cacaaaacuucugagcgcc

SEQ ID NO: 1692422 - RNA, 19 nt, Artificial Sequence
  Description of Artificial Sequence: Synthetic oligonucleotide
gguuuucugagauauagga

SEQ ID NO: 1692423 - RNA, 19 nt, Artificial Sequence
  Description of Artificial Sequence: Synthetic oligonucleotide
aauuagcauagaucaugcu

SEQ ID NO: 1692424 - RNA, 19 nt, Artificial Sequence
  Description of Artificial Sequence: Synthetic oligonucleotide
aaguucacccugauacccc

SEQ ID NO: 1692425 - RNA, 19 nt, Artificial Sequence
  Description of Artificial Sequence: Synthetic oligonucleotide
uaguaguagcgguuuaggc

SEQ ID NO: 1692426 - RNA, 19 nt, Artificial Sequence
  Description of Artificial Sequence: Synthetic oligonucleotide
ucucacaauacagugaauu

SEQ ID NO: 1692427 - RNA, 19 nt, Artificial Sequence
  Description of Artificial Sequence: Synthetic oligonucleotide
uccggacacauuagcauag

SEQ ID NO: 1692428 - RNA, 19 nt, Artificial Sequence
  Description of Artificial Sequence: Synthetic oligonucleotide
uggaaauuccaacuaguuu

SEQ ID NO: 1692429 - RNA, 19 nt, Artificial Sequence
  Description of Artificial Sequence: Synthetic oligonucleotide
uccgaugcacacaccagag

SEQ ID NO: 1692430 - RNA, 19 nt, Artificial Sequence
  Description of Artificial Sequence: Synthetic oligonucleotide
uguaaaggaguaacacagu

SEQ ID NO: 1692431 - RNA, 19 nt, Artificial Sequence
  Description of Artificial Sequence: Synthetic oligonucleotide
cucacaauacagugaauuc

SEQ ID NO: 1692432 - RNA, 19 nt, Artificial Sequence
  Description of Artificial Sequence: Synthetic oligonucleotide
ccagagacgaaguacagag

SEQ ID NO: 1692433 - RNA, 19 nt, Artificial Sequence
  Description of Artificial Sequence: Synthetic oligonucleotide
agucuaaagcaaaccgucc

SEQ ID NO: 1692434 - RNA, 19 nt, Artificial Sequence
  Description of Artificial Sequence: Synthetic oligonucleotide
gaucaugcuaucucaauua

SEQ ID NO: 1692435 - RNA, 19 nt, Artificial Sequence
  Description of Artificial Sequence: Synthetic oligonucleotide
cauagaucaugcuaucuca

SEQ ID NO: 1692436 - RNA, 19 nt, Artificial Sequence
  Description of Artificial Sequence: Synthetic oligonucleotide
acugugccuuaguaguagc

SEQ ID NO: 1692437 - RNA, 19 nt, Artificial Sequence
  Description of Artificial Sequence: Synthetic oligonucleotide
agcuuuaaauaauuagcau

SEQ ID NO: 1692438 - RNA, 19 nt, Artificial Sequence
  Description of Artificial Sequence: Synthetic oligonucleotide
ucaguguggcaggagaucc

SEQ ID NO: 1692439 - RNA, 19 nt, Artificial Sequence
  Description of Artificial Sequence: Synthetic oligonucleotide
ugguccugcaagcaccucc

SEQ ID NO: 1692440 - RNA, 19 nt, Artificial Sequence
  Description of Artificial Sequence: Synthetic oligonucleotide
auaucacaagucucugaag

SEQ ID NO: 1692441 - RNA, 19 nt, Artificial Sequence
  Description of Artificial Sequence: Synthetic oligonucleotide
uaaugauguauguauccua

SEQ ID NO: 1692442 - RNA, 19 nt, Artificial Sequence
  Description of Artificial Sequence: Synthetic oligonucleotide
gagucuaaagcaaaccguc

SEQ ID NO: 1692443 - RNA, 19 nt, Artificial Sequence
  Description of Artificial Sequence: Synthetic oligonucleotide
auucuaagaccuggaaagg

SEQ ID NO: 1692444 - RNA, 19 nt, Artificial Sequence
  Description of Artificial Sequence: Synthetic oligonucleotide
aauaauuagcauagaucau

SEQ ID NO: 1692445 - RNA, 19 nt, Artificial Sequence
  Description of Artificial Sequence: Synthetic oligonucleotide
agaccuggaaagguugggc

SEQ ID NO: 1692446 - RNA, 19 nt, Artificial Sequence
  Description of Artificial Sequence: Synthetic oligonucleotide
uccucauuacuaaggcggc

SEQ ID NO: 1692447 - RNA, 19 nt, Artificial Sequence
  Description of Artificial Sequence: Synthetic oligonucleotide
cuccaaaauggaaggacac

SEQ ID NO: 1692448 - RNA, 19 nt, Artificial Sequence
  Description of Artificial Sequence: Synthetic oligonucleotide
cacucucuauuccuggagg

SEQ ID NO: 1692449 - RNA, 19 nt, Artificial Sequence
  Description of Artificial Sequence: Synthetic oligonucleotide
ugucaagaccuggaaaggc

SEQ ID NO: 1692450 - RNA, 19 nt, Artificial Sequence
  Description of Artificial Sequence: Synthetic oligonucleotide
uccguugugcacaccgucc

SEQ ID NO: 1692451 - RNA, 19 nt, Artificial Sequence
  Description of Artificial Sequence: Synthetic oligonucleotide
agaucaugcuaucucaauu

SEQ ID NO: 1692452 - RNA, 19 nt, Artificial Sequence
  Description of Artificial Sequence: Synthetic oligonucleotide
uacuaaggcggccaagguc

SEQ ID NO: 1692453 - RNA, 19 nt, Artificial Sequence
  Description of Artificial Sequence: Synthetic oligonucleotide
aaggacacagggcuucuau

SEQ ID NO: 1692454 - RNA, 19 nt, Artificial Sequence
  Description of Artificial Sequence: Synthetic oligonucleotide
cuuaguaguagcgguuuag

SEQ ID NO: 1692455 - RNA, 19 nt, Artificial Sequence
  Description of Artificial Sequence: Synthetic oligonucleotide
auaggauuuuaaucccuga

SEQ ID NO: 1692456 - RNA, 19 nt, Artificial Sequence
  Description of Artificial Sequence: Synthetic oligonucleotide
ucuuguucaaaguccucuc

SEQ ID NO: 1692457 - RNA, 19 nt, Artificial Sequence
  Description of Artificial Sequence: Synthetic oligonucleotide
auugggaaagcaggcuggc

SEQ ID NO: 1692458 - RNA, 19 nt, Artificial Sequence
  Description of Artificial Sequence: Synthetic oligonucleotide
auuagcauaggggcuuccg

SEQ ID NO: 1692459 - RNA, 19 nt, Artificial Sequence
  Description of Artificial Sequence: Synthetic oligonucleotide
uucugagauauaggaacag

SEQ ID NO: 1692460 - RNA, 19 nt, Artificial Sequence
  Description of Artificial Sequence: Synthetic oligonucleotide
uagcgguuuaggcuccggg

SEQ ID NO: 1692461 - RNA, 19 nt, Artificial Sequence
  Description of Artificial Sequence: Synthetic oligonucleotide
uccaaacugugccuuagua

SEQ ID NO: 1692462 - RNA, 19 nt, Artificial Sequence
  Description of Artificial Sequence: Synthetic oligonucleotide
caaacugugccuuaguagu

SEQ ID NO: 1692463 - RNA, 19 nt, Artificial Sequence
  Description of Artificial Sequence: Synthetic oligonucleotide
cagagguaagagucuaaag

SEQ ID NO: 1692464 - RNA, 19 nt, Artificial Sequence
  Description of Artificial Sequence: Synthetic oligonucleotide
ucaugcuaucucaauuaaa

SEQ ID NO: 1692465 - RNA, 19 nt, Artificial Sequence
  Description of Artificial Sequence: Synthetic oligonucleotide
uccucugcagaggugaaca

SEQ ID NO: 1692466 - RNA, 19 nt, Artificial Sequence
  Description of Artificial Sequence: Synthetic oligonucleotide
agcauaggggcuuccguug

SEQ ID NO: 1692467 - RNA, 19 nt, Artificial Sequence
  Description of Artificial Sequence: Synthetic oligonucleotide
agagucuaaagcaaaccgu

SEQ ID NO: 1692468 - RNA, 19 nt, Artificial Sequence
  Description of Artificial Sequence: Synthetic oligonucleotide
auaggggcuuccguugugc

SEQ ID NO: 1692469 - RNA, 19 nt, Artificial Sequence
  Description of Artificial Sequence: Synthetic oligonucleotide
uucuaagaccuggaaaggu

SEQ ID NO: 1692470 - RNA, 19 nt, Artificial Sequence
  Description of Artificial Sequence: Synthetic oligonucleotide
cugugccuuaguaguagcg

SEQ ID NO: 1692471 - RNA, 19 nt, Artificial Sequence
  Description of Artificial Sequence: Synthetic oligonucleotide
uccaaaauggaaggacaca

SEQ ID NO: 1692472 - RNA, 19 nt, Artificial Sequence
  Description of Artificial Sequence: Synthetic oligonucleotide
ucucuauuccuggaggccu

SEQ ID NO: 1692473 - RNA, 19 nt, Artificial Sequence
  Description of Artificial Sequence: Synthetic oligonucleotide
gcuuccguugugcacaccg

SEQ ID NO: 1692474 - RNA, 19 nt, Artificial Sequence
  Description of Artificial Sequence: Synthetic oligonucleotide
uuacuaaggcggccaaggu

SEQ ID NO: 1692475 - RNA, 19 nt, Artificial Sequence
  Description of Artificial Sequence: Synthetic oligonucleotide
guaagagucuaaagcaaac

SEQ ID NO: 1692476 - RNA, 19 nt, Artificial Sequence
  Description of Artificial Sequence: Synthetic oligonucleotide
ucuccagagguaagagucu

SEQ ID NO: 1692477 - RNA, 19 nt, Artificial Sequence
  Description of Artificial Sequence: Synthetic oligonucleotide
guauguauccuaagucacc

SEQ ID NO: 1692478 - RNA, 19 nt, Artificial Sequence
  Description of Artificial Sequence: Synthetic oligonucleotide
auacaucucacaauacagu

SEQ ID NO: 1692479 - RNA, 19 nt, Artificial Sequence
  Description of Artificial Sequence: Synthetic oligonucleotide
gucaccaauacaucucaca

SEQ ID NO: 1692480 - RNA, 19 nt, Artificial Sequence
  Description of Artificial Sequence: Synthetic oligonucleotide
aggagauccucauuacuaa

SEQ ID NO: 1692481 - RNA, 19 nt, Artificial Sequence
  Description of Artificial Sequence: Synthetic oligonucleotide
cuaagucaccaauacaucu

SEQ ID NO: 1692482 - RNA, 19 nt, Artificial Sequence
  Description of Artificial Sequence: Synthetic oligonucleotide
aucaugcuaucucaauuaa

SEQ ID NO: 1692483 - RNA, 19 nt, Artificial Sequence
  Description of Artificial Sequence: Synthetic oligonucleotide
uucagccugucacaucacu

SEQ ID NO: 1692484 - RNA, 19 nt, Artificial Sequence
  Description of Artificial Sequence: Synthetic oligonucleotide
uacagaacccacucucuau

SEQ ID NO: 1692485 - RNA, 19 nt, Artificial Sequence
  Description of Artificial Sequence: Synthetic oligonucleotide
gaugcgcucgcgcuccucc

SEQ ID NO: 1692486 - RNA, 19 nt, Artificial Sequence
  Description of Artificial Sequence: Synthetic oligonucleotide
cuucugagcgccucagaac

SEQ ID NO: 1692487 - RNA, 19 nt, Artificial Sequence
  Description of Artificial Sequence: Synthetic oligonucleotide
uagaucaugcuaucucaau

SEQ ID NO: 1692488 - RNA, 19 nt, Artificial Sequence
  Description of Artificial Sequence: Synthetic oligonucleotide
augcacacaccagagacga

SEQ ID NO: 1692489 - RNA, 19 nt, Artificial Sequence
  Description of Artificial Sequence: Synthetic oligonucleotide
ucccugaggugucaguuaa

SEQ ID NO: 1692490 - RNA, 19 nt, Artificial Sequence
  Description of Artificial Sequence: Synthetic oligonucleotide
caaaccguccugccauugg

SEQ ID NO: 1692491 - RNA, 19 nt, Artificial Sequence
  Description of Artificial Sequence: Synthetic oligonucleotide
gugucaguuaaaaugcaga

SEQ ID NO: 1692492 - RNA, 19 nt, Artificial Sequence
  Description of Artificial Sequence: Synthetic oligonucleotide
aaucccugaggugucaguu

SEQ ID NO: 1692493 - RNA, 19 nt, Artificial Sequence
  Description of Artificial Sequence: Synthetic oligonucleotide
ucauuacuaaggcggccaa

SEQ ID NO: 1692494 - RNA, 19 nt, Artificial Sequence
  Description of Artificial Sequence: Synthetic oligonucleotide
agcgguuuaggcuccgggu

SEQ ID NO: 1692495 - RNA, 19 nt, Artificial Sequence
  Description of Artificial Sequence: Synthetic oligonucleotide
ccugcaagcaccuccuccg

SEQ ID NO: 1692496 - RNA, 19 nt, Artificial Sequence
  Description of Artificial Sequence: Synthetic oligonucleotide
gugucaagaccuggaaagg

SEQ ID NO: 1692497 - RNA, 19 nt, Artificial Sequence
  Description of Artificial Sequence: Synthetic oligonucleotide
acgaaguacagagcagcuc

SEQ ID NO: 1692498 - RNA, 19 nt, Artificial Sequence
  Description of Artificial Sequence: Synthetic oligonucleotide
acagaacccacucucuauu

SEQ ID NO: 1692499 - RNA, 19 nt, Artificial Sequence
  Description of Artificial Sequence: Synthetic oligonucleotide
uugaauuuucuggguuaag

SEQ ID NO: 1692500 - RNA, 19 nt, Artificial Sequence
  Description of Artificial Sequence: Synthetic oligonucleotide
uccaugaaugaggugggaa

SEQ ID NO: 1692501 - RNA, 19 nt, Artificial Sequence
  Description of Artificial Sequence: Synthetic oligonucleotide
ugcagagguugccaagaaa

SEQ ID NO: 1692502 - RNA, 19 nt, Artificial Sequence
  Description of Artificial Sequence: Synthetic oligonucleotide
cagagacgaaguacagagc

SEQ ID NO: 1692503 - RNA, 19 nt, Artificial Sequence
  Description of Artificial Sequence: Synthetic oligonucleotide
aggggcuuccguugugcac

SEQ ID NO: 1692504 - RNA, 19 nt, Artificial Sequence
  Description of Artificial Sequence: Synthetic oligonucleotide
ggugucugcgcacggacag

SEQ ID NO: 1692505 - RNA, 19 nt, Artificial Sequence
  Description of Artificial Sequence: Synthetic oligonucleotide
agagguugccaagaaauuu

SEQ ID NO: 1692506 - RNA, 19 nt, Artificial Sequence
  Description of Artificial Sequence: Synthetic oligonucleotide
gcauagaucaugcuaucuc

SEQ ID NO: 1692507 - RNA, 19 nt, Artificial Sequence
  Description of Artificial Sequence: Synthetic oligonucleotide
cuccaagggacuccgcggc

SEQ ID NO: 1692508 - RNA, 19 nt, Artificial Sequence
  Description of Artificial Sequence: Synthetic oligonucleotide
uuccguugugcacaccguc

SEQ ID NO: 1692509 - RNA, 19 nt, Artificial Sequence
  Description of Artificial Sequence: Synthetic oligonucleotide
accauucuaagaccuggaa

SEQ ID NO: 1692510 - RNA, 19 nt, Artificial Sequence
  Description of Artificial Sequence: Synthetic oligonucleotide
cucggguugucuauuucuc

SEQ ID NO: 1692511 - RNA, 19 nt, Artificial Sequence
  Description of Artificial Sequence: Synthetic oligonucleotide
caaaguccucucgaagcgg

SEQ ID NO: 1692512 - RNA, 19 nt, Artificial Sequence
  Description of Artificial Sequence: Synthetic oligonucleotide
aacuucugagcgccucaga

SEQ ID NO: 1692513 - RNA, 19 nt, Artificial Sequence
  Description of Artificial Sequence: Synthetic oligonucleotide
caggagauccucauuacua

SEQ ID NO: 1692514 - RNA, 19 nt, Artificial Sequence
  Description of Artificial Sequence: Synthetic oligonucleotide
cucucuauuccuggaggcc

SEQ ID NO: 1692515 - RNA, 19 nt, Artificial Sequence
  Description of Artificial Sequence: Synthetic oligonucleotide
acaucucacaauacaguga

SEQ ID NO: 1692516 - RNA, 19 nt, Artificial Sequence
  Description of Artificial Sequence: Synthetic oligonucleotide
cuuggaaauuccaacuagu

SEQ ID NO: 1692517 - RNA, 19 nt, Artificial Sequence
  Description of Artificial Sequence: Synthetic oligonucleotide
ggaacaguccgaugcacac

SEQ ID NO: 1692518 - RNA, 19 nt, Artificial Sequence
  Description of Artificial Sequence: Synthetic oligonucleotide
uagcauaggggcuuccguu

SEQ ID NO: 1692519 - RNA, 19 nt, Artificial Sequence
  Description of Artificial Sequence: Synthetic oligonucleotide
ggugucaguuaaaaugcag

SEQ ID NO: 1692520 - RNA, 19 nt, Artificial Sequence
  Description of Artificial Sequence: Synthetic oligonucleotide
agcauagaucaugcuaucu

SEQ ID NO: 1692521 - RNA, 19 nt, Artificial Sequence
  Description of Artificial Sequence: Synthetic oligonucleotide
ggaauccuuuagaaaauug

SEQ ID NO: 1692522 - RNA, 19 nt, Artificial Sequence
  Description of Artificial Sequence: Synthetic oligonucleotide
ugucacuacugucgcugcu

SEQ ID NO: 1692523 - RNA, 19 nt, Artificial Sequence
  Description of Artificial Sequence: Synthetic oligonucleotide
aguccucucgaagcggcgg

SEQ ID NO: 1692524 - RNA, 19 nt, Artificial Sequence
  Description of Artificial Sequence: Synthetic oligonucleotide
agcucuccagcuaugagaa

SEQ ID NO: 1692525 - RNA, 19 nt, Artificial Sequence
  Description of Artificial Sequence: Synthetic oligonucleotide
gucuaaagcaaaccguccu

SEQ ID NO: 1692526 - RNA, 19 nt, Artificial Sequence
  Description of Artificial Sequence: Synthetic oligonucleotide
ugugcacaccgucccugcc

SEQ ID NO: 1692527 - RNA, 19 nt, Artificial Sequence
  Description of Artificial Sequence: Synthetic oligonucleotide
gcaaagccaucuccaaggg

SEQ ID NO: 1692528 - RNA, 19 nt, Artificial Sequence
  Description of Artificial Sequence: Synthetic oligonucleotide
ucgcgcuccuccaaccucu

SEQ ID NO: 1692529 - RNA, 19 nt, Artificial Sequence
  Description of Artificial Sequence: Synthetic oligonucleotide
cugcgcacggacagguccg

SEQ ID NO: 1692530 - RNA, 19 nt, Artificial Sequence
  Description of Artificial Sequence: Synthetic oligonucleotide
cucauuacuaaggcggcca

SEQ ID NO: 1692531 - RNA, 19 nt, Artificial Sequence
  Description of Artificial Sequence: Synthetic oligonucleotide
uagcauagaucaugcuauc

SEQ ID NO: 1692532 - RNA, 19 nt, Artificial Sequence
  Description of Artificial Sequence: Synthetic oligonucleotide
uccagauuucccugaugau

SEQ ID NO: 1692533 - RNA, 19 nt, Artificial Sequence
  Description of Artificial Sequence: Synthetic oligonucleotide
gucacaucacugucacaug

SEQ ID NO: 1692534 - RNA, 19 nt, Artificial Sequence
  Description of Artificial Sequence: Synthetic oligonucleotide
ugccuuaguaguagcgguu

SEQ ID NO: 1692535 - RNA, 19 nt, Artificial Sequence
  Description of Artificial Sequence: Synthetic oligonucleotide
cuuccacugcauggaaucc

SEQ ID NO: 1692536 - RNA, 19 nt, Artificial Sequence
  Description of Artificial Sequence: Synthetic oligonucleotide
guccgaugcacacaccaga

SEQ ID NO: 1692537 - RNA, 19 nt, Artificial Sequence
  Description of Artificial Sequence: Synthetic oligonucleotide
cugucacuacugucgcugc

SEQ ID NO: 1692538 - RNA, 19 nt, Artificial Sequence
  Description of Artificial Sequence: Synthetic oligonucleotide
cucuauuccuggaggccug

SEQ ID NO: 1692539 - RNA, 19 nt, Artificial Sequence
  Description of Artificial Sequence: Synthetic oligonucleotide
ugccuacagaacccacucu

SEQ ID NO: 1692540 - RNA, 19 nt, Artificial Sequence
  Description of Artificial Sequence: Synthetic oligonucleotide
caaaacuucugagcgccuc

SEQ ID NO: 1692541 - RNA, 19 nt, Artificial Sequence
  Description of Artificial Sequence: Synthetic oligonucleotide
cuccuccaaccucugugcg

SEQ ID NO: 1692542 - RNA, 19 nt, Artificial Sequence
  Description of Artificial Sequence: Synthetic oligonucleotide
gugguaagucugcacaaaa

SEQ ID NO: 1692543 - RNA, 19 nt, Artificial Sequence
  Description of Artificial Sequence: Synthetic oligonucleotide
aaguccucucgaagcggcg

SEQ ID NO: 1692544 - RNA, 19 nt, Artificial Sequence
  Description of Artificial Sequence: Synthetic oligonucleotide
gcucucgugguccugcaag

SEQ ID NO: 1692545 - RNA, 19 nt, Artificial Sequence
  Description of Artificial Sequence: Synthetic oligonucleotide
agguaagagucuaaagcaa

SEQ ID NO: 1692546 - RNA, 19 nt, Artificial Sequence
  Description of Artificial Sequence: Synthetic oligonucleotide
accgucccugccuacagaa

SEQ ID NO: 1692547 - RNA, 19 nt, Artificial Sequence
  Description of Artificial Sequence: Synthetic oligonucleotide
ugucugcgcacggacaggu

SEQ ID NO: 1692548 - RNA, 19 nt, Artificial Sequence
  Description of Artificial Sequence: Synthetic oligonucleotide
uggaauccuuuagaaaauu

SEQ ID NO: 1692549 - RNA, 19 nt, Artificial Sequence
  Description of Artificial Sequence: Synthetic oligonucleotide
cucgugguccugcaagcac

SEQ ID NO: 1692550 - RNA, 19 nt, Artificial Sequence
  Description of Artificial Sequence: Synthetic oligonucleotide
acaccgucccugccuacag

SEQ ID NO: 1692551 - RNA, 19 nt, Artificial Sequence
  Description of Artificial Sequence: Synthetic oligonucleotide
auagaucaugcuaucucaa

SEQ ID NO: 1692552 - RNA, 19 nt, Artificial Sequence
  Description of Artificial Sequence: Synthetic oligonucleotide
auaaaacccuuuauccuuu

SEQ ID NO: 1692553 - RNA, 19 nt, Artificial Sequence
  Description of Artificial Sequence: Synthetic oligonucleotide
ggguuuucugagauauagg

SEQ ID NO: 1692554 - RNA, 19 nt, Artificial Sequence
  Description of Artificial Sequence: Synthetic oligonucleotide
caagucucugaagucacga

SEQ ID NO: 1692555 - RNA, 19 nt, Artificial Sequence
  Description of Artificial Sequence: Synthetic oligonucleotide
ccucagaacuuucagccug

SEQ ID NO: 1692556 - RNA, 19 nt, Artificial Sequence
  Description of Artificial Sequence: Synthetic oligonucleotide
cauuacuaaggcggccaag

SEQ ID NO: 1692557 - RNA, 19 nt, Artificial Sequence
  Description of Artificial Sequence: Synthetic oligonucleotide
guaacacagugguaagucu

SEQ ID NO: 1692558 - RNA, 19 nt, Artificial Sequence
  Description of Artificial Sequence: Synthetic oligonucleotide
gcacaaaacuucugagcgc

SEQ ID NO: 1692559 - RNA, 19 nt, Artificial Sequence
  Description of Artificial Sequence: Synthetic oligonucleotide
gccaaggucaggaacaguc

SEQ ID NO: 1692560 - RNA, 19 nt, Artificial Sequence
  Description of Artificial Sequence: Synthetic oligonucleotide
ugaagucacgagagauuuu

SEQ ID NO: 1692561 - RNA, 19 nt, Artificial Sequence
  Description of Artificial Sequence: Synthetic oligonucleotide
uuucagccugucacaucac

SEQ ID NO: 1692562 - RNA, 19 nt, Artificial Sequence
  Description of Artificial Sequence: Synthetic oligonucleotide
gccuacagaacccacucuc

SEQ ID NO: 1692563 - RNA, 19 nt, Artificial Sequence
  Description of Artificial Sequence: Synthetic oligonucleotide
aguccgaugcacacaccag

SEQ ID NO: 1692564 - RNA, 19 nt, Artificial Sequence
  Description of Artificial Sequence: Synthetic oligonucleotide
guauccuaagucaccaaua

SEQ ID NO: 1692565 - RNA, 19 nt, Artificial Sequence
  Description of Artificial Sequence: Synthetic oligonucleotide
ggugccgggcaccucaggc

SEQ ID NO: 1692566 - RNA, 19 nt, Artificial Sequence
  Description of Artificial Sequence: Synthetic oligonucleotide
agugguaagucugcacaaa

SEQ ID NO: 1692567 - RNA, 19 nt, Artificial Sequence
  Description of Artificial Sequence: Synthetic oligonucleotide
augaaugaggugggaauua

SEQ ID NO: 1692568 - RNA, 19 nt, Artificial Sequence
  Description of Artificial Sequence: Synthetic oligonucleotide
ucucgugguccugcaagca

SEQ ID NO: 1692569 - RNA, 19 nt, Artificial Sequence
  Description of Artificial Sequence: Synthetic oligonucleotide
ugcucggguugucuauuuc

SEQ ID NO: 1692570 - RNA, 19 nt, Artificial Sequence
  Description of Artificial Sequence: Synthetic oligonucleotide
cugcaagcaccuccuccgg

SEQ ID NO: 1692571 - RNA, 19 nt, Artificial Sequence
  Description of Artificial Sequence: Synthetic oligonucleotide
ucucgaagcggcggugucu

SEQ ID NO: 1692572 - RNA, 19 nt, Artificial Sequence
  Description of Artificial Sequence: Synthetic oligonucleotide
aggaacaguccgaugcaca

SEQ ID NO: 1692573 - RNA, 19 nt, Artificial Sequence
  Description of Artificial Sequence: Synthetic oligonucleotide
acagugaauucuauucauu

SEQ ID NO: 1692574 - RNA, 19 nt, Artificial Sequence
  Description of Artificial Sequence: Synthetic oligonucleotide
cucgaagcggcggugucug

SEQ ID NO: 1692575 - RNA, 19 nt, Artificial Sequence
  Description of Artificial Sequence: Synthetic oligonucleotide
ccugaugaugcgcucgcgc

SEQ ID NO: 1692576 - RNA, 19 nt, Artificial Sequence
  Description of Artificial Sequence: Synthetic oligonucleotide
cacgugggugucaagaccu

SEQ ID NO: 1692577 - RNA, 19 nt, Artificial Sequence
  Description of Artificial Sequence: Synthetic oligonucleotide
cuaaggcggccaaggucag

SEQ ID NO: 1692578 - RNA, 19 nt, Artificial Sequence
  Description of Artificial Sequence: Synthetic oligonucleotide
auguauccuaagucaccaa

SEQ ID NO: 1692579 - RNA, 19 nt, Artificial Sequence
  Description of Artificial Sequence: Synthetic oligonucleotide
agacuuccacugcauggaa

SEQ ID NO: 1692580 - RNA, 19 nt, Artificial Sequence
  Description of Artificial Sequence: Synthetic oligonucleotide
accucaggcugcccguuca

SEQ ID NO: 1692581 - RNA, 19 nt, Artificial Sequence
  Description of Artificial Sequence: Synthetic oligonucleotide
agaaguucugggguccaaa

SEQ ID NO: 1692582 - RNA, 19 nt, Artificial Sequence
  Description of Artificial Sequence: Synthetic oligonucleotide
gaacaguccgaugcacaca

SEQ ID NO: 1692583 - RNA, 19 nt, Artificial Sequence
  Description of Artificial Sequence: Synthetic oligonucleotide
guaagucugcacaaaacuu

SEQ ID NO: 1692584 - RNA, 19 nt, Artificial Sequence
  Description of Artificial Sequence: Synthetic oligonucleotide
gucccugccuacagaaccc

SEQ ID NO: 1692585 - RNA, 19 nt, Artificial Sequence
  Description of Artificial Sequence: Synthetic oligonucleotide
ccguucauccagauuuccc

SEQ ID NO: 1692586 - RNA, 19 nt, Artificial Sequence
  Description of Artificial Sequence: Synthetic oligonucleotide
gagguugccaagaaauuuu

SEQ ID NO: 1692587 - RNA, 19 nt, Artificial Sequence
  Description of Artificial Sequence: Synthetic oligonucleotide
uccgaggcuguguccucgc

SEQ ID NO: 1692588 - RNA, 19 nt, Artificial Sequence
  Description of Artificial Sequence: Synthetic oligonucleotide
cauaggggcuuccguugug

SEQ ID NO: 1692589 - RNA, 19 nt, Artificial Sequence
  Description of Artificial Sequence: Synthetic oligonucleotide
cgucccugccuacagaacc

SEQ ID NO: 1692590 - RNA, 19 nt, Artificial Sequence
  Description of Artificial Sequence: Synthetic oligonucleotide
aggucaggaacaguccgau

SEQ ID NO: 1692591 - RNA, 19 nt, Artificial Sequence
  Description of Artificial Sequence: Synthetic oligonucleotide
aagcggcggugucugcgca

SEQ ID NO: 1692592 - RNA, 19 nt, Artificial Sequence
  Description of Artificial Sequence: Synthetic oligonucleotide
aaggaguaacacaguggua

SEQ ID NO: 1692593 - RNA, 19 nt, Artificial Sequence
  Description of Artificial Sequence: Synthetic oligonucleotide
ucugagcgccucagaacuu

SEQ ID NO: 1692594 - RNA, 19 nt, Artificial Sequence
  Description of Artificial Sequence: Synthetic oligonucleotide
caggaacaguccgaugcac

SEQ ID NO: 1692595 - RNA, 19 nt, Artificial Sequence
  Description of Artificial Sequence: Synthetic oligonucleotide
aguagcgguuuaggcuccg

SEQ ID NO: 1692596 - RNA, 19 nt, Artificial Sequence
  Description of Artificial Sequence: Synthetic oligonucleotide
cagugguaagucugcacaa

SEQ ID NO: 1692597 - RNA, 19 nt, Artificial Sequence
  Description of Artificial Sequence: Synthetic oligonucleotide
aucccugaggugucaguua

SEQ ID NO: 1692598 - RNA, 19 nt, Artificial Sequence
  Description of Artificial Sequence: Synthetic oligonucleotide
gguccaaacugugccuuag

SEQ ID NO: 1692599 - RNA, 19 nt, Artificial Sequence
  Description of Artificial Sequence: Synthetic oligonucleotide
gggcaccucaggcugcccg

SEQ ID NO: 1692600 - RNA, 19 nt, Artificial Sequence
  Description of Artificial Sequence: Synthetic oligonucleotide
auauaggaacaggcugcca

SEQ ID NO: 1692601 - RNA, 19 nt, Artificial Sequence
  Description of Artificial Sequence: Synthetic oligonucleotide
cauuagcauaggggcuucc

SEQ ID NO: 1692602 - RNA, 19 nt, Artificial Sequence
  Description of Artificial Sequence: Synthetic oligonucleotide
uccugcagucaguguggca

SEQ ID NO: 1692603 - RNA, 19 nt, Artificial Sequence
  Description of Artificial Sequence: Synthetic oligonucleotide
aggugucaguuaaaaugca

SEQ ID NO: 1692604 - RNA, 19 nt, Artificial Sequence
  Description of Artificial Sequence: Synthetic oligonucleotide
guccgaggcuguguccucg

SEQ ID NO: 1692605 - RNA, 19 nt, Artificial Sequence
  Description of Artificial Sequence: Synthetic oligonucleotide
gucuauuucuccagaggua

SEQ ID NO: 1692606 - RNA, 19 nt, Artificial Sequence
  Description of Artificial Sequence: Synthetic oligonucleotide
guuuaggcuccgggugccg

SEQ ID NO: 1692607 - RNA, 19 nt, Artificial Sequence
  Description of Artificial Sequence: Synthetic oligonucleotide
uccaaccucugugcgcgcu

SEQ ID NO: 1692608 - RNA, 19 nt, Artificial Sequence
  Description of Artificial Sequence: Synthetic oligonucleotide
uccuccggggaccccuccu

SEQ ID NO: 1692609 - RNA, 19 nt, Artificial Sequence
  Description of Artificial Sequence: Synthetic oligonucleotide
guagcgguuuaggcuccgg

SEQ ID NO: 1692610 - RNA, 19 nt, Artificial Sequence
  Description of Artificial Sequence: Synthetic oligonucleotide
gcagagguugccaagaaau

SEQ ID NO: 1692611 - RNA, 19 nt, Artificial Sequence
  Description of Artificial Sequence: Synthetic oligonucleotide
gacgaaguacagagcagcu

SEQ ID NO: 1692612 - RNA, 19 nt, Artificial Sequence
  Description of Artificial Sequence: Synthetic oligonucleotide
uccugccauugggaaagca

SEQ ID NO: 1692613 - RNA, 19 nt, Artificial Sequence
  Description of Artificial Sequence: Synthetic oligonucleotide
ugcucucgugguccugcaa

SEQ ID NO: 1692614 - RNA, 19 nt, Artificial Sequence
  Description of Artificial Sequence: Synthetic oligonucleotide
uuuauccuuugagguuaau

SEQ ID NO: 1692615 - RNA, 19 nt, Artificial Sequence
  Description of Artificial Sequence: Synthetic oligonucleotide
gugcuucuuucucuccgga

SEQ ID NO: 1692616 - RNA, 19 nt, Artificial Sequence
  Description of Artificial Sequence: Synthetic oligonucleotide
uccucucgaagcggcggug

SEQ ID NO: 1692617 - RNA, 19 nt, Artificial Sequence
  Description of Artificial Sequence: Synthetic oligonucleotide
cucgcgcuccuccaaccuc

SEQ ID NO: 1692618 - RNA, 19 nt, Artificial Sequence
  Description of Artificial Sequence: Synthetic oligonucleotide
cacauggcuggagaggaaa

SEQ ID NO: 1692619 - RNA, 19 nt, Artificial Sequence
  Description of Artificial Sequence: Synthetic oligonucleotide
ugcgcucgcgcuccuccaa

SEQ ID NO: 1692620 - RNA, 19 nt, Artificial Sequence
  Description of Artificial Sequence: Synthetic oligonucleotide
ugugcgcgcuccagcuccu

SEQ ID NO: 1692621 - RNA, 19 nt, Artificial Sequence
  Description of Artificial Sequence: Synthetic oligonucleotide
gugucugcgcacggacagg

SEQ ID NO: 1692622 - RNA, 19 nt, Artificial Sequence
  Description of Artificial Sequence: Synthetic oligonucleotide
ggcggccaaggucaggaac

SEQ ID NO: 1692623 - RNA, 19 nt, Artificial Sequence
  Description of Artificial Sequence: Synthetic oligonucleotide
ggaaaggcugaugccgcug

SEQ ID NO: 1692624 - RNA, 19 nt, Artificial Sequence
  Description of Artificial Sequence: Synthetic oligonucleotide
gguuuaggcuccgggugcc

SEQ ID NO: 1692625 - RNA, 19 nt, Artificial Sequence
  Description of Artificial Sequence: Synthetic oligonucleotide
gguuaaguucacccugaua

SEQ ID NO: 1692626 - RNA, 19 nt, Artificial Sequence
  Description of Artificial Sequence: Synthetic oligonucleotide
cucucgaagcggcgguguc

SEQ ID NO: 1692627 - RNA, 19 nt, Artificial Sequence
  Description of Artificial Sequence: Synthetic oligonucleotide
agcaaaccguccugccauu

SEQ ID NO: 1692628 - RNA, 19 nt, Artificial Sequence
  Description of Artificial Sequence: Synthetic oligonucleotide
ccuuuauccuuugagguua

SEQ ID NO: 1692629 - RNA, 19 nt, Artificial Sequence
  Description of Artificial Sequence: Synthetic oligonucleotide
gggugucaagaccuggaaa

SEQ ID NO: 1692630 - RNA, 19 nt, Artificial Sequence
  Description of Artificial Sequence: Synthetic oligonucleotide
aggugggaauuagacuaaa

SEQ ID NO: 1692631 - RNA, 19 nt, Artificial Sequence
  Description of Artificial Sequence: Synthetic oligonucleotide
ggacacagggcuucuauuu

SEQ ID NO: 1692632 - RNA, 19 nt, Artificial Sequence
  Description of Artificial Sequence: Synthetic oligonucleotide
ggacacugcugagcaaagc

SEQ ID NO: 1692633 - RNA, 19 nt, Artificial Sequence
  Description of Artificial Sequence: Synthetic oligonucleotide
gcucggguugucuauuucu

SEQ ID NO: 1692634 - RNA, 19 nt, Artificial Sequence
  Description of Artificial Sequence: Synthetic oligonucleotide
ccucauuacuaaggcggcc

SEQ ID NO: 1692635 - RNA, 19 nt, Artificial Sequence
  Description of Artificial Sequence: Synthetic oligonucleotide
cacauuagcauaggggcuu

SEQ ID NO: 1692636 - RNA, 19 nt, Artificial Sequence
  Description of Artificial Sequence: Synthetic oligonucleotide
cgcacggacagguccgagg

SEQ ID NO: 1692637 - RNA, 19 nt, Artificial Sequence
  Description of Artificial Sequence: Synthetic oligonucleotide
cgguuuaggcuccgggugc

SEQ ID NO: 1692638 - RNA, 19 nt, Artificial Sequence
  Description of Artificial Sequence: Synthetic oligonucleotide
gcggugucugcgcacggac

SEQ ID NO: 1692639 - RNA, 19 nt, Artificial Sequence
  Description of Artificial Sequence: Synthetic oligonucleotide
guugggccagugugcccac

SEQ ID NO: 1692640 - RNA, 19 nt, Artificial Sequence
  Description of Artificial Sequence: Synthetic oligonucleotide
ugcgcacggacagguccga

SEQ ID NO: 1692641 - RNA, 19 nt, Artificial Sequence
  Description of Artificial Sequence: Synthetic oligonucleotide
ggugggaauuagacuaaaa

SEQ ID NO: 1692642 - RNA, 19 nt, Artificial Sequence
  Description of Artificial Sequence: Synthetic oligonucleotide
ggaaagguugggccagugu

SEQ ID NO: 1692643 - RNA, 19 nt, Artificial Sequence
  Description of Artificial Sequence: Synthetic oligonucleotide
cuccaaccucugugcgcgc

SEQ ID NO: 1692644 - RNA, 19 nt, Artificial Sequence
  Description of Artificial Sequence: Synthetic oligonucleotide
gugcacaccgucccugccu

SEQ ID NO: 1692645 - RNA, 19 nt, Artificial Sequence
  Description of Artificial Sequence: Synthetic oligonucleotide
cuccagagguaagagucua

SEQ ID NO: 1692646 - RNA, 19 nt, Artificial Sequence
  Description of Artificial Sequence: Synthetic oligonucleotide
cagagguugccaagaaauu

SEQ ID NO: 1692647 - RNA, 19 nt, Artificial Sequence
  Description of Artificial Sequence: Synthetic oligonucleotide
caguuaaaaugcagagguu

SEQ ID NO: 1692648 - RNA, 19 nt, Artificial Sequence
  Description of Artificial Sequence: Synthetic oligonucleotide
gcaaaccguccugccauug

SEQ ID NO: 1692649 - RNA, 19 nt, Artificial Sequence
  Description of Artificial Sequence: Synthetic oligonucleotide
cacaccgucccugccuaca

SEQ ID NO: 1692650 - RNA, 19 nt, Artificial Sequence
  Description of Artificial Sequence: Synthetic oligonucleotide
acgugggugucaagaccug

SEQ ID NO: 1692651 - RNA, 19 nt, Artificial Sequence
  Description of Artificial Sequence: Synthetic oligonucleotide
augaugcgcucgcgcuccu

SEQ ID NO: 1692652 - RNA, 19 nt, Artificial Sequence
  Description of Artificial Sequence: Synthetic oligonucleotide
gaaagcaggcuggcccugu

SEQ ID NO: 1692653 - RNA, 19 nt, Artificial Sequence
  Description of Artificial Sequence: Synthetic oligonucleotide
cccguucauccagauuucc

SEQ ID NO: 1692654 - RNA, 19 nt, Artificial Sequence
  Description of Artificial Sequence: Synthetic oligonucleotide
ccggacacauuagcauagg

SEQ ID NO: 1692655 - RNA, 19 nt, Artificial Sequence
  Description of Artificial Sequence: Synthetic oligonucleotide
caggguuuucugagauaua

SEQ ID NO: 1692656 - RNA, 19 nt, Artificial Sequence
  Description of Artificial Sequence: Synthetic oligonucleotide
guccucucgaagcggcggu

SEQ ID NO: 1692657 - RNA, 19 nt, Artificial Sequence
  Description of Artificial Sequence: Synthetic oligonucleotide
ugaugcgcucgcgcuccuc

SEQ ID NO: 1692658 - RNA, 19 nt, Artificial Sequence
  Description of Artificial Sequence: Synthetic oligonucleotide
aggcggccaaggucaggaa

SEQ ID NO: 1692659 - RNA, 19 nt, Artificial Sequence
  Description of Artificial Sequence: Synthetic oligonucleotide
cugcucucgugguccugca

SEQ ID NO: 1692660 - RNA, 19 nt, Artificial Sequence
  Description of Artificial Sequence: Synthetic oligonucleotide
ggggaccccuccugcaguc

SEQ ID NO: 1692661 - RNA, 19 nt, Artificial Sequence
  Description of Artificial Sequence: Synthetic oligonucleotide
caguguggcaggagauccu

SEQ ID NO: 1692662 - RNA, 19 nt, Artificial Sequence
  Description of Artificial Sequence: Synthetic oligonucleotide
gguccugcaagcaccuccu

SEQ ID NO: 1692663 - RNA, 19 nt, Artificial Sequence
  Description of Artificial Sequence: Synthetic oligonucleotide
gggugccgggcaccucagg

SEQ ID NO: 1692664 - RNA, 19 nt, Artificial Sequence
  Description of Artificial Sequence: Synthetic oligonucleotide
gggcuuccguugugcacac

SEQ ID NO: 1692665 - RNA, 19 nt, Artificial Sequence
  Description of Artificial Sequence: Synthetic oligonucleotide
gccucagaacuuucagccu

SEQ ID NO: 1692666 - RNA, 19 nt, Artificial Sequence
  Description of Artificial Sequence: Synthetic oligonucleotide
ccaaccucugugcgcgcuc

SEQ ID NO: 1692667 - RNA, 19 nt, Artificial Sequence
  Description of Artificial Sequence: Synthetic oligonucleotide
gcauaggggcuuccguugu

SEQ ID NO: 1692668 - RNA, 19 nt, Artificial Sequence
  Description of Artificial Sequence: Synthetic oligonucleotide
gguccgaggcuguguccuc

SEQ ID NO: 1692669 - RNA, 19 nt, Artificial Sequence
  Description of Artificial Sequence: Synthetic oligonucleotide
cccugaugaugcgcucgcg

SEQ ID NO: 1692670 - RNA, 19 nt, Artificial Sequence
  Description of Artificial Sequence: Synthetic oligonucleotide
ggguccaaacugugccuua

SEQ ID NO: 1692671 - RNA, 19 nt, Artificial Sequence
  Description of Artificial Sequence: Synthetic oligonucleotide
ggcuccgggugccgggcac

SEQ ID NO: 1692672 - RNA, 19 nt, Artificial Sequence
  Description of Artificial Sequence: Synthetic oligonucleotide
gucugcgcacggacagguc

SEQ ID NO: 1692673 - RNA, 19 nt, Artificial Sequence
  Description of Artificial Sequence: Synthetic oligonucleotide
gcccugugcuucuuucucu

SEQ ID NO: 1692674 - RNA, 19 nt, Artificial Sequence
  Description of Artificial Sequence: Synthetic oligonucleotide
ccuuaguaguagcgguuua

SEQ ID NO: 1692675 - RNA, 19 nt, Artificial Sequence
  Description of Artificial Sequence: Synthetic oligonucleotide
cugagcgccucagaacuuu

SEQ ID NO: 1692676 - RNA, 19 nt, Artificial Sequence
  Description of Artificial Sequence: Synthetic oligonucleotide
gcgcucgcgcuccuccaac

SEQ ID NO: 1692677 - RNA, 19 nt, Artificial Sequence
  Description of Artificial Sequence: Synthetic oligonucleotide
ccgggugccgggcaccuca

SEQ ID NO: 1692678 - RNA, 19 nt, Artificial Sequence
  Description of Artificial Sequence: Synthetic oligonucleotide
gcccguucauccagauuuc

SEQ ID NO: 1692679 - RNA, 19 nt, Artificial Sequence
  Description of Artificial Sequence: Synthetic oligonucleotide
cugaugccgcugcucgggu

SEQ ID NO: 1692680 - RNA, 19 nt, Artificial Sequence
  Description of Artificial Sequence: Synthetic oligonucleotide
gugguccugcaagcaccuc

SEQ ID NO: 1692681 - RNA, 19 nt, Artificial Sequence
  Description of Artificial Sequence: Synthetic oligonucleotide
ggcggugucugcgcacgga

SEQ ID NO: 1692682 - RNA, 19 nt, Artificial Sequence
  Description of Artificial Sequence: Synthetic oligonucleotide
gccuuaguaguagcgguuu

SEQ ID NO: 1692683 - RNA, 19 nt, Artificial Sequence
  Description of Artificial Sequence: Synthetic oligonucleotide
ggaaggacacagggcuucu

SEQ ID NO: 1692684 - RNA, 19 nt, Artificial Sequence
  Description of Artificial Sequence: Synthetic oligonucleotide
cacggacagguccgaggcu

SEQ ID NO: 1692685 - RNA, 19 nt, Artificial Sequence
  Description of Artificial Sequence: Synthetic oligonucleotide
cugcucggguugucuauuu

SEQ ID NO: 1692686 - RNA, 19 nt, Artificial Sequence
  Description of Artificial Sequence: Synthetic oligonucleotide
ccguccugccauugggaaa

SEQ ID NO: 1692687 - RNA, 19 nt, Artificial Sequence
  Description of Artificial Sequence: Synthetic oligonucleotide
gcucgcgcuccuccaaccu

SEQ ID NO: 1692688 - RNA, 19 nt, Artificial Sequence
  Description of Artificial Sequence: Synthetic oligonucleotide
cugcagaggugaacacauu

SEQ ID NO: 1692689 - RNA, 19 nt, Artificial Sequence
  Description of Artificial Sequence: Synthetic oligonucleotide
gcacaccgucccugccuac

SEQ ID NO: 1692690 - RNA, 19 nt, Artificial Sequence
  Description of Artificial Sequence: Synthetic oligonucleotide
gcgcacggacagguccgag

SEQ ID NO: 1692691 - RNA, 19 nt, Artificial Sequence
  Description of Artificial Sequence: Synthetic oligonucleotide
ggcuuccguugugcacacc

SEQ ID NO: 1692692 - RNA, 19 nt, Artificial Sequence
  Description of Artificial Sequence: Synthetic oligonucleotide
cggugucugcgcacggaca

SEQ ID NO: 1692693 - RNA, 19 nt, Artificial Sequence
  Description of Artificial Sequence: Synthetic oligonucleotide
guguccucgcugccaucuu

SEQ ID NO: 1692694 - RNA, 19 nt, Artificial Sequence
  Description of Artificial Sequence: Synthetic oligonucleotide
cugcccguucauccagauu

SEQ ID NO: 1692695 - RNA, 19 nt, Artificial Sequence
  Description of Artificial Sequence: Synthetic oligonucleotide
ccucgcugccaucuucacu

SEQ ID NO: 1692696 - RNA, 19 nt, Artificial Sequence
  Description of Artificial Sequence: Synthetic oligonucleotide
cgugguccugcaagcaccu

SEQ ID NO: 1692697 - RNA, 19 nt, Artificial Sequence
  Description of Artificial Sequence: Synthetic oligonucleotide
gcugcucggguugucuauu

SEQ ID NO: 1692698 - RNA, 19 nt, Artificial Sequence
  Description of Artificial Sequence: Synthetic oligonucleotide
gccgcugcucggguugucu

SEQ ID NO: 1692699 - RNA, 19 nt, Artificial Sequence
  Description of Artificial Sequence: Synthetic oligonucleotide
cggcggugucugcgcacgg

SEQ ID NO: 1692700 - RNA, 19 nt, Artificial Sequence
  Description of Artificial Sequence: Synthetic oligonucleotide
ccucucgaagcggcggugu

SEQ ID NO: 1692701 - RNA, 19 nt, Artificial Sequence
  Description of Artificial Sequence: Synthetic oligonucleotide
cgcugcucggguugucuau

SEQ ID NO: 1692702 - RNA, 19 nt, Artificial Sequence
  Description of Artificial Sequence: Synthetic oligonucleotide
ccgaggcuguguccucgcu

SEQ ID NO: 1692703 - RNA, 19 nt, Artificial Sequence
  Description of Artificial Sequence: Synthetic oligonucleotide
ucauaaaucugauagaucu

SEQ ID NO: 1692704 - RNA, 19 nt, Artificial Sequence
  Description of Artificial Sequence: Synthetic oligonucleotide
aauguuuuccucuccaggg

SEQ ID NO: 1692705 - RNA, 19 nt, Artificial Sequence
  Description of Artificial Sequence: Synthetic oligonucleotide
aaugagaaagacuucuuag

SEQ ID NO: 1692706 - RNA, 19 nt, Artificial Sequence
  Description of Artificial Sequence: Synthetic oligonucleotide
aaaucugauagaucuuggc

SEQ ID NO: 1692707 - RNA, 19 nt, Artificial Sequence
  Description of Artificial Sequence: Synthetic oligonucleotide
auugaucaaaccaaguucc

SEQ ID NO: 1692708 - RNA, 19 nt, Artificial Sequence
  Description of Artificial Sequence: Synthetic oligonucleotide
uuaaaacucgaaaugagaa

SEQ ID NO: 1692709 - RNA, 19 nt, Artificial Sequence
  Description of Artificial Sequence: Synthetic oligonucleotide
uagacaagcaucaaaaguc

SEQ ID NO: 1692710 - RNA, 19 nt, Artificial Sequence
  Description of Artificial Sequence: Synthetic oligonucleotide
acugauuggcaauaucucc

SEQ ID NO: 1692711 - RNA, 19 nt, Artificial Sequence
  Description of Artificial Sequence: Synthetic oligonucleotide
uuuaaacuuuccaaugugc

SEQ ID NO: 1692712 - RNA, 19 nt, Artificial Sequence
  Description of Artificial Sequence: Synthetic oligonucleotide
aaucaagacguuuuccuug

SEQ ID NO: 1692713 - RNA, 19 nt, Artificial Sequence
  Description of Artificial Sequence: Synthetic oligonucleotide
aacucuucgguaauuagac

SEQ ID NO: 1692714 - RNA, 19 nt, Artificial Sequence
  Description of Artificial Sequence: Synthetic oligonucleotide
ucugaauuugugcaguacc

SEQ ID NO: 1692715 - RNA, 19 nt, Artificial Sequence
  Description of Artificial Sequence: Synthetic oligonucleotide
uuuccagcgagaaucacag

SEQ ID NO: 1692716 - RNA, 19 nt, Artificial Sequence
  Description of Artificial Sequence: Synthetic oligonucleotide
aaugaaacugcuuggugcu

SEQ ID NO: 1692717 - RNA, 19 nt, Artificial Sequence
  Description of Artificial Sequence: Synthetic oligonucleotide
uuuaguugcacgaguauga

SEQ ID NO: 1692718 - RNA, 19 nt, Artificial Sequence
  Description of Artificial Sequence: Synthetic oligonucleotide
cauaguauguauuccggcg

SEQ ID NO: 1692719 - RNA, 19 nt, Artificial Sequence
  Description of Artificial Sequence: Synthetic oligonucleotide
augagaaagacuucuuagg

SEQ ID NO: 1692720 - RNA, 19 nt, Artificial Sequence
  Description of Artificial Sequence: Synthetic oligonucleotide
ugagaaagacuucuuagga

SEQ ID NO: 1692721 - RNA, 19 nt, Artificial Sequence
  Description of Artificial Sequence: Synthetic oligonucleotide
aaugccuugagguuuaguu

SEQ ID NO: 1692722 - RNA, 19 nt, Artificial Sequence
  Description of Artificial Sequence: Synthetic oligonucleotide
aacucgaaaugagaaagac

SEQ ID NO: 1692723 - RNA, 19 nt, Artificial Sequence
  Description of Artificial Sequence: Synthetic oligonucleotide
ugugcauugaucaaaccaa

SEQ ID NO: 1692724 - RNA, 19 nt, Artificial Sequence
  Description of Artificial Sequence: Synthetic oligonucleotide
uccagcgagaaucacaggc

SEQ ID NO: 1692725 - RNA, 19 nt, Artificial Sequence
  Description of Artificial Sequence: Synthetic oligonucleotide
gaagcaucucuucaaaagc

SEQ ID NO: 1692726 - RNA, 19 nt, Artificial Sequence
  Description of Artificial Sequence: Synthetic oligonucleotide
aauauguauuccuggggug

SEQ ID NO: 1692727 - RNA, 19 nt, Artificial Sequence
  Description of Artificial Sequence: Synthetic oligonucleotide
auaguauguauuccggcgg

SEQ ID NO: 1692728 - RNA, 19 nt, Artificial Sequence
  Description of Artificial Sequence: Synthetic oligonucleotide
gauaacauacucaucgccc

SEQ ID NO: 1692729 - RNA, 19 nt, Artificial Sequence
  Description of Artificial Sequence: Synthetic oligonucleotide
uaaaucugauagaucuugg

SEQ ID NO: 1692730 - RNA, 19 nt, Artificial Sequence
  Description of Artificial Sequence: Synthetic oligonucleotide
gcgaguucaacuuucaucg

SEQ ID NO: 1692731 - RNA, 19 nt, Artificial Sequence
  Description of Artificial Sequence: Synthetic oligonucleotide
ugauaacauacucaucgcc

SEQ ID NO: 1692732 - RNA, 19 nt, Artificial Sequence
  Description of Artificial Sequence: Synthetic oligonucleotide
uguauugaauccauagccu

SEQ ID NO: 1692733 - RNA, 19 nt, Artificial Sequence
  Description of Artificial Sequence: Synthetic oligonucleotide
agcgaguucaacuuucauc

SEQ ID NO: 1692734 - RNA, 19 nt, Artificial Sequence
  Description of Artificial Sequence: Synthetic oligonucleotide
uaagcauaaacaaugccuu

SEQ ID NO: 1692735 - RNA, 19 nt, Artificial Sequence
  Description of Artificial Sequence: Synthetic oligonucleotide
agaaucacaggcauuugcc

SEQ ID NO: 1692736 - RNA, 19 nt, Artificial Sequence
  Description of Artificial Sequence: Synthetic oligonucleotide
uccacaaugaauccaguaa

SEQ ID NO: 1692737 - RNA, 19 nt, Artificial Sequence
  Description of Artificial Sequence: Synthetic oligonucleotide
uguucagucaacucaaaau

SEQ ID NO: 1692738 - RNA, 19 nt, Artificial Sequence
  Description of Artificial Sequence: Synthetic oligonucleotide
acgaguaugaagcaucucu

SEQ ID NO: 1692739 - RNA, 19 nt, Artificial Sequence
  Description of Artificial Sequence: Synthetic oligonucleotide
ugcaguaccuucauaaauc

SEQ ID NO: 1692740 - RNA, 19 nt, Artificial Sequence
  Description of Artificial Sequence: Synthetic oligonucleotide
uaauuagacaagcaucaaa

SEQ ID NO: 1692741 - RNA, 19 nt, Artificial Sequence
  Description of Artificial Sequence: Synthetic oligonucleotide
cuuuccaaugugcucacgg

SEQ ID NO: 1692742 - RNA, 19 nt, Artificial Sequence
  Description of Artificial Sequence: Synthetic oligonucleotide
uuuccaaugugcucacggg

SEQ ID NO: 1692743 - RNA, 19 nt, Artificial Sequence
  Description of Artificial Sequence: Synthetic oligonucleotide
ucuucgguaauuagacaag

SEQ ID NO: 1692744 - RNA, 19 nt, Artificial Sequence
  Description of Artificial Sequence: Synthetic oligonucleotide
ucugcgagcagaaaugaaa

SEQ ID NO: 1692745 - RNA, 19 nt, Artificial Sequence
  Description of Artificial Sequence: Synthetic oligonucleotide
uccaguaaaggcuuuacua

SEQ ID NO: 1692746 - RNA, 19 nt, Artificial Sequence
  Description of Artificial Sequence: Synthetic oligonucleotide
cuuaagcauaaacaaugcc

SEQ ID NO: 1692747 - RNA, 19 nt, Artificial Sequence
  Description of Artificial Sequence: Synthetic oligonucleotide
aaugccagccacgucagag

SEQ ID NO: 1692748 - RNA, 19 nt, Artificial Sequence
  Description of Artificial Sequence: Synthetic oligonucleotide
uugugcaguaccuucauaa

SEQ ID NO: 1692749 - RNA, 19 nt, Artificial Sequence
  Description of Artificial Sequence: Synthetic oligonucleotide
ugcucugucauucucccca

SEQ ID NO: 1692750 - RNA, 19 nt, Artificial Sequence
  Description of Artificial Sequence: Synthetic oligonucleotide
aucaagacguuuuccuugg

SEQ ID NO: 1692751 - RNA, 19 nt, Artificial Sequence
  Description of Artificial Sequence: Synthetic oligonucleotide
aauccaguaaaggcuuuac

SEQ ID NO: 1692752 - RNA, 19 nt, Artificial Sequence
  Description of Artificial Sequence: Synthetic oligonucleotide
aacugauuggcaauaucuc

SEQ ID NO: 1692753 - RNA, 19 nt, Artificial Sequence
  Description of Artificial Sequence: Synthetic oligonucleotide
uuauccacaucuucuggcc

SEQ ID NO: 1692754 - RNA, 19 nt, Artificial Sequence
  Description of Artificial Sequence: Synthetic oligonucleotide
uacuaggagguacuuuagg

SEQ ID NO: 1692755 - RNA, 19 nt, Artificial Sequence
  Description of Artificial Sequence: Synthetic oligonucleotide
agacaagcaucaaaagucc

SEQ ID NO: 1692756 - RNA, 19 nt, Artificial Sequence
  Description of Artificial Sequence: Synthetic oligonucleotide
acuaggagguacuuuagga

SEQ ID NO: 1692757 - RNA, 19 nt, Artificial Sequence
  Description of Artificial Sequence: Synthetic oligonucleotide
ucccaauauguauuccugg

SEQ ID NO: 1692758 - RNA, 19 nt, Artificial Sequence
  Description of Artificial Sequence: Synthetic oligonucleotide
gagaaucacaggcauuugc

SEQ ID NO: 1692759 - RNA, 19 nt, Artificial Sequence
  Description of Artificial Sequence: Synthetic oligonucleotide
gguaacugagucuagcgag

SEQ ID NO: 1692760 - RNA, 19 nt, Artificial Sequence
  Description of Artificial Sequence: Synthetic oligonucleotide
aucaaaaguccccagucca

SEQ ID NO: 1692761 - RNA, 19 nt, Artificial Sequence
  Description of Artificial Sequence: Synthetic oligonucleotide
uugagguuuaguugcacga

SEQ ID NO: 1692762 - RNA, 19 nt, Artificial Sequence
  Description of Artificial Sequence: Synthetic oligonucleotide
auaacauacucaucgcccu

SEQ ID NO: 1692763 - RNA, 19 nt, Artificial Sequence
  Description of Artificial Sequence: Synthetic oligonucleotide
uugauaacauacucaucgc

SEQ ID NO: 1692764 - RNA, 19 nt, Artificial Sequence
  Description of Artificial Sequence: Synthetic oligonucleotide
uuguaucagagcaucgcug

SEQ ID NO: 1692765 - RNA, 19 nt, Artificial Sequence
  Description of Artificial Sequence: Synthetic oligonucleotide
uaugaucagccucugaauu

SEQ ID NO: 1692766 - RNA, 19 nt, Artificial Sequence
  Description of Artificial Sequence: Synthetic oligonucleotide
ucucuuaagcauaaacaau

SEQ ID NO: 1692767 - RNA, 19 nt, Artificial Sequence
  Description of Artificial Sequence: Synthetic oligonucleotide
uguacauccauacgccaac

SEQ ID NO: 1692768 - RNA, 19 nt, Artificial Sequence
  Description of Artificial Sequence: Synthetic oligonucleotide
ucaaaccaaguucccaggc

SEQ ID NO: 1692769 - RNA, 19 nt, Artificial Sequence
  Description of Artificial Sequence: Synthetic oligonucleotide
uucccaagcagcucucugg

SEQ ID NO: 1692770 - RNA, 19 nt, Artificial Sequence
  Description of Artificial Sequence: Synthetic oligonucleotide
auugcaauuuugaagccag

SEQ ID NO: 1692771 - RNA, 19 nt, Artificial Sequence
  Description of Artificial Sequence: Synthetic oligonucleotide
aguucuccggaaugugugc

SEQ ID NO: 1692772 - RNA, 19 nt, Artificial Sequence
  Description of Artificial Sequence: Synthetic oligonucleotide
ugcucacgggcuaugauca

SEQ ID NO: 1692773 - RNA, 19 nt, Artificial Sequence
  Description of Artificial Sequence: Synthetic oligonucleotide
aacuuuccaaugugcucac

SEQ ID NO: 1692774 - RNA, 19 nt, Artificial Sequence
  Description of Artificial Sequence: Synthetic oligonucleotide
uuucaucgccauuucugcg

SEQ ID NO: 1692775 - RNA, 19 nt, Artificial Sequence
  Description of Artificial Sequence: Synthetic oligonucleotide
cacaaugaauccaguaaag

SEQ ID NO: 1692776 - RNA, 19 nt, Artificial Sequence
  Description of Artificial Sequence: Synthetic oligonucleotide
cuucuuaggaccccgcagc

SEQ ID NO: 1692777 - RNA, 19 nt, Artificial Sequence
  Description of Artificial Sequence: Synthetic oligonucleotide
ugucauacucugcagcgac

SEQ ID NO: 1692778 - RNA, 19 nt, Artificial Sequence
  Description of Artificial Sequence: Synthetic oligonucleotide
auuaaaacucgaaaugaga

SEQ ID NO: 1692779 - RNA, 19 nt, Artificial Sequence
  Description of Artificial Sequence: Synthetic oligonucleotide
caguccaagaccaccacag

SEQ ID NO: 1692780 - RNA, 19 nt, Artificial Sequence
  Description of Artificial Sequence: Synthetic oligonucleotide
aaaucugcacggcaucagu

SEQ ID NO: 1692781 - RNA, 19 nt, Artificial Sequence
  Description of Artificial Sequence: Synthetic oligonucleotide
uucauaaaucugauagauc

SEQ ID NO: 1692782 - RNA, 19 nt, Artificial Sequence
  Description of Artificial Sequence: Synthetic oligonucleotide
uaggagguacuuuaggauc

SEQ ID NO: 1692783 - RNA, 19 nt, Artificial Sequence
  Description of Artificial Sequence: Synthetic oligonucleotide
ugguucuaucaaaagcccc

SEQ ID NO: 1692784 - RNA, 19 nt, Artificial Sequence
  Description of Artificial Sequence: Synthetic oligonucleotide
uccaaugugcucacgggcu

SEQ ID NO: 1692785 - RNA, 19 nt, Artificial Sequence
  Description of Artificial Sequence: Synthetic oligonucleotide
ugcacgaguaugaagcauc

SEQ ID NO: 1692786 - RNA, 19 nt, Artificial Sequence
  Description of Artificial Sequence: Synthetic oligonucleotide
uuacuaggagguacuuuag

SEQ ID NO: 1692787 - RNA, 19 nt, Artificial Sequence
  Description of Artificial Sequence: Synthetic oligonucleotide
ugguaacugagucuagcga

SEQ ID NO: 1692788 - RNA, 19 nt, Artificial Sequence
  Description of Artificial Sequence: Synthetic oligonucleotide
uggucuuaaugccagccac

SEQ ID NO: 1692789 - RNA, 19 nt, Artificial Sequence
  Description of Artificial Sequence: Synthetic oligonucleotide
uucaucgccauuucugcga

SEQ ID NO: 1692790 - RNA, 19 nt, Artificial Sequence
  Description of Artificial Sequence: Synthetic oligonucleotide
ucacgggcuaugaucagcc

SEQ ID NO: 1692791 - RNA, 19 nt, Artificial Sequence
  Description of Artificial Sequence: Synthetic oligonucleotide
ucuagcgaguucaacuuuc

SEQ ID NO: 1692792 - RNA, 19 nt, Artificial Sequence
  Description of Artificial Sequence: Synthetic oligonucleotide
uaguauguauuccggcggc

SEQ ID NO: 1692793 - RNA, 19 nt, Artificial Sequence
  Description of Artificial Sequence: Synthetic oligonucleotide
uauguauuccggcggccag

SEQ ID NO: 1692794 - RNA, 19 nt, Artificial Sequence
  Description of Artificial Sequence: Synthetic oligonucleotide
ggaaugugugcauugauca

SEQ ID NO: 1692795 - RNA, 19 nt, Artificial Sequence
  Description of Artificial Sequence: Synthetic oligonucleotide
aacugagucuagcgaguuc

SEQ ID NO: 1692796 - RNA, 19 nt, Artificial Sequence
  Description of Artificial Sequence: Synthetic oligonucleotide
gugugcauugaucaaacca

SEQ ID NO: 1692797 - RNA, 19 nt, Artificial Sequence
  Description of Artificial Sequence: Synthetic oligonucleotide
uugaucaaaccaaguuccc

SEQ ID NO: 1692798 - RNA, 19 nt, Artificial Sequence
  Description of Artificial Sequence: Synthetic oligonucleotide
caucaaaaguccccagucc

SEQ ID NO: 1692799 - RNA, 19 nt, Artificial Sequence
  Description of Artificial Sequence: Synthetic oligonucleotide
cucgaaaugagaaagacuu

SEQ ID NO: 1692800 - RNA, 19 nt, Artificial Sequence
  Description of Artificial Sequence: Synthetic oligonucleotide
aauuugugcaguaccuuca

SEQ ID NO: 1692801 - RNA, 19 nt, Artificial Sequence
  Description of Artificial Sequence: Synthetic oligonucleotide
caggcucuuuuaauuaggg

SEQ ID NO: 1692802 - RNA, 19 nt, Artificial Sequence
  Description of Artificial Sequence: Synthetic oligonucleotide
guagcuaacugauuggcaa

SEQ ID NO: 1692803 - RNA, 19 nt, Artificial Sequence
  Description of Artificial Sequence: Synthetic oligonucleotide
caaacuuccgagcgguugc

SEQ ID NO: 1692804 - RNA, 19 nt, Artificial Sequence
  Description of Artificial Sequence: Synthetic oligonucleotide
guuuaguugcacgaguaug

SEQ ID NO: 1692805 - RNA, 19 nt, Artificial Sequence
  Description of Artificial Sequence: Synthetic oligonucleotide
uccauacgccaacucuucg

SEQ ID NO: 1692806 - RNA, 19 nt, Artificial Sequence
  Description of Artificial Sequence: Synthetic oligonucleotide
ugcauugaucaaaccaagu

SEQ ID NO: 1692807 - RNA, 19 nt, Artificial Sequence
  Description of Artificial Sequence: Synthetic oligonucleotide
auuucugcgagcagaaaug

SEQ ID NO: 1692808 - RNA, 19 nt, Artificial Sequence
  Description of Artificial Sequence: Synthetic oligonucleotide
agcgacugggauuauuucu

SEQ ID NO: 1692809 - RNA, 19 nt, Artificial Sequence
  Description of Artificial Sequence: Synthetic oligonucleotide
cugcgagcagaaaugaaac

SEQ ID NO: 1692810 - RNA, 19 nt, Artificial Sequence
  Description of Artificial Sequence: Synthetic oligonucleotide
agaaaugaaacugcuuggu

SEQ ID NO: 1692811 - RNA, 19 nt, Artificial Sequence
  Description of Artificial Sequence: Synthetic oligonucleotide
ugagguuuaguugcacgag

SEQ ID NO: 1692812 - RNA, 19 nt, Artificial Sequence
  Description of Artificial Sequence: Synthetic oligonucleotide
aacggguauucacccguuc

SEQ ID NO: 1692813 - RNA, 19 nt, Artificial Sequence
  Description of Artificial Sequence: Synthetic oligonucleotide
uauucacccguucugucau

SEQ ID NO: 1692814 - RNA, 19 nt, Artificial Sequence
  Description of Artificial Sequence: Synthetic oligonucleotide
aauuuugaagccagcuccu

SEQ ID NO: 1692815 - RNA, 19 nt, Artificial Sequence
  Description of Artificial Sequence: Synthetic oligonucleotide
cucuucgguaauuagacaa

SEQ ID NO: 1692816 - RNA, 19 nt, Artificial Sequence
  Description of Artificial Sequence: Synthetic oligonucleotide
ucauacucugcagcgacug

SEQ ID NO: 1692817 - RNA, 19 nt, Artificial Sequence
  Description of Artificial Sequence: Synthetic oligonucleotide
auacucugcagcgacuggg

SEQ ID NO: 1692818 - RNA, 19 nt, Artificial Sequence
  Description of Artificial Sequence: Synthetic oligonucleotide
uguauuccggcggccagcg

SEQ ID NO: 1692819 - RNA, 19 nt, Artificial Sequence
  Description of Artificial Sequence: Synthetic oligonucleotide
uauuccggcggccagcguc

SEQ ID NO: 1692820 - RNA, 19 nt, Artificial Sequence
  Description of Artificial Sequence: Synthetic oligonucleotide
uacgccaacucuucgguaa

SEQ ID NO: 1692821 - RNA, 19 nt, Artificial Sequence
  Description of Artificial Sequence: Synthetic oligonucleotide
uaucagagcaucgcuggcc

SEQ ID NO: 1692822 - RNA, 19 nt, Artificial Sequence
  Description of Artificial Sequence: Synthetic oligonucleotide
uucuuaggaccccgcagcc

SEQ ID NO: 1692823 - RNA, 19 nt, Artificial Sequence
  Description of Artificial Sequence: Synthetic oligonucleotide
cuucgguaauuagacaagc

SEQ ID NO: 1692824 - RNA, 19 nt, Artificial Sequence
  Description of Artificial Sequence: Synthetic oligonucleotide
ucugcagcgacugggauua

SEQ ID NO: 1692825 - RNA, 19 nt, Artificial Sequence
  Description of Artificial Sequence: Synthetic oligonucleotide
uggccauugauaacauacu

SEQ ID NO: 1692826 - RNA, 19 nt, Artificial Sequence
  Description of Artificial Sequence: Synthetic oligonucleotide
guugguuauccacaucuuc

SEQ ID NO: 1692827 - RNA, 19 nt, Artificial Sequence
  Description of Artificial Sequence: Synthetic oligonucleotide
augugugcauugaucaaac

SEQ ID NO: 1692828 - RNA, 19 nt, Artificial Sequence
  Description of Artificial Sequence: Synthetic oligonucleotide
gagucuagcgaguucaacu

SEQ ID NO: 1692829 - RNA, 19 nt, Artificial Sequence
  Description of Artificial Sequence: Synthetic oligonucleotide
ugugcaguaccuucauaaa

SEQ ID NO: 1692830 - RNA, 19 nt, Artificial Sequence
  Description of Artificial Sequence: Synthetic oligonucleotide
gaggcauaguauguauucc

SEQ ID NO: 1692831 - RNA, 19 nt, Artificial Sequence
  Description of Artificial Sequence: Synthetic oligonucleotide
aaacucgaaaugagaaaga

SEQ ID NO: 1692832 - RNA, 19 nt, Artificial Sequence
  Description of Artificial Sequence: Synthetic oligonucleotide
cucugcggaacgcagcugc

SEQ ID NO: 1692833 - RNA, 19 nt, Artificial Sequence
  Description of Artificial Sequence: Synthetic oligonucleotide
agucuagcgaguucaacuu

SEQ ID NO: 1692834 - RNA, 19 nt, Artificial Sequence
  Description of Artificial Sequence: Synthetic oligonucleotide
cuuaggaccccgcagccuc

SEQ ID NO: 1692835 - RNA, 19 nt, Artificial Sequence
  Description of Artificial Sequence: Synthetic oligonucleotide
uuucugcgagcagaaauga

SEQ ID NO: 1692836 - RNA, 19 nt, Artificial Sequence
  Description of Artificial Sequence: Synthetic oligonucleotide
guacuuuaggauccggguc

SEQ ID NO: 1692837 - RNA, 19 nt, Artificial Sequence
  Description of Artificial Sequence: Synthetic oligonucleotide
ucaagacguuuuccuuggg

SEQ ID NO: 1692838 - RNA, 19 nt, Artificial Sequence
  Description of Artificial Sequence: Synthetic oligonucleotide
auuugccccagagaguuug

SEQ ID NO: 1692839 - RNA, 19 nt, Artificial Sequence
  Description of Artificial Sequence: Synthetic oligonucleotide
ugugugcauugaucaaacc

SEQ ID NO: 1692840 - RNA, 19 nt, Artificial Sequence
  Description of Artificial Sequence: Synthetic oligonucleotide
cuaacugauuggcaauauc

SEQ ID NO: 1692841 - RNA, 19 nt, Artificial Sequence
  Description of Artificial Sequence: Synthetic oligonucleotide
acuuccgagcgguugcuug

SEQ ID NO: 1692842 - RNA, 19 nt, Artificial Sequence
  Description of Artificial Sequence: Synthetic oligonucleotide
cuggcccauguuuaauucc

SEQ ID NO: 1692843 - RNA, 19 nt, Artificial Sequence
  Description of Artificial Sequence: Synthetic oligonucleotide
uuccacaaugaauccagua

SEQ ID NO: 1692844 - RNA, 19 nt, Artificial Sequence
  Description of Artificial Sequence: Synthetic oligonucleotide
cuuugcaauggaggcauag

SEQ ID NO: 1692845 - RNA, 19 nt, Artificial Sequence
  Description of Artificial Sequence: Synthetic oligonucleotide
gcauaaacaaugccuugag

SEQ ID NO: 1692846 - RNA, 19 nt, Artificial Sequence
  Description of Artificial Sequence: Synthetic oligonucleotide
ugcgagcagaaaugaaacu

SEQ ID NO: 1692847 - RNA, 19 nt, Artificial Sequence
  Description of Artificial Sequence: Synthetic oligonucleotide
guucaucguuuccagcgag

SEQ ID NO: 1692848 - RNA, 19 nt, Artificial Sequence
  Description of Artificial Sequence: Synthetic oligonucleotide
ggaggcauaguauguauuc

SEQ ID NO: 1692849 - RNA, 19 nt, Artificial Sequence
  Description of Artificial Sequence: Synthetic oligonucleotide
auccaguaaaggcuuuacu

SEQ ID NO: 1692850 - RNA, 19 nt, Artificial Sequence
  Description of Artificial Sequence: Synthetic oligonucleotide
cacggcaucaguagcuaac

SEQ ID NO: 1692851 - RNA, 19 nt, Artificial Sequence
  Description of Artificial Sequence: Synthetic oligonucleotide
ucguuuccagcgagaauca

SEQ ID NO: 1692852 - RNA, 19 nt, Artificial Sequence
  Description of Artificial Sequence: Synthetic oligonucleotide
auccgggucagaacgugcc

SEQ ID NO: 1692853 - RNA, 19 nt, Artificial Sequence
  Description of Artificial Sequence: Synthetic oligonucleotide
gucagaacgugccaguaaa

SEQ ID NO: 1692854 - RNA, 19 nt, Artificial Sequence
  Description of Artificial Sequence: Synthetic oligonucleotide
agagcucucugggcuagcc

SEQ ID NO: 1692855 - RNA, 19 nt, Artificial Sequence
  Description of Artificial Sequence: Synthetic oligonucleotide
auguauuccggcggccagc

SEQ ID NO: 1692856 - RNA, 19 nt, Artificial Sequence
  Description of Artificial Sequence: Synthetic oligonucleotide
agccucugaauuugugcag

SEQ ID NO: 1692857 - RNA, 19 nt, Artificial Sequence
  Description of Artificial Sequence: Synthetic oligonucleotide
acggguauucacccguucu

SEQ ID NO: 1692858 - RNA, 19 nt, Artificial Sequence
  Description of Artificial Sequence: Synthetic oligonucleotide
cugggcuagcccgacagcg

SEQ ID NO: 1692859 - RNA, 19 nt, Artificial Sequence
  Description of Artificial Sequence: Synthetic oligonucleotide
caauauguauuccuggggu

SEQ ID NO: 1692860 - RNA, 19 nt, Artificial Sequence
  Description of Artificial Sequence: Synthetic oligonucleotide
auaccaguuugccuucccu

SEQ ID NO: 1692861 - RNA, 19 nt, Artificial Sequence
  Description of Artificial Sequence: Synthetic oligonucleotide
uacucaucgcccuucuuuu

SEQ ID NO: 1692862 - RNA, 19 nt, Artificial Sequence
  Description of Artificial Sequence: Synthetic oligonucleotide
ggcaucaguagcuaacuga

SEQ ID NO: 1692863 - RNA, 19 nt, Artificial Sequence
  Description of Artificial Sequence: Synthetic oligonucleotide
aucgccauuucugcgagca

SEQ ID NO: 1692864 - RNA, 19 nt, Artificial Sequence
  Description of Artificial Sequence: Synthetic oligonucleotide
gcuaugaucagccucugaa

SEQ ID NO: 1692865 - RNA, 19 nt, Artificial Sequence
  Description of Artificial Sequence: Synthetic oligonucleotide
ucagaacgugccaguaaaa

SEQ ID NO: 1692866 - RNA, 19 nt, Artificial Sequence
  Description of Artificial Sequence: Synthetic oligonucleotide
ucaucguuuccagcgagaa

SEQ ID NO: 1692867 - RNA, 19 nt, Artificial Sequence
  Description of Artificial Sequence: Synthetic oligonucleotide
uaggucugguucuaucaaa

SEQ ID NO: 1692868 - RNA, 19 nt, Artificial Sequence
  Description of Artificial Sequence: Synthetic oligonucleotide
caccccuguacauccauac

SEQ ID NO: 1692869 - RNA, 19 nt, Artificial Sequence
  Description of Artificial Sequence: Synthetic oligonucleotide
cagccucugaauuugugca

SEQ ID NO: 1692870 - RNA, 19 nt, Artificial Sequence
  Description of Artificial Sequence: Synthetic oligonucleotide
gcauaguauguauuccggc

SEQ ID NO: 1692871 - RNA, 19 nt, Artificial Sequence
  Description of Artificial Sequence: Synthetic oligonucleotide
gcgagcagaaaugaaacug

SEQ ID NO: 1692872 - RNA, 19 nt, Artificial Sequence
  Description of Artificial Sequence: Synthetic oligonucleotide
cauacucugcagcgacugg

SEQ ID NO: 1692873 - RNA, 19 nt, Artificial Sequence
  Description of Artificial Sequence: Synthetic oligonucleotide
uuaguugcacgaguaugaa

SEQ ID NO: 1692874 - RNA, 19 nt, Artificial Sequence
  Description of Artificial Sequence: Synthetic oligonucleotide
acucgaaaugagaaagacu

SEQ ID NO: 1692875 - RNA, 19 nt, Artificial Sequence
  Description of Artificial Sequence: Synthetic oligonucleotide
gaaugugugcauugaucaa

SEQ ID NO: 1692876 - RNA, 19 nt, Artificial Sequence
  Description of Artificial Sequence: Synthetic oligonucleotide
gugcauugaucaaaccaag

SEQ ID NO: 1692877 - RNA, 19 nt, Artificial Sequence
  Description of Artificial Sequence: Synthetic oligonucleotide
uagcuaacugauuggcaau

SEQ ID NO: 1692878 - RNA, 19 nt, Artificial Sequence
  Description of Artificial Sequence: Synthetic oligonucleotide
cuucauaaaucugauagau

SEQ ID NO: 1692879 - RNA, 19 nt, Artificial Sequence
  Description of Artificial Sequence: Synthetic oligonucleotide
uuugccccagagaguuugc

SEQ ID NO: 1692880 - RNA, 19 nt, Artificial Sequence
  Description of Artificial Sequence: Synthetic oligonucleotide
gagcgguugcuugaaauuc

SEQ ID NO: 1692881 - RNA, 19 nt, Artificial Sequence
  Description of Artificial Sequence: Synthetic oligonucleotide
acucuucgguaauuagaca

SEQ ID NO: 1692882 - RNA, 19 nt, Artificial Sequence
  Description of Artificial Sequence: Synthetic oligonucleotide
caagcaucaaaagucccca

SEQ ID NO: 1692883 - RNA, 19 nt, Artificial Sequence
  Description of Artificial Sequence: Synthetic oligonucleotide
auccauacgccaacucuuc

SEQ ID NO: 1692884 - RNA, 19 nt, Artificial Sequence
  Description of Artificial Sequence: Synthetic oligonucleotide
ucccaggcucuuuuaauua

SEQ ID NO: 1692885 - RNA, 19 nt, Artificial Sequence
  Description of Artificial Sequence: Synthetic oligonucleotide
aguagcuaacugauuggca

SEQ ID NO: 1692886 - RNA, 19 nt, Artificial Sequence
  Description of Artificial Sequence: Synthetic oligonucleotide
ugggcuagcccgacagcgc

SEQ ID NO: 1692887 - RNA, 19 nt, Artificial Sequence
  Description of Artificial Sequence: Synthetic oligonucleotide
uucugcgagcagaaaugaa

SEQ ID NO: 1692888 - RNA, 19 nt, Artificial Sequence
  Description of Artificial Sequence: Synthetic oligonucleotide
guugcacgaguaugaagca

SEQ ID NO: 1692889 - RNA, 19 nt, Artificial Sequence
  Description of Artificial Sequence: Synthetic oligonucleotide
ugugcucacgggcuaugau

SEQ ID NO: 1692890 - RNA, 19 nt, Artificial Sequence
  Description of Artificial Sequence: Synthetic oligonucleotide
aaccaaguucccaggcucu

SEQ ID NO: 1692891 - RNA, 19 nt, Artificial Sequence
  Description of Artificial Sequence: Synthetic oligonucleotide
uaacauacucaucgcccuu

SEQ ID NO: 1692892 - RNA, 19 nt, Artificial Sequence
  Description of Artificial Sequence: Synthetic oligonucleotide
ugcggaacgcagcugccau

SEQ ID NO: 1692893 - RNA, 19 nt, Artificial Sequence
  Description of Artificial Sequence: Synthetic oligonucleotide
aaucugcacggcaucagua

SEQ ID NO: 1692894 - RNA, 19 nt, Artificial Sequence
  Description of Artificial Sequence: Synthetic oligonucleotide
gcgucaacuucccaagcag

SEQ ID NO: 1692895 - RNA, 19 nt, Artificial Sequence
  Description of Artificial Sequence: Synthetic oligonucleotide
ugagucuagcgaguucaac

SEQ ID NO: 1692896 - RNA, 19 nt, Artificial Sequence
  Description of Artificial Sequence: Synthetic oligonucleotide
uccggaaugugugcauuga

SEQ ID NO: 1692897 - RNA, 19 nt, Artificial Sequence
  Description of Artificial Sequence: Synthetic oligonucleotide
cucugaauuugugcaguac

SEQ ID NO: 1692898 - RNA, 19 nt, Artificial Sequence
  Description of Artificial Sequence: Synthetic oligonucleotide
cuccggaaugugugcauug

SEQ ID NO: 1692899 - RNA, 19 nt, Artificial Sequence
  Description of Artificial Sequence: Synthetic oligonucleotide
cccuguacauccauacgcc

SEQ ID NO: 1692900 - RNA, 19 nt, Artificial Sequence
  Description of Artificial Sequence: Synthetic oligonucleotide
guaggucugguucuaucaa

SEQ ID NO: 1692901 - RNA, 19 nt, Artificial Sequence
  Description of Artificial Sequence: Synthetic oligonucleotide
gagguuuaguugcacgagu

SEQ ID NO: 1692902 - RNA, 19 nt, Artificial Sequence
  Description of Artificial Sequence: Synthetic oligonucleotide
cucacgggcuaugaucagc

SEQ ID NO: 1692903 - RNA, 19 nt, Artificial Sequence
  Description of Artificial Sequence: Synthetic oligonucleotide
aggguauucuguauugaau

SEQ ID NO: 1692904 - RNA, 19 nt, Artificial Sequence
  Description of Artificial Sequence: Synthetic oligonucleotide
cuuguaucagagcaucgcu

SEQ ID NO: 1692905 - RNA, 19 nt, Artificial Sequence
  Description of Artificial Sequence: Synthetic oligonucleotide
ggggaacggguauucaccc

SEQ ID NO: 1692906 - RNA, 19 nt, Artificial Sequence
  Description of Artificial Sequence: Synthetic oligonucleotide
aaacuuccgagcgguugcu

SEQ ID NO: 1692907 - RNA, 19 nt, Artificial Sequence
  Description of Artificial Sequence: Synthetic oligonucleotide
cauuucugcgagcagaaau

SEQ ID NO: 1692908 - RNA, 19 nt, Artificial Sequence
  Description of Artificial Sequence: Synthetic oligonucleotide
cuguacauccauacgccaa

SEQ ID NO: 1692909 - RNA, 19 nt, Artificial Sequence
  Description of Artificial Sequence: Synthetic oligonucleotide
gguacuuuaggauccgggu

SEQ ID NO: 1692910 - RNA, 19 nt, Artificial Sequence
  Description of Artificial Sequence: Synthetic oligonucleotide
gauccgggucagaacgugc

SEQ ID NO: 1692911 - RNA, 19 nt, Artificial Sequence
  Description of Artificial Sequence: Synthetic oligonucleotide
cuagcgaguucaacuuuca

SEQ ID NO: 1692912 - RNA, 19 nt, Artificial Sequence
  Description of Artificial Sequence: Synthetic oligonucleotide
ugcaacuguaggucugguu

SEQ ID NO: 1692913 - RNA, 19 nt, Artificial Sequence
  Description of Artificial Sequence: Synthetic oligonucleotide
cuuuguagcuucguccaga

SEQ ID NO: 1692914 - RNA, 19 nt, Artificial Sequence
  Description of Artificial Sequence: Synthetic oligonucleotide
acggcaucaguagcuaacu

SEQ ID NO: 1692915 - RNA, 19 nt, Artificial Sequence
  Description of Artificial Sequence: Synthetic oligonucleotide
gccauugauaacauacuca

SEQ ID NO: 1692916 - RNA, 19 nt, Artificial Sequence
  Description of Artificial Sequence: Synthetic oligonucleotide
uagcgaguucaacuuucau

SEQ ID NO: 1692917 - RNA, 19 nt, Artificial Sequence
  Description of Artificial Sequence: Synthetic oligonucleotide
ccagcgucaacuucccaag

SEQ ID NO: 1692918 - RNA, 19 nt, Artificial Sequence
  Description of Artificial Sequence: Synthetic oligonucleotide
guauguauuccggcggcca

SEQ ID NO: 1692919 - RNA, 19 nt, Artificial Sequence
  Description of Artificial Sequence: Synthetic oligonucleotide
aaggcuuuacuaggaggua

SEQ ID NO: 1692920 - RNA, 19 nt, Artificial Sequence
  Description of Artificial Sequence: Synthetic oligonucleotide
aaguucccaggcucuuuua

SEQ ID NO: 1692921 - RNA, 19 nt, Artificial Sequence
  Description of Artificial Sequence: Synthetic oligonucleotide
ugcaccccuguacauccau

SEQ ID NO: 1692922 - RNA, 19 nt, Artificial Sequence
  Description of Artificial Sequence: Synthetic oligonucleotide
ucuuaggaccccgcagccu

SEQ ID NO: 1692923 - RNA, 19 nt, Artificial Sequence
  Description of Artificial Sequence: Synthetic oligonucleotide
uucuccggaaugugugcau

SEQ ID NO: 1692924 - RNA, 19 nt, Artificial Sequence
  Description of Artificial Sequence: Synthetic oligonucleotide
aggucugguucuaucaaaa

SEQ ID NO: 1692925 - RNA, 19 nt, Artificial Sequence
  Description of Artificial Sequence: Synthetic oligonucleotide
gacugggauuauuucuucu

SEQ ID NO: 1692926 - RNA, 19 nt, Artificial Sequence
  Description of Artificial Sequence: Synthetic oligonucleotide
agcgguugcuugaaauucu

SEQ ID NO: 1692927 - RNA, 19 nt, Artificial Sequence
  Description of Artificial Sequence: Synthetic oligonucleotide
uaacugagucuagcgaguu

SEQ ID NO: 1692928 - RNA, 19 nt, Artificial Sequence
  Description of Artificial Sequence: Synthetic oligonucleotide
uccguugguuauccacauc

SEQ ID NO: 1692929 - RNA, 19 nt, Artificial Sequence
  Description of Artificial Sequence: Synthetic oligonucleotide
gguauucacccguucuguc

SEQ ID NO: 1692930 - RNA, 19 nt, Artificial Sequence
  Description of Artificial Sequence: Synthetic oligonucleotide
gcaaacuuccgagcgguug

SEQ ID NO: 1692931 - RNA, 19 nt, Artificial Sequence
  Description of Artificial Sequence: Synthetic oligonucleotide
uugcacgaguaugaagcau

SEQ ID NO: 1692932 - RNA, 19 nt, Artificial Sequence
  Description of Artificial Sequence: Synthetic oligonucleotide
agguuuaguugcacgagua

SEQ ID NO: 1692933 - RNA, 19 nt, Artificial Sequence
  Description of Artificial Sequence: Synthetic oligonucleotide
cagcgacugggauuauuuc

SEQ ID NO: 1692934 - RNA, 19 nt, Artificial Sequence
  Description of Artificial Sequence: Synthetic oligonucleotide
cuuccgagcgguugcuuga

SEQ ID NO: 1692935 - RNA, 19 nt, Artificial Sequence
  Description of Artificial Sequence: Synthetic oligonucleotide
guagcuucguccagagcuc

SEQ ID NO: 1692936 - RNA, 19 nt, Artificial Sequence
  Description of Artificial Sequence: Synthetic oligonucleotide
aucgcuggcccauguuuaa

SEQ ID NO: 1692937 - RNA, 19 nt, Artificial Sequence
  Description of Artificial Sequence: Synthetic oligonucleotide
cauacgccaacucuucggu

SEQ ID NO: 1692938 - RNA, 19 nt, Artificial Sequence
  Description of Artificial Sequence: Synthetic oligonucleotide
cagcgucaacuucccaagc

SEQ ID NO: 1692939 - RNA, 19 nt, Artificial Sequence
  Description of Artificial Sequence: Synthetic oligonucleotide
ccacaaugaauccaguaaa

SEQ ID NO: 1692940 - RNA, 19 nt, Artificial Sequence
  Description of Artificial Sequence: Synthetic oligonucleotide
cagccucugcggaacgcag

SEQ ID NO: 1692941 - RNA, 19 nt, Artificial Sequence
  Description of Artificial Sequence: Synthetic oligonucleotide
gugcaguaccuucauaaau

SEQ ID NO: 1692942 - RNA, 19 nt, Artificial Sequence
  Description of Artificial Sequence: Synthetic oligonucleotide
ggagguacuuuaggauccg

SEQ ID NO: 1692943 - RNA, 19 nt, Artificial Sequence
  Description of Artificial Sequence: Synthetic oligonucleotide
cuaugaucagccucugaau

SEQ ID NO: 1692944 - RNA, 19 nt, Artificial Sequence
  Description of Artificial Sequence: Synthetic oligonucleotide
gagcagaaaugaaacugcu

SEQ ID NO: 1692945 - RNA, 19 nt, Artificial Sequence
  Description of Artificial Sequence: Synthetic oligonucleotide
gucauucuccccaaauacu

SEQ ID NO: 1692946 - RNA, 19 nt, Artificial Sequence
  Description of Artificial Sequence: Synthetic oligonucleotide
uagcuucguccagagcucu

SEQ ID NO: 1692947 - RNA, 19 nt, Artificial Sequence
  Description of Artificial Sequence: Synthetic oligonucleotide
agcccgacagcgccagcug

SEQ ID NO: 1692948 - RNA, 19 nt, Artificial Sequence
  Description of Artificial Sequence: Synthetic oligonucleotide
gcuggcccauguuuaauuc

SEQ ID NO: 1692949 - RNA, 19 nt, Artificial Sequence
  Description of Artificial Sequence: Synthetic oligonucleotide
cauccauacgccaacucuu

SEQ ID NO: 1692950 - RNA, 19 nt, Artificial Sequence
  Description of Artificial Sequence: Synthetic oligonucleotide
ugcacggcaucaguagcua

SEQ ID NO: 1692951 - RNA, 19 nt, Artificial Sequence
  Description of Artificial Sequence: Synthetic oligonucleotide
ggaccccgcagccucugcg

SEQ ID NO: 1692952 - RNA, 19 nt, Artificial Sequence
  Description of Artificial Sequence: Synthetic oligonucleotide
ggcacacaucauuggcugc

SEQ ID NO: 1692953 - RNA, 19 nt, Artificial Sequence
  Description of Artificial Sequence: Synthetic oligonucleotide
gccagcgucaacuucccaa

SEQ ID NO: 1692954 - RNA, 19 nt, Artificial Sequence
  Description of Artificial Sequence: Synthetic oligonucleotide
cgucaacuucccaagcagc

SEQ ID NO: 1692955 - RNA, 19 nt, Artificial Sequence
  Description of Artificial Sequence: Synthetic oligonucleotide
ucuccggaaugugugcauu

SEQ ID NO: 1692956 - RNA, 19 nt, Artificial Sequence
  Description of Artificial Sequence: Synthetic oligonucleotide
auacgccaacucuucggua

SEQ ID NO: 1692957 - RNA, 19 nt, Artificial Sequence
  Description of Artificial Sequence: Synthetic oligonucleotide
gggcuagcccgacagcgcc

SEQ ID NO: 1692958 - RNA, 19 nt, Artificial Sequence
  Description of Artificial Sequence: Synthetic oligonucleotide
cggaaugugugcauugauc

SEQ ID NO: 1692959 - RNA, 19 nt, Artificial Sequence
  Description of Artificial Sequence: Synthetic oligonucleotide
ggaacggguauucacccgu

SEQ ID NO: 1692960 - RNA, 19 nt, Artificial Sequence
  Description of Artificial Sequence: Synthetic oligonucleotide
cccuccguugguuauccac

SEQ ID NO: 1692961 - RNA, 19 nt, Artificial Sequence
  Description of Artificial Sequence: Synthetic oligonucleotide
ugcaaacuuccgagcgguu

SEQ ID NO: 1692962 - RNA, 19 nt, Artificial Sequence
  Description of Artificial Sequence: Synthetic oligonucleotide
caagaccaccacaguucuc

SEQ ID NO: 1692963 - RNA, 19 nt, Artificial Sequence
  Description of Artificial Sequence: Synthetic oligonucleotide
acgccaacucuucgguaau

SEQ ID NO: 1692964 - RNA, 19 nt, Artificial Sequence
  Description of Artificial Sequence: Synthetic oligonucleotide
ccagcgagaaucacaggca

SEQ ID NO: 1692965 - RNA, 19 nt, Artificial Sequence
  Description of Artificial Sequence: Synthetic oligonucleotide
auuccggcggccagcguca

SEQ ID NO: 1692966 - RNA, 19 nt, Artificial Sequence
  Description of Artificial Sequence: Synthetic oligonucleotide
uccgagcgguugcuugaaa

SEQ ID NO: 1692967 - RNA, 19 nt, Artificial Sequence
  Description of Artificial Sequence: Synthetic oligonucleotide
agccacgucagagccugcu

SEQ ID NO: 1692968 - RNA, 19 nt, Artificial Sequence
  Description of Artificial Sequence: Synthetic oligonucleotide
auggcaguuugcaccccug

SEQ ID NO: 1692969 - RNA, 19 nt, Artificial Sequence
  Description of Artificial Sequence: Synthetic oligonucleotide
agagcaucgcuggcccaug

SEQ ID NO: 1692970 - RNA, 19 nt, Artificial Sequence
  Description of Artificial Sequence: Synthetic oligonucleotide
ccuccguugguuauccaca

SEQ ID NO: 1692971 - RNA, 19 nt, Artificial Sequence
  Description of Artificial Sequence: Synthetic oligonucleotide
ggucagaacgugccaguaa

SEQ ID NO: 1692972 - RNA, 19 nt, Artificial Sequence
  Description of Artificial Sequence: Synthetic oligonucleotide
ccguugguuauccacaucu

SEQ ID NO: 1692973 - RNA, 19 nt, Artificial Sequence
  Description of Artificial Sequence: Synthetic oligonucleotide
agcaucgcuggcccauguu

SEQ ID NO: 1692974 - RNA, 19 nt, Artificial Sequence
  Description of Artificial Sequence: Synthetic oligonucleotide
uugggcacucugacaucuu

SEQ ID NO: 1692975 - RNA, 19 nt, Artificial Sequence
  Description of Artificial Sequence: Synthetic oligonucleotide
agcuucguccagagcucuc

SEQ ID NO: 1692976 - RNA, 19 nt, Artificial Sequence
  Description of Artificial Sequence: Synthetic oligonucleotide
uuccgagcgguugcuugaa

SEQ ID NO: 1692977 - RNA, 19 nt, Artificial Sequence
  Description of Artificial Sequence: Synthetic oligonucleotide
ggauccgggucagaacgug

SEQ ID NO: 1692978 - RNA, 19 nt, Artificial Sequence
  Description of Artificial Sequence: Synthetic oligonucleotide
cacgaguaugaagcaucuc

SEQ ID NO: 1692979 - RNA, 19 nt, Artificial Sequence
  Description of Artificial Sequence: Synthetic oligonucleotide
aacuuccgagcgguugcuu

SEQ ID NO: 1692980 - RNA, 19 nt, Artificial Sequence
  Description of Artificial Sequence: Synthetic oligonucleotide
gguuuaguugcacgaguau

SEQ ID NO: 1692981 - RNA, 19 nt, Artificial Sequence
  Description of Artificial Sequence: Synthetic oligonucleotide
ugcagcgacugggauuauu

SEQ ID NO: 1692982 - RNA, 19 nt, Artificial Sequence
  Description of Artificial Sequence: Synthetic oligonucleotide
cugagucuagcgaguucaa

SEQ ID NO: 1692983 - RNA, 19 nt, Artificial Sequence
  Description of Artificial Sequence: Synthetic oligonucleotide
uaggaccccgcagccucug

SEQ ID NO: 1692984 - RNA, 19 nt, Artificial Sequence
  Description of Artificial Sequence: Synthetic oligonucleotide
guucaacuuucaucgccau

SEQ ID NO: 1692985 - RNA, 19 nt, Artificial Sequence
  Description of Artificial Sequence: Synthetic oligonucleotide
gcuagcccgacagcgccag

SEQ ID NO: 1692986 - RNA, 19 nt, Artificial Sequence
  Description of Artificial Sequence: Synthetic oligonucleotide
gcauuugccccagagaguu

SEQ ID NO: 1692987 - RNA, 19 nt, Artificial Sequence
  Description of Artificial Sequence: Synthetic oligonucleotide
agcgagaaucacaggcauu

SEQ ID NO: 1692988 - RNA, 19 nt, Artificial Sequence
  Description of Artificial Sequence: Synthetic oligonucleotide
ucgcuggcccauguuuaau

SEQ ID NO: 1692989 - RNA, 19 nt, Artificial Sequence
  Description of Artificial Sequence: Synthetic oligonucleotide
cuuuacuaggagguacuuu

SEQ ID NO: 1692990 - RNA, 19 nt, Artificial Sequence
  Description of Artificial Sequence: Synthetic oligonucleotide
cucucugggcuagcccgac

SEQ ID NO: 1692991 - RNA, 19 nt, Artificial Sequence
  Description of Artificial Sequence: Synthetic oligonucleotide
ccacgucagagccugcuga

SEQ ID NO: 1692992 - RNA, 19 nt, Artificial Sequence
  Description of Artificial Sequence: Synthetic oligonucleotide
gcucacgggcuaugaucag

SEQ ID NO: 1692993 - RNA, 19 nt, Artificial Sequence
  Description of Artificial Sequence: Synthetic oligonucleotide
cagcgagaaucacaggcau

SEQ ID NO: 1692994 - RNA, 19 nt, Artificial Sequence
  Description of Artificial Sequence: Synthetic oligonucleotide
ccgggucagaacgugccag

SEQ ID NO: 1692995 - RNA, 19 nt, Artificial Sequence
  Description of Artificial Sequence: Synthetic oligonucleotide
gucuagcgaguucaacuuu

SEQ ID NO: 1692996 - RNA, 19 nt, Artificial Sequence
  Description of Artificial Sequence: Synthetic oligonucleotide
cuagcccgacagcgccagc

SEQ ID NO: 1692997 - RNA, 19 nt, Artificial Sequence
  Description of Artificial Sequence: Synthetic oligonucleotide
ccuugagguuuaguugcac

SEQ ID NO: 1692998 - RNA, 19 nt, Artificial Sequence
  Description of Artificial Sequence: Synthetic oligonucleotide
cuccguugguuauccacau

SEQ ID NO: 1692999 - RNA, 19 nt, Artificial Sequence
  Description of Artificial Sequence: Synthetic oligonucleotide
gcggaacgcagcugccaug

SEQ ID NO: 1693000 - RNA, 19 nt, Artificial Sequence
  Description of Artificial Sequence: Synthetic oligonucleotide
ggguauucacccguucugu

SEQ ID NO: 1693001 - RNA, 19 nt, Artificial Sequence
  Description of Artificial Sequence: Synthetic oligonucleotide
caguuugccuucccuccgu

SEQ ID NO: 1693002 - RNA, 19 nt, Artificial Sequence
  Description of Artificial Sequence: Synthetic oligonucleotide
caucguuuccagcgagaau

SEQ ID NO: 1693003 - RNA, 19 nt, Artificial Sequence
  Description of Artificial Sequence: Synthetic oligonucleotide
ggcggccagcgucaacuuc

SEQ ID NO: 1693004 - RNA, 19 nt, Artificial Sequence
  Description of Artificial Sequence: Synthetic oligonucleotide
gcagcgacugggauuauuu

SEQ ID NO: 1693005 - RNA, 19 nt, Artificial Sequence
  Description of Artificial Sequence: Synthetic oligonucleotide
gcgacugggauuauuucuu

SEQ ID NO: 1693006 - RNA, 19 nt, Artificial Sequence
  Description of Artificial Sequence: Synthetic oligonucleotide
gcuucguccagagcucucu

SEQ ID NO: 1693007 - RNA, 19 nt, Artificial Sequence
  Description of Artificial Sequence: Synthetic oligonucleotide
caccacaguucuccggaau

SEQ ID NO: 1693008 - RNA, 19 nt, Artificial Sequence
  Description of Artificial Sequence: Synthetic oligonucleotide
gcuaacugauuggcaauau

SEQ ID NO: 1693009 - RNA, 19 nt, Artificial Sequence
  Description of Artificial Sequence: Synthetic oligonucleotide
gaacggguauucacccguu

SEQ ID NO: 1693010 - RNA, 19 nt, Artificial Sequence
  Description of Artificial Sequence: Synthetic oligonucleotide
gccuugagguuuaguugca

SEQ ID NO: 1693011 - RNA, 19 nt, Artificial Sequence
  Description of Artificial Sequence: Synthetic oligonucleotide
gcauacuuuguagcuucgu

SEQ ID NO: 1693012 - RNA, 19 nt, Artificial Sequence
  Description of Artificial Sequence: Synthetic oligonucleotide
gcacggcaucaguagcuaa

SEQ ID NO: 1693013 - RNA, 19 nt, Artificial Sequence
  Description of Artificial Sequence: Synthetic oligonucleotide
cagagcaucgcuggcccau

SEQ ID NO: 1693014 - RNA, 19 nt, Artificial Sequence
  Description of Artificial Sequence: Synthetic oligonucleotide
gggucagaacgugccagua

SEQ ID NO: 1693015 - RNA, 19 nt, Artificial Sequence
  Description of Artificial Sequence: Synthetic oligonucleotide
cagcuccuucagcaaucaa

SEQ ID NO: 1693016 - RNA, 19 nt, Artificial Sequence
  Description of Artificial Sequence: Synthetic oligonucleotide
cacgggcuaugaucagccu

SEQ ID NO: 1693017 - RNA, 19 nt, Artificial Sequence
  Description of Artificial Sequence: Synthetic oligonucleotide
cggaacgcagcugccauga

SEQ ID NO: 1693018 - RNA, 19 nt, Artificial Sequence
  Description of Artificial Sequence: Synthetic oligonucleotide
gcucucugggcuagcccga

SEQ ID NO: 1693019 - RNA, 19 nt, Artificial Sequence
  Description of Artificial Sequence: Synthetic oligonucleotide
ccgagcgguugcuugaaau

SEQ ID NO: 1693020 - RNA, 19 nt, Artificial Sequence
  Description of Artificial Sequence: Synthetic oligonucleotide
cguuuccagcgagaaucac

SEQ ID NO: 1693021 - RNA, 19 nt, Artificial Sequence
  Description of Artificial Sequence: Synthetic oligonucleotide
cuucagcaaucaagacguu

SEQ ID NO: 1693022 - RNA, 19 nt, Artificial Sequence
  Description of Artificial Sequence: Synthetic oligonucleotide
uuccggcggccagcgucaa

SEQ ID NO: 1693023 - RNA, 19 nt, Artificial Sequence
  Description of Artificial Sequence: Synthetic oligonucleotide
cauuugccccagagaguuu

SEQ ID NO: 1693024 - RNA, 19 nt, Artificial Sequence
  Description of Artificial Sequence: Synthetic oligonucleotide
ggcuagcccgacagcgcca

SEQ ID NO: 1693025 - RNA, 19 nt, Artificial Sequence
  Description of Artificial Sequence: Synthetic oligonucleotide
gcuuuacuaggagguacuu

SEQ ID NO: 1693026 - RNA, 19 nt, Artificial Sequence
  Description of Artificial Sequence: Synthetic oligonucleotide
guauuccggcggccagcgu

SEQ ID NO: 1693027 - RNA, 19 nt, Artificial Sequence
  Description of Artificial Sequence: Synthetic oligonucleotide
cgagcgguugcuugaaauu

SEQ ID NO: 1693028 - RNA, 19 nt, Artificial Sequence
  Description of Artificial Sequence: Synthetic oligonucleotide
ccuggggugucagcuucca

SEQ ID NO: 1693029 - RNA, 19 nt, Artificial Sequence
  Description of Artificial Sequence: Synthetic oligonucleotide
ccagagaguuugcuucaau

SEQ ID NO: 1693030 - RNA, 19 nt, Artificial Sequence
  Description of Artificial Sequence: Synthetic oligonucleotide
gcgguugcuugaaauucuu

SEQ ID NO: 1693031 - RNA, 19 nt, Artificial Sequence
  Description of Artificial Sequence: Synthetic oligonucleotide
ccuucccuccguugguuau

SEQ ID NO: 1693032 - RNA, 19 nt, Artificial Sequence
  Description of Artificial Sequence: Synthetic oligonucleotide
ggaacgcagcugccaugau

SEQ ID NO: 1693033 - RNA, 19 nt, Artificial Sequence
  Description of Artificial Sequence: Synthetic oligonucleotide
ccuuugcaauggaggcaua

SEQ ID NO: 1693034 - RNA, 19 nt, Artificial Sequence
  Description of Artificial Sequence: Synthetic oligonucleotide
cguugguuauccacaucuu

SEQ ID NO: 1693035 - RNA, 19 nt, Artificial Sequence
  Description of Artificial Sequence: Synthetic oligonucleotide
cgggucagaacgugccagu

SEQ ID NO: 1693036 - RNA, 19 nt, Artificial Sequence
  Description of Artificial Sequence: Synthetic oligonucleotide
cgcuggcccauguuuaauu

SEQ ID NO: 1693037 - RNA, 19 nt, Artificial Sequence
  Description of Artificial Sequence: Synthetic oligonucleotide
ccaaguucccaggcucuuu

SEQ ID NO: 1693038 - RNA, 19 nt, Artificial Sequence
  Description of Artificial Sequence: Synthetic oligonucleotide
cugcagcgacugggauuau

SEQ ID NO: 1693039 - RNA, 19 nt, Artificial Sequence
  Description of Artificial Sequence: Synthetic oligonucleotide
acauacgagagccagaugc

SEQ ID NO: 1693040 - RNA, 19 nt, Artificial Sequence
  Description of Artificial Sequence: Synthetic oligonucleotide
ucaagaauuuccuagaggc

SEQ ID NO: 1693041 - RNA, 19 nt, Artificial Sequence
  Description of Artificial Sequence: Synthetic oligonucleotide
ugaaagaucccuaugauac

SEQ ID NO: 1693042 - RNA, 19 nt, Artificial Sequence
  Description of Artificial Sequence: Synthetic oligonucleotide
aagggugucccuuucaccg

SEQ ID NO: 1693043 - RNA, 19 nt, Artificial Sequence
  Description of Artificial Sequence: Synthetic oligonucleotide
acagcaaaggccuucuacc

SEQ ID NO: 1693044 - RNA, 19 nt, Artificial Sequence
  Description of Artificial Sequence: Synthetic oligonucleotide
aucccuaugauacaugggg

SEQ ID NO: 1693045 - RNA, 19 nt, Artificial Sequence
  Description of Artificial Sequence: Synthetic oligonucleotide
uacucaaaaggcaaaagga

SEQ ID NO: 1693046 - RNA, 19 nt, Artificial Sequence
  Description of Artificial Sequence: Synthetic oligonucleotide
uugagaaugagggucaggg

SEQ ID NO: 1693047 - RNA, 19 nt, Artificial Sequence
  Description of Artificial Sequence: Synthetic oligonucleotide
caauacauacaaaagugag

SEQ ID NO: 1693048 - RNA, 19 nt, Artificial Sequence
  Description of Artificial Sequence: Synthetic oligonucleotide
aaaggaacaugccccaguc

SEQ ID NO: 1693049 - RNA, 19 nt, Artificial Sequence
  Description of Artificial Sequence: Synthetic oligonucleotide
uaaacaagccaacaggggu

SEQ ID NO: 1693050 - RNA, 19 nt, Artificial Sequence
  Description of Artificial Sequence: Synthetic oligonucleotide
acaugcaggaguccgaugg

SEQ ID NO: 1693051 - RNA, 19 nt, Artificial Sequence
  Description of Artificial Sequence: Synthetic oligonucleotide
aguguugaguaugaaaugg

SEQ ID NO: 1693052 - RNA, 19 nt, Artificial Sequence
  Description of Artificial Sequence: Synthetic oligonucleotide
aaaacuucagaauggguua

SEQ ID NO: 1693053 - RNA, 19 nt, Artificial Sequence
  Description of Artificial Sequence: Synthetic oligonucleotide
acauacaaaagugagucuc

SEQ ID NO: 1693054 - RNA, 19 nt, Artificial Sequence
  Description of Artificial Sequence: Synthetic oligonucleotide
aaauccuauucacacuuug

SEQ ID NO: 1693055 - RNA, 19 nt, Artificial Sequence
  Description of Artificial Sequence: Synthetic oligonucleotide
aauccuauucacacuuugc

SEQ ID NO: 1693056 - RNA, 19 nt, Artificial Sequence
  Description of Artificial Sequence: Synthetic oligonucleotide
cacacucaaagacugaggg

SEQ ID NO: 1693057 - RNA, 19 nt, Artificial Sequence
  Description of Artificial Sequence: Synthetic oligonucleotide
agaucccuaugauacaugg

SEQ ID NO: 1693058 - RNA, 19 nt, Artificial Sequence
  Description of Artificial Sequence: Synthetic oligonucleotide
uacaagcuacuccaagucg

SEQ ID NO: 1693059 - RNA, 19 nt, Artificial Sequence
  Description of Artificial Sequence: Synthetic oligonucleotide
aaagaccacaaggugaaag

SEQ ID NO: 1693060 - RNA, 19 nt, Artificial Sequence
  Description of Artificial Sequence: Synthetic oligonucleotide
uuggugaggguccagacga

SEQ ID NO: 1693061 - RNA, 19 nt, Artificial Sequence
  Description of Artificial Sequence: Synthetic oligonucleotide
gcuuagaaagaccacaagg

SEQ ID NO: 1693062 - RNA, 19 nt, Artificial Sequence
  Description of Artificial Sequence: Synthetic oligonucleotide
gacagggacgcucacaaag

SEQ ID NO: 1693063 - RNA, 19 nt, Artificial Sequence
  Description of Artificial Sequence: Synthetic oligonucleotide
uccuauagcacuguggagc

SEQ ID NO: 1693064 - RNA, 19 nt, Artificial Sequence
  Description of Artificial Sequence: Synthetic oligonucleotide
uuugcuuagaaagaccaca

SEQ ID NO: 1693065 - RNA, 19 nt, Artificial Sequence
  Description of Artificial Sequence: Synthetic oligonucleotide
aacaugccccagucgaacc

SEQ ID NO: 1693066 - RNA, 19 nt, Artificial Sequence
  Description of Artificial Sequence: Synthetic oligonucleotide
cuuagucagacucugugag

SEQ ID NO: 1693067 - RNA, 19 nt, Artificial Sequence
  Description of Artificial Sequence: Synthetic oligonucleotide
acuagugcccuguuugggc

SEQ ID NO: 1693068 - RNA, 19 nt, Artificial Sequence
  Description of Artificial Sequence: Synthetic oligonucleotide
gauccuauagcacugugga

SEQ ID NO: 1693069 - RNA, 19 nt, Artificial Sequence
  Description of Artificial Sequence: Synthetic oligonucleotide
aagaccacaaggugaaaga

SEQ ID NO: 1693070 - RNA, 19 nt, Artificial Sequence
  Description of Artificial Sequence: Synthetic oligonucleotide
ggcaucucuacucaaaagg

SEQ ID NO: 1693071 - RNA, 19 nt, Artificial Sequence
  Description of Artificial Sequence: Synthetic oligonucleotide
aauacauacaaaagugagu

SEQ ID NO: 1693072 - RNA, 19 nt, Artificial Sequence
  Description of Artificial Sequence: Synthetic oligonucleotide
aauccggacuccauggagc

SEQ ID NO: 1693073 - RNA, 19 nt, Artificial Sequence
  Description of Artificial Sequence: Synthetic oligonucleotide
uggguuagagcccaagggc

SEQ ID NO: 1693074 - RNA, 19 nt, Artificial Sequence
  Description of Artificial Sequence: Synthetic oligonucleotide
aagauguacaugcccaagu

SEQ ID NO: 1693075 - RNA, 19 nt, Artificial Sequence
  Description of Artificial Sequence: Synthetic oligonucleotide
ggaaguacagcacaaucgg

SEQ ID NO: 1693076 - RNA, 19 nt, Artificial Sequence
  Description of Artificial Sequence: Synthetic oligonucleotide
uguugaguaugaaauggac

SEQ ID NO: 1693077 - RNA, 19 nt, Artificial Sequence
  Description of Artificial Sequence: Synthetic oligonucleotide
agucucaccccacacacuc

SEQ ID NO: 1693078 - RNA, 19 nt, Artificial Sequence
  Description of Artificial Sequence: Synthetic oligonucleotide
cauuccaauacauacaaaa

SEQ ID NO: 1693079 - RNA, 19 nt, Artificial Sequence
  Description of Artificial Sequence: Synthetic oligonucleotide
agugacuucccuccauccc

SEQ ID NO: 1693080 - RNA, 19 nt, Artificial Sequence
  Description of Artificial Sequence: Synthetic oligonucleotide
uggauaagguuggugaggg

SEQ ID NO: 1693081 - RNA, 19 nt, Artificial Sequence
  Description of Artificial Sequence: Synthetic oligonucleotide
ugagucucaccccacacac

SEQ ID NO: 1693082 - RNA, 19 nt, Artificial Sequence
  Description of Artificial Sequence: Synthetic oligonucleotide
aggaaguacagcacaaucg

SEQ ID NO: 1693083 - RNA, 19 nt, Artificial Sequence
  Description of Artificial Sequence: Synthetic oligonucleotide
aggguaaacaagccaacag

SEQ ID NO: 1693084 - RNA, 19 nt, Artificial Sequence
  Description of Artificial Sequence: Synthetic oligonucleotide
aauggacuuggucauacuu

SEQ ID NO: 1693085 - RNA, 19 nt, Artificial Sequence
  Description of Artificial Sequence: Synthetic oligonucleotide
aaccucaguacuuauugau

SEQ ID NO: 1693086 - RNA, 19 nt, Artificial Sequence
  Description of Artificial Sequence: Synthetic oligonucleotide
uggccauuccaauacauac

SEQ ID NO: 1693087 - RNA, 19 nt, Artificial Sequence
  Description of Artificial Sequence: Synthetic oligonucleotide
gugauaguccaucugcucc

SEQ ID NO: 1693088 - RNA, 19 nt, Artificial Sequence
  Description of Artificial Sequence: Synthetic oligonucleotide
ugccugaggguaaacaagc

SEQ ID NO: 1693089 - RNA, 19 nt, Artificial Sequence
  Description of Artificial Sequence: Synthetic oligonucleotide
auaagguuggugagggucc

SEQ ID NO: 1693090 - RNA, 19 nt, Artificial Sequence
  Description of Artificial Sequence: Synthetic oligonucleotide
gauguacaugcccaaguug

SEQ ID NO: 1693091 - RNA, 19 nt, Artificial Sequence
  Description of Artificial Sequence: Synthetic oligonucleotide
ugauggucaagaauuuccu

SEQ ID NO: 1693092 - RNA, 19 nt, Artificial Sequence
  Description of Artificial Sequence: Synthetic oligonucleotide
auccuauucacacuuugcu

SEQ ID NO: 1693093 - RNA, 19 nt, Artificial Sequence
  Description of Artificial Sequence: Synthetic oligonucleotide
uagucagacucugugagcc

SEQ ID NO: 1693094 - RNA, 19 nt, Artificial Sequence
  Description of Artificial Sequence: Synthetic oligonucleotide
acacuuugcuuagaaagac

SEQ ID NO: 1693095 - RNA, 19 nt, Artificial Sequence
  Description of Artificial Sequence: Synthetic oligonucleotide
aggaacaugccccagucga

SEQ ID NO: 1693096 - RNA, 19 nt, Artificial Sequence
  Description of Artificial Sequence: Synthetic oligonucleotide
cagugggucagcaaccugg

SEQ ID NO: 1693097 - RNA, 19 nt, Artificial Sequence
  Description of Artificial Sequence: Synthetic oligonucleotide
cucucaggggcuaaagugc

SEQ ID NO: 1693098 - RNA, 19 nt, Artificial Sequence
  Description of Artificial Sequence: Synthetic oligonucleotide
uuuccuggcuuccuguccc

SEQ ID NO: 1693099 - RNA, 19 nt, Artificial Sequence
  Description of Artificial Sequence: Synthetic oligonucleotide
gauaagguuggugaggguc

SEQ ID NO: 1693100 - RNA, 19 nt, Artificial Sequence
  Description of Artificial Sequence: Synthetic oligonucleotide
ugugagccaccucucuucg

SEQ ID NO: 1693101 - RNA, 19 nt, Artificial Sequence
  Description of Artificial Sequence: Synthetic oligonucleotide
acaagcuacuccaagucgg

SEQ ID NO: 1693102 - RNA, 19 nt, Artificial Sequence
  Description of Artificial Sequence: Synthetic oligonucleotide
cuccaagucggcuacuggg

SEQ ID NO: 1693103 - RNA, 19 nt, Artificial Sequence
  Description of Artificial Sequence: Synthetic oligonucleotide
agcuuagucagacucugug

SEQ ID NO: 1693104 - RNA, 19 nt, Artificial Sequence
  Description of Artificial Sequence: Synthetic oligonucleotide
caugggguugagaaugagg

SEQ ID NO: 1693105 - RNA, 19 nt, Artificial Sequence
  Description of Artificial Sequence: Synthetic oligonucleotide
cuuagaaagaccacaaggu

SEQ ID NO: 1693106 - RNA, 19 nt, Artificial Sequence
  Description of Artificial Sequence: Synthetic oligonucleotide
augagcacacucaucaagg

SEQ ID NO: 1693107 - RNA, 19 nt, Artificial Sequence
  Description of Artificial Sequence: Synthetic oligonucleotide
agugagucucaccccacac

SEQ ID NO: 1693108 - RNA, 19 nt, Artificial Sequence
  Description of Artificial Sequence: Synthetic oligonucleotide
aaagaucccuaugauacau

SEQ ID NO: 1693109 - RNA, 19 nt, Artificial Sequence
  Description of Artificial Sequence: Synthetic oligonucleotide
aaacuucagaauggguuag

SEQ ID NO: 1693110 - RNA, 19 nt, Artificial Sequence
  Description of Artificial Sequence: Synthetic oligonucleotide
gucgaaccaaaccagcgag

SEQ ID NO: 1693111 - RNA, 19 nt, Artificial Sequence
  Description of Artificial Sequence: Synthetic oligonucleotide
guaaacaagccaacagggg

SEQ ID NO: 1693112 - RNA, 19 nt, Artificial Sequence
  Description of Artificial Sequence: Synthetic oligonucleotide
gugauggucaagaauuucc

SEQ ID NO: 1693113 - RNA, 19 nt, Artificial Sequence
  Description of Artificial Sequence: Synthetic oligonucleotide
uacaaaagugagucucacc

SEQ ID NO: 1693114 - RNA, 19 nt, Artificial Sequence
  Description of Artificial Sequence: Synthetic oligonucleotide
aaaauccggacuccaugga

SEQ ID NO: 1693115 - RNA, 19 nt, Artificial Sequence
  Description of Artificial Sequence: Synthetic oligonucleotide
ucgaaccaaaccagcgagg

SEQ ID NO: 1693116 - RNA, 19 nt, Artificial Sequence
  Description of Artificial Sequence: Synthetic oligonucleotide
agcagcacgacaugcagga

SEQ ID NO: 1693117 - RNA, 19 nt, Artificial Sequence
  Description of Artificial Sequence: Synthetic oligonucleotide
cauacgagagccagaugcc

SEQ ID NO: 1693118 - RNA, 19 nt, Artificial Sequence
  Description of Artificial Sequence: Synthetic oligonucleotide
acuuugcuuagaaagacca

SEQ ID NO: 1693119 - RNA, 19 nt, Artificial Sequence
  Description of Artificial Sequence: Synthetic oligonucleotide
auacaaaagugagucucac

SEQ ID NO: 1693120 - RNA, 19 nt, Artificial Sequence
  Description of Artificial Sequence: Synthetic oligonucleotide
uucugagguccacagucag

SEQ ID NO: 1693121 - RNA, 19 nt, Artificial Sequence
  Description of Artificial Sequence: Synthetic oligonucleotide
auuuccuagaggcugugau

SEQ ID NO: 1693122 - RNA, 19 nt, Artificial Sequence
  Description of Artificial Sequence: Synthetic oligonucleotide
uauagcacuguggagccca

SEQ ID NO: 1693123 - RNA, 19 nt, Artificial Sequence
  Description of Artificial Sequence: Synthetic oligonucleotide
aguacuuauugauuccaaa

SEQ ID NO: 1693124 - RNA, 19 nt, Artificial Sequence
  Description of Artificial Sequence: Synthetic oligonucleotide
cagucgaaccaaaccagcg

SEQ ID NO: 1693125 - RNA, 19 nt, Artificial Sequence
  Description of Artificial Sequence: Synthetic oligonucleotide
gaaguacagcacaaucggg

SEQ ID NO: 1693126 - RNA, 19 nt, Artificial Sequence
  Description of Artificial Sequence: Synthetic oligonucleotide
aguacagcacaaucggggu

SEQ ID NO: 1693127 - RNA, 19 nt, Artificial Sequence
  Description of Artificial Sequence: Synthetic oligonucleotide
uucagcuuagucagacucu

SEQ ID NO: 1693128 - RNA, 19 nt, Artificial Sequence
  Description of Artificial Sequence: Synthetic oligonucleotide
uguacaugcccaaguugug

SEQ ID NO: 1693129 - RNA, 19 nt, Artificial Sequence
  Description of Artificial Sequence: Synthetic oligonucleotide
ucagccggaaagcccagcc

SEQ ID NO: 1693130 - RNA, 19 nt, Artificial Sequence
  Description of Artificial Sequence: Synthetic oligonucleotide
ugcagaagccguaccgucc

SEQ ID NO: 1693131 - RNA, 19 nt, Artificial Sequence
  Description of Artificial Sequence: Synthetic oligonucleotide
agcacacucaucaaggaca

SEQ ID NO: 1693132 - RNA, 19 nt, Artificial Sequence
  Description of Artificial Sequence: Synthetic oligonucleotide
auguacaugcccaaguugu

SEQ ID NO: 1693133 - RNA, 19 nt, Artificial Sequence
  Description of Artificial Sequence: Synthetic oligonucleotide
uacaugcccaaguugugga

SEQ ID NO: 1693134 - RNA, 19 nt, Artificial Sequence
  Description of Artificial Sequence: Synthetic oligonucleotide
agccguaccgucccucugc

SEQ ID NO: 1693135 - RNA, 19 nt, Artificial Sequence
  Description of Artificial Sequence: Synthetic oligonucleotide
uccaagucggcuacuggga

SEQ ID NO: 1693136 - RNA, 19 nt, Artificial Sequence
  Description of Artificial Sequence: Synthetic oligonucleotide
cuacaagcuacuccaaguc

SEQ ID NO: 1693137 - RNA, 19 nt, Artificial Sequence
  Description of Artificial Sequence: Synthetic oligonucleotide
ugaguaugaaauggacuug

SEQ ID NO: 1693138 - RNA, 19 nt, Artificial Sequence
  Description of Artificial Sequence: Synthetic oligonucleotide
cacuuugcuuagaaagacc

SEQ ID NO: 1693139 - RNA, 19 nt, Artificial Sequence
  Description of Artificial Sequence: Synthetic oligonucleotide
agcaaccuggcuuugcccu

SEQ ID NO: 1693140 - RNA, 19 nt, Artificial Sequence
  Description of Artificial Sequence: Synthetic oligonucleotide
agucgaaccaaaccagcga

SEQ ID NO: 1693141 - RNA, 19 nt, Artificial Sequence
  Description of Artificial Sequence: Synthetic oligonucleotide
gaagauguacaugcccaag

SEQ ID NO: 1693142 - RNA, 19 nt, Artificial Sequence
  Description of Artificial Sequence: Synthetic oligonucleotide
aggggcuaaagugcuaugg

SEQ ID NO: 1693143 - RNA, 19 nt, Artificial Sequence
  Description of Artificial Sequence: Synthetic oligonucleotide
ucccuaugauacauggggu

SEQ ID NO: 1693144 - RNA, 19 nt, Artificial Sequence
  Description of Artificial Sequence: Synthetic oligonucleotide
uaaccccacuacaagcuac

SEQ ID NO: 1693145 - RNA, 19 nt, Artificial Sequence
  Description of Artificial Sequence: Synthetic oligonucleotide
ugugauaguccaucugcuc

SEQ ID NO: 1693146 - RNA, 19 nt, Artificial Sequence
  Description of Artificial Sequence: Synthetic oligonucleotide
augcagaagccguaccguc

SEQ ID NO: 1693147 - RNA, 19 nt, Artificial Sequence
  Description of Artificial Sequence: Synthetic oligonucleotide
acgagagccagaugccgcg

SEQ ID NO: 1693148 - RNA, 19 nt, Artificial Sequence
  Description of Artificial Sequence: Synthetic oligonucleotide
cugaggguaaacaagccaa

SEQ ID NO: 1693149 - RNA, 19 nt, Artificial Sequence
  Description of Artificial Sequence: Synthetic oligonucleotide
acagucagccggaaagccc

SEQ ID NO: 1693150 - RNA, 19 nt, Artificial Sequence
  Description of Artificial Sequence: Synthetic oligonucleotide
uucaccucacugugugccg

SEQ ID NO: 1693151 - RNA, 19 nt, Artificial Sequence
  Description of Artificial Sequence: Synthetic oligonucleotide
aaauggacuuggucauacu

SEQ ID NO: 1693152 - RNA, 19 nt, Artificial Sequence
  Description of Artificial Sequence: Synthetic oligonucleotide
guacaugcccaaguugugg

SEQ ID NO: 1693153 - RNA, 19 nt, Artificial Sequence
  Description of Artificial Sequence: Synthetic oligonucleotide
ucucuacucaaaaggcaaa

SEQ ID NO: 1693154 - RNA, 19 nt, Artificial Sequence
  Description of Artificial Sequence: Synthetic oligonucleotide
cugccugaggguaaacaag

SEQ ID NO: 1693155 - RNA, 19 nt, Artificial Sequence
  Description of Artificial Sequence: Synthetic oligonucleotide
cuuugcuuagaaagaccac

SEQ ID NO: 1693156 - RNA, 19 nt, Artificial Sequence
  Description of Artificial Sequence: Synthetic oligonucleotide
aagcgaggggaagccaggc

SEQ ID NO: 1693157 - RNA, 19 nt, Artificial Sequence
  Description of Artificial Sequence: Synthetic oligonucleotide
ugugccgugcccacauuca

SEQ ID NO: 1693158 - RNA, 19 nt, Artificial Sequence
  Description of Artificial Sequence: Synthetic oligonucleotide
uacuagugcccuguuuggg

SEQ ID NO: 1693159 - RNA, 19 nt, Artificial Sequence
  Description of Artificial Sequence: Synthetic oligonucleotide
gaucccuaugauacauggg

SEQ ID NO: 1693160 - RNA, 19 nt, Artificial Sequence
  Description of Artificial Sequence: Synthetic oligonucleotide
guggauaagguuggugagg

SEQ ID NO: 1693161 - RNA, 19 nt, Artificial Sequence
  Description of Artificial Sequence: Synthetic oligonucleotide
cacacuuugcuuagaaaga

SEQ ID NO: 1693162 - RNA, 19 nt, Artificial Sequence
  Description of Artificial Sequence: Synthetic oligonucleotide
aagugagucucaccccaca

SEQ ID NO: 1693163 - RNA, 19 nt, Artificial Sequence
  Description of Artificial Sequence: Synthetic oligonucleotide
caagcuacuccaagucggc

SEQ ID NO: 1693164 - RNA, 19 nt, Artificial Sequence
  Description of Artificial Sequence: Synthetic oligonucleotide
agauguacaugcccaaguu

SEQ ID NO: 1693165 - RNA, 19 nt, Artificial Sequence
  Description of Artificial Sequence: Synthetic oligonucleotide
auacgagagccagaugccg

SEQ ID NO: 1693166 - RNA, 19 nt, Artificial Sequence
  Description of Artificial Sequence: Synthetic oligonucleotide
uccuauucacacuuugcuu

SEQ ID NO: 1693167 - RNA, 19 nt, Artificial Sequence
  Description of Artificial Sequence: Synthetic oligonucleotide
cacgacaugcaggaguccg

SEQ ID NO: 1693168 - RNA, 19 nt, Artificial Sequence
  Description of Artificial Sequence: Synthetic oligonucleotide
acuccaagucggcuacugg

SEQ ID NO: 1693169 - RNA, 19 nt, Artificial Sequence
  Description of Artificial Sequence: Synthetic oligonucleotide
agcacgacaugcaggaguc

SEQ ID NO: 1693170 - RNA, 19 nt, Artificial Sequence
  Description of Artificial Sequence: Synthetic oligonucleotide
gucccaacuucugaggucc

SEQ ID NO: 1693171 - RNA, 19 nt, Artificial Sequence
  Description of Artificial Sequence: Synthetic oligonucleotide
ccuacuagugcccuguuug

SEQ ID NO: 1693172 - RNA, 19 nt, Artificial Sequence
  Description of Artificial Sequence: Synthetic oligonucleotide
auggacuuggucauacuug

SEQ ID NO: 1693173 - RNA, 19 nt, Artificial Sequence
  Description of Artificial Sequence: Synthetic oligonucleotide
aaacaagccaacagggguu

SEQ ID NO: 1693174 - RNA, 19 nt, Artificial Sequence
  Description of Artificial Sequence: Synthetic oligonucleotide
cacuacaagcuacuccaag

SEQ ID NO: 1693175 - RNA, 19 nt, Artificial Sequence
  Description of Artificial Sequence: Synthetic oligonucleotide
ucuuggccauuccaauaca

SEQ ID NO: 1693176 - RNA, 19 nt, Artificial Sequence
  Description of Artificial Sequence: Synthetic oligonucleotide
acgacagggacgcucacaa

SEQ ID NO: 1693177 - RNA, 19 nt, Artificial Sequence
  Description of Artificial Sequence: Synthetic oligonucleotide
ucucaccccacacacucaa

SEQ ID NO: 1693178 - RNA, 19 nt, Artificial Sequence
  Description of Artificial Sequence: Synthetic oligonucleotide
cacacccuuccaaaggaac

SEQ ID NO: 1693179 - RNA, 19 nt, Artificial Sequence
  Description of Artificial Sequence: Synthetic oligonucleotide
ucuacccuuccccugccaa

SEQ ID NO: 1693180 - RNA, 19 nt, Artificial Sequence
  Description of Artificial Sequence: Synthetic oligonucleotide
acagggacgcucacaaagg

SEQ ID NO: 1693181 - RNA, 19 nt, Artificial Sequence
  Description of Artificial Sequence: Synthetic oligonucleotide
ggggcuacaaccucaguac

SEQ ID NO: 1693182 - RNA, 19 nt, Artificial Sequence
  Description of Artificial Sequence: Synthetic oligonucleotide
agcaaaggccuucuacccu

SEQ ID NO: 1693183 - RNA, 19 nt, Artificial Sequence
  Description of Artificial Sequence: Synthetic oligonucleotide
auccuauagcacuguggag

SEQ ID NO: 1693184 - RNA, 19 nt, Artificial Sequence
  Description of Artificial Sequence: Synthetic oligonucleotide
aagugcuauggcugccuga

SEQ ID NO: 1693185 - RNA, 19 nt, Artificial Sequence
  Description of Artificial Sequence: Synthetic oligonucleotide
cagggacgcucacaaaggg

SEQ ID NO: 1693186 - RNA, 19 nt, Artificial Sequence
  Description of Artificial Sequence: Synthetic oligonucleotide
ccucaguacuuauugauuc

SEQ ID NO: 1693187 - RNA, 19 nt, Artificial Sequence
  Description of Artificial Sequence: Synthetic oligonucleotide
ucagacucugugagccacc

SEQ ID NO: 1693188 - RNA, 19 nt, Artificial Sequence
  Description of Artificial Sequence: Synthetic oligonucleotide
cacugaccucacauggagg

SEQ ID NO: 1693189 - RNA, 19 nt, Artificial Sequence
  Description of Artificial Sequence: Synthetic oligonucleotide
uacaaccucaguacuuauu

SEQ ID NO: 1693190 - RNA, 19 nt, Artificial Sequence
  Description of Artificial Sequence: Synthetic oligonucleotide
acacacucaaagacugagg

SEQ ID NO: 1693191 - RNA, 19 nt, Artificial Sequence
  Description of Artificial Sequence: Synthetic oligonucleotide
uggggaugagcacacucau

SEQ ID NO: 1693192 - RNA, 19 nt, Artificial Sequence
  Description of Artificial Sequence: Synthetic oligonucleotide
ggauccuauagcacugugg

SEQ ID NO: 1693193 - RNA, 19 nt, Artificial Sequence
  Description of Artificial Sequence: Synthetic oligonucleotide
caagucggcuacugggaag

SEQ ID NO: 1693194 - RNA, 19 nt, Artificial Sequence
  Description of Artificial Sequence: Synthetic oligonucleotide
guccagacgacagggacgc

SEQ ID NO: 1693195 - RNA, 19 nt, Artificial Sequence
  Description of Artificial Sequence: Synthetic oligonucleotide
gggugagugacuucccucc

SEQ ID NO: 1693196 - RNA, 19 nt, Artificial Sequence
  Description of Artificial Sequence: Synthetic oligonucleotide
uacuguacaaagggaguaa

SEQ ID NO: 1693197 - RNA, 19 nt, Artificial Sequence
  Description of Artificial Sequence: Synthetic oligonucleotide
uguucaucacccguguguu

SEQ ID NO: 1693198 - RNA, 19 nt, Artificial Sequence
  Description of Artificial Sequence: Synthetic oligonucleotide
ccuauagcacuguggagcc

SEQ ID NO: 1693199 - RNA, 19 nt, Artificial Sequence
  Description of Artificial Sequence: Synthetic oligonucleotide
acaaucggggugaugguca

SEQ ID NO: 1693200 - RNA, 19 nt, Artificial Sequence
  Description of Artificial Sequence: Synthetic oligonucleotide
aauuuccuagaggcuguga

SEQ ID NO: 1693201 - RNA, 19 nt, Artificial Sequence
  Description of Artificial Sequence: Synthetic oligonucleotide
gcaucucuacucaaaaggc

SEQ ID NO: 1693202 - RNA, 19 nt, Artificial Sequence
  Description of Artificial Sequence: Synthetic oligonucleotide
gugaaagaucccuaugaua

SEQ ID NO: 1693203 - RNA, 19 nt, Artificial Sequence
  Description of Artificial Sequence: Synthetic oligonucleotide
gauggucaagaauuuccua

SEQ ID NO: 1693204 - RNA, 19 nt, Artificial Sequence
  Description of Artificial Sequence: Synthetic oligonucleotide
guacagcacaaucggggug

SEQ ID NO: 1693205 - RNA, 19 nt, Artificial Sequence
  Description of Artificial Sequence: Synthetic oligonucleotide
aaagcccagccccuuucau

SEQ ID NO: 1693206 - RNA, 19 nt, Artificial Sequence
  Description of Artificial Sequence: Synthetic oligonucleotide
gaacaugccccagucgaac

SEQ ID NO: 1693207 - RNA, 19 nt, Artificial Sequence
  Description of Artificial Sequence: Synthetic oligonucleotide
gcccacugaccucacaugg

SEQ ID NO: 1693208 - RNA, 19 nt, Artificial Sequence
  Description of Artificial Sequence: Synthetic oligonucleotide
cuucgggcugaggagacag

SEQ ID NO: 1693209 - RNA, 19 nt, Artificial Sequence
  Description of Artificial Sequence: Synthetic oligonucleotide
ggagacgaugcagaagccg

SEQ ID NO: 1693210 - RNA, 19 nt, Artificial Sequence
  Description of Artificial Sequence: Synthetic oligonucleotide
gaccacaaggugaaagauc

SEQ ID NO: 1693211 - RNA, 19 nt, Artificial Sequence
  Description of Artificial Sequence: Synthetic oligonucleotide
aucggggugauggucaaga

SEQ ID NO: 1693212 - RNA, 19 nt, Artificial Sequence
  Description of Artificial Sequence: Synthetic oligonucleotide
acggcaucucuacucaaaa

SEQ ID NO: 1693213 - RNA, 19 nt, Artificial Sequence
  Description of Artificial Sequence: Synthetic oligonucleotide
auccggacuccauggagcu

SEQ ID NO: 1693214 - RNA, 19 nt, Artificial Sequence
  Description of Artificial Sequence: Synthetic oligonucleotide
cacaccccaucucuggcag

SEQ ID NO: 1693215 - RNA, 19 nt, Artificial Sequence
  Description of Artificial Sequence: Synthetic oligonucleotide
cccacuacaagcuacucca

SEQ ID NO: 1693216 - RNA, 19 nt, Artificial Sequence
  Description of Artificial Sequence: Synthetic oligonucleotide
caugcaggaguccgauggc

SEQ ID NO: 1693217 - RNA, 19 nt, Artificial Sequence
  Description of Artificial Sequence: Synthetic oligonucleotide
gaaugagggucaggggaag

SEQ ID NO: 1693218 - RNA, 19 nt, Artificial Sequence
  Description of Artificial Sequence: Synthetic oligonucleotide
guugaguaugaaauggacu

SEQ ID NO: 1693219 - RNA, 19 nt, Artificial Sequence
  Description of Artificial Sequence: Synthetic oligonucleotide
ugggaagcgaggggaagcc

SEQ ID NO: 1693220 - RNA, 19 nt, Artificial Sequence
  Description of Artificial Sequence: Synthetic oligonucleotide
gccgugcccacauucaucc

SEQ ID NO: 1693221 - RNA, 19 nt, Artificial Sequence
  Description of Artificial Sequence: Synthetic oligonucleotide
ggggcuaaagugcuauggc

SEQ ID NO: 1693222 - RNA, 19 nt, Artificial Sequence
  Description of Artificial Sequence: Synthetic oligonucleotide
ccaauacauacaaaaguga

SEQ ID NO: 1693223 - RNA, 19 nt, Artificial Sequence
  Description of Artificial Sequence: Synthetic oligonucleotide
acaugccccagucgaacca

SEQ ID NO: 1693224 - RNA, 19 nt, Artificial Sequence
  Description of Artificial Sequence: Synthetic oligonucleotide
aacaagccaacagggguuu

SEQ ID NO: 1693225 - RNA, 19 nt, Artificial Sequence
  Description of Artificial Sequence: Synthetic oligonucleotide
cagcugucccuacuagugc

SEQ ID NO: 1693226 - RNA, 19 nt, Artificial Sequence
  Description of Artificial Sequence: Synthetic oligonucleotide
gggguugagaaugaggguc

SEQ ID NO: 1693227 - RNA, 19 nt, Artificial Sequence
  Description of Artificial Sequence: Synthetic oligonucleotide
gacgcucacaaaggggaug

SEQ ID NO: 1693228 - RNA, 19 nt, Artificial Sequence
  Description of Artificial Sequence: Synthetic oligonucleotide
gccauuccaauacauacaa

SEQ ID NO: 1693229 - RNA, 19 nt, Artificial Sequence
  Description of Artificial Sequence: Synthetic oligonucleotide
ggguucaccucacugugug

SEQ ID NO: 1693230 - RNA, 19 nt, Artificial Sequence
  Description of Artificial Sequence: Synthetic oligonucleotide
agaaugagggucaggggaa

SEQ ID NO: 1693231 - RNA, 19 nt, Artificial Sequence
  Description of Artificial Sequence: Synthetic oligonucleotide
aaaauccuauucacacuuu

SEQ ID NO: 1693232 - RNA, 19 nt, Artificial Sequence
  Description of Artificial Sequence: Synthetic oligonucleotide
aaccccacuacaagcuacu

SEQ ID NO: 1693233 - RNA, 19 nt, Artificial Sequence
  Description of Artificial Sequence: Synthetic oligonucleotide
agagcccaagggccccacc

SEQ ID NO: 1693234 - RNA, 19 nt, Artificial Sequence
  Description of Artificial Sequence: Synthetic oligonucleotide
gagucucgaaggguguccc

SEQ ID NO: 1693235 - RNA, 19 nt, Artificial Sequence
  Description of Artificial Sequence: Synthetic oligonucleotide
agcccacugaccucacaug

SEQ ID NO: 1693236 - RNA, 19 nt, Artificial Sequence
  Description of Artificial Sequence: Synthetic oligonucleotide
agcuuggggaugagcacac

SEQ ID NO: 1693237 - RNA, 19 nt, Artificial Sequence
  Description of Artificial Sequence: Synthetic oligonucleotide
ggguuagagcccaagggcc

SEQ ID NO: 1693238 - RNA, 19 nt, Artificial Sequence
  Description of Artificial Sequence: Synthetic oligonucleotide
cugggaagcgaggggaagc

SEQ ID NO: 1693239 - RNA, 19 nt, Artificial Sequence
  Description of Artificial Sequence: Synthetic oligonucleotide
gacaugcaggaguccgaug

SEQ ID NO: 1693240 - RNA, 19 nt, Artificial Sequence
  Description of Artificial Sequence: Synthetic oligonucleotide
gugagucucaccccacaca

SEQ ID NO: 1693241 - RNA, 19 nt, Artificial Sequence
  Description of Artificial Sequence: Synthetic oligonucleotide
guguugaguaugaaaugga

SEQ ID NO: 1693242 - RNA, 19 nt, Artificial Sequence
  Description of Artificial Sequence: Synthetic oligonucleotide
aagccguaccgucccucug

SEQ ID NO: 1693243 - RNA, 19 nt, Artificial Sequence
  Description of Artificial Sequence: Synthetic oligonucleotide
gaugccgcggcuguucauc

SEQ ID NO: 1693244 - RNA, 19 nt, Artificial Sequence
  Description of Artificial Sequence: Synthetic oligonucleotide
aucacccguguguuggggu

SEQ ID NO: 1693245 - RNA, 19 nt, Artificial Sequence
  Description of Artificial Sequence: Synthetic oligonucleotide
ugggagagcucaggcaccc

SEQ ID NO: 1693246 - RNA, 19 nt, Artificial Sequence
  Description of Artificial Sequence: Synthetic oligonucleotide
agaagccguaccgucccuc

SEQ ID NO: 1693247 - RNA, 19 nt, Artificial Sequence
  Description of Artificial Sequence: Synthetic oligonucleotide
gcgaggggaagccaggccc

SEQ ID NO: 1693248 - RNA, 19 nt, Artificial Sequence
  Description of Artificial Sequence: Synthetic oligonucleotide
cccuaaccccacuacaagc

SEQ ID NO: 1693249 - RNA, 19 nt, Artificial Sequence
  Description of Artificial Sequence: Synthetic oligonucleotide
gcuacuccaagucggcuac

SEQ ID NO: 1693250 - RNA, 19 nt, Artificial Sequence
  Description of Artificial Sequence: Synthetic oligonucleotide
accucacugugugccgugc

SEQ ID NO: 1693251 - RNA, 19 nt, Artificial Sequence
  Description of Artificial Sequence: Synthetic oligonucleotide
ggaagcgaggggaagccag

SEQ ID NO: 1693252 - RNA, 19 nt, Artificial Sequence
  Description of Artificial Sequence: Synthetic oligonucleotide
guuagagcccaagggcccc

SEQ ID NO: 1693253 - RNA, 19 nt, Artificial Sequence
  Description of Artificial Sequence: Synthetic oligonucleotide
aguccgauggccagcacau

SEQ ID NO: 1693254 - RNA, 19 nt, Artificial Sequence
  Description of Artificial Sequence: Synthetic oligonucleotide
gcagaagccguaccguccc

SEQ ID NO: 1693255 - RNA, 19 nt, Artificial Sequence
  Description of Artificial Sequence: Synthetic oligonucleotide
gcuuagucagacucuguga

SEQ ID NO: 1693256 - RNA, 19 nt, Artificial Sequence
  Description of Artificial Sequence: Synthetic oligonucleotide
caaccucaguacuuauuga

SEQ ID NO: 1693257 - RNA, 19 nt, Artificial Sequence
  Description of Artificial Sequence: Synthetic oligonucleotide
ugccgugcccacauucauc

SEQ ID NO: 1693258 - RNA, 19 nt, Artificial Sequence
  Description of Artificial Sequence: Synthetic oligonucleotide
gucagacucugugagccac

SEQ ID NO: 1693259 - RNA, 19 nt, Artificial Sequence
  Description of Artificial Sequence: Synthetic oligonucleotide
agucagacucugugagcca

SEQ ID NO: 1693260 - RNA, 19 nt, Artificial Sequence
  Description of Artificial Sequence: Synthetic oligonucleotide
ugccccagucgaaccaaac

SEQ ID NO: 1693261 - RNA, 19 nt, Artificial Sequence
  Description of Artificial Sequence: Synthetic oligonucleotide
ccagucgaaccaaaccagc

SEQ ID NO: 1693262 - RNA, 19 nt, Artificial Sequence
  Description of Artificial Sequence: Synthetic oligonucleotide
ccuucuacccuuccccugc

SEQ ID NO: 1693263 - RNA, 19 nt, Artificial Sequence
  Description of Artificial Sequence: Synthetic oligonucleotide
cucuucgggcugaggagac

SEQ ID NO: 1693264 - RNA, 19 nt, Artificial Sequence
  Description of Artificial Sequence: Synthetic oligonucleotide
uguggagcccacugaccuc

SEQ ID NO: 1693265 - RNA, 19 nt, Artificial Sequence
  Description of Artificial Sequence: Synthetic oligonucleotide
ugucccuacuagugcccug

SEQ ID NO: 1693266 - RNA, 19 nt, Artificial Sequence
  Description of Artificial Sequence: Synthetic oligonucleotide
gagccaccucucuucgggc

SEQ ID NO: 1693267 - RNA, 19 nt, Artificial Sequence
  Description of Artificial Sequence: Synthetic oligonucleotide
ccuaugauacaugggguug

SEQ ID NO: 1693268 - RNA, 19 nt, Artificial Sequence
  Description of Artificial Sequence: Synthetic oligonucleotide
aaucggggugauggucaag

SEQ ID NO: 1693269 - RNA, 19 nt, Artificial Sequence
  Description of Artificial Sequence: Synthetic oligonucleotide
ccacugaccucacauggag

SEQ ID NO: 1693270 - RNA, 19 nt, Artificial Sequence
  Description of Artificial Sequence: Synthetic oligonucleotide
gaugcagaagccguaccgu

SEQ ID NO: 1693271 - RNA, 19 nt, Artificial Sequence
  Description of Artificial Sequence: Synthetic oligonucleotide
agacgacagggacgcucac

SEQ ID NO: 1693272 - RNA, 19 nt, Artificial Sequence
  Description of Artificial Sequence: Synthetic oligonucleotide
ugaaauggacuuggucaua

SEQ ID NO: 1693273 - RNA, 19 nt, Artificial Sequence
  Description of Artificial Sequence: Synthetic oligonucleotide
gguuagagcccaagggccc

SEQ ID NO: 1693274 - RNA, 19 nt, Artificial Sequence
  Description of Artificial Sequence: Synthetic oligonucleotide
aaggggcuacaaccucagu

SEQ ID NO: 1693275 - RNA, 19 nt, Artificial Sequence
  Description of Artificial Sequence: Synthetic oligonucleotide
cuucuacccuuccccugcc

SEQ ID NO: 1693276 - RNA, 19 nt, Artificial Sequence
  Description of Artificial Sequence: Synthetic oligonucleotide
gugagccaccucucuucgg

SEQ ID NO: 1693277 - RNA, 19 nt, Artificial Sequence
  Description of Artificial Sequence: Synthetic oligonucleotide
ucacccguguguugggguu

SEQ ID NO: 1693278 - RNA, 19 nt, Artificial Sequence
  Description of Artificial Sequence: Synthetic oligonucleotide
cguaccgucccucugcccc

SEQ ID NO: 1693279 - RNA, 19 nt, Artificial Sequence
  Description of Artificial Sequence: Synthetic oligonucleotide
caaccuggcuuugcccugg

SEQ ID NO: 1693280 - RNA, 19 nt, Artificial Sequence
  Description of Artificial Sequence: Synthetic oligonucleotide
gugugccgugcccacauuc

SEQ ID NO: 1693281 - RNA, 19 nt, Artificial Sequence
  Description of Artificial Sequence: Synthetic oligonucleotide
ucaccucacugugugccgu

SEQ ID NO: 1693282 - RNA, 19 nt, Artificial Sequence
  Description of Artificial Sequence: Synthetic oligonucleotide
ggagagcucaggcacccac

SEQ ID NO: 1693283 - RNA, 19 nt, Artificial Sequence
  Description of Artificial Sequence: Synthetic oligonucleotide
gggcacaccccaucucugg

SEQ ID NO: 1693284 - RNA, 19 nt, Artificial Sequence
  Description of Artificial Sequence: Synthetic oligonucleotide
ccuuccccugccaaccugg

SEQ ID NO: 1693285 - RNA, 19 nt, Artificial Sequence
  Description of Artificial Sequence: Synthetic oligonucleotide
caccccacacacucaaaga

SEQ ID NO: 1693286 - RNA, 19 nt, Artificial Sequence
  Description of Artificial Sequence: Synthetic oligonucleotide
ccgauggccagcacauacg

SEQ ID NO: 1693287 - RNA, 19 nt, Artificial Sequence
  Description of Artificial Sequence: Synthetic oligonucleotide
uccuagaggcugugauagu

SEQ ID NO: 1693288 - RNA, 19 nt, Artificial Sequence
  Description of Artificial Sequence: Synthetic oligonucleotide
caucacccguguguugggg

SEQ ID NO: 1693289 - RNA, 19 nt, Artificial Sequence
  Description of Artificial Sequence: Synthetic oligonucleotide
gccccagucgaaccaaacc

SEQ ID NO: 1693290 - RNA, 19 nt, Artificial Sequence
  Description of Artificial Sequence: Synthetic oligonucleotide
cucuacucaaaaggcaaaa

SEQ ID NO: 1693291 - RNA, 19 nt, Artificial Sequence
  Description of Artificial Sequence: Synthetic oligonucleotide
accucaguacuuauugauu

SEQ ID NO: 1693292 - RNA, 19 nt, Artificial Sequence
  Description of Artificial Sequence: Synthetic oligonucleotide
ggaagauguacaugcccaa

SEQ ID NO: 1693293 - RNA, 19 nt, Artificial Sequence
  Description of Artificial Sequence: Synthetic oligonucleotide
caaggugaaagaucccuau

SEQ ID NO: 1693294 - RNA, 19 nt, Artificial Sequence
  Description of Artificial Sequence: Synthetic oligonucleotide
uucgggcugaggagacagu

SEQ ID NO: 1693295 - RNA, 19 nt, Artificial Sequence
  Description of Artificial Sequence: Synthetic oligonucleotide
aggaguccgauggccagca

SEQ ID NO: 1693296 - RNA, 19 nt, Artificial Sequence
  Description of Artificial Sequence: Synthetic oligonucleotide
gaagccguaccgucccucu

SEQ ID NO: 1693297 - RNA, 19 nt, Artificial Sequence
  Description of Artificial Sequence: Synthetic oligonucleotide
caaaggaacaugccccagu

SEQ ID NO: 1693298 - RNA, 19 nt, Artificial Sequence
  Description of Artificial Sequence: Synthetic oligonucleotide
gucagcaaccuggcuuugc

SEQ ID NO: 1693299 - RNA, 19 nt, Artificial Sequence
  Description of Artificial Sequence: Synthetic oligonucleotide
ggagucucgaagggugucc

SEQ ID NO: 1693300 - RNA, 19 nt, Artificial Sequence
  Description of Artificial Sequence: Synthetic oligonucleotide
ggugauggucaagaauuuc

SEQ ID NO: 1693301 - RNA, 19 nt, Artificial Sequence
  Description of Artificial Sequence: Synthetic oligonucleotide
ccccucuucagcuuaguca

SEQ ID NO: 1693302 - RNA, 19 nt, Artificial Sequence
  Description of Artificial Sequence: Synthetic oligonucleotide
cacauacgagagccagaug

SEQ ID NO: 1693303 - RNA, 19 nt, Artificial Sequence
  Description of Artificial Sequence: Synthetic oligonucleotide
gacgacagggacgcucaca

SEQ ID NO: 1693304 - RNA, 19 nt, Artificial Sequence
  Description of Artificial Sequence: Synthetic oligonucleotide
gcgaggggagaagacagcc

SEQ ID NO: 1693305 - RNA, 19 nt, Artificial Sequence
  Description of Artificial Sequence: Synthetic oligonucleotide
ggugaaagaucccuaugau

SEQ ID NO: 1693306 - RNA, 19 nt, Artificial Sequence
  Description of Artificial Sequence: Synthetic oligonucleotide
cacggcaucucuacucaaa

SEQ ID NO: 1693307 - RNA, 19 nt, Artificial Sequence
  Description of Artificial Sequence: Synthetic oligonucleotide
ggggugauggucaagaauu

SEQ ID NO: 1693308 - RNA, 19 nt, Artificial Sequence
  Description of Artificial Sequence: Synthetic oligonucleotide
ccccagucgaaccaaacca

SEQ ID NO: 1693309 - RNA, 19 nt, Artificial Sequence
  Description of Artificial Sequence: Synthetic oligonucleotide
ugccaccccucuugacugc

SEQ ID NO: 1693310 - RNA, 19 nt, Artificial Sequence
  Description of Artificial Sequence: Synthetic oligonucleotide
agcacauacgagagccaga

SEQ ID NO: 1693311 - RNA, 19 nt, Artificial Sequence
  Description of Artificial Sequence: Synthetic oligonucleotide
ggcacaccccaucucuggc

SEQ ID NO: 1693312 - RNA, 19 nt, Artificial Sequence
  Description of Artificial Sequence: Synthetic oligonucleotide
gggauccuauagcacugug

SEQ ID NO: 1693313 - RNA, 19 nt, Artificial Sequence
  Description of Artificial Sequence: Synthetic oligonucleotide
aaccuggcuuugcccuggu

SEQ ID NO: 1693314 - RNA, 19 nt, Artificial Sequence
  Description of Artificial Sequence: Synthetic oligonucleotide
ccugaggguaaacaagcca

SEQ ID NO: 1693315 - RNA, 19 nt, Artificial Sequence
  Description of Artificial Sequence: Synthetic oligonucleotide
cagcuuggggaugagcaca

SEQ ID NO: 1693316 - RNA, 19 nt, Artificial Sequence
  Description of Artificial Sequence: Synthetic oligonucleotide
ggccauuccaauacauaca

SEQ ID NO: 1693317 - RNA, 19 nt, Artificial Sequence
  Description of Artificial Sequence: Synthetic oligonucleotide
cuaaccccacuacaagcua

SEQ ID NO: 1693318 - RNA, 19 nt, Artificial Sequence
  Description of Artificial Sequence: Synthetic oligonucleotide
accuggcuuugcccugguc

SEQ ID NO: 1693319 - RNA, 19 nt, Artificial Sequence
  Description of Artificial Sequence: Synthetic oligonucleotide
agucggcuacugggaagcg

SEQ ID NO: 1693320 - RNA, 19 nt, Artificial Sequence
  Description of Artificial Sequence: Synthetic oligonucleotide
ucuucgggcugaggagaca

SEQ ID NO: 1693321 - RNA, 19 nt, Artificial Sequence
  Description of Artificial Sequence: Synthetic oligonucleotide
cuuggccauuccaauacau

SEQ ID NO: 1693322 - RNA, 19 nt, Artificial Sequence
  Description of Artificial Sequence: Synthetic oligonucleotide
gggcuaaagugcuauggcu

SEQ ID NO: 1693323 - RNA, 19 nt, Artificial Sequence
  Description of Artificial Sequence: Synthetic oligonucleotide
gcuacaaccucaguacuua

SEQ ID NO: 1693324 - RNA, 19 nt, Artificial Sequence
  Description of Artificial Sequence: Synthetic oligonucleotide
ccuuucaccgugugcagga

SEQ ID NO: 1693325 - RNA, 19 nt, Artificial Sequence
  Description of Artificial Sequence: Synthetic oligonucleotide
gggugucccuuucaccgug

SEQ ID NO: 1693326 - RNA, 19 nt, Artificial Sequence
  Description of Artificial Sequence: Synthetic oligonucleotide
acgacaugcaggaguccga

SEQ ID NO: 1693327 - RNA, 19 nt, Artificial Sequence
  Description of Artificial Sequence: Synthetic oligonucleotide
ggugagugacuucccucca

SEQ ID NO: 1693328 - RNA, 19 nt, Artificial Sequence
  Description of Artificial Sequence: Synthetic oligonucleotide
ccuaaccccacuacaagcu

SEQ ID NO: 1693329 - RNA, 19 nt, Artificial Sequence
  Description of Artificial Sequence: Synthetic oligonucleotide
cuauggcugccugagggua

SEQ ID NO: 1693330 - RNA, 19 nt, Artificial Sequence
  Description of Artificial Sequence: Synthetic oligonucleotide
cagggcacaccccaucucu

SEQ ID NO: 1693331 - RNA, 19 nt, Artificial Sequence
  Description of Artificial Sequence: Synthetic oligonucleotide
ccacaaggugaaagauccc

SEQ ID NO: 1693332 - RNA, 19 nt, Artificial Sequence
  Description of Artificial Sequence: Synthetic oligonucleotide
cgaagggugucccuuucac

SEQ ID NO: 1693333 - RNA, 19 nt, Artificial Sequence
  Description of Artificial Sequence: Synthetic oligonucleotide
gccuucuacccuuccccug

SEQ ID NO: 1693334 - RNA, 19 nt, Artificial Sequence
  Description of Artificial Sequence: Synthetic oligonucleotide
cuccauccccucugggaga

SEQ ID NO: 1693335 - RNA, 19 nt, Artificial Sequence
  Description of Artificial Sequence: Synthetic oligonucleotide
ugugugccgugcccacauu

SEQ ID NO: 1693336 - RNA, 19 nt, Artificial Sequence
  Description of Artificial Sequence: Synthetic oligonucleotide
caaucggggugauggucaa

SEQ ID NO: 1693337 - RNA, 19 nt, Artificial Sequence
  Description of Artificial Sequence: Synthetic oligonucleotide
gccugaggguaaacaagcc

SEQ ID NO: 1693338 - RNA, 19 nt, Artificial Sequence
  Description of Artificial Sequence: Synthetic oligonucleotide
cccacccuaaccccacuac

SEQ ID NO: 1693339 - RNA, 19 nt, Artificial Sequence
  Description of Artificial Sequence: Synthetic oligonucleotide
uggagcccacugaccucac

SEQ ID NO: 1693340 - RNA, 19 nt, Artificial Sequence
  Description of Artificial Sequence: Synthetic oligonucleotide
gcugucccuacuagugccc

SEQ ID NO: 1693341 - RNA, 19 nt, Artificial Sequence
  Description of Artificial Sequence: Synthetic oligonucleotide
ccccacggcaucucuacuc

SEQ ID NO: 1693342 - RNA, 19 nt, Artificial Sequence
  Description of Artificial Sequence: Synthetic oligonucleotide
ucccuacuagugcccuguu

SEQ ID NO: 1693343 - RNA, 19 nt, Artificial Sequence
  Description of Artificial Sequence: Synthetic oligonucleotide
gucggcuacugggaagcga

SEQ ID NO: 1693344 - RNA, 19 nt, Artificial Sequence
  Description of Artificial Sequence: Synthetic oligonucleotide
cggcaucucuacucaaaag

SEQ ID NO: 1693345 - RNA, 19 nt, Artificial Sequence
  Description of Artificial Sequence: Synthetic oligonucleotide
gucagccggaaagcccagc

SEQ ID NO: 1693346 - RNA, 19 nt, Artificial Sequence
  Description of Artificial Sequence: Synthetic oligonucleotide
gccguaccgucccucugcc

SEQ ID NO: 1693347 - RNA, 19 nt, Artificial Sequence
  Description of Artificial Sequence: Synthetic oligonucleotide
cccaaguuguggauaaggu

SEQ ID NO: 1693348 - RNA, 19 nt, Artificial Sequence
  Description of Artificial Sequence: Synthetic oligonucleotide
ccgcggcuguucaucaccc

SEQ ID NO: 1693349 - RNA, 19 nt, Artificial Sequence
  Description of Artificial Sequence: Synthetic oligonucleotide
gucccuacuagugcccugu

SEQ ID NO: 1693350 - RNA, 19 nt, Artificial Sequence
  Description of Artificial Sequence: Synthetic oligonucleotide
ccucacugugugccgugcc

SEQ ID NO: 1693351 - RNA, 19 nt, Artificial Sequence
  Description of Artificial Sequence: Synthetic oligonucleotide
ggcugccugaggguaaaca

SEQ ID NO: 1693352 - RNA, 19 nt, Artificial Sequence
  Description of Artificial Sequence: Synthetic oligonucleotide
ccuggcuuccugucccaac

SEQ ID NO: 1693353 - RNA, 19 nt, Artificial Sequence
  Description of Artificial Sequence: Synthetic oligonucleotide
gcacauacgagagccagau

SEQ ID NO: 1693354 - RNA, 19 nt, Artificial Sequence
  Description of Artificial Sequence: Synthetic oligonucleotide
cuggagucucgaagggugu

SEQ ID NO: 1693355 - RNA, 19 nt, Artificial Sequence
  Description of Artificial Sequence: Synthetic oligonucleotide
gcaaaggccuucuacccuu

SEQ ID NO: 1693356 - RNA, 19 nt, Artificial Sequence
  Description of Artificial Sequence: Synthetic oligonucleotide
cuacaaccucaguacuuau

SEQ ID NO: 1693357 - RNA, 19 nt, Artificial Sequence
  Description of Artificial Sequence: Synthetic oligonucleotide
cacccguguguugggguuc

SEQ ID NO: 1693358 - RNA, 19 nt, Artificial Sequence
  Description of Artificial Sequence: Synthetic oligonucleotide
ccaaguuguggauaagguu

SEQ ID NO: 1693359 - RNA, 19 nt, Artificial Sequence
  Description of Artificial Sequence: Synthetic oligonucleotide
ggagaagacagccccucuu

SEQ ID NO: 1693360 - RNA, 19 nt, Artificial Sequence
  Description of Artificial Sequence: Synthetic oligonucleotide
gggucagcaaccuggcuuu

SEQ ID NO: 1693361 - RNA, 19 nt, Artificial Sequence
  Description of Artificial Sequence: Synthetic oligonucleotide
ggaacaugccccagucgaa

SEQ ID NO: 1693362 - RNA, 19 nt, Artificial Sequence
  Description of Artificial Sequence: Synthetic oligonucleotide
cucaccccacacacucaaa

SEQ ID NO: 1693363 - RNA, 19 nt, Artificial Sequence
  Description of Artificial Sequence: Synthetic oligonucleotide
cucaggggcuaaagugcua

SEQ ID NO: 1693364 - RNA, 19 nt, Artificial Sequence
  Description of Artificial Sequence: Synthetic oligonucleotide
cacccuuccaaaggaacau

SEQ ID NO: 1693365 - RNA, 19 nt, Artificial Sequence
  Description of Artificial Sequence: Synthetic oligonucleotide
gggucaggggaaggaaaca

SEQ ID NO: 1693366 - RNA, 19 nt, Artificial Sequence
  Description of Artificial Sequence: Synthetic oligonucleotide
cuuucaccgugugcaggaa

SEQ ID NO: 1693367 - RNA, 19 nt, Artificial Sequence
  Description of Artificial Sequence: Synthetic oligonucleotide
guaccgucccucugccccu

SEQ ID NO: 1693368 - RNA, 19 nt, Artificial Sequence
  Description of Artificial Sequence: Synthetic oligonucleotide
gccccucuucagcuuaguc

SEQ ID NO: 1693369 - RNA, 19 nt, Artificial Sequence
  Description of Artificial Sequence: Synthetic oligonucleotide
ccaagucggcuacugggaa

SEQ ID NO: 1693370 - RNA, 19 nt, Artificial Sequence
  Description of Artificial Sequence: Synthetic oligonucleotide
agccccucuucagcuuagu

SEQ ID NO: 1693371 - RNA, 19 nt, Artificial Sequence
  Description of Artificial Sequence: Synthetic oligonucleotide
cagacucugugagccaccu

SEQ ID NO: 1693372 - RNA, 19 nt, Artificial Sequence
  Description of Artificial Sequence: Synthetic oligonucleotide
uggcugccugaggguaaac

SEQ ID NO: 1693373 - RNA, 19 nt, Artificial Sequence
  Description of Artificial Sequence: Synthetic oligonucleotide
cagcuuagucagacucugu

SEQ ID NO: 1693374 - RNA, 19 nt, Artificial Sequence
  Description of Artificial Sequence: Synthetic oligonucleotide
ggccuucuacccuuccccu

SEQ ID NO: 1693375 - RNA, 19 nt, Artificial Sequence
  Description of Artificial Sequence: Synthetic oligonucleotide
gugccgugcccacauucau

SEQ ID NO: 1693376 - RNA, 19 nt, Artificial Sequence
  Description of Artificial Sequence: Synthetic oligonucleotide
uccagacgacagggacgcu

SEQ ID NO: 1693377 - RNA, 19 nt, Artificial Sequence
  Description of Artificial Sequence: Synthetic oligonucleotide
uaccgucccucugccccuc

SEQ ID NO: 1693378 - RNA, 19 nt, Artificial Sequence
  Description of Artificial Sequence: Synthetic oligonucleotide
ugccccucucaggggcuaa

SEQ ID NO: 1693379 - RNA, 19 nt, Artificial Sequence
  Description of Artificial Sequence: Synthetic oligonucleotide
cccaacuucugagguccac

SEQ ID NO: 1693380 - RNA, 19 nt, Artificial Sequence
  Description of Artificial Sequence: Synthetic oligonucleotide
caccucucuucgggcugag

SEQ ID NO: 1693381 - RNA, 19 nt, Artificial Sequence
  Description of Artificial Sequence: Synthetic oligonucleotide
cccuaugauacaugggguu

SEQ ID NO: 1693382 - RNA, 19 nt, Artificial Sequence
  Description of Artificial Sequence: Synthetic oligonucleotide
ggucagcaaccuggcuuug

SEQ ID NO: 1693383 - RNA, 19 nt, Artificial Sequence
  Description of Artificial Sequence: Synthetic oligonucleotide
ggagcccacugaccucaca

SEQ ID NO: 1693384 - RNA, 19 nt, Artificial Sequence
  Description of Artificial Sequence: Synthetic oligonucleotide
gcccuggucuggagucucg

SEQ ID NO: 1693385 - RNA, 19 nt, Artificial Sequence
  Description of Artificial Sequence: Synthetic oligonucleotide
gcacgacaugcaggagucc

SEQ ID NO: 1693386 - RNA, 19 nt, Artificial Sequence
  Description of Artificial Sequence: Synthetic oligonucleotide
augccccagucgaaccaaa

SEQ ID NO: 1693387 - RNA, 19 nt, Artificial Sequence
  Description of Artificial Sequence: Synthetic oligonucleotide
gggaagcgaggggaagcca

SEQ ID NO: 1693388 - RNA, 19 nt, Artificial Sequence
  Description of Artificial Sequence: Synthetic oligonucleotide
cugucccuacuagugcccu

SEQ ID NO: 1693389 - RNA, 19 nt, Artificial Sequence
  Description of Artificial Sequence: Synthetic oligonucleotide
ggcuacaaccucaguacuu

SEQ ID NO: 1693390 - RNA, 19 nt, Artificial Sequence
  Description of Artificial Sequence: Synthetic oligonucleotide
gcacaaucggggugauggu

SEQ ID NO: 1693391 - RNA, 19 nt, Artificial Sequence
  Description of Artificial Sequence: Synthetic oligonucleotide
gcccuguuugggcagggau

SEQ ID NO: 1693392 - RNA, 19 nt, Artificial Sequence
  Description of Artificial Sequence: Synthetic oligonucleotide
ggaguccgauggccagcac

SEQ ID NO: 1693393 - RNA, 19 nt, Artificial Sequence
  Description of Artificial Sequence: Synthetic oligonucleotide
ccccucucaggggcuaaag

SEQ ID NO: 1693394 - RNA, 19 nt, Artificial Sequence
  Description of Artificial Sequence: Synthetic oligonucleotide
ccguaccgucccucugccc

SEQ ID NO: 1693395 - RNA, 19 nt, Artificial Sequence
  Description of Artificial Sequence: Synthetic oligonucleotide
ccacuacaagcuacuccaa

SEQ ID NO: 1693396 - RNA, 19 nt, Artificial Sequence
  Description of Artificial Sequence: Synthetic oligonucleotide
gcccaagggccccacccua

SEQ ID NO: 1693397 - RNA, 19 nt, Artificial Sequence
  Description of Artificial Sequence: Synthetic oligonucleotide
gggugauggucaagaauuu

SEQ ID NO: 1693398 - RNA, 19 nt, Artificial Sequence
  Description of Artificial Sequence: Synthetic oligonucleotide
ggacuuggucauacuuggu

SEQ ID NO: 1693399 - RNA, 19 nt, Artificial Sequence
  Description of Artificial Sequence: Synthetic oligonucleotide
cagaagccguaccgucccu

SEQ ID NO: 1693400 - RNA, 19 nt, Artificial Sequence
  Description of Artificial Sequence: Synthetic oligonucleotide
guccgauggccagcacaua

SEQ ID NO: 1693401 - RNA, 19 nt, Artificial Sequence
  Description of Artificial Sequence: Synthetic oligonucleotide
cuacuccaagucggcuacu

SEQ ID NO: 1693402 - RNA, 19 nt, Artificial Sequence
  Description of Artificial Sequence: Synthetic oligonucleotide
ggacgcucacaaaggggau

SEQ ID NO: 1693403 - RNA, 19 nt, Artificial Sequence
  Description of Artificial Sequence: Synthetic oligonucleotide
ccacggcaucucuacucaa

SEQ ID NO: 1693404 - RNA, 19 nt, Artificial Sequence
  Description of Artificial Sequence: Synthetic oligonucleotide
gggagagcucaggcaccca

SEQ ID NO: 1693405 - RNA, 19 nt, Artificial Sequence
  Description of Artificial Sequence: Synthetic oligonucleotide
ccaccucucuucgggcuga

SEQ ID NO: 1693406 - RNA, 19 nt, Artificial Sequence
  Description of Artificial Sequence: Synthetic oligonucleotide
cuguuugggcagggauccu

SEQ ID NO: 1693407 - RNA, 19 nt, Artificial Sequence
  Description of Artificial Sequence: Synthetic oligonucleotide
cccuggucuggagucucga

SEQ ID NO: 1693408 - RNA, 19 nt, Artificial Sequence
  Description of Artificial Sequence: Synthetic oligonucleotide
gccaccccucuugacugcu

SEQ ID NO: 1693409 - RNA, 19 nt, Artificial Sequence
  Description of Artificial Sequence: Synthetic oligonucleotide
cccuacuagugcccuguuu

SEQ ID NO: 1693410 - RNA, 19 nt, Artificial Sequence
  Description of Artificial Sequence: Synthetic oligonucleotide
cgacagggacgcucacaaa

SEQ ID NO: 1693411 - RNA, 19 nt, Artificial Sequence
  Description of Artificial Sequence: Synthetic oligonucleotide
gccccucucaggggcuaaa

SEQ ID NO: 1693412 - RNA, 19 nt, Artificial Sequence
  Description of Artificial Sequence: Synthetic oligonucleotide
cgacaugcaggaguccgau

SEQ ID NO: 1693413 - RNA, 19 nt, Artificial Sequence
  Description of Artificial Sequence: Synthetic oligonucleotide
ccgugcccacauucauccu

SEQ ID NO: 1693414 - RNA, 19 nt, Artificial Sequence
  Description of Artificial Sequence: Synthetic oligonucleotide
ccggaaagcccagccccuu

SEQ ID NO: 1693415 - RNA, 19 nt, Artificial Sequence
  Description of Artificial Sequence: Synthetic oligonucleotide
agugagaaggcccagaacc

SEQ ID NO: 1693416 - RNA, 19 nt, Artificial Sequence
  Description of Artificial Sequence: Synthetic oligonucleotide
auugauguaaccucccgcc

SEQ ID NO: 1693417 - RNA, 19 nt, Artificial Sequence
  Description of Artificial Sequence: Synthetic oligonucleotide
uuuggccauauccaaacgg

SEQ ID NO: 1693418 - RNA, 19 nt, Artificial Sequence
  Description of Artificial Sequence: Synthetic oligonucleotide
uuuccuagagcucagcaca

SEQ ID NO: 1693419 - RNA, 19 nt, Artificial Sequence
  Description of Artificial Sequence: Synthetic oligonucleotide
uguaccaaugggcugacgc

SEQ ID NO: 1693420 - RNA, 19 nt, Artificial Sequence
  Description of Artificial Sequence: Synthetic oligonucleotide
uguagcacacuccucaccc

SEQ ID NO: 1693421 - RNA, 19 nt, Artificial Sequence
  Description of Artificial Sequence: Synthetic oligonucleotide
uucucgguaauauaucugc

SEQ ID NO: 1693422 - RNA, 19 nt, Artificial Sequence
  Description of Artificial Sequence: Synthetic oligonucleotide
ucuuuucucgguaauauau

SEQ ID NO: 1693423 - RNA, 19 nt, Artificial Sequence
  Description of Artificial Sequence: Synthetic oligonucleotide
cuccucucaaauaugaagc

SEQ ID NO: 1693424 - RNA, 19 nt, Artificial Sequence
  Description of Artificial Sequence: Synthetic oligonucleotide
uguucuagaucccaguccu

SEQ ID NO: 1693425 - RNA, 19 nt, Artificial Sequence
  Description of Artificial Sequence: Synthetic oligonucleotide
cuugacgcuggcaugaccg

SEQ ID NO: 1693426 - RNA, 19 nt, Artificial Sequence
  Description of Artificial Sequence: Synthetic oligonucleotide
acccgucuguucuagaucc

SEQ ID NO: 1693427 - RNA, 19 nt, Artificial Sequence
  Description of Artificial Sequence: Synthetic oligonucleotide
uaggcuguuggcuugacgc

SEQ ID NO: 1693428 - RNA, 19 nt, Artificial Sequence
  Description of Artificial Sequence: Synthetic oligonucleotide
cucguagccauaaucaggc

SEQ ID NO: 1693429 - RNA, 19 nt, Artificial Sequence
  Description of Artificial Sequence: Synthetic oligonucleotide
aguccuguaaagcagggug

SEQ ID NO: 1693430 - RNA, 19 nt, Artificial Sequence
  Description of Artificial Sequence: Synthetic oligonucleotide
aaaccaguuacggagacga

SEQ ID NO: 1693431 - RNA, 19 nt, Artificial Sequence
  Description of Artificial Sequence: Synthetic oligonucleotide
agaaccacagggcucgggc

SEQ ID NO: 1693432 - RNA, 19 nt, Artificial Sequence
  Description of Artificial Sequence: Synthetic oligonucleotide
uguauugggcucuugcuug

SEQ ID NO: 1693433 - RNA, 19 nt, Artificial Sequence
  Description of Artificial Sequence: Synthetic oligonucleotide
cugaugguagucuugcacg

SEQ ID NO: 1693434 - RNA, 19 nt, Artificial Sequence
  Description of Artificial Sequence: Synthetic oligonucleotide
uuuucucgguaauauaucu

SEQ ID NO: 1693435 - RNA, 19 nt, Artificial Sequence
  Description of Artificial Sequence: Synthetic oligonucleotide
uaaucaggcccaauccugg

SEQ ID NO: 1693436 - RNA, 19 nt, Artificial Sequence
  Description of Artificial Sequence: Synthetic oligonucleotide
gcugaaaccaguuacggag

SEQ ID NO: 1693437 - RNA, 19 nt, Artificial Sequence
  Description of Artificial Sequence: Synthetic oligonucleotide
aacgucguaacacccaccu

SEQ ID NO: 1693438 - RNA, 19 nt, Artificial Sequence
  Description of Artificial Sequence: Synthetic oligonucleotide
ucugcauugauguaaccuc

SEQ ID NO: 1693439 - RNA, 19 nt, Artificial Sequence
  Description of Artificial Sequence: Synthetic oligonucleotide
guaacacccaccuuagcag

SEQ ID NO: 1693440 - RNA, 19 nt, Artificial Sequence
  Description of Artificial Sequence: Synthetic oligonucleotide
acacgagcaaugcauguac

SEQ ID NO: 1693441 - RNA, 19 nt, Artificial Sequence
  Description of Artificial Sequence: Synthetic oligonucleotide
caaugcauguaccaauggg

SEQ ID NO: 1693442 - RNA, 19 nt, Artificial Sequence
  Description of Artificial Sequence: Synthetic oligonucleotide
ucauaccagcugcaaagcg

SEQ ID NO: 1693443 - RNA, 19 nt, Artificial Sequence
  Description of Artificial Sequence: Synthetic oligonucleotide
aggaccuuggagcacagag

SEQ ID NO: 1693444 - RNA, 19 nt, Artificial Sequence
  Description of Artificial Sequence: Synthetic oligonucleotide
auccaaacgggccacagug

SEQ ID NO: 1693445 - RNA, 19 nt, Artificial Sequence
  Description of Artificial Sequence: Synthetic oligonucleotide
agggaggagaggcaguagc

SEQ ID NO: 1693446 - RNA, 19 nt, Artificial Sequence
  Description of Artificial Sequence: Synthetic oligonucleotide
ugcagaguccuguaaagca

SEQ ID NO: 1693447 - RNA, 19 nt, Artificial Sequence
  Description of Artificial Sequence: Synthetic oligonucleotide
cauaccagcugcaaagcgc

SEQ ID NO: 1693448 - RNA, 19 nt, Artificial Sequence
  Description of Artificial Sequence: Synthetic oligonucleotide
ugaugguagucuugcacgg

SEQ ID NO: 1693449 - RNA, 19 nt, Artificial Sequence
  Description of Artificial Sequence: Synthetic oligonucleotide
ucuuuggccauauccaaac

SEQ ID NO: 1693450 - RNA, 19 nt, Artificial Sequence
  Description of Artificial Sequence: Synthetic oligonucleotide
auaugaagcccagccaugc

SEQ ID NO: 1693451 - RNA, 19 nt, Artificial Sequence
  Description of Artificial Sequence: Synthetic oligonucleotide
aguagcaccaggccuggac

SEQ ID NO: 1693452 - RNA, 19 nt, Artificial Sequence
  Description of Artificial Sequence: Synthetic oligonucleotide
ggugguaugccuuccaccg

SEQ ID NO: 1693453 - RNA, 19 nt, Artificial Sequence
  Description of Artificial Sequence: Synthetic oligonucleotide
acaguguuuucucuccaac

SEQ ID NO: 1693454 - RNA, 19 nt, Artificial Sequence
  Description of Artificial Sequence: Synthetic oligonucleotide
acuuugcuucugcagacac

SEQ ID NO: 1693455 - RNA, 19 nt, Artificial Sequence
  Description of Artificial Sequence: Synthetic oligonucleotide
cauugcuuccaucagcagc

SEQ ID NO: 1693456 - RNA, 19 nt, Artificial Sequence
  Description of Artificial Sequence: Synthetic oligonucleotide
accaguuacggagacgacc

SEQ ID NO: 1693457 - RNA, 19 nt, Artificial Sequence
  Description of Artificial Sequence: Synthetic oligonucleotide
ugaacacgagcaaugcaug

SEQ ID NO: 1693458 - RNA, 19 nt, Artificial Sequence
  Description of Artificial Sequence: Synthetic oligonucleotide
uuucucgguaauauaucug

SEQ ID NO: 1693459 - RNA, 19 nt, Artificial Sequence
  Description of Artificial Sequence: Synthetic oligonucleotide
acggagacgaccccugccc

SEQ ID NO: 1693460 - RNA, 19 nt, Artificial Sequence
  Description of Artificial Sequence: Synthetic oligonucleotide
agcaacuguagccucguag

SEQ ID NO: 1693461 - RNA, 19 nt, Artificial Sequence
  Description of Artificial Sequence: Synthetic oligonucleotide
uuuuccuagagcucagcac

SEQ ID NO: 1693462 - RNA, 19 nt, Artificial Sequence
  Description of Artificial Sequence: Synthetic oligonucleotide
guuguauugucucucccug

SEQ ID NO: 1693463 - RNA, 19 nt, Artificial Sequence
  Description of Artificial Sequence: Synthetic oligonucleotide
ucuccaacgucguaacacc

SEQ ID NO: 1693464 - RNA, 19 nt, Artificial Sequence
  Description of Artificial Sequence: Synthetic oligonucleotide
aggugguaugccuuccacc

SEQ ID NO: 1693465 - RNA, 19 nt, Artificial Sequence
  Description of Artificial Sequence: Synthetic oligonucleotide
ugguaugccuuccaccgag

SEQ ID NO: 1693466 - RNA, 19 nt, Artificial Sequence
  Description of Artificial Sequence: Synthetic oligonucleotide
augcaguccacacccuugc

SEQ ID NO: 1693467 - RNA, 19 nt, Artificial Sequence
  Description of Artificial Sequence: Synthetic oligonucleotide
ugcuugugaaauccccagg

SEQ ID NO: 1693468 - RNA, 19 nt, Artificial Sequence
  Description of Artificial Sequence: Synthetic oligonucleotide
ucuguucuagaucccaguc

SEQ ID NO: 1693469 - RNA, 19 nt, Artificial Sequence
  Description of Artificial Sequence: Synthetic oligonucleotide
ccugacacacccuaggugg

SEQ ID NO: 1693470 - RNA, 19 nt, Artificial Sequence
  Description of Artificial Sequence: Synthetic oligonucleotide
auaucugcauugauguaac

SEQ ID NO: 1693471 - RNA, 19 nt, Artificial Sequence
  Description of Artificial Sequence: Synthetic oligonucleotide
uuguauugucucucccugg

SEQ ID NO: 1693472 - RNA, 19 nt, Artificial Sequence
  Description of Artificial Sequence: Synthetic oligonucleotide
ucgguaauauaucugcauu

SEQ ID NO: 1693473 - RNA, 19 nt, Artificial Sequence
  Description of Artificial Sequence: Synthetic oligonucleotide
augaagcccagccaugcag

SEQ ID NO: 1693474 - RNA, 19 nt, Artificial Sequence
  Description of Artificial Sequence: Synthetic oligonucleotide
uuuuccugacacacccuag

SEQ ID NO: 1693475 - RNA, 19 nt, Artificial Sequence
  Description of Artificial Sequence: Synthetic oligonucleotide
cucucaaauaugaagccca

SEQ ID NO: 1693476 - RNA, 19 nt, Artificial Sequence
  Description of Artificial Sequence: Synthetic oligonucleotide
uugcugaaugugaugggug

SEQ ID NO: 1693477 - RNA, 19 nt, Artificial Sequence
  Description of Artificial Sequence: Synthetic oligonucleotide
acagaguccuguuguauug

SEQ ID NO: 1693478 - RNA, 19 nt, Artificial Sequence
  Description of Artificial Sequence: Synthetic oligonucleotide
ugaaugugaugggugcugg

SEQ ID NO: 1693479 - RNA, 19 nt, Artificial Sequence
  Description of Artificial Sequence: Synthetic oligonucleotide
gagcucagcacaguggcgg

SEQ ID NO: 1693480 - RNA, 19 nt, Artificial Sequence
  Description of Artificial Sequence: Synthetic oligonucleotide
aaccucccgccacugcacc

SEQ ID NO: 1693481 - RNA, 19 nt, Artificial Sequence
  Description of Artificial Sequence: Synthetic oligonucleotide
uguaaagcagggugugcug

SEQ ID NO: 1693482 - RNA, 19 nt, Artificial Sequence
  Description of Artificial Sequence: Synthetic oligonucleotide
aauaugaagcccagccaug

SEQ ID NO: 1693483 - RNA, 19 nt, Artificial Sequence
  Description of Artificial Sequence: Synthetic oligonucleotide
ugaaaccaguuacggagac

SEQ ID NO: 1693484 - RNA, 19 nt, Artificial Sequence
  Description of Artificial Sequence: Synthetic oligonucleotide
ugcaaagcgcagaagccgu

SEQ ID NO: 1693485 - RNA, 19 nt, Artificial Sequence
  Description of Artificial Sequence: Synthetic oligonucleotide
ucucgguaauauaucugca

SEQ ID NO: 1693486 - RNA, 19 nt, Artificial Sequence
  Description of Artificial Sequence: Synthetic oligonucleotide
uugccuguagugagaaggc

SEQ ID NO: 1693487 - RNA, 19 nt, Artificial Sequence
  Description of Artificial Sequence: Synthetic oligonucleotide
cugguagugcuguaacugc

SEQ ID NO: 1693488 - RNA, 19 nt, Artificial Sequence
  Description of Artificial Sequence: Synthetic oligonucleotide
uccugacacacccuaggug

SEQ ID NO: 1693489 - RNA, 19 nt, Artificial Sequence
  Description of Artificial Sequence: Synthetic oligonucleotide
ugggagguuuucuuuggcc

SEQ ID NO: 1693490 - RNA, 19 nt, Artificial Sequence
  Description of Artificial Sequence: Synthetic oligonucleotide
cuuuguguggccugcagca

SEQ ID NO: 1693491 - RNA, 19 nt, Artificial Sequence
  Description of Artificial Sequence: Synthetic oligonucleotide
aaagcgcagaagccgugug

SEQ ID NO: 1693492 - RNA, 19 nt, Artificial Sequence
  Description of Artificial Sequence: Synthetic oligonucleotide
aucugcauugauguaaccu

SEQ ID NO: 1693493 - RNA, 19 nt, Artificial Sequence
  Description of Artificial Sequence: Synthetic oligonucleotide
aagcaggcacgaccaaguc

SEQ ID NO: 1693494 - RNA, 19 nt, Artificial Sequence
  Description of Artificial Sequence: Synthetic oligonucleotide
uugauguaaccucccgcca

SEQ ID NO: 1693495 - RNA, 19 nt, Artificial Sequence
  Description of Artificial Sequence: Synthetic oligonucleotide
uggccauauccaaacgggc

SEQ ID NO: 1693496 - RNA, 19 nt, Artificial Sequence
  Description of Artificial Sequence: Synthetic oligonucleotide
ucaagcuuuguguggccug

SEQ ID NO: 1693497 - RNA, 19 nt, Artificial Sequence
  Description of Artificial Sequence: Synthetic oligonucleotide
uccaacgucguaacaccca

SEQ ID NO: 1693498 - RNA, 19 nt, Artificial Sequence
  Description of Artificial Sequence: Synthetic oligonucleotide
gaggcaguagcaccaggcc

SEQ ID NO: 1693499 - RNA, 19 nt, Artificial Sequence
  Description of Artificial Sequence: Synthetic oligonucleotide
uacuccacugcucuuguuu

SEQ ID NO: 1693500 - RNA, 19 nt, Artificial Sequence
  Description of Artificial Sequence: Synthetic oligonucleotide
uuccuagagcucagcacag

SEQ ID NO: 1693501 - RNA, 19 nt, Artificial Sequence
  Description of Artificial Sequence: Synthetic oligonucleotide
ugcauguaccaaugggcug

SEQ ID NO: 1693502 - RNA, 19 nt, Artificial Sequence
  Description of Artificial Sequence: Synthetic oligonucleotide
ucuugcacggcuugcucca

SEQ ID NO: 1693503 - RNA, 19 nt, Artificial Sequence
  Description of Artificial Sequence: Synthetic oligonucleotide
agcgcagaagccgugugac

SEQ ID NO: 1693504 - RNA, 19 nt, Artificial Sequence
  Description of Artificial Sequence: Synthetic oligonucleotide
ugccgggaagccuucauac

SEQ ID NO: 1693505 - RNA, 19 nt, Artificial Sequence
  Description of Artificial Sequence: Synthetic oligonucleotide
guccugguaagucagccac

SEQ ID NO: 1693506 - RNA, 19 nt, Artificial Sequence
  Description of Artificial Sequence: Synthetic oligonucleotide
uucauaccagcugcaaagc

SEQ ID NO: 1693507 - RNA, 19 nt, Artificial Sequence
  Description of Artificial Sequence: Synthetic oligonucleotide
ugguagugcuguaacugcu

SEQ ID NO: 1693508 - RNA, 19 nt, Artificial Sequence
  Description of Artificial Sequence: Synthetic oligonucleotide
acgagcaaugcauguacca

SEQ ID NO: 1693509 - RNA, 19 nt, Artificial Sequence
  Description of Artificial Sequence: Synthetic oligonucleotide
ccugccuggaccaaguacc

SEQ ID NO: 1693510 - RNA, 19 nt, Artificial Sequence
  Description of Artificial Sequence: Synthetic oligonucleotide
aacuguagccucguagcca

SEQ ID NO: 1693511 - RNA, 19 nt, Artificial Sequence
  Description of Artificial Sequence: Synthetic oligonucleotide
augguagucuugcacggcu

SEQ ID NO: 1693512 - RNA, 19 nt, Artificial Sequence
  Description of Artificial Sequence: Synthetic oligonucleotide
cucuccaacgucguaacac

SEQ ID NO: 1693513 - RNA, 19 nt, Artificial Sequence
  Description of Artificial Sequence: Synthetic oligonucleotide
uuuuacccgucuguucuag

SEQ ID NO: 1693514 - RNA, 19 nt, Artificial Sequence
  Description of Artificial Sequence: Synthetic oligonucleotide
gaccaagucucugugccag

SEQ ID NO: 1693515 - RNA, 19 nt, Artificial Sequence
  Description of Artificial Sequence: Synthetic oligonucleotide
agccucaagcuuugugugg

SEQ ID NO: 1693516 - RNA, 19 nt, Artificial Sequence
  Description of Artificial Sequence: Synthetic oligonucleotide
ccaguuacggagacgaccc

SEQ ID NO: 1693517 - RNA, 19 nt, Artificial Sequence
  Description of Artificial Sequence: Synthetic oligonucleotide
cuuuggccauauccaaacg

SEQ ID NO: 1693518 - RNA, 19 nt, Artificial Sequence
  Description of Artificial Sequence: Synthetic oligonucleotide
accugcguaggcuguuggc

SEQ ID NO: 1693519 - RNA, 19 nt, Artificial Sequence
  Description of Artificial Sequence: Synthetic oligonucleotide
gaacugccagcgcugaaac

SEQ ID NO: 1693520 - RNA, 19 nt, Artificial Sequence
  Description of Artificial Sequence: Synthetic oligonucleotide
acuggcagaagcaggcacg

SEQ ID NO: 1693521 - RNA, 19 nt, Artificial Sequence
  Description of Artificial Sequence: Synthetic oligonucleotide
aaucaggcccaauccuggu

SEQ ID NO: 1693522 - RNA, 19 nt, Artificial Sequence
  Description of Artificial Sequence: Synthetic oligonucleotide
uggcggacugcacagugga

SEQ ID NO: 1693523 - RNA, 19 nt, Artificial Sequence
  Description of Artificial Sequence: Synthetic oligonucleotide
uggaccguugcugaaugug

SEQ ID NO: 1693524 - RNA, 19 nt, Artificial Sequence
  Description of Artificial Sequence: Synthetic oligonucleotide
uuccugacacacccuaggu

SEQ ID NO: 1693525 - RNA, 19 nt, Artificial Sequence
  Description of Artificial Sequence: Synthetic oligonucleotide
uagccucguagccauaauc

SEQ ID NO: 1693526 - RNA, 19 nt, Artificial Sequence
  Description of Artificial Sequence: Synthetic oligonucleotide
guagccauaaucaggccca

SEQ ID NO: 1693527 - RNA, 19 nt, Artificial Sequence
  Description of Artificial Sequence: Synthetic oligonucleotide
uccaccgagccauugcuuc

SEQ ID NO: 1693528 - RNA, 19 nt, Artificial Sequence
  Description of Artificial Sequence: Synthetic oligonucleotide
cuggcaugaccgaagguuc

SEQ ID NO: 1693529 - RNA, 19 nt, Artificial Sequence
  Description of Artificial Sequence: Synthetic oligonucleotide
uggaccaaguaccuucuuu

SEQ ID NO: 1693530 - RNA, 19 nt, Artificial Sequence
  Description of Artificial Sequence: Synthetic oligonucleotide
caugcaguccacacccuug

SEQ ID NO: 1693531 - RNA, 19 nt, Artificial Sequence
  Description of Artificial Sequence: Synthetic oligonucleotide
aagcgcagaagccguguga

SEQ ID NO: 1693532 - RNA, 19 nt, Artificial Sequence
  Description of Artificial Sequence: Synthetic oligonucleotide
uauccaaacgggccacagu

SEQ ID NO: 1693533 - RNA, 19 nt, Artificial Sequence
  Description of Artificial Sequence: Synthetic oligonucleotide
cagcgcugaaaccaguuac

SEQ ID NO: 1693534 - RNA, 19 nt, Artificial Sequence
  Description of Artificial Sequence: Synthetic oligonucleotide
uccugccuggaccaaguac

SEQ ID NO: 1693535 - RNA, 19 nt, Artificial Sequence
  Description of Artificial Sequence: Synthetic oligonucleotide
agacauccugccuggacca

SEQ ID NO: 1693536 - RNA, 19 nt, Artificial Sequence
  Description of Artificial Sequence: Synthetic oligonucleotide
caacuguagccucguagcc

SEQ ID NO: 1693537 - RNA, 19 nt, Artificial Sequence
  Description of Artificial Sequence: Synthetic oligonucleotide
ccauaaucaggcccaaucc

SEQ ID NO: 1693538 - RNA, 19 nt, Artificial Sequence
  Description of Artificial Sequence: Synthetic oligonucleotide
agcgcugaaaccaguuacg

SEQ ID NO: 1693539 - RNA, 19 nt, Artificial Sequence
  Description of Artificial Sequence: Synthetic oligonucleotide
gacugcacaguggaggcug

SEQ ID NO: 1693540 - RNA, 19 nt, Artificial Sequence
  Description of Artificial Sequence: Synthetic oligonucleotide
cgaagguucugcuuggugg

SEQ ID NO: 1693541 - RNA, 19 nt, Artificial Sequence
  Description of Artificial Sequence: Synthetic oligonucleotide
ugacgcugggccuggagcu

SEQ ID NO: 1693542 - RNA, 19 nt, Artificial Sequence
  Description of Artificial Sequence: Synthetic oligonucleotide
uacggagacgaccccugcc

SEQ ID NO: 1693543 - RNA, 19 nt, Artificial Sequence
  Description of Artificial Sequence: Synthetic oligonucleotide
ccuccucucaaauaugaag

SEQ ID NO: 1693544 - RNA, 19 nt, Artificial Sequence
  Description of Artificial Sequence: Synthetic oligonucleotide
uguaaccucccgccacugc

SEQ ID NO: 1693545 - RNA, 19 nt, Artificial Sequence
  Description of Artificial Sequence: Synthetic oligonucleotide
aaacgggccacaguguuuu

SEQ ID NO: 1693546 - RNA, 19 nt, Artificial Sequence
  Description of Artificial Sequence: Synthetic oligonucleotide
uuuccgggccucccugagg

SEQ ID NO: 1693547 - RNA, 19 nt, Artificial Sequence
  Description of Artificial Sequence: Synthetic oligonucleotide
uguccugguaagucagcca

SEQ ID NO: 1693548 - RNA, 19 nt, Artificial Sequence
  Description of Artificial Sequence: Synthetic oligonucleotide
uccuguaaagcagggugug

SEQ ID NO: 1693549 - RNA, 19 nt, Artificial Sequence
  Description of Artificial Sequence: Synthetic oligonucleotide
ugcacggcuugcuccagcc

SEQ ID NO: 1693550 - RNA, 19 nt, Artificial Sequence
  Description of Artificial Sequence: Synthetic oligonucleotide
uguagugagaaggcccaga

SEQ ID NO: 1693551 - RNA, 19 nt, Artificial Sequence
  Description of Artificial Sequence: Synthetic oligonucleotide
gaaauccccagggaggaga

SEQ ID NO: 1693552 - RNA, 19 nt, Artificial Sequence
  Description of Artificial Sequence: Synthetic oligonucleotide
cacccuugccuguagugag

SEQ ID NO: 1693553 - RNA, 19 nt, Artificial Sequence
  Description of Artificial Sequence: Synthetic oligonucleotide
gguaauauaucugcauuga

SEQ ID NO: 1693554 - RNA, 19 nt, Artificial Sequence
  Description of Artificial Sequence: Synthetic oligonucleotide
uguuccaccugggaucucu

SEQ ID NO: 1693555 - RNA, 19 nt, Artificial Sequence
  Description of Artificial Sequence: Synthetic oligonucleotide
acacccuaggugguaugcc

SEQ ID NO: 1693556 - RNA, 19 nt, Artificial Sequence
  Description of Artificial Sequence: Synthetic oligonucleotide
guaaccucccgccacugca

SEQ ID NO: 1693557 - RNA, 19 nt, Artificial Sequence
  Description of Artificial Sequence: Synthetic oligonucleotide
agcaggcacgaccaagucu

SEQ ID NO: 1693558 - RNA, 19 nt, Artificial Sequence
  Description of Artificial Sequence: Synthetic oligonucleotide
uagugagaaggcccagaac

SEQ ID NO: 1693559 - RNA, 19 nt, Artificial Sequence
  Description of Artificial Sequence: Synthetic oligonucleotide
auaccagcugcaaagcgca

SEQ ID NO: 1693560 - RNA, 19 nt, Artificial Sequence
  Description of Artificial Sequence: Synthetic oligonucleotide
cuguuguauugucucuccc

SEQ ID NO: 1693561 - RNA, 19 nt, Artificial Sequence
  Description of Artificial Sequence: Synthetic oligonucleotide
cuccaacgucguaacaccc

SEQ ID NO: 1693562 - RNA, 19 nt, Artificial Sequence
  Description of Artificial Sequence: Synthetic oligonucleotide
ucgggcuguacuccacugc

SEQ ID NO: 1693563 - RNA, 19 nt, Artificial Sequence
  Description of Artificial Sequence: Synthetic oligonucleotide
uuggcuugacgcuggcaug

SEQ ID NO: 1693564 - RNA, 19 nt, Artificial Sequence
  Description of Artificial Sequence: Synthetic oligonucleotide
aggcaguagcaccaggccu

SEQ ID NO: 1693565 - RNA, 19 nt, Artificial Sequence
  Description of Artificial Sequence: Synthetic oligonucleotide
guaugccuuccaccgagcc

SEQ ID NO: 1693566 - RNA, 19 nt, Artificial Sequence
  Description of Artificial Sequence: Synthetic oligonucleotide
aacacgagcaaugcaugua

SEQ ID NO: 1693567 - RNA, 19 nt, Artificial Sequence
  Description of Artificial Sequence: Synthetic oligonucleotide
uaucugcauugauguaacc

SEQ ID NO: 1693568 - RNA, 19 nt, Artificial Sequence
  Description of Artificial Sequence: Synthetic oligonucleotide
cacgagcaaugcauguacc

SEQ ID NO: 1693569 - RNA, 19 nt, Artificial Sequence
  Description of Artificial Sequence: Synthetic oligonucleotide
auauccaaacgggccacag

SEQ ID NO: 1693570 - RNA, 19 nt, Artificial Sequence
  Description of Artificial Sequence: Synthetic oligonucleotide
uccaaacgggccacagugu

SEQ ID NO: 1693571 - RNA, 19 nt, Artificial Sequence
  Description of Artificial Sequence: Synthetic oligonucleotide
guaggcuguuggcuugacg

SEQ ID NO: 1693572 - RNA, 19 nt, Artificial Sequence
  Description of Artificial Sequence: Synthetic oligonucleotide
cagccucaagcuuugugug

SEQ ID NO: 1693573 - RNA, 19 nt, Artificial Sequence
  Description of Artificial Sequence: Synthetic oligonucleotide
cucaaauaugaagcccagc

SEQ ID NO: 1693574 - RNA, 19 nt, Artificial Sequence
  Description of Artificial Sequence: Synthetic oligonucleotide
ccucguagccauaaucagg

SEQ ID NO: 1693575 - RNA, 19 nt, Artificial Sequence
  Description of Artificial Sequence: Synthetic oligonucleotide
gcauugauguaaccucccg

SEQ ID NO: 1693576 - RNA, 19 nt, Artificial Sequence
  Description of Artificial Sequence: Synthetic oligonucleotide
ugcguaggcuguuggcuug

SEQ ID NO: 1693577 - RNA, 19 nt, Artificial Sequence
  Description of Artificial Sequence: Synthetic oligonucleotide
gccauaaucaggcccaauc

SEQ ID NO: 1693578 - RNA, 19 nt, Artificial Sequence
  Description of Artificial Sequence: Synthetic oligonucleotide
uuacggagacgaccccugc

SEQ ID NO: 1693579 - RNA, 19 nt, Artificial Sequence
  Description of Artificial Sequence: Synthetic oligonucleotide
gaaggcccagaaccacagg

SEQ ID NO: 1693580 - RNA, 19 nt, Artificial Sequence
  Description of Artificial Sequence: Synthetic oligonucleotide
gaagguucugcuugguggu

SEQ ID NO: 1693581 - RNA, 19 nt, Artificial Sequence
  Description of Artificial Sequence: Synthetic oligonucleotide
gucguaacacccaccuuag

SEQ ID NO: 1693582 - RNA, 19 nt, Artificial Sequence
  Description of Artificial Sequence: Synthetic oligonucleotide
agaaggcccagaaccacag

SEQ ID NO: 1693583 - RNA, 19 nt, Artificial Sequence
  Description of Artificial Sequence: Synthetic oligonucleotide
gaugguagucuugcacggc

SEQ ID NO: 1693584 - RNA, 19 nt, Artificial Sequence
  Description of Artificial Sequence: Synthetic oligonucleotide
gaugcugagccgccuguuc

SEQ ID NO: 1693585 - RNA, 19 nt, Artificial Sequence
  Description of Artificial Sequence: Synthetic oligonucleotide
uguagccucguagccauaa

SEQ ID NO: 1693586 - RNA, 19 nt, Artificial Sequence
  Description of Artificial Sequence: Synthetic oligonucleotide
accguugcugaaugugaug

SEQ ID NO: 1693587 - RNA, 19 nt, Artificial Sequence
  Description of Artificial Sequence: Synthetic oligonucleotide
cuggugcuugugaaauccc

SEQ ID NO: 1693588 - RNA, 19 nt, Artificial Sequence
  Description of Artificial Sequence: Synthetic oligonucleotide
cuguccugguaagucagcc

SEQ ID NO: 1693589 - RNA, 19 nt, Artificial Sequence
  Description of Artificial Sequence: Synthetic oligonucleotide
caagcuuuguguggccugc

SEQ ID NO: 1693590 - RNA, 19 nt, Artificial Sequence
  Description of Artificial Sequence: Synthetic oligonucleotide
gacgcuggcaugaccgaag

SEQ ID NO: 1693591 - RNA, 19 nt, Artificial Sequence
  Description of Artificial Sequence: Synthetic oligonucleotide
guuguauugggcucuugcu

SEQ ID NO: 1693592 - RNA, 19 nt, Artificial Sequence
  Description of Artificial Sequence: Synthetic oligonucleotide
uccuguuguauugggcucu

SEQ ID NO: 1693593 - RNA, 19 nt, Artificial Sequence
  Description of Artificial Sequence: Synthetic oligonucleotide
cacacccuugccuguagug

SEQ ID NO: 1693594 - RNA, 19 nt, Artificial Sequence
  Description of Artificial Sequence: Synthetic oligonucleotide
agaguccuguaaagcaggg

SEQ ID NO: 1693595 - RNA, 19 nt, Artificial Sequence
  Description of Artificial Sequence: Synthetic oligonucleotide
cugcagaguccuguaaagc

SEQ ID NO: 1693596 - RNA, 19 nt, Artificial Sequence
  Description of Artificial Sequence: Synthetic oligonucleotide
ugcccagugcuuuccgggc

SEQ ID NO: 1693597 - RNA, 19 nt, Artificial Sequence
  Description of Artificial Sequence: Synthetic oligonucleotide
uccuccucucaaauaugaa

SEQ ID NO: 1693598 - RNA, 19 nt, Artificial Sequence
  Description of Artificial Sequence: Synthetic oligonucleotide
aguuacggagacgaccccu

SEQ ID NO: 1693599 - RNA, 19 nt, Artificial Sequence
  Description of Artificial Sequence: Synthetic oligonucleotide
uuuacccgucuguucuaga

SEQ ID NO: 1693600 - RNA, 19 nt, Artificial Sequence
  Description of Artificial Sequence: Synthetic oligonucleotide
ccguugcugaaugugaugg

SEQ ID NO: 1693601 - RNA, 19 nt, Artificial Sequence
  Description of Artificial Sequence: Synthetic oligonucleotide
gaguccuguuguauugggc

SEQ ID NO: 1693602 - RNA, 19 nt, Artificial Sequence
  Description of Artificial Sequence: Synthetic oligonucleotide
gggagguuuucuuuggcca

SEQ ID NO: 1693603 - RNA, 19 nt, Artificial Sequence
  Description of Artificial Sequence: Synthetic oligonucleotide
ucucuccaacgucguaaca

SEQ ID NO: 1693604 - RNA, 19 nt, Artificial Sequence
  Description of Artificial Sequence: Synthetic oligonucleotide
cucacccuguccugguaag

SEQ ID NO: 1693605 - RNA, 19 nt, Artificial Sequence
  Description of Artificial Sequence: Synthetic oligonucleotide
guuggcuugacgcuggcau

SEQ ID NO: 1693606 - RNA, 19 nt, Artificial Sequence
  Description of Artificial Sequence: Synthetic oligonucleotide
cauaaucaggcccaauccu

SEQ ID NO: 1693607 - RNA, 19 nt, Artificial Sequence
  Description of Artificial Sequence: Synthetic oligonucleotide
guuacggagacgaccccug

SEQ ID NO: 1693608 - RNA, 19 nt, Artificial Sequence
  Description of Artificial Sequence: Synthetic oligonucleotide
cugggaucucugcugcgcc

SEQ ID NO: 1693609 - RNA, 19 nt, Artificial Sequence
  Description of Artificial Sequence: Synthetic oligonucleotide
aaccaguuacggagacgac

SEQ ID NO: 1693610 - RNA, 19 nt, Artificial Sequence
  Description of Artificial Sequence: Synthetic oligonucleotide
ugccuguagugagaaggcc

SEQ ID NO: 1693611 - RNA, 19 nt, Artificial Sequence
  Description of Artificial Sequence: Synthetic oligonucleotide
caucagcagcugcuggcgg

SEQ ID NO: 1693612 - RNA, 19 nt, Artificial Sequence
  Description of Artificial Sequence: Synthetic oligonucleotide
gauguaaccucccgccacu

SEQ ID NO: 1693613 - RNA, 19 nt, Artificial Sequence
  Description of Artificial Sequence: Synthetic oligonucleotide
acgaccccugcccagugcu

SEQ ID NO: 1693614 - RNA, 19 nt, Artificial Sequence
  Description of Artificial Sequence: Synthetic oligonucleotide
aacacccaccuuagcagcu

SEQ ID NO: 1693615 - RNA, 19 nt, Artificial Sequence
  Description of Artificial Sequence: Synthetic oligonucleotide
uugacgcuggcaugaccga

SEQ ID NO: 1693616 - RNA, 19 nt, Artificial Sequence
  Description of Artificial Sequence: Synthetic oligonucleotide
caacgucguaacacccacc

SEQ ID NO: 1693617 - RNA, 19 nt, Artificial Sequence
  Description of Artificial Sequence: Synthetic oligonucleotide
acacccuugccuguaguga

SEQ ID NO: 1693618 - RNA, 19 nt, Artificial Sequence
  Description of Artificial Sequence: Synthetic oligonucleotide
aacgggccacaguguuuuc

SEQ ID NO: 1693619 - RNA, 19 nt, Artificial Sequence
  Description of Artificial Sequence: Synthetic oligonucleotide
ucguagccauaaucaggcc

SEQ ID NO: 1693620 - RNA, 19 nt, Artificial Sequence
  Description of Artificial Sequence: Synthetic oligonucleotide
gcaggcacgaccaagucuc

SEQ ID NO: 1693621 - RNA, 19 nt, Artificial Sequence
  Description of Artificial Sequence: Synthetic oligonucleotide
cacacccuaggugguaugc

SEQ ID NO: 1693622 - RNA, 19 nt, Artificial Sequence
  Description of Artificial Sequence: Synthetic oligonucleotide
gguaagucagccacuucug

SEQ ID NO: 1693623 - RNA, 19 nt, Artificial Sequence
  Description of Artificial Sequence: Synthetic oligonucleotide
caauccuggugcuugugaa

SEQ ID NO: 1693624 - RNA, 19 nt, Artificial Sequence
  Description of Artificial Sequence: Synthetic oligonucleotide
ggccauauccaaacgggcc

SEQ ID NO: 1693625 - RNA, 19 nt, Artificial Sequence
  Description of Artificial Sequence: Synthetic oligonucleotide
cacaguggcggacugcaca

SEQ ID NO: 1693626 - RNA, 19 nt, Artificial Sequence
  Description of Artificial Sequence: Synthetic oligonucleotide
guaauauaucugcauugau

SEQ ID NO: 1693627 - RNA, 19 nt, Artificial Sequence
  Description of Artificial Sequence: Synthetic oligonucleotide
gcuuuguguggccugcagc

SEQ ID NO: 1693628 - RNA, 19 nt, Artificial Sequence
  Description of Artificial Sequence: Synthetic oligonucleotide
cgguaauauaucugcauug

SEQ ID NO: 1693629 - RNA, 19 nt, Artificial Sequence
  Description of Artificial Sequence: Synthetic oligonucleotide
ggaucuguaguuccaccuc

SEQ ID NO: 1693630 - RNA, 19 nt, Artificial Sequence
  Description of Artificial Sequence: Synthetic oligonucleotide
uugcacggcuugcuccagc

SEQ ID NO: 1693631 - RNA, 19 nt, Artificial Sequence
  Description of Artificial Sequence: Synthetic oligonucleotide
uggauccccuccagcucag

SEQ ID NO: 1693632 - RNA, 19 nt, Artificial Sequence
  Description of Artificial Sequence: Synthetic oligonucleotide
ugggaucucugcugcgccu

SEQ ID NO: 1693633 - RNA, 19 nt, Artificial Sequence
  Description of Artificial Sequence: Synthetic oligonucleotide
uaccagcugcaaagcgcag

SEQ ID NO: 1693634 - RNA, 19 nt, Artificial Sequence
  Description of Artificial Sequence: Synthetic oligonucleotide
ccuagagcucagcacagug

SEQ ID NO: 1693635 - RNA, 19 nt, Artificial Sequence
  Description of Artificial Sequence: Synthetic oligonucleotide
cuguagaacugccagcgcu

SEQ ID NO: 1693636 - RNA, 19 nt, Artificial Sequence
  Description of Artificial Sequence: Synthetic oligonucleotide
gccuguagugagaaggccc

SEQ ID NO: 1693637 - RNA, 19 nt, Artificial Sequence
  Description of Artificial Sequence: Synthetic oligonucleotide
uggcggugaugcugagccg

SEQ ID NO: 1693638 - RNA, 19 nt, Artificial Sequence
  Description of Artificial Sequence: Synthetic oligonucleotide
uuuguguggccugcagcaa

SEQ ID NO: 1693639 - RNA, 19 nt, Artificial Sequence
  Description of Artificial Sequence: Synthetic oligonucleotide
cuuggagcacagaguccug

SEQ ID NO: 1693640 - RNA, 19 nt, Artificial Sequence
  Description of Artificial Sequence: Synthetic oligonucleotide
ugguagucuugcacggcuu

SEQ ID NO: 1693641 - RNA, 19 nt, Artificial Sequence
  Description of Artificial Sequence: Synthetic oligonucleotide
gcauguaccaaugggcuga

SEQ ID NO: 1693642 - RNA, 19 nt, Artificial Sequence
  Description of Artificial Sequence: Synthetic oligonucleotide
agccgugugacgcccuccu

SEQ ID NO: 1693643 - RNA, 19 nt, Artificial Sequence
  Description of Artificial Sequence: Synthetic oligonucleotide
cguaacacccaccuuagca

SEQ ID NO: 1693644 - RNA, 19 nt, Artificial Sequence
  Description of Artificial Sequence: Synthetic oligonucleotide
guaccaaugggcugacgcu

SEQ ID NO: 1693645 - RNA, 19 nt, Artificial Sequence
  Description of Artificial Sequence: Synthetic oligonucleotide
uccagccaccugcguaggc

SEQ ID NO: 1693646 - RNA, 19 nt, Artificial Sequence
  Description of Artificial Sequence: Synthetic oligonucleotide
uccuccuggcuuagcucca

SEQ ID NO: 1693647 - RNA, 19 nt, Artificial Sequence
  Description of Artificial Sequence: Synthetic oligonucleotide
caccugcguaggcuguugg

SEQ ID NO: 1693648 - RNA, 19 nt, Artificial Sequence
  Description of Artificial Sequence: Synthetic oligonucleotide
guggcggacugcacagugg

SEQ ID NO: 1693649 - RNA, 19 nt, Artificial Sequence
  Description of Artificial Sequence: Synthetic oligonucleotide
uccuggugcuugugaaauc

SEQ ID NO: 1693650 - RNA, 19 nt, Artificial Sequence
  Description of Artificial Sequence: Synthetic oligonucleotide
cagaagccgugugacgccc

SEQ ID NO: 1693651 - RNA, 19 nt, Artificial Sequence
  Description of Artificial Sequence: Synthetic oligonucleotide
gcgcugaaaccaguuacgg

SEQ ID NO: 1693652 - RNA, 19 nt, Artificial Sequence
  Description of Artificial Sequence: Synthetic oligonucleotide
cuucuuuucucgguaauau

SEQ ID NO: 1693653 - RNA, 19 nt, Artificial Sequence
  Description of Artificial Sequence: Synthetic oligonucleotide
uguuggcuugacgcuggca

SEQ ID NO: 1693654 - RNA, 19 nt, Artificial Sequence
  Description of Artificial Sequence: Synthetic oligonucleotide
gaagccgugugacgcccuc

SEQ ID NO: 1693655 - RNA, 19 nt, Artificial Sequence
  Description of Artificial Sequence: Synthetic oligonucleotide
ccaacgucguaacacccac

SEQ ID NO: 1693656 - RNA, 19 nt, Artificial Sequence
  Description of Artificial Sequence: Synthetic oligonucleotide
gccauugcuuccaucagca

SEQ ID NO: 1693657 - RNA, 19 nt, Artificial Sequence
  Description of Artificial Sequence: Synthetic oligonucleotide
ggcggugaugcugagccgc

SEQ ID NO: 1693658 - RNA, 19 nt, Artificial Sequence
  Description of Artificial Sequence: Synthetic oligonucleotide
uuccaccgagccauugcuu

SEQ ID NO: 1693659 - RNA, 19 nt, Artificial Sequence
  Description of Artificial Sequence: Synthetic oligonucleotide
cacccuguccugguaaguc

SEQ ID NO: 1693660 - RNA, 19 nt, Artificial Sequence
  Description of Artificial Sequence: Synthetic oligonucleotide
acccaccuuagcagcugcc

SEQ ID NO: 1693661 - RNA, 19 nt, Artificial Sequence
  Description of Artificial Sequence: Synthetic oligonucleotide
caguuacggagacgacccc

SEQ ID NO: 1693662 - RNA, 19 nt, Artificial Sequence
  Description of Artificial Sequence: Synthetic oligonucleotide
gccucaagcuuuguguggc

SEQ ID NO: 1693663 - RNA, 19 nt, Artificial Sequence
  Description of Artificial Sequence: Synthetic oligonucleotide
cacaguguuuucucuccaa

SEQ ID NO: 1693664 - RNA, 19 nt, Artificial Sequence
  Description of Artificial Sequence: Synthetic oligonucleotide
uccuagagcucagcacagu

SEQ ID NO: 1693665 - RNA, 19 nt, Artificial Sequence
  Description of Artificial Sequence: Synthetic oligonucleotide
caccuccuguagcacacuc

SEQ ID NO: 1693666 - RNA, 19 nt, Artificial Sequence
  Description of Artificial Sequence: Synthetic oligonucleotide
ggagacgaccccugcccag

SEQ ID NO: 1693667 - RNA, 19 nt, Artificial Sequence
  Description of Artificial Sequence: Synthetic oligonucleotide
gcagaagccgugugacgcc

SEQ ID NO: 1693668 - RNA, 19 nt, Artificial Sequence
  Description of Artificial Sequence: Synthetic oligonucleotide
cugagccgccuguuccacc

SEQ ID NO: 1693669 - RNA, 19 nt, Artificial Sequence
  Description of Artificial Sequence: Synthetic oligonucleotide
agguuuucuuuggccauau

SEQ ID NO: 1693670 - RNA, 19 nt, Artificial Sequence
  Description of Artificial Sequence: Synthetic oligonucleotide
ugacgcuggcaugaccgaa

SEQ ID NO: 1693671 - RNA, 19 nt, Artificial Sequence
  Description of Artificial Sequence: Synthetic oligonucleotide
gaaugugaugggugcuggu

SEQ ID NO: 1693672 - RNA, 19 nt, Artificial Sequence
  Description of Artificial Sequence: Synthetic oligonucleotide
ucacccuguccugguaagu

SEQ ID NO: 1693673 - RNA, 19 nt, Artificial Sequence
  Description of Artificial Sequence: Synthetic oligonucleotide
agacgaccccugcccagug

SEQ ID NO: 1693674 - RNA, 19 nt, Artificial Sequence
  Description of Artificial Sequence: Synthetic oligonucleotide
cauguaccaaugggcugac

SEQ ID NO: 1693675 - RNA, 19 nt, Artificial Sequence
  Description of Artificial Sequence: Synthetic oligonucleotide
cagaaccacagggcucggg

SEQ ID NO: 1693676 - RNA, 19 nt, Artificial Sequence
  Description of Artificial Sequence: Synthetic oligonucleotide
cuuccaccgagccauugcu

SEQ ID NO: 1693677 - RNA, 19 nt, Artificial Sequence
  Description of Artificial Sequence: Synthetic oligonucleotide
agcucagccucaagcuuug

SEQ ID NO: 1693678 - RNA, 19 nt, Artificial Sequence
  Description of Artificial Sequence: Synthetic oligonucleotide
cgcagaagccgugugacgc

SEQ ID NO: 1693679 - RNA, 19 nt, Artificial Sequence
  Description of Artificial Sequence: Synthetic oligonucleotide
ggcccaauccuggugcuug

SEQ ID NO: 1693680 - RNA, 19 nt, Artificial Sequence
  Description of Artificial Sequence: Synthetic oligonucleotide
acgggccacaguguuuucu

SEQ ID NO: 1693681 - RNA, 19 nt, Artificial Sequence
  Description of Artificial Sequence: Synthetic oligonucleotide
gcuguagaacugccagcgc

SEQ ID NO: 1693682 - RNA, 19 nt, Artificial Sequence
  Description of Artificial Sequence: Synthetic oligonucleotide
ucccgccacugcaccagga

SEQ ID NO: 1693683 - RNA, 19 nt, Artificial Sequence
  Description of Artificial Sequence: Synthetic oligonucleotide
gugguaugccuuccaccga

SEQ ID NO: 1693684 - RNA, 19 nt, Artificial Sequence
  Description of Artificial Sequence: Synthetic oligonucleotide
gucugguagugcuguaacu

SEQ ID NO: 1693685 - RNA, 19 nt, Artificial Sequence
  Description of Artificial Sequence: Synthetic oligonucleotide
ugacacacccuagguggua

SEQ ID NO: 1693686 - RNA, 19 nt, Artificial Sequence
  Description of Artificial Sequence: Synthetic oligonucleotide
gccgggaagccuucauacc

SEQ ID NO: 1693687 - RNA, 19 nt, Artificial Sequence
  Description of Artificial Sequence: Synthetic oligonucleotide
ccuggaccguugcugaaug

SEQ ID NO: 1693688 - RNA, 19 nt, Artificial Sequence
  Description of Artificial Sequence: Synthetic oligonucleotide
auguaccaaugggcugacg

SEQ ID NO: 1693689 - RNA, 19 nt, Artificial Sequence
  Description of Artificial Sequence: Synthetic oligonucleotide
gagguuuucuuuggccaua

SEQ ID NO: 1693690 - RNA, 19 nt, Artificial Sequence
  Description of Artificial Sequence: Synthetic oligonucleotide
ccgggaagccuucauacca

SEQ ID NO: 1693691 - RNA, 19 nt, Artificial Sequence
  Description of Artificial Sequence: Synthetic oligonucleotide
guauugucucucccuggcu

SEQ ID NO: 1693692 - RNA, 19 nt, Artificial Sequence
  Description of Artificial Sequence: Synthetic oligonucleotide
ggaccguugcugaauguga

SEQ ID NO: 1693693 - RNA, 19 nt, Artificial Sequence
  Description of Artificial Sequence: Synthetic oligonucleotide
uccucacccuguccuggua

SEQ ID NO: 1693694 - RNA, 19 nt, Artificial Sequence
  Description of Artificial Sequence: Synthetic oligonucleotide
cggacugcacaguggaggc

SEQ ID NO: 1693695 - RNA, 19 nt, Artificial Sequence
  Description of Artificial Sequence: Synthetic oligonucleotide
caugaccgaagguucugcu

SEQ ID NO: 1693696 - RNA, 19 nt, Artificial Sequence
  Description of Artificial Sequence: Synthetic oligonucleotide
gcuugacgcuggcaugacc

SEQ ID NO: 1693697 - RNA, 19 nt, Artificial Sequence
  Description of Artificial Sequence: Synthetic oligonucleotide
cuggcagaagcaggcacga

SEQ ID NO: 1693698 - RNA, 19 nt, Artificial Sequence
  Description of Artificial Sequence: Synthetic oligonucleotide
agcaccaggccuggaccug

SEQ ID NO: 1693699 - RNA, 19 nt, Artificial Sequence
  Description of Artificial Sequence: Synthetic oligonucleotide
accuggaccguugcugaau

SEQ ID NO: 1693700 - RNA, 19 nt, Artificial Sequence
  Description of Artificial Sequence: Synthetic oligonucleotide
gcaugaccgaagguucugc

SEQ ID NO: 1693701 - RNA, 19 nt, Artificial Sequence
  Description of Artificial Sequence: Synthetic oligonucleotide
gcgcagaagccgugugacg

SEQ ID NO: 1693702 - RNA, 19 nt, Artificial Sequence
  Description of Artificial Sequence: Synthetic oligonucleotide
cacagaguccuguuguauu

SEQ ID NO: 1693703 - RNA, 19 nt, Artificial Sequence
  Description of Artificial Sequence: Synthetic oligonucleotide
guccuguaaagcagggugu

SEQ ID NO: 1693704 - RNA, 19 nt, Artificial Sequence
  Description of Artificial Sequence: Synthetic oligonucleotide
accucccgccacugcacca

SEQ ID NO: 1693705 - RNA, 19 nt, Artificial Sequence
  Description of Artificial Sequence: Synthetic oligonucleotide
ggaucucugcugcgccucc

SEQ ID NO: 1693706 - RNA, 19 nt, Artificial Sequence
  Description of Artificial Sequence: Synthetic oligonucleotide
ccaccgagccauugcuucc

SEQ ID NO: 1693707 - RNA, 19 nt, Artificial Sequence
  Description of Artificial Sequence: Synthetic oligonucleotide
cgucguaacacccaccuua

SEQ ID NO: 1693708 - RNA, 19 nt, Artificial Sequence
  Description of Artificial Sequence: Synthetic oligonucleotide
aggcacgaccaagucucug

SEQ ID NO: 1693709 - RNA, 19 nt, Artificial Sequence
  Description of Artificial Sequence: Synthetic oligonucleotide
caguccucgggccugggcu

SEQ ID NO: 1693710 - RNA, 19 nt, Artificial Sequence
  Description of Artificial Sequence: Synthetic oligonucleotide
cacccuaggugguaugccu

SEQ ID NO: 1693711 - RNA, 19 nt, Artificial Sequence
  Description of Artificial Sequence: Synthetic oligonucleotide
ggcaugaccgaagguucug

SEQ ID NO: 1693712 - RNA, 19 nt, Artificial Sequence
  Description of Artificial Sequence: Synthetic oligonucleotide
cuugcacggcuugcuccag

SEQ ID NO: 1693713 - RNA, 19 nt, Artificial Sequence
  Description of Artificial Sequence: Synthetic oligonucleotide
cgucuguucuagaucccag

SEQ ID NO: 1693714 - RNA, 19 nt, Artificial Sequence
  Description of Artificial Sequence: Synthetic oligonucleotide
cucgggccugggcuccucc

SEQ ID NO: 1693715 - RNA, 19 nt, Artificial Sequence
  Description of Artificial Sequence: Synthetic oligonucleotide
cacuuugcuucugcagaca

SEQ ID NO: 1693716 - RNA, 19 nt, Artificial Sequence
  Description of Artificial Sequence: Synthetic oligonucleotide
acgucguaacacccaccuu

SEQ ID NO: 1693717 - RNA, 19 nt, Artificial Sequence
  Description of Artificial Sequence: Synthetic oligonucleotide
ccgccacugcaccaggacc

SEQ ID NO: 1693718 - RNA, 19 nt, Artificial Sequence
  Description of Artificial Sequence: Synthetic oligonucleotide
ccucaagcuuuguguggcc

SEQ ID NO: 1693719 - RNA, 19 nt, Artificial Sequence
  Description of Artificial Sequence: Synthetic oligonucleotide
cgggaagccuucauaccag

SEQ ID NO: 1693720 - RNA, 19 nt, Artificial Sequence
  Description of Artificial Sequence: Synthetic oligonucleotide
acggcuugcuccagccgug

SEQ ID NO: 1693721 - RNA, 19 nt, Artificial Sequence
  Description of Artificial Sequence: Synthetic oligonucleotide
gcacggcuugcuccagccg

SEQ ID NO: 1693722 - RNA, 19 nt, Artificial Sequence
  Description of Artificial Sequence: Synthetic oligonucleotide
ccauugcuuccaucagcag

SEQ ID NO: 1693723 - RNA, 19 nt, Artificial Sequence
  Description of Artificial Sequence: Synthetic oligonucleotide
gcuggcaugaccgaagguu

SEQ ID NO: 1693724 - RNA, 19 nt, Artificial Sequence
  Description of Artificial Sequence: Synthetic oligonucleotide
gguaugccuuccaccgagc

SEQ ID NO: 1693725 - RNA, 19 nt, Artificial Sequence
  Description of Artificial Sequence: Synthetic oligonucleotide
gcccagugcuuuccgggcc

SEQ ID NO: 1693726 - RNA, 19 nt, Artificial Sequence
  Description of Artificial Sequence: Synthetic oligonucleotide
ccgaagguucugcuuggug

SEQ ID NO: 1693727 - RNA, 19 nt, Artificial Sequence
  Description of Artificial Sequence: Synthetic oligonucleotide
ccugaacacgagcaaugca

SEQ ID NO: 1693728 - RNA, 19 nt, Artificial Sequence
  Description of Artificial Sequence: Synthetic oligonucleotide
cuccagccgugccuucuuc

SEQ ID NO: 1693729 - RNA, 19 nt, Artificial Sequence
  Description of Artificial Sequence: Synthetic oligonucleotide
gaccguugcugaaugugau

SEQ ID NO: 1693730 - RNA, 19 nt, Artificial Sequence
  Description of Artificial Sequence: Synthetic oligonucleotide
gaccuggaccguugcugaa

SEQ ID NO: 1693731 - RNA, 19 nt, Artificial Sequence
  Description of Artificial Sequence: Synthetic oligonucleotide
gacagcugcuggaucugua

SEQ ID NO: 1693732 - RNA, 19 nt, Artificial Sequence
  Description of Artificial Sequence: Synthetic oligonucleotide
ccaauccuggugcuuguga

SEQ ID NO: 1693733 - RNA, 19 nt, Artificial Sequence
  Description of Artificial Sequence: Synthetic oligonucleotide
gugaugcugagccgccugu

SEQ ID NO: 1693734 - RNA, 19 nt, Artificial Sequence
  Description of Artificial Sequence: Synthetic oligonucleotide
ccuaggugguaugccuucc

SEQ ID NO: 1693735 - RNA, 19 nt, Artificial Sequence
  Description of Artificial Sequence: Synthetic oligonucleotide
gcaccaggccuggaccugg

SEQ ID NO: 1693736 - RNA, 19 nt, Artificial Sequence
  Description of Artificial Sequence: Synthetic oligonucleotide
gacgcugggccuggagcuc

SEQ ID NO: 1693737 - RNA, 19 nt, Artificial Sequence
  Description of Artificial Sequence: Synthetic oligonucleotide
ugacgcccuccugcaggag

SEQ ID NO: 1693738 - RNA, 19 nt, Artificial Sequence
  Description of Artificial Sequence: Synthetic oligonucleotide
cugacacacccuagguggu

SEQ ID NO: 1693739 - RNA, 19 nt, Artificial Sequence
  Description of Artificial Sequence: Synthetic oligonucleotide
cugcugcgccucccucugg

SEQ ID NO: 1693740 - RNA, 19 nt, Artificial Sequence
  Description of Artificial Sequence: Synthetic oligonucleotide
gagacgaccccugcccagu

SEQ ID NO: 1693741 - RNA, 19 nt, Artificial Sequence
  Description of Artificial Sequence: Synthetic oligonucleotide
cucaagcuuuguguggccu

SEQ ID NO: 1693742 - RNA, 19 nt, Artificial Sequence
  Description of Artificial Sequence: Synthetic oligonucleotide
caccgagccauugcuucca

SEQ ID NO: 1693743 - RNA, 19 nt, Artificial Sequence
  Description of Artificial Sequence: Synthetic oligonucleotide
gcaaagcgcagaagccgug

SEQ ID NO: 1693744 - RNA, 19 nt, Artificial Sequence
  Description of Artificial Sequence: Synthetic oligonucleotide
agaagccgugugacgcccu

SEQ ID NO: 1693745 - RNA, 19 nt, Artificial Sequence
  Description of Artificial Sequence: Synthetic oligonucleotide
caaagcgcagaagccgugu

SEQ ID NO: 1693746 - RNA, 19 nt, Artificial Sequence
  Description of Artificial Sequence: Synthetic oligonucleotide
agccauaaucaggcccaau

SEQ ID NO: 1693747 - RNA, 19 nt, Artificial Sequence
  Description of Artificial Sequence: Synthetic oligonucleotide
ugcugccgggaagccuuca

SEQ ID NO: 1693748 - RNA, 19 nt, Artificial Sequence
  Description of Artificial Sequence: Synthetic oligonucleotide
ugccuggaccaaguaccuu

SEQ ID NO: 1693749 - RNA, 19 nt, Artificial Sequence
  Description of Artificial Sequence: Synthetic oligonucleotide
gggaucucugcugcgccuc

SEQ ID NO: 1693750 - RNA, 19 nt, Artificial Sequence
  Description of Artificial Sequence: Synthetic oligonucleotide
cccgucuguucuagauccc

SEQ ID NO: 1693751 - RNA, 19 nt, Artificial Sequence
  Description of Artificial Sequence: Synthetic oligonucleotide
caccaggaccuuggagcac

SEQ ID NO: 1693752 - RNA, 19 nt, Artificial Sequence
  Description of Artificial Sequence: Synthetic oligonucleotide
gacauccugccuggaccaa

SEQ ID NO: 1693753 - RNA, 19 nt, Artificial Sequence
  Description of Artificial Sequence: Synthetic oligonucleotide
gcacacuccucacccuguc

SEQ ID NO: 1693754 - RNA, 19 nt, Artificial Sequence
  Description of Artificial Sequence: Synthetic oligonucleotide
cugagggcaaccgccuucu

SEQ ID NO: 1693755 - RNA, 19 nt, Artificial Sequence
  Description of Artificial Sequence: Synthetic oligonucleotide
cccgccacugcaccaggac

SEQ ID NO: 1693756 - RNA, 19 nt, Artificial Sequence
  Description of Artificial Sequence: Synthetic oligonucleotide
ggaccuuggagcacagagu

SEQ ID NO: 1693757 - RNA, 19 nt, Artificial Sequence
  Description of Artificial Sequence: Synthetic oligonucleotide
cugcguaggcuguuggcuu

SEQ ID NO: 1693758 - RNA, 19 nt, Artificial Sequence
  Description of Artificial Sequence: Synthetic oligonucleotide
caaacgggccacaguguuu

SEQ ID NO: 1693759 - RNA, 19 nt, Artificial Sequence
  Description of Artificial Sequence: Synthetic oligonucleotide
gcuuuccgggccucccuga

SEQ ID NO: 1693760 - RNA, 19 nt, Artificial Sequence
  Description of Artificial Sequence: Synthetic oligonucleotide
guagccucguagccauaau

SEQ ID NO: 1693761 - RNA, 19 nt, Artificial Sequence
  Description of Artificial Sequence: Synthetic oligonucleotide
ggcggacugcacaguggag

SEQ ID NO: 1693762 - RNA, 19 nt, Artificial Sequence
  Description of Artificial Sequence: Synthetic oligonucleotide
gcuggcggugaugcugagc

SEQ ID NO: 1693763 - RNA, 19 nt, Artificial Sequence
  Description of Artificial Sequence: Synthetic oligonucleotide
ccaggaccuuggagcacag

SEQ ID NO: 1693764 - RNA, 19 nt, Artificial Sequence
  Description of Artificial Sequence: Synthetic oligonucleotide
cgcugaaaccaguuacgga

SEQ ID NO: 1693765 - RNA, 19 nt, Artificial Sequence
  Description of Artificial Sequence: Synthetic oligonucleotide
gcugaaugugaugggugcu

SEQ ID NO: 1693766 - RNA, 19 nt, Artificial Sequence
  Description of Artificial Sequence: Synthetic oligonucleotide
gcggugaugcugagccgcc

SEQ ID NO: 1693767 - RNA, 19 nt, Artificial Sequence
  Description of Artificial Sequence: Synthetic oligonucleotide
cgugugacgcccuccugca

SEQ ID NO: 1693768 - RNA, 19 nt, Artificial Sequence
  Description of Artificial Sequence: Synthetic oligonucleotide
cuggaccguugcugaaugu

SEQ ID NO: 1693769 - RNA, 19 nt, Artificial Sequence
  Description of Artificial Sequence: Synthetic oligonucleotide
cgagcaaugcauguaccaa

SEQ ID NO: 1693770 - RNA, 19 nt, Artificial Sequence
  Description of Artificial Sequence: Synthetic oligonucleotide
aggccuggaccuggaccgu

SEQ ID NO: 1693771 - RNA, 19 nt, Artificial Sequence
  Description of Artificial Sequence: Synthetic oligonucleotide
cugagacauccugccugga

SEQ ID NO: 1693772 - RNA, 19 nt, Artificial Sequence
  Description of Artificial Sequence: Synthetic oligonucleotide
gccuucauaccagcugcaa

SEQ ID NO: 1693773 - RNA, 19 nt, Artificial Sequence
  Description of Artificial Sequence: Synthetic oligonucleotide
gggcucgggcuguacucca

SEQ ID NO: 1693774 - RNA, 19 nt, Artificial Sequence
  Description of Artificial Sequence: Synthetic oligonucleotide
ccucacccuguccugguaa

SEQ ID NO: 1693775 - RNA, 19 nt, Artificial Sequence
  Description of Artificial Sequence: Synthetic oligonucleotide
gccgugugacgcccuccug

SEQ ID NO: 1693776 - RNA, 19 nt, Artificial Sequence
  Description of Artificial Sequence: Synthetic oligonucleotide
ccuggaccaaguaccuucu

SEQ ID NO: 1693777 - RNA, 19 nt, Artificial Sequence
  Description of Artificial Sequence: Synthetic oligonucleotide
ggcuugacgcuggcaugac

SEQ ID NO: 1693778 - RNA, 19 nt, Artificial Sequence
  Description of Artificial Sequence: Synthetic oligonucleotide
gggcuguacuccacugcuc

SEQ ID NO: 1693779 - RNA, 19 nt, Artificial Sequence
  Description of Artificial Sequence: Synthetic oligonucleotide
aggcccaauccuggugcuu

SEQ ID NO: 1693780 - RNA, 19 nt, Artificial Sequence
  Description of Artificial Sequence: Synthetic oligonucleotide
caggcccaauccuggugcu

SEQ ID NO: 1693781 - RNA, 19 nt, Artificial Sequence
  Description of Artificial Sequence: Synthetic oligonucleotide
ccugcguaggcuguuggcu

SEQ ID NO: 1693782 - RNA, 19 nt, Artificial Sequence
  Description of Artificial Sequence: Synthetic oligonucleotide
gggcugacgcugggccugg

SEQ ID NO: 1693783 - RNA, 19 nt, Artificial Sequence
  Description of Artificial Sequence: Synthetic oligonucleotide
ccaaacgggccacaguguu

SEQ ID NO: 1693784 - RNA, 19 nt, Artificial Sequence
  Description of Artificial Sequence: Synthetic oligonucleotide
ccaccugcguaggcuguug

SEQ ID NO: 1693785 - RNA, 19 nt, Artificial Sequence
  Description of Artificial Sequence: Synthetic oligonucleotide
ggcucgggcuguacuccac

SEQ ID NO: 1693786 - RNA, 19 nt, Artificial Sequence
  Description of Artificial Sequence: Synthetic oligonucleotide
gcacagaguccuguuguau

SEQ ID NO: 1693787 - RNA, 19 nt, Artificial Sequence
  Description of Artificial Sequence: Synthetic oligonucleotide
guacuccacugcucuuguu

SEQ ID NO: 1693788 - RNA, 19 nt, Artificial Sequence
  Description of Artificial Sequence: Synthetic oligonucleotide
caggcacgaccaagucucu

SEQ ID NO: 1693789 - RNA, 19 nt, Artificial Sequence
  Description of Artificial Sequence: Synthetic oligonucleotide
cgaccaagucucugugcca

SEQ ID NO: 1693790 - RNA, 19 nt, Artificial Sequence
  Description of Artificial Sequence: Synthetic oligonucleotide
ccuguuccaccugggaucu

SEQ ID NO: 1693791 - RNA, 19 nt, Artificial Sequence
  Description of Artificial Sequence: Synthetic oligonucleotide
gggccugaacacgagcaau

SEQ ID NO: 1693792 - RNA, 19 nt, Artificial Sequence
  Description of Artificial Sequence: Synthetic oligonucleotide
cuguagccucguagccaua

SEQ ID NO: 1693793 - RNA, 19 nt, Artificial Sequence
  Description of Artificial Sequence: Synthetic oligonucleotide
cccuugccuguagugagaa

SEQ ID NO: 1693794 - RNA, 19 nt, Artificial Sequence
  Description of Artificial Sequence: Synthetic oligonucleotide
gcguaggcuguuggcuuga

SEQ ID NO: 1693795 - RNA, 19 nt, Artificial Sequence
  Description of Artificial Sequence: Synthetic oligonucleotide
gcucuugcuugggagguuu

SEQ ID NO: 1693796 - RNA, 19 nt, Artificial Sequence
  Description of Artificial Sequence: Synthetic oligonucleotide
cgggcuguacuccacugcu

SEQ ID NO: 1693797 - RNA, 19 nt, Artificial Sequence
  Description of Artificial Sequence: Synthetic oligonucleotide
ccagccaccugcguaggcu

SEQ ID NO: 1693798 - RNA, 19 nt, Artificial Sequence
  Description of Artificial Sequence: Synthetic oligonucleotide
ccgggccucccugagggca

SEQ ID NO: 1693799 - RNA, 19 nt, Artificial Sequence
  Description of Artificial Sequence: Synthetic oligonucleotide
ccagugcuuuccgggccuc

SEQ ID NO: 1693800 - RNA, 19 nt, Artificial Sequence
  Description of Artificial Sequence: Synthetic oligonucleotide
cggagacgaccccugccca

SEQ ID NO: 1693801 - RNA, 19 nt, Artificial Sequence
  Description of Artificial Sequence: Synthetic oligonucleotide
caguggcggacugcacagu

SEQ ID NO: 1693802 - RNA, 19 nt, Artificial Sequence
  Description of Artificial Sequence: Synthetic oligonucleotide
cgccuguuccaccugggau

SEQ ID NO: 1693803 - RNA, 19 nt, Artificial Sequence
  Description of Artificial Sequence: Synthetic oligonucleotide
gccgugccuucuuccuccu

SEQ ID NO: 1693804 - RNA, 19 nt, Artificial Sequence
  Description of Artificial Sequence: Synthetic oligonucleotide
ggcugacgcugggccugga

SEQ ID NO: 1693805 - RNA, 19 nt, Artificial Sequence
  Description of Artificial Sequence: Synthetic oligonucleotide
ccuguuguauugggcucuu

SEQ ID NO: 1693806 - RNA, 19 nt, Artificial Sequence
  Description of Artificial Sequence: Synthetic oligonucleotide
ggccuggaccuggaccguu

SEQ ID NO: 1693807 - RNA, 19 nt, Artificial Sequence
  Description of Artificial Sequence: Synthetic oligonucleotide
cgcuggcaugaccgaaggu

SEQ ID NO: 1693808 - RNA, 19 nt, Artificial Sequence
  Description of Artificial Sequence: Synthetic oligonucleotide
acaucaaagauuuugacgg

SEQ ID NO: 1693809 - RNA, 19 nt, Artificial Sequence
  Description of Artificial Sequence: Synthetic oligonucleotide
ugcaauaugauuuuauuag

SEQ ID NO: 1693810 - RNA, 19 nt, Artificial Sequence
  Description of Artificial Sequence: Synthetic oligonucleotide
aauaaauacucgaccaucc

SEQ ID NO: 1693811 - RNA, 19 nt, Artificial Sequence
  Description of Artificial Sequence: Synthetic oligonucleotide
gauauugccguacaugggg

SEQ ID NO: 1693812 - RNA, 19 nt, Artificial Sequence
  Description of Artificial Sequence: Synthetic oligonucleotide
uagaaauaagaccaggcca

SEQ ID NO: 1693813 - RNA, 19 nt, Artificial Sequence
  Description of Artificial Sequence: Synthetic oligonucleotide
auguaauugggcuucugcc

SEQ ID NO: 1693814 - RNA, 19 nt, Artificial Sequence
  Description of Artificial Sequence: Synthetic oligonucleotide
ugaugguuggucuaugagg

SEQ ID NO: 1693815 - RNA, 19 nt, Artificial Sequence
  Description of Artificial Sequence: Synthetic oligonucleotide
auuuugacggaccuguccg

SEQ ID NO: 1693816 - RNA, 19 nt, Artificial Sequence
  Description of Artificial Sequence: Synthetic oligonucleotide
accacauauugccugaagc

SEQ ID NO: 1693817 - RNA, 19 nt, Artificial Sequence
  Description of Artificial Sequence: Synthetic oligonucleotide
uuuauuagcuuggaaacag

SEQ ID NO: 1693818 - RNA, 19 nt, Artificial Sequence
  Description of Artificial Sequence: Synthetic oligonucleotide
uaacuuuccggucauagga

SEQ ID NO: 1693819 - RNA, 19 nt, Artificial Sequence
  Description of Artificial Sequence: Synthetic oligonucleotide
gauagaccagcucacaugc

SEQ ID NO: 1693820 - RNA, 19 nt, Artificial Sequence
  Description of Artificial Sequence: Synthetic oligonucleotide
aauaacuuuccggucauag

SEQ ID NO: 1693821 - RNA, 19 nt, Artificial Sequence
  Description of Artificial Sequence: Synthetic oligonucleotide
aaaauaggcaguccuagaa

SEQ ID NO: 1693822 - RNA, 19 nt, Artificial Sequence
  Description of Artificial Sequence: Synthetic oligonucleotide
aacugacggcguuacagcc

SEQ ID NO: 1693823 - RNA, 19 nt, Artificial Sequence
  Description of Artificial Sequence: Synthetic oligonucleotide
agaaauaagaccaggccac

SEQ ID NO: 1693824 - RNA, 19 nt, Artificial Sequence
  Description of Artificial Sequence: Synthetic oligonucleotide
aacagccugaaccaaaaga

SEQ ID NO: 1693825 - RNA, 19 nt, Artificial Sequence
  Description of Artificial Sequence: Synthetic oligonucleotide
aacgucucgaacccagucg

SEQ ID NO: 1693826 - RNA, 19 nt, Artificial Sequence
  Description of Artificial Sequence: Synthetic oligonucleotide
acaucguugaauuugugca

SEQ ID NO: 1693827 - RNA, 19 nt, Artificial Sequence
  Description of Artificial Sequence: Synthetic oligonucleotide
aauaggcaguccuagaaau

SEQ ID NO: 1693828 - RNA, 19 nt, Artificial Sequence
  Description of Artificial Sequence: Synthetic oligonucleotide
aguccuagaaauaagacca

SEQ ID NO: 1693829 - RNA, 19 nt, Artificial Sequence
  Description of Artificial Sequence: Synthetic oligonucleotide
auugccugaagcaucaucg

SEQ ID NO: 1693830 - RNA, 19 nt, Artificial Sequence
  Description of Artificial Sequence: Synthetic oligonucleotide
uguaauugggcuucugccc

SEQ ID NO: 1693831 - RNA, 19 nt, Artificial Sequence
  Description of Artificial Sequence: Synthetic oligonucleotide
gaagcaucaucgcaggucc

SEQ ID NO: 1693832 - RNA, 19 nt, Artificial Sequence
  Description of Artificial Sequence: Synthetic oligonucleotide
auagucauuuguuccuagc

SEQ ID NO: 1693833 - RNA, 19 nt, Artificial Sequence
  Description of Artificial Sequence: Synthetic oligonucleotide
aagauuuugacggaccugu

SEQ ID NO: 1693834 - RNA, 19 nt, Artificial Sequence
  Description of Artificial Sequence: Synthetic oligonucleotide
gauguaauugggcuucugc

SEQ ID NO: 1693835 - RNA, 19 nt, Artificial Sequence
  Description of Artificial Sequence: Synthetic oligonucleotide
ugggugaccacauauugcc

SEQ ID NO: 1693836 - RNA, 19 nt, Artificial Sequence
  Description of Artificial Sequence: Synthetic oligonucleotide
uuuguuccuagcaugaaua

SEQ ID NO: 1693837 - RNA, 19 nt, Artificial Sequence
  Description of Artificial Sequence: Synthetic oligonucleotide
ucaaagauuuugacggacc

SEQ ID NO: 1693838 - RNA, 19 nt, Artificial Sequence
  Description of Artificial Sequence: Synthetic oligonucleotide
ggcaucaugaaucaugucc

SEQ ID NO: 1693839 - RNA, 19 nt, Artificial Sequence
  Description of Artificial Sequence: Synthetic oligonucleotide
uauugucuccaccugacac

SEQ ID NO: 1693840 - RNA, 19 nt, Artificial Sequence
  Description of Artificial Sequence: Synthetic oligonucleotide
uggucuaugaggcuuccag

SEQ ID NO: 1693841 - RNA, 19 nt, Artificial Sequence
  Description of Artificial Sequence: Synthetic oligonucleotide
gacaucguugaauuugugc

SEQ ID NO: 1693842 - RNA, 19 nt, Artificial Sequence
  Description of Artificial Sequence: Synthetic oligonucleotide
aaucaggccauaaucauga

SEQ ID NO: 1693843 - RNA, 19 nt, Artificial Sequence
  Description of Artificial Sequence: Synthetic oligonucleotide
aauagucauuuguuccuag

SEQ ID NO: 1693844 - RNA, 19 nt, Artificial Sequence
  Description of Artificial Sequence: Synthetic oligonucleotide
auuacugacaccauagcug

SEQ ID NO: 1693845 - RNA, 19 nt, Artificial Sequence
  Description of Artificial Sequence: Synthetic oligonucleotide
uguuugcugugauagacca

SEQ ID NO: 1693846 - RNA, 19 nt, Artificial Sequence
  Description of Artificial Sequence: Synthetic oligonucleotide
cuacuugccauacuggccc

SEQ ID NO: 1693847 - RNA, 19 nt, Artificial Sequence
  Description of Artificial Sequence: Synthetic oligonucleotide
ucauuuguuccuagcauga

SEQ ID NO: 1693848 - RNA, 19 nt, Artificial Sequence
  Description of Artificial Sequence: Synthetic oligonucleotide
auagggucaccuuauuguc

SEQ ID NO: 1693849 - RNA, 19 nt, Artificial Sequence
  Description of Artificial Sequence: Synthetic oligonucleotide
agcaugaauacuuuucaga

SEQ ID NO: 1693850 - RNA, 19 nt, Artificial Sequence
  Description of Artificial Sequence: Synthetic oligonucleotide
uagucauuuguuccuagca

SEQ ID NO: 1693851 - RNA, 19 nt, Artificial Sequence
  Description of Artificial Sequence: Synthetic oligonucleotide
gauuuugacggaccugucc

SEQ ID NO: 1693852 - RNA, 19 nt, Artificial Sequence
  Description of Artificial Sequence: Synthetic oligonucleotide
aaucuugguagcauuagga

SEQ ID NO: 1693853 - RNA, 19 nt, Artificial Sequence
  Description of Artificial Sequence: Synthetic oligonucleotide
acgucucgaacccagucgc

SEQ ID NO: 1693854 - RNA, 19 nt, Artificial Sequence
  Description of Artificial Sequence: Synthetic oligonucleotide
ugacacggaacccuggccc

SEQ ID NO: 1693855 - RNA, 19 nt, Artificial Sequence
  Description of Artificial Sequence: Synthetic oligonucleotide
aaauaggcaguccuagaaa

SEQ ID NO: 1693856 - RNA, 19 nt, Artificial Sequence
  Description of Artificial Sequence: Synthetic oligonucleotide
ugauagaccagcucacaug

SEQ ID NO: 1693857 - RNA, 19 nt, Artificial Sequence
  Description of Artificial Sequence: Synthetic oligonucleotide
ucaugagagguguccacgg

SEQ ID NO: 1693858 - RNA, 19 nt, Artificial Sequence
  Description of Artificial Sequence: Synthetic oligonucleotide
ccagauaauaacuuuccgg

SEQ ID NO: 1693859 - RNA, 19 nt, Artificial Sequence
  Description of Artificial Sequence: Synthetic oligonucleotide
uuuucagauggacauuaaa

SEQ ID NO: 1693860 - RNA, 19 nt, Artificial Sequence
  Description of Artificial Sequence: Synthetic oligonucleotide
uaggcgggugccauaauag

SEQ ID NO: 1693861 - RNA, 19 nt, Artificial Sequence
  Description of Artificial Sequence: Synthetic oligonucleotide
uuauuagcuuggaaacagc

SEQ ID NO: 1693862 - RNA, 19 nt, Artificial Sequence
  Description of Artificial Sequence: Synthetic oligonucleotide
cuaaggucugcaaugagga

SEQ ID NO: 1693863 - RNA, 19 nt, Artificial Sequence
  Description of Artificial Sequence: Synthetic oligonucleotide
ugauuacugacaccauagc

SEQ ID NO: 1693864 - RNA, 19 nt, Artificial Sequence
  Description of Artificial Sequence: Synthetic oligonucleotide
acagccaaucgugugagcg

SEQ ID NO: 1693865 - RNA, 19 nt, Artificial Sequence
  Description of Artificial Sequence: Synthetic oligonucleotide
cuuauugucuccaccugac

SEQ ID NO: 1693866 - RNA, 19 nt, Artificial Sequence
  Description of Artificial Sequence: Synthetic oligonucleotide
uccacgguguugauuacug

SEQ ID NO: 1693867 - RNA, 19 nt, Artificial Sequence
  Description of Artificial Sequence: Synthetic oligonucleotide
auuaggacccuucuuccca

SEQ ID NO: 1693868 - RNA, 19 nt, Artificial Sequence
  Description of Artificial Sequence: Synthetic oligonucleotide
aaaucaggccauaaucaug

SEQ ID NO: 1693869 - RNA, 19 nt, Artificial Sequence
  Description of Artificial Sequence: Synthetic oligonucleotide
gugcucaugagucuucucc

SEQ ID NO: 1693870 - RNA, 19 nt, Artificial Sequence
  Description of Artificial Sequence: Synthetic oligonucleotide
cagcauacagaguucacug

SEQ ID NO: 1693871 - RNA, 19 nt, Artificial Sequence
  Description of Artificial Sequence: Synthetic oligonucleotide
aaagauuuugacggaccug

SEQ ID NO: 1693872 - RNA, 19 nt, Artificial Sequence
  Description of Artificial Sequence: Synthetic oligonucleotide
agccugaaccaaaagauag

SEQ ID NO: 1693873 - RNA, 19 nt, Artificial Sequence
  Description of Artificial Sequence: Synthetic oligonucleotide
uguccgaggagcagguugc

SEQ ID NO: 1693874 - RNA, 19 nt, Artificial Sequence
  Description of Artificial Sequence: Synthetic oligonucleotide
ucuaugaggcuuccaggca

SEQ ID NO: 1693875 - RNA, 19 nt, Artificial Sequence
  Description of Artificial Sequence: Synthetic oligonucleotide
cauccgagcucccacaggc

SEQ ID NO: 1693876 - RNA, 19 nt, Artificial Sequence
  Description of Artificial Sequence: Synthetic oligonucleotide
aucauguccucaugagagg

SEQ ID NO: 1693877 - RNA, 19 nt, Artificial Sequence
  Description of Artificial Sequence: Synthetic oligonucleotide
ucaccuuauugucuccacc

SEQ ID NO: 1693878 - RNA, 19 nt, Artificial Sequence
  Description of Artificial Sequence: Synthetic oligonucleotide
auaaauacucgaccauccu

SEQ ID NO: 1693879 - RNA, 19 nt, Artificial Sequence
  Description of Artificial Sequence: Synthetic oligonucleotide
aguuugggugaccacauau

SEQ ID NO: 1693880 - RNA, 19 nt, Artificial Sequence
  Description of Artificial Sequence: Synthetic oligonucleotide
ugccacacgacaucguuga

SEQ ID NO: 1693881 - RNA, 19 nt, Artificial Sequence
  Description of Artificial Sequence: Synthetic oligonucleotide
gacacagcuaggauguuug

SEQ ID NO: 1693882 - RNA, 19 nt, Artificial Sequence
  Description of Artificial Sequence: Synthetic oligonucleotide
guuacagccaaucguguga

SEQ ID NO: 1693883 - RNA, 19 nt, Artificial Sequence
  Description of Artificial Sequence: Synthetic oligonucleotide
cacgguguugauuacugac

SEQ ID NO: 1693884 - RNA, 19 nt, Artificial Sequence
  Description of Artificial Sequence: Synthetic oligonucleotide
agucauuuguuccuagcau

SEQ ID NO: 1693885 - RNA, 19 nt, Artificial Sequence
  Description of Artificial Sequence: Synthetic oligonucleotide
acauauugccugaagcauc

SEQ ID NO: 1693886 - RNA, 19 nt, Artificial Sequence
  Description of Artificial Sequence: Synthetic oligonucleotide
uccggucauaggaacagga

SEQ ID NO: 1693887 - RNA, 19 nt, Artificial Sequence
  Description of Artificial Sequence: Synthetic oligonucleotide
ucuguuggccuucugugau

SEQ ID NO: 1693888 - RNA, 19 nt, Artificial Sequence
  Description of Artificial Sequence: Synthetic oligonucleotide
ggaucugcccuccauuucg

SEQ ID NO: 1693889 - RNA, 19 nt, Artificial Sequence
  Description of Artificial Sequence: Synthetic oligonucleotide
caggcuacuugccauacug

SEQ ID NO: 1693890 - RNA, 19 nt, Artificial Sequence
  Description of Artificial Sequence: Synthetic oligonucleotide
uucccauuggccuuccccu

SEQ ID NO: 1693891 - RNA, 19 nt, Artificial Sequence
  Description of Artificial Sequence: Synthetic oligonucleotide
uacagaguucacugaggag

SEQ ID NO: 1693892 - RNA, 19 nt, Artificial Sequence
  Description of Artificial Sequence: Synthetic oligonucleotide
auaagaccaggccaccugu

SEQ ID NO: 1693893 - RNA, 19 nt, Artificial Sequence
  Description of Artificial Sequence: Synthetic oligonucleotide
ugacggaccuguccgagga

SEQ ID NO: 1693894 - RNA, 19 nt, Artificial Sequence
  Description of Artificial Sequence: Synthetic oligonucleotide
auaauaacuuuccggucau

SEQ ID NO: 1693895 - RNA, 19 nt, Artificial Sequence
  Description of Artificial Sequence: Synthetic oligonucleotide
uccaaaauaggcaguccua

SEQ ID NO: 1693896 - RNA, 19 nt, Artificial Sequence
  Description of Artificial Sequence: Synthetic oligonucleotide
uuacagccaaucgugugag

SEQ ID NO: 1693897 - RNA, 19 nt, Artificial Sequence
  Description of Artificial Sequence: Synthetic oligonucleotide
acagccugaaccaaaagau

SEQ ID NO: 1693898 - RNA, 19 nt, Artificial Sequence
  Description of Artificial Sequence: Synthetic oligonucleotide
uaggcaguccuagaaauaa

SEQ ID NO: 1693899 - RNA, 19 nt, Artificial Sequence
  Description of Artificial Sequence: Synthetic oligonucleotide
ccaaaaucaggccauaauc

SEQ ID NO: 1693900 - RNA, 19 nt, Artificial Sequence
  Description of Artificial Sequence: Synthetic oligonucleotide
uuauugucuccaccugaca

SEQ ID NO: 1693901 - RNA, 19 nt, Artificial Sequence
  Description of Artificial Sequence: Synthetic oligonucleotide
aggcacaacagcaggggcc

SEQ ID NO: 1693902 - RNA, 19 nt, Artificial Sequence
  Description of Artificial Sequence: Synthetic oligonucleotide
agguccaaauaaauacucg

SEQ ID NO: 1693903 - RNA, 19 nt, Artificial Sequence
  Description of Artificial Sequence: Synthetic oligonucleotide
caacugacggcguuacagc

SEQ ID NO: 1693904 - RNA, 19 nt, Artificial Sequence
  Description of Artificial Sequence: Synthetic oligonucleotide
acggcguuacagccaaucg

SEQ ID NO: 1693905 - RNA, 19 nt, Artificial Sequence
  Description of Artificial Sequence: Synthetic oligonucleotide
cccuguauaggucagcagg

SEQ ID NO: 1693906 - RNA, 19 nt, Artificial Sequence
  Description of Artificial Sequence: Synthetic oligonucleotide
auaaucaugaggggcccag

SEQ ID NO: 1693907 - RNA, 19 nt, Artificial Sequence
  Description of Artificial Sequence: Synthetic oligonucleotide
gcauacagaguucacugag

SEQ ID NO: 1693908 - RNA, 19 nt, Artificial Sequence
  Description of Artificial Sequence: Synthetic oligonucleotide
gguccaaauaaauacucga

SEQ ID NO: 1693909 - RNA, 19 nt, Artificial Sequence
  Description of Artificial Sequence: Synthetic oligonucleotide
auguccugagugcucauga

SEQ ID NO: 1693910 - RNA, 19 nt, Artificial Sequence
  Description of Artificial Sequence: Synthetic oligonucleotide
ucauguccucaugagaggu

SEQ ID NO: 1693911 - RNA, 19 nt, Artificial Sequence
  Description of Artificial Sequence: Synthetic oligonucleotide
ucgaccauccugagagcag

SEQ ID NO: 1693912 - RNA, 19 nt, Artificial Sequence
  Description of Artificial Sequence: Synthetic oligonucleotide
guccaaauaaauacucgac

SEQ ID NO: 1693913 - RNA, 19 nt, Artificial Sequence
  Description of Artificial Sequence: Synthetic oligonucleotide
uguuccuagcaugaauacu

SEQ ID NO: 1693914 - RNA, 19 nt, Artificial Sequence
  Description of Artificial Sequence: Synthetic oligonucleotide
ggacauuaaauuaaacaca

SEQ ID NO: 1693915 - RNA, 19 nt, Artificial Sequence
  Description of Artificial Sequence: Synthetic oligonucleotide
uccgagcucccacaggcca

SEQ ID NO: 1693916 - RNA, 19 nt, Artificial Sequence
  Description of Artificial Sequence: Synthetic oligonucleotide
uuugacggaccuguccgag

SEQ ID NO: 1693917 - RNA, 19 nt, Artificial Sequence
  Description of Artificial Sequence: Synthetic oligonucleotide
cacugaugcacacccacug

SEQ ID NO: 1693918 - RNA, 19 nt, Artificial Sequence
  Description of Artificial Sequence: Synthetic oligonucleotide
ccuguauaggucagcaggg

SEQ ID NO: 1693919 - RNA, 19 nt, Artificial Sequence
  Description of Artificial Sequence: Synthetic oligonucleotide
caggauauugccguacaug

SEQ ID NO: 1693920 - RNA, 19 nt, Artificial Sequence
  Description of Artificial Sequence: Synthetic oligonucleotide
ucacaugccacacgacauc

SEQ ID NO: 1693921 - RNA, 19 nt, Artificial Sequence
  Description of Artificial Sequence: Synthetic oligonucleotide
uugacggaccuguccgagg

SEQ ID NO: 1693922 - RNA, 19 nt, Artificial Sequence
  Description of Artificial Sequence: Synthetic oligonucleotide
cacaugccacacgacaucg

SEQ ID NO: 1693923 - RNA, 19 nt, Artificial Sequence
  Description of Artificial Sequence: Synthetic oligonucleotide
aggaguuugggugaccaca

SEQ ID NO: 1693924 - RNA, 19 nt, Artificial Sequence
  Description of Artificial Sequence: Synthetic oligonucleotide
gaccacauauugccugaag

SEQ ID NO: 1693925 - RNA, 19 nt, Artificial Sequence
  Description of Artificial Sequence: Synthetic oligonucleotide
cauagcuguugcugcggcg

SEQ ID NO: 1693926 - RNA, 19 nt, Artificial Sequence
  Description of Artificial Sequence: Synthetic oligonucleotide
uuuugacggaccuguccga

SEQ ID NO: 1693927 - RNA, 19 nt, Artificial Sequence
  Description of Artificial Sequence: Synthetic oligonucleotide
acggaccuguccgaggagc

SEQ ID NO: 1693928 - RNA, 19 nt, Artificial Sequence
  Description of Artificial Sequence: Synthetic oligonucleotide
accuuauugucuccaccug

SEQ ID NO: 1693929 - RNA, 19 nt, Artificial Sequence
  Description of Artificial Sequence: Synthetic oligonucleotide
ccauuggccaucuuccucc

SEQ ID NO: 1693930 - RNA, 19 nt, Artificial Sequence
  Description of Artificial Sequence: Synthetic oligonucleotide
ucgcagguccaaauaaaua

SEQ ID NO: 1693931 - RNA, 19 nt, Artificial Sequence
  Description of Artificial Sequence: Synthetic oligonucleotide
uguuccaucuguggguacu

SEQ ID NO: 1693932 - RNA, 19 nt, Artificial Sequence
  Description of Artificial Sequence: Synthetic oligonucleotide
caccauagcuguugcugcg

SEQ ID NO: 1693933 - RNA, 19 nt, Artificial Sequence
  Description of Artificial Sequence: Synthetic oligonucleotide
auagcuguugcugcggcga

SEQ ID NO: 1693934 - RNA, 19 nt, Artificial Sequence
  Description of Artificial Sequence: Synthetic oligonucleotide
aaucccaguaaggcaggug

SEQ ID NO: 1693935 - RNA, 19 nt, Artificial Sequence
  Description of Artificial Sequence: Synthetic oligonucleotide
ugaggaucugcccuccauu

SEQ ID NO: 1693936 - RNA, 19 nt, Artificial Sequence
  Description of Artificial Sequence: Synthetic oligonucleotide
ucucgaacccagucgcugu

SEQ ID NO: 1693937 - RNA, 19 nt, Artificial Sequence
  Description of Artificial Sequence: Synthetic oligonucleotide
ggcuacuugccauacuggc

SEQ ID NO: 1693938 - RNA, 19 nt, Artificial Sequence
  Description of Artificial Sequence: Synthetic oligonucleotide
caugaggggcccagcauac

SEQ ID NO: 1693939 - RNA, 19 nt, Artificial Sequence
  Description of Artificial Sequence: Synthetic oligonucleotide
uguugauuacugacaccau

SEQ ID NO: 1693940 - RNA, 19 nt, Artificial Sequence
  Description of Artificial Sequence: Synthetic oligonucleotide
gaccuguccgaggagcagg

SEQ ID NO: 1693941 - RNA, 19 nt, Artificial Sequence
  Description of Artificial Sequence: Synthetic oligonucleotide
uggccuuccccuguauagg

SEQ ID NO: 1693942 - RNA, 19 nt, Artificial Sequence
  Description of Artificial Sequence: Synthetic oligonucleotide
gccauaaucaugaggggcc

SEQ ID NO: 1693943 - RNA, 19 nt, Artificial Sequence
  Description of Artificial Sequence: Synthetic oligonucleotide
uguugucacugcucauucu

SEQ ID NO: 1693944 - RNA, 19 nt, Artificial Sequence
  Description of Artificial Sequence: Synthetic oligonucleotide
acccacuguccauccaccg

SEQ ID NO: 1693945 - RNA, 19 nt, Artificial Sequence
  Description of Artificial Sequence: Synthetic oligonucleotide
ucuuuccauagggucaccu

SEQ ID NO: 1693946 - RNA, 19 nt, Artificial Sequence
  Description of Artificial Sequence: Synthetic oligonucleotide
ggcguuacagccaaucgug

SEQ ID NO: 1693947 - RNA, 19 nt, Artificial Sequence
  Description of Artificial Sequence: Synthetic oligonucleotide
caaaauaggcaguccuaga

SEQ ID NO: 1693948 - RNA, 19 nt, Artificial Sequence
  Description of Artificial Sequence: Synthetic oligonucleotide
aucaucgcagguccaaaua

SEQ ID NO: 1693949 - RNA, 19 nt, Artificial Sequence
  Description of Artificial Sequence: Synthetic oligonucleotide
gaacccagucgcugugugc

SEQ ID NO: 1693950 - RNA, 19 nt, Artificial Sequence
  Description of Artificial Sequence: Synthetic oligonucleotide
uaauugggcuucugcccug

SEQ ID NO: 1693951 - RNA, 19 nt, Artificial Sequence
  Description of Artificial Sequence: Synthetic oligonucleotide
cauguccucaugagaggug

SEQ ID NO: 1693952 - RNA, 19 nt, Artificial Sequence
  Description of Artificial Sequence: Synthetic oligonucleotide
cugacacggaacccuggcc

SEQ ID NO: 1693953 - RNA, 19 nt, Artificial Sequence
  Description of Artificial Sequence: Synthetic oligonucleotide
uccaccgacucuuuccaua

SEQ ID NO: 1693954 - RNA, 19 nt, Artificial Sequence
  Description of Artificial Sequence: Synthetic oligonucleotide
ugagugcucaugagucuuc

SEQ ID NO: 1693955 - RNA, 19 nt, Artificial Sequence
  Description of Artificial Sequence: Synthetic oligonucleotide
guaauugggcuucugcccu

SEQ ID NO: 1693956 - RNA, 19 nt, Artificial Sequence
  Description of Artificial Sequence: Synthetic oligonucleotide
auagaccagcucacaugcc

SEQ ID NO: 1693957 - RNA, 19 nt, Artificial Sequence
  Description of Artificial Sequence: Synthetic oligonucleotide
ccaaaauaggcaguccuag

SEQ ID NO: 1693958 - RNA, 19 nt, Artificial Sequence
  Description of Artificial Sequence: Synthetic oligonucleotide
ggaaucuugguagcauuag

SEQ ID NO: 1693959 - RNA, 19 nt, Artificial Sequence
  Description of Artificial Sequence: Synthetic oligonucleotide
aguuucuaugcaauaugau

SEQ ID NO: 1693960 - RNA, 19 nt, Artificial Sequence
  Description of Artificial Sequence: Synthetic oligonucleotide
auuucgcacaucaaagauu

SEQ ID NO: 1693961 - RNA, 19 nt, Artificial Sequence
  Description of Artificial Sequence: Synthetic oligonucleotide
uugccguacaugggguggg

SEQ ID NO: 1693962 - RNA, 19 nt, Artificial Sequence
  Description of Artificial Sequence: Synthetic oligonucleotide
cuuuccggucauaggaaca

SEQ ID NO: 1693963 - RNA, 19 nt, Artificial Sequence
  Description of Artificial Sequence: Synthetic oligonucleotide
ccaacugacggcguuacag

SEQ ID NO: 1693964 - RNA, 19 nt, Artificial Sequence
  Description of Artificial Sequence: Synthetic oligonucleotide
acgguguugauuacugaca

SEQ ID NO: 1693965 - RNA, 19 nt, Artificial Sequence
  Description of Artificial Sequence: Synthetic oligonucleotide
uugcugugauagaccagcu

SEQ ID NO: 1693966 - RNA, 19 nt, Artificial Sequence
  Description of Artificial Sequence: Synthetic oligonucleotide
ggccauaaucaugaggggc

SEQ ID NO: 1693967 - RNA, 19 nt, Artificial Sequence
  Description of Artificial Sequence: Synthetic oligonucleotide
ucgcugugugccucuagcu

SEQ ID NO: 1693968 - RNA, 19 nt, Artificial Sequence
  Description of Artificial Sequence: Synthetic oligonucleotide
uaggauguuugcugugaua

SEQ ID NO: 1693969 - RNA, 19 nt, Artificial Sequence
  Description of Artificial Sequence: Synthetic oligonucleotide
uuccggucauaggaacagg

SEQ ID NO: 1693970 - RNA, 19 nt, Artificial Sequence
  Description of Artificial Sequence: Synthetic oligonucleotide
gacccuucuucccaguugu

SEQ ID NO: 1693971 - RNA, 19 nt, Artificial Sequence
  Description of Artificial Sequence: Synthetic oligonucleotide
caucaaagauuuugacgga

SEQ ID NO: 1693972 - RNA, 19 nt, Artificial Sequence
  Description of Artificial Sequence: Synthetic oligonucleotide
ggauauugccguacauggg

SEQ ID NO: 1693973 - RNA, 19 nt, Artificial Sequence
  Description of Artificial Sequence: Synthetic oligonucleotide
aucaugaggggcccagcau

SEQ ID NO: 1693974 - RNA, 19 nt, Artificial Sequence
  Description of Artificial Sequence: Synthetic oligonucleotide
auacucgaccauccugaga

SEQ ID NO: 1693975 - RNA, 19 nt, Artificial Sequence
  Description of Artificial Sequence: Synthetic oligonucleotide
acgacaucguugaauuugu

SEQ ID NO: 1693976 - RNA, 19 nt, Artificial Sequence
  Description of Artificial Sequence: Synthetic oligonucleotide
gucaccuuauugucuccac

SEQ ID NO: 1693977 - RNA, 19 nt, Artificial Sequence
  Description of Artificial Sequence: Synthetic oligonucleotide
ugauguaauugggcuucug

SEQ ID NO: 1693978 - RNA, 19 nt, Artificial Sequence
  Description of Artificial Sequence: Synthetic oligonucleotide
uccuagcaugaauacuuuu

SEQ ID NO: 1693979 - RNA, 19 nt, Artificial Sequence
  Description of Artificial Sequence: Synthetic oligonucleotide
aggcuacuugccauacugg

SEQ ID NO: 1693980 - RNA, 19 nt, Artificial Sequence
  Description of Artificial Sequence: Synthetic oligonucleotide
uguugacaucacugaugca

SEQ ID NO: 1693981 - RNA, 19 nt, Artificial Sequence
  Description of Artificial Sequence: Synthetic oligonucleotide
uacuugccauacuggcccc

SEQ ID NO: 1693982 - RNA, 19 nt, Artificial Sequence
  Description of Artificial Sequence: Synthetic oligonucleotide
auauugccguacauggggu

SEQ ID NO: 1693983 - RNA, 19 nt, Artificial Sequence
  Description of Artificial Sequence: Synthetic oligonucleotide
gacggcguuacagccaauc

SEQ ID NO: 1693984 - RNA, 19 nt, Artificial Sequence
  Description of Artificial Sequence: Synthetic oligonucleotide
caccuuauugucuccaccu

SEQ ID NO: 1693985 - RNA, 19 nt, Artificial Sequence
  Description of Artificial Sequence: Synthetic oligonucleotide
agauuuugacggaccuguc

SEQ ID NO: 1693986 - RNA, 19 nt, Artificial Sequence
  Description of Artificial Sequence: Synthetic oligonucleotide
cugaaccaaaagauaguua

SEQ ID NO: 1693987 - RNA, 19 nt, Artificial Sequence
  Description of Artificial Sequence: Synthetic oligonucleotide
aucgcagguccaaauaaau

SEQ ID NO: 1693988 - RNA, 19 nt, Artificial Sequence
  Description of Artificial Sequence: Synthetic oligonucleotide
ccagggugaggaaucuugg

SEQ ID NO: 1693989 - RNA, 19 nt, Artificial Sequence
  Description of Artificial Sequence: Synthetic oligonucleotide
ugagcacccaguguuccau

SEQ ID NO: 1693990 - RNA, 19 nt, Artificial Sequence
  Description of Artificial Sequence: Synthetic oligonucleotide
cauuucgcacaucaaagau

SEQ ID NO: 1693991 - RNA, 19 nt, Artificial Sequence
  Description of Artificial Sequence: Synthetic oligonucleotide
gaucugcccuccauuucgc

SEQ ID NO: 1693992 - RNA, 19 nt, Artificial Sequence
  Description of Artificial Sequence: Synthetic oligonucleotide
caaugaggaucugcccucc

SEQ ID NO: 1693993 - RNA, 19 nt, Artificial Sequence
  Description of Artificial Sequence: Synthetic oligonucleotide
cugcccuccauuucgcaca

SEQ ID NO: 1693994 - RNA, 19 nt, Artificial Sequence
  Description of Artificial Sequence: Synthetic oligonucleotide
agguugcuaggcgggugcc

SEQ ID NO: 1693995 - RNA, 19 nt, Artificial Sequence
  Description of Artificial Sequence: Synthetic oligonucleotide
gugugagcguuguuaaucu

SEQ ID NO: 1693996 - RNA, 19 nt, Artificial Sequence
  Description of Artificial Sequence: Synthetic oligonucleotide
ugcuaggcgggugccauaa

SEQ ID NO: 1693997 - RNA, 19 nt, Artificial Sequence
  Description of Artificial Sequence: Synthetic oligonucleotide
gcugacacggaacccuggc

SEQ ID NO: 1693998 - RNA, 19 nt, Artificial Sequence
  Description of Artificial Sequence: Synthetic oligonucleotide
cgacucacggcuucggacg

SEQ ID NO: 1693999 - RNA, 19 nt, Artificial Sequence
  Description of Artificial Sequence: Synthetic oligonucleotide
cacacgacaucguugaauu

SEQ ID NO: 1694000 - RNA, 19 nt, Artificial Sequence
  Description of Artificial Sequence: Synthetic oligonucleotide
cuguuggccuucugugaug

SEQ ID NO: 1694001 - RNA, 19 nt, Artificial Sequence
  Description of Artificial Sequence: Synthetic oligonucleotide
agaccaggccaccuguguu

SEQ ID NO: 1694002 - RNA, 19 nt, Artificial Sequence
  Description of Artificial Sequence: Synthetic oligonucleotide
ggcaacgucucgaacccag

SEQ ID NO: 1694003 - RNA, 19 nt, Artificial Sequence
  Description of Artificial Sequence: Synthetic oligonucleotide
ccaccgacucuuuccauag

SEQ ID NO: 1694004 - RNA, 19 nt, Artificial Sequence
  Description of Artificial Sequence: Synthetic oligonucleotide
auccgagcucccacaggcc

SEQ ID NO: 1694005 - RNA, 19 nt, Artificial Sequence
  Description of Artificial Sequence: Synthetic oligonucleotide
cucgaacccagucgcugug

SEQ ID NO: 1694006 - RNA, 19 nt, Artificial Sequence
  Description of Artificial Sequence: Synthetic oligonucleotide
gcccuuguugacaucacug

SEQ ID NO: 1694007 - RNA, 19 nt, Artificial Sequence
  Description of Artificial Sequence: Synthetic oligonucleotide
gacggaccuguccgaggag

SEQ ID NO: 1694008 - RNA, 19 nt, Artificial Sequence
  Description of Artificial Sequence: Synthetic oligonucleotide
augccacacgacaucguug

SEQ ID NO: 1694009 - RNA, 19 nt, Artificial Sequence
  Description of Artificial Sequence: Synthetic oligonucleotide
acugacggcguuacagcca

SEQ ID NO: 1694010 - RNA, 19 nt, Artificial Sequence
  Description of Artificial Sequence: Synthetic oligonucleotide
aggaaucuugguagcauua

SEQ ID NO: 1694011 - RNA, 19 nt, Artificial Sequence
  Description of Artificial Sequence: Synthetic oligonucleotide
cagcaggggcccaacugac

SEQ ID NO: 1694012 - RNA, 19 nt, Artificial Sequence
  Description of Artificial Sequence: Synthetic oligonucleotide
caggaguuugggugaccac

SEQ ID NO: 1694013 - RNA, 19 nt, Artificial Sequence
  Description of Artificial Sequence: Synthetic oligonucleotide
agcaucaucgcagguccaa

SEQ ID NO: 1694014 - RNA, 19 nt, Artificial Sequence
  Description of Artificial Sequence: Synthetic oligonucleotide
gaggaaucuugguagcauu

SEQ ID NO: 1694015 - RNA, 19 nt, Artificial Sequence
  Description of Artificial Sequence: Synthetic oligonucleotide
uggguacucccagggugag

SEQ ID NO: 1694016 - RNA, 19 nt, Artificial Sequence
  Description of Artificial Sequence: Synthetic oligonucleotide
guuggucuaugaggcuucc

SEQ ID NO: 1694017 - RNA, 19 nt, Artificial Sequence
  Description of Artificial Sequence: Synthetic oligonucleotide
cuaggcgggugccauaaua

SEQ ID NO: 1694018 - RNA, 19 nt, Artificial Sequence
  Description of Artificial Sequence: Synthetic oligonucleotide
uguccacgguguugauuac

SEQ ID NO: 1694019 - RNA, 19 nt, Artificial Sequence
  Description of Artificial Sequence: Synthetic oligonucleotide
cucacaugccacacgacau

SEQ ID NO: 1694020 - RNA, 19 nt, Artificial Sequence
  Description of Artificial Sequence: Synthetic oligonucleotide
cugacggcguuacagccaa

SEQ ID NO: 1694021 - RNA, 19 nt, Artificial Sequence
  Description of Artificial Sequence: Synthetic oligonucleotide
gugaggaaucuugguagca

SEQ ID NO: 1694022 - RNA, 19 nt, Artificial Sequence
  Description of Artificial Sequence: Synthetic oligonucleotide
gugauagaccagcucacau

SEQ ID NO: 1694023 - RNA, 19 nt, Artificial Sequence
  Description of Artificial Sequence: Synthetic oligonucleotide
caccgacucuuuccauagg

SEQ ID NO: 1694024 - RNA, 19 nt, Artificial Sequence
  Description of Artificial Sequence: Synthetic oligonucleotide
aucugcccuccauuucgca

SEQ ID NO: 1694025 - RNA, 19 nt, Artificial Sequence
  Description of Artificial Sequence: Synthetic oligonucleotide
ccauuucgcacaucaaaga

SEQ ID NO: 1694026 - RNA, 19 nt, Artificial Sequence
  Description of Artificial Sequence: Synthetic oligonucleotide
ggugagcacccaguguucc

SEQ ID NO: 1694027 - RNA, 19 nt, Artificial Sequence
  Description of Artificial Sequence: Synthetic oligonucleotide
guggguacucccaggguga

SEQ ID NO: 1694028 - RNA, 19 nt, Artificial Sequence
  Description of Artificial Sequence: Synthetic oligonucleotide
uuggucuaugaggcuucca

SEQ ID NO: 1694029 - RNA, 19 nt, Artificial Sequence
  Description of Artificial Sequence: Synthetic oligonucleotide
cagccugaaccaaaagaua

SEQ ID NO: 1694030 - RNA, 19 nt, Artificial Sequence
  Description of Artificial Sequence: Synthetic oligonucleotide
agccaaucgugugagcguu

SEQ ID NO: 1694031 - RNA, 19 nt, Artificial Sequence
  Description of Artificial Sequence: Synthetic oligonucleotide
caggugagcacccaguguu

SEQ ID NO: 1694032 - RNA, 19 nt, Artificial Sequence
  Description of Artificial Sequence: Synthetic oligonucleotide
ugcccuccauuucgcacau

SEQ ID NO: 1694033 - RNA, 19 nt, Artificial Sequence
  Description of Artificial Sequence: Synthetic oligonucleotide
ucgaacccagucgcugugu

SEQ ID NO: 1694034 - RNA, 19 nt, Artificial Sequence
  Description of Artificial Sequence: Synthetic oligonucleotide
gcgacucacggcuucggac

SEQ ID NO: 1694035 - RNA, 19 nt, Artificial Sequence
  Description of Artificial Sequence: Synthetic oligonucleotide
cgguguugauuacugacac

SEQ ID NO: 1694036 - RNA, 19 nt, Artificial Sequence
  Description of Artificial Sequence: Synthetic oligonucleotide
ugaccacauauugccugaa

SEQ ID NO: 1694037 - RNA, 19 nt, Artificial Sequence
  Description of Artificial Sequence: Synthetic oligonucleotide
cacauauugccugaagcau

SEQ ID NO: 1694038 - RNA, 19 nt, Artificial Sequence
  Description of Artificial Sequence: Synthetic oligonucleotide
ccuuauugucuccaccuga

SEQ ID NO: 1694039 - RNA, 19 nt, Artificial Sequence
  Description of Artificial Sequence: Synthetic oligonucleotide
cuguauaggucagcaggga

SEQ ID NO: 1694040 - RNA, 19 nt, Artificial Sequence
  Description of Artificial Sequence: Synthetic oligonucleotide
acacgacaucguugaauuu

SEQ ID NO: 1694041 - RNA, 19 nt, Artificial Sequence
  Description of Artificial Sequence: Synthetic oligonucleotide
gcugcggcgacucacggcu

SEQ ID NO: 1694042 - RNA, 19 nt, Artificial Sequence
  Description of Artificial Sequence: Synthetic oligonucleotide
cguuacagccaaucgugug

SEQ ID NO: 1694043 - RNA, 19 nt, Artificial Sequence
  Description of Artificial Sequence: Synthetic oligonucleotide
ggcgggugccauaauaguc

SEQ ID NO: 1694044 - RNA, 19 nt, Artificial Sequence
  Description of Artificial Sequence: Synthetic oligonucleotide
ugccguacauggggugggc

SEQ ID NO: 1694045 - RNA, 19 nt, Artificial Sequence
  Description of Artificial Sequence: Synthetic oligonucleotide
gguuggucuaugaggcuuc

SEQ ID NO: 1694046 - RNA, 19 nt, Artificial Sequence
  Description of Artificial Sequence: Synthetic oligonucleotide
gaguuugggugaccacaua

SEQ ID NO: 1694047 - RNA, 19 nt, Artificial Sequence
  Description of Artificial Sequence: Synthetic oligonucleotide
auaggucagcagggagaug

SEQ ID NO: 1694048 - RNA, 19 nt, Artificial Sequence
  Description of Artificial Sequence: Synthetic oligonucleotide
guuugggugaccacauauu

SEQ ID NO: 1694049 - RNA, 19 nt, Artificial Sequence
  Description of Artificial Sequence: Synthetic oligonucleotide
caugccacacgacaucguu

SEQ ID NO: 1694050 - RNA, 19 nt, Artificial Sequence
  Description of Artificial Sequence: Synthetic oligonucleotide
accuguccgaggagcaggu

SEQ ID NO: 1694051 - RNA, 19 nt, Artificial Sequence
  Description of Artificial Sequence: Synthetic oligonucleotide
gggucaccuuauugucucc

SEQ ID NO: 1694052 - RNA, 19 nt, Artificial Sequence
  Description of Artificial Sequence: Synthetic oligonucleotide
cacagcuaggauguuugcu

SEQ ID NO: 1694053 - RNA, 19 nt, Artificial Sequence
  Description of Artificial Sequence: Synthetic oligonucleotide
cacggaacccuggcccuug

SEQ ID NO: 1694054 - RNA, 19 nt, Artificial Sequence
  Description of Artificial Sequence: Synthetic oligonucleotide
caugagagguguccacggu

SEQ ID NO: 1694055 - RNA, 19 nt, Artificial Sequence
  Description of Artificial Sequence: Synthetic oligonucleotide
uugcuaggcgggugccaua

SEQ ID NO: 1694056 - RNA, 19 nt, Artificial Sequence
  Description of Artificial Sequence: Synthetic oligonucleotide
cagccaaucgugugagcgu

SEQ ID NO: 1694057 - RNA, 19 nt, Artificial Sequence
  Description of Artificial Sequence: Synthetic oligonucleotide
acggaacccuggcccuugu

SEQ ID NO: 1694058 - RNA, 19 nt, Artificial Sequence
  Description of Artificial Sequence: Synthetic oligonucleotide
auauugccugaagcaucau

SEQ ID NO: 1694059 - RNA, 19 nt, Artificial Sequence
  Description of Artificial Sequence: Synthetic oligonucleotide
augaggggcccagcauaca

SEQ ID NO: 1694060 - RNA, 19 nt, Artificial Sequence
  Description of Artificial Sequence: Synthetic oligonucleotide
guugcuaggcgggugccau

SEQ ID NO: 1694061 - RNA, 19 nt, Artificial Sequence
  Description of Artificial Sequence: Synthetic oligonucleotide
aggcaacgucucgaaccca

SEQ ID NO: 1694062 - RNA, 19 nt, Artificial Sequence
  Description of Artificial Sequence: Synthetic oligonucleotide
cugagugcucaugagucuu

SEQ ID NO: 1694063 - RNA, 19 nt, Artificial Sequence
  Description of Artificial Sequence: Synthetic oligonucleotide
ggaguuugggugaccacau

SEQ ID NO: 1694064 - RNA, 19 nt, Artificial Sequence
  Description of Artificial Sequence: Synthetic oligonucleotide
guccacgguguugauuacu

SEQ ID NO: 1694065 - RNA, 19 nt, Artificial Sequence
  Description of Artificial Sequence: Synthetic oligonucleotide
gccguacauggggugggcc

SEQ ID NO: 1694066 - RNA, 19 nt, Artificial Sequence
  Description of Artificial Sequence: Synthetic oligonucleotide
ugacggcguuacagccaau

SEQ ID NO: 1694067 - RNA, 19 nt, Artificial Sequence
  Description of Artificial Sequence: Synthetic oligonucleotide
ggcccaggcaacgucucga

SEQ ID NO: 1694068 - RNA, 19 nt, Artificial Sequence
  Description of Artificial Sequence: Synthetic oligonucleotide
uggccccauccgagcuccc

SEQ ID NO: 1694069 - RNA, 19 nt, Artificial Sequence
  Description of Artificial Sequence: Synthetic oligonucleotide
cccacuguccauccaccga

SEQ ID NO: 1694070 - RNA, 19 nt, Artificial Sequence
  Description of Artificial Sequence: Synthetic oligonucleotide
gcggcgacucacggcuucg

SEQ ID NO: 1694071 - RNA, 19 nt, Artificial Sequence
  Description of Artificial Sequence: Synthetic oligonucleotide
gcccaacugacggcguuac

SEQ ID NO: 1694072 - RNA, 19 nt, Artificial Sequence
  Description of Artificial Sequence: Synthetic oligonucleotide
cuguggguacucccagggu

SEQ ID NO: 1694073 - RNA, 19 nt, Artificial Sequence
  Description of Artificial Sequence: Synthetic oligonucleotide
gguugcuaggcgggugcca

SEQ ID NO: 1694074 - RNA, 19 nt, Artificial Sequence
  Description of Artificial Sequence: Synthetic oligonucleotide
cccaggcuacuugccauac

SEQ ID NO: 1694075 - RNA, 19 nt, Artificial Sequence
  Description of Artificial Sequence: Synthetic oligonucleotide
ggcccuuguugacaucacu

SEQ ID NO: 1694076 - RNA, 19 nt, Artificial Sequence
  Description of Artificial Sequence: Synthetic oligonucleotide
gccaaucgugugagcguug

SEQ ID NO: 1694077 - RNA, 19 nt, Artificial Sequence
  Description of Artificial Sequence: Synthetic oligonucleotide
cgggugccauaauagucca

SEQ ID NO: 1694078 - RNA, 19 nt, Artificial Sequence
  Description of Artificial Sequence: Synthetic oligonucleotide
gagcucccacaggccaaaa

SEQ ID NO: 1694079 - RNA, 19 nt, Artificial Sequence
  Description of Artificial Sequence: Synthetic oligonucleotide
cauuggccuuccccuguau

SEQ ID NO: 1694080 - RNA, 19 nt, Artificial Sequence
  Description of Artificial Sequence: Synthetic oligonucleotide
cccagucgcugugugccuc

SEQ ID NO: 1694081 - RNA, 19 nt, Artificial Sequence
  Description of Artificial Sequence: Synthetic oligonucleotide
gcguuacagccaaucgugu

SEQ ID NO: 1694082 - RNA, 19 nt, Artificial Sequence
  Description of Artificial Sequence: Synthetic oligonucleotide
ccaaucgugugagcguugu

SEQ ID NO: 1694083 - RNA, 19 nt, Artificial Sequence
  Description of Artificial Sequence: Synthetic oligonucleotide
cggcguuacagccaaucgu

SEQ ID NO: 1694084 - RNA, 19 nt, Artificial Sequence
  Description of Artificial Sequence: Synthetic oligonucleotide
ggcccaacugacggcguua

SEQ ID NO: 1694085 - RNA, 19 nt, Artificial Sequence
  Description of Artificial Sequence: Synthetic oligonucleotide
caaucgugugagcguuguu

SEQ ID NO: 1694086 - RNA, 19 nt, Artificial Sequence
  Description of Artificial Sequence: Synthetic oligonucleotide
ccacacgacaucguugaau

SEQ ID NO: 1694087 - RNA, 19 nt, Artificial Sequence
  Description of Artificial Sequence: Synthetic oligonucleotide
ggccccauccgagcuccca

SEQ ID NO: 1694088 - RNA, 19 nt, Artificial Sequence
  Description of Artificial Sequence: Synthetic oligonucleotide
gccacacgacaucguugaa

SEQ ID NO: 1694089 - RNA, 19 nt, Artificial Sequence
  Description of Artificial Sequence: Synthetic oligonucleotide
ccgagcucccacaggccaa

SEQ ID NO: 1694090 - RNA, 19 nt, Artificial Sequence
  Description of Artificial Sequence: Synthetic oligonucleotide
ccaggauauugccguacau

SEQ ID NO: 1694091 - RNA, 19 nt, Artificial Sequence
  Description of Artificial Sequence: Synthetic oligonucleotide
cggcgacucacggcuucgg

SEQ ID NO: 1694092 - RNA, 19 nt, Artificial Sequence
  Description of Artificial Sequence: Synthetic oligonucleotide
gcuaggcgggugccauaau

SEQ ID NO: 1694093 - RNA, 19 nt, Artificial Sequence
  Description of Artificial Sequence: Synthetic oligonucleotide
cgucucgaacccagucgcu

SEQ ID NO: 1694094 - RNA, 19 nt, Artificial Sequence
  Description of Artificial Sequence: Synthetic oligonucleotide
cugcggcgacucacggcuu

SEQ ID NO: 1694095 - RNA, 19 nt, Artificial Sequence
  Description of Artificial Sequence: Synthetic oligonucleotide
uguaaauugcacuagaggg

SEQ ID NO: 1694096 - RNA, 19 nt, Artificial Sequence
  Description of Artificial Sequence: Synthetic oligonucleotide
uuugacuccacuaugaaag

SEQ ID NO: 1694097 - RNA, 19 nt, Artificial Sequence
  Description of Artificial Sequence: Synthetic oligonucleotide
aaguauugcacauacauca

SEQ ID NO: 1694098 - RNA, 19 nt, Artificial Sequence
  Description of Artificial Sequence: Synthetic oligonucleotide
ucauauaccauguauaagc

SEQ ID NO: 1694099 - RNA, 19 nt, Artificial Sequence
  Description of Artificial Sequence: Synthetic oligonucleotide
uauaccauguauaagcucc

SEQ ID NO: 1694100 - RNA, 19 nt, Artificial Sequence
  Description of Artificial Sequence: Synthetic oligonucleotide
ugguaaguaccaaagaugg

SEQ ID NO: 1694101 - RNA, 19 nt, Artificial Sequence
  Description of Artificial Sequence: Synthetic oligonucleotide
aaagauaguaaucaagaga

SEQ ID NO: 1694102 - RNA, 19 nt, Artificial Sequence
  Description of Artificial Sequence: Synthetic oligonucleotide
aauugcacuagagggaucc

SEQ ID NO: 1694103 - RNA, 19 nt, Artificial Sequence
  Description of Artificial Sequence: Synthetic oligonucleotide
ugacagugcaccaacaccg

SEQ ID NO: 1694104 - RNA, 19 nt, Artificial Sequence
  Description of Artificial Sequence: Synthetic oligonucleotide
uuauccaucgaccacacga

SEQ ID NO: 1694105 - RNA, 19 nt, Artificial Sequence
  Description of Artificial Sequence: Synthetic oligonucleotide
uuguaaauugcacuagagg

SEQ ID NO: 1694106 - RNA, 19 nt, Artificial Sequence
  Description of Artificial Sequence: Synthetic oligonucleotide
ugauuaaaagccuggauug

SEQ ID NO: 1694107 - RNA, 19 nt, Artificial Sequence
  Description of Artificial Sequence: Synthetic oligonucleotide
agugaaguauugcacauac

SEQ ID NO: 1694108 - RNA, 19 nt, Artificial Sequence
  Description of Artificial Sequence: Synthetic oligonucleotide
ucucauauaacuucaguug

SEQ ID NO: 1694109 - RNA, 19 nt, Artificial Sequence
  Description of Artificial Sequence: Synthetic oligonucleotide
aaggaacccaacuuggcac

SEQ ID NO: 1694110 - RNA, 19 nt, Artificial Sequence
  Description of Artificial Sequence: Synthetic oligonucleotide
aacacuucgacucacuccu

SEQ ID NO: 1694111 - RNA, 19 nt, Artificial Sequence
  Description of Artificial Sequence: Synthetic oligonucleotide
ucuacauuuguagagaaug

SEQ ID NO: 1694112 - RNA, 19 nt, Artificial Sequence
  Description of Artificial Sequence: Synthetic oligonucleotide
ugcauuuugggcaaagaag

SEQ ID NO: 1694113 - RNA, 19 nt, Artificial Sequence
  Description of Artificial Sequence: Synthetic oligonucleotide
cuagauacaguccuggccg

SEQ ID NO: 1694114 - RNA, 19 nt, Artificial Sequence
  Description of Artificial Sequence: Synthetic oligonucleotide
ucuuuggacacuccaaagg

SEQ ID NO: 1694115 - RNA, 19 nt, Artificial Sequence
  Description of Artificial Sequence: Synthetic oligonucleotide
acauacaucauauaccaug

SEQ ID NO: 1694116 - RNA, 19 nt, Artificial Sequence
  Description of Artificial Sequence: Synthetic oligonucleotide
ucuaccgugagcacggcgg

SEQ ID NO: 1694117 - RNA, 19 nt, Artificial Sequence
  Description of Artificial Sequence: Synthetic oligonucleotide
aggcuaauggcccacuucc

SEQ ID NO: 1694118 - RNA, 19 nt, Artificial Sequence
  Description of Artificial Sequence: Synthetic oligonucleotide
aaauuuugacuccacuaug

SEQ ID NO: 1694119 - RNA, 19 nt, Artificial Sequence
  Description of Artificial Sequence: Synthetic oligonucleotide
aauccuugugaaauggucg

SEQ ID NO: 1694120 - RNA, 19 nt, Artificial Sequence
  Description of Artificial Sequence: Synthetic oligonucleotide
ugauccaaaauacuagaac

SEQ ID NO: 1694121 - RNA, 19 nt, Artificial Sequence
  Description of Artificial Sequence: Synthetic oligonucleotide
uuguguauuugaaaagcag

SEQ ID NO: 1694122 - RNA, 19 nt, Artificial Sequence
  Description of Artificial Sequence: Synthetic oligonucleotide
auuccgaaguucuggauac

SEQ ID NO: 1694123 - RNA, 19 nt, Artificial Sequence
  Description of Artificial Sequence: Synthetic oligonucleotide
gaaggaugugcacugagcc

SEQ ID NO: 1694124 - RNA, 19 nt, Artificial Sequence
  Description of Artificial Sequence: Synthetic oligonucleotide
uaaguaccaaagauggugc

SEQ ID NO: 1694125 - RNA, 19 nt, Artificial Sequence
  Description of Artificial Sequence: Synthetic oligonucleotide
ucaaugaagaaggaugugc

SEQ ID NO: 1694126 - RNA, 19 nt, Artificial Sequence
  Description of Artificial Sequence: Synthetic oligonucleotide
cucccaacaaaguagauuc

SEQ ID NO: 1694127 - RNA, 19 nt, Artificial Sequence
  Description of Artificial Sequence: Synthetic oligonucleotide
cucauauaacuucaguugc

SEQ ID NO: 1694128 - RNA, 19 nt, Artificial Sequence
  Description of Artificial Sequence: Synthetic oligonucleotide
caagcuguguccuaaauuc

SEQ ID NO: 1694129 - RNA, 19 nt, Artificial Sequence
  Description of Artificial Sequence: Synthetic oligonucleotide
uugagguaaauuccgaagu

SEQ ID NO: 1694130 - RNA, 19 nt, Artificial Sequence
  Description of Artificial Sequence: Synthetic oligonucleotide
uguauuugaaaagcagggg

SEQ ID NO: 1694131 - RNA, 19 nt, Artificial Sequence
  Description of Artificial Sequence: Synthetic oligonucleotide
aagagaaguauguuuccug

SEQ ID NO: 1694132 - RNA, 19 nt, Artificial Sequence
  Description of Artificial Sequence: Synthetic oligonucleotide
uccacuaugaaagauagua

SEQ ID NO: 1694133 - RNA, 19 nt, Artificial Sequence
  Description of Artificial Sequence: Synthetic oligonucleotide
gaguucuugagguaaauuc

SEQ ID NO: 1694134 - RNA, 19 nt, Artificial Sequence
  Description of Artificial Sequence: Synthetic oligonucleotide
ucaaaucccucauucaucu

SEQ ID NO: 1694135 - RNA, 19 nt, Artificial Sequence
  Description of Artificial Sequence: Synthetic oligonucleotide
guaaguaccaaagauggug

SEQ ID NO: 1694136 - RNA, 19 nt, Artificial Sequence
  Description of Artificial Sequence: Synthetic oligonucleotide
uacaucauauaccauguau

SEQ ID NO: 1694137 - RNA, 19 nt, Artificial Sequence
  Description of Artificial Sequence: Synthetic oligonucleotide
guaaauuccgaaguucugg

SEQ ID NO: 1694138 - RNA, 19 nt, Artificial Sequence
  Description of Artificial Sequence: Synthetic oligonucleotide
auuacucccaacaaaguag

SEQ ID NO: 1694139 - RNA, 19 nt, Artificial Sequence
  Description of Artificial Sequence: Synthetic oligonucleotide
uucucuugugagcaaaggc

SEQ ID NO: 1694140 - RNA, 19 nt, Artificial Sequence
  Description of Artificial Sequence: Synthetic oligonucleotide
cuugagguaaauuccgaag

SEQ ID NO: 1694141 - RNA, 19 nt, Artificial Sequence
  Description of Artificial Sequence: Synthetic oligonucleotide
ucauauaacuucaguugcc

SEQ ID NO: 1694142 - RNA, 19 nt, Artificial Sequence
  Description of Artificial Sequence: Synthetic oligonucleotide
ugggcuuuuauuccaagcu

SEQ ID NO: 1694143 - RNA, 19 nt, Artificial Sequence
  Description of Artificial Sequence: Synthetic oligonucleotide
auuaucuuuggacacucca

SEQ ID NO: 1694144 - RNA, 19 nt, Artificial Sequence
  Description of Artificial Sequence: Synthetic oligonucleotide
aauuccgaaguucuggaua

SEQ ID NO: 1694145 - RNA, 19 nt, Artificial Sequence
  Description of Artificial Sequence: Synthetic oligonucleotide
ugggucaacagcaaagagu

SEQ ID NO: 1694146 - RNA, 19 nt, Artificial Sequence
  Description of Artificial Sequence: Synthetic oligonucleotide
aauuuugacuccacuauga

SEQ ID NO: 1694147 - RNA, 19 nt, Artificial Sequence
  Description of Artificial Sequence: Synthetic oligonucleotide
aaggcuaauggcccacuuc

SEQ ID NO: 1694148 - RNA, 19 nt, Artificial Sequence
  Description of Artificial Sequence: Synthetic oligonucleotide
uauccaucgaccacacgag

SEQ ID NO: 1694149 - RNA, 19 nt, Artificial Sequence
  Description of Artificial Sequence: Synthetic oligonucleotide
aaaucccucauucaucuuu

SEQ ID NO: 1694150 - RNA, 19 nt, Artificial Sequence
  Description of Artificial Sequence: Synthetic oligonucleotide
acuagagggauccacuuca

SEQ ID NO: 1694151 - RNA, 19 nt, Artificial Sequence
  Description of Artificial Sequence: Synthetic oligonucleotide
aaagaucgccugcacuuuc

SEQ ID NO: 1694152 - RNA, 19 nt, Artificial Sequence
  Description of Artificial Sequence: Synthetic oligonucleotide
ugugaaauggucguugggu

SEQ ID NO: 1694153 - RNA, 19 nt, Artificial Sequence
  Description of Artificial Sequence: Synthetic oligonucleotide
auauaccauguauaagcuc

SEQ ID NO: 1694154 - RNA, 19 nt, Artificial Sequence
  Description of Artificial Sequence: Synthetic oligonucleotide
uauuugaaaagcagggguu

SEQ ID NO: 1694155 - RNA, 19 nt, Artificial Sequence
  Description of Artificial Sequence: Synthetic oligonucleotide
uuacucccaacaaaguaga

SEQ ID NO: 1694156 - RNA, 19 nt, Artificial Sequence
  Description of Artificial Sequence: Synthetic oligonucleotide
aacgguacugcuuguaaau

SEQ ID NO: 1694157 - RNA, 19 nt, Artificial Sequence
  Description of Artificial Sequence: Synthetic oligonucleotide
uguucuccauaccaguuga

SEQ ID NO: 1694158 - RNA, 19 nt, Artificial Sequence
  Description of Artificial Sequence: Synthetic oligonucleotide
ugaauaaagaucgccugca

SEQ ID NO: 1694159 - RNA, 19 nt, Artificial Sequence
  Description of Artificial Sequence: Synthetic oligonucleotide
cugaauaaagaucgccugc

SEQ ID NO: 1694160 - RNA, 19 nt, Artificial Sequence
  Description of Artificial Sequence: Synthetic oligonucleotide
caucuuuuaauccuuguga

SEQ ID NO: 1694161 - RNA, 19 nt, Artificial Sequence
  Description of Artificial Sequence: Synthetic oligonucleotide
aggccuucgaacccggccc

SEQ ID NO: 1694162 - RNA, 19 nt, Artificial Sequence
  Description of Artificial Sequence: Synthetic oligonucleotide
uuuccugggcuuuuauucc

SEQ ID NO: 1694163 - RNA, 19 nt, Artificial Sequence
  Description of Artificial Sequence: Synthetic oligonucleotide
gaagcuguccgucuauuac

SEQ ID NO: 1694164 - RNA, 19 nt, Artificial Sequence
  Description of Artificial Sequence: Synthetic oligonucleotide
aguaacuacagcaacacuu

SEQ ID NO: 1694165 - RNA, 19 nt, Artificial Sequence
  Description of Artificial Sequence: Synthetic oligonucleotide
aauuaucuuuggacacucc

SEQ ID NO: 1694166 - RNA, 19 nt, Artificial Sequence
  Description of Artificial Sequence: Synthetic oligonucleotide
uccuaaauucacaguuucc

SEQ ID NO: 1694167 - RNA, 19 nt, Artificial Sequence
  Description of Artificial Sequence: Synthetic oligonucleotide
gugagcaaaggcuaauggc

SEQ ID NO: 1694168 - RNA, 19 nt, Artificial Sequence
  Description of Artificial Sequence: Synthetic oligonucleotide
uguucuuguguauuugaaa

SEQ ID NO: 1694169 - RNA, 19 nt, Artificial Sequence
  Description of Artificial Sequence: Synthetic oligonucleotide
cuccaaaggaaauuuugac

SEQ ID NO: 1694170 - RNA, 19 nt, Artificial Sequence
  Description of Artificial Sequence: Synthetic oligonucleotide
uugugaaauggucguuggg

SEQ ID NO: 1694171 - RNA, 19 nt, Artificial Sequence
  Description of Artificial Sequence: Synthetic oligonucleotide
aaaagccuggauugcccag

SEQ ID NO: 1694172 - RNA, 19 nt, Artificial Sequence
  Description of Artificial Sequence: Synthetic oligonucleotide
uccgagucuaccgugagca

SEQ ID NO: 1694173 - RNA, 19 nt, Artificial Sequence
  Description of Artificial Sequence: Synthetic oligonucleotide
cuucugaauaaagaucgcc

SEQ ID NO: 1694174 - RNA, 19 nt, Artificial Sequence
  Description of Artificial Sequence: Synthetic oligonucleotide
uaaauugcacuagagggau

SEQ ID NO: 1694175 - RNA, 19 nt, Artificial Sequence
  Description of Artificial Sequence: Synthetic oligonucleotide
uggucguugggucaacagc

SEQ ID NO: 1694176 - RNA, 19 nt, Artificial Sequence
  Description of Artificial Sequence: Synthetic oligonucleotide
uccaaaauacuagaacuuc

SEQ ID NO: 1694177 - RNA, 19 nt, Artificial Sequence
  Description of Artificial Sequence: Synthetic oligonucleotide
uguagagaaugucaucuuu

SEQ ID NO: 1694178 - RNA, 19 nt, Artificial Sequence
  Description of Artificial Sequence: Synthetic oligonucleotide
uaaacgguacugcuuguaa

SEQ ID NO: 1694179 - RNA, 19 nt, Artificial Sequence
  Description of Artificial Sequence: Synthetic oligonucleotide
cacuccaaaggaaauuuug

SEQ ID NO: 1694180 - RNA, 19 nt, Artificial Sequence
  Description of Artificial Sequence: Synthetic oligonucleotide
agaaggaugugcacugagc

SEQ ID NO: 1694181 - RNA, 19 nt, Artificial Sequence
  Description of Artificial Sequence: Synthetic oligonucleotide
uaguaaucaagagaaguau

SEQ ID NO: 1694182 - RNA, 19 nt, Artificial Sequence
  Description of Artificial Sequence: Synthetic oligonucleotide
uccaucgaccacacgagca

SEQ ID NO: 1694183 - RNA, 19 nt, Artificial Sequence
  Description of Artificial Sequence: Synthetic oligonucleotide
uaaaagccuggauugccca

SEQ ID NO: 1694184 - RNA, 19 nt, Artificial Sequence
  Description of Artificial Sequence: Synthetic oligonucleotide
aaacgguacugcuuguaaa

SEQ ID NO: 1694185 - RNA, 19 nt, Artificial Sequence
  Description of Artificial Sequence: Synthetic oligonucleotide
caacacuucgacucacucc

SEQ ID NO: 1694186 - RNA, 19 nt, Artificial Sequence
  Description of Artificial Sequence: Synthetic oligonucleotide
ugcccagugaaguauugca

SEQ ID NO: 1694187 - RNA, 19 nt, Artificial Sequence
  Description of Artificial Sequence: Synthetic oligonucleotide
uucaguugccauucaaauc

SEQ ID NO: 1694188 - RNA, 19 nt, Artificial Sequence
  Description of Artificial Sequence: Synthetic oligonucleotide
acuccacuaugaaagauag

SEQ ID NO: 1694189 - RNA, 19 nt, Artificial Sequence
  Description of Artificial Sequence: Synthetic oligonucleotide
caaugaagaaggaugugca

SEQ ID NO: 1694190 - RNA, 19 nt, Artificial Sequence
  Description of Artificial Sequence: Synthetic oligonucleotide
aguaaucaagagaaguaug

SEQ ID NO: 1694191 - RNA, 19 nt, Artificial Sequence
  Description of Artificial Sequence: Synthetic oligonucleotide
guauuugaaaagcaggggu

SEQ ID NO: 1694192 - RNA, 19 nt, Artificial Sequence
  Description of Artificial Sequence: Synthetic oligonucleotide
uacugcuuguaaauugcac

SEQ ID NO: 1694193 - RNA, 19 nt, Artificial Sequence
  Description of Artificial Sequence: Synthetic oligonucleotide
uuugugaccccagggcugg

SEQ ID NO: 1694194 - RNA, 19 nt, Artificial Sequence
  Description of Artificial Sequence: Synthetic oligonucleotide
cucggguucguccagcgcc

SEQ ID NO: 1694195 - RNA, 19 nt, Artificial Sequence
  Description of Artificial Sequence: Synthetic oligonucleotide
gagucuaccgugagcacgg

SEQ ID NO: 1694196 - RNA, 19 nt, Artificial Sequence
  Description of Artificial Sequence: Synthetic oligonucleotide
cauggcggcgccuggaagg

SEQ ID NO: 1694197 - RNA, 19 nt, Artificial Sequence
  Description of Artificial Sequence: Synthetic oligonucleotide
acagugcaccaacaccgcc

SEQ ID NO: 1694198 - RNA, 19 nt, Artificial Sequence
  Description of Artificial Sequence: Synthetic oligonucleotide
aaguaccaaagauggugca

SEQ ID NO: 1694199 - RNA, 19 nt, Artificial Sequence
  Description of Artificial Sequence: Synthetic oligonucleotide
auaagcucccagcacacau

SEQ ID NO: 1694200 - RNA, 19 nt, Artificial Sequence
  Description of Artificial Sequence: Synthetic oligonucleotide
uugucucauauaacuucag

SEQ ID NO: 1694201 - RNA, 19 nt, Artificial Sequence
  Description of Artificial Sequence: Synthetic oligonucleotide
auccaucgaccacacgagc

SEQ ID NO: 1694202 - RNA, 19 nt, Artificial Sequence
  Description of Artificial Sequence: Synthetic oligonucleotide
caugguucgagcccugcgc

SEQ ID NO: 1694203 - RNA, 19 nt, Artificial Sequence
  Description of Artificial Sequence: Synthetic oligonucleotide
guaaauugcacuagaggga

SEQ ID NO: 1694204 - RNA, 19 nt, Artificial Sequence
  Description of Artificial Sequence: Synthetic oligonucleotide
gaaguauugcacauacauc

SEQ ID NO: 1694205 - RNA, 19 nt, Artificial Sequence
  Description of Artificial Sequence: Synthetic oligonucleotide
aaauuccgaaguucuggau

SEQ ID NO: 1694206 - RNA, 19 nt, Artificial Sequence
  Description of Artificial Sequence: Synthetic oligonucleotide
aaccuucuguaaacgguac

SEQ ID NO: 1694207 - RNA, 19 nt, Artificial Sequence
  Description of Artificial Sequence: Synthetic oligonucleotide
auaguaaucaagagaagua

SEQ ID NO: 1694208 - RNA, 19 nt, Artificial Sequence
  Description of Artificial Sequence: Synthetic oligonucleotide
auugucucauauaacuuca

SEQ ID NO: 1694209 - RNA, 19 nt, Artificial Sequence
  Description of Artificial Sequence: Synthetic oligonucleotide
cuccauaccaguugaagga

SEQ ID NO: 1694210 - RNA, 19 nt, Artificial Sequence
  Description of Artificial Sequence: Synthetic oligonucleotide
aaucccucauucaucuuug

SEQ ID NO: 1694211 - RNA, 19 nt, Artificial Sequence
  Description of Artificial Sequence: Synthetic oligonucleotide
gaauaaagaucgccugcac

SEQ ID NO: 1694212 - RNA, 19 nt, Artificial Sequence
  Description of Artificial Sequence: Synthetic oligonucleotide
caugacagugcaccaacac

SEQ ID NO: 1694213 - RNA, 19 nt, Artificial Sequence
  Description of Artificial Sequence: Synthetic oligonucleotide
aguaccaaagauggugcag

SEQ ID NO: 1694214 - RNA, 19 nt, Artificial Sequence
  Description of Artificial Sequence: Synthetic oligonucleotide
cuaauggcccacuuccuuc

SEQ ID NO: 1694215 - RNA, 19 nt, Artificial Sequence
  Description of Artificial Sequence: Synthetic oligonucleotide
cacuucauaucccauuguc

SEQ ID NO: 1694216 - RNA, 19 nt, Artificial Sequence
  Description of Artificial Sequence: Synthetic oligonucleotide
cagggguuauccaucgacc

SEQ ID NO: 1694217 - RNA, 19 nt, Artificial Sequence
  Description of Artificial Sequence: Synthetic oligonucleotide
uaauggcccacuuccuuca

SEQ ID NO: 1694218 - RNA, 19 nt, Artificial Sequence
  Description of Artificial Sequence: Synthetic oligonucleotide
uccagcgccggcacgaaga

SEQ ID NO: 1694219 - RNA, 19 nt, Artificial Sequence
  Description of Artificial Sequence: Synthetic oligonucleotide
agcuguguccuaaauucac

SEQ ID NO: 1694220 - RNA, 19 nt, Artificial Sequence
  Description of Artificial Sequence: Synthetic oligonucleotide
agguaaauuccgaaguucu

SEQ ID NO: 1694221 - RNA, 19 nt, Artificial Sequence
  Description of Artificial Sequence: Synthetic oligonucleotide
uguccgucuauuacuccca

SEQ ID NO: 1694222 - RNA, 19 nt, Artificial Sequence
  Description of Artificial Sequence: Synthetic oligonucleotide
auaccauguauaagcuccc

SEQ ID NO: 1694223 - RNA, 19 nt, Artificial Sequence
  Description of Artificial Sequence: Synthetic oligonucleotide
auuuugacuccacuaugaa

SEQ ID NO: 1694224 - RNA, 19 nt, Artificial Sequence
  Description of Artificial Sequence: Synthetic oligonucleotide
gagggauccacuucauauc

SEQ ID NO: 1694225 - RNA, 19 nt, Artificial Sequence
  Description of Artificial Sequence: Synthetic oligonucleotide
aacccaacuuggcacugca

SEQ ID NO: 1694226 - RNA, 19 nt, Artificial Sequence
  Description of Artificial Sequence: Synthetic oligonucleotide
aaggcaguaacuacagcaa

SEQ ID NO: 1694227 - RNA, 19 nt, Artificial Sequence
  Description of Artificial Sequence: Synthetic oligonucleotide
uggugcaguucucuuguga

SEQ ID NO: 1694228 - RNA, 19 nt, Artificial Sequence
  Description of Artificial Sequence: Synthetic oligonucleotide
ucauccacucuguucuugu

SEQ ID NO: 1694229 - RNA, 19 nt, Artificial Sequence
  Description of Artificial Sequence: Synthetic oligonucleotide
uucgaacccggccccagcc

SEQ ID NO: 1694230 - RNA, 19 nt, Artificial Sequence
  Description of Artificial Sequence: Synthetic oligonucleotide
gacuggccgaugaaggccg

SEQ ID NO: 1694231 - RNA, 19 nt, Artificial Sequence
  Description of Artificial Sequence: Synthetic oligonucleotide
acaucauauaccauguaua

SEQ ID NO: 1694232 - RNA, 19 nt, Artificial Sequence
  Description of Artificial Sequence: Synthetic oligonucleotide
ucccucauucaucuuugcu

SEQ ID NO: 1694233 - RNA, 19 nt, Artificial Sequence
  Description of Artificial Sequence: Synthetic oligonucleotide
uucuacauuuguagagaau

SEQ ID NO: 1694234 - RNA, 19 nt, Artificial Sequence
  Description of Artificial Sequence: Synthetic oligonucleotide
auggucguugggucaacag

SEQ ID NO: 1694235 - RNA, 19 nt, Artificial Sequence
  Description of Artificial Sequence: Synthetic oligonucleotide
acuucauaucccauugucu

SEQ ID NO: 1694236 - RNA, 19 nt, Artificial Sequence
  Description of Artificial Sequence: Synthetic oligonucleotide
cucggcucgggacuggccg

SEQ ID NO: 1694237 - RNA, 19 nt, Artificial Sequence
  Description of Artificial Sequence: Synthetic oligonucleotide
caucaggcggucuggcucc

SEQ ID NO: 1694238 - RNA, 19 nt, Artificial Sequence
  Description of Artificial Sequence: Synthetic oligonucleotide
cucaguaaccuucuguaaa

SEQ ID NO: 1694239 - RNA, 19 nt, Artificial Sequence
  Description of Artificial Sequence: Synthetic oligonucleotide
uaagcucccagcacacauc

SEQ ID NO: 1694240 - RNA, 19 nt, Artificial Sequence
  Description of Artificial Sequence: Synthetic oligonucleotide
uaucccauugucucauaua

SEQ ID NO: 1694241 - RNA, 19 nt, Artificial Sequence
  Description of Artificial Sequence: Synthetic oligonucleotide
cauauaacuucaguugcca

SEQ ID NO: 1694242 - RNA, 19 nt, Artificial Sequence
  Description of Artificial Sequence: Synthetic oligonucleotide
ccuagauacaguccuggcc

SEQ ID NO: 1694243 - RNA, 19 nt, Artificial Sequence
  Description of Artificial Sequence: Synthetic oligonucleotide
auaucccauugucucauau

SEQ ID NO: 1694244 - RNA, 19 nt, Artificial Sequence
  Description of Artificial Sequence: Synthetic oligonucleotide
augaaggccgcgcagcgau

SEQ ID NO: 1694245 - RNA, 19 nt, Artificial Sequence
  Description of Artificial Sequence: Synthetic oligonucleotide
uccuuguuugugaccccag

SEQ ID NO: 1694246 - RNA, 19 nt, Artificial Sequence
  Description of Artificial Sequence: Synthetic oligonucleotide
caguaaccuucuguaaacg

SEQ ID NO: 1694247 - RNA, 19 nt, Artificial Sequence
  Description of Artificial Sequence: Synthetic oligonucleotide
aggaacccaacuuggcacu

SEQ ID NO: 1694248 - RNA, 19 nt, Artificial Sequence
  Description of Artificial Sequence: Synthetic oligonucleotide
aaaggcuaauggcccacuu

SEQ ID NO: 1694249 - RNA, 19 nt, Artificial Sequence
  Description of Artificial Sequence: Synthetic oligonucleotide
uguaaacgguacugcuugu

SEQ ID NO: 1694250 - RNA, 19 nt, Artificial Sequence
  Description of Artificial Sequence: Synthetic oligonucleotide
aaauugcacuagagggauc

SEQ ID NO: 1694251 - RNA, 19 nt, Artificial Sequence
  Description of Artificial Sequence: Synthetic oligonucleotide
agauaguaaucaagagaag

SEQ ID NO: 1694252 - RNA, 19 nt, Artificial Sequence
  Description of Artificial Sequence: Synthetic oligonucleotide
uccuggccgcacuugcacg

SEQ ID NO: 1694253 - RNA, 19 nt, Artificial Sequence
  Description of Artificial Sequence: Synthetic oligonucleotide
aaauggucguugggucaac

SEQ ID NO: 1694254 - RNA, 19 nt, Artificial Sequence
  Description of Artificial Sequence: Synthetic oligonucleotide
cacuucgacucacuccugc

SEQ ID NO: 1694255 - RNA, 19 nt, Artificial Sequence
  Description of Artificial Sequence: Synthetic oligonucleotide
cauauaccauguauaagcu

SEQ ID NO: 1694256 - RNA, 19 nt, Artificial Sequence
  Description of Artificial Sequence: Synthetic oligonucleotide
cacuuucuacauuuguaga

SEQ ID NO: 1694257 - RNA, 19 nt, Artificial Sequence
  Description of Artificial Sequence: Synthetic oligonucleotide
uuccgagucuaccgugagc

SEQ ID NO: 1694258 - RNA, 19 nt, Artificial Sequence
  Description of Artificial Sequence: Synthetic oligonucleotide
augguucgagcccugcgcu

SEQ ID NO: 1694259 - RNA, 19 nt, Artificial Sequence
  Description of Artificial Sequence: Synthetic oligonucleotide
agcuguccgucuauuacuc

SEQ ID NO: 1694260 - RNA, 19 nt, Artificial Sequence
  Description of Artificial Sequence: Synthetic oligonucleotide
acuugcacggugugcccag

SEQ ID NO: 1694261 - RNA, 19 nt, Artificial Sequence
  Description of Artificial Sequence: Synthetic oligonucleotide
acuucgacucacuccugca

SEQ ID NO: 1694262 - RNA, 19 nt, Artificial Sequence
  Description of Artificial Sequence: Synthetic oligonucleotide
agcaagucggucucggguu

SEQ ID NO: 1694263 - RNA, 19 nt, Artificial Sequence
  Description of Artificial Sequence: Synthetic oligonucleotide
gaucgccugcacuuucuac

SEQ ID NO: 1694264 - RNA, 19 nt, Artificial Sequence
  Description of Artificial Sequence: Synthetic oligonucleotide
agggcuggcaacauuuuca

SEQ ID NO: 1694265 - RNA, 19 nt, Artificial Sequence
  Description of Artificial Sequence: Synthetic oligonucleotide
gggcuuuuauuccaagcug

SEQ ID NO: 1694266 - RNA, 19 nt, Artificial Sequence
  Description of Artificial Sequence: Synthetic oligonucleotide
ucgggacuggccgaugaag

SEQ ID NO: 1694267 - RNA, 19 nt, Artificial Sequence
  Description of Artificial Sequence: Synthetic oligonucleotide
acuccccgugguaaguacc

SEQ ID NO: 1694268 - RNA, 19 nt, Artificial Sequence
  Description of Artificial Sequence: Synthetic oligonucleotide
uugaaaagcagggguuauc

SEQ ID NO: 1694269 - RNA, 19 nt, Artificial Sequence
  Description of Artificial Sequence: Synthetic oligonucleotide
guuugugaccccagggcug

SEQ ID NO: 1694270 - RNA, 19 nt, Artificial Sequence
  Description of Artificial Sequence: Synthetic oligonucleotide
guuauccaucgaccacacg

SEQ ID NO: 1694271 - RNA, 19 nt, Artificial Sequence
  Description of Artificial Sequence: Synthetic oligonucleotide
gauacuucucaguaaccuu

SEQ ID NO: 1694272 - RNA, 19 nt, Artificial Sequence
  Description of Artificial Sequence: Synthetic oligonucleotide
uggauugcccagugaagua

SEQ ID NO: 1694273 - RNA, 19 nt, Artificial Sequence
  Description of Artificial Sequence: Synthetic oligonucleotide
cucuugugagcaaaggcua

SEQ ID NO: 1694274 - RNA, 19 nt, Artificial Sequence
  Description of Artificial Sequence: Synthetic oligonucleotide
gaaggccgcgcagcgaucc

SEQ ID NO: 1694275 - RNA, 19 nt, Artificial Sequence
  Description of Artificial Sequence: Synthetic oligonucleotide
gaaauggucguugggucaa

SEQ ID NO: 1694276 - RNA, 19 nt, Artificial Sequence
  Description of Artificial Sequence: Synthetic oligonucleotide
guauaagcucccagcacac

SEQ ID NO: 1694277 - RNA, 19 nt, Artificial Sequence
  Description of Artificial Sequence: Synthetic oligonucleotide
augauccaaaauacuagaa

SEQ ID NO: 1694278 - RNA, 19 nt, Artificial Sequence
  Description of Artificial Sequence: Synthetic oligonucleotide
uauaagcucccagcacaca

SEQ ID NO: 1694279 - RNA, 19 nt, Artificial Sequence
  Description of Artificial Sequence: Synthetic oligonucleotide
gauacaguccuggccgcac

SEQ ID NO: 1694280 - RNA, 19 nt, Artificial Sequence
  Description of Artificial Sequence: Synthetic oligonucleotide
ucguugggucaacagcaaa

SEQ ID NO: 1694281 - RNA, 19 nt, Artificial Sequence
  Description of Artificial Sequence: Synthetic oligonucleotide
uugcacuagagggauccac

SEQ ID NO: 1694282 - RNA, 19 nt, Artificial Sequence
  Description of Artificial Sequence: Synthetic oligonucleotide
guauugcacauacaucaua

SEQ ID NO: 1694283 - RNA, 19 nt, Artificial Sequence
  Description of Artificial Sequence: Synthetic oligonucleotide
guaaccuucuguaaacggu

SEQ ID NO: 1694284 - RNA, 19 nt, Artificial Sequence
  Description of Artificial Sequence: Synthetic oligonucleotide
cuucaguugccauucaaau

SEQ ID NO: 1694285 - RNA, 19 nt, Artificial Sequence
  Description of Artificial Sequence: Synthetic oligonucleotide
guuccgagucuaccgugag

SEQ ID NO: 1694286 - RNA, 19 nt, Artificial Sequence
  Description of Artificial Sequence: Synthetic oligonucleotide
cccgugguaaguaccaaag

SEQ ID NO: 1694287 - RNA, 19 nt, Artificial Sequence
  Description of Artificial Sequence: Synthetic oligonucleotide
gcaguaacuacagcaacac

SEQ ID NO: 1694288 - RNA, 19 nt, Artificial Sequence
  Description of Artificial Sequence: Synthetic oligonucleotide
cugagcaagucggucucgg

SEQ ID NO: 1694289 - RNA, 19 nt, Artificial Sequence
  Description of Artificial Sequence: Synthetic oligonucleotide
gucucggguucguccagcg

SEQ ID NO: 1694290 - RNA, 19 nt, Artificial Sequence
  Description of Artificial Sequence: Synthetic oligonucleotide
gacagugcaccaacaccgc

SEQ ID NO: 1694291 - RNA, 19 nt, Artificial Sequence
  Description of Artificial Sequence: Synthetic oligonucleotide
gucuaccgugagcacggcg

SEQ ID NO: 1694292 - RNA, 19 nt, Artificial Sequence
  Description of Artificial Sequence: Synthetic oligonucleotide
cgcgcagcgauccaggugg

SEQ ID NO: 1694293 - RNA, 19 nt, Artificial Sequence
  Description of Artificial Sequence: Synthetic oligonucleotide
gguaaauuccgaaguucug

SEQ ID NO: 1694294 - RNA, 19 nt, Artificial Sequence
  Description of Artificial Sequence: Synthetic oligonucleotide
gcagggguuauccaucgac

SEQ ID NO: 1694295 - RNA, 19 nt, Artificial Sequence
  Description of Artificial Sequence: Synthetic oligonucleotide
ggucguugggucaacagca

SEQ ID NO: 1694296 - RNA, 19 nt, Artificial Sequence
  Description of Artificial Sequence: Synthetic oligonucleotide
ugacuccacuaugaaagau

SEQ ID NO: 1694297 - RNA, 19 nt, Artificial Sequence
  Description of Artificial Sequence: Synthetic oligonucleotide
ucucggguucguccagcgc

SEQ ID NO: 1694298 - RNA, 19 nt, Artificial Sequence
  Description of Artificial Sequence: Synthetic oligonucleotide
gugaugccggccuccauca

SEQ ID NO: 1694299 - RNA, 19 nt, Artificial Sequence
  Description of Artificial Sequence: Synthetic oligonucleotide
ucgccugcacuuucuacau

SEQ ID NO: 1694300 - RNA, 19 nt, Artificial Sequence
  Description of Artificial Sequence: Synthetic oligonucleotide
aguauugcacauacaucau

SEQ ID NO: 1694301 - RNA, 19 nt, Artificial Sequence
  Description of Artificial Sequence: Synthetic oligonucleotide
uccgaaguucuggauacuu

SEQ ID NO: 1694302 - RNA, 19 nt, Artificial Sequence
  Description of Artificial Sequence: Synthetic oligonucleotide
gacuccccgugguaaguac

SEQ ID NO: 1694303 - RNA, 19 nt, Artificial Sequence
  Description of Artificial Sequence: Synthetic oligonucleotide
uccgucuauuacucccaac

SEQ ID NO: 1694304 - RNA, 19 nt, Artificial Sequence
  Description of Artificial Sequence: Synthetic oligonucleotide
ccgucuauuacucccaaca

SEQ ID NO: 1694305 - RNA, 19 nt, Artificial Sequence
  Description of Artificial Sequence: Synthetic oligonucleotide
accaguugaaggaacccaa

SEQ ID NO: 1694306 - RNA, 19 nt, Artificial Sequence
  Description of Artificial Sequence: Synthetic oligonucleotide
auacaguccuggccgcacu

SEQ ID NO: 1694307 - RNA, 19 nt, Artificial Sequence
  Description of Artificial Sequence: Synthetic oligonucleotide
acacgagcacuguucucca

SEQ ID NO: 1694308 - RNA, 19 nt, Artificial Sequence
  Description of Artificial Sequence: Synthetic oligonucleotide
uggaagcccgguuccgagu

SEQ ID NO: 1694309 - RNA, 19 nt, Artificial Sequence
  Description of Artificial Sequence: Synthetic oligonucleotide
guaccaaagauggugcagu

SEQ ID NO: 1694310 - RNA, 19 nt, Artificial Sequence
  Description of Artificial Sequence: Synthetic oligonucleotide
cccauugucucauauaacu

SEQ ID NO: 1694311 - RNA, 19 nt, Artificial Sequence
  Description of Artificial Sequence: Synthetic oligonucleotide
cccgguuccgagucuaccg

SEQ ID NO: 1694312 - RNA, 19 nt, Artificial Sequence
  Description of Artificial Sequence: Synthetic oligonucleotide
ucgaacccggccccagccu

SEQ ID NO: 1694313 - RNA, 19 nt, Artificial Sequence
  Description of Artificial Sequence: Synthetic oligonucleotide
uugcacggugugcccagcu

SEQ ID NO: 1694314 - RNA, 19 nt, Artificial Sequence
  Description of Artificial Sequence: Synthetic oligonucleotide
auugcccagugaaguauug

SEQ ID NO: 1694315 - RNA, 19 nt, Artificial Sequence
  Description of Artificial Sequence: Synthetic oligonucleotide
ggcaguaacuacagcaaca

SEQ ID NO: 1694316 - RNA, 19 nt, Artificial Sequence
  Description of Artificial Sequence: Synthetic oligonucleotide
uggccgaugaaggccgcgc

SEQ ID NO: 1694317 - RNA, 19 nt, Artificial Sequence
  Description of Artificial Sequence: Synthetic oligonucleotide
ggguuauccaucgaccaca

SEQ ID NO: 1694318 - RNA, 19 nt, Artificial Sequence
  Description of Artificial Sequence: Synthetic oligonucleotide
uacaguccuggccgcacuu

SEQ ID NO: 1694319 - RNA, 19 nt, Artificial Sequence
  Description of Artificial Sequence: Synthetic oligonucleotide
ccuggauugcccagugaag

SEQ ID NO: 1694320 - RNA, 19 nt, Artificial Sequence
  Description of Artificial Sequence: Synthetic oligonucleotide
cucgccgccaugguucgag

SEQ ID NO: 1694321 - RNA, 19 nt, Artificial Sequence
  Description of Artificial Sequence: Synthetic oligonucleotide
cuggggcucgccgccaugg

SEQ ID NO: 1694322 - RNA, 19 nt, Artificial Sequence
  Description of Artificial Sequence: Synthetic oligonucleotide
caagucggucucggguucg

SEQ ID NO: 1694323 - RNA, 19 nt, Artificial Sequence
  Description of Artificial Sequence: Synthetic oligonucleotide
ggcacgaagaggcuccgga

SEQ ID NO: 1694324 - RNA, 19 nt, Artificial Sequence
  Description of Artificial Sequence: Synthetic oligonucleotide
gcacgaagaggcuccggag

SEQ ID NO: 1694325 - RNA, 19 nt, Artificial Sequence
  Description of Artificial Sequence: Synthetic oligonucleotide
acggugugcccagcugagc

SEQ ID NO: 1694326 - RNA, 19 nt, Artificial Sequence
  Description of Artificial Sequence: Synthetic oligonucleotide
gcaacacuucgacucacuc

SEQ ID NO: 1694327 - RNA, 19 nt, Artificial Sequence
  Description of Artificial Sequence: Synthetic oligonucleotide
gcccacuuccuucauuaug

SEQ ID NO: 1694328 - RNA, 19 nt, Artificial Sequence
  Description of Artificial Sequence: Synthetic oligonucleotide
auggugcaguucucuugug

SEQ ID NO: 1694329 - RNA, 19 nt, Artificial Sequence
  Description of Artificial Sequence: Synthetic oligonucleotide
aucgaccacacgagcacug

SEQ ID NO: 1694330 - RNA, 19 nt, Artificial Sequence
  Description of Artificial Sequence: Synthetic oligonucleotide
cuccccgugguaaguacca

SEQ ID NO: 1694331 - RNA, 19 nt, Artificial Sequence
  Description of Artificial Sequence: Synthetic oligonucleotide
gaacccggccccagccugg

SEQ ID NO: 1694332 - RNA, 19 nt, Artificial Sequence
  Description of Artificial Sequence: Synthetic oligonucleotide
caggcggucuggcuccgcc

SEQ ID NO: 1694333 - RNA, 19 nt, Artificial Sequence
  Description of Artificial Sequence: Synthetic oligonucleotide
agucuaccgugagcacggc

SEQ ID NO: 1694334 - RNA, 19 nt, Artificial Sequence
  Description of Artificial Sequence: Synthetic oligonucleotide
ccaucgaccacacgagcac

SEQ ID NO: 1694335 - RNA, 19 nt, Artificial Sequence
  Description of Artificial Sequence: Synthetic oligonucleotide
ggaagcccgguuccgaguc

SEQ ID NO: 1694336 - RNA, 19 nt, Artificial Sequence
  Description of Artificial Sequence: Synthetic oligonucleotide
ucgaccacacgagcacugu

SEQ ID NO: 1694337 - RNA, 19 nt, Artificial Sequence
  Description of Artificial Sequence: Synthetic oligonucleotide
ggcaaagaagcuguccguc

SEQ ID NO: 1694338 - RNA, 19 nt, Artificial Sequence
  Description of Artificial Sequence: Synthetic oligonucleotide
ccuggccgcacuugcacgg

SEQ ID NO: 1694339 - RNA, 19 nt, Artificial Sequence
  Description of Artificial Sequence: Synthetic oligonucleotide
gccuggauugcccagugaa

SEQ ID NO: 1694340 - RNA, 19 nt, Artificial Sequence
  Description of Artificial Sequence: Synthetic oligonucleotide
cuggauugcccagugaagu

SEQ ID NO: 1694341 - RNA, 19 nt, Artificial Sequence
  Description of Artificial Sequence: Synthetic oligonucleotide
ugccccgccuagauacagu

SEQ ID NO: 1694342 - RNA, 19 nt, Artificial Sequence
  Description of Artificial Sequence: Synthetic oligonucleotide
gguucgagcccugcgcucc

SEQ ID NO: 1694343 - RNA, 19 nt, Artificial Sequence
  Description of Artificial Sequence: Synthetic oligonucleotide
ucggcucgggacuggccga

SEQ ID NO: 1694344 - RNA, 19 nt, Artificial Sequence
  Description of Artificial Sequence: Synthetic oligonucleotide
gccuagauacaguccuggc

SEQ ID NO: 1694345 - RNA, 19 nt, Artificial Sequence
  Description of Artificial Sequence: Synthetic oligonucleotide
ccaaaauacuagaacuucu

SEQ ID NO: 1694346 - RNA, 19 nt, Artificial Sequence
  Description of Artificial Sequence: Synthetic oligonucleotide
ccaguugaaggaacccaac

SEQ ID NO: 1694347 - RNA, 19 nt, Artificial Sequence
  Description of Artificial Sequence: Synthetic oligonucleotide
uggccgcacuugcacggug

SEQ ID NO: 1694348 - RNA, 19 nt, Artificial Sequence
  Description of Artificial Sequence: Synthetic oligonucleotide
cgguacugcuuguaaauug

SEQ ID NO: 1694349 - RNA, 19 nt, Artificial Sequence
  Description of Artificial Sequence: Synthetic oligonucleotide
agaucgccugcacuuucua

SEQ ID NO: 1694350 - RNA, 19 nt, Artificial Sequence
  Description of Artificial Sequence: Synthetic oligonucleotide
agcccugcgcucccaacau

SEQ ID NO: 1694351 - RNA, 19 nt, Artificial Sequence
  Description of Artificial Sequence: Synthetic oligonucleotide
gcagcgauccagguggcug

SEQ ID NO: 1694352 - RNA, 19 nt, Artificial Sequence
  Description of Artificial Sequence: Synthetic oligonucleotide
caagagaaguauguuuccu

SEQ ID NO: 1694353 - RNA, 19 nt, Artificial Sequence
  Description of Artificial Sequence: Synthetic oligonucleotide
agauacaguccuggccgca

SEQ ID NO: 1694354 - RNA, 19 nt, Artificial Sequence
  Description of Artificial Sequence: Synthetic oligonucleotide
guucguccagcgccggcac

SEQ ID NO: 1694355 - RNA, 19 nt, Artificial Sequence
  Description of Artificial Sequence: Synthetic oligonucleotide
ugguucgagcccugcgcuc

SEQ ID NO: 1694356 - RNA, 19 nt, Artificial Sequence
  Description of Artificial Sequence: Synthetic oligonucleotide
guaaacgguacugcuugua

SEQ ID NO: 1694357 - RNA, 19 nt, Artificial Sequence
  Description of Artificial Sequence: Synthetic oligonucleotide
cacuguucuccauaccagu

SEQ ID NO: 1694358 - RNA, 19 nt, Artificial Sequence
  Description of Artificial Sequence: Synthetic oligonucleotide
auugcacuagagggaucca

SEQ ID NO: 1694359 - RNA, 19 nt, Artificial Sequence
  Description of Artificial Sequence: Synthetic oligonucleotide
agcaacacuucgacucacu

SEQ ID NO: 1694360 - RNA, 19 nt, Artificial Sequence
  Description of Artificial Sequence: Synthetic oligonucleotide
ggcacugcauuuugggcaa

SEQ ID NO: 1694361 - RNA, 19 nt, Artificial Sequence
  Description of Artificial Sequence: Synthetic oligonucleotide
gugaaguauugcacauaca

SEQ ID NO: 1694362 - RNA, 19 nt, Artificial Sequence
  Description of Artificial Sequence: Synthetic oligonucleotide
acgguacugcuuguaaauu

SEQ ID NO: 1694363 - RNA, 19 nt, Artificial Sequence
  Description of Artificial Sequence: Synthetic oligonucleotide
cgagucuaccgugagcacg

SEQ ID NO: 1694364 - RNA, 19 nt, Artificial Sequence
  Description of Artificial Sequence: Synthetic oligonucleotide
ccaugguucgagcccugcg

SEQ ID NO: 1694365 - RNA, 19 nt, Artificial Sequence
  Description of Artificial Sequence: Synthetic oligonucleotide
ugaaggccgcgcagcgauc

SEQ ID NO: 1694366 - RNA, 19 nt, Artificial Sequence
  Description of Artificial Sequence: Synthetic oligonucleotide
ggcggucuggcuccgccag

SEQ ID NO: 1694367 - RNA, 19 nt, Artificial Sequence
  Description of Artificial Sequence: Synthetic oligonucleotide
agcagggguuauccaucga

SEQ ID NO: 1694368 - RNA, 19 nt, Artificial Sequence
  Description of Artificial Sequence: Synthetic oligonucleotide
aagucggucucggguucgu

SEQ ID NO: 1694369 - RNA, 19 nt, Artificial Sequence
  Description of Artificial Sequence: Synthetic oligonucleotide
uuccgaaguucuggauacu

SEQ ID NO: 1694370 - RNA, 19 nt, Artificial Sequence
  Description of Artificial Sequence: Synthetic oligonucleotide
gguuauccaucgaccacac

SEQ ID NO: 1694371 - RNA, 19 nt, Artificial Sequence
  Description of Artificial Sequence: Synthetic oligonucleotide
acuggccgaugaaggccgc

SEQ ID NO: 1694372 - RNA, 19 nt, Artificial Sequence
  Description of Artificial Sequence: Synthetic oligonucleotide
cuccaucaggcggucuggc

SEQ ID NO: 1694373 - RNA, 19 nt, Artificial Sequence
  Description of Artificial Sequence: Synthetic oligonucleotide
ugacuccccgugguaagua

SEQ ID NO: 1694374 - RNA, 19 nt, Artificial Sequence
  Description of Artificial Sequence: Synthetic oligonucleotide
gccgaugaaggccgcgcag

SEQ ID NO: 1694375 - RNA, 19 nt, Artificial Sequence
  Description of Artificial Sequence: Synthetic oligonucleotide
gcuguccgucuauuacucc

SEQ ID NO: 1694376 - RNA, 19 nt, Artificial Sequence
  Description of Artificial Sequence: Synthetic oligonucleotide
ccugacuccccgugguaag

SEQ ID NO: 1694377 - RNA, 19 nt, Artificial Sequence
  Description of Artificial Sequence: Synthetic oligonucleotide
gcucccaacauggcggcgc

SEQ ID NO: 1694378 - RNA, 19 nt, Artificial Sequence
  Description of Artificial Sequence: Synthetic oligonucleotide
accgcccgucccucggcuc

SEQ ID NO: 1694379 - RNA, 19 nt, Artificial Sequence
  Description of Artificial Sequence: Synthetic oligonucleotide
agcgauccagguggcugag

SEQ ID NO: 1694380 - RNA, 19 nt, Artificial Sequence
  Description of Artificial Sequence: Synthetic oligonucleotide
guucgagcccugcgcuccc

SEQ ID NO: 1694381 - RNA, 19 nt, Artificial Sequence
  Description of Artificial Sequence: Synthetic oligonucleotide
cagcaacacuucgacucac

SEQ ID NO: 1694382 - RNA, 19 nt, Artificial Sequence
  Description of Artificial Sequence: Synthetic oligonucleotide
gcccagugaaguauugcac

SEQ ID NO: 1694383 - RNA, 19 nt, Artificial Sequence
  Description of Artificial Sequence: Synthetic oligonucleotide
ucgagcccugcgcucccaa

SEQ ID NO: 1694384 - RNA, 19 nt, Artificial Sequence
  Description of Artificial Sequence: Synthetic oligonucleotide
ggcucgccgccaugguucg

SEQ ID NO: 1694385 - RNA, 19 nt, Artificial Sequence
  Description of Artificial Sequence: Synthetic oligonucleotide
cuggccgaugaaggccgcg

SEQ ID NO: 1694386 - RNA, 19 nt, Artificial Sequence
  Description of Artificial Sequence: Synthetic oligonucleotide
cugccccgccuagauacag

SEQ ID NO: 1694387 - RNA, 19 nt, Artificial Sequence
  Description of Artificial Sequence: Synthetic oligonucleotide
uggggcucgccgccauggu

SEQ ID NO: 1694388 - RNA, 19 nt, Artificial Sequence
  Description of Artificial Sequence: Synthetic oligonucleotide
cuugcacggugugcccagc

SEQ ID NO: 1694389 - RNA, 19 nt, Artificial Sequence
  Description of Artificial Sequence: Synthetic oligonucleotide
gguucguccagcgccggca

SEQ ID NO: 1694390 - RNA, 19 nt, Artificial Sequence
  Description of Artificial Sequence: Synthetic oligonucleotide
gguuccgagucuaccguga

SEQ ID NO: 1694391 - RNA, 19 nt, Artificial Sequence
  Description of Artificial Sequence: Synthetic oligonucleotide
gccggcacgaagaggcucc

SEQ ID NO: 1694392 - RNA, 19 nt, Artificial Sequence
  Description of Artificial Sequence: Synthetic oligonucleotide
gcaagucggucucggguuc

SEQ ID NO: 1694393 - RNA, 19 nt, Artificial Sequence
  Description of Artificial Sequence: Synthetic oligonucleotide
ggccuucgaacccggcccc

SEQ ID NO: 1694394 - RNA, 19 nt, Artificial Sequence
  Description of Artificial Sequence: Synthetic oligonucleotide
gccccgccuagauacaguc

SEQ ID NO: 1694395 - RNA, 19 nt, Artificial Sequence
  Description of Artificial Sequence: Synthetic oligonucleotide
gauugcccagugaaguauu

SEQ ID NO: 1694396 - RNA, 19 nt, Artificial Sequence
  Description of Artificial Sequence: Synthetic oligonucleotide
guccgucuauuacucccaa

SEQ ID NO: 1694397 - RNA, 19 nt, Artificial Sequence
  Description of Artificial Sequence: Synthetic oligonucleotide
aggccgcgcagcgauccag

SEQ ID NO: 1694398 - RNA, 19 nt, Artificial Sequence
  Description of Artificial Sequence: Synthetic oligonucleotide
aucaggcggucuggcuccg

SEQ ID NO: 1694399 - RNA, 19 nt, Artificial Sequence
  Description of Artificial Sequence: Synthetic oligonucleotide
cuucgacucacuccugcau

SEQ ID NO: 1694400 - RNA, 19 nt, Artificial Sequence
  Description of Artificial Sequence: Synthetic oligonucleotide
caguaacuacagcaacacu

SEQ ID NO: 1694401 - RNA, 19 nt, Artificial Sequence
  Description of Artificial Sequence: Synthetic oligonucleotide
gcacuugcacggugugccc

SEQ ID NO: 1694402 - RNA, 19 nt, Artificial Sequence
  Description of Artificial Sequence: Synthetic oligonucleotide
gggcucgccgccaugguuc

SEQ ID NO: 1694403 - RNA, 19 nt, Artificial Sequence
  Description of Artificial Sequence: Synthetic oligonucleotide
agcccgguuccgagucuac

SEQ ID NO: 1694404 - RNA, 19 nt, Artificial Sequence
  Description of Artificial Sequence: Synthetic oligonucleotide
cugcaugacagugcaccaa

SEQ ID NO: 1694405 - RNA, 19 nt, Artificial Sequence
  Description of Artificial Sequence: Synthetic oligonucleotide
uccccgugguaaguaccaa

SEQ ID NO: 1694406 - RNA, 19 nt, Artificial Sequence
  Description of Artificial Sequence: Synthetic oligonucleotide
cacggcggugaugccggcc

SEQ ID NO: 1694407 - RNA, 19 nt, Artificial Sequence
  Description of Artificial Sequence: Synthetic oligonucleotide
gucguugggucaacagcaa

SEQ ID NO: 1694408 - RNA, 19 nt, Artificial Sequence
  Description of Artificial Sequence: Synthetic oligonucleotide
cagugaaguauugcacaua

SEQ ID NO: 1694409 - RNA, 19 nt, Artificial Sequence
  Description of Artificial Sequence: Synthetic oligonucleotide
ucccucggcucgggacugg

SEQ ID NO: 1694410 - RNA, 19 nt, Artificial Sequence
  Description of Artificial Sequence: Synthetic oligonucleotide
acacuucgacucacuccug

SEQ ID NO: 1694411 - RNA, 19 nt, Artificial Sequence
  Description of Artificial Sequence: Synthetic oligonucleotide
cuggcuccgccagcgccgc

SEQ ID NO: 1694412 - RNA, 19 nt, Artificial Sequence
  Description of Artificial Sequence: Synthetic oligonucleotide
uucgagcccugcgcuccca

SEQ ID NO: 1694413 - RNA, 19 nt, Artificial Sequence
  Description of Artificial Sequence: Synthetic oligonucleotide
gaagcccgguuccgagucu

SEQ ID NO: 1694414 - RNA, 19 nt, Artificial Sequence
  Description of Artificial Sequence: Synthetic oligonucleotide
cuagagggauccacuucau

SEQ ID NO: 1694415 - RNA, 19 nt, Artificial Sequence
  Description of Artificial Sequence: Synthetic oligonucleotide
gccgcacuugcacggugug

SEQ ID NO: 1694416 - RNA, 19 nt, Artificial Sequence
  Description of Artificial Sequence: Synthetic oligonucleotide
ccccgccuagauacagucc

SEQ ID NO: 1694417 - RNA, 19 nt, Artificial Sequence
  Description of Artificial Sequence: Synthetic oligonucleotide
ggauugcccagugaaguau

SEQ ID NO: 1694418 - RNA, 19 nt, Artificial Sequence
  Description of Artificial Sequence: Synthetic oligonucleotide
gcgcucccaacauggcggc

SEQ ID NO: 1694419 - RNA, 19 nt, Artificial Sequence
  Description of Artificial Sequence: Synthetic oligonucleotide
gcuaauggcccacuuccuu

SEQ ID NO: 1694420 - RNA, 19 nt, Artificial Sequence
  Description of Artificial Sequence: Synthetic oligonucleotide
ggccgcgcagcgauccagg

SEQ ID NO: 1694421 - RNA, 19 nt, Artificial Sequence
  Description of Artificial Sequence: Synthetic oligonucleotide
ccgugguaaguaccaaaga

SEQ ID NO: 1694422 - RNA, 19 nt, Artificial Sequence
  Description of Artificial Sequence: Synthetic oligonucleotide
ggccgaugaaggccgcgca

SEQ ID NO: 1694423 - RNA, 19 nt, Artificial Sequence
  Description of Artificial Sequence: Synthetic oligonucleotide
cucgggacuggccgaugaa

SEQ ID NO: 1694424 - RNA, 19 nt, Artificial Sequence
  Description of Artificial Sequence: Synthetic oligonucleotide
cuaccgugagcacggcggu

SEQ ID NO: 1694425 - RNA, 19 nt, Artificial Sequence
  Description of Artificial Sequence: Synthetic oligonucleotide
cgucuauuacucccaacaa

SEQ ID NO: 1694426 - RNA, 19 nt, Artificial Sequence
  Description of Artificial Sequence: Synthetic oligonucleotide
ccgcccgucccucggcucg

SEQ ID NO: 1694427 - RNA, 19 nt, Artificial Sequence
  Description of Artificial Sequence: Synthetic oligonucleotide
ggucuggcuccgccagcgc

SEQ ID NO: 1694428 - RNA, 19 nt, Artificial Sequence
  Description of Artificial Sequence: Synthetic oligonucleotide
ggguucguccagcgccggc

SEQ ID NO: 1694429 - RNA, 19 nt, Artificial Sequence
  Description of Artificial Sequence: Synthetic oligonucleotide
ggcuccggaggccuucgaa

SEQ ID NO: 1694430 - RNA, 19 nt, Artificial Sequence
  Description of Artificial Sequence: Synthetic oligonucleotide
acccaacuuggcacugcau

SEQ ID NO: 1694431 - RNA, 19 nt, Artificial Sequence
  Description of Artificial Sequence: Synthetic oligonucleotide
caucgaccacacgagcacu

SEQ ID NO: 1694432 - RNA, 19 nt, Artificial Sequence
  Description of Artificial Sequence: Synthetic oligonucleotide
ccgagucuaccgugagcac

SEQ ID NO: 1694433 - RNA, 19 nt, Artificial Sequence
  Description of Artificial Sequence: Synthetic oligonucleotide
caaaggcuaauggcccacu

SEQ ID NO: 1694434 - RNA, 19 nt, Artificial Sequence
  Description of Artificial Sequence: Synthetic oligonucleotide
gcacuagagggauccacuu

SEQ ID NO: 1694435 - RNA, 19 nt, Artificial Sequence
  Description of Artificial Sequence: Synthetic oligonucleotide
cgaacccggccccagccug

SEQ ID NO: 1694436 - RNA, 19 nt, Artificial Sequence
  Description of Artificial Sequence: Synthetic oligonucleotide
guauguuuccugggcuuuu

SEQ ID NO: 1694437 - RNA, 19 nt, Artificial Sequence
  Description of Artificial Sequence: Synthetic oligonucleotide
ccuucgaacccggccccag

SEQ ID NO: 1694438 - RNA, 19 nt, Artificial Sequence
  Description of Artificial Sequence: Synthetic oligonucleotide
gcccgguuccgagucuacc

SEQ ID NO: 1694439 - RNA, 19 nt, Artificial Sequence
  Description of Artificial Sequence: Synthetic oligonucleotide
gccugacuccccgugguaa

SEQ ID NO: 1694440 - RNA, 19 nt, Artificial Sequence
  Description of Artificial Sequence: Synthetic oligonucleotide
ccgcgcagcgauccaggug

SEQ ID NO: 1694441 - RNA, 19 nt, Artificial Sequence
  Description of Artificial Sequence: Synthetic oligonucleotide
cugacuccccgugguaagu

SEQ ID NO: 1694442 - RNA, 19 nt, Artificial Sequence
  Description of Artificial Sequence: Synthetic oligonucleotide
ccccgugguaaguaccaaa

SEQ ID NO: 1694443 - RNA, 19 nt, Artificial Sequence
  Description of Artificial Sequence: Synthetic oligonucleotide
ccgcacuugcacggugugc

SEQ ID NO: 1694444 - RNA, 19 nt, Artificial Sequence
  Description of Artificial Sequence: Synthetic oligonucleotide
ggaggccuucgaacccggc

SEQ ID NO: 1694445 - RNA, 19 nt, Artificial Sequence
  Description of Artificial Sequence: Synthetic oligonucleotide
gcggucuggcuccgccagc

SEQ ID NO: 1694446 - RNA, 19 nt, Artificial Sequence
  Description of Artificial Sequence: Synthetic oligonucleotide
ggcuaauggcccacuuccu

SEQ ID NO: 1694447 - RNA, 19 nt, Artificial Sequence
  Description of Artificial Sequence: Synthetic oligonucleotide
gcgauccagguggcugagc

SEQ ID NO: 1694448 - RNA, 19 nt, Artificial Sequence
  Description of Artificial Sequence: Synthetic oligonucleotide
ccggcacgaagaggcuccg

SEQ ID NO: 1694449 - RNA, 19 nt, Artificial Sequence
  Description of Artificial Sequence: Synthetic oligonucleotide
cacgagcacuguucuccau

SEQ ID NO: 1694450 - RNA, 19 nt, Artificial Sequence
  Description of Artificial Sequence: Synthetic oligonucleotide
cggugugcccagcugagcu

SEQ ID NO: 1694451 - RNA, 19 nt, Artificial Sequence
  Description of Artificial Sequence: Synthetic oligonucleotide
ggcucgggacuggccgaug

SEQ ID NO: 1694452 - RNA, 19 nt, Artificial Sequence
  Description of Artificial Sequence: Synthetic oligonucleotide
gcugccccgccuagauaca

SEQ ID NO: 1694453 - RNA, 19 nt, Artificial Sequence
  Description of Artificial Sequence: Synthetic oligonucleotide
ccuggggcucgccgccaug

SEQ ID NO: 1694454 - RNA, 19 nt, Artificial Sequence
  Description of Artificial Sequence: Synthetic oligonucleotide
caccgcccgucccucggcu

SEQ ID NO: 1694455 - RNA, 19 nt, Artificial Sequence
  Description of Artificial Sequence: Synthetic oligonucleotide
gcgcagcgauccagguggc

SEQ ID NO: 1694456 - RNA, 19 nt, Artificial Sequence
  Description of Artificial Sequence: Synthetic oligonucleotide
cuggccgcacuugcacggu

SEQ ID NO: 1694457 - RNA, 19 nt, Artificial Sequence
  Description of Artificial Sequence: Synthetic oligonucleotide
gccgggguuggcagccgca

SEQ ID NO: 1694458 - RNA, 19 nt, Artificial Sequence
  Description of Artificial Sequence: Synthetic oligonucleotide
ggggcucgccgccaugguu

SEQ ID NO: 1694459 - RNA, 19 nt, Artificial Sequence
  Description of Artificial Sequence: Synthetic oligonucleotide
gccuucgaacccggcccca

SEQ ID NO: 1694460 - RNA, 19 nt, Artificial Sequence
  Description of Artificial Sequence: Synthetic oligonucleotide
gccgcgcagcgauccaggu

SEQ ID NO: 1694461 - RNA, 19 nt, Artificial Sequence
  Description of Artificial Sequence: Synthetic oligonucleotide
cggcacgaagaggcuccgg

SEQ ID NO: 1694462 - RNA, 19 nt, Artificial Sequence
  Description of Artificial Sequence: Synthetic oligonucleotide
gcccgucccucggcucggg

SEQ ID NO: 1694463 - RNA, 19 nt, Artificial Sequence
  Description of Artificial Sequence: Synthetic oligonucleotide
cgccggcacgaagaggcuc

SEQ ID NO: 1694464 - RNA, 19 nt, Artificial Sequence
  Description of Artificial Sequence: Synthetic oligonucleotide
ccgccaugguucgagcccu

SEQ ID NO: 1694465 - RNA, 19 nt, Artificial Sequence
  Description of Artificial Sequence: Synthetic oligonucleotide
cgcccgucccucggcucgg

SEQ ID NO: 1694466 - RNA, 19 nt, Artificial Sequence
  Description of Artificial Sequence: Synthetic oligonucleotide
gcucgccgccaugguucga

SEQ ID NO: 1694467 - RNA, 19 nt, Artificial Sequence
  Description of Artificial Sequence: Synthetic oligonucleotide
ccgugagcacggcggugau

SEQ ID NO: 1694468 - RNA, 19 nt, Artificial Sequence
  Description of Artificial Sequence: Synthetic oligonucleotide
cgcagcgauccagguggcu

SEQ ID NO: 1694469 - RNA, 19 nt, Artificial Sequence
  Description of Artificial Sequence: Synthetic oligonucleotide
cggcucgggacuggccgau

SEQ ID NO: 1694470 - RNA, 19 nt, Artificial Sequence
  Description of Artificial Sequence: Synthetic oligonucleotide
aaagcuacuauauaagagc

SEQ ID NO: 1694471 - RNA, 19 nt, Artificial Sequence
  Description of Artificial Sequence: Synthetic oligonucleotide
aauuuaaugaguuuacauc

SEQ ID NO: 1694472 - RNA, 19 nt, Artificial Sequence
  Description of Artificial Sequence: Synthetic oligonucleotide
ucaauauugucucagaagg

SEQ ID NO: 1694473 - RNA, 19 nt, Artificial Sequence
  Description of Artificial Sequence: Synthetic oligonucleotide
ucuuuguuaacuuauaagg

SEQ ID NO: 1694474 - RNA, 19 nt, Artificial Sequence
  Description of Artificial Sequence: Synthetic oligonucleotide
aauauauccaggcagaugu

SEQ ID NO: 1694475 - RNA, 19 nt, Artificial Sequence
  Description of Artificial Sequence: Synthetic oligonucleotide
aaguacauuucacagcacc

SEQ ID NO: 1694476 - RNA, 19 nt, Artificial Sequence
  Description of Artificial Sequence: Synthetic oligonucleotide
ucuuacaaaacuuugguca

SEQ ID NO: 1694477 - RNA, 19 nt, Artificial Sequence
  Description of Artificial Sequence: Synthetic oligonucleotide
aguacaaaugacuacaaug

SEQ ID NO: 1694478 - RNA, 19 nt, Artificial Sequence
  Description of Artificial Sequence: Synthetic oligonucleotide
ugcaguauugccaugaugu

SEQ ID NO: 1694479 - RNA, 19 nt, Artificial Sequence
  Description of Artificial Sequence: Synthetic oligonucleotide
agucauuuuacaucuaagg

SEQ ID NO: 1694480 - RNA, 19 nt, Artificial Sequence
  Description of Artificial Sequence: Synthetic oligonucleotide
uaguuuuagagcaaaagcu

SEQ ID NO: 1694481 - RNA, 19 nt, Artificial Sequence
  Description of Artificial Sequence: Synthetic oligonucleotide
uguauugugucuuacaaaa

SEQ ID NO: 1694482 - RNA, 19 nt, Artificial Sequence
  Description of Artificial Sequence: Synthetic oligonucleotide
uauaagguugguuauguug

SEQ ID NO: 1694483 - RNA, 19 nt, Artificial Sequence
  Description of Artificial Sequence: Synthetic oligonucleotide
ugagaaucaucaaaguugc

SEQ ID NO: 1694484 - RNA, 19 nt, Artificial Sequence
  Description of Artificial Sequence: Synthetic oligonucleotide
uuguauuaauuuuagcaag

SEQ ID NO: 1694485 - RNA, 19 nt, Artificial Sequence
  Description of Artificial Sequence: Synthetic oligonucleotide
agcaaaagcuguuaaagag

SEQ ID NO: 1694486 - RNA, 19 nt, Artificial Sequence
  Description of Artificial Sequence: Synthetic oligonucleotide
ucacuguacaaucucaaag

SEQ ID NO: 1694487 - RNA, 19 nt, Artificial Sequence
  Description of Artificial Sequence: Synthetic oligonucleotide
aauaaguagucauuuuaca

SEQ ID NO: 1694488 - RNA, 19 nt, Artificial Sequence
  Description of Artificial Sequence: Synthetic oligonucleotide
uuguuaacuuauaagguug

SEQ ID NO: 1694489 - RNA, 19 nt, Artificial Sequence
  Description of Artificial Sequence: Synthetic oligonucleotide
uugaauugaacacgguccg

SEQ ID NO: 1694490 - RNA, 19 nt, Artificial Sequence
  Description of Artificial Sequence: Synthetic oligonucleotide
gaaucaucaaaguugcuug

SEQ ID NO: 1694491 - RNA, 19 nt, Artificial Sequence
  Description of Artificial Sequence: Synthetic oligonucleotide
uaaguauuacacaaugcug

SEQ ID NO: 1694492 - RNA, 19 nt, Artificial Sequence
  Description of Artificial Sequence: Synthetic oligonucleotide
aagagccucuuuuaaaauc

SEQ ID NO: 1694493 - RNA, 19 nt, Artificial Sequence
  Description of Artificial Sequence: Synthetic oligonucleotide
agcaagaacaguaaagccc

SEQ ID NO: 1694494 - RNA, 19 nt, Artificial Sequence
  Description of Artificial Sequence: Synthetic oligonucleotide
aagcuacuauauaagagcc

SEQ ID NO: 1694495 - RNA, 19 nt, Artificial Sequence
  Description of Artificial Sequence: Synthetic oligonucleotide
auaucuaaguauuacacaa

SEQ ID NO: 1694496 - RNA, 19 nt, Artificial Sequence
  Description of Artificial Sequence: Synthetic oligonucleotide
guuauguugacaucuguag

SEQ ID NO: 1694497 - RNA, 19 nt, Artificial Sequence
  Description of Artificial Sequence: Synthetic oligonucleotide
uguuaacuuauaagguugg

SEQ ID NO: 1694498 - RNA, 19 nt, Artificial Sequence
  Description of Artificial Sequence: Synthetic oligonucleotide
uguauuaauuuuagcaaga

SEQ ID NO: 1694499 - RNA, 19 nt, Artificial Sequence
  Description of Artificial Sequence: Synthetic oligonucleotide
uaaagcccaacuaaugacc

SEQ ID NO: 1694500 - RNA, 19 nt, Artificial Sequence
  Description of Artificial Sequence: Synthetic oligonucleotide
gauguguugaggcaugaag

SEQ ID NO: 1694501 - RNA, 19 nt, Artificial Sequence
  Description of Artificial Sequence: Synthetic oligonucleotide
uacaaucucaaaguaaugc

SEQ ID NO: 1694502 - RNA, 19 nt, Artificial Sequence
  Description of Artificial Sequence: Synthetic oligonucleotide
uaaaaggugaagcauuccu

SEQ ID NO: 1694503 - RNA, 19 nt, Artificial Sequence
  Description of Artificial Sequence: Synthetic oligonucleotide
cauucaauagcaagaacag

SEQ ID NO: 1694504 - RNA, 19 nt, Artificial Sequence
  Description of Artificial Sequence: Synthetic oligonucleotide
uauaucuaaguauuacaca

SEQ ID NO: 1694505 - RNA, 19 nt, Artificial Sequence
  Description of Artificial Sequence: Synthetic oligonucleotide
agggcuaaaaccauacucc

SEQ ID NO: 1694506 - RNA, 19 nt, Artificial Sequence
  Description of Artificial Sequence: Synthetic oligonucleotide
augacuacaauguuaaaau

SEQ ID NO: 1694507 - RNA, 19 nt, Artificial Sequence
  Description of Artificial Sequence: Synthetic oligonucleotide
aguauaucuaaguauuaca

SEQ ID NO: 1694508 - RNA, 19 nt, Artificial Sequence
  Description of Artificial Sequence: Synthetic oligonucleotide
cuguuaaagagucuagagg

SEQ ID NO: 1694509 - RNA, 19 nt, Artificial Sequence
  Description of Artificial Sequence: Synthetic oligonucleotide
aacacaacacaugagucag

SEQ ID NO: 1694510 - RNA, 19 nt, Artificial Sequence
  Description of Artificial Sequence: Synthetic oligonucleotide
ugucuuacaaaacuuuggu

SEQ ID NO: 1694511 - RNA, 19 nt, Artificial Sequence
  Description of Artificial Sequence: Synthetic oligonucleotide
auaaaucuuuuguaaguag

SEQ ID NO: 1694512 - RNA, 19 nt, Artificial Sequence
  Description of Artificial Sequence: Synthetic oligonucleotide
auugaaacagucacaaagg

SEQ ID NO: 1694513 - RNA, 19 nt, Artificial Sequence
  Description of Artificial Sequence: Synthetic oligonucleotide
aaauacugauaucaaagua

SEQ ID NO: 1694514 - RNA, 19 nt, Artificial Sequence
  Description of Artificial Sequence: Synthetic oligonucleotide
agauaaaucuuuuguaagu

SEQ ID NO: 1694515 - RNA, 19 nt, Artificial Sequence
  Description of Artificial Sequence: Synthetic oligonucleotide
aucuaaguauuacacaaug

SEQ ID NO: 1694516 - RNA, 19 nt, Artificial Sequence
  Description of Artificial Sequence: Synthetic oligonucleotide
ugugucuuacaaaacuuug

SEQ ID NO: 1694517 - RNA, 19 nt, Artificial Sequence
  Description of Artificial Sequence: Synthetic oligonucleotide
uuguaaguaguucuccaag

SEQ ID NO: 1694518 - RNA, 19 nt, Artificial Sequence
  Description of Artificial Sequence: Synthetic oligonucleotide
uauaugccauucaauagca

SEQ ID NO: 1694519 - RNA, 19 nt, Artificial Sequence
  Description of Artificial Sequence: Synthetic oligonucleotide
uagacaaaagcuacuauau

SEQ ID NO: 1694520 - RNA, 19 nt, Artificial Sequence
  Description of Artificial Sequence: Synthetic oligonucleotide
aauuucagucuuuguuaac

SEQ ID NO: 1694521 - RNA, 19 nt, Artificial Sequence
  Description of Artificial Sequence: Synthetic oligonucleotide
ugugcaaguacauuucaca

SEQ ID NO: 1694522 - RNA, 19 nt, Artificial Sequence
  Description of Artificial Sequence: Synthetic oligonucleotide
uacucaaaguuacauuaag

SEQ ID NO: 1694523 - RNA, 19 nt, Artificial Sequence
  Description of Artificial Sequence: Synthetic oligonucleotide
aguaaagcccaacuaauga

SEQ ID NO: 1694524 - RNA, 19 nt, Artificial Sequence
  Description of Artificial Sequence: Synthetic oligonucleotide
uauugucucagaaggaacu

SEQ ID NO: 1694525 - RNA, 19 nt, Artificial Sequence
  Description of Artificial Sequence: Synthetic oligonucleotide
aguauccucccucccaucc

SEQ ID NO: 1694526 - RNA, 19 nt, Artificial Sequence
  Description of Artificial Sequence: Synthetic oligonucleotide
uuuguuaacuuauaagguu

SEQ ID NO: 1694527 - RNA, 19 nt, Artificial Sequence
  Description of Artificial Sequence: Synthetic oligonucleotide
ugugaaaagcgcuacagua

SEQ ID NO: 1694528 - RNA, 19 nt, Artificial Sequence
  Description of Artificial Sequence: Synthetic oligonucleotide
aaagcgcuacaguauaucu

SEQ ID NO: 1694529 - RNA, 19 nt, Artificial Sequence
  Description of Artificial Sequence: Synthetic oligonucleotide
aagguuaagaaaauacuga

SEQ ID NO: 1694530 - RNA, 19 nt, Artificial Sequence
  Description of Artificial Sequence: Synthetic oligonucleotide
uggaaauaaguccacguaa

SEQ ID NO: 1694531 - RNA, 19 nt, Artificial Sequence
  Description of Artificial Sequence: Synthetic oligonucleotide
aaaagcuuucacuggagaa

SEQ ID NO: 1694532 - RNA, 19 nt, Artificial Sequence
  Description of Artificial Sequence: Synthetic oligonucleotide
gucaauauugucucagaag

SEQ ID NO: 1694533 - RNA, 19 nt, Artificial Sequence
  Description of Artificial Sequence: Synthetic oligonucleotide
auaaguagucauuuuacau

SEQ ID NO: 1694534 - RNA, 19 nt, Artificial Sequence
  Description of Artificial Sequence: Synthetic oligonucleotide
gucuuuguuaacuuauaag

SEQ ID NO: 1694535 - RNA, 19 nt, Artificial Sequence
  Description of Artificial Sequence: Synthetic oligonucleotide
auagccgguguacagcgcc

SEQ ID NO: 1694536 - RNA, 19 nt, Artificial Sequence
  Description of Artificial Sequence: Synthetic oligonucleotide
uuauguugacaucuguaga

SEQ ID NO: 1694537 - RNA, 19 nt, Artificial Sequence
  Description of Artificial Sequence: Synthetic oligonucleotide
cagauaaaucuuuuguaag

SEQ ID NO: 1694538 - RNA, 19 nt, Artificial Sequence
  Description of Artificial Sequence: Synthetic oligonucleotide
ucuuugaauuuaaugaguu

SEQ ID NO: 1694539 - RNA, 19 nt, Artificial Sequence
  Description of Artificial Sequence: Synthetic oligonucleotide
uuuagcaagauuguuacuu

SEQ ID NO: 1694540 - RNA, 19 nt, Artificial Sequence
  Description of Artificial Sequence: Synthetic oligonucleotide
agaacaguaaagcccaacu

SEQ ID NO: 1694541 - RNA, 19 nt, Artificial Sequence
  Description of Artificial Sequence: Synthetic oligonucleotide
aauugaacacgguccgcuc

SEQ ID NO: 1694542 - RNA, 19 nt, Artificial Sequence
  Description of Artificial Sequence: Synthetic oligonucleotide
aguucaagcuugcagauaa

SEQ ID NO: 1694543 - RNA, 19 nt, Artificial Sequence
  Description of Artificial Sequence: Synthetic oligonucleotide
auagacaaaagcuacuaua

SEQ ID NO: 1694544 - RNA, 19 nt, Artificial Sequence
  Description of Artificial Sequence: Synthetic oligonucleotide
uuuacaugucuuuugguua

SEQ ID NO: 1694545 - RNA, 19 nt, Artificial Sequence
  Description of Artificial Sequence: Synthetic oligonucleotide
cuuguauuaauuuuagcaa

SEQ ID NO: 1694546 - RNA, 19 nt, Artificial Sequence
  Description of Artificial Sequence: Synthetic oligonucleotide
aguaaugcaguauugccau

SEQ ID NO: 1694547 - RNA, 19 nt, Artificial Sequence
  Description of Artificial Sequence: Synthetic oligonucleotide
aggcaauuaagauguacuc

SEQ ID NO: 1694548 - RNA, 19 nt, Artificial Sequence
  Description of Artificial Sequence: Synthetic oligonucleotide
uuucacuggagaauauuga

SEQ ID NO: 1694549 - RNA, 19 nt, Artificial Sequence
  Description of Artificial Sequence: Synthetic oligonucleotide
auuccaacuucauaaggug

SEQ ID NO: 1694550 - RNA, 19 nt, Artificial Sequence
  Description of Artificial Sequence: Synthetic oligonucleotide
ucacaucugaucacaaugu

SEQ ID NO: 1694551 - RNA, 19 nt, Artificial Sequence
  Description of Artificial Sequence: Synthetic oligonucleotide
uugaaacagucacaaaggu

SEQ ID NO: 1694552 - RNA, 19 nt, Artificial Sequence
  Description of Artificial Sequence: Synthetic oligonucleotide
uagucauuuuacaucuaag

SEQ ID NO: 1694553 - RNA, 19 nt, Artificial Sequence
  Description of Artificial Sequence: Synthetic oligonucleotide
uucauaagguggaucuucc

SEQ ID NO: 1694554 - RNA, 19 nt, Artificial Sequence
  Description of Artificial Sequence: Synthetic oligonucleotide
aaagcuguuaaagagucua

SEQ ID NO: 1694555 - RNA, 19 nt, Artificial Sequence
  Description of Artificial Sequence: Synthetic oligonucleotide
ucuguagagcaucuuaguc

SEQ ID NO: 1694556 - RNA, 19 nt, Artificial Sequence
  Description of Artificial Sequence: Synthetic oligonucleotide
ugcaaguacauuucacagc

SEQ ID NO: 1694557 - RNA, 19 nt, Artificial Sequence
  Description of Artificial Sequence: Synthetic oligonucleotide
ucagucuuuguuaacuuau

SEQ ID NO: 1694558 - RNA, 19 nt, Artificial Sequence
  Description of Artificial Sequence: Synthetic oligonucleotide
uauuuaaaaggugaagcau

SEQ ID NO: 1694559 - RNA, 19 nt, Artificial Sequence
  Description of Artificial Sequence: Synthetic oligonucleotide
cauugaauugaacacgguc

SEQ ID NO: 1694560 - RNA, 19 nt, Artificial Sequence
  Description of Artificial Sequence: Synthetic oligonucleotide
uguguugaggcaugaagac

SEQ ID NO: 1694561 - RNA, 19 nt, Artificial Sequence
  Description of Artificial Sequence: Synthetic oligonucleotide
gagggcuaaaaccauacuc

SEQ ID NO: 1694562 - RNA, 19 nt, Artificial Sequence
  Description of Artificial Sequence: Synthetic oligonucleotide
caaaguaaugcaguauugc

SEQ ID NO: 1694563 - RNA, 19 nt, Artificial Sequence
  Description of Artificial Sequence: Synthetic oligonucleotide
caaaugacuacaauguuaa

SEQ ID NO: 1694564 - RNA, 19 nt, Artificial Sequence
  Description of Artificial Sequence: Synthetic oligonucleotide
aaguaaugcaguauugcca

SEQ ID NO: 1694565 - RNA, 19 nt, Artificial Sequence
  Description of Artificial Sequence: Synthetic oligonucleotide
ucuuagucugaugaggucu

SEQ ID NO: 1694566 - RNA, 19 nt, Artificial Sequence
  Description of Artificial Sequence: Synthetic oligonucleotide
auaagguggaucuucccca

SEQ ID NO: 1694567 - RNA, 19 nt, Artificial Sequence
  Description of Artificial Sequence: Synthetic oligonucleotide
uggagaauauugaaacagu

SEQ ID NO: 1694568 - RNA, 19 nt, Artificial Sequence
  Description of Artificial Sequence: Synthetic oligonucleotide
aagaacaguaaagcccaac

SEQ ID NO: 1694569 - RNA, 19 nt, Artificial Sequence
  Description of Artificial Sequence: Synthetic oligonucleotide
cauacuccugaguucaagc

SEQ ID NO: 1694570 - RNA, 19 nt, Artificial Sequence
  Description of Artificial Sequence: Synthetic oligonucleotide
ugaccacccacccucauga

SEQ ID NO: 1694571 - RNA, 19 nt, Artificial Sequence
  Description of Artificial Sequence: Synthetic oligonucleotide
uacucaugaauuucagucu

SEQ ID NO: 1694572 - RNA, 19 nt, Artificial Sequence
  Description of Artificial Sequence: Synthetic oligonucleotide
ugaaaagcgcuacaguaua

SEQ ID NO: 1694573 - RNA, 19 nt, Artificial Sequence
  Description of Artificial Sequence: Synthetic oligonucleotide
uuaaagagucuagagggcu

SEQ ID NO: 1694574 - RNA, 19 nt, Artificial Sequence
  Description of Artificial Sequence: Synthetic oligonucleotide
aacacaugagucaggauga

SEQ ID NO: 1694575 - RNA, 19 nt, Artificial Sequence
  Description of Artificial Sequence: Synthetic oligonucleotide
agguuaagaaaauacugau

SEQ ID NO: 1694576 - RNA, 19 nt, Artificial Sequence
  Description of Artificial Sequence: Synthetic oligonucleotide
uuaaccaaauuuacauguc

SEQ ID NO: 1694577 - RNA, 19 nt, Artificial Sequence
  Description of Artificial Sequence: Synthetic oligonucleotide
uuugguuaugguacugaac

SEQ ID NO: 1694578 - RNA, 19 nt, Artificial Sequence
  Description of Artificial Sequence: Synthetic oligonucleotide
uccuguucuacucaugaau

SEQ ID NO: 1694579 - RNA, 19 nt, Artificial Sequence
  Description of Artificial Sequence: Synthetic oligonucleotide
agucacaaagguuaagaaa

SEQ ID NO: 1694580 - RNA, 19 nt, Artificial Sequence
  Description of Artificial Sequence: Synthetic oligonucleotide
auuucagucuuuguuaacu

SEQ ID NO: 1694581 - RNA, 19 nt, Artificial Sequence
  Description of Artificial Sequence: Synthetic oligonucleotide
uucuacucaugaauuucag

SEQ ID NO: 1694582 - RNA, 19 nt, Artificial Sequence
  Description of Artificial Sequence: Synthetic oligonucleotide
uacauuucacagcaccugu

SEQ ID NO: 1694583 - RNA, 19 nt, Artificial Sequence
  Description of Artificial Sequence: Synthetic oligonucleotide
uucacuggagaauauugaa

SEQ ID NO: 1694584 - RNA, 19 nt, Artificial Sequence
  Description of Artificial Sequence: Synthetic oligonucleotide
uuggaaauaaguccacgua

SEQ ID NO: 1694585 - RNA, 19 nt, Artificial Sequence
  Description of Artificial Sequence: Synthetic oligonucleotide
uuaagaaaauacugauauc

SEQ ID NO: 1694586 - RNA, 19 nt, Artificial Sequence
  Description of Artificial Sequence: Synthetic oligonucleotide
cuugcagauaaaucuuuug

SEQ ID NO: 1694587 - RNA, 19 nt, Artificial Sequence
  Description of Artificial Sequence: Synthetic oligonucleotide
ugaagcauuccuuguauua

SEQ ID NO: 1694588 - RNA, 19 nt, Artificial Sequence
  Description of Artificial Sequence: Synthetic oligonucleotide
agcgcuacaguauaucuaa

SEQ ID NO: 1694589 - RNA, 19 nt, Artificial Sequence
  Description of Artificial Sequence: Synthetic oligonucleotide
ugaaacagucacaaagguu

SEQ ID NO: 1694590 - RNA, 19 nt, Artificial Sequence
  Description of Artificial Sequence: Synthetic oligonucleotide
uuaugguacugaacaauuc

SEQ ID NO: 1694591 - RNA, 19 nt, Artificial Sequence
  Description of Artificial Sequence: Synthetic oligonucleotide
gugucuuacaaaacuuugg

SEQ ID NO: 1694592 - RNA, 19 nt, Artificial Sequence
  Description of Artificial Sequence: Synthetic oligonucleotide
guagaaauauauccaggca

SEQ ID NO: 1694593 - RNA, 19 nt, Artificial Sequence
  Description of Artificial Sequence: Synthetic oligonucleotide
agaaauauauccaggcaga

SEQ ID NO: 1694594 - RNA, 19 nt, Artificial Sequence
  Description of Artificial Sequence: Synthetic oligonucleotide
ucuacucaugaauuucagu

SEQ ID NO: 1694595 - RNA, 19 nt, Artificial Sequence
  Description of Artificial Sequence: Synthetic oligonucleotide
gaauuucagucuuuguuaa

SEQ ID NO: 1694596 - RNA, 19 nt, Artificial Sequence
  Description of Artificial Sequence: Synthetic oligonucleotide
aaaucuuuuguaaguaguu

SEQ ID NO: 1694597 - RNA, 19 nt, Artificial Sequence
  Description of Artificial Sequence: Synthetic oligonucleotide
gcuguuaaagagucuagag

SEQ ID NO: 1694598 - RNA, 19 nt, Artificial Sequence
  Description of Artificial Sequence: Synthetic oligonucleotide
uaucuaaguauuacacaau

SEQ ID NO: 1694599 - RNA, 19 nt, Artificial Sequence
  Description of Artificial Sequence: Synthetic oligonucleotide
agcaucuuagucugaugag

SEQ ID NO: 1694600 - RNA, 19 nt, Artificial Sequence
  Description of Artificial Sequence: Synthetic oligonucleotide
acaaaacuuuggucaagag

SEQ ID NO: 1694601 - RNA, 19 nt, Artificial Sequence
  Description of Artificial Sequence: Synthetic oligonucleotide
uuuuagagcaaaagcuguu

SEQ ID NO: 1694602 - RNA, 19 nt, Artificial Sequence
  Description of Artificial Sequence: Synthetic oligonucleotide
uuaacuuauaagguugguu

SEQ ID NO: 1694603 - RNA, 19 nt, Artificial Sequence
  Description of Artificial Sequence: Synthetic oligonucleotide
uguucuacucaugaauuuc

SEQ ID NO: 1694604 - RNA, 19 nt, Artificial Sequence
  Description of Artificial Sequence: Synthetic oligonucleotide
cagcauugaauugaacacg

SEQ ID NO: 1694605 - RNA, 19 nt, Artificial Sequence
  Description of Artificial Sequence: Synthetic oligonucleotide
gauaaaucuuuuguaagua

SEQ ID NO: 1694606 - RNA, 19 nt, Artificial Sequence
  Description of Artificial Sequence: Synthetic oligonucleotide
uugaacacgguccgcuccc

SEQ ID NO: 1694607 - RNA, 19 nt, Artificial Sequence
  Description of Artificial Sequence: Synthetic oligonucleotide
agaaaccagcauugaauug

SEQ ID NO: 1694608 - RNA, 19 nt, Artificial Sequence
  Description of Artificial Sequence: Synthetic oligonucleotide
gagcaaaagcuguuaaaga

SEQ ID NO: 1694609 - RNA, 19 nt, Artificial Sequence
  Description of Artificial Sequence: Synthetic oligonucleotide
agucuuuguuaacuuauaa

SEQ ID NO: 1694610 - RNA, 19 nt, Artificial Sequence
  Description of Artificial Sequence: Synthetic oligonucleotide
aucuuagucugaugagguc

SEQ ID NO: 1694611 - RNA, 19 nt, Artificial Sequence
  Description of Artificial Sequence: Synthetic oligonucleotide
gaagacauagccgguguac

SEQ ID NO: 1694612 - RNA, 19 nt, Artificial Sequence
  Description of Artificial Sequence: Synthetic oligonucleotide
caguauaucuaaguauuac

SEQ ID NO: 1694613 - RNA, 19 nt, Artificial Sequence
  Description of Artificial Sequence: Synthetic oligonucleotide
agagccucuuuuaaaauca

SEQ ID NO: 1694614 - RNA, 19 nt, Artificial Sequence
  Description of Artificial Sequence: Synthetic oligonucleotide
caguaaagcccaacuaaug

SEQ ID NO: 1694615 - RNA, 19 nt, Artificial Sequence
  Description of Artificial Sequence: Synthetic oligonucleotide
aaacuuuggucaagaguag

SEQ ID NO: 1694616 - RNA, 19 nt, Artificial Sequence
  Description of Artificial Sequence: Synthetic oligonucleotide
auguagagcgccgugacca

SEQ ID NO: 1694617 - RNA, 19 nt, Artificial Sequence
  Description of Artificial Sequence: Synthetic oligonucleotide
uaagguggaucuuccccag

SEQ ID NO: 1694618 - RNA, 19 nt, Artificial Sequence
  Description of Artificial Sequence: Synthetic oligonucleotide
ucgucacuguacaaucuca

SEQ ID NO: 1694619 - RNA, 19 nt, Artificial Sequence
  Description of Artificial Sequence: Synthetic oligonucleotide
agacauagccgguguacag

SEQ ID NO: 1694620 - RNA, 19 nt, Artificial Sequence
  Description of Artificial Sequence: Synthetic oligonucleotide
gauccuggucacaucuucg

SEQ ID NO: 1694621 - RNA, 19 nt, Artificial Sequence
  Description of Artificial Sequence: Synthetic oligonucleotide
cuuuguuaacuuauaaggu

SEQ ID NO: 1694622 - RNA, 19 nt, Artificial Sequence
  Description of Artificial Sequence: Synthetic oligonucleotide
accaaauuuacaugucuuu

SEQ ID NO: 1694623 - RNA, 19 nt, Artificial Sequence
  Description of Artificial Sequence: Synthetic oligonucleotide
uuagcaagauuguuacuuu

SEQ ID NO: 1694624 - RNA, 19 nt, Artificial Sequence
  Description of Artificial Sequence: Synthetic oligonucleotide
uacagcgccauccccacaa

SEQ ID NO: 1694625 - RNA, 19 nt, Artificial Sequence
  Description of Artificial Sequence: Synthetic oligonucleotide
uuuagagcaaaagcuguua

SEQ ID NO: 1694626 - RNA, 19 nt, Artificial Sequence
  Description of Artificial Sequence: Synthetic oligonucleotide
aagacauagccgguguaca

SEQ ID NO: 1694627 - RNA, 19 nt, Artificial Sequence
  Description of Artificial Sequence: Synthetic oligonucleotide
ucuagagggcuaaaaccau

SEQ ID NO: 1694628 - RNA, 19 nt, Artificial Sequence
  Description of Artificial Sequence: Synthetic oligonucleotide
ucauaagguggaucuuccc

SEQ ID NO: 1694629 - RNA, 19 nt, Artificial Sequence
  Description of Artificial Sequence: Synthetic oligonucleotide
aaugcaguauugccaugau

SEQ ID NO: 1694630 - RNA, 19 nt, Artificial Sequence
  Description of Artificial Sequence: Synthetic oligonucleotide
guuaaagagucuagagggc

SEQ ID NO: 1694631 - RNA, 19 nt, Artificial Sequence
  Description of Artificial Sequence: Synthetic oligonucleotide
ugaguucaagcuugcagau

SEQ ID NO: 1694632 - RNA, 19 nt, Artificial Sequence
  Description of Artificial Sequence: Synthetic oligonucleotide
aaguauccucccucccauc

SEQ ID NO: 1694633 - RNA, 19 nt, Artificial Sequence
  Description of Artificial Sequence: Synthetic oligonucleotide
uaaagagucuagagggcua

SEQ ID NO: 1694634 - RNA, 19 nt, Artificial Sequence
  Description of Artificial Sequence: Synthetic oligonucleotide
acaugucuuuugguuaugg

SEQ ID NO: 1694635 - RNA, 19 nt, Artificial Sequence
  Description of Artificial Sequence: Synthetic oligonucleotide
ccacguaagaauuagauua

SEQ ID NO: 1694636 - RNA, 19 nt, Artificial Sequence
  Description of Artificial Sequence: Synthetic oligonucleotide
uccacguaagaauuagauu

SEQ ID NO: 1694637 - RNA, 19 nt, Artificial Sequence
  Description of Artificial Sequence: Synthetic oligonucleotide
ugcuacugaccacccaccc

SEQ ID NO: 1694638 - RNA, 19 nt, Artificial Sequence
  Description of Artificial Sequence: Synthetic oligonucleotide
aggcaugaagacauagccg

SEQ ID NO: 1694639 - RNA, 19 nt, Artificial Sequence
  Description of Artificial Sequence: Synthetic oligonucleotide
acucaaaguuacauuaaga

SEQ ID NO: 1694640 - RNA, 19 nt, Artificial Sequence
  Description of Artificial Sequence: Synthetic oligonucleotide
gacauagccgguguacagc

SEQ ID NO: 1694641 - RNA, 19 nt, Artificial Sequence
  Description of Artificial Sequence: Synthetic oligonucleotide
aguacauuucacagcaccu

SEQ ID NO: 1694642 - RNA, 19 nt, Artificial Sequence
  Description of Artificial Sequence: Synthetic oligonucleotide
guacauuucacagcaccug

SEQ ID NO: 1694643 - RNA, 19 nt, Artificial Sequence
  Description of Artificial Sequence: Synthetic oligonucleotide
aaagagucuagagggcuaa

SEQ ID NO: 1694644 - RNA, 19 nt, Artificial Sequence
  Description of Artificial Sequence: Synthetic oligonucleotide
gaacaguaaagcccaacua

SEQ ID NO: 1694645 - RNA, 19 nt, Artificial Sequence
  Description of Artificial Sequence: Synthetic oligonucleotide
agcccaacuaaugaccuug

SEQ ID NO: 1694646 - RNA, 19 nt, Artificial Sequence
  Description of Artificial Sequence: Synthetic oligonucleotide
cuccaaguauccucccucc

SEQ ID NO: 1694647 - RNA, 19 nt, Artificial Sequence
  Description of Artificial Sequence: Synthetic oligonucleotide
uccaaguauccucccuccc

SEQ ID NO: 1694648 - RNA, 19 nt, Artificial Sequence
  Description of Artificial Sequence: Synthetic oligonucleotide
acuccugaguucaagcuug

SEQ ID NO: 1694649 - RNA, 19 nt, Artificial Sequence
  Description of Artificial Sequence: Synthetic oligonucleotide
aguagaaccaggacaucug

SEQ ID NO: 1694650 - RNA, 19 nt, Artificial Sequence
  Description of Artificial Sequence: Synthetic oligonucleotide
augaggucucauuccaacu

SEQ ID NO: 1694651 - RNA, 19 nt, Artificial Sequence
  Description of Artificial Sequence: Synthetic oligonucleotide
aagcuuucacuggagaaua

SEQ ID NO: 1694652 - RNA, 19 nt, Artificial Sequence
  Description of Artificial Sequence: Synthetic oligonucleotide
uacuauauaagagccucuu

SEQ ID NO: 1694653 - RNA, 19 nt, Artificial Sequence
  Description of Artificial Sequence: Synthetic oligonucleotide
uagagcgccgugaccagca

SEQ ID NO: 1694654 - RNA, 19 nt, Artificial Sequence
  Description of Artificial Sequence: Synthetic oligonucleotide
augccauucaauagcaaga

SEQ ID NO: 1694655 - RNA, 19 nt, Artificial Sequence
  Description of Artificial Sequence: Synthetic oligonucleotide
gcuacuauauaagagccuc

SEQ ID NO: 1694656 - RNA, 19 nt, Artificial Sequence
  Description of Artificial Sequence: Synthetic oligonucleotide
acuauauaagagccucuuu

SEQ ID NO: 1694657 - RNA, 19 nt, Artificial Sequence
  Description of Artificial Sequence: Synthetic oligonucleotide
agacaaaagcuacuauaua

SEQ ID NO: 1694658 - RNA, 19 nt, Artificial Sequence
  Description of Artificial Sequence: Synthetic oligonucleotide
agguggaucuuccccagga

SEQ ID NO: 1694659 - RNA, 19 nt, Artificial Sequence
  Description of Artificial Sequence: Synthetic oligonucleotide
uauugccaugauguguuga

SEQ ID NO: 1694660 - RNA, 19 nt, Artificial Sequence
  Description of Artificial Sequence: Synthetic oligonucleotide
caaaacuuuggucaagagu

SEQ ID NO: 1694661 - RNA, 19 nt, Artificial Sequence
  Description of Artificial Sequence: Synthetic oligonucleotide
augcaguauugccaugaug

SEQ ID NO: 1694662 - RNA, 19 nt, Artificial Sequence
  Description of Artificial Sequence: Synthetic oligonucleotide
aaaagcuguuaaagagucu

SEQ ID NO: 1694663 - RNA, 19 nt, Artificial Sequence
  Description of Artificial Sequence: Synthetic oligonucleotide
cacuguacaaucucaaagu

SEQ ID NO: 1694664 - RNA, 19 nt, Artificial Sequence
  Description of Artificial Sequence: Synthetic oligonucleotide
cugguaguagaaccaggac

SEQ ID NO: 1694665 - RNA, 19 nt, Artificial Sequence
  Description of Artificial Sequence: Synthetic oligonucleotide
agcuguuaaagagucuaga

SEQ ID NO: 1694666 - RNA, 19 nt, Artificial Sequence
  Description of Artificial Sequence: Synthetic oligonucleotide
ggagaauauugaaacaguc

SEQ ID NO: 1694667 - RNA, 19 nt, Artificial Sequence
  Description of Artificial Sequence: Synthetic oligonucleotide
gcuacaguauaucuaagua

SEQ ID NO: 1694668 - RNA, 19 nt, Artificial Sequence
  Description of Artificial Sequence: Synthetic oligonucleotide
agcgccauccccacaacag

SEQ ID NO: 1694669 - RNA, 19 nt, Artificial Sequence
  Description of Artificial Sequence: Synthetic oligonucleotide
uuauaagguugguuauguu

SEQ ID NO: 1694670 - RNA, 19 nt, Artificial Sequence
  Description of Artificial Sequence: Synthetic oligonucleotide
uagcaagauuguuacuuuu

SEQ ID NO: 1694671 - RNA, 19 nt, Artificial Sequence
  Description of Artificial Sequence: Synthetic oligonucleotide
agagggcuaaaaccauacu

SEQ ID NO: 1694672 - RNA, 19 nt, Artificial Sequence
  Description of Artificial Sequence: Synthetic oligonucleotide
guacaaucucaaaguaaug

SEQ ID NO: 1694673 - RNA, 19 nt, Artificial Sequence
  Description of Artificial Sequence: Synthetic oligonucleotide
gaauugaacacgguccgcu

SEQ ID NO: 1694674 - RNA, 19 nt, Artificial Sequence
  Description of Artificial Sequence: Synthetic oligonucleotide
aaacagucacaaagguuaa

SEQ ID NO: 1694675 - RNA, 19 nt, Artificial Sequence
  Description of Artificial Sequence: Synthetic oligonucleotide
caucuuagucugaugaggu

SEQ ID NO: 1694676 - RNA, 19 nt, Artificial Sequence
  Description of Artificial Sequence: Synthetic oligonucleotide
ccgcucaccuccuaaagcc

SEQ ID NO: 1694677 - RNA, 19 nt, Artificial Sequence
  Description of Artificial Sequence: Synthetic oligonucleotide
uccccaaauucuguauugu

SEQ ID NO: 1694678 - RNA, 19 nt, Artificial Sequence
  Description of Artificial Sequence: Synthetic oligonucleotide
uccuggucacaucuucguc

SEQ ID NO: 1694679 - RNA, 19 nt, Artificial Sequence
  Description of Artificial Sequence: Synthetic oligonucleotide
uuccuguucuacucaugaa

SEQ ID NO: 1694680 - RNA, 19 nt, Artificial Sequence
  Description of Artificial Sequence: Synthetic oligonucleotide
caugagaaucaucaaaguu

SEQ ID NO: 1694681 - RNA, 19 nt, Artificial Sequence
  Description of Artificial Sequence: Synthetic oligonucleotide
accacccacccucaugaga

SEQ ID NO: 1694682 - RNA, 19 nt, Artificial Sequence
  Description of Artificial Sequence: Synthetic oligonucleotide
gccucuuuuaaaaucaaaa

SEQ ID NO: 1694683 - RNA, 19 nt, Artificial Sequence
  Description of Artificial Sequence: Synthetic oligonucleotide
caaguacauuucacagcac

SEQ ID NO: 1694684 - RNA, 19 nt, Artificial Sequence
  Description of Artificial Sequence: Synthetic oligonucleotide
agagucuagagggcuaaaa

SEQ ID NO: 1694685 - RNA, 19 nt, Artificial Sequence
  Description of Artificial Sequence: Synthetic oligonucleotide
aagcgcuacaguauaucua

SEQ ID NO: 1694686 - RNA, 19 nt, Artificial Sequence
  Description of Artificial Sequence: Synthetic oligonucleotide
gguaguagaaccaggacau

SEQ ID NO: 1694687 - RNA, 19 nt, Artificial Sequence
  Description of Artificial Sequence: Synthetic oligonucleotide
acagcgccauccccacaac

SEQ ID NO: 1694688 - RNA, 19 nt, Artificial Sequence
  Description of Artificial Sequence: Synthetic oligonucleotide
gaacacgguccgcucccag

SEQ ID NO: 1694689 - RNA, 19 nt, Artificial Sequence
  Description of Artificial Sequence: Synthetic oligonucleotide
gcaguauugccaugaugug

SEQ ID NO: 1694690 - RNA, 19 nt, Artificial Sequence
  Description of Artificial Sequence: Synthetic oligonucleotide
agcuacuauauaagagccu

SEQ ID NO: 1694691 - RNA, 19 nt, Artificial Sequence
  Description of Artificial Sequence: Synthetic oligonucleotide
uacaugucuuuugguuaug

SEQ ID NO: 1694692 - RNA, 19 nt, Artificial Sequence
  Description of Artificial Sequence: Synthetic oligonucleotide
aagcccaacuaaugaccuu

SEQ ID NO: 1694693 - RNA, 19 nt, Artificial Sequence
  Description of Artificial Sequence: Synthetic oligonucleotide
agcgccgugaccagcaggu

SEQ ID NO: 1694694 - RNA, 19 nt, Artificial Sequence
  Description of Artificial Sequence: Synthetic oligonucleotide
cauagccgguguacagcgc

SEQ ID NO: 1694695 - RNA, 19 nt, Artificial Sequence
  Description of Artificial Sequence: Synthetic oligonucleotide
cuccugaguucaagcuugc

SEQ ID NO: 1694696 - RNA, 19 nt, Artificial Sequence
  Description of Artificial Sequence: Synthetic oligonucleotide
guguacagcgccaucccca

SEQ ID NO: 1694697 - RNA, 19 nt, Artificial Sequence
  Description of Artificial Sequence: Synthetic oligonucleotide
ucccaggguuccagcaugu

SEQ ID NO: 1694698 - RNA, 19 nt, Artificial Sequence
  Description of Artificial Sequence: Synthetic oligonucleotide
ggauccuggucacaucuuc

SEQ ID NO: 1694699 - RNA, 19 nt, Artificial Sequence
  Description of Artificial Sequence: Synthetic oligonucleotide
gguguacagcgccaucccc

SEQ ID NO: 1694700 - RNA, 19 nt, Artificial Sequence
  Description of Artificial Sequence: Synthetic oligonucleotide
ugauguguugaggcaugaa

SEQ ID NO: 1694701 - RNA, 19 nt, Artificial Sequence
  Description of Artificial Sequence: Synthetic oligonucleotide
ugaucacaaugugcaagua

SEQ ID NO: 1694702 - RNA, 19 nt, Artificial Sequence
  Description of Artificial Sequence: Synthetic oligonucleotide
gguuauguugacaucugua

SEQ ID NO: 1694703 - RNA, 19 nt, Artificial Sequence
  Description of Artificial Sequence: Synthetic oligonucleotide
caugaauuucagucuuugu

SEQ ID NO: 1694704 - RNA, 19 nt, Artificial Sequence
  Description of Artificial Sequence: Synthetic oligonucleotide
caugcgccucccgcgaugc

SEQ ID NO: 1694705 - RNA, 19 nt, Artificial Sequence
  Description of Artificial Sequence: Synthetic oligonucleotide
guuccagcauguagagcgc

SEQ ID NO: 1694706 - RNA, 19 nt, Artificial Sequence
  Description of Artificial Sequence: Synthetic oligonucleotide
cacaaagguuaagaaaaua

SEQ ID NO: 1694707 - RNA, 19 nt, Artificial Sequence
  Description of Artificial Sequence: Synthetic oligonucleotide
augauguguugaggcauga

SEQ ID NO: 1694708 - RNA, 19 nt, Artificial Sequence
  Description of Artificial Sequence: Synthetic oligonucleotide
cacguaagaauuagauuau

SEQ ID NO: 1694709 - RNA, 19 nt, Artificial Sequence
  Description of Artificial Sequence: Synthetic oligonucleotide
gugaaaagcgcuacaguau

SEQ ID NO: 1694710 - RNA, 19 nt, Artificial Sequence
  Description of Artificial Sequence: Synthetic oligonucleotide
ccccaaauucuguauugug

SEQ ID NO: 1694711 - RNA, 19 nt, Artificial Sequence
  Description of Artificial Sequence: Synthetic oligonucleotide
acguaagaauuagauuauu

SEQ ID NO: 1694712 - RNA, 19 nt, Artificial Sequence
  Description of Artificial Sequence: Synthetic oligonucleotide
cuacuauauaagagccucu

SEQ ID NO: 1694713 - RNA, 19 nt, Artificial Sequence
  Description of Artificial Sequence: Synthetic oligonucleotide
ccucccgcgaugcagcagc

SEQ ID NO: 1694714 - RNA, 19 nt, Artificial Sequence
  Description of Artificial Sequence: Synthetic oligonucleotide
agcuugcagauaaaucuuu

SEQ ID NO: 1694715 - RNA, 19 nt, Artificial Sequence
  Description of Artificial Sequence: Synthetic oligonucleotide
gcaaaagcuguuaaagagu

SEQ ID NO: 1694716 - RNA, 19 nt, Artificial Sequence
  Description of Artificial Sequence: Synthetic oligonucleotide
uccugaguucaagcuugca

SEQ ID NO: 1694717 - RNA, 19 nt, Artificial Sequence
  Description of Artificial Sequence: Synthetic oligonucleotide
ugaacacgguccgcuccca

SEQ ID NO: 1694718 - RNA, 19 nt, Artificial Sequence
  Description of Artificial Sequence: Synthetic oligonucleotide
guauuacacaaugcugcua

SEQ ID NO: 1694719 - RNA, 19 nt, Artificial Sequence
  Description of Artificial Sequence: Synthetic oligonucleotide
agccucuuuuaaaaucaaa

SEQ ID NO: 1694720 - RNA, 19 nt, Artificial Sequence
  Description of Artificial Sequence: Synthetic oligonucleotide
cccaacuaaugaccuuggg

SEQ ID NO: 1694721 - RNA, 19 nt, Artificial Sequence
  Description of Artificial Sequence: Synthetic oligonucleotide
ccaacuaaugaccuugggu

SEQ ID NO: 1694722 - RNA, 19 nt, Artificial Sequence
  Description of Artificial Sequence: Synthetic oligonucleotide
uggucacaucuucgucacu

SEQ ID NO: 1694723 - RNA, 19 nt, Artificial Sequence
  Description of Artificial Sequence: Synthetic oligonucleotide
guagagcgccgugaccagc

SEQ ID NO: 1694724 - RNA, 19 nt, Artificial Sequence
  Description of Artificial Sequence: Synthetic oligonucleotide
cucccgcgaugcagcagcg

SEQ ID NO: 1694725 - RNA, 19 nt, Artificial Sequence
  Description of Artificial Sequence: Synthetic oligonucleotide
cacugucaauauugucuca

SEQ ID NO: 1694726 - RNA, 19 nt, Artificial Sequence
  Description of Artificial Sequence: Synthetic oligonucleotide
caguauugccaugaugugu

SEQ ID NO: 1694727 - RNA, 19 nt, Artificial Sequence
  Description of Artificial Sequence: Synthetic oligonucleotide
cccgcucaccuccuaaagc

SEQ ID NO: 1694728 - RNA, 19 nt, Artificial Sequence
  Description of Artificial Sequence: Synthetic oligonucleotide
guaguagaaccaggacauc

SEQ ID NO: 1694729 - RNA, 19 nt, Artificial Sequence
  Description of Artificial Sequence: Synthetic oligonucleotide
gguuaugguacugaacaau

SEQ ID NO: 1694730 - RNA, 19 nt, Artificial Sequence
  Description of Artificial Sequence: Synthetic oligonucleotide
auaugccauucaauagcaa

SEQ ID NO: 1694731 - RNA, 19 nt, Artificial Sequence
  Description of Artificial Sequence: Synthetic oligonucleotide
gaaaagcgcuacaguauau

SEQ ID NO: 1694732 - RNA, 19 nt, Artificial Sequence
  Description of Artificial Sequence: Synthetic oligonucleotide
ccaaguauccucccuccca

SEQ ID NO: 1694733 - RNA, 19 nt, Artificial Sequence
  Description of Artificial Sequence: Synthetic oligonucleotide
gagccucuuuuaaaaucaa

SEQ ID NO: 1694734 - RNA, 19 nt, Artificial Sequence
  Description of Artificial Sequence: Synthetic oligonucleotide
caaguauccucccucccau

SEQ ID NO: 1694735 - RNA, 19 nt, Artificial Sequence
  Description of Artificial Sequence: Synthetic oligonucleotide
gaguucaagcuugcagaua

SEQ ID NO: 1694736 - RNA, 19 nt, Artificial Sequence
  Description of Artificial Sequence: Synthetic oligonucleotide
gcccaacuaaugaccuugg

SEQ ID NO: 1694737 - RNA, 19 nt, Artificial Sequence
  Description of Artificial Sequence: Synthetic oligonucleotide
cuguucuacucaugaauuu

SEQ ID NO: 1694738 - RNA, 19 nt, Artificial Sequence
  Description of Artificial Sequence: Synthetic oligonucleotide
gcccgcucaccuccuaaag

SEQ ID NO: 1694739 - RNA, 19 nt, Artificial Sequence
  Description of Artificial Sequence: Synthetic oligonucleotide
caucuucgucacuguacaa

SEQ ID NO: 1694740 - RNA, 19 nt, Artificial Sequence
  Description of Artificial Sequence: Synthetic oligonucleotide
ccccaugcccgccaugcgc

SEQ ID NO: 1694741 - RNA, 19 nt, Artificial Sequence
  Description of Artificial Sequence: Synthetic oligonucleotide
agcuuucacuggagaauau

SEQ ID NO: 1694742 - RNA, 19 nt, Artificial Sequence
  Description of Artificial Sequence: Synthetic oligonucleotide
cccgcgaugcagcagcguc

SEQ ID NO: 1694743 - RNA, 19 nt, Artificial Sequence
  Description of Artificial Sequence: Synthetic oligonucleotide
ccuguucuacucaugaauu

SEQ ID NO: 1694744 - RNA, 19 nt, Artificial Sequence
  Description of Artificial Sequence: Synthetic oligonucleotide
cgcucaccuccuaaagccc

SEQ ID NO: 1694745 - RNA, 19 nt, Artificial Sequence
  Description of Artificial Sequence: Synthetic oligonucleotide
gcuacugaccacccacccu

SEQ ID NO: 1694746 - RNA, 19 nt, Artificial Sequence
  Description of Artificial Sequence: Synthetic oligonucleotide
gcgcuacaguauaucuaag

SEQ ID NO: 1694747 - RNA, 19 nt, Artificial Sequence
  Description of Artificial Sequence: Synthetic oligonucleotide
gcgucaggccggccggcgg

SEQ ID NO: 1694748 - RNA, 19 nt, Artificial Sequence
  Description of Artificial Sequence: Synthetic oligonucleotide
gccccaugcccgccaugcg

SEQ ID NO: 1694749 - RNA, 19 nt, Artificial Sequence
  Description of Artificial Sequence: Synthetic oligonucleotide
accauacuccugaguucaa

SEQ ID NO: 1694750 - RNA, 19 nt, Artificial Sequence
  Description of Artificial Sequence: Synthetic oligonucleotide
cgcuacaguauaucuaagu

SEQ ID NO: 1694751 - RNA, 19 nt, Artificial Sequence
  Description of Artificial Sequence: Synthetic oligonucleotide
caugcccgccaugcgccuc

SEQ ID NO: 1694752 - RNA, 19 nt, Artificial Sequence
  Description of Artificial Sequence: Synthetic oligonucleotide
gguccgcucccaggguucc

SEQ ID NO: 1694753 - RNA, 19 nt, Artificial Sequence
  Description of Artificial Sequence: Synthetic oligonucleotide
augcgccucccgcgaugca

SEQ ID NO: 1694754 - RNA, 19 nt, Artificial Sequence
  Description of Artificial Sequence: Synthetic oligonucleotide
ccaugcgccucccgcgaug

SEQ ID NO: 1694755 - RNA, 19 nt, Artificial Sequence
  Description of Artificial Sequence: Synthetic oligonucleotide
ggcccgcucaccuccuaaa

SEQ ID NO: 1694756 - RNA, 19 nt, Artificial Sequence
  Description of Artificial Sequence: Synthetic oligonucleotide
cagcgucaggccggccggc

SEQ ID NO: 1694757 - RNA, 19 nt, Artificial Sequence
  Description of Artificial Sequence: Synthetic oligonucleotide
gcuugcagauaaaucuuuu

SEQ ID NO: 1694758 - RNA, 19 nt, Artificial Sequence
  Description of Artificial Sequence: Synthetic oligonucleotide
cacaugagucaggaugauu

SEQ ID NO: 1694759 - RNA, 19 nt, Artificial Sequence
  Description of Artificial Sequence: Synthetic oligonucleotide
gcauugaauugaacacggu

SEQ ID NO: 1694760 - RNA, 19 nt, Artificial Sequence
  Description of Artificial Sequence: Synthetic oligonucleotide
ccgcucccaggguuccagc

SEQ ID NO: 1694761 - RNA, 19 nt, Artificial Sequence
  Description of Artificial Sequence: Synthetic oligonucleotide
gccucccgcgaugcagcag

SEQ ID NO: 1694762 - RNA, 19 nt, Artificial Sequence
  Description of Artificial Sequence: Synthetic oligonucleotide
cacgguccgcucccagggu

SEQ ID NO: 1694763 - RNA, 19 nt, Artificial Sequence
  Description of Artificial Sequence: Synthetic oligonucleotide
ccaacuucauaagguggau

SEQ ID NO: 1694764 - RNA, 19 nt, Artificial Sequence
  Description of Artificial Sequence: Synthetic oligonucleotide
cacccacccucaugagaau

SEQ ID NO: 1694765 - RNA, 19 nt, Artificial Sequence
  Description of Artificial Sequence: Synthetic oligonucleotide
ccagcauguagagcgccgu

SEQ ID NO: 1694766 - RNA, 19 nt, Artificial Sequence
  Description of Artificial Sequence: Synthetic oligonucleotide
guccgcucccaggguucca

SEQ ID NO: 1694767 - RNA, 19 nt, Artificial Sequence
  Description of Artificial Sequence: Synthetic oligonucleotide
gcgccgugaccagcaggua

SEQ ID NO: 1694768 - RNA, 19 nt, Artificial Sequence
  Description of Artificial Sequence: Synthetic oligonucleotide
cggcccgcucaccuccuaa

SEQ ID NO: 1694769 - RNA, 19 nt, Artificial Sequence
  Description of Artificial Sequence: Synthetic oligonucleotide
ggcggcccgcucaccuccu

SEQ ID NO: 1694770 - RNA, 19 nt, Artificial Sequence
  Description of Artificial Sequence: Synthetic oligonucleotide
uuuucuaucccucaaagca

SEQ ID NO: 1694771 - RNA, 19 nt, Artificial Sequence
  Description of Artificial Sequence: Synthetic oligonucleotide
aaagaggucguuuauguuc

SEQ ID NO: 1694772 - RNA, 19 nt, Artificial Sequence
  Description of Artificial Sequence: Synthetic oligonucleotide
uucagugacauaauuaagg

SEQ ID NO: 1694773 - RNA, 19 nt, Artificial Sequence
  Description of Artificial Sequence: Synthetic oligonucleotide
acaauggaagcauugaggc

SEQ ID NO: 1694774 - RNA, 19 nt, Artificial Sequence
  Description of Artificial Sequence: Synthetic oligonucleotide
auaauuaaggguccggagc

SEQ ID NO: 1694775 - RNA, 19 nt, Artificial Sequence
  Description of Artificial Sequence: Synthetic oligonucleotide
acauaaguagaccagugcc

SEQ ID NO: 1694776 - RNA, 19 nt, Artificial Sequence
  Description of Artificial Sequence: Synthetic oligonucleotide
acuucuagaaccaagcucc

SEQ ID NO: 1694777 - RNA, 19 nt, Artificial Sequence
  Description of Artificial Sequence: Synthetic oligonucleotide
acaaauagaagccuggaag

SEQ ID NO: 1694778 - RNA, 19 nt, Artificial Sequence
  Description of Artificial Sequence: Synthetic oligonucleotide
agugacauaauuaaggguc

SEQ ID NO: 1694779 - RNA, 19 nt, Artificial Sequence
  Description of Artificial Sequence: Synthetic oligonucleotide
ucguagauaaagcugaccc

SEQ ID NO: 1694780 - RNA, 19 nt, Artificial Sequence
  Description of Artificial Sequence: Synthetic oligonucleotide
agaaggguaagccugagag

SEQ ID NO: 1694781 - RNA, 19 nt, Artificial Sequence
  Description of Artificial Sequence: Synthetic oligonucleotide
ucagugacauaauuaaggg

SEQ ID NO: 1694782 - RNA, 19 nt, Artificial Sequence
  Description of Artificial Sequence: Synthetic oligonucleotide
agcaggauaacgcaacugc

SEQ ID NO: 1694783 - RNA, 19 nt, Artificial Sequence
  Description of Artificial Sequence: Synthetic oligonucleotide
agaggcauuuuccucaugc

SEQ ID NO: 1694784 - RNA, 19 nt, Artificial Sequence
  Description of Artificial Sequence: Synthetic oligonucleotide
uuggucaagagguagauga

SEQ ID NO: 1694785 - RNA, 19 nt, Artificial Sequence
  Description of Artificial Sequence: Synthetic oligonucleotide
ucuauuuagacuugcgacc

SEQ ID NO: 1694786 - RNA, 19 nt, Artificial Sequence
  Description of Artificial Sequence: Synthetic oligonucleotide
uaguuaaugagcuggaaga

SEQ ID NO: 1694787 - RNA, 19 nt, Artificial Sequence
  Description of Artificial Sequence: Synthetic oligonucleotide
acaacauauagcuaaacaa

SEQ ID NO: 1694788 - RNA, 19 nt, Artificial Sequence
  Description of Artificial Sequence: Synthetic oligonucleotide
ugagcccacaaauagaagc

SEQ ID NO: 1694789 - RNA, 19 nt, Artificial Sequence
  Description of Artificial Sequence: Synthetic oligonucleotide
aaucauguucccuacuaug

SEQ ID NO: 1694790 - RNA, 19 nt, Artificial Sequence
  Description of Artificial Sequence: Synthetic oligonucleotide
guaguaguuaaugagcugg

SEQ ID NO: 1694791 - RNA, 19 nt, Artificial Sequence
  Description of Artificial Sequence: Synthetic oligonucleotide
caaauagaagccuggaagc

SEQ ID NO: 1694792 - RNA, 19 nt, Artificial Sequence
  Description of Artificial Sequence: Synthetic oligonucleotide
uagcuaaacaaauaaauua

SEQ ID NO: 1694793 - RNA, 19 nt, Artificial Sequence
  Description of Artificial Sequence: Synthetic oligonucleotide
uucgaaggcaaagaggucg

SEQ ID NO: 1694794 - RNA, 19 nt, Artificial Sequence
  Description of Artificial Sequence: Synthetic oligonucleotide
cauugaagaguagagaagg

SEQ ID NO: 1694795 - RNA, 19 nt, Artificial Sequence
  Description of Artificial Sequence: Synthetic oligonucleotide
agucugaaacaacauauag

SEQ ID NO: 1694796 - RNA, 19 nt, Artificial Sequence
  Description of Artificial Sequence: Synthetic oligonucleotide
agaaccaagcuccagaagu

SEQ ID NO: 1694797 - RNA, 19 nt, Artificial Sequence
  Description of Artificial Sequence: Synthetic oligonucleotide
ugaagaguagagaaggcac

SEQ ID NO: 1694798 - RNA, 19 nt, Artificial Sequence
  Description of Artificial Sequence: Synthetic oligonucleotide
aauggcaaugccgaugagg

SEQ ID NO: 1694799 - RNA, 19 nt, Artificial Sequence
  Description of Artificial Sequence: Synthetic oligonucleotide
aagaggucguuuauguucc

SEQ ID NO: 1694800 - RNA, 19 nt, Artificial Sequence
  Description of Artificial Sequence: Synthetic oligonucleotide
aaggguaagccugagagug

SEQ ID NO: 1694801 - RNA, 19 nt, Artificial Sequence
  Description of Artificial Sequence: Synthetic oligonucleotide
acaauggggaagaaaaggc

SEQ ID NO: 1694802 - RNA, 19 nt, Artificial Sequence
  Description of Artificial Sequence: Synthetic oligonucleotide
ucuagaaccaagcuccaga

SEQ ID NO: 1694803 - RNA, 19 nt, Artificial Sequence
  Description of Artificial Sequence: Synthetic oligonucleotide
cucuauuuagacuugcgac

SEQ ID NO: 1694804 - RNA, 19 nt, Artificial Sequence
  Description of Artificial Sequence: Synthetic oligonucleotide
uccaucguagauaaagcug

SEQ ID NO: 1694805 - RNA, 19 nt, Artificial Sequence
  Description of Artificial Sequence: Synthetic oligonucleotide
guaccaauugaauauuacc

SEQ ID NO: 1694806 - RNA, 19 nt, Artificial Sequence
  Description of Artificial Sequence: Synthetic oligonucleotide
uguaguggaggcuacaauc

SEQ ID NO: 1694807 - RNA, 19 nt, Artificial Sequence
  Description of Artificial Sequence: Synthetic oligonucleotide
guaguuaaugagcuggaag

SEQ ID NO: 1694808 - RNA, 19 nt, Artificial Sequence
  Description of Artificial Sequence: Synthetic oligonucleotide
ugacccacaauagaaagcc

SEQ ID NO: 1694809 - RNA, 19 nt, Artificial Sequence
  Description of Artificial Sequence: Synthetic oligonucleotide
aacagcuucacucgccaag

SEQ ID NO: 1694810 - RNA, 19 nt, Artificial Sequence
  Description of Artificial Sequence: Synthetic oligonucleotide
cuuuaugucuagcacacug

SEQ ID NO: 1694811 - RNA, 19 nt, Artificial Sequence
  Description of Artificial Sequence: Synthetic oligonucleotide
aaucauacagauggcauca

SEQ ID NO: 1694812 - RNA, 19 nt, Artificial Sequence
  Description of Artificial Sequence: Synthetic oligonucleotide
acuuuucuaucccucaaag

SEQ ID NO: 1694813 - RNA, 19 nt, Artificial Sequence
  Description of Artificial Sequence: Synthetic oligonucleotide
uagacuugcgaccuuguug

SEQ ID NO: 1694814 - RNA, 19 nt, Artificial Sequence
  Description of Artificial Sequence: Synthetic oligonucleotide
aggauaacgcaacugccac

SEQ ID NO: 1694815 - RNA, 19 nt, Artificial Sequence
  Description of Artificial Sequence: Synthetic oligonucleotide
uccacacauaaguagacca

SEQ ID NO: 1694816 - RNA, 19 nt, Artificial Sequence
  Description of Artificial Sequence: Synthetic oligonucleotide
uuuaguagugagaucuccu

SEQ ID NO: 1694817 - RNA, 19 nt, Artificial Sequence
  Description of Artificial Sequence: Synthetic oligonucleotide
aauagaagccuggaagcag

SEQ ID NO: 1694818 - RNA, 19 nt, Artificial Sequence
  Description of Artificial Sequence: Synthetic oligonucleotide
ugaaucauacagauggcau

SEQ ID NO: 1694819 - RNA, 19 nt, Artificial Sequence
  Description of Artificial Sequence: Synthetic oligonucleotide
agacuugcgaccuuguugu

SEQ ID NO: 1694820 - RNA, 19 nt, Artificial Sequence
  Description of Artificial Sequence: Synthetic oligonucleotide
ugacauacagaggaucugg

SEQ ID NO: 1694821 - RNA, 19 nt, Artificial Sequence
  Description of Artificial Sequence: Synthetic oligonucleotide
uagaaagccccacaaagaa

SEQ ID NO: 1694822 - RNA, 19 nt, Artificial Sequence
  Description of Artificial Sequence: Synthetic oligonucleotide
gacaggugccuccagagag

SEQ ID NO: 1694823 - RNA, 19 nt, Artificial Sequence
  Description of Artificial Sequence: Synthetic oligonucleotide
uguaccaauugaauauuac

SEQ ID NO: 1694824 - RNA, 19 nt, Artificial Sequence
  Description of Artificial Sequence: Synthetic oligonucleotide
ccuacuaugaggcacacgc

SEQ ID NO: 1694825 - RNA, 19 nt, Artificial Sequence
  Description of Artificial Sequence: Synthetic oligonucleotide
uuugcauugcccucucucc

SEQ ID NO: 1694826 - RNA, 19 nt, Artificial Sequence
  Description of Artificial Sequence: Synthetic oligonucleotide
aggucguuuauguuccggc

SEQ ID NO: 1694827 - RNA, 19 nt, Artificial Sequence
  Description of Artificial Sequence: Synthetic oligonucleotide
uucuaucccucaaagcaag

SEQ ID NO: 1694828 - RNA, 19 nt, Artificial Sequence
  Description of Artificial Sequence: Synthetic oligonucleotide
uuuaugucuagcacacugu

SEQ ID NO: 1694829 - RNA, 19 nt, Artificial Sequence
  Description of Artificial Sequence: Synthetic oligonucleotide
ugccaagauaccauugaag

SEQ ID NO: 1694830 - RNA, 19 nt, Artificial Sequence
  Description of Artificial Sequence: Synthetic oligonucleotide
aaguagaaggguaagccug

SEQ ID NO: 1694831 - RNA, 19 nt, Artificial Sequence
  Description of Artificial Sequence: Synthetic oligonucleotide
uccuuuaugucuagcacac

SEQ ID NO: 1694832 - RNA, 19 nt, Artificial Sequence
  Description of Artificial Sequence: Synthetic oligonucleotide
cuagcacacuguaauaggc

SEQ ID NO: 1694833 - RNA, 19 nt, Artificial Sequence
  Description of Artificial Sequence: Synthetic oligonucleotide
aguagugagaucuccuucu

SEQ ID NO: 1694834 - RNA, 19 nt, Artificial Sequence
  Description of Artificial Sequence: Synthetic oligonucleotide
cagcaacugacauacagag

SEQ ID NO: 1694835 - RNA, 19 nt, Artificial Sequence
  Description of Artificial Sequence: Synthetic oligonucleotide
gaagaaaggucuucaccag

SEQ ID NO: 1694836 - RNA, 19 nt, Artificial Sequence
  Description of Artificial Sequence: Synthetic oligonucleotide
aacugacauacagaggauc

SEQ ID NO: 1694837 - RNA, 19 nt, Artificial Sequence
  Description of Artificial Sequence: Synthetic oligonucleotide
aguucagaguugaagcugc

SEQ ID NO: 1694838 - RNA, 19 nt, Artificial Sequence
  Description of Artificial Sequence: Synthetic oligonucleotide
auuguuggcccuuguaaag

SEQ ID NO: 1694839 - RNA, 19 nt, Artificial Sequence
  Description of Artificial Sequence: Synthetic oligonucleotide
auguucccuacuaugaggc

SEQ ID NO: 1694840 - RNA, 19 nt, Artificial Sequence
  Description of Artificial Sequence: Synthetic oligonucleotide
cauaauuaaggguccggag

SEQ ID NO: 1694841 - RNA, 19 nt, Artificial Sequence
  Description of Artificial Sequence: Synthetic oligonucleotide
gauaccauugaagaguaga

SEQ ID NO: 1694842 - RNA, 19 nt, Artificial Sequence
  Description of Artificial Sequence: Synthetic oligonucleotide
gcaacugacauacagagga

SEQ ID NO: 1694843 - RNA, 19 nt, Artificial Sequence
  Description of Artificial Sequence: Synthetic oligonucleotide
aaccgcucaacaugaauca

SEQ ID NO: 1694844 - RNA, 19 nt, Artificial Sequence
  Description of Artificial Sequence: Synthetic oligonucleotide
auuaacuuuucuaucccuc

SEQ ID NO: 1694845 - RNA, 19 nt, Artificial Sequence
  Description of Artificial Sequence: Synthetic oligonucleotide
gaaguggguaggcacaccc

SEQ ID NO: 1694846 - RNA, 19 nt, Artificial Sequence
  Description of Artificial Sequence: Synthetic oligonucleotide
ugaagucugaaacaacaua

SEQ ID NO: 1694847 - RNA, 19 nt, Artificial Sequence
  Description of Artificial Sequence: Synthetic oligonucleotide
caccaaagcaggauaacgc

SEQ ID NO: 1694848 - RNA, 19 nt, Artificial Sequence
  Description of Artificial Sequence: Synthetic oligonucleotide
gaaucauacagauggcauc

SEQ ID NO: 1694849 - RNA, 19 nt, Artificial Sequence
  Description of Artificial Sequence: Synthetic oligonucleotide
cucuugagcccacaaauag

SEQ ID NO: 1694850 - RNA, 19 nt, Artificial Sequence
  Description of Artificial Sequence: Synthetic oligonucleotide
uaucccucaaagcaaguuc

SEQ ID NO: 1694851 - RNA, 19 nt, Artificial Sequence
  Description of Artificial Sequence: Synthetic oligonucleotide
auagaagccuggaagcagc

SEQ ID NO: 1694852 - RNA, 19 nt, Artificial Sequence
  Description of Artificial Sequence: Synthetic oligonucleotide
augucuagcacacuguaau

SEQ ID NO: 1694853 - RNA, 19 nt, Artificial Sequence
  Description of Artificial Sequence: Synthetic oligonucleotide
uuucuaucccucaaagcaa

SEQ ID NO: 1694854 - RNA, 19 nt, Artificial Sequence
  Description of Artificial Sequence: Synthetic oligonucleotide
gaaggcacuggcgugaacc

SEQ ID NO: 1694855 - RNA, 19 nt, Artificial Sequence
  Description of Artificial Sequence: Synthetic oligonucleotide
uugcauugcccucucuccg

SEQ ID NO: 1694856 - RNA, 19 nt, Artificial Sequence
  Description of Artificial Sequence: Synthetic oligonucleotide
uuauguuccggcacucuga

SEQ ID NO: 1694857 - RNA, 19 nt, Artificial Sequence
  Description of Artificial Sequence: Synthetic oligonucleotide
uugaagaguagagaaggca

SEQ ID NO: 1694858 - RNA, 19 nt, Artificial Sequence
  Description of Artificial Sequence: Synthetic oligonucleotide
accaauugaauauuaccaa

SEQ ID NO: 1694859 - RNA, 19 nt, Artificial Sequence
  Description of Artificial Sequence: Synthetic oligonucleotide
aauccggucugcaaagguc

SEQ ID NO: 1694860 - RNA, 19 nt, Artificial Sequence
  Description of Artificial Sequence: Synthetic oligonucleotide
guagaugauggugacaaug

SEQ ID NO: 1694861 - RNA, 19 nt, Artificial Sequence
  Description of Artificial Sequence: Synthetic oligonucleotide
ucuugagcccacaaauaga

SEQ ID NO: 1694862 - RNA, 19 nt, Artificial Sequence
  Description of Artificial Sequence: Synthetic oligonucleotide
guagauaaagcugacccac

SEQ ID NO: 1694863 - RNA, 19 nt, Artificial Sequence
  Description of Artificial Sequence: Synthetic oligonucleotide
gaguagagaaggcacuggc

SEQ ID NO: 1694864 - RNA, 19 nt, Artificial Sequence
  Description of Artificial Sequence: Synthetic oligonucleotide
agcaaguucagaguugaag

SEQ ID NO: 1694865 - RNA, 19 nt, Artificial Sequence
  Description of Artificial Sequence: Synthetic oligonucleotide
aagcucuauuuagacuugc

SEQ ID NO: 1694866 - RNA, 19 nt, Artificial Sequence
  Description of Artificial Sequence: Synthetic oligonucleotide
aaauccggucugcaaaggu

SEQ ID NO: 1694867 - RNA, 19 nt, Artificial Sequence
  Description of Artificial Sequence: Synthetic oligonucleotide
auugaagaguagagaaggc

SEQ ID NO: 1694868 - RNA, 19 nt, Artificial Sequence
  Description of Artificial Sequence: Synthetic oligonucleotide
cuugcgaccuuguuguuug

SEQ ID NO: 1694869 - RNA, 19 nt, Artificial Sequence
  Description of Artificial Sequence: Synthetic oligonucleotide
gacauaauuaaggguccgg

SEQ ID NO: 1694870 - RNA, 19 nt, Artificial Sequence
  Description of Artificial Sequence: Synthetic oligonucleotide
cacauaaguagaccagugc

SEQ ID NO: 1694871 - RNA, 19 nt, Artificial Sequence
  Description of Artificial Sequence: Synthetic oligonucleotide
gagugcaauggcaaugccg

SEQ ID NO: 1694872 - RNA, 19 nt, Artificial Sequence
  Description of Artificial Sequence: Synthetic oligonucleotide
aagaguagagaaggcacug

SEQ ID NO: 1694873 - RNA, 19 nt, Artificial Sequence
  Description of Artificial Sequence: Synthetic oligonucleotide
agccacuucauacuuggug

SEQ ID NO: 1694874 - RNA, 19 nt, Artificial Sequence
  Description of Artificial Sequence: Synthetic oligonucleotide
aacuuuucuaucccucaaa

SEQ ID NO: 1694875 - RNA, 19 nt, Artificial Sequence
  Description of Artificial Sequence: Synthetic oligonucleotide
aauccuucgaaggcaaaga

SEQ ID NO: 1694876 - RNA, 19 nt, Artificial Sequence
  Description of Artificial Sequence: Synthetic oligonucleotide
uaaccccuuaugaagucug

SEQ ID NO: 1694877 - RNA, 19 nt, Artificial Sequence
  Description of Artificial Sequence: Synthetic oligonucleotide
agugcaauggcaaugccga

SEQ ID NO: 1694878 - RNA, 19 nt, Artificial Sequence
  Description of Artificial Sequence: Synthetic oligonucleotide
cuacauuaaccccuuauga

SEQ ID NO: 1694879 - RNA, 19 nt, Artificial Sequence
  Description of Artificial Sequence: Synthetic oligonucleotide
aaccaagcuccagaagugg

SEQ ID NO: 1694880 - RNA, 19 nt, Artificial Sequence
  Description of Artificial Sequence: Synthetic oligonucleotide
aaaauccggucugcaaagg

SEQ ID NO: 1694881 - RNA, 19 nt, Artificial Sequence
  Description of Artificial Sequence: Synthetic oligonucleotide
auguccuuuaugucuagca

SEQ ID NO: 1694882 - RNA, 19 nt, Artificial Sequence
  Description of Artificial Sequence: Synthetic oligonucleotide
agagcagaggcauuuuccu

SEQ ID NO: 1694883 - RNA, 19 nt, Artificial Sequence
  Description of Artificial Sequence: Synthetic oligonucleotide
uuguuggcccuuguaaagg

SEQ ID NO: 1694884 - RNA, 19 nt, Artificial Sequence
  Description of Artificial Sequence: Synthetic oligonucleotide
aucguagauaaagcugacc

SEQ ID NO: 1694885 - RNA, 19 nt, Artificial Sequence
  Description of Artificial Sequence: Synthetic oligonucleotide
acugccacuggaauuguac

SEQ ID NO: 1694886 - RNA, 19 nt, Artificial Sequence
  Description of Artificial Sequence: Synthetic oligonucleotide
auaccauugaagaguagag

SEQ ID NO: 1694887 - RNA, 19 nt, Artificial Sequence
  Description of Artificial Sequence: Synthetic oligonucleotide
cacgccauuuaguagugag

SEQ ID NO: 1694888 - RNA, 19 nt, Artificial Sequence
  Description of Artificial Sequence: Synthetic oligonucleotide
uccggcacucugaugauga

SEQ ID NO: 1694889 - RNA, 19 nt, Artificial Sequence
  Description of Artificial Sequence: Synthetic oligonucleotide
ugacauaauuaaggguccg

SEQ ID NO: 1694890 - RNA, 19 nt, Artificial Sequence
  Description of Artificial Sequence: Synthetic oligonucleotide
ggcuacaauccuucgaagg

SEQ ID NO: 1694891 - RNA, 19 nt, Artificial Sequence
  Description of Artificial Sequence: Synthetic oligonucleotide
ucguuuauguuccggcacu

SEQ ID NO: 1694892 - RNA, 19 nt, Artificial Sequence
  Description of Artificial Sequence: Synthetic oligonucleotide
auccuucgaaggcaaagag

SEQ ID NO: 1694893 - RNA, 19 nt, Artificial Sequence
  Description of Artificial Sequence: Synthetic oligonucleotide
gaaccgcucaacaugaauc

SEQ ID NO: 1694894 - RNA, 19 nt, Artificial Sequence
  Description of Artificial Sequence: Synthetic oligonucleotide
uaacgcaacugccacugga

SEQ ID NO: 1694895 - RNA, 19 nt, Artificial Sequence
  Description of Artificial Sequence: Synthetic oligonucleotide
ucacucgccaagauguccu

SEQ ID NO: 1694896 - RNA, 19 nt, Artificial Sequence
  Description of Artificial Sequence: Synthetic oligonucleotide
cugacccacaauagaaagc

SEQ ID NO: 1694897 - RNA, 19 nt, Artificial Sequence
  Description of Artificial Sequence: Synthetic oligonucleotide
uguuuguccaugucucaga

SEQ ID NO: 1694898 - RNA, 19 nt, Artificial Sequence
  Description of Artificial Sequence: Synthetic oligonucleotide
cauaaguagaccagugcca

SEQ ID NO: 1694899 - RNA, 19 nt, Artificial Sequence
  Description of Artificial Sequence: Synthetic oligonucleotide
cuugagcccacaaauagaa

SEQ ID NO: 1694900 - RNA, 19 nt, Artificial Sequence
  Description of Artificial Sequence: Synthetic oligonucleotide
uuccuuccaucguagauaa

SEQ ID NO: 1694901 - RNA, 19 nt, Artificial Sequence
  Description of Artificial Sequence: Synthetic oligonucleotide
gauggugacaaugggcaug

SEQ ID NO: 1694902 - RNA, 19 nt, Artificial Sequence
  Description of Artificial Sequence: Synthetic oligonucleotide
gagcccacaaauagaagcc

SEQ ID NO: 1694903 - RNA, 19 nt, Artificial Sequence
  Description of Artificial Sequence: Synthetic oligonucleotide
guaguggaggcuacaaucc

SEQ ID NO: 1694904 - RNA, 19 nt, Artificial Sequence
  Description of Artificial Sequence: Synthetic oligonucleotide
gaagucugaaacaacauau

SEQ ID NO: 1694905 - RNA, 19 nt, Artificial Sequence
  Description of Artificial Sequence: Synthetic oligonucleotide
uaugucuagcacacuguaa

SEQ ID NO: 1694906 - RNA, 19 nt, Artificial Sequence
  Description of Artificial Sequence: Synthetic oligonucleotide
uaagccugagagugcaaug

SEQ ID NO: 1694907 - RNA, 19 nt, Artificial Sequence
  Description of Artificial Sequence: Synthetic oligonucleotide
acagucuacauuaaccccu

SEQ ID NO: 1694908 - RNA, 19 nt, Artificial Sequence
  Description of Artificial Sequence: Synthetic oligonucleotide
uucccuacuaugaggcaca

SEQ ID NO: 1694909 - RNA, 19 nt, Artificial Sequence
  Description of Artificial Sequence: Synthetic oligonucleotide
uucauacuuggugcugucg

SEQ ID NO: 1694910 - RNA, 19 nt, Artificial Sequence
  Description of Artificial Sequence: Synthetic oligonucleotide
caauggaagcauugaggcc

SEQ ID NO: 1694911 - RNA, 19 nt, Artificial Sequence
  Description of Artificial Sequence: Synthetic oligonucleotide
uacaauccuucgaaggcaa

SEQ ID NO: 1694912 - RNA, 19 nt, Artificial Sequence
  Description of Artificial Sequence: Synthetic oligonucleotide
cuuugcauugcccucucuc

SEQ ID NO: 1694913 - RNA, 19 nt, Artificial Sequence
  Description of Artificial Sequence: Synthetic oligonucleotide
ucagguuccuuccaucgua

SEQ ID NO: 1694914 - RNA, 19 nt, Artificial Sequence
  Description of Artificial Sequence: Synthetic oligonucleotide
ugccacuggaauuguacca

SEQ ID NO: 1694915 - RNA, 19 nt, Artificial Sequence
  Description of Artificial Sequence: Synthetic oligonucleotide
acauaauuaaggguccgga

SEQ ID NO: 1694916 - RNA, 19 nt, Artificial Sequence
  Description of Artificial Sequence: Synthetic oligonucleotide
guccuuuaugucuagcaca

SEQ ID NO: 1694917 - RNA, 19 nt, Artificial Sequence
  Description of Artificial Sequence: Synthetic oligonucleotide
agaaagccccacaaagaac

SEQ ID NO: 1694918 - RNA, 19 nt, Artificial Sequence
  Description of Artificial Sequence: Synthetic oligonucleotide
agauaaagcugacccacaa

SEQ ID NO: 1694919 - RNA, 19 nt, Artificial Sequence
  Description of Artificial Sequence: Synthetic oligonucleotide
caugucucagaaucccaag

SEQ ID NO: 1694920 - RNA, 19 nt, Artificial Sequence
  Description of Artificial Sequence: Synthetic oligonucleotide
acauaagcaccuguuuguc

SEQ ID NO: 1694921 - RNA, 19 nt, Artificial Sequence
  Description of Artificial Sequence: Synthetic oligonucleotide
ccacagucuacauuaaccc

SEQ ID NO: 1694922 - RNA, 19 nt, Artificial Sequence
  Description of Artificial Sequence: Synthetic oligonucleotide
ugcaaaggucacagcaaca

SEQ ID NO: 1694923 - RNA, 19 nt, Artificial Sequence
  Description of Artificial Sequence: Synthetic oligonucleotide
agggagguggccuuucucu

SEQ ID NO: 1694924 - RNA, 19 nt, Artificial Sequence
  Description of Artificial Sequence: Synthetic oligonucleotide
uggagguaccguguagugg

SEQ ID NO: 1694925 - RNA, 19 nt, Artificial Sequence
  Description of Artificial Sequence: Synthetic oligonucleotide
acugacauacagaggaucu

SEQ ID NO: 1694926 - RNA, 19 nt, Artificial Sequence
  Description of Artificial Sequence: Synthetic oligonucleotide
uuuagacuugcgaccuugu

SEQ ID NO: 1694927 - RNA, 19 nt, Artificial Sequence
  Description of Artificial Sequence: Synthetic oligonucleotide
gacauaagcaccuguuugu

SEQ ID NO: 1694928 - RNA, 19 nt, Artificial Sequence
  Description of Artificial Sequence: Synthetic oligonucleotide
agaaucccaagcucuauuu

SEQ ID NO: 1694929 - RNA, 19 nt, Artificial Sequence
  Description of Artificial Sequence: Synthetic oligonucleotide
ggucagguuccuuccaucg

SEQ ID NO: 1694930 - RNA, 19 nt, Artificial Sequence
  Description of Artificial Sequence: Synthetic oligonucleotide
ugaaccgcucaacaugaau

SEQ ID NO: 1694931 - RNA, 19 nt, Artificial Sequence
  Description of Artificial Sequence: Synthetic oligonucleotide
ugcaauggcaaugccgaug

SEQ ID NO: 1694932 - RNA, 19 nt, Artificial Sequence
  Description of Artificial Sequence: Synthetic oligonucleotide
cacacuguaauaggccacg

SEQ ID NO: 1694933 - RNA, 19 nt, Artificial Sequence
  Description of Artificial Sequence: Synthetic oligonucleotide
aucauguucccuacuauga

SEQ ID NO: 1694934 - RNA, 19 nt, Artificial Sequence
  Description of Artificial Sequence: Synthetic oligonucleotide
uauguuccggcacucugau

SEQ ID NO: 1694935 - RNA, 19 nt, Artificial Sequence
  Description of Artificial Sequence: Synthetic oligonucleotide
cagaguugaagcugccaag

SEQ ID NO: 1694936 - RNA, 19 nt, Artificial Sequence
  Description of Artificial Sequence: Synthetic oligonucleotide
uuguaccaauugaauauua

SEQ ID NO: 1694937 - RNA, 19 nt, Artificial Sequence
  Description of Artificial Sequence: Synthetic oligonucleotide
ucaagagguagaugauggu

SEQ ID NO: 1694938 - RNA, 19 nt, Artificial Sequence
  Description of Artificial Sequence: Synthetic oligonucleotide
cuggaauuguaccaauuga

SEQ ID NO: 1694939 - RNA, 19 nt, Artificial Sequence
  Description of Artificial Sequence: Synthetic oligonucleotide
ucuggagguaccguguagu

SEQ ID NO: 1694940 - RNA, 19 nt, Artificial Sequence
  Description of Artificial Sequence: Synthetic oligonucleotide
aagauaccauugaagagua

SEQ ID NO: 1694941 - RNA, 19 nt, Artificial Sequence
  Description of Artificial Sequence: Synthetic oligonucleotide
uccaugucucagaauccca

SEQ ID NO: 1694942 - RNA, 19 nt, Artificial Sequence
  Description of Artificial Sequence: Synthetic oligonucleotide
cuacuaugaggcacacgcc

SEQ ID NO: 1694943 - RNA, 19 nt, Artificial Sequence
  Description of Artificial Sequence: Synthetic oligonucleotide
ugggacauaagcaccuguu

SEQ ID NO: 1694944 - RNA, 19 nt, Artificial Sequence
  Description of Artificial Sequence: Synthetic oligonucleotide
uggccuuucucuugagccc

SEQ ID NO: 1694945 - RNA, 19 nt, Artificial Sequence
  Description of Artificial Sequence: Synthetic oligonucleotide
caauccuucgaaggcaaag

SEQ ID NO: 1694946 - RNA, 19 nt, Artificial Sequence
  Description of Artificial Sequence: Synthetic oligonucleotide
cuuccaaauccaguucugc

SEQ ID NO: 1694947 - RNA, 19 nt, Artificial Sequence
  Description of Artificial Sequence: Synthetic oligonucleotide
agcaacagcuucacucgcc

SEQ ID NO: 1694948 - RNA, 19 nt, Artificial Sequence
  Description of Artificial Sequence: Synthetic oligonucleotide
aagcaggauaacgcaacug

SEQ ID NO: 1694949 - RNA, 19 nt, Artificial Sequence
  Description of Artificial Sequence: Synthetic oligonucleotide
cauugaggccaccaaagca

SEQ ID NO: 1694950 - RNA, 19 nt, Artificial Sequence
  Description of Artificial Sequence: Synthetic oligonucleotide
ugggcaucucuucaucuuc

SEQ ID NO: 1694951 - RNA, 19 nt, Artificial Sequence
  Description of Artificial Sequence: Synthetic oligonucleotide
aggccggucagguuccuuc

SEQ ID NO: 1694952 - RNA, 19 nt, Artificial Sequence
  Description of Artificial Sequence: Synthetic oligonucleotide
ggagguaccguguagugga

SEQ ID NO: 1694953 - RNA, 19 nt, Artificial Sequence
  Description of Artificial Sequence: Synthetic oligonucleotide
gucguuuauguuccggcac

SEQ ID NO: 1694954 - RNA, 19 nt, Artificial Sequence
  Description of Artificial Sequence: Synthetic oligonucleotide
cauacuuggugcugucgac

SEQ ID NO: 1694955 - RNA, 19 nt, Artificial Sequence
  Description of Artificial Sequence: Synthetic oligonucleotide
aggaacuucuagaaccaag

SEQ ID NO: 1694956 - RNA, 19 nt, Artificial Sequence
  Description of Artificial Sequence: Synthetic oligonucleotide
aagauguccuuuaugucua

SEQ ID NO: 1694957 - RNA, 19 nt, Artificial Sequence
  Description of Artificial Sequence: Synthetic oligonucleotide
aggauuccugaucucuuca

SEQ ID NO: 1694958 - RNA, 19 nt, Artificial Sequence
  Description of Artificial Sequence: Synthetic oligonucleotide
aaggguccggagccaauca

SEQ ID NO: 1694959 - RNA, 19 nt, Artificial Sequence
  Description of Artificial Sequence: Synthetic oligonucleotide
gguaccguguaguggaggc

SEQ ID NO: 1694960 - RNA, 19 nt, Artificial Sequence
  Description of Artificial Sequence: Synthetic oligonucleotide
uggcgugaaccgcucaaca

SEQ ID NO: 1694961 - RNA, 19 nt, Artificial Sequence
  Description of Artificial Sequence: Synthetic oligonucleotide
aaugggcauggaaauggca

SEQ ID NO: 1694962 - RNA, 19 nt, Artificial Sequence
  Description of Artificial Sequence: Synthetic oligonucleotide
aguuaaugagcuggaagau

SEQ ID NO: 1694963 - RNA, 19 nt, Artificial Sequence
  Description of Artificial Sequence: Synthetic oligonucleotide
acacauaaguagaccagug

SEQ ID NO: 1694964 - RNA, 19 nt, Artificial Sequence
  Description of Artificial Sequence: Synthetic oligonucleotide
gaggucguuuauguuccgg

SEQ ID NO: 1694965 - RNA, 19 nt, Artificial Sequence
  Description of Artificial Sequence: Synthetic oligonucleotide
gaagcauugaggccaccaa

SEQ ID NO: 1694966 - RNA, 19 nt, Artificial Sequence
  Description of Artificial Sequence: Synthetic oligonucleotide
auaacgcaacugccacugg

SEQ ID NO: 1694967 - RNA, 19 nt, Artificial Sequence
  Description of Artificial Sequence: Synthetic oligonucleotide
gccacagucuacauuaacc

SEQ ID NO: 1694968 - RNA, 19 nt, Artificial Sequence
  Description of Artificial Sequence: Synthetic oligonucleotide
ucuaucccucaaagcaagu

SEQ ID NO: 1694969 - RNA, 19 nt, Artificial Sequence
  Description of Artificial Sequence: Synthetic oligonucleotide
cauuguuggcccuuguaaa

SEQ ID NO: 1694970 - RNA, 19 nt, Artificial Sequence
  Description of Artificial Sequence: Synthetic oligonucleotide
agcucuauuuagacuugcg

SEQ ID NO: 1694971 - RNA, 19 nt, Artificial Sequence
  Description of Artificial Sequence: Synthetic oligonucleotide
uagugagaucuccuucuuc

SEQ ID NO: 1694972 - RNA, 19 nt, Artificial Sequence
  Description of Artificial Sequence: Synthetic oligonucleotide
aagucugaaacaacauaua

SEQ ID NO: 1694973 - RNA, 19 nt, Artificial Sequence
  Description of Artificial Sequence: Synthetic oligonucleotide
cuguuuguccaugucucag

SEQ ID NO: 1694974 - RNA, 19 nt, Artificial Sequence
  Description of Artificial Sequence: Synthetic oligonucleotide
ugucuagcacacuguaaua

SEQ ID NO: 1694975 - RNA, 19 nt, Artificial Sequence
  Description of Artificial Sequence: Synthetic oligonucleotide
ccaaauccaguucugcagc

SEQ ID NO: 1694976 - RNA, 19 nt, Artificial Sequence
  Description of Artificial Sequence: Synthetic oligonucleotide
ugccacagucuacauuaac

SEQ ID NO: 1694977 - RNA, 19 nt, Artificial Sequence
  Description of Artificial Sequence: Synthetic oligonucleotide
aguugauggugucacugua

SEQ ID NO: 1694978 - RNA, 19 nt, Artificial Sequence
  Description of Artificial Sequence: Synthetic oligonucleotide
guucccuacuaugaggcac

SEQ ID NO: 1694979 - RNA, 19 nt, Artificial Sequence
  Description of Artificial Sequence: Synthetic oligonucleotide
ugcgaccuuguuguuuggg

SEQ ID NO: 1694980 - RNA, 19 nt, Artificial Sequence
  Description of Artificial Sequence: Synthetic oligonucleotide
uucuagaaccaagcuccag

SEQ ID NO: 1694981 - RNA, 19 nt, Artificial Sequence
  Description of Artificial Sequence: Synthetic oligonucleotide
uuagacuugcgaccuuguu

SEQ ID NO: 1694982 - RNA, 19 nt, Artificial Sequence
  Description of Artificial Sequence: Synthetic oligonucleotide
ugcucggccaccgggcugg

SEQ ID NO: 1694983 - RNA, 19 nt, Artificial Sequence
  Description of Artificial Sequence: Synthetic oligonucleotide
aucuggagguaccguguag

SEQ ID NO: 1694984 - RNA, 19 nt, Artificial Sequence
  Description of Artificial Sequence: Synthetic oligonucleotide
cacaauagaaagccccaca

SEQ ID NO: 1694985 - RNA, 19 nt, Artificial Sequence
  Description of Artificial Sequence: Synthetic oligonucleotide
cacguuggucaagagguag

SEQ ID NO: 1694986 - RNA, 19 nt, Artificial Sequence
  Description of Artificial Sequence: Synthetic oligonucleotide
ccaucguagauaaagcuga

SEQ ID NO: 1694987 - RNA, 19 nt, Artificial Sequence
  Description of Artificial Sequence: Synthetic oligonucleotide
aggcacacgccauuuagua

SEQ ID NO: 1694988 - RNA, 19 nt, Artificial Sequence
  Description of Artificial Sequence: Synthetic oligonucleotide
acauauagcuaaacaaaua

SEQ ID NO: 1694989 - RNA, 19 nt, Artificial Sequence
  Description of Artificial Sequence: Synthetic oligonucleotide
agcaacugacauacagagg

SEQ ID NO: 1694990 - RNA, 19 nt, Artificial Sequence
  Description of Artificial Sequence: Synthetic oligonucleotide
cccacaaauagaagccugg

SEQ ID NO: 1694991 - RNA, 19 nt, Artificial Sequence
  Description of Artificial Sequence: Synthetic oligonucleotide
ucgaccaugguggggagaa

SEQ ID NO: 1694992 - RNA, 19 nt, Artificial Sequence
  Description of Artificial Sequence: Synthetic oligonucleotide
gauguccuuuaugucuagc

SEQ ID NO: 1694993 - RNA, 19 nt, Artificial Sequence
  Description of Artificial Sequence: Synthetic oligonucleotide
aacgcaacugccacuggaa

SEQ ID NO: 1694994 - RNA, 19 nt, Artificial Sequence
  Description of Artificial Sequence: Synthetic oligonucleotide
caucguagauaaagcugac

SEQ ID NO: 1694995 - RNA, 19 nt, Artificial Sequence
  Description of Artificial Sequence: Synthetic oligonucleotide
uguucccuacuaugaggca

SEQ ID NO: 1694996 - RNA, 19 nt, Artificial Sequence
  Description of Artificial Sequence: Synthetic oligonucleotide
ucuggucaaugggacauaa

SEQ ID NO: 1694997 - RNA, 19 nt, Artificial Sequence
  Description of Artificial Sequence: Synthetic oligonucleotide
guuuguccaugucucagaa

SEQ ID NO: 1694998 - RNA, 19 nt, Artificial Sequence
  Description of Artificial Sequence: Synthetic oligonucleotide
augggacauaagcaccugu

SEQ ID NO: 1694999 - RNA, 19 nt, Artificial Sequence
  Description of Artificial Sequence: Synthetic oligonucleotide
uuaccugcucggccaccgg

SEQ ID NO: 1695000 - RNA, 19 nt, Artificial Sequence
  Description of Artificial Sequence: Synthetic oligonucleotide
aguagaccagugccaagau

SEQ ID NO: 1695001 - RNA, 19 nt, Artificial Sequence
  Description of Artificial Sequence: Synthetic oligonucleotide
accgggcuggcccugucuc

SEQ ID NO: 1695002 - RNA, 19 nt, Artificial Sequence
  Description of Artificial Sequence: Synthetic oligonucleotide
cuggagguaccguguagug

SEQ ID NO: 1695003 - RNA, 19 nt, Artificial Sequence
  Description of Artificial Sequence: Synthetic oligonucleotide
gaaucccaagcucuauuua

SEQ ID NO: 1695004 - RNA, 19 nt, Artificial Sequence
  Description of Artificial Sequence: Synthetic oligonucleotide
aggguaagccugagagugc

SEQ ID NO: 1695005 - RNA, 19 nt, Artificial Sequence
  Description of Artificial Sequence: Synthetic oligonucleotide
gcucuauuuagacuugcga

SEQ ID NO: 1695006 - RNA, 19 nt, Artificial Sequence
  Description of Artificial Sequence: Synthetic oligonucleotide
gauguccuccacacauaag

SEQ ID NO: 1695007 - RNA, 19 nt, Artificial Sequence
  Description of Artificial Sequence: Synthetic oligonucleotide
agaggucguuuauguuccg

SEQ ID NO: 1695008 - RNA, 19 nt, Artificial Sequence
  Description of Artificial Sequence: Synthetic oligonucleotide
gcgugaaccgcucaacaug

SEQ ID NO: 1695009 - RNA, 19 nt, Artificial Sequence
  Description of Artificial Sequence: Synthetic oligonucleotide
auccggucugcaaagguca

SEQ ID NO: 1695010 - RNA, 19 nt, Artificial Sequence
  Description of Artificial Sequence: Synthetic oligonucleotide
cacaaauagaagccuggaa

SEQ ID NO: 1695011 - RNA, 19 nt, Artificial Sequence
  Description of Artificial Sequence: Synthetic oligonucleotide
gaagaguagagaaggcacu

SEQ ID NO: 1695012 - RNA, 19 nt, Artificial Sequence
  Description of Artificial Sequence: Synthetic oligonucleotide
aagaugguacagaggcaga

SEQ ID NO: 1695013 - RNA, 19 nt, Artificial Sequence
  Description of Artificial Sequence: Synthetic oligonucleotide
uaaggguccggagccaauc

SEQ ID NO: 1695014 - RNA, 19 nt, Artificial Sequence
  Description of Artificial Sequence: Synthetic oligonucleotide
ggcacacgccauuuaguag

SEQ ID NO: 1695015 - RNA, 19 nt, Artificial Sequence
  Description of Artificial Sequence: Synthetic oligonucleotide
ccuucgaaggcaaagaggu

SEQ ID NO: 1695016 - RNA, 19 nt, Artificial Sequence
  Description of Artificial Sequence: Synthetic oligonucleotide
cuucgaaggcaaagagguc

SEQ ID NO: 1695017 - RNA, 19 nt, Artificial Sequence
  Description of Artificial Sequence: Synthetic oligonucleotide
uaugaggcacacgccauuu

SEQ ID NO: 1695018 - RNA, 19 nt, Artificial Sequence
  Description of Artificial Sequence: Synthetic oligonucleotide
cucucaggauuccugaucu

SEQ ID NO: 1695019 - RNA, 19 nt, Artificial Sequence
  Description of Artificial Sequence: Synthetic oligonucleotide
accuuguuguuugggcauc

SEQ ID NO: 1695020 - RNA, 19 nt, Artificial Sequence
  Description of Artificial Sequence: Synthetic oligonucleotide
acuggcgugaaccgcucaa

SEQ ID NO: 1695021 - RNA, 19 nt, Artificial Sequence
  Description of Artificial Sequence: Synthetic oligonucleotide
agcauuguuggcccuugua

SEQ ID NO: 1695022 - RNA, 19 nt, Artificial Sequence
  Description of Artificial Sequence: Synthetic oligonucleotide
cacacgccauuuaguagug

SEQ ID NO: 1695023 - RNA, 19 nt, Artificial Sequence
  Description of Artificial Sequence: Synthetic oligonucleotide
ccauuuaguagugagaucu

SEQ ID NO: 1695024 - RNA, 19 nt, Artificial Sequence
  Description of Artificial Sequence: Synthetic oligonucleotide
ccugccacagucuacauua

SEQ ID NO: 1695025 - RNA, 19 nt, Artificial Sequence
  Description of Artificial Sequence: Synthetic oligonucleotide
gaaggguaagccugagagu

SEQ ID NO: 1695026 - RNA, 19 nt, Artificial Sequence
  Description of Artificial Sequence: Synthetic oligonucleotide
gcauuguuggcccuuguaa

SEQ ID NO: 1695027 - RNA, 19 nt, Artificial Sequence
  Description of Artificial Sequence: Synthetic oligonucleotide
cgcucaacaugaaucauac

SEQ ID NO: 1695028 - RNA, 19 nt, Artificial Sequence
  Description of Artificial Sequence: Synthetic oligonucleotide
gucacagcaacagcuucac

SEQ ID NO: 1695029 - RNA, 19 nt, Artificial Sequence
  Description of Artificial Sequence: Synthetic oligonucleotide
gauuccugccacagucuac

SEQ ID NO: 1695030 - RNA, 19 nt, Artificial Sequence
  Description of Artificial Sequence: Synthetic oligonucleotide
auggaagcauugaggccac

SEQ ID NO: 1695031 - RNA, 19 nt, Artificial Sequence
  Description of Artificial Sequence: Synthetic oligonucleotide
guuggucaagagguagaug

SEQ ID NO: 1695032 - RNA, 19 nt, Artificial Sequence
  Description of Artificial Sequence: Synthetic oligonucleotide
uuaaggguccggagccaau

SEQ ID NO: 1695033 - RNA, 19 nt, Artificial Sequence
  Description of Artificial Sequence: Synthetic oligonucleotide
aggcacuggcgugaaccgc

SEQ ID NO: 1695034 - RNA, 19 nt, Artificial Sequence
  Description of Artificial Sequence: Synthetic oligonucleotide
agaaguggccugauuccug

SEQ ID NO: 1695035 - RNA, 19 nt, Artificial Sequence
  Description of Artificial Sequence: Synthetic oligonucleotide
gcgaccuuguuguuugggc

SEQ ID NO: 1695036 - RNA, 19 nt, Artificial Sequence
  Description of Artificial Sequence: Synthetic oligonucleotide
guggaggcuacaauccuuc

SEQ ID NO: 1695037 - RNA, 19 nt, Artificial Sequence
  Description of Artificial Sequence: Synthetic oligonucleotide
cugucgaccauggugggga

SEQ ID NO: 1695038 - RNA, 19 nt, Artificial Sequence
  Description of Artificial Sequence: Synthetic oligonucleotide
aaguggguaggcacaccca

SEQ ID NO: 1695039 - RNA, 19 nt, Artificial Sequence
  Description of Artificial Sequence: Synthetic oligonucleotide
agguaccguguaguggagg

SEQ ID NO: 1695040 - RNA, 19 nt, Artificial Sequence
  Description of Artificial Sequence: Synthetic oligonucleotide
ugucgaccaugguggggag

SEQ ID NO: 1695041 - RNA, 19 nt, Artificial Sequence
  Description of Artificial Sequence: Synthetic oligonucleotide
uugcgaccuuguuguuugg

SEQ ID NO: 1695042 - RNA, 19 nt, Artificial Sequence
  Description of Artificial Sequence: Synthetic oligonucleotide
gucuacauuaaccccuuau

SEQ ID NO: 1695043 - RNA, 19 nt, Artificial Sequence
  Description of Artificial Sequence: Synthetic oligonucleotide
uccggucugcaaaggucac

SEQ ID NO: 1695044 - RNA, 19 nt, Artificial Sequence
  Description of Artificial Sequence: Synthetic oligonucleotide
cuucacucgccaagauguc

SEQ ID NO: 1695045 - RNA, 19 nt, Artificial Sequence
  Description of Artificial Sequence: Synthetic oligonucleotide
aggcaaagaggucguuuau

SEQ ID NO: 1695046 - RNA, 19 nt, Artificial Sequence
  Description of Artificial Sequence: Synthetic oligonucleotide
guagaaggguaagccugag

SEQ ID NO: 1695047 - RNA, 19 nt, Artificial Sequence
  Description of Artificial Sequence: Synthetic oligonucleotide
ggucguuuauguuccggca

SEQ ID NO: 1695048 - RNA, 19 nt, Artificial Sequence
  Description of Artificial Sequence: Synthetic oligonucleotide
cugaaacaacauauagcua

SEQ ID NO: 1695049 - RNA, 19 nt, Artificial Sequence
  Description of Artificial Sequence: Synthetic oligonucleotide
uccucucaggauuccugau

SEQ ID NO: 1695050 - RNA, 19 nt, Artificial Sequence
  Description of Artificial Sequence: Synthetic oligonucleotide
aggccaccaaagcaggaua

SEQ ID NO: 1695051 - RNA, 19 nt, Artificial Sequence
  Description of Artificial Sequence: Synthetic oligonucleotide
aagauguccuccacacaua

SEQ ID NO: 1695052 - RNA, 19 nt, Artificial Sequence
  Description of Artificial Sequence: Synthetic oligonucleotide
cacuucauacuuggugcug

SEQ ID NO: 1695053 - RNA, 19 nt, Artificial Sequence
  Description of Artificial Sequence: Synthetic oligonucleotide
acgcaacugccacuggaau

SEQ ID NO: 1695054 - RNA, 19 nt, Artificial Sequence
  Description of Artificial Sequence: Synthetic oligonucleotide
gaucuggagguaccgugua

SEQ ID NO: 1695055 - RNA, 19 nt, Artificial Sequence
  Description of Artificial Sequence: Synthetic oligonucleotide
cauuuuccucaugcugggc

SEQ ID NO: 1695056 - RNA, 19 nt, Artificial Sequence
  Description of Artificial Sequence: Synthetic oligonucleotide
acuaugaggcacacgccau

SEQ ID NO: 1695057 - RNA, 19 nt, Artificial Sequence
  Description of Artificial Sequence: Synthetic oligonucleotide
aguuccucucaggauuccu

SEQ ID NO: 1695058 - RNA, 19 nt, Artificial Sequence
  Description of Artificial Sequence: Synthetic oligonucleotide
cagugacauaauuaagggu

SEQ ID NO: 1695059 - RNA, 19 nt, Artificial Sequence
  Description of Artificial Sequence: Synthetic oligonucleotide
gcacacgccauuuaguagu

SEQ ID NO: 1695060 - RNA, 19 nt, Artificial Sequence
  Description of Artificial Sequence: Synthetic oligonucleotide
caccaggaagaugguacag

SEQ ID NO: 1695061 - RNA, 19 nt, Artificial Sequence
  Description of Artificial Sequence: Synthetic oligonucleotide
gggcaaguuccucucagga

SEQ ID NO: 1695062 - RNA, 19 nt, Artificial Sequence
  Description of Artificial Sequence: Synthetic oligonucleotide
ggagguggccuuucucuug

SEQ ID NO: 1695063 - RNA, 19 nt, Artificial Sequence
  Description of Artificial Sequence: Synthetic oligonucleotide
cuucuagaaccaagcucca

SEQ ID NO: 1695064 - RNA, 19 nt, Artificial Sequence
  Description of Artificial Sequence: Synthetic oligonucleotide
gaccuuguuguuugggcau

SEQ ID NO: 1695065 - RNA, 19 nt, Artificial Sequence
  Description of Artificial Sequence: Synthetic oligonucleotide
agguuccuuccaucguaga

SEQ ID NO: 1695066 - RNA, 19 nt, Artificial Sequence
  Description of Artificial Sequence: Synthetic oligonucleotide
acgccauuuaguagugaga

SEQ ID NO: 1695067 - RNA, 19 nt, Artificial Sequence
  Description of Artificial Sequence: Synthetic oligonucleotide
uggcaauggagaggggcaa

SEQ ID NO: 1695068 - RNA, 19 nt, Artificial Sequence
  Description of Artificial Sequence: Synthetic oligonucleotide
uuccggcacucugaugaug

SEQ ID NO: 1695069 - RNA, 19 nt, Artificial Sequence
  Description of Artificial Sequence: Synthetic oligonucleotide
acguuggucaagagguaga

SEQ ID NO: 1695070 - RNA, 19 nt, Artificial Sequence
  Description of Artificial Sequence: Synthetic oligonucleotide
guucuggucaaugggacau

SEQ ID NO: 1695071 - RNA, 19 nt, Artificial Sequence
  Description of Artificial Sequence: Synthetic oligonucleotide
ggcacggccaccaggaaga

SEQ ID NO: 1695072 - RNA, 19 nt, Artificial Sequence
  Description of Artificial Sequence: Synthetic oligonucleotide
acuugcgaccuuguuguuu

SEQ ID NO: 1695073 - RNA, 19 nt, Artificial Sequence
  Description of Artificial Sequence: Synthetic oligonucleotide
gguucuggucaaugggaca

SEQ ID NO: 1695074 - RNA, 19 nt, Artificial Sequence
  Description of Artificial Sequence: Synthetic oligonucleotide
aggguccggagccaaucau

SEQ ID NO: 1695075 - RNA, 19 nt, Artificial Sequence
  Description of Artificial Sequence: Synthetic oligonucleotide
agauaccauugaagaguag

SEQ ID NO: 1695076 - RNA, 19 nt, Artificial Sequence
  Description of Artificial Sequence: Synthetic oligonucleotide
gagguaccguguaguggag

SEQ ID NO: 1695077 - RNA, 19 nt, Artificial Sequence
  Description of Artificial Sequence: Synthetic oligonucleotide
guagaccagugccaagaua

SEQ ID NO: 1695078 - RNA, 19 nt, Artificial Sequence
  Description of Artificial Sequence: Synthetic oligonucleotide
ggaagcauugaggccacca

SEQ ID NO: 1695079 - RNA, 19 nt, Artificial Sequence
  Description of Artificial Sequence: Synthetic oligonucleotide
aguggaggcuacaauccuu

SEQ ID NO: 1695080 - RNA, 19 nt, Artificial Sequence
  Description of Artificial Sequence: Synthetic oligonucleotide
ggaauuguaccaauugaau

SEQ ID NO: 1695081 - RNA, 19 nt, Artificial Sequence
  Description of Artificial Sequence: Synthetic oligonucleotide
auguuccggcacucugaug

SEQ ID NO: 1695082 - RNA, 19 nt, Artificial Sequence
  Description of Artificial Sequence: Synthetic oligonucleotide
aggcugagcuugagagggc

SEQ ID NO: 1695083 - RNA, 19 nt, Artificial Sequence
  Description of Artificial Sequence: Synthetic oligonucleotide
gggcauggaaauggcaaug

SEQ ID NO: 1695084 - RNA, 19 nt, Artificial Sequence
  Description of Artificial Sequence: Synthetic oligonucleotide
cuggcgugaaccgcucaac

SEQ ID NO: 1695085 - RNA, 19 nt, Artificial Sequence
  Description of Artificial Sequence: Synthetic oligonucleotide
cuuguuguuugggcaucuc

SEQ ID NO: 1695086 - RNA, 19 nt, Artificial Sequence
  Description of Artificial Sequence: Synthetic oligonucleotide
cacuguagaggggcacggc

SEQ ID NO: 1695087 - RNA, 19 nt, Artificial Sequence
  Description of Artificial Sequence: Synthetic oligonucleotide
augaggcacacgccauuua

SEQ ID NO: 1695088 - RNA, 19 nt, Artificial Sequence
  Description of Artificial Sequence: Synthetic oligonucleotide
caauggcaaugccgaugag

SEQ ID NO: 1695089 - RNA, 19 nt, Artificial Sequence
  Description of Artificial Sequence: Synthetic oligonucleotide
agggcgaggccggucaggu

SEQ ID NO: 1695090 - RNA, 19 nt, Artificial Sequence
  Description of Artificial Sequence: Synthetic oligonucleotide
accccuuaugaagucugaa

SEQ ID NO: 1695091 - RNA, 19 nt, Artificial Sequence
  Description of Artificial Sequence: Synthetic oligonucleotide
acuuggugcugucgaccau

SEQ ID NO: 1695092 - RNA, 19 nt, Artificial Sequence
  Description of Artificial Sequence: Synthetic oligonucleotide
agguggccuuucucuugag

SEQ ID NO: 1695093 - RNA, 19 nt, Artificial Sequence
  Description of Artificial Sequence: Synthetic oligonucleotide
ccucucaggauuccugauc

SEQ ID NO: 1695094 - RNA, 19 nt, Artificial Sequence
  Description of Artificial Sequence: Synthetic oligonucleotide
gccauuuaguagugagauc

SEQ ID NO: 1695095 - RNA, 19 nt, Artificial Sequence
  Description of Artificial Sequence: Synthetic oligonucleotide
cugggcuccuggacaggug

SEQ ID NO: 1695096 - RNA, 19 nt, Artificial Sequence
  Description of Artificial Sequence: Synthetic oligonucleotide
cguagauaaagcugaccca

SEQ ID NO: 1695097 - RNA, 19 nt, Artificial Sequence
  Description of Artificial Sequence: Synthetic oligonucleotide
caaucauguucccuacuau

SEQ ID NO: 1695098 - RNA, 19 nt, Artificial Sequence
  Description of Artificial Sequence: Synthetic oligonucleotide
ggccugauuccugccacag

SEQ ID NO: 1695099 - RNA, 19 nt, Artificial Sequence
  Description of Artificial Sequence: Synthetic oligonucleotide
guaagccugagagugcaau

SEQ ID NO: 1695100 - RNA, 19 nt, Artificial Sequence
  Description of Artificial Sequence: Synthetic oligonucleotide
cgugaaccgcucaacauga

SEQ ID NO: 1695101 - RNA, 19 nt, Artificial Sequence
  Description of Artificial Sequence: Synthetic oligonucleotide
uucuggucaaugggacaua

SEQ ID NO: 1695102 - RNA, 19 nt, Artificial Sequence
  Description of Artificial Sequence: Synthetic oligonucleotide
aagcaaguucagaguugaa

SEQ ID NO: 1695103 - RNA, 19 nt, Artificial Sequence
  Description of Artificial Sequence: Synthetic oligonucleotide
ggguccggagccaaucaug

SEQ ID NO: 1695104 - RNA, 19 nt, Artificial Sequence
  Description of Artificial Sequence: Synthetic oligonucleotide
ucccuacuaugaggcacac

SEQ ID NO: 1695105 - RNA, 19 nt, Artificial Sequence
  Description of Artificial Sequence: Synthetic oligonucleotide
ggccggucagguuccuucc

SEQ ID NO: 1695106 - RNA, 19 nt, Artificial Sequence
  Description of Artificial Sequence: Synthetic oligonucleotide
uuccugccacagucuacau

SEQ ID NO: 1695107 - RNA, 19 nt, Artificial Sequence
  Description of Artificial Sequence: Synthetic oligonucleotide
accgcucaacaugaaucau

SEQ ID NO: 1695108 - RNA, 19 nt, Artificial Sequence
  Description of Artificial Sequence: Synthetic oligonucleotide
agucuacauuaaccccuua

SEQ ID NO: 1695109 - RNA, 19 nt, Artificial Sequence
  Description of Artificial Sequence: Synthetic oligonucleotide
gucagguuccuuccaucgu

SEQ ID NO: 1695110 - RNA, 19 nt, Artificial Sequence
  Description of Artificial Sequence: Synthetic oligonucleotide
gguuccuuccaucguagau

SEQ ID NO: 1695111 - RNA, 19 nt, Artificial Sequence
  Description of Artificial Sequence: Synthetic oligonucleotide
gaggcacacgccauuuagu

SEQ ID NO: 1695112 - RNA, 19 nt, Artificial Sequence
  Description of Artificial Sequence: Synthetic oligonucleotide
ccaugucucagaaucccaa

SEQ ID NO: 1695113 - RNA, 19 nt, Artificial Sequence
  Description of Artificial Sequence: Synthetic oligonucleotide
guguaguggaggcuacaau

SEQ ID NO: 1695114 - RNA, 19 nt, Artificial Sequence
  Description of Artificial Sequence: Synthetic oligonucleotide
cagaggcauuuuccucaug

SEQ ID NO: 1695115 - RNA, 19 nt, Artificial Sequence
  Description of Artificial Sequence: Synthetic oligonucleotide
gcuugccuuugcauugccc

SEQ ID NO: 1695116 - RNA, 19 nt, Artificial Sequence
  Description of Artificial Sequence: Synthetic oligonucleotide
guagugagaucuccuucuu

SEQ ID NO: 1695117 - RNA, 19 nt, Artificial Sequence
  Description of Artificial Sequence: Synthetic oligonucleotide
acacgccauuuaguaguga

SEQ ID NO: 1695118 - RNA, 19 nt, Artificial Sequence
  Description of Artificial Sequence: Synthetic oligonucleotide
acaauccuucgaaggcaaa

SEQ ID NO: 1695119 - RNA, 19 nt, Artificial Sequence
  Description of Artificial Sequence: Synthetic oligonucleotide
gcucaacaugaaucauaca

SEQ ID NO: 1695120 - RNA, 19 nt, Artificial Sequence
  Description of Artificial Sequence: Synthetic oligonucleotide
cagaaguggccugauuccu

SEQ ID NO: 1695121 - RNA, 19 nt, Artificial Sequence
  Description of Artificial Sequence: Synthetic oligonucleotide
cagaaucccaagcucuauu

SEQ ID NO: 1695122 - RNA, 19 nt, Artificial Sequence
  Description of Artificial Sequence: Synthetic oligonucleotide
cacuggaauuguaccaauu

SEQ ID NO: 1695123 - RNA, 19 nt, Artificial Sequence
  Description of Artificial Sequence: Synthetic oligonucleotide
acucgccaagauguccuuu

SEQ ID NO: 1695124 - RNA, 19 nt, Artificial Sequence
  Description of Artificial Sequence: Synthetic oligonucleotide
gguccggagccaaucaugu

SEQ ID NO: 1695125 - RNA, 19 nt, Artificial Sequence
  Description of Artificial Sequence: Synthetic oligonucleotide
cagucuacauuaaccccuu

SEQ ID NO: 1695126 - RNA, 19 nt, Artificial Sequence
  Description of Artificial Sequence: Synthetic oligonucleotide
cugccacagucuacauuaa

SEQ ID NO: 1695127 - RNA, 19 nt, Artificial Sequence
  Description of Artificial Sequence: Synthetic oligonucleotide
ggcgugaaccgcucaacau

SEQ ID NO: 1695128 - RNA, 19 nt, Artificial Sequence
  Description of Artificial Sequence: Synthetic oligonucleotide
cuaugaggcacacgccauu

SEQ ID NO: 1695129 - RNA, 19 nt, Artificial Sequence
  Description of Artificial Sequence: Synthetic oligonucleotide
ccgcucaacaugaaucaua

SEQ ID NO: 1695130 - RNA, 19 nt, Artificial Sequence
  Description of Artificial Sequence: Synthetic oligonucleotide
cacuguaauaggccacguu

SEQ ID NO: 1695131 - RNA, 19 nt, Artificial Sequence
  Description of Artificial Sequence: Synthetic oligonucleotide
ggagaggggcaaguuccuc

SEQ ID NO: 1695132 - RNA, 19 nt, Artificial Sequence
  Description of Artificial Sequence: Synthetic oligonucleotide
ggcacuggcgugaaccgcu

SEQ ID NO: 1695133 - RNA, 19 nt, Artificial Sequence
  Description of Artificial Sequence: Synthetic oligonucleotide
gucgaccaugguggggaga

SEQ ID NO: 1695134 - RNA, 19 nt, Artificial Sequence
  Description of Artificial Sequence: Synthetic oligonucleotide
cccuacuaugaggcacacg

SEQ ID NO: 1695135 - RNA, 19 nt, Artificial Sequence
  Description of Artificial Sequence: Synthetic oligonucleotide
guaccguguaguggaggcu

SEQ ID NO: 1695136 - RNA, 19 nt, Artificial Sequence
  Description of Artificial Sequence: Synthetic oligonucleotide
cacuggcgugaaccgcuca

SEQ ID NO: 1695137 - RNA, 19 nt, Artificial Sequence
  Description of Artificial Sequence: Synthetic oligonucleotide
cccaagcucuauuuagacu

SEQ ID NO: 1695138 - RNA, 19 nt, Artificial Sequence
  Description of Artificial Sequence: Synthetic oligonucleotide
ccggcacucugaugaugag

SEQ ID NO: 1695139 - RNA, 19 nt, Artificial Sequence
  Description of Artificial Sequence: Synthetic oligonucleotide
guuccggcacucugaugau

SEQ ID NO: 1695140 - RNA, 19 nt, Artificial Sequence
  Description of Artificial Sequence: Synthetic oligonucleotide
ggucuucaccagcuugccu

SEQ ID NO: 1695141 - RNA, 19 nt, Artificial Sequence
  Description of Artificial Sequence: Synthetic oligonucleotide
gugaaccgcucaacaugaa

SEQ ID NO: 1695142 - RNA, 19 nt, Artificial Sequence
  Description of Artificial Sequence: Synthetic oligonucleotide
gccuuugcauugcccucuc

SEQ ID NO: 1695143 - RNA, 19 nt, Artificial Sequence
  Description of Artificial Sequence: Synthetic oligonucleotide
cggucagguuccuuccauc

SEQ ID NO: 1695144 - RNA, 19 nt, Artificial Sequence
  Description of Artificial Sequence: Synthetic oligonucleotide
gccggucagguuccuucca

SEQ ID NO: 1695145 - RNA, 19 nt, Artificial Sequence
  Description of Artificial Sequence: Synthetic oligonucleotide
cgccauuuaguagugagau

SEQ ID NO: 1695146 - RNA, 19 nt, Artificial Sequence
  Description of Artificial Sequence: Synthetic oligonucleotide
gguaagccugagagugcaa

SEQ ID NO: 1695147 - RNA, 19 nt, Artificial Sequence
  Description of Artificial Sequence: Synthetic oligonucleotide
gcaaugccgaugagggagu

SEQ ID NO: 1695148 - RNA, 19 nt, Artificial Sequence
  Description of Artificial Sequence: Synthetic oligonucleotide
cguguaguggaggcuacaa

SEQ ID NO: 1695149 - RNA, 19 nt, Artificial Sequence
  Description of Artificial Sequence: Synthetic oligonucleotide
gccccacaaagaaccagua

SEQ ID NO: 1695150 - RNA, 19 nt, Artificial Sequence
  Description of Artificial Sequence: Synthetic oligonucleotide
cacucgccaagauguccuu

SEQ ID NO: 1695151 - RNA, 19 nt, Artificial Sequence
  Description of Artificial Sequence: Synthetic oligonucleotide
gcacuggcgugaaccgcuc

SEQ ID NO: 1695152 - RNA, 19 nt, Artificial Sequence
  Description of Artificial Sequence: Synthetic oligonucleotide
ccggucugcaaaggucaca

SEQ ID NO: 1695153 - RNA, 19 nt, Artificial Sequence
  Description of Artificial Sequence: Synthetic oligonucleotide
ccuuguuguuugggcaucu

SEQ ID NO: 1695154 - RNA, 19 nt, Artificial Sequence
  Description of Artificial Sequence: Synthetic oligonucleotide
ggggcacggccaccaggaa

SEQ ID NO: 1695155 - RNA, 19 nt, Artificial Sequence
  Description of Artificial Sequence: Synthetic oligonucleotide
caaugccgaugagggaguu

SEQ ID NO: 1695156 - RNA, 19 nt, Artificial Sequence
  Description of Artificial Sequence: Synthetic oligonucleotide
ccguguaguggaggcuaca

SEQ ID NO: 1695157 - RNA, 19 nt, Artificial Sequence
  Description of Artificial Sequence: Synthetic oligonucleotide
cguuggucaagagguagau

SEQ ID NO: 1695158 - RNA, 19 nt, Artificial Sequence
  Description of Artificial Sequence: Synthetic oligonucleotide
ccuuuaugucuagcacacu

SEQ ID NO: 1695159 - RNA, 19 nt, Artificial Sequence
  Description of Artificial Sequence: Synthetic oligonucleotide
gaggccggucagguuccuu

SEQ ID NO: 1695160 - RNA, 19 nt, Artificial Sequence
  Description of Artificial Sequence: Synthetic oligonucleotide
ggccaccgggcuggcccug

SEQ ID NO: 1695161 - RNA, 19 nt, Artificial Sequence
  Description of Artificial Sequence: Synthetic oligonucleotide
aaguaagccaaauuggugg

SEQ ID NO: 1695162 - RNA, 19 nt, Artificial Sequence
  Description of Artificial Sequence: Synthetic oligonucleotide
acaucauagauccauacgc

SEQ ID NO: 1695163 - RNA, 19 nt, Artificial Sequence
  Description of Artificial Sequence: Synthetic oligonucleotide
ugagaaguaagccaaauug

SEQ ID NO: 1695164 - RNA, 19 nt, Artificial Sequence
  Description of Artificial Sequence: Synthetic oligonucleotide
uaaugcacgucccugaugg

SEQ ID NO: 1695165 - RNA, 19 nt, Artificial Sequence
  Description of Artificial Sequence: Synthetic oligonucleotide
uguccaacaucauagaucc

SEQ ID NO: 1695166 - RNA, 19 nt, Artificial Sequence
  Description of Artificial Sequence: Synthetic oligonucleotide
aacaucgucacucacaaau

SEQ ID NO: 1695167 - RNA, 19 nt, Artificial Sequence
  Description of Artificial Sequence: Synthetic oligonucleotide
gauuaauuccacuucacac

SEQ ID NO: 1695168 - RNA, 19 nt, Artificial Sequence
  Description of Artificial Sequence: Synthetic oligonucleotide
gaacacacucgcuugaugg

SEQ ID NO: 1695169 - RNA, 19 nt, Artificial Sequence
  Description of Artificial Sequence: Synthetic oligonucleotide
aaaccucuaccauuagccc

SEQ ID NO: 1695170 - RNA, 19 nt, Artificial Sequence
  Description of Artificial Sequence: Synthetic oligonucleotide
auuagccccaagcugauac

SEQ ID NO: 1695171 - RNA, 19 nt, Artificial Sequence
  Description of Artificial Sequence: Synthetic oligonucleotide
ugagguacguaaaagcugc

SEQ ID NO: 1695172 - RNA, 19 nt, Artificial Sequence
  Description of Artificial Sequence: Synthetic oligonucleotide
gagaaguaagccaaauugg

SEQ ID NO: 1695173 - RNA, 19 nt, Artificial Sequence
  Description of Artificial Sequence: Synthetic oligonucleotide
agcugauacgcugugaccc

SEQ ID NO: 1695174 - RNA, 19 nt, Artificial Sequence
  Description of Artificial Sequence: Synthetic oligonucleotide
uucuugucaggacaggugc

SEQ ID NO: 1695175 - RNA, 19 nt, Artificial Sequence
  Description of Artificial Sequence: Synthetic oligonucleotide
uccguuugucguaagaggc

SEQ ID NO: 1695176 - RNA, 19 nt, Artificial Sequence
  Description of Artificial Sequence: Synthetic oligonucleotide
aauacucacugguacaaaa

SEQ ID NO: 1695177 - RNA, 19 nt, Artificial Sequence
  Description of Artificial Sequence: Synthetic oligonucleotide
gaagauuaauuccacuuca

SEQ ID NO: 1695178 - RNA, 19 nt, Artificial Sequence
  Description of Artificial Sequence: Synthetic oligonucleotide
cagguguccaacaucauag

SEQ ID NO: 1695179 - RNA, 19 nt, Artificial Sequence
  Description of Artificial Sequence: Synthetic oligonucleotide
aagcugauacgcugugacc

SEQ ID NO: 1695180 - RNA, 19 nt, Artificial Sequence
  Description of Artificial Sequence: Synthetic oligonucleotide
acucacaaaugccagcccg

SEQ ID NO: 1695181 - RNA, 19 nt, Artificial Sequence
  Description of Artificial Sequence: Synthetic oligonucleotide
aguaagccaaauugguggg

SEQ ID NO: 1695182 - RNA, 19 nt, Artificial Sequence
  Description of Artificial Sequence: Synthetic oligonucleotide
guacguaaaagcugcauug

SEQ ID NO: 1695183 - RNA, 19 nt, Artificial Sequence
  Description of Artificial Sequence: Synthetic oligonucleotide
aaugccagcccguccacuc

SEQ ID NO: 1695184 - RNA, 19 nt, Artificial Sequence
  Description of Artificial Sequence: Synthetic oligonucleotide
acguaaaagcugcauuggc

SEQ ID NO: 1695185 - RNA, 19 nt, Artificial Sequence
  Description of Artificial Sequence: Synthetic oligonucleotide
cucgcugagagacucaggg

SEQ ID NO: 1695186 - RNA, 19 nt, Artificial Sequence
  Description of Artificial Sequence: Synthetic oligonucleotide
ugugcaagcuagcaacucc

SEQ ID NO: 1695187 - RNA, 19 nt, Artificial Sequence
  Description of Artificial Sequence: Synthetic oligonucleotide
agugggacauuaucuggcc

SEQ ID NO: 1695188 - RNA, 19 nt, Artificial Sequence
  Description of Artificial Sequence: Synthetic oligonucleotide
guagauaacgcccugucca

SEQ ID NO: 1695189 - RNA, 19 nt, Artificial Sequence
  Description of Artificial Sequence: Synthetic oligonucleotide
caucuuggagucuucagag

SEQ ID NO: 1695190 - RNA, 19 nt, Artificial Sequence
  Description of Artificial Sequence: Synthetic oligonucleotide
uugagcaugaguagcuggc

SEQ ID NO: 1695191 - RNA, 19 nt, Artificial Sequence
  Description of Artificial Sequence: Synthetic oligonucleotide
gaggaugauccguuugucg

SEQ ID NO: 1695192 - RNA, 19 nt, Artificial Sequence
  Description of Artificial Sequence: Synthetic oligonucleotide
guaaaagcugcauuggcca

SEQ ID NO: 1695193 - RNA, 19 nt, Artificial Sequence
  Description of Artificial Sequence: Synthetic oligonucleotide
ugcugagugagaaguaagc

SEQ ID NO: 1695194 - RNA, 19 nt, Artificial Sequence
  Description of Artificial Sequence: Synthetic oligonucleotide
ugaguagcuggcuagccug

SEQ ID NO: 1695195 - RNA, 19 nt, Artificial Sequence
  Description of Artificial Sequence: Synthetic oligonucleotide
uccacagguagauaacgcc

SEQ ID NO: 1695196 - RNA, 19 nt, Artificial Sequence
  Description of Artificial Sequence: Synthetic oligonucleotide
ucgucacucacaaaugcca

SEQ ID NO: 1695197 - RNA, 19 nt, Artificial Sequence
  Description of Artificial Sequence: Synthetic oligonucleotide
auccguuugucguaagagg

SEQ ID NO: 1695198 - RNA, 19 nt, Artificial Sequence
  Description of Artificial Sequence: Synthetic oligonucleotide
auggacacgauguuggagu

SEQ ID NO: 1695199 - RNA, 19 nt, Artificial Sequence
  Description of Artificial Sequence: Synthetic oligonucleotide
guugaccuuacguagcuug

SEQ ID NO: 1695200 - RNA, 19 nt, Artificial Sequence
  Description of Artificial Sequence: Synthetic oligonucleotide
gauggagggaggucgagug

SEQ ID NO: 1695201 - RNA, 19 nt, Artificial Sequence
  Description of Artificial Sequence: Synthetic oligonucleotide
uugaccuuacguagcuugg

SEQ ID NO: 1695202 - RNA, 19 nt, Artificial Sequence
  Description of Artificial Sequence: Synthetic oligonucleotide
uacguaaaagcugcauugg

SEQ ID NO: 1695203 - RNA, 19 nt, Artificial Sequence
  Description of Artificial Sequence: Synthetic oligonucleotide
agagcagugagguacguaa

SEQ ID NO: 1695204 - RNA, 19 nt, Artificial Sequence
  Description of Artificial Sequence: Synthetic oligonucleotide
gaagaggugggucucggug

SEQ ID NO: 1695205 - RNA, 19 nt, Artificial Sequence
  Description of Artificial Sequence: Synthetic oligonucleotide
gacauuaucuggccgcuug

SEQ ID NO: 1695206 - RNA, 19 nt, Artificial Sequence
  Description of Artificial Sequence: Synthetic oligonucleotide
agcccguccacucucugcc

SEQ ID NO: 1695207 - RNA, 19 nt, Artificial Sequence
  Description of Artificial Sequence: Synthetic oligonucleotide
guccacucccuuuagaggc

SEQ ID NO: 1695208 - RNA, 19 nt, Artificial Sequence
  Description of Artificial Sequence: Synthetic oligonucleotide
ucgagugggacauuaucug

SEQ ID NO: 1695209 - RNA, 19 nt, Artificial Sequence
  Description of Artificial Sequence: Synthetic oligonucleotide
gauccguuugucguaagag

SEQ ID NO: 1695210 - RNA, 19 nt, Artificial Sequence
  Description of Artificial Sequence: Synthetic oligonucleotide
agucagucagagcagugag

SEQ ID NO: 1695211 - RNA, 19 nt, Artificial Sequence
  Description of Artificial Sequence: Synthetic oligonucleotide
aggaugauccguuugucgu

SEQ ID NO: 1695212 - RNA, 19 nt, Artificial Sequence
  Description of Artificial Sequence: Synthetic oligonucleotide
acaacaucgucacucacaa

SEQ ID NO: 1695213 - RNA, 19 nt, Artificial Sequence
  Description of Artificial Sequence: Synthetic oligonucleotide
acaucuuggagucuucaga

SEQ ID NO: 1695214 - RNA, 19 nt, Artificial Sequence
  Description of Artificial Sequence: Synthetic oligonucleotide
gaaguaagccaaauuggug

SEQ ID NO: 1695215 - RNA, 19 nt, Artificial Sequence
  Description of Artificial Sequence: Synthetic oligonucleotide
ugcaguugagcaugaguag

SEQ ID NO: 1695216 - RNA, 19 nt, Artificial Sequence
  Description of Artificial Sequence: Synthetic oligonucleotide
ucaggacaggugcugagug

SEQ ID NO: 1695217 - RNA, 19 nt, Artificial Sequence
  Description of Artificial Sequence: Synthetic oligonucleotide
aaauuggugggugaccacu

SEQ ID NO: 1695218 - RNA, 19 nt, Artificial Sequence
  Description of Artificial Sequence: Synthetic oligonucleotide
uuugucguaagaggcagug

SEQ ID NO: 1695219 - RNA, 19 nt, Artificial Sequence
  Description of Artificial Sequence: Synthetic oligonucleotide
agccgcacaucccagcagc

SEQ ID NO: 1695220 - RNA, 19 nt, Artificial Sequence
  Description of Artificial Sequence: Synthetic oligonucleotide
guguuuaccauggucuugg

SEQ ID NO: 1695221 - RNA, 19 nt, Artificial Sequence
  Description of Artificial Sequence: Synthetic oligonucleotide
agcugggaggaacacacuc

SEQ ID NO: 1695222 - RNA, 19 nt, Artificial Sequence
  Description of Artificial Sequence: Synthetic oligonucleotide
ugguauucaugguugggca

SEQ ID NO: 1695223 - RNA, 19 nt, Artificial Sequence
  Description of Artificial Sequence: Synthetic oligonucleotide
gaggccaccgcucugcacc

SEQ ID NO: 1695224 - RNA, 19 nt, Artificial Sequence
  Description of Artificial Sequence: Synthetic oligonucleotide
uccaacaucauagauccau

SEQ ID NO: 1695225 - RNA, 19 nt, Artificial Sequence
  Description of Artificial Sequence: Synthetic oligonucleotide
acaaccguguuuaccaugg

SEQ ID NO: 1695226 - RNA, 19 nt, Artificial Sequence
  Description of Artificial Sequence: Synthetic oligonucleotide
ugucacgaagucagucugg

SEQ ID NO: 1695227 - RNA, 19 nt, Artificial Sequence
  Description of Artificial Sequence: Synthetic oligonucleotide
agguagauaacgcccuguc

SEQ ID NO: 1695228 - RNA, 19 nt, Artificial Sequence
  Description of Artificial Sequence: Synthetic oligonucleotide
uuagaggccacaacaucgu

SEQ ID NO: 1695229 - RNA, 19 nt, Artificial Sequence
  Description of Artificial Sequence: Synthetic oligonucleotide
ucccguugaccuuacguag

SEQ ID NO: 1695230 - RNA, 19 nt, Artificial Sequence
  Description of Artificial Sequence: Synthetic oligonucleotide
caagcugauacgcugugac

SEQ ID NO: 1695231 - RNA, 19 nt, Artificial Sequence
  Description of Artificial Sequence: Synthetic oligonucleotide
uuuagcagguguccaacau

SEQ ID NO: 1695232 - RNA, 19 nt, Artificial Sequence
  Description of Artificial Sequence: Synthetic oligonucleotide
gacacgauguuggagucag

SEQ ID NO: 1695233 - RNA, 19 nt, Artificial Sequence
  Description of Artificial Sequence: Synthetic oligonucleotide
agaaguaagccaaauuggu

SEQ ID NO: 1695234 - RNA, 19 nt, Artificial Sequence
  Description of Artificial Sequence: Synthetic oligonucleotide
ugcacgucccugauggcag

SEQ ID NO: 1695235 - RNA, 19 nt, Artificial Sequence
  Description of Artificial Sequence: Synthetic oligonucleotide
uuagccccaagcugauacg

SEQ ID NO: 1695236 - RNA, 19 nt, Artificial Sequence
  Description of Artificial Sequence: Synthetic oligonucleotide
aagguucuugucaggacag

SEQ ID NO: 1695237 - RNA, 19 nt, Artificial Sequence
  Description of Artificial Sequence: Synthetic oligonucleotide
uaagccaaauuggugggug

SEQ ID NO: 1695238 - RNA, 19 nt, Artificial Sequence
  Description of Artificial Sequence: Synthetic oligonucleotide
uuagcagguguccaacauc

SEQ ID NO: 1695239 - RNA, 19 nt, Artificial Sequence
  Description of Artificial Sequence: Synthetic oligonucleotide
auaacgcccuguccacucc

SEQ ID NO: 1695240 - RNA, 19 nt, Artificial Sequence
  Description of Artificial Sequence: Synthetic oligonucleotide
gcagaugucacgaagucag

SEQ ID NO: 1695241 - RNA, 19 nt, Artificial Sequence
  Description of Artificial Sequence: Synthetic oligonucleotide
aucugcacccgccacuggg

SEQ ID NO: 1695242 - RNA, 19 nt, Artificial Sequence
  Description of Artificial Sequence: Synthetic oligonucleotide
cuggucuagccgcacaucc

SEQ ID NO: 1695243 - RNA, 19 nt, Artificial Sequence
  Description of Artificial Sequence: Synthetic oligonucleotide
cuuucguaugucagcuucc

SEQ ID NO: 1695244 - RNA, 19 nt, Artificial Sequence
  Description of Artificial Sequence: Synthetic oligonucleotide
agaugucacgaagucaguc

SEQ ID NO: 1695245 - RNA, 19 nt, Artificial Sequence
  Description of Artificial Sequence: Synthetic oligonucleotide
cacccaaugucccagagga

SEQ ID NO: 1695246 - RNA, 19 nt, Artificial Sequence
  Description of Artificial Sequence: Synthetic oligonucleotide
auacccugccugugcaagc

SEQ ID NO: 1695247 - RNA, 19 nt, Artificial Sequence
  Description of Artificial Sequence: Synthetic oligonucleotide
accguguuuaccauggucu

SEQ ID NO: 1695248 - RNA, 19 nt, Artificial Sequence
  Description of Artificial Sequence: Synthetic oligonucleotide
ugauccguuugucguaaga

SEQ ID NO: 1695249 - RNA, 19 nt, Artificial Sequence
  Description of Artificial Sequence: Synthetic oligonucleotide
gaccuuacguagcuugggc

SEQ ID NO: 1695250 - RNA, 19 nt, Artificial Sequence
  Description of Artificial Sequence: Synthetic oligonucleotide
ugucccagaggaugauccg

SEQ ID NO: 1695251 - RNA, 19 nt, Artificial Sequence
  Description of Artificial Sequence: Synthetic oligonucleotide
aacucgcugagagacucag

SEQ ID NO: 1695252 - RNA, 19 nt, Artificial Sequence
  Description of Artificial Sequence: Synthetic oligonucleotide
gauacccugccugugcaag

SEQ ID NO: 1695253 - RNA, 19 nt, Artificial Sequence
  Description of Artificial Sequence: Synthetic oligonucleotide
ucccagugagcugugaccc

SEQ ID NO: 1695254 - RNA, 19 nt, Artificial Sequence
  Description of Artificial Sequence: Synthetic oligonucleotide
cuuggucacugguuggccc

SEQ ID NO: 1695255 - RNA, 19 nt, Artificial Sequence
  Description of Artificial Sequence: Synthetic oligonucleotide
cugggaggaacacacucgc

SEQ ID NO: 1695256 - RNA, 19 nt, Artificial Sequence
  Description of Artificial Sequence: Synthetic oligonucleotide
ucccugauggcagauguca

SEQ ID NO: 1695257 - RNA, 19 nt, Artificial Sequence
  Description of Artificial Sequence: Synthetic oligonucleotide
caugguugggcacccaaug

SEQ ID NO: 1695258 - RNA, 19 nt, Artificial Sequence
  Description of Artificial Sequence: Synthetic oligonucleotide
gauaacgcccuguccacuc

SEQ ID NO: 1695259 - RNA, 19 nt, Artificial Sequence
  Description of Artificial Sequence: Synthetic oligonucleotide
guugcugccaguggaggcg

SEQ ID NO: 1695260 - RNA, 19 nt, Artificial Sequence
  Description of Artificial Sequence: Synthetic oligonucleotide
uucccguugaccuuacgua

SEQ ID NO: 1695261 - RNA, 19 nt, Artificial Sequence
  Description of Artificial Sequence: Synthetic oligonucleotide
acacucgcuugauggaggg

SEQ ID NO: 1695262 - RNA, 19 nt, Artificial Sequence
  Description of Artificial Sequence: Synthetic oligonucleotide
gaugucacgaagucagucu

SEQ ID NO: 1695263 - RNA, 19 nt, Artificial Sequence
  Description of Artificial Sequence: Synthetic oligonucleotide
ugaccuuacguagcuuggg

SEQ ID NO: 1695264 - RNA, 19 nt, Artificial Sequence
  Description of Artificial Sequence: Synthetic oligonucleotide
ggugaacucgcugagagac

SEQ ID NO: 1695265 - RNA, 19 nt, Artificial Sequence
  Description of Artificial Sequence: Synthetic oligonucleotide
uagauaacgcccuguccac

SEQ ID NO: 1695266 - RNA, 19 nt, Artificial Sequence
  Description of Artificial Sequence: Synthetic oligonucleotide
ugguugggcacccaauguc

SEQ ID NO: 1695267 - RNA, 19 nt, Artificial Sequence
  Description of Artificial Sequence: Synthetic oligonucleotide
aagccaaauugguggguga

SEQ ID NO: 1695268 - RNA, 19 nt, Artificial Sequence
  Description of Artificial Sequence: Synthetic oligonucleotide
cugcaguugagcaugagua

SEQ ID NO: 1695269 - RNA, 19 nt, Artificial Sequence
  Description of Artificial Sequence: Synthetic oligonucleotide
ugaacucgcugagagacuc

SEQ ID NO: 1695270 - RNA, 19 nt, Artificial Sequence
  Description of Artificial Sequence: Synthetic oligonucleotide
uccuacucuacaguagaga

SEQ ID NO: 1695271 - RNA, 19 nt, Artificial Sequence
  Description of Artificial Sequence: Synthetic oligonucleotide
ucugcccugacaucuugga

SEQ ID NO: 1695272 - RNA, 19 nt, Artificial Sequence
  Description of Artificial Sequence: Synthetic oligonucleotide
aauuggugggugaccacug

SEQ ID NO: 1695273 - RNA, 19 nt, Artificial Sequence
  Description of Artificial Sequence: Synthetic oligonucleotide
acugguauucaugguuggg

SEQ ID NO: 1695274 - RNA, 19 nt, Artificial Sequence
  Description of Artificial Sequence: Synthetic oligonucleotide
uucacacacccuuugcuuu

SEQ ID NO: 1695275 - RNA, 19 nt, Artificial Sequence
  Description of Artificial Sequence: Synthetic oligonucleotide
auaaugcacgucccugaug

SEQ ID NO: 1695276 - RNA, 19 nt, Artificial Sequence
  Description of Artificial Sequence: Synthetic oligonucleotide
uuaccauggucuuggucac

SEQ ID NO: 1695277 - RNA, 19 nt, Artificial Sequence
  Description of Artificial Sequence: Synthetic oligonucleotide
gcuugauggagggaggucg

SEQ ID NO: 1695278 - RNA, 19 nt, Artificial Sequence
  Description of Artificial Sequence: Synthetic oligonucleotide
accacacagcacaagguuc

SEQ ID NO: 1695279 - RNA, 19 nt, Artificial Sequence
  Description of Artificial Sequence: Synthetic oligonucleotide
accuuacguagcuugggca

SEQ ID NO: 1695280 - RNA, 19 nt, Artificial Sequence
  Description of Artificial Sequence: Synthetic oligonucleotide
uaauuccacuucacacacc

SEQ ID NO: 1695281 - RNA, 19 nt, Artificial Sequence
  Description of Artificial Sequence: Synthetic oligonucleotide
gugagguacguaaaagcug

SEQ ID NO: 1695282 - RNA, 19 nt, Artificial Sequence
  Description of Artificial Sequence: Synthetic oligonucleotide
ucacugguuggcccugugc

SEQ ID NO: 1695283 - RNA, 19 nt, Artificial Sequence
  Description of Artificial Sequence: Synthetic oligonucleotide
gauccauacgcugcccucc

SEQ ID NO: 1695284 - RNA, 19 nt, Artificial Sequence
  Description of Artificial Sequence: Synthetic oligonucleotide
gacagagcugcaguugagc

SEQ ID NO: 1695285 - RNA, 19 nt, Artificial Sequence
  Description of Artificial Sequence: Synthetic oligonucleotide
ucuagccgcacaucccagc

SEQ ID NO: 1695286 - RNA, 19 nt, Artificial Sequence
  Description of Artificial Sequence: Synthetic oligonucleotide
agccaaauuggugggugac

SEQ ID NO: 1695287 - RNA, 19 nt, Artificial Sequence
  Description of Artificial Sequence: Synthetic oligonucleotide
cuuacguagcuugggcagg

SEQ ID NO: 1695288 - RNA, 19 nt, Artificial Sequence
  Description of Artificial Sequence: Synthetic oligonucleotide
gucacucacaaaugccagc

SEQ ID NO: 1695289 - RNA, 19 nt, Artificial Sequence
  Description of Artificial Sequence: Synthetic oligonucleotide
cguaaaagcugcauuggcc

SEQ ID NO: 1695290 - RNA, 19 nt, Artificial Sequence
  Description of Artificial Sequence: Synthetic oligonucleotide
uuucguaugucagcuuccu

SEQ ID NO: 1695291 - RNA, 19 nt, Artificial Sequence
  Description of Artificial Sequence: Synthetic oligonucleotide
uucguaugucagcuuccug

SEQ ID NO: 1695292 - RNA, 19 nt, Artificial Sequence
  Description of Artificial Sequence: Synthetic oligonucleotide
acucagggccauaaugcac

SEQ ID NO: 1695293 - RNA, 19 nt, Artificial Sequence
  Description of Artificial Sequence: Synthetic oligonucleotide
uggcagaugucacgaaguc

SEQ ID NO: 1695294 - RNA, 19 nt, Artificial Sequence
  Description of Artificial Sequence: Synthetic oligonucleotide
uccacucccuuuagaggcc

SEQ ID NO: 1695295 - RNA, 19 nt, Artificial Sequence
  Description of Artificial Sequence: Synthetic oligonucleotide
ucccgauccagguucucca

SEQ ID NO: 1695296 - RNA, 19 nt, Artificial Sequence
  Description of Artificial Sequence: Synthetic oligonucleotide
augguugggcacccaaugu

SEQ ID NO: 1695297 - RNA, 19 nt, Artificial Sequence
  Description of Artificial Sequence: Synthetic oligonucleotide
ccacagguagauaacgccc

SEQ ID NO: 1695298 - RNA, 19 nt, Artificial Sequence
  Description of Artificial Sequence: Synthetic oligonucleotide
cacgauguuggagucaguc

SEQ ID NO: 1695299 - RNA, 19 nt, Artificial Sequence
  Description of Artificial Sequence: Synthetic oligonucleotide
ugauacgcugugacccuga

SEQ ID NO: 1695300 - RNA, 19 nt, Artificial Sequence
  Description of Artificial Sequence: Synthetic oligonucleotide
agugaagaggugggucucg

SEQ ID NO: 1695301 - RNA, 19 nt, Artificial Sequence
  Description of Artificial Sequence: Synthetic oligonucleotide
ugcuuuagcagguguccaa

SEQ ID NO: 1695302 - RNA, 19 nt, Artificial Sequence
  Description of Artificial Sequence: Synthetic oligonucleotide
gccacaaccguguuuacca

SEQ ID NO: 1695303 - RNA, 19 nt, Artificial Sequence
  Description of Artificial Sequence: Synthetic oligonucleotide
acacacucgcuugauggag

SEQ ID NO: 1695304 - RNA, 19 nt, Artificial Sequence
  Description of Artificial Sequence: Synthetic oligonucleotide
ugcagccgggccaggauga

SEQ ID NO: 1695305 - RNA, 19 nt, Artificial Sequence
  Description of Artificial Sequence: Synthetic oligonucleotide
gccugugcaagcuagcaac

SEQ ID NO: 1695306 - RNA, 19 nt, Artificial Sequence
  Description of Artificial Sequence: Synthetic oligonucleotide
cacaaaugccagcccgucc

SEQ ID NO: 1695307 - RNA, 19 nt, Artificial Sequence
  Description of Artificial Sequence: Synthetic oligonucleotide
ucaugguugggcacccaau

SEQ ID NO: 1695308 - RNA, 19 nt, Artificial Sequence
  Description of Artificial Sequence: Synthetic oligonucleotide
ucgcugagagacucagggc

SEQ ID NO: 1695309 - RNA, 19 nt, Artificial Sequence
  Description of Artificial Sequence: Synthetic oligonucleotide
uaacgcccuguccacuccc

SEQ ID NO: 1695310 - RNA, 19 nt, Artificial Sequence
  Description of Artificial Sequence: Synthetic oligonucleotide
ucugcacccgccacugggu

SEQ ID NO: 1695311 - RNA, 19 nt, Artificial Sequence
  Description of Artificial Sequence: Synthetic oligonucleotide
ccuuacguagcuugggcag

SEQ ID NO: 1695312 - RNA, 19 nt, Artificial Sequence
  Description of Artificial Sequence: Synthetic oligonucleotide
ucuuggucacugguuggcc

SEQ ID NO: 1695313 - RNA, 19 nt, Artificial Sequence
  Description of Artificial Sequence: Synthetic oligonucleotide
ucccuuuagaggccacaac

SEQ ID NO: 1695314 - RNA, 19 nt, Artificial Sequence
  Description of Artificial Sequence: Synthetic oligonucleotide
caugaguagcuggcuagcc

SEQ ID NO: 1695315 - RNA, 19 nt, Artificial Sequence
  Description of Artificial Sequence: Synthetic oligonucleotide
uagccccaagcugauacgc

SEQ ID NO: 1695316 - RNA, 19 nt, Artificial Sequence
  Description of Artificial Sequence: Synthetic oligonucleotide
gucagagcagugagguacg

SEQ ID NO: 1695317 - RNA, 19 nt, Artificial Sequence
  Description of Artificial Sequence: Synthetic oligonucleotide
guucacgguggccaugaac

SEQ ID NO: 1695318 - RNA, 19 nt, Artificial Sequence
  Description of Artificial Sequence: Synthetic oligonucleotide
accgcucugcaccugggcu

SEQ ID NO: 1695319 - RNA, 19 nt, Artificial Sequence
  Description of Artificial Sequence: Synthetic oligonucleotide
gaggaacacacucgcuuga

SEQ ID NO: 1695320 - RNA, 19 nt, Artificial Sequence
  Description of Artificial Sequence: Synthetic oligonucleotide
acaucgucacucacaaaug

SEQ ID NO: 1695321 - RNA, 19 nt, Artificial Sequence
  Description of Artificial Sequence: Synthetic oligonucleotide
aguugagcaugaguagcug

SEQ ID NO: 1695322 - RNA, 19 nt, Artificial Sequence
  Description of Artificial Sequence: Synthetic oligonucleotide
auggcagaugucacgaagu

SEQ ID NO: 1695323 - RNA, 19 nt, Artificial Sequence
  Description of Artificial Sequence: Synthetic oligonucleotide
cacugggugaacucgcuga

SEQ ID NO: 1695324 - RNA, 19 nt, Artificial Sequence
  Description of Artificial Sequence: Synthetic oligonucleotide
ugccugugcaagcuagcaa

SEQ ID NO: 1695325 - RNA, 19 nt, Artificial Sequence
  Description of Artificial Sequence: Synthetic oligonucleotide
acgcugugacccugauacc

SEQ ID NO: 1695326 - RNA, 19 nt, Artificial Sequence
  Description of Artificial Sequence: Synthetic oligonucleotide
ugggcacccaaugucccag

SEQ ID NO: 1695327 - RNA, 19 nt, Artificial Sequence
  Description of Artificial Sequence: Synthetic oligonucleotide
gucguaagaggcagugaag

SEQ ID NO: 1695328 - RNA, 19 nt, Artificial Sequence
  Description of Artificial Sequence: Synthetic oligonucleotide
caaauuggugggugaccac

SEQ ID NO: 1695329 - RNA, 19 nt, Artificial Sequence
  Description of Artificial Sequence: Synthetic oligonucleotide
auacgcugcccuccucauc

SEQ ID NO: 1695330 - RNA, 19 nt, Artificial Sequence
  Description of Artificial Sequence: Synthetic oligonucleotide
caucauagauccauacgcu

SEQ ID NO: 1695331 - RNA, 19 nt, Artificial Sequence
  Description of Artificial Sequence: Synthetic oligonucleotide
uuacguagcuugggcagga

SEQ ID NO: 1695332 - RNA, 19 nt, Artificial Sequence
  Description of Artificial Sequence: Synthetic oligonucleotide
accucuaccauuagcccca

SEQ ID NO: 1695333 - RNA, 19 nt, Artificial Sequence
  Description of Artificial Sequence: Synthetic oligonucleotide
ugaccacugcagccgggcc

SEQ ID NO: 1695334 - RNA, 19 nt, Artificial Sequence
  Description of Artificial Sequence: Synthetic oligonucleotide
uagccgcacaucccagcag

SEQ ID NO: 1695335 - RNA, 19 nt, Artificial Sequence
  Description of Artificial Sequence: Synthetic oligonucleotide
gugcugagugagaaguaag

SEQ ID NO: 1695336 - RNA, 19 nt, Artificial Sequence
  Description of Artificial Sequence: Synthetic oligonucleotide
ggaagucauccggacaggg

SEQ ID NO: 1695337 - RNA, 19 nt, Artificial Sequence
  Description of Artificial Sequence: Synthetic oligonucleotide
uggagucagucagagcagu

SEQ ID NO: 1695338 - RNA, 19 nt, Artificial Sequence
  Description of Artificial Sequence: Synthetic oligonucleotide
cacgaagucagucuggaau

SEQ ID NO: 1695339 - RNA, 19 nt, Artificial Sequence
  Description of Artificial Sequence: Synthetic oligonucleotide
gaugauccguuugucguaa

SEQ ID NO: 1695340 - RNA, 19 nt, Artificial Sequence
  Description of Artificial Sequence: Synthetic oligonucleotide
gcaguugagcaugaguagc

SEQ ID NO: 1695341 - RNA, 19 nt, Artificial Sequence
  Description of Artificial Sequence: Synthetic oligonucleotide
ugaagaggugggucucggu

SEQ ID NO: 1695342 - RNA, 19 nt, Artificial Sequence
  Description of Artificial Sequence: Synthetic oligonucleotide
gcagugagguacguaaaag

SEQ ID NO: 1695343 - RNA, 19 nt, Artificial Sequence
  Description of Artificial Sequence: Synthetic oligonucleotide
ucccagaggaugauccguu

SEQ ID NO: 1695344 - RNA, 19 nt, Artificial Sequence
  Description of Artificial Sequence: Synthetic oligonucleotide
gcugggaggaacacacucg

SEQ ID NO: 1695345 - RNA, 19 nt, Artificial Sequence
  Description of Artificial Sequence: Synthetic oligonucleotide
cacucacaaaugccagccc

SEQ ID NO: 1695346 - RNA, 19 nt, Artificial Sequence
  Description of Artificial Sequence: Synthetic oligonucleotide
ccuuucguaugucagcuuc

SEQ ID NO: 1695347 - RNA, 19 nt, Artificial Sequence
  Description of Artificial Sequence: Synthetic oligonucleotide
gguugggcacccaaugucc

SEQ ID NO: 1695348 - RNA, 19 nt, Artificial Sequence
  Description of Artificial Sequence: Synthetic oligonucleotide
uugggcacccaauguccca

SEQ ID NO: 1695349 - RNA, 19 nt, Artificial Sequence
  Description of Artificial Sequence: Synthetic oligonucleotide
cugguuggcccugugcuac

SEQ ID NO: 1695350 - RNA, 19 nt, Artificial Sequence
  Description of Artificial Sequence: Synthetic oligonucleotide
cagcuccacagguagauaa

SEQ ID NO: 1695351 - RNA, 19 nt, Artificial Sequence
  Description of Artificial Sequence: Synthetic oligonucleotide
gugaagaggugggucucgg

SEQ ID NO: 1695352 - RNA, 19 nt, Artificial Sequence
  Description of Artificial Sequence: Synthetic oligonucleotide
ugggaggaacacacucgcu

SEQ ID NO: 1695353 - RNA, 19 nt, Artificial Sequence
  Description of Artificial Sequence: Synthetic oligonucleotide
ccuacucuacaguagagaa

SEQ ID NO: 1695354 - RNA, 19 nt, Artificial Sequence
  Description of Artificial Sequence: Synthetic oligonucleotide
gaggcgcaaggggacagag

SEQ ID NO: 1695355 - RNA, 19 nt, Artificial Sequence
  Description of Artificial Sequence: Synthetic oligonucleotide
cuugauggagggaggucga

SEQ ID NO: 1695356 - RNA, 19 nt, Artificial Sequence
  Description of Artificial Sequence: Synthetic oligonucleotide
aaaugccagcccguccacu

SEQ ID NO: 1695357 - RNA, 19 nt, Artificial Sequence
  Description of Artificial Sequence: Synthetic oligonucleotide
guugggcacccaauguccc

SEQ ID NO: 1695358 - RNA, 19 nt, Artificial Sequence
  Description of Artificial Sequence: Synthetic oligonucleotide
ucagggccauaaugcacgu

SEQ ID NO: 1695359 - RNA, 19 nt, Artificial Sequence
  Description of Artificial Sequence: Synthetic oligonucleotide
ggaacacacucgcuugaug

SEQ ID NO: 1695360 - RNA, 19 nt, Artificial Sequence
  Description of Artificial Sequence: Synthetic oligonucleotide
cccuuuagaggccacaaca

SEQ ID NO: 1695361 - RNA, 19 nt, Artificial Sequence
  Description of Artificial Sequence: Synthetic oligonucleotide
uggagucuucagagaagau

SEQ ID NO: 1695362 - RNA, 19 nt, Artificial Sequence
  Description of Artificial Sequence: Synthetic oligonucleotide
ggcgcaaggggacagagcu

SEQ ID NO: 1695363 - RNA, 19 nt, Artificial Sequence
  Description of Artificial Sequence: Synthetic oligonucleotide
gucgagugggacauuaucu

SEQ ID NO: 1695364 - RNA, 19 nt, Artificial Sequence
  Description of Artificial Sequence: Synthetic oligonucleotide
cuagccgcacaucccagca

SEQ ID NO: 1695365 - RNA, 19 nt, Artificial Sequence
  Description of Artificial Sequence: Synthetic oligonucleotide
ggucgagugggacauuauc

SEQ ID NO: 1695366 - RNA, 19 nt, Artificial Sequence
  Description of Artificial Sequence: Synthetic oligonucleotide
cuacaguagagaauuuaau

SEQ ID NO: 1695367 - RNA, 19 nt, Artificial Sequence
  Description of Artificial Sequence: Synthetic oligonucleotide
ugauacccugccugugcaa

SEQ ID NO: 1695368 - RNA, 19 nt, Artificial Sequence
  Description of Artificial Sequence: Synthetic oligonucleotide
ggucuagccgcacauccca

SEQ ID NO: 1695369 - RNA, 19 nt, Artificial Sequence
  Description of Artificial Sequence: Synthetic oligonucleotide
gguucuccaccugugagca

SEQ ID NO: 1695370 - RNA, 19 nt, Artificial Sequence
  Description of Artificial Sequence: Synthetic oligonucleotide
gcacccaaugucccagagg

SEQ ID NO: 1695371 - RNA, 19 nt, Artificial Sequence
  Description of Artificial Sequence: Synthetic oligonucleotide
augauccguuugucguaag

SEQ ID NO: 1695372 - RNA, 19 nt, Artificial Sequence
  Description of Artificial Sequence: Synthetic oligonucleotide
cacagaccggcugucccgg

SEQ ID NO: 1695373 - RNA, 19 nt, Artificial Sequence
  Description of Artificial Sequence: Synthetic oligonucleotide
cgagugggacauuaucugg

SEQ ID NO: 1695374 - RNA, 19 nt, Artificial Sequence
  Description of Artificial Sequence: Synthetic oligonucleotide
uacccugccugugcaagcu

SEQ ID NO: 1695375 - RNA, 19 nt, Artificial Sequence
  Description of Artificial Sequence: Synthetic oligonucleotide
gagcaugaguagcuggcua

SEQ ID NO: 1695376 - RNA, 19 nt, Artificial Sequence
  Description of Artificial Sequence: Synthetic oligonucleotide
ucacgaagucagucuggaa

SEQ ID NO: 1695377 - RNA, 19 nt, Artificial Sequence
  Description of Artificial Sequence: Synthetic oligonucleotide
ucgcuugauggagggaggu

SEQ ID NO: 1695378 - RNA, 19 nt, Artificial Sequence
  Description of Artificial Sequence: Synthetic oligonucleotide
cuucccguugaccuuacgu

SEQ ID NO: 1695379 - RNA, 19 nt, Artificial Sequence
  Description of Artificial Sequence: Synthetic oligonucleotide
agaccggcugucccggccu

SEQ ID NO: 1695380 - RNA, 19 nt, Artificial Sequence
  Description of Artificial Sequence: Synthetic oligonucleotide
aucugaguuggggccugcg

SEQ ID NO: 1695381 - RNA, 19 nt, Artificial Sequence
  Description of Artificial Sequence: Synthetic oligonucleotide
ggcuccuuucguaugucag

SEQ ID NO: 1695382 - RNA, 19 nt, Artificial Sequence
  Description of Artificial Sequence: Synthetic oligonucleotide
uggcccugugcuacuggcu

SEQ ID NO: 1695383 - RNA, 19 nt, Artificial Sequence
  Description of Artificial Sequence: Synthetic oligonucleotide
aggaucugaguuggggccu

SEQ ID NO: 1695384 - RNA, 19 nt, Artificial Sequence
  Description of Artificial Sequence: Synthetic oligonucleotide
ugcacccgccacuggguga

SEQ ID NO: 1695385 - RNA, 19 nt, Artificial Sequence
  Description of Artificial Sequence: Synthetic oligonucleotide
caaaugccagcccguccac

SEQ ID NO: 1695386 - RNA, 19 nt, Artificial Sequence
  Description of Artificial Sequence: Synthetic oligonucleotide
gccauaaugcacgucccug

SEQ ID NO: 1695387 - RNA, 19 nt, Artificial Sequence
  Description of Artificial Sequence: Synthetic oligonucleotide
cacagguagauaacgcccu

SEQ ID NO: 1695388 - RNA, 19 nt, Artificial Sequence
  Description of Artificial Sequence: Synthetic oligonucleotide
aguggaggcggcugcuuua

SEQ ID NO: 1695389 - RNA, 19 nt, Artificial Sequence
  Description of Artificial Sequence: Synthetic oligonucleotide
agauaacgcccuguccacu

SEQ ID NO: 1695390 - RNA, 19 nt, Artificial Sequence
  Description of Artificial Sequence: Synthetic oligonucleotide
cugugacccuguaggucag

SEQ ID NO: 1695391 - RNA, 19 nt, Artificial Sequence
  Description of Artificial Sequence: Synthetic oligonucleotide
aggcgcaaggggacagagc

SEQ ID NO: 1695392 - RNA, 19 nt, Artificial Sequence
  Description of Artificial Sequence: Synthetic oligonucleotide
cagaggaugauccguuugu

SEQ ID NO: 1695393 - RNA, 19 nt, Artificial Sequence
  Description of Artificial Sequence: Synthetic oligonucleotide
gguacguaaaagcugcauu

SEQ ID NO: 1695394 - RNA, 19 nt, Artificial Sequence
  Description of Artificial Sequence: Synthetic oligonucleotide
cacaggcaacacagaccgg

SEQ ID NO: 1695395 - RNA, 19 nt, Artificial Sequence
  Description of Artificial Sequence: Synthetic oligonucleotide
ugucccggccugcccacgu

SEQ ID NO: 1695396 - RNA, 19 nt, Artificial Sequence
  Description of Artificial Sequence: Synthetic oligonucleotide
cugugcaagcuagcaacuc

SEQ ID NO: 1695397 - RNA, 19 nt, Artificial Sequence
  Description of Artificial Sequence: Synthetic oligonucleotide
gccccaagcugauacgcug

SEQ ID NO: 1695398 - RNA, 19 nt, Artificial Sequence
  Description of Artificial Sequence: Synthetic oligonucleotide
cccguugaccuuacguagc

SEQ ID NO: 1695399 - RNA, 19 nt, Artificial Sequence
  Description of Artificial Sequence: Synthetic oligonucleotide
uacguagcuugggcaggag

SEQ ID NO: 1695400 - RNA, 19 nt, Artificial Sequence
  Description of Artificial Sequence: Synthetic oligonucleotide
gugagaaguaagccaaauu

SEQ ID NO: 1695401 - RNA, 19 nt, Artificial Sequence
  Description of Artificial Sequence: Synthetic oligonucleotide
cacugguuggcccugugcu

SEQ ID NO: 1695402 - RNA, 19 nt, Artificial Sequence
  Description of Artificial Sequence: Synthetic oligonucleotide
uggcggcuccuuucguaug

SEQ ID NO: 1695403 - RNA, 19 nt, Artificial Sequence
  Description of Artificial Sequence: Synthetic oligonucleotide
acucccuuuagaggccaca

SEQ ID NO: 1695404 - RNA, 19 nt, Artificial Sequence
  Description of Artificial Sequence: Synthetic oligonucleotide
cugauacgcugugacccug

SEQ ID NO: 1695405 - RNA, 19 nt, Artificial Sequence
  Description of Artificial Sequence: Synthetic oligonucleotide
agccagcuaucaggaaguc

SEQ ID NO: 1695406 - RNA, 19 nt, Artificial Sequence
  Description of Artificial Sequence: Synthetic oligonucleotide
ucagagcagugagguacgu

SEQ ID NO: 1695407 - RNA, 19 nt, Artificial Sequence
  Description of Artificial Sequence: Synthetic oligonucleotide
gcuuuagcagguguccaac

SEQ ID NO: 1695408 - RNA, 19 nt, Artificial Sequence
  Description of Artificial Sequence: Synthetic oligonucleotide
gcccugacaucuuggaguc

SEQ ID NO: 1695409 - RNA, 19 nt, Artificial Sequence
  Description of Artificial Sequence: Synthetic oligonucleotide
gaggucgagugggacauua

SEQ ID NO: 1695410 - RNA, 19 nt, Artificial Sequence
  Description of Artificial Sequence: Synthetic oligonucleotide
ggugcugagugagaaguaa

SEQ ID NO: 1695411 - RNA, 19 nt, Artificial Sequence
  Description of Artificial Sequence: Synthetic oligonucleotide
ccauaaugcacgucccuga

SEQ ID NO: 1695412 - RNA, 19 nt, Artificial Sequence
  Description of Artificial Sequence: Synthetic oligonucleotide
acgcugcccuccucaucac

SEQ ID NO: 1695413 - RNA, 19 nt, Artificial Sequence
  Description of Artificial Sequence: Synthetic oligonucleotide
cgcaaggggacagagcugc

SEQ ID NO: 1695414 - RNA, 19 nt, Artificial Sequence
  Description of Artificial Sequence: Synthetic oligonucleotide
cuacucuacaguagagaau

SEQ ID NO: 1695415 - RNA, 19 nt, Artificial Sequence
  Description of Artificial Sequence: Synthetic oligonucleotide
caccgcucugcaccugggc

SEQ ID NO: 1695416 - RNA, 19 nt, Artificial Sequence
  Description of Artificial Sequence: Synthetic oligonucleotide
aggaacacacucgcuugau

SEQ ID NO: 1695417 - RNA, 19 nt, Artificial Sequence
  Description of Artificial Sequence: Synthetic oligonucleotide
cagugaagaggugggucuc

SEQ ID NO: 1695418 - RNA, 19 nt, Artificial Sequence
  Description of Artificial Sequence: Synthetic oligonucleotide
cguuugucguaagaggcag

SEQ ID NO: 1695419 - RNA, 19 nt, Artificial Sequence
  Description of Artificial Sequence: Synthetic oligonucleotide
gcuagcaacuccuccagau

SEQ ID NO: 1695420 - RNA, 19 nt, Artificial Sequence
  Description of Artificial Sequence: Synthetic oligonucleotide
gucuagccgcacaucccag

SEQ ID NO: 1695421 - RNA, 19 nt, Artificial Sequence
  Description of Artificial Sequence: Synthetic oligonucleotide
cugcacccgccacugggug

SEQ ID NO: 1695422 - RNA, 19 nt, Artificial Sequence
  Description of Artificial Sequence: Synthetic oligonucleotide
gucacugguuggcccugug

SEQ ID NO: 1695423 - RNA, 19 nt, Artificial Sequence
  Description of Artificial Sequence: Synthetic oligonucleotide
aacgcccuguccacucccu

SEQ ID NO: 1695424 - RNA, 19 nt, Artificial Sequence
  Description of Artificial Sequence: Synthetic oligonucleotide
uccauacgcugcccuccuc

SEQ ID NO: 1695425 - RNA, 19 nt, Artificial Sequence
  Description of Artificial Sequence: Synthetic oligonucleotide
aagcugggaggaacacacu

SEQ ID NO: 1695426 - RNA, 19 nt, Artificial Sequence
  Description of Artificial Sequence: Synthetic oligonucleotide
guagcuugggcaggagaaa

SEQ ID NO: 1695427 - RNA, 19 nt, Artificial Sequence
  Description of Artificial Sequence: Synthetic oligonucleotide
gugcaagcuagcaacuccu

SEQ ID NO: 1695428 - RNA, 19 nt, Artificial Sequence
  Description of Artificial Sequence: Synthetic oligonucleotide
ggaugauccguuugucgua

SEQ ID NO: 1695429 - RNA, 19 nt, Artificial Sequence
  Description of Artificial Sequence: Synthetic oligonucleotide
gagguacguaaaagcugca

SEQ ID NO: 1695430 - RNA, 19 nt, Artificial Sequence
  Description of Artificial Sequence: Synthetic oligonucleotide
ggccacaaccguguuuacc

SEQ ID NO: 1695431 - RNA, 19 nt, Artificial Sequence
  Description of Artificial Sequence: Synthetic oligonucleotide
cauaaugcacgucccugau

SEQ ID NO: 1695432 - RNA, 19 nt, Artificial Sequence
  Description of Artificial Sequence: Synthetic oligonucleotide
cugcuuuagcaggugucca

SEQ ID NO: 1695433 - RNA, 19 nt, Artificial Sequence
  Description of Artificial Sequence: Synthetic oligonucleotide
gaacucgcugagagacuca

SEQ ID NO: 1695434 - RNA, 19 nt, Artificial Sequence
  Description of Artificial Sequence: Synthetic oligonucleotide
cugccugugcaagcuagca

SEQ ID NO: 1695435 - RNA, 19 nt, Artificial Sequence
  Description of Artificial Sequence: Synthetic oligonucleotide
cguagcuugggcaggagaa

SEQ ID NO: 1695436 - RNA, 19 nt, Artificial Sequence
  Description of Artificial Sequence: Synthetic oligonucleotide
gucuucagagaagauuaau

SEQ ID NO: 1695437 - RNA, 19 nt, Artificial Sequence
  Description of Artificial Sequence: Synthetic oligonucleotide
ccugcggaguugcugccag

SEQ ID NO: 1695438 - RNA, 19 nt, Artificial Sequence
  Description of Artificial Sequence: Synthetic oligonucleotide
cucccuuuagaggccacaa

SEQ ID NO: 1695439 - RNA, 19 nt, Artificial Sequence
  Description of Artificial Sequence: Synthetic oligonucleotide
caccugggccccaccugag

SEQ ID NO: 1695440 - RNA, 19 nt, Artificial Sequence
  Description of Artificial Sequence: Synthetic oligonucleotide
gccauuucaggaucugagu

SEQ ID NO: 1695441 - RNA, 19 nt, Artificial Sequence
  Description of Artificial Sequence: Synthetic oligonucleotide
ccucacagccagcuaucag

SEQ ID NO: 1695442 - RNA, 19 nt, Artificial Sequence
  Description of Artificial Sequence: Synthetic oligonucleotide
agccccaagcugauacgcu

SEQ ID NO: 1695443 - RNA, 19 nt, Artificial Sequence
  Description of Artificial Sequence: Synthetic oligonucleotide
accggcugucccggccugc

SEQ ID NO: 1695444 - RNA, 19 nt, Artificial Sequence
  Description of Artificial Sequence: Synthetic oligonucleotide
gauacgcugugacccugau

SEQ ID NO: 1695445 - RNA, 19 nt, Artificial Sequence
  Description of Artificial Sequence: Synthetic oligonucleotide
uggccacaaccguguuuac

SEQ ID NO: 1695446 - RNA, 19 nt, Artificial Sequence
  Description of Artificial Sequence: Synthetic oligonucleotide
cucuaccauuagccccaag

SEQ ID NO: 1695447 - RNA, 19 nt, Artificial Sequence
  Description of Artificial Sequence: Synthetic oligonucleotide
gaccggcugucccggccug

SEQ ID NO: 1695448 - RNA, 19 nt, Artificial Sequence
  Description of Artificial Sequence: Synthetic oligonucleotide
acgucccugauggcagaug

SEQ ID NO: 1695449 - RNA, 19 nt, Artificial Sequence
  Description of Artificial Sequence: Synthetic oligonucleotide
gguucuugucaggacaggu

SEQ ID NO: 1695450 - RNA, 19 nt, Artificial Sequence
  Description of Artificial Sequence: Synthetic oligonucleotide
gggccauaaugcacguccc

SEQ ID NO: 1695451 - RNA, 19 nt, Artificial Sequence
  Description of Artificial Sequence: Synthetic oligonucleotide
agaggcgcaaggggacaga

SEQ ID NO: 1695452 - RNA, 19 nt, Artificial Sequence
  Description of Artificial Sequence: Synthetic oligonucleotide
guaagccaaauuggugggu

SEQ ID NO: 1695453 - RNA, 19 nt, Artificial Sequence
  Description of Artificial Sequence: Synthetic oligonucleotide
ccguuugucguaagaggca

SEQ ID NO: 1695454 - RNA, 19 nt, Artificial Sequence
  Description of Artificial Sequence: Synthetic oligonucleotide
ccauacgcugcccuccuca

SEQ ID NO: 1695455 - RNA, 19 nt, Artificial Sequence
  Description of Artificial Sequence: Synthetic oligonucleotide
ccaacaucauagauccaua

SEQ ID NO: 1695456 - RNA, 19 nt, Artificial Sequence
  Description of Artificial Sequence: Synthetic oligonucleotide
gggugaacucgcugagaga

SEQ ID NO: 1695457 - RNA, 19 nt, Artificial Sequence
  Description of Artificial Sequence: Synthetic oligonucleotide
gccgcuuggaggccaccgc

SEQ ID NO: 1695458 - RNA, 19 nt, Artificial Sequence
  Description of Artificial Sequence: Synthetic oligonucleotide
aggguucacgguggccaug

SEQ ID NO: 1695459 - RNA, 19 nt, Artificial Sequence
  Description of Artificial Sequence: Synthetic oligonucleotide
guggcggcuccuuucguau

SEQ ID NO: 1695460 - RNA, 19 nt, Artificial Sequence
  Description of Artificial Sequence: Synthetic oligonucleotide
ugggcuggucuagccgcac

SEQ ID NO: 1695461 - RNA, 19 nt, Artificial Sequence
  Description of Artificial Sequence: Synthetic oligonucleotide
cccaagcugauacgcugug

SEQ ID NO: 1695462 - RNA, 19 nt, Artificial Sequence
  Description of Artificial Sequence: Synthetic oligonucleotide
caggcaacacagaccggcu

SEQ ID NO: 1695463 - RNA, 19 nt, Artificial Sequence
  Description of Artificial Sequence: Synthetic oligonucleotide
gucccagaggaugauccgu

SEQ ID NO: 1695464 - RNA, 19 nt, Artificial Sequence
  Description of Artificial Sequence: Synthetic oligonucleotide
ccacacagcacaagguucu

SEQ ID NO: 1695465 - RNA, 19 nt, Artificial Sequence
  Description of Artificial Sequence: Synthetic oligonucleotide
ccacaacaucgucacucac

SEQ ID NO: 1695466 - RNA, 19 nt, Artificial Sequence
  Description of Artificial Sequence: Synthetic oligonucleotide
ccgccacugggugaacucg

SEQ ID NO: 1695467 - RNA, 19 nt, Artificial Sequence
  Description of Artificial Sequence: Synthetic oligonucleotide
gucccugauggcagauguc

SEQ ID NO: 1695468 - RNA, 19 nt, Artificial Sequence
  Description of Artificial Sequence: Synthetic oligonucleotide
gcugauacgcugugacccu

SEQ ID NO: 1695469 - RNA, 19 nt, Artificial Sequence
  Description of Artificial Sequence: Synthetic oligonucleotide
gugacccuguaggucagcu

SEQ ID NO: 1695470 - RNA, 19 nt, Artificial Sequence
  Description of Artificial Sequence: Synthetic oligonucleotide
caacaucgucacucacaaa

SEQ ID NO: 1695471 - RNA, 19 nt, Artificial Sequence
  Description of Artificial Sequence: Synthetic oligonucleotide
acccgccacugggugaacu

SEQ ID NO: 1695472 - RNA, 19 nt, Artificial Sequence
  Description of Artificial Sequence: Synthetic oligonucleotide
ccacugggugaacucgcug

SEQ ID NO: 1695473 - RNA, 19 nt, Artificial Sequence
  Description of Artificial Sequence: Synthetic oligonucleotide
guuugucguaagaggcagu

SEQ ID NO: 1695474 - RNA, 19 nt, Artificial Sequence
  Description of Artificial Sequence: Synthetic oligonucleotide
gguuggcccugugcuacug

SEQ ID NO: 1695475 - RNA, 19 nt, Artificial Sequence
  Description of Artificial Sequence: Synthetic oligonucleotide
cagaugucacgaagucagu

SEQ ID NO: 1695476 - RNA, 19 nt, Artificial Sequence
  Description of Artificial Sequence: Synthetic oligonucleotide
agccuguggcggcuccuuu

SEQ ID NO: 1695477 - RNA, 19 nt, Artificial Sequence
  Description of Artificial Sequence: Synthetic oligonucleotide
aggucgagugggacauuau

SEQ ID NO: 1695478 - RNA, 19 nt, Artificial Sequence
  Description of Artificial Sequence: Synthetic oligonucleotide
cguguuuaccauggucuug

SEQ ID NO: 1695479 - RNA, 19 nt, Artificial Sequence
  Description of Artificial Sequence: Synthetic oligonucleotide
agcucccgauccagguucu

SEQ ID NO: 1695480 - RNA, 19 nt, Artificial Sequence
  Description of Artificial Sequence: Synthetic oligonucleotide
gccagcuaucaggaaguca

SEQ ID NO: 1695481 - RNA, 19 nt, Artificial Sequence
  Description of Artificial Sequence: Synthetic oligonucleotide
ggacacgauguuggaguca

SEQ ID NO: 1695482 - RNA, 19 nt, Artificial Sequence
  Description of Artificial Sequence: Synthetic oligonucleotide
gcccacgucuggcuccagc

SEQ ID NO: 1695483 - RNA, 19 nt, Artificial Sequence
  Description of Artificial Sequence: Synthetic oligonucleotide
cagucagagcagugaggua

SEQ ID NO: 1695484 - RNA, 19 nt, Artificial Sequence
  Description of Artificial Sequence: Synthetic oligonucleotide
acccugccugugcaagcua

SEQ ID NO: 1695485 - RNA, 19 nt, Artificial Sequence
  Description of Artificial Sequence: Synthetic oligonucleotide
cauacgcugcccuccucau

SEQ ID NO: 1695486 - RNA, 19 nt, Artificial Sequence
  Description of Artificial Sequence: Synthetic oligonucleotide
cggaguugcugccagugga

SEQ ID NO: 1695487 - RNA, 19 nt, Artificial Sequence
  Description of Artificial Sequence: Synthetic oligonucleotide
ggccauaaugcacgucccu

SEQ ID NO: 1695488 - RNA, 19 nt, Artificial Sequence
  Description of Artificial Sequence: Synthetic oligonucleotide
ggaggccaccgcucugcac

SEQ ID NO: 1695489 - RNA, 19 nt, Artificial Sequence
  Description of Artificial Sequence: Synthetic oligonucleotide
ggcggcuccuuucguaugu

SEQ ID NO: 1695490 - RNA, 19 nt, Artificial Sequence
  Description of Artificial Sequence: Synthetic oligonucleotide
cugucccggccugcccacg

SEQ ID NO: 1695491 - RNA, 19 nt, Artificial Sequence
  Description of Artificial Sequence: Synthetic oligonucleotide
ccaccgcucugcaccuggg

SEQ ID NO: 1695492 - RNA, 19 nt, Artificial Sequence
  Description of Artificial Sequence: Synthetic oligonucleotide
cagagcagugagguacgua

SEQ ID NO: 1695493 - RNA, 19 nt, Artificial Sequence
  Description of Artificial Sequence: Synthetic oligonucleotide
caacagggcagaggcgcaa

SEQ ID NO: 1695494 - RNA, 19 nt, Artificial Sequence
  Description of Artificial Sequence: Synthetic oligonucleotide
gggaggucgagugggacau

SEQ ID NO: 1695495 - RNA, 19 nt, Artificial Sequence
  Description of Artificial Sequence: Synthetic oligonucleotide
guccaacaucauagaucca

SEQ ID NO: 1695496 - RNA, 19 nt, Artificial Sequence
  Description of Artificial Sequence: Synthetic oligonucleotide
acacgauguuggagucagu

SEQ ID NO: 1695497 - RNA, 19 nt, Artificial Sequence
  Description of Artificial Sequence: Synthetic oligonucleotide
gucccggccugcccacguc

SEQ ID NO: 1695498 - RNA, 19 nt, Artificial Sequence
  Description of Artificial Sequence: Synthetic oligonucleotide
gcccguccacucucugccc

SEQ ID NO: 1695499 - RNA, 19 nt, Artificial Sequence
  Description of Artificial Sequence: Synthetic oligonucleotide
ccugugcaagcuagcaacu

SEQ ID NO: 1695500 - RNA, 19 nt, Artificial Sequence
  Description of Artificial Sequence: Synthetic oligonucleotide
ccggccugcccacgucugg

SEQ ID NO: 1695501 - RNA, 19 nt, Artificial Sequence
  Description of Artificial Sequence: Synthetic oligonucleotide
ggcuggucuagccgcacau

SEQ ID NO: 1695502 - RNA, 19 nt, Artificial Sequence
  Description of Artificial Sequence: Synthetic oligonucleotide
gccuggaacugguauucau

SEQ ID NO: 1695503 - RNA, 19 nt, Artificial Sequence
  Description of Artificial Sequence: Synthetic oligonucleotide
gcgcaaggggacagagcug

SEQ ID NO: 1695504 - RNA, 19 nt, Artificial Sequence
  Description of Artificial Sequence: Synthetic oligonucleotide
cauuagccccaagcugaua

SEQ ID NO: 1695505 - RNA, 19 nt, Artificial Sequence
  Description of Artificial Sequence: Synthetic oligonucleotide
cccugauacccugccugug

SEQ ID NO: 1695506 - RNA, 19 nt, Artificial Sequence
  Description of Artificial Sequence: Synthetic oligonucleotide
gcacgucccugauggcaga

SEQ ID NO: 1695507 - RNA, 19 nt, Artificial Sequence
  Description of Artificial Sequence: Synthetic oligonucleotide
caaccguguuuaccauggu

SEQ ID NO: 1695508 - RNA, 19 nt, Artificial Sequence
  Description of Artificial Sequence: Synthetic oligonucleotide
gggcacccaaugucccaga

SEQ ID NO: 1695509 - RNA, 19 nt, Artificial Sequence
  Description of Artificial Sequence: Synthetic oligonucleotide
cgcuuggaggccaccgcuc

SEQ ID NO: 1695510 - RNA, 19 nt, Artificial Sequence
  Description of Artificial Sequence: Synthetic oligonucleotide
caggguucacgguggccau

SEQ ID NO: 1695511 - RNA, 19 nt, Artificial Sequence
  Description of Artificial Sequence: Synthetic oligonucleotide
cgucccugauggcagaugu

SEQ ID NO: 1695512 - RNA, 19 nt, Artificial Sequence
  Description of Artificial Sequence: Synthetic oligonucleotide
ccguugaccuuacguagcu

SEQ ID NO: 1695513 - RNA, 19 nt, Artificial Sequence
  Description of Artificial Sequence: Synthetic oligonucleotide
ccaccugaggccaccaguu

SEQ ID NO: 1695514 - RNA, 19 nt, Artificial Sequence
  Description of Artificial Sequence: Synthetic oligonucleotide
cccggccugcccacgucug

SEQ ID NO: 1695515 - RNA, 19 nt, Artificial Sequence
  Description of Artificial Sequence: Synthetic oligonucleotide
ccggcugucccggccugcc

SEQ ID NO: 1695516 - RNA, 19 nt, Artificial Sequence
  Description of Artificial Sequence: Synthetic oligonucleotide
gguucacgguggccaugaa

SEQ ID NO: 1695517 - RNA, 19 nt, Artificial Sequence
  Description of Artificial Sequence: Synthetic oligonucleotide
ccccaagcugauacgcugu

SEQ ID NO: 1695518 - RNA, 19 nt, Artificial Sequence
  Description of Artificial Sequence: Synthetic oligonucleotide
gcaaggggacagagcugca

SEQ ID NO: 1695519 - RNA, 19 nt, Artificial Sequence
  Description of Artificial Sequence: Synthetic oligonucleotide
gcggcuccuuucguauguc

SEQ ID NO: 1695520 - RNA, 19 nt, Artificial Sequence
  Description of Artificial Sequence: Synthetic oligonucleotide
cgcuugauggagggagguc

SEQ ID NO: 1695521 - RNA, 19 nt, Artificial Sequence
  Description of Artificial Sequence: Synthetic oligonucleotide
cuguggcggcuccuuucgu

SEQ ID NO: 1695522 - RNA, 19 nt, Artificial Sequence
  Description of Artificial Sequence: Synthetic oligonucleotide
ccguguuuaccauggucuu

SEQ ID NO: 1695523 - RNA, 19 nt, Artificial Sequence
  Description of Artificial Sequence: Synthetic oligonucleotide
cggcuccuuucguauguca

SEQ ID NO: 1695524 - RNA, 19 nt, Artificial Sequence
  Description of Artificial Sequence: Synthetic oligonucleotide
cucgguggguggggcugga

SEQ ID NO: 1695525 - RNA, 19 nt, Artificial Sequence
  Description of Artificial Sequence: Synthetic oligonucleotide
ccauuagccccaagcugau

SEQ ID NO: 1695526 - RNA, 19 nt, Artificial Sequence
  Description of Artificial Sequence: Synthetic oligonucleotide
gccacugggugaacucgcu

SEQ ID NO: 1695527 - RNA, 19 nt, Artificial Sequence
  Description of Artificial Sequence: Synthetic oligonucleotide
ccacaaccguguuuaccau

SEQ ID NO: 1695528 - RNA, 19 nt, Artificial Sequence
  Description of Artificial Sequence: Synthetic oligonucleotide
cacccgccacugggugaac

SEQ ID NO: 1695529 - RNA, 19 nt, Artificial Sequence
  Description of Artificial Sequence: Synthetic oligonucleotide
cacgucccugauggcagau

SEQ ID NO: 1695530 - RNA, 19 nt, Artificial Sequence
  Description of Artificial Sequence: Synthetic oligonucleotide
ggcuagccuggaacuggua

SEQ ID NO: 1695531 - RNA, 19 nt, Artificial Sequence
  Description of Artificial Sequence: Synthetic oligonucleotide
cccguccacucucugcccu

SEQ ID NO: 1695532 - RNA, 19 nt, Artificial Sequence
  Description of Artificial Sequence: Synthetic oligonucleotide
cccagaggaugauccguuu

SEQ ID NO: 1695533 - RNA, 19 nt, Artificial Sequence
  Description of Artificial Sequence: Synthetic oligonucleotide
ccgcucugcaccugggcuu

SEQ ID NO: 1695534 - RNA, 19 nt, Artificial Sequence
  Description of Artificial Sequence: Synthetic oligonucleotide
gggccccaccugaggccac

SEQ ID NO: 1695535 - RNA, 19 nt, Artificial Sequence
  Description of Artificial Sequence: Synthetic oligonucleotide
ccucuaccauuagccccaa

SEQ ID NO: 1695536 - RNA, 19 nt, Artificial Sequence
  Description of Artificial Sequence: Synthetic oligonucleotide
cccugacaucuuggagucu

SEQ ID NO: 1695537 - RNA, 19 nt, Artificial Sequence
  Description of Artificial Sequence: Synthetic oligonucleotide
cguugaccuuacguagcuu

SEQ ID NO: 1695538 - RNA, 19 nt, Artificial Sequence
  Description of Artificial Sequence: Synthetic oligonucleotide
uuuaagaucaaaguuaucg

SEQ ID NO: 1695539 - RNA, 19 nt, Artificial Sequence
  Description of Artificial Sequence: Synthetic oligonucleotide
aguucuuacagccauacuc

SEQ ID NO: 1695540 - RNA, 19 nt, Artificial Sequence
  Description of Artificial Sequence: Synthetic oligonucleotide
aagagggugaacuugacug

SEQ ID NO: 1695541 - RNA, 19 nt, Artificial Sequence
  Description of Artificial Sequence: Synthetic oligonucleotide
uuuaccaucaguagagcag

SEQ ID NO: 1695542 - RNA, 19 nt, Artificial Sequence
  Description of Artificial Sequence: Synthetic oligonucleotide
agagcguugaagcuaagac

SEQ ID NO: 1695543 - RNA, 19 nt, Artificial Sequence
  Description of Artificial Sequence: Synthetic oligonucleotide
aucaaaguuaucguggccc

SEQ ID NO: 1695544 - RNA, 19 nt, Artificial Sequence
  Description of Artificial Sequence: Synthetic oligonucleotide
aaaguuaucguggcccucc

SEQ ID NO: 1695545 - RNA, 19 nt, Artificial Sequence
  Description of Artificial Sequence: Synthetic oligonucleotide
ugaaguauagccaaucuuu

SEQ ID NO: 1695546 - RNA, 19 nt, Artificial Sequence
  Description of Artificial Sequence: Synthetic oligonucleotide
agaucaaaguuaucguggc

SEQ ID NO: 1695547 - RNA, 19 nt, Artificial Sequence
  Description of Artificial Sequence: Synthetic oligonucleotide
uaagaucaaaguuaucgug

SEQ ID NO: 1695548 - RNA, 19 nt, Artificial Sequence
  Description of Artificial Sequence: Synthetic oligonucleotide
caucaguagagcaggaucg

SEQ ID NO: 1695549 - RNA, 19 nt, Artificial Sequence
  Description of Artificial Sequence: Synthetic oligonucleotide
caaucuuuuggcgagagcc

SEQ ID NO: 1695550 - RNA, 19 nt, Artificial Sequence
  Description of Artificial Sequence: Synthetic oligonucleotide
uuaagaucaaaguuaucgu

SEQ ID NO: 1695551 - RNA, 19 nt, Artificial Sequence
  Description of Artificial Sequence: Synthetic oligonucleotide
uguguuagcagauccugag

SEQ ID NO: 1695552 - RNA, 19 nt, Artificial Sequence
  Description of Artificial Sequence: Synthetic oligonucleotide
uugaagcuaagacagccgc

SEQ ID NO: 1695553 - RNA, 19 nt, Artificial Sequence
  Description of Artificial Sequence: Synthetic oligonucleotide
cauguuaaagccacuugcc

SEQ ID NO: 1695554 - RNA, 19 nt, Artificial Sequence
  Description of Artificial Sequence: Synthetic oligonucleotide
aacuugacugcacagccgu

SEQ ID NO: 1695555 - RNA, 19 nt, Artificial Sequence
  Description of Artificial Sequence: Synthetic oligonucleotide
gaauuugugugcugguucc

SEQ ID NO: 1695556 - RNA, 19 nt, Artificial Sequence
  Description of Artificial Sequence: Synthetic oligonucleotide
ucggcuaucccacuggaug

SEQ ID NO: 1695557 - RNA, 19 nt, Artificial Sequence
  Description of Artificial Sequence: Synthetic oligonucleotide
agagggugaacuugacugc

SEQ ID NO: 1695558 - RNA, 19 nt, Artificial Sequence
  Description of Artificial Sequence: Synthetic oligonucleotide
agcguugaagcuaagacag

SEQ ID NO: 1695559 - RNA, 19 nt, Artificial Sequence
  Description of Artificial Sequence: Synthetic oligonucleotide
accacuuggagguauuguc

SEQ ID NO: 1695560 - RNA, 19 nt, Artificial Sequence
  Description of Artificial Sequence: Synthetic oligonucleotide
ucguucccagcuuucaucg

SEQ ID NO: 1695561 - RNA, 19 nt, Artificial Sequence
  Description of Artificial Sequence: Synthetic oligonucleotide
uuggcgagagccaggaucc

SEQ ID NO: 1695562 - RNA, 19 nt, Artificial Sequence
  Description of Artificial Sequence: Synthetic oligonucleotide
ugugaggguacugacuugg

SEQ ID NO: 1695563 - RNA, 19 nt, Artificial Sequence
  Description of Artificial Sequence: Synthetic oligonucleotide
aguguugccagcccgaggu

SEQ ID NO: 1695564 - RNA, 19 nt, Artificial Sequence
  Description of Artificial Sequence: Synthetic oligonucleotide
gguaccagagcguugaagc

SEQ ID NO: 1695565 - RNA, 19 nt, Artificial Sequence
  Description of Artificial Sequence: Synthetic oligonucleotide
aaugcugcaagccgauccu

SEQ ID NO: 1695566 - RNA, 19 nt, Artificial Sequence
  Description of Artificial Sequence: Synthetic oligonucleotide
auagccaaucuuuuggcga

SEQ ID NO: 1695567 - RNA, 19 nt, Artificial Sequence
  Description of Artificial Sequence: Synthetic oligonucleotide
ucacggugugagaaggugg

SEQ ID NO: 1695568 - RNA, 19 nt, Artificial Sequence
  Description of Artificial Sequence: Synthetic oligonucleotide
uucuugaagagggugaacu

SEQ ID NO: 1695569 - RNA, 19 nt, Artificial Sequence
  Description of Artificial Sequence: Synthetic oligonucleotide
agcccgagguaccagagcg

SEQ ID NO: 1695570 - RNA, 19 nt, Artificial Sequence
  Description of Artificial Sequence: Synthetic oligonucleotide
cacagcgcauguuaaagcc

SEQ ID NO: 1695571 - RNA, 19 nt, Artificial Sequence
  Description of Artificial Sequence: Synthetic oligonucleotide
ucucguguggaagggaugg

SEQ ID NO: 1695572 - RNA, 19 nt, Artificial Sequence
  Description of Artificial Sequence: Synthetic oligonucleotide
agaaggugguacucugccc

SEQ ID NO: 1695573 - RNA, 19 nt, Artificial Sequence
  Description of Artificial Sequence: Synthetic oligonucleotide
aagccgauccuccauuucu

SEQ ID NO: 1695574 - RNA, 19 nt, Artificial Sequence
  Description of Artificial Sequence: Synthetic oligonucleotide
guucuuacagccauacucc

SEQ ID NO: 1695575 - RNA, 19 nt, Artificial Sequence
  Description of Artificial Sequence: Synthetic oligonucleotide
uguaccucccuuguugagg

SEQ ID NO: 1695576 - RNA, 19 nt, Artificial Sequence
  Description of Artificial Sequence: Synthetic oligonucleotide
guuaaagccacuugccuca

SEQ ID NO: 1695577 - RNA, 19 nt, Artificial Sequence
  Description of Artificial Sequence: Synthetic oligonucleotide
aagaguguguuuaccauca

SEQ ID NO: 1695578 - RNA, 19 nt, Artificial Sequence
  Description of Artificial Sequence: Synthetic oligonucleotide
aaguuaucguggcccuccc

SEQ ID NO: 1695579 - RNA, 19 nt, Artificial Sequence
  Description of Artificial Sequence: Synthetic oligonucleotide
acagccgcuacagaaggcc

SEQ ID NO: 1695580 - RNA, 19 nt, Artificial Sequence
  Description of Artificial Sequence: Synthetic oligonucleotide
uuucuguugaguguugcca

SEQ ID NO: 1695581 - RNA, 19 nt, Artificial Sequence
  Description of Artificial Sequence: Synthetic oligonucleotide
guugaguguugccagcccg

SEQ ID NO: 1695582 - RNA, 19 nt, Artificial Sequence
  Description of Artificial Sequence: Synthetic oligonucleotide
ugguguucuccucucguag

SEQ ID NO: 1695583 - RNA, 19 nt, Artificial Sequence
  Description of Artificial Sequence: Synthetic oligonucleotide
agacagccgcuacagaagg

SEQ ID NO: 1695584 - RNA, 19 nt, Artificial Sequence
  Description of Artificial Sequence: Synthetic oligonucleotide
ucgauagccaccucagcug

SEQ ID NO: 1695585 - RNA, 19 nt, Artificial Sequence
  Description of Artificial Sequence: Synthetic oligonucleotide
ugccacacgcuucuuguag

SEQ ID NO: 1695586 - RNA, 19 nt, Artificial Sequence
  Description of Artificial Sequence: Synthetic oligonucleotide
gcauguuaaagccacuugc

SEQ ID NO: 1695587 - RNA, 19 nt, Artificial Sequence
  Description of Artificial Sequence: Synthetic oligonucleotide
uaggcgaucagcgauggcu

SEQ ID NO: 1695588 - RNA, 19 nt, Artificial Sequence
  Description of Artificial Sequence: Synthetic oligonucleotide
ugaggguacugacuugggc

SEQ ID NO: 1695589 - RNA, 19 nt, Artificial Sequence
  Description of Artificial Sequence: Synthetic oligonucleotide
aucagcgauggcuuggucu

SEQ ID NO: 1695590 - RNA, 19 nt, Artificial Sequence
  Description of Artificial Sequence: Synthetic oligonucleotide
agcuuucaucgauagccac

SEQ ID NO: 1695591 - RNA, 19 nt, Artificial Sequence
  Description of Artificial Sequence: Synthetic oligonucleotide
ucuuuuggcgagagccagg

SEQ ID NO: 1695592 - RNA, 19 nt, Artificial Sequence
  Description of Artificial Sequence: Synthetic oligonucleotide
gagcguugaagcuaagaca

SEQ ID NO: 1695593 - RNA, 19 nt, Artificial Sequence
  Description of Artificial Sequence: Synthetic oligonucleotide
guguguuuaccaucaguag

SEQ ID NO: 1695594 - RNA, 19 nt, Artificial Sequence
  Description of Artificial Sequence: Synthetic oligonucleotide
gaucaaaguuaucguggcc

SEQ ID NO: 1695595 - RNA, 19 nt, Artificial Sequence
  Description of Artificial Sequence: Synthetic oligonucleotide
aacgcagugaaggccuuuc

SEQ ID NO: 1695596 - RNA, 19 nt, Artificial Sequence
  Description of Artificial Sequence: Synthetic oligonucleotide
cuugaagagggugaacuug

SEQ ID NO: 1695597 - RNA, 19 nt, Artificial Sequence
  Description of Artificial Sequence: Synthetic oligonucleotide
uguugggucaagcccuggc

SEQ ID NO: 1695598 - RNA, 19 nt, Artificial Sequence
  Description of Artificial Sequence: Synthetic oligonucleotide
guugaagcuaagacagccg

SEQ ID NO: 1695599 - RNA, 19 nt, Artificial Sequence
  Description of Artificial Sequence: Synthetic oligonucleotide
caucgcagccagcacagcg

SEQ ID NO: 1695600 - RNA, 19 nt, Artificial Sequence
  Description of Artificial Sequence: Synthetic oligonucleotide
ugucugguaggugauaguc

SEQ ID NO: 1695601 - RNA, 19 nt, Artificial Sequence
  Description of Artificial Sequence: Synthetic oligonucleotide
gacggagccgugcuaggcg

SEQ ID NO: 1695602 - RNA, 19 nt, Artificial Sequence
  Description of Artificial Sequence: Synthetic oligonucleotide
cuucuuguaguucugaggu

SEQ ID NO: 1695603 - RNA, 19 nt, Artificial Sequence
  Description of Artificial Sequence: Synthetic oligonucleotide
uggagguauugucgggagg

SEQ ID NO: 1695604 - RNA, 19 nt, Artificial Sequence
  Description of Artificial Sequence: Synthetic oligonucleotide
caagaguguguuuaccauc

SEQ ID NO: 1695605 - RNA, 19 nt, Artificial Sequence
  Description of Artificial Sequence: Synthetic oligonucleotide
acaagaguguguuuaccau

SEQ ID NO: 1695606 - RNA, 19 nt, Artificial Sequence
  Description of Artificial Sequence: Synthetic oligonucleotide
ugaagcuaagacagccgcu

SEQ ID NO: 1695607 - RNA, 19 nt, Artificial Sequence
  Description of Artificial Sequence: Synthetic oligonucleotide
uuuccgacccucagccuag

SEQ ID NO: 1695608 - RNA, 19 nt, Artificial Sequence
  Description of Artificial Sequence: Synthetic oligonucleotide
acugucugguaggugauag

SEQ ID NO: 1695609 - RNA, 19 nt, Artificial Sequence
  Description of Artificial Sequence: Synthetic oligonucleotide
guaggaucgccucucacca

SEQ ID NO: 1695610 - RNA, 19 nt, Artificial Sequence
  Description of Artificial Sequence: Synthetic oligonucleotide
acuuggagguauugucggg

SEQ ID NO: 1695611 - RNA, 19 nt, Artificial Sequence
  Description of Artificial Sequence: Synthetic oligonucleotide
ugauaguccuggaggguca

SEQ ID NO: 1695612 - RNA, 19 nt, Artificial Sequence
  Description of Artificial Sequence: Synthetic oligonucleotide
ucaccaacgcagugaaggc

SEQ ID NO: 1695613 - RNA, 19 nt, Artificial Sequence
  Description of Artificial Sequence: Synthetic oligonucleotide
uguugaguguugccagccc

SEQ ID NO: 1695614 - RNA, 19 nt, Artificial Sequence
  Description of Artificial Sequence: Synthetic oligonucleotide
ucuguugaguguugccagc

SEQ ID NO: 1695615 - RNA, 19 nt, Artificial Sequence
  Description of Artificial Sequence: Synthetic oligonucleotide
agggauggcgcccuggacu

SEQ ID NO: 1695616 - RNA, 19 nt, Artificial Sequence
  Description of Artificial Sequence: Synthetic oligonucleotide
agguauugucgggaggccc

SEQ ID NO: 1695617 - RNA, 19 nt, Artificial Sequence
  Description of Artificial Sequence: Synthetic oligonucleotide
aaucuuuuggcgagagcca

SEQ ID NO: 1695618 - RNA, 19 nt, Artificial Sequence
  Description of Artificial Sequence: Synthetic oligonucleotide
agccacuugccucauccag

SEQ ID NO: 1695619 - RNA, 19 nt, Artificial Sequence
  Description of Artificial Sequence: Synthetic oligonucleotide
gaacuugacugcacagccg

SEQ ID NO: 1695620 - RNA, 19 nt, Artificial Sequence
  Description of Artificial Sequence: Synthetic oligonucleotide
ugcugcaagccgauccucc

SEQ ID NO: 1695621 - RNA, 19 nt, Artificial Sequence
  Description of Artificial Sequence: Synthetic oligonucleotide
uugaguguugccagcccga

SEQ ID NO: 1695622 - RNA, 19 nt, Artificial Sequence
  Description of Artificial Sequence: Synthetic oligonucleotide
uacucugcccuguaaugcu

SEQ ID NO: 1695623 - RNA, 19 nt, Artificial Sequence
  Description of Artificial Sequence: Synthetic oligonucleotide
uucguucccagcuuucauc

SEQ ID NO: 1695624 - RNA, 19 nt, Artificial Sequence
  Description of Artificial Sequence: Synthetic oligonucleotide
ucccagcuuucaucgauag

SEQ ID NO: 1695625 - RNA, 19 nt, Artificial Sequence
  Description of Artificial Sequence: Synthetic oligonucleotide
gguggcgaccacuuggagg

SEQ ID NO: 1695626 - RNA, 19 nt, Artificial Sequence
  Description of Artificial Sequence: Synthetic oligonucleotide
agcgccgccgauucguagg

SEQ ID NO: 1695627 - RNA, 19 nt, Artificial Sequence
  Description of Artificial Sequence: Synthetic oligonucleotide
uucuuguaguucugaggug

SEQ ID NO: 1695628 - RNA, 19 nt, Artificial Sequence
  Description of Artificial Sequence: Synthetic oligonucleotide
uucuuacagccauacuccu

SEQ ID NO: 1695629 - RNA, 19 nt, Artificial Sequence
  Description of Artificial Sequence: Synthetic oligonucleotide
cucacaagaguguguuuac

SEQ ID NO: 1695630 - RNA, 19 nt, Artificial Sequence
  Description of Artificial Sequence: Synthetic oligonucleotide
ucuggugccuggugugccg

SEQ ID NO: 1695631 - RNA, 19 nt, Artificial Sequence
  Description of Artificial Sequence: Synthetic oligonucleotide
auucguaggaucgccucuc

SEQ ID NO: 1695632 - RNA, 19 nt, Artificial Sequence
  Description of Artificial Sequence: Synthetic oligonucleotide
agcucaauggcugccucgg

SEQ ID NO: 1695633 - RNA, 19 nt, Artificial Sequence
  Description of Artificial Sequence: Synthetic oligonucleotide
cagcgcauguuaaagccac

SEQ ID NO: 1695634 - RNA, 19 nt, Artificial Sequence
  Description of Artificial Sequence: Synthetic oligonucleotide
uuguaguucugagguggcg

SEQ ID NO: 1695635 - RNA, 19 nt, Artificial Sequence
  Description of Artificial Sequence: Synthetic oligonucleotide
aucaguagagcaggaucgg

SEQ ID NO: 1695636 - RNA, 19 nt, Artificial Sequence
  Description of Artificial Sequence: Synthetic oligonucleotide
acgcagugaaggccuuucc

SEQ ID NO: 1695637 - RNA, 19 nt, Artificial Sequence
  Description of Artificial Sequence: Synthetic oligonucleotide
aaggugguacucugcccug

SEQ ID NO: 1695638 - RNA, 19 nt, Artificial Sequence
  Description of Artificial Sequence: Synthetic oligonucleotide
gaggucucccaucgcagcc

SEQ ID NO: 1695639 - RNA, 19 nt, Artificial Sequence
  Description of Artificial Sequence: Synthetic oligonucleotide
ucacaagaguguguuuacc

SEQ ID NO: 1695640 - RNA, 19 nt, Artificial Sequence
  Description of Artificial Sequence: Synthetic oligonucleotide
aucuuuuggcgagagccag

SEQ ID NO: 1695641 - RNA, 19 nt, Artificial Sequence
  Description of Artificial Sequence: Synthetic oligonucleotide
cauuucucguguggaaggg

SEQ ID NO: 1695642 - RNA, 19 nt, Artificial Sequence
  Description of Artificial Sequence: Synthetic oligonucleotide
gucucacggugugagaagg

SEQ ID NO: 1695643 - RNA, 19 nt, Artificial Sequence
  Description of Artificial Sequence: Synthetic oligonucleotide
uucucguguggaagggaug

SEQ ID NO: 1695644 - RNA, 19 nt, Artificial Sequence
  Description of Artificial Sequence: Synthetic oligonucleotide
ggugaacuugacugcacag

SEQ ID NO: 1695645 - RNA, 19 nt, Artificial Sequence
  Description of Artificial Sequence: Synthetic oligonucleotide
aagcucacaagaguguguu

SEQ ID NO: 1695646 - RNA, 19 nt, Artificial Sequence
  Description of Artificial Sequence: Synthetic oligonucleotide
aguuaucguggcccucccg

SEQ ID NO: 1695647 - RNA, 19 nt, Artificial Sequence
  Description of Artificial Sequence: Synthetic oligonucleotide
cagugaaggccuuuccgac

SEQ ID NO: 1695648 - RNA, 19 nt, Artificial Sequence
  Description of Artificial Sequence: Synthetic oligonucleotide
cuguaaugcugcaagccga

SEQ ID NO: 1695649 - RNA, 19 nt, Artificial Sequence
  Description of Artificial Sequence: Synthetic oligonucleotide
gguacucugcccuguaaug

SEQ ID NO: 1695650 - RNA, 19 nt, Artificial Sequence
  Description of Artificial Sequence: Synthetic oligonucleotide
agcuaagacagccgcuaca

SEQ ID NO: 1695651 - RNA, 19 nt, Artificial Sequence
  Description of Artificial Sequence: Synthetic oligonucleotide
gcuaagacagccgcuacag

SEQ ID NO: 1695652 - RNA, 19 nt, Artificial Sequence
  Description of Artificial Sequence: Synthetic oligonucleotide
uagcagauccugagucugc

SEQ ID NO: 1695653 - RNA, 19 nt, Artificial Sequence
  Description of Artificial Sequence: Synthetic oligonucleotide
ccacuuggagguauugucg

SEQ ID NO: 1695654 - RNA, 19 nt, Artificial Sequence
  Description of Artificial Sequence: Synthetic oligonucleotide
uguuuuccugacggagccg

SEQ ID NO: 1695655 - RNA, 19 nt, Artificial Sequence
  Description of Artificial Sequence: Synthetic oligonucleotide
ccauuucucguguggaagg

SEQ ID NO: 1695656 - RNA, 19 nt, Artificial Sequence
  Description of Artificial Sequence: Synthetic oligonucleotide
aggguuuuccucaguguuc

SEQ ID NO: 1695657 - RNA, 19 nt, Artificial Sequence
  Description of Artificial Sequence: Synthetic oligonucleotide
uuguaccucccuuguugag

SEQ ID NO: 1695658 - RNA, 19 nt, Artificial Sequence
  Description of Artificial Sequence: Synthetic oligonucleotide
auacuccuucuugaagagg

SEQ ID NO: 1695659 - RNA, 19 nt, Artificial Sequence
  Description of Artificial Sequence: Synthetic oligonucleotide
gaagcuaagacagccgcua

SEQ ID NO: 1695660 - RNA, 19 nt, Artificial Sequence
  Description of Artificial Sequence: Synthetic oligonucleotide
ggucuuguugggucaagcc

SEQ ID NO: 1695661 - RNA, 19 nt, Artificial Sequence
  Description of Artificial Sequence: Synthetic oligonucleotide
ugcccugacaccgggcccg

SEQ ID NO: 1695662 - RNA, 19 nt, Artificial Sequence
  Description of Artificial Sequence: Synthetic oligonucleotide
cucguagcucaauggcugc

SEQ ID NO: 1695663 - RNA, 19 nt, Artificial Sequence
  Description of Artificial Sequence: Synthetic oligonucleotide
guggcgaccacuuggaggu

SEQ ID NO: 1695664 - RNA, 19 nt, Artificial Sequence
  Description of Artificial Sequence: Synthetic oligonucleotide
aggaucggcuaucccacug

SEQ ID NO: 1695665 - RNA, 19 nt, Artificial Sequence
  Description of Artificial Sequence: Synthetic oligonucleotide
gaucgccucucaccaacgc

SEQ ID NO: 1695666 - RNA, 19 nt, Artificial Sequence
  Description of Artificial Sequence: Synthetic oligonucleotide
ugucgggaggcccucuggu

SEQ ID NO: 1695667 - RNA, 19 nt, Artificial Sequence
  Description of Artificial Sequence: Synthetic oligonucleotide
cuuguaccucccuuguuga

SEQ ID NO: 1695668 - RNA, 19 nt, Artificial Sequence
  Description of Artificial Sequence: Synthetic oligonucleotide
aggcagcccagcccuacac

SEQ ID NO: 1695669 - RNA, 19 nt, Artificial Sequence
  Description of Artificial Sequence: Synthetic oligonucleotide
cacuggaugcccugacacc

SEQ ID NO: 1695670 - RNA, 19 nt, Artificial Sequence
  Description of Artificial Sequence: Synthetic oligonucleotide
cuagccgugccucuaucuc

SEQ ID NO: 1695671 - RNA, 19 nt, Artificial Sequence
  Description of Artificial Sequence: Synthetic oligonucleotide
gaguguugccagcccgagg

SEQ ID NO: 1695672 - RNA, 19 nt, Artificial Sequence
  Description of Artificial Sequence: Synthetic oligonucleotide
uagccgugccucuaucucu

SEQ ID NO: 1695673 - RNA, 19 nt, Artificial Sequence
  Description of Artificial Sequence: Synthetic oligonucleotide
aggcccucuggucaggacu

SEQ ID NO: 1695674 - RNA, 19 nt, Artificial Sequence
  Description of Artificial Sequence: Synthetic oligonucleotide
ccuuguaccucccuuguug

SEQ ID NO: 1695675 - RNA, 19 nt, Artificial Sequence
  Description of Artificial Sequence: Synthetic oligonucleotide
ggaucggcuaucccacugg

SEQ ID NO: 1695676 - RNA, 19 nt, Artificial Sequence
  Description of Artificial Sequence: Synthetic oligonucleotide
ugggaauuugugugcuggu

SEQ ID NO: 1695677 - RNA, 19 nt, Artificial Sequence
  Description of Artificial Sequence: Synthetic oligonucleotide
guagcaccugcucuccaug

SEQ ID NO: 1695678 - RNA, 19 nt, Artificial Sequence
  Description of Artificial Sequence: Synthetic oligonucleotide
agaguguguuuaccaucag

SEQ ID NO: 1695679 - RNA, 19 nt, Artificial Sequence
  Description of Artificial Sequence: Synthetic oligonucleotide
accaacgcagugaaggccu

SEQ ID NO: 1695680 - RNA, 19 nt, Artificial Sequence
  Description of Artificial Sequence: Synthetic oligonucleotide
ugaguguugccagcccgag

SEQ ID NO: 1695681 - RNA, 19 nt, Artificial Sequence
  Description of Artificial Sequence: Synthetic oligonucleotide
gaagggauggcgcccugga

SEQ ID NO: 1695682 - RNA, 19 nt, Artificial Sequence
  Description of Artificial Sequence: Synthetic oligonucleotide
uuccugacggagccgugcu

SEQ ID NO: 1695683 - RNA, 19 nt, Artificial Sequence
  Description of Artificial Sequence: Synthetic oligonucleotide
aucguggcccucccggaag

SEQ ID NO: 1695684 - RNA, 19 nt, Artificial Sequence
  Description of Artificial Sequence: Synthetic oligonucleotide
uccuggagggucacucugu

SEQ ID NO: 1695685 - RNA, 19 nt, Artificial Sequence
  Description of Artificial Sequence: Synthetic oligonucleotide
uguugccagcccgagguac

SEQ ID NO: 1695686 - RNA, 19 nt, Artificial Sequence
  Description of Artificial Sequence: Synthetic oligonucleotide
uugugaggguacugacuug

SEQ ID NO: 1695687 - RNA, 19 nt, Artificial Sequence
  Description of Artificial Sequence: Synthetic oligonucleotide
uucguaggaucgccucuca

SEQ ID NO: 1695688 - RNA, 19 nt, Artificial Sequence
  Description of Artificial Sequence: Synthetic oligonucleotide
cuuguugggucaagcccug

SEQ ID NO: 1695689 - RNA, 19 nt, Artificial Sequence
  Description of Artificial Sequence: Synthetic oligonucleotide
ugcaagccgauccuccauu

SEQ ID NO: 1695690 - RNA, 19 nt, Artificial Sequence
  Description of Artificial Sequence: Synthetic oligonucleotide
auugucgggaggcccucug

SEQ ID NO: 1695691 - RNA, 19 nt, Artificial Sequence
  Description of Artificial Sequence: Synthetic oligonucleotide
gugauaguccuggaggguc

SEQ ID NO: 1695692 - RNA, 19 nt, Artificial Sequence
  Description of Artificial Sequence: Synthetic oligonucleotide
ucucacggugugagaaggu

SEQ ID NO: 1695693 - RNA, 19 nt, Artificial Sequence
  Description of Artificial Sequence: Synthetic oligonucleotide
cucacggugugagaaggug

SEQ ID NO: 1695694 - RNA, 19 nt, Artificial Sequence
  Description of Artificial Sequence: Synthetic oligonucleotide
caucgauagccaccucagc

SEQ ID NO: 1695695 - RNA, 19 nt, Artificial Sequence
  Description of Artificial Sequence: Synthetic oligonucleotide
cuggaugcccugacaccgg

SEQ ID NO: 1695696 - RNA, 19 nt, Artificial Sequence
  Description of Artificial Sequence: Synthetic oligonucleotide
ucucaccaacgcagugaag

SEQ ID NO: 1695697 - RNA, 19 nt, Artificial Sequence
  Description of Artificial Sequence: Synthetic oligonucleotide
uuacagccauacuccuucu

SEQ ID NO: 1695698 - RNA, 19 nt, Artificial Sequence
  Description of Artificial Sequence: Synthetic oligonucleotide
ccucucguagcucaauggc

SEQ ID NO: 1695699 - RNA, 19 nt, Artificial Sequence
  Description of Artificial Sequence: Synthetic oligonucleotide
uggguccugguaucuggug

SEQ ID NO: 1695700 - RNA, 19 nt, Artificial Sequence
  Description of Artificial Sequence: Synthetic oligonucleotide
gaucggcuaucccacugga

SEQ ID NO: 1695701 - RNA, 19 nt, Artificial Sequence
  Description of Artificial Sequence: Synthetic oligonucleotide
uucccagcuuucaucgaua

SEQ ID NO: 1695702 - RNA, 19 nt, Artificial Sequence
  Description of Artificial Sequence: Synthetic oligonucleotide
agguaccagagcguugaag

SEQ ID NO: 1695703 - RNA, 19 nt, Artificial Sequence
  Description of Artificial Sequence: Synthetic oligonucleotide
uaccagagcguugaagcua

SEQ ID NO: 1695704 - RNA, 19 nt, Artificial Sequence
  Description of Artificial Sequence: Synthetic oligonucleotide
gauucguaggaucgccucu

SEQ ID NO: 1695705 - RNA, 19 nt, Artificial Sequence
  Description of Artificial Sequence: Synthetic oligonucleotide
caccaacgcagugaaggcc

SEQ ID NO: 1695706 - RNA, 19 nt, Artificial Sequence
  Description of Artificial Sequence: Synthetic oligonucleotide
accugcucuccauggcguc

SEQ ID NO: 1695707 - RNA, 19 nt, Artificial Sequence
  Description of Artificial Sequence: Synthetic oligonucleotide
cucucagcgccgccgauuc

SEQ ID NO: 1695708 - RNA, 19 nt, Artificial Sequence
  Description of Artificial Sequence: Synthetic oligonucleotide
ugaugcucuuuaagaucaa

SEQ ID NO: 1695709 - RNA, 19 nt, Artificial Sequence
  Description of Artificial Sequence: Synthetic oligonucleotide
ccgugcuaggcgaucagcg

SEQ ID NO: 1695710 - RNA, 19 nt, Artificial Sequence
  Description of Artificial Sequence: Synthetic oligonucleotide
ugacggagccgugcuaggc

SEQ ID NO: 1695711 - RNA, 19 nt, Artificial Sequence
  Description of Artificial Sequence: Synthetic oligonucleotide
agcacucucuggauggcug

SEQ ID NO: 1695712 - RNA, 19 nt, Artificial Sequence
  Description of Artificial Sequence: Synthetic oligonucleotide
cuuuuggcgagagccagga

SEQ ID NO: 1695713 - RNA, 19 nt, Artificial Sequence
  Description of Artificial Sequence: Synthetic oligonucleotide
cagccgcuacagaaggccc

SEQ ID NO: 1695714 - RNA, 19 nt, Artificial Sequence
  Description of Artificial Sequence: Synthetic oligonucleotide
agggugaacuugacugcac

SEQ ID NO: 1695715 - RNA, 19 nt, Artificial Sequence
  Description of Artificial Sequence: Synthetic oligonucleotide
cguugaagcuaagacagcc

SEQ ID NO: 1695716 - RNA, 19 nt, Artificial Sequence
  Description of Artificial Sequence: Synthetic oligonucleotide
cuuuccgacccucagccua

SEQ ID NO: 1695717 - RNA, 19 nt, Artificial Sequence
  Description of Artificial Sequence: Synthetic oligonucleotide
ucguagcucaauggcugcc

SEQ ID NO: 1695718 - RNA, 19 nt, Artificial Sequence
  Description of Artificial Sequence: Synthetic oligonucleotide
gcacagcgcauguuaaagc

SEQ ID NO: 1695719 - RNA, 19 nt, Artificial Sequence
  Description of Artificial Sequence: Synthetic oligonucleotide
uacugacuugggcuuguuu

SEQ ID NO: 1695720 - RNA, 19 nt, Artificial Sequence
  Description of Artificial Sequence: Synthetic oligonucleotide
agccgauccuccauuucuc

SEQ ID NO: 1695721 - RNA, 19 nt, Artificial Sequence
  Description of Artificial Sequence: Synthetic oligonucleotide
acggagccgugcuaggcga

SEQ ID NO: 1695722 - RNA, 19 nt, Artificial Sequence
  Description of Artificial Sequence: Synthetic oligonucleotide
uucugagguggcgaccacu

SEQ ID NO: 1695723 - RNA, 19 nt, Artificial Sequence
  Description of Artificial Sequence: Synthetic oligonucleotide
auuucucguguggaaggga

SEQ ID NO: 1695724 - RNA, 19 nt, Artificial Sequence
  Description of Artificial Sequence: Synthetic oligonucleotide
cugacggagccgugcuagg

SEQ ID NO: 1695725 - RNA, 19 nt, Artificial Sequence
  Description of Artificial Sequence: Synthetic oligonucleotide
cacgcuucuuguaguucug

SEQ ID NO: 1695726 - RNA, 19 nt, Artificial Sequence
  Description of Artificial Sequence: Synthetic oligonucleotide
caagcccuggcucugggaa

SEQ ID NO: 1695727 - RNA, 19 nt, Artificial Sequence
  Description of Artificial Sequence: Synthetic oligonucleotide
agccgcuacagaaggcccg

SEQ ID NO: 1695728 - RNA, 19 nt, Artificial Sequence
  Description of Artificial Sequence: Synthetic oligonucleotide
ccgccgauucguaggaucg

SEQ ID NO: 1695729 - RNA, 19 nt, Artificial Sequence
  Description of Artificial Sequence: Synthetic oligonucleotide
gaaguauagccaaucuuuu

SEQ ID NO: 1695730 - RNA, 19 nt, Artificial Sequence
  Description of Artificial Sequence: Synthetic oligonucleotide
uagagcaggaucggcuauc

SEQ ID NO: 1695731 - RNA, 19 nt, Artificial Sequence
  Description of Artificial Sequence: Synthetic oligonucleotide
cucucaccaacgcagugaa

SEQ ID NO: 1695732 - RNA, 19 nt, Artificial Sequence
  Description of Artificial Sequence: Synthetic oligonucleotide
ggucucacggugugagaag

SEQ ID NO: 1695733 - RNA, 19 nt, Artificial Sequence
  Description of Artificial Sequence: Synthetic oligonucleotide
gccgauccuccauuucucg

SEQ ID NO: 1695734 - RNA, 19 nt, Artificial Sequence
  Description of Artificial Sequence: Synthetic oligonucleotide
cagcuuucaucgauagcca

SEQ ID NO: 1695735 - RNA, 19 nt, Artificial Sequence
  Description of Artificial Sequence: Synthetic oligonucleotide
acagcgcauguuaaagcca

SEQ ID NO: 1695736 - RNA, 19 nt, Artificial Sequence
  Description of Artificial Sequence: Synthetic oligonucleotide
cugguaggugauaguccug

SEQ ID NO: 1695737 - RNA, 19 nt, Artificial Sequence
  Description of Artificial Sequence: Synthetic oligonucleotide
gauaguccuggagggucac

SEQ ID NO: 1695738 - RNA, 19 nt, Artificial Sequence
  Description of Artificial Sequence: Synthetic oligonucleotide
gccacuugccucauccagg

SEQ ID NO: 1695739 - RNA, 19 nt, Artificial Sequence
  Description of Artificial Sequence: Synthetic oligonucleotide
guaccucccuuguugaggu

SEQ ID NO: 1695740 - RNA, 19 nt, Artificial Sequence
  Description of Artificial Sequence: Synthetic oligonucleotide
uuggucuuguugggucaag

SEQ ID NO: 1695741 - RNA, 19 nt, Artificial Sequence
  Description of Artificial Sequence: Synthetic oligonucleotide
gugaggguacugacuuggg

SEQ ID NO: 1695742 - RNA, 19 nt, Artificial Sequence
  Description of Artificial Sequence: Synthetic oligonucleotide
cucuucguucccagcuuuc

SEQ ID NO: 1695743 - RNA, 19 nt, Artificial Sequence
  Description of Artificial Sequence: Synthetic oligonucleotide
agcuguguuagcagauccu

SEQ ID NO: 1695744 - RNA, 19 nt, Artificial Sequence
  Description of Artificial Sequence: Synthetic oligonucleotide
accagagcguugaagcuaa

SEQ ID NO: 1695745 - RNA, 19 nt, Artificial Sequence
  Description of Artificial Sequence: Synthetic oligonucleotide
ggcuuggucuuguuggguc

SEQ ID NO: 1695746 - RNA, 19 nt, Artificial Sequence
  Description of Artificial Sequence: Synthetic oligonucleotide
uggucaggacuguguggca

SEQ ID NO: 1695747 - RNA, 19 nt, Artificial Sequence
  Description of Artificial Sequence: Synthetic oligonucleotide
cucagccuaggcagcccag

SEQ ID NO: 1695748 - RNA, 19 nt, Artificial Sequence
  Description of Artificial Sequence: Synthetic oligonucleotide
gauggcgcccuggacuuca

SEQ ID NO: 1695749 - RNA, 19 nt, Artificial Sequence
  Description of Artificial Sequence: Synthetic oligonucleotide
gagguggcgaccacuugga

SEQ ID NO: 1695750 - RNA, 19 nt, Artificial Sequence
  Description of Artificial Sequence: Synthetic oligonucleotide
cccuguaaugcugcaagcc

SEQ ID NO: 1695751 - RNA, 19 nt, Artificial Sequence
  Description of Artificial Sequence: Synthetic oligonucleotide
gguaucuggugccuggugu

SEQ ID NO: 1695752 - RNA, 19 nt, Artificial Sequence
  Description of Artificial Sequence: Synthetic oligonucleotide
gacagccgcuacagaaggc

SEQ ID NO: 1695753 - RNA, 19 nt, Artificial Sequence
  Description of Artificial Sequence: Synthetic oligonucleotide
cucucguagcucaauggcu

SEQ ID NO: 1695754 - RNA, 19 nt, Artificial Sequence
  Description of Artificial Sequence: Synthetic oligonucleotide
augcugcaagccgauccuc

SEQ ID NO: 1695755 - RNA, 19 nt, Artificial Sequence
  Description of Artificial Sequence: Synthetic oligonucleotide
auuugugugcugguuccuu

SEQ ID NO: 1695756 - RNA, 19 nt, Artificial Sequence
  Description of Artificial Sequence: Synthetic oligonucleotide
agguggcgaccacuuggag

SEQ ID NO: 1695757 - RNA, 19 nt, Artificial Sequence
  Description of Artificial Sequence: Synthetic oligonucleotide
gggugaacuugacugcaca

SEQ ID NO: 1695758 - RNA, 19 nt, Artificial Sequence
  Description of Artificial Sequence: Synthetic oligonucleotide
guaccagagcguugaagcu

SEQ ID NO: 1695759 - RNA, 19 nt, Artificial Sequence
  Description of Artificial Sequence: Synthetic oligonucleotide
cugaaguauagccaaucuu

SEQ ID NO: 1695760 - RNA, 19 nt, Artificial Sequence
  Description of Artificial Sequence: Synthetic oligonucleotide
guuuuccugacggagccgu

SEQ ID NO: 1695761 - RNA, 19 nt, Artificial Sequence
  Description of Artificial Sequence: Synthetic oligonucleotide
agccgugcuaggcgaucag

SEQ ID NO: 1695762 - RNA, 19 nt, Artificial Sequence
  Description of Artificial Sequence: Synthetic oligonucleotide
cgcagugaaggccuuuccg

SEQ ID NO: 1695763 - RNA, 19 nt, Artificial Sequence
  Description of Artificial Sequence: Synthetic oligonucleotide
cugcuugugaggguacuga

SEQ ID NO: 1695764 - RNA, 19 nt, Artificial Sequence
  Description of Artificial Sequence: Synthetic oligonucleotide
gcaccgggcacaguagagg

SEQ ID NO: 1695765 - RNA, 19 nt, Artificial Sequence
  Description of Artificial Sequence: Synthetic oligonucleotide
gcaggaucggcuaucccac

SEQ ID NO: 1695766 - RNA, 19 nt, Artificial Sequence
  Description of Artificial Sequence: Synthetic oligonucleotide
caaaguuaucguggcccuc

SEQ ID NO: 1695767 - RNA, 19 nt, Artificial Sequence
  Description of Artificial Sequence: Synthetic oligonucleotide
uuaaagccacuugccucau

SEQ ID NO: 1695768 - RNA, 19 nt, Artificial Sequence
  Description of Artificial Sequence: Synthetic oligonucleotide
cacggugugagaagguggu

SEQ ID NO: 1695769 - RNA, 19 nt, Artificial Sequence
  Description of Artificial Sequence: Synthetic oligonucleotide
agccgugccucuaucucug

SEQ ID NO: 1695770 - RNA, 19 nt, Artificial Sequence
  Description of Artificial Sequence: Synthetic oligonucleotide
agcgauggcuuggucuugu

SEQ ID NO: 1695771 - RNA, 19 nt, Artificial Sequence
  Description of Artificial Sequence: Synthetic oligonucleotide
gugugagaaggugguacuc

SEQ ID NO: 1695772 - RNA, 19 nt, Artificial Sequence
  Description of Artificial Sequence: Synthetic oligonucleotide
cgauccuccauuucucgug

SEQ ID NO: 1695773 - RNA, 19 nt, Artificial Sequence
  Description of Artificial Sequence: Synthetic oligonucleotide
auggcgucucucagcgccg

SEQ ID NO: 1695774 - RNA, 19 nt, Artificial Sequence
  Description of Artificial Sequence: Synthetic oligonucleotide
ccugacggagccgugcuag

SEQ ID NO: 1695775 - RNA, 19 nt, Artificial Sequence
  Description of Artificial Sequence: Synthetic oligonucleotide
uauugucgggaggcccucu

SEQ ID NO: 1695776 - RNA, 19 nt, Artificial Sequence
  Description of Artificial Sequence: Synthetic oligonucleotide
cuaggcgaucagcgauggc

SEQ ID NO: 1695777 - RNA, 19 nt, Artificial Sequence
  Description of Artificial Sequence: Synthetic oligonucleotide
cucguguggaagggauggc

SEQ ID NO: 1695778 - RNA, 19 nt, Artificial Sequence
  Description of Artificial Sequence: Synthetic oligonucleotide
gugccggucucacggugug

SEQ ID NO: 1695779 - RNA, 19 nt, Artificial Sequence
  Description of Artificial Sequence: Synthetic oligonucleotide
cagagcguugaagcuaaga

SEQ ID NO: 1695780 - RNA, 19 nt, Artificial Sequence
  Description of Artificial Sequence: Synthetic oligonucleotide
gccaaucuuuuggcgagag

SEQ ID NO: 1695781 - RNA, 19 nt, Artificial Sequence
  Description of Artificial Sequence: Synthetic oligonucleotide
gcgaucagcgauggcuugg

SEQ ID NO: 1695782 - RNA, 19 nt, Artificial Sequence
  Description of Artificial Sequence: Synthetic oligonucleotide
gacccucagccuaggcagc

SEQ ID NO: 1695783 - RNA, 19 nt, Artificial Sequence
  Description of Artificial Sequence: Synthetic oligonucleotide
gcuuggucuuguuggguca

SEQ ID NO: 1695784 - RNA, 19 nt, Artificial Sequence
  Description of Artificial Sequence: Synthetic oligonucleotide
gucgggaggcccucugguc

SEQ ID NO: 1695785 - RNA, 19 nt, Artificial Sequence
  Description of Artificial Sequence: Synthetic oligonucleotide
ugcucuccauggcgucucu

SEQ ID NO: 1695786 - RNA, 19 nt, Artificial Sequence
  Description of Artificial Sequence: Synthetic oligonucleotide
ucagcgccgccgauucgua

SEQ ID NO: 1695787 - RNA, 19 nt, Artificial Sequence
  Description of Artificial Sequence: Synthetic oligonucleotide
uggcgagagccaggauccg

SEQ ID NO: 1695788 - RNA, 19 nt, Artificial Sequence
  Description of Artificial Sequence: Synthetic oligonucleotide
cggcuaucccacuggaugc

SEQ ID NO: 1695789 - RNA, 19 nt, Artificial Sequence
  Description of Artificial Sequence: Synthetic oligonucleotide
cuguguggcacugcuugca

SEQ ID NO: 1695790 - RNA, 19 nt, Artificial Sequence
  Description of Artificial Sequence: Synthetic oligonucleotide
gaggcccucuggucaggac

SEQ ID NO: 1695791 - RNA, 19 nt, Artificial Sequence
  Description of Artificial Sequence: Synthetic oligonucleotide
gcccuguaaugcugcaagc

SEQ ID NO: 1695792 - RNA, 19 nt, Artificial Sequence
  Description of Artificial Sequence: Synthetic oligonucleotide
gccgauucguaggaucgcc

SEQ ID NO: 1695793 - RNA, 19 nt, Artificial Sequence
  Description of Artificial Sequence: Synthetic oligonucleotide
cugguguucuccucucgua

SEQ ID NO: 1695794 - RNA, 19 nt, Artificial Sequence
  Description of Artificial Sequence: Synthetic oligonucleotide
gagccgugcuaggcgauca

SEQ ID NO: 1695795 - RNA, 19 nt, Artificial Sequence
  Description of Artificial Sequence: Synthetic oligonucleotide
uccugacggagccgugcua

SEQ ID NO: 1695796 - RNA, 19 nt, Artificial Sequence
  Description of Artificial Sequence: Synthetic oligonucleotide
ggcgaucagcgauggcuug

SEQ ID NO: 1695797 - RNA, 19 nt, Artificial Sequence
  Description of Artificial Sequence: Synthetic oligonucleotide
cgcauguuaaagccacuug

SEQ ID NO: 1695798 - RNA, 19 nt, Artificial Sequence
  Description of Artificial Sequence: Synthetic oligonucleotide
ggcuaucccacuggaugcc

SEQ ID NO: 1695799 - RNA, 19 nt, Artificial Sequence
  Description of Artificial Sequence: Synthetic oligonucleotide
cucccaucgcagccagcac

SEQ ID NO: 1695800 - RNA, 19 nt, Artificial Sequence
  Description of Artificial Sequence: Synthetic oligonucleotide
guucugagguggcgaccac

SEQ ID NO: 1695801 - RNA, 19 nt, Artificial Sequence
  Description of Artificial Sequence: Synthetic oligonucleotide
gccgcuacagaaggcccgg

SEQ ID NO: 1695802 - RNA, 19 nt, Artificial Sequence
  Description of Artificial Sequence: Synthetic oligonucleotide
aggcgaucagcgauggcuu

SEQ ID NO: 1695803 - RNA, 19 nt, Artificial Sequence
  Description of Artificial Sequence: Synthetic oligonucleotide
cagcgccgccgauucguag

SEQ ID NO: 1695804 - RNA, 19 nt, Artificial Sequence
  Description of Artificial Sequence: Synthetic oligonucleotide
caccgggcacaguagaggu

SEQ ID NO: 1695805 - RNA, 19 nt, Artificial Sequence
  Description of Artificial Sequence: Synthetic oligonucleotide
cacaguucuuacagccaua

SEQ ID NO: 1695806 - RNA, 19 nt, Artificial Sequence
  Description of Artificial Sequence: Synthetic oligonucleotide
gcgucucucagcgccgccg

SEQ ID NO: 1695807 - RNA, 19 nt, Artificial Sequence
  Description of Artificial Sequence: Synthetic oligonucleotide
ccagcccgagguaccagag

SEQ ID NO: 1695808 - RNA, 19 nt, Artificial Sequence
  Description of Artificial Sequence: Synthetic oligonucleotide
gccgccgauucguaggauc

SEQ ID NO: 1695809 - RNA, 19 nt, Artificial Sequence
  Description of Artificial Sequence: Synthetic oligonucleotide
guauugucgggaggcccuc

SEQ ID NO: 1695810 - RNA, 19 nt, Artificial Sequence
  Description of Artificial Sequence: Synthetic oligonucleotide
uguucucggccaggugguc

SEQ ID NO: 1695811 - RNA, 19 nt, Artificial Sequence
  Description of Artificial Sequence: Synthetic oligonucleotide
cgauucguaggaucgccuc

SEQ ID NO: 1695812 - RNA, 19 nt, Artificial Sequence
  Description of Artificial Sequence: Synthetic oligonucleotide
cagcacagcgcauguuaaa

SEQ ID NO: 1695813 - RNA, 19 nt, Artificial Sequence
  Description of Artificial Sequence: Synthetic oligonucleotide
cacucucuggauggcuguc

SEQ ID NO: 1695814 - RNA, 19 nt, Artificial Sequence
  Description of Artificial Sequence: Synthetic oligonucleotide
cuuggucuuguugggucaa

SEQ ID NO: 1695815 - RNA, 19 nt, Artificial Sequence
  Description of Artificial Sequence: Synthetic oligonucleotide
guagagcaggaucggcuau

SEQ ID NO: 1695816 - RNA, 19 nt, Artificial Sequence
  Description of Artificial Sequence: Synthetic oligonucleotide
gguauugucgggaggcccu

SEQ ID NO: 1695817 - RNA, 19 nt, Artificial Sequence
  Description of Artificial Sequence: Synthetic oligonucleotide
uggugccuggugugccggu

SEQ ID NO: 1695818 - RNA, 19 nt, Artificial Sequence
  Description of Artificial Sequence: Synthetic oligonucleotide
cuaucccacuggaugcccu

SEQ ID NO: 1695819 - RNA, 19 nt, Artificial Sequence
  Description of Artificial Sequence: Synthetic oligonucleotide
gccucucaccaacgcagug

SEQ ID NO: 1695820 - RNA, 19 nt, Artificial Sequence
  Description of Artificial Sequence: Synthetic oligonucleotide
agcgcauguuaaagccacu

SEQ ID NO: 1695821 - RNA, 19 nt, Artificial Sequence
  Description of Artificial Sequence: Synthetic oligonucleotide
gagguaccagagcguugaa

SEQ ID NO: 1695822 - RNA, 19 nt, Artificial Sequence
  Description of Artificial Sequence: Synthetic oligonucleotide
aucggcuaucccacuggau

SEQ ID NO: 1695823 - RNA, 19 nt, Artificial Sequence
  Description of Artificial Sequence: Synthetic oligonucleotide
cagcuucuucggugagcug

SEQ ID NO: 1695824 - RNA, 19 nt, Artificial Sequence
  Description of Artificial Sequence: Synthetic oligonucleotide
guccugucccugaaguaua

SEQ ID NO: 1695825 - RNA, 19 nt, Artificial Sequence
  Description of Artificial Sequence: Synthetic oligonucleotide
ggggcgguaggcagaaguc

SEQ ID NO: 1695826 - RNA, 19 nt, Artificial Sequence
  Description of Artificial Sequence: Synthetic oligonucleotide
guguucucggccagguggu

SEQ ID NO: 1695827 - RNA, 19 nt, Artificial Sequence
  Description of Artificial Sequence: Synthetic oligonucleotide
ugccggucucacgguguga

SEQ ID NO: 1695828 - RNA, 19 nt, Artificial Sequence
  Description of Artificial Sequence: Synthetic oligonucleotide
gcguugaagcuaagacagc

SEQ ID NO: 1695829 - RNA, 19 nt, Artificial Sequence
  Description of Artificial Sequence: Synthetic oligonucleotide
ccucucaccaacgcaguga

SEQ ID NO: 1695830 - RNA, 19 nt, Artificial Sequence
  Description of Artificial Sequence: Synthetic oligonucleotide
cacugcuugcagacuuucu

SEQ ID NO: 1695831 - RNA, 19 nt, Artificial Sequence
  Description of Artificial Sequence: Synthetic oligonucleotide
gccagcccgagguaccaga

SEQ ID NO: 1695832 - RNA, 19 nt, Artificial Sequence
  Description of Artificial Sequence: Synthetic oligonucleotide
cugucugguaggugauagu

SEQ ID NO: 1695833 - RNA, 19 nt, Artificial Sequence
  Description of Artificial Sequence: Synthetic oligonucleotide
cuggguccugguaucuggu

SEQ ID NO: 1695834 - RNA, 19 nt, Artificial Sequence
  Description of Artificial Sequence: Synthetic oligonucleotide
cucagcgccgccgauucgu

SEQ ID NO: 1695835 - RNA, 19 nt, Artificial Sequence
  Description of Artificial Sequence: Synthetic oligonucleotide
gccgugcuaggcgaucagc

SEQ ID NO: 1695836 - RNA, 19 nt, Artificial Sequence
  Description of Artificial Sequence: Synthetic oligonucleotide
ccugucccugaaguauagc

SEQ ID NO: 1695837 - RNA, 19 nt, Artificial Sequence
  Description of Artificial Sequence: Synthetic oligonucleotide
gggcagcuucuucggugag

SEQ ID NO: 1695838 - RNA, 19 nt, Artificial Sequence
  Description of Artificial Sequence: Synthetic oligonucleotide
gggucaagcccuggcucug

SEQ ID NO: 1695839 - RNA, 19 nt, Artificial Sequence
  Description of Artificial Sequence: Synthetic oligonucleotide
gcuugugaggguacugacu

SEQ ID NO: 1695840 - RNA, 19 nt, Artificial Sequence
  Description of Artificial Sequence: Synthetic oligonucleotide
ggaugcccugacaccgggc

SEQ ID NO: 1695841 - RNA, 19 nt, Artificial Sequence
  Description of Artificial Sequence: Synthetic oligonucleotide
acuugacugcacagccgua

SEQ ID NO: 1695842 - RNA, 19 nt, Artificial Sequence
  Description of Artificial Sequence: Synthetic oligonucleotide
ccgagguaccagagcguug

SEQ ID NO: 1695843 - RNA, 19 nt, Artificial Sequence
  Description of Artificial Sequence: Synthetic oligonucleotide
gugccuggugugccggucu

SEQ ID NO: 1695844 - RNA, 19 nt, Artificial Sequence
  Description of Artificial Sequence: Synthetic oligonucleotide
cacucuguugggguccugu

SEQ ID NO: 1695845 - RNA, 19 nt, Artificial Sequence
  Description of Artificial Sequence: Synthetic oligonucleotide
guggaagggauggcgcccu

SEQ ID NO: 1695846 - RNA, 19 nt, Artificial Sequence
  Description of Artificial Sequence: Synthetic oligonucleotide
acggugugagaagguggua

SEQ ID NO: 1695847 - RNA, 19 nt, Artificial Sequence
  Description of Artificial Sequence: Synthetic oligonucleotide
guguugccagcccgaggua

SEQ ID NO: 1695848 - RNA, 19 nt, Artificial Sequence
  Description of Artificial Sequence: Synthetic oligonucleotide
cugcccuguaaugcugcaa

SEQ ID NO: 1695849 - RNA, 19 nt, Artificial Sequence
  Description of Artificial Sequence: Synthetic oligonucleotide
ggcgucucucagcgccgcc

SEQ ID NO: 1695850 - RNA, 19 nt, Artificial Sequence
  Description of Artificial Sequence: Synthetic oligonucleotide
ccucagccuaggcagccca

SEQ ID NO: 1695851 - RNA, 19 nt, Artificial Sequence
  Description of Artificial Sequence: Synthetic oligonucleotide
gggauggcgcccuggacuu

SEQ ID NO: 1695852 - RNA, 19 nt, Artificial Sequence
  Description of Artificial Sequence: Synthetic oligonucleotide
ggagccgugcuaggcgauc

SEQ ID NO: 1695853 - RNA, 19 nt, Artificial Sequence
  Description of Artificial Sequence: Synthetic oligonucleotide
ggugccuggugugccgguc

SEQ ID NO: 1695854 - RNA, 19 nt, Artificial Sequence
  Description of Artificial Sequence: Synthetic oligonucleotide
gguacugacuugggcuugu

SEQ ID NO: 1695855 - RNA, 19 nt, Artificial Sequence
  Description of Artificial Sequence: Synthetic oligonucleotide
gggaauuugugugcugguu

SEQ ID NO: 1695856 - RNA, 19 nt, Artificial Sequence
  Description of Artificial Sequence: Synthetic oligonucleotide
ccauggcgucucucagcgc

SEQ ID NO: 1695857 - RNA, 19 nt, Artificial Sequence
  Description of Artificial Sequence: Synthetic oligonucleotide
gggcgguaggcagaagucu

SEQ ID NO: 1695858 - RNA, 19 nt, Artificial Sequence
  Description of Artificial Sequence: Synthetic oligonucleotide
gcgccgccgauucguagga

SEQ ID NO: 1695859 - RNA, 19 nt, Artificial Sequence
  Description of Artificial Sequence: Synthetic oligonucleotide
ccagagcguugaagcuaag

SEQ ID NO: 1695860 - RNA, 19 nt, Artificial Sequence
  Description of Artificial Sequence: Synthetic oligonucleotide
ccugguguucuccucucgu

SEQ ID NO: 1695861 - RNA, 19 nt, Artificial Sequence
  Description of Artificial Sequence: Synthetic oligonucleotide
caggaucggcuaucccacu

SEQ ID NO: 1695862 - RNA, 19 nt, Artificial Sequence
  Description of Artificial Sequence: Synthetic oligonucleotide
cacugucugguaggugaua

SEQ ID NO: 1695863 - RNA, 19 nt, Artificial Sequence
  Description of Artificial Sequence: Synthetic oligonucleotide
ggcccggccacaguucuua

SEQ ID NO: 1695864 - RNA, 19 nt, Artificial Sequence
  Description of Artificial Sequence: Synthetic oligonucleotide
gcaagccgauccuccauuu

SEQ ID NO: 1695865 - RNA, 19 nt, Artificial Sequence
  Description of Artificial Sequence: Synthetic oligonucleotide
ggcucuucguucccagcuu

SEQ ID NO: 1695866 - RNA, 19 nt, Artificial Sequence
  Description of Artificial Sequence: Synthetic oligonucleotide
uggcgaccacuuggaggua

SEQ ID NO: 1695867 - RNA, 19 nt, Artificial Sequence
  Description of Artificial Sequence: Synthetic oligonucleotide
gcgcauguuaaagccacuu

SEQ ID NO: 1695868 - RNA, 19 nt, Artificial Sequence
  Description of Artificial Sequence: Synthetic oligonucleotide
ccgauucguaggaucgccu

SEQ ID NO: 1695869 - RNA, 19 nt, Artificial Sequence
  Description of Artificial Sequence: Synthetic oligonucleotide
cggucucacggugugagaa

SEQ ID NO: 1695870 - RNA, 19 nt, Artificial Sequence
  Description of Artificial Sequence: Synthetic oligonucleotide
ccgauccuccauuucucgu

SEQ ID NO: 1695871 - RNA, 19 nt, Artificial Sequence
  Description of Artificial Sequence: Synthetic oligonucleotide
cgccgauucguaggaucgc

SEQ ID NO: 1695872 - RNA, 19 nt, Artificial Sequence
  Description of Artificial Sequence: Synthetic oligonucleotide
ggcgagagccaggauccgu

SEQ ID NO: 1695873 - RNA, 19 nt, Artificial Sequence
  Description of Artificial Sequence: Synthetic oligonucleotide
ccaucgcagccagcacagc

SEQ ID NO: 1695874 - RNA, 19 nt, Artificial Sequence
  Description of Artificial Sequence: Synthetic oligonucleotide
gcccugacaccgggcccgg

SEQ ID NO: 1695875 - RNA, 19 nt, Artificial Sequence
  Description of Artificial Sequence: Synthetic oligonucleotide
gucucucagcgccgccgau

SEQ ID NO: 1695876 - RNA, 19 nt, Artificial Sequence
  Description of Artificial Sequence: Synthetic oligonucleotide
ggcgaccacuuggagguau

SEQ ID NO: 1695877 - RNA, 19 nt, Artificial Sequence
  Description of Artificial Sequence: Synthetic oligonucleotide
gcgagagccaggauccguu

SEQ ID NO: 1695878 - RNA, 19 nt, Artificial Sequence
  Description of Artificial Sequence: Synthetic oligonucleotide
cgucucucagcgccgccga

SEQ ID NO: 1695879 - RNA, 19 nt, Artificial Sequence
  Description of Artificial Sequence: Synthetic oligonucleotide
cguucccagcuuucaucga

SEQ ID NO: 1695880 - RNA, 19 nt, Artificial Sequence
  Description of Artificial Sequence: Synthetic oligonucleotide
auggcgcccuggacuucau

SEQ ID NO: 1695881 - RNA, 19 nt, Artificial Sequence
  Description of Artificial Sequence: Synthetic oligonucleotide
ggauggcgcccuggacuuc

SEQ ID NO: 1695882 - RNA, 19 nt, Artificial Sequence
  Description of Artificial Sequence: Synthetic oligonucleotide
guacugacuugggcuuguu

SEQ ID NO: 1695883 - RNA, 19 nt, Artificial Sequence
  Description of Artificial Sequence: Synthetic oligonucleotide
cguagcaccugcucuccau

SEQ ID NO: 1695884 - RNA, 19 nt, Artificial Sequence
  Description of Artificial Sequence: Synthetic oligonucleotide
ccaaggcugccacacgcuu

SEQ ID NO: 1695885 - RNA, 19 nt, Artificial Sequence
  Description of Artificial Sequence: Synthetic oligonucleotide
ccguuccugccugguguuc

SEQ ID NO: 1695886 - RNA, 19 nt, Artificial Sequence
  Description of Artificial Sequence: Synthetic oligonucleotide
ccguagcaccugcucucca

SEQ ID NO: 1695887 - RNA, 19 nt, Artificial Sequence
  Description of Artificial Sequence: Synthetic oligonucleotide
caacgcagugaaggccuuu

SEQ ID NO: 1695888 - RNA, 19 nt, Artificial Sequence
  Description of Artificial Sequence: Synthetic oligonucleotide
ccuuuccgacccucagccu

SEQ ID NO: 1695889 - RNA, 19 nt, Artificial Sequence
  Description of Artificial Sequence: Synthetic oligonucleotide
ccuggagggucacucuguu

SEQ ID NO: 1695890 - RNA, 19 nt, Artificial Sequence
  Description of Artificial Sequence: Synthetic oligonucleotide
ccugcucuccauggcgucu

SEQ ID NO: 1695891 - RNA, 19 nt, Artificial Sequence
  Description of Artificial Sequence: Synthetic oligonucleotide
cccgagguaccagagcguu

SEQ ID NO: 1695892 - RNA, 19 nt, Artificial Sequence
  Description of Artificial Sequence: Synthetic oligonucleotide
ccuaggcagcccagcccua

SEQ ID NO: 1695893 - RNA, 19 nt, Artificial Sequence
  Description of Artificial Sequence: Synthetic oligonucleotide
cguuccugccugguguucu

SEQ ID NO: 1695894 - RNA, 19 nt, Artificial Sequence
  Description of Artificial Sequence: Synthetic oligonucleotide
gcccgagguaccagagcgu

SEQ ID NO: 1695895 - RNA, 19 nt, Artificial Sequence
  Description of Artificial Sequence: Synthetic oligonucleotide
cccugacaccgggcccggg

SEQ ID NO: 1695896 - RNA, 19 nt, Artificial Sequence
  Description of Artificial Sequence: Synthetic oligonucleotide
cgaucagcgauggcuuggu

SEQ ID NO: 1695897 - RNA, 19 nt, Artificial Sequence
  Description of Artificial Sequence: Synthetic oligonucleotide
gcgauggcuuggucuuguu

SEQ ID NO: 1695898 - RNA, 19 nt, Artificial Sequence
  Description of Artificial Sequence: Synthetic oligonucleotide
gcgaccacuuggagguauu

SEQ ID NO: 1695899 - RNA, 19 nt, Artificial Sequence
  Description of Artificial Sequence: Synthetic oligonucleotide
ccaacgcagugaaggccuu

SEQ ID NO: 1695900 - RNA, 19 nt, Artificial Sequence
  Description of Artificial Sequence: Synthetic oligonucleotide
cucccuuguugaggucauu

SEQ ID NO: 1695901 - RNA, 19 nt, Artificial Sequence
  Description of Artificial Sequence: Synthetic oligonucleotide
cgccucucaccaacgcagu

SEQ ID NO: 1695902 - RNA, 19 nt, Artificial Sequence
  Description of Artificial Sequence: Synthetic oligonucleotide
cgccgccgauucguaggau

SEQ ID NO: 1695903 - RNA, 19 nt, Artificial Sequence
  Description of Artificial Sequence: Synthetic oligonucleotide
uauuuugccuguauacucg

SEQ ID NO: 1695904 - RNA, 19 nt, Artificial Sequence
  Description of Artificial Sequence: Synthetic oligonucleotide
agcuguucaauauuuugcc

SEQ ID NO: 1695905 - RNA, 19 nt, Artificial Sequence
  Description of Artificial Sequence: Synthetic oligonucleotide
agcuucuccaaguaggacc

SEQ ID NO: 1695906 - RNA, 19 nt, Artificial Sequence
  Description of Artificial Sequence: Synthetic oligonucleotide
aauuaguggggugacuucc

SEQ ID NO: 1695907 - RNA, 19 nt, Artificial Sequence
  Description of Artificial Sequence: Synthetic oligonucleotide
ugagaaacaguccuaaccu

SEQ ID NO: 1695908 - RNA, 19 nt, Artificial Sequence
  Description of Artificial Sequence: Synthetic oligonucleotide
auauuuugccuguauacuc

SEQ ID NO: 1695909 - RNA, 19 nt, Artificial Sequence
  Description of Artificial Sequence: Synthetic oligonucleotide
cauaguaauucugauacgg

SEQ ID NO: 1695910 - RNA, 19 nt, Artificial Sequence
  Description of Artificial Sequence: Synthetic oligonucleotide
gaagccauugaugucaccg

SEQ ID NO: 1695911 - RNA, 19 nt, Artificial Sequence
  Description of Artificial Sequence: Synthetic oligonucleotide
aauugaucucugucuggcc

SEQ ID NO: 1695912 - RNA, 19 nt, Artificial Sequence
  Description of Artificial Sequence: Synthetic oligonucleotide
uguguagucauagagcgcc

SEQ ID NO: 1695913 - RNA, 19 nt, Artificial Sequence
  Description of Artificial Sequence: Synthetic oligonucleotide
agcaguaccucauaucccg

SEQ ID NO: 1695914 - RNA, 19 nt, Artificial Sequence
  Description of Artificial Sequence: Synthetic oligonucleotide
aaagccacgcuguccauuc

SEQ ID NO: 1695915 - RNA, 19 nt, Artificial Sequence
  Description of Artificial Sequence: Synthetic oligonucleotide
ucugauacggcaccggagc

SEQ ID NO: 1695916 - RNA, 19 nt, Artificial Sequence
  Description of Artificial Sequence: Synthetic oligonucleotide
uuaucacaccacaggaugg

SEQ ID NO: 1695917 - RNA, 19 nt, Artificial Sequence
  Description of Artificial Sequence: Synthetic oligonucleotide
aaauuaguggggugacuuc

SEQ ID NO: 1695918 - RNA, 19 nt, Artificial Sequence
  Description of Artificial Sequence: Synthetic oligonucleotide
ucaagugucagccguaccu

SEQ ID NO: 1695919 - RNA, 19 nt, Artificial Sequence
  Description of Artificial Sequence: Synthetic oligonucleotide
guugccugcacgucgaugg

SEQ ID NO: 1695920 - RNA, 19 nt, Artificial Sequence
  Description of Artificial Sequence: Synthetic oligonucleotide
auagaccaacucuuugugc

SEQ ID NO: 1695921 - RNA, 19 nt, Artificial Sequence
  Description of Artificial Sequence: Synthetic oligonucleotide
gugagaaacaguccuaacc

SEQ ID NO: 1695922 - RNA, 19 nt, Artificial Sequence
  Description of Artificial Sequence: Synthetic oligonucleotide
gcuguguagucauagagcg

SEQ ID NO: 1695923 - RNA, 19 nt, Artificial Sequence
  Description of Artificial Sequence: Synthetic oligonucleotide
auuuugccuguauacucgc

SEQ ID NO: 1695924 - RNA, 19 nt, Artificial Sequence
  Description of Artificial Sequence: Synthetic oligonucleotide
gagaagaugugaucuuggg

SEQ ID NO: 1695925 - RNA, 19 nt, Artificial Sequence
  Description of Artificial Sequence: Synthetic oligonucleotide
ugcuguguagucauagagc

SEQ ID NO: 1695926 - RNA, 19 nt, Artificial Sequence
  Description of Artificial Sequence: Synthetic oligonucleotide
auaguaauucugauacggc

SEQ ID NO: 1695927 - RNA, 19 nt, Artificial Sequence
  Description of Artificial Sequence: Synthetic oligonucleotide
uguauacucgcucugccuc

SEQ ID NO: 1695928 - RNA, 19 nt, Artificial Sequence
  Description of Artificial Sequence: Synthetic oligonucleotide
cacucaugcgcucaaaggc

SEQ ID NO: 1695929 - RNA, 19 nt, Artificial Sequence
  Description of Artificial Sequence: Synthetic oligonucleotide
uauucuggcucuuuucuac

SEQ ID NO: 1695930 - RNA, 19 nt, Artificial Sequence
  Description of Artificial Sequence: Synthetic oligonucleotide
gauggcuggacacuagggc

SEQ ID NO: 1695931 - RNA, 19 nt, Artificial Sequence
  Description of Artificial Sequence: Synthetic oligonucleotide
ucauaguaauucugauacg

SEQ ID NO: 1695932 - RNA, 19 nt, Artificial Sequence
  Description of Artificial Sequence: Synthetic oligonucleotide
agggaauugaucucugucu

SEQ ID NO: 1695933 - RNA, 19 nt, Artificial Sequence
  Description of Artificial Sequence: Synthetic oligonucleotide
auugaucucugucuggcca

SEQ ID NO: 1695934 - RNA, 19 nt, Artificial Sequence
  Description of Artificial Sequence: Synthetic oligonucleotide
guaauucugauacggcacc

SEQ ID NO: 1695935 - RNA, 19 nt, Artificial Sequence
  Description of Artificial Sequence: Synthetic oligonucleotide
augaccaccagaaugucuc

SEQ ID NO: 1695936 - RNA, 19 nt, Artificial Sequence
  Description of Artificial Sequence: Synthetic oligonucleotide
aauucugauacggcaccgg

SEQ ID NO: 1695937 - RNA, 19 nt, Artificial Sequence
  Description of Artificial Sequence: Synthetic oligonucleotide
gaauugaucucugucuggc

SEQ ID NO: 1695938 - RNA, 19 nt, Artificial Sequence
  Description of Artificial Sequence: Synthetic oligonucleotide
ucaccguccacauuacagc

SEQ ID NO: 1695939 - RNA, 19 nt, Artificial Sequence
  Description of Artificial Sequence: Synthetic oligonucleotide
aagaugugaucuugggacu

SEQ ID NO: 1695940 - RNA, 19 nt, Artificial Sequence
  Description of Artificial Sequence: Synthetic oligonucleotide
uggccguuggcacucaugc

SEQ ID NO: 1695941 - RNA, 19 nt, Artificial Sequence
  Description of Artificial Sequence: Synthetic oligonucleotide
ugugucaugguuccccugu

SEQ ID NO: 1695942 - RNA, 19 nt, Artificial Sequence
  Description of Artificial Sequence: Synthetic oligonucleotide
cuuguagagugacagcuug

SEQ ID NO: 1695943 - RNA, 19 nt, Artificial Sequence
  Description of Artificial Sequence: Synthetic oligonucleotide
ggcacuucuggucauaugc

SEQ ID NO: 1695944 - RNA, 19 nt, Artificial Sequence
  Description of Artificial Sequence: Synthetic oligonucleotide
uccuccacaucuuugcaca

SEQ ID NO: 1695945 - RNA, 19 nt, Artificial Sequence
  Description of Artificial Sequence: Synthetic oligonucleotide
acucaugcgcucaaaggcc

SEQ ID NO: 1695946 - RNA, 19 nt, Artificial Sequence
  Description of Artificial Sequence: Synthetic oligonucleotide
gcagcaguaccucauaucc

SEQ ID NO: 1695947 - RNA, 19 nt, Artificial Sequence
  Description of Artificial Sequence: Synthetic oligonucleotide
uuaguggggugacuucccg

SEQ ID NO: 1695948 - RNA, 19 nt, Artificial Sequence
  Description of Artificial Sequence: Synthetic oligonucleotide
ucggucaaacuccugcagc

SEQ ID NO: 1695949 - RNA, 19 nt, Artificial Sequence
  Description of Artificial Sequence: Synthetic oligonucleotide
ugaugugucaugguucccc

SEQ ID NO: 1695950 - RNA, 19 nt, Artificial Sequence
  Description of Artificial Sequence: Synthetic oligonucleotide
uucugauacggcaccggag

SEQ ID NO: 1695951 - RNA, 19 nt, Artificial Sequence
  Description of Artificial Sequence: Synthetic oligonucleotide
cauagaccaacucuuugug

SEQ ID NO: 1695952 - RNA, 19 nt, Artificial Sequence
  Description of Artificial Sequence: Synthetic oligonucleotide
ucauaucccgugugggccg

SEQ ID NO: 1695953 - RNA, 19 nt, Artificial Sequence
  Description of Artificial Sequence: Synthetic oligonucleotide
uccacuguccaccagccau

SEQ ID NO: 1695954 - RNA, 19 nt, Artificial Sequence
  Description of Artificial Sequence: Synthetic oligonucleotide
cuuugcacaucuuccugcc

SEQ ID NO: 1695955 - RNA, 19 nt, Artificial Sequence
  Description of Artificial Sequence: Synthetic oligonucleotide
cuuuccucagagcuucucc

SEQ ID NO: 1695956 - RNA, 19 nt, Artificial Sequence
  Description of Artificial Sequence: Synthetic oligonucleotide
uugagaagaugugaucuug

SEQ ID NO: 1695957 - RNA, 19 nt, Artificial Sequence
  Description of Artificial Sequence: Synthetic oligonucleotide
uaauucugauacggcaccg

SEQ ID NO: 1695958 - RNA, 19 nt, Artificial Sequence
  Description of Artificial Sequence: Synthetic oligonucleotide
gaaccucuuuaucacacca

SEQ ID NO: 1695959 - RNA, 19 nt, Artificial Sequence
  Description of Artificial Sequence: Synthetic oligonucleotide
cucacggagggccagggcc

SEQ ID NO: 1695960 - RNA, 19 nt, Artificial Sequence
  Description of Artificial Sequence: Synthetic oligonucleotide
cacauuacagccuucaagu

SEQ ID NO: 1695961 - RNA, 19 nt, Artificial Sequence
  Description of Artificial Sequence: Synthetic oligonucleotide
agucaaaggagguccucag

SEQ ID NO: 1695962 - RNA, 19 nt, Artificial Sequence
  Description of Artificial Sequence: Synthetic oligonucleotide
agcucaucggaauucugug

SEQ ID NO: 1695963 - RNA, 19 nt, Artificial Sequence
  Description of Artificial Sequence: Synthetic oligonucleotide
caugcagcagcccagagaa

SEQ ID NO: 1695964 - RNA, 19 nt, Artificial Sequence
  Description of Artificial Sequence: Synthetic oligonucleotide
ccuaaccucacugugaggg

SEQ ID NO: 1695965 - RNA, 19 nt, Artificial Sequence
  Description of Artificial Sequence: Synthetic oligonucleotide
uguagagugacagcuugcu

SEQ ID NO: 1695966 - RNA, 19 nt, Artificial Sequence
  Description of Artificial Sequence: Synthetic oligonucleotide
caugguuccccuguguugc

SEQ ID NO: 1695967 - RNA, 19 nt, Artificial Sequence
  Description of Artificial Sequence: Synthetic oligonucleotide
guccuaaccucacugugag

SEQ ID NO: 1695968 - RNA, 19 nt, Artificial Sequence
  Description of Artificial Sequence: Synthetic oligonucleotide
ucauagagcgcccgguagu

SEQ ID NO: 1695969 - RNA, 19 nt, Artificial Sequence
  Description of Artificial Sequence: Synthetic oligonucleotide
ucaggaguaggagccagag

SEQ ID NO: 1695970 - RNA, 19 nt, Artificial Sequence
  Description of Artificial Sequence: Synthetic oligonucleotide
uguguugccugcacgucga

SEQ ID NO: 1695971 - RNA, 19 nt, Artificial Sequence
  Description of Artificial Sequence: Synthetic oligonucleotide
cuugcgcgcaaucugcacc

SEQ ID NO: 1695972 - RNA, 19 nt, Artificial Sequence
  Description of Artificial Sequence: Synthetic oligonucleotide
ucucugucuggccaccagc

SEQ ID NO: 1695973 - RNA, 19 nt, Artificial Sequence
  Description of Artificial Sequence: Synthetic oligonucleotide
ugacuucccggucauagua

SEQ ID NO: 1695974 - RNA, 19 nt, Artificial Sequence
  Description of Artificial Sequence: Synthetic oligonucleotide
gucaccguccacauuacag

SEQ ID NO: 1695975 - RNA, 19 nt, Artificial Sequence
  Description of Artificial Sequence: Synthetic oligonucleotide
acauuacagccuucaagug

SEQ ID NO: 1695976 - RNA, 19 nt, Artificial Sequence
  Description of Artificial Sequence: Synthetic oligonucleotide
cucauaucccgugugggcc

SEQ ID NO: 1695977 - RNA, 19 nt, Artificial Sequence
  Description of Artificial Sequence: Synthetic oligonucleotide
cuucccguaccucucuucc

SEQ ID NO: 1695978 - RNA, 19 nt, Artificial Sequence
  Description of Artificial Sequence: Synthetic oligonucleotide
uuccguuccacuguccacc

SEQ ID NO: 1695979 - RNA, 19 nt, Artificial Sequence
  Description of Artificial Sequence: Synthetic oligonucleotide
aguaccucauaucccgugu

SEQ ID NO: 1695980 - RNA, 19 nt, Artificial Sequence
  Description of Artificial Sequence: Synthetic oligonucleotide
auuaguggggugacuuccc

SEQ ID NO: 1695981 - RNA, 19 nt, Artificial Sequence
  Description of Artificial Sequence: Synthetic oligonucleotide
cuguggaagcagcagguag

SEQ ID NO: 1695982 - RNA, 19 nt, Artificial Sequence
  Description of Artificial Sequence: Synthetic oligonucleotide
ucccguaccucucuuccgc

SEQ ID NO: 1695983 - RNA, 19 nt, Artificial Sequence
  Description of Artificial Sequence: Synthetic oligonucleotide
aaacaguccuaaccucacu

SEQ ID NO: 1695984 - RNA, 19 nt, Artificial Sequence
  Description of Artificial Sequence: Synthetic oligonucleotide
uucccggucauaguaauuc

SEQ ID NO: 1695985 - RNA, 19 nt, Artificial Sequence
  Description of Artificial Sequence: Synthetic oligonucleotide
uaucacaccacaggauggc

SEQ ID NO: 1695986 - RNA, 19 nt, Artificial Sequence
  Description of Artificial Sequence: Synthetic oligonucleotide
gagaaccucuuuaucacac

SEQ ID NO: 1695987 - RNA, 19 nt, Artificial Sequence
  Description of Artificial Sequence: Synthetic oligonucleotide
cuguguugccugcacgucg

SEQ ID NO: 1695988 - RNA, 19 nt, Artificial Sequence
  Description of Artificial Sequence: Synthetic oligonucleotide
uugguucuggccccaugag

SEQ ID NO: 1695989 - RNA, 19 nt, Artificial Sequence
  Description of Artificial Sequence: Synthetic oligonucleotide
cuagggcugcaaauuagug

SEQ ID NO: 1695990 - RNA, 19 nt, Artificial Sequence
  Description of Artificial Sequence: Synthetic oligonucleotide
aguggggugacuucccggu

SEQ ID NO: 1695991 - RNA, 19 nt, Artificial Sequence
  Description of Artificial Sequence: Synthetic oligonucleotide
gucauaugccuucuuggac

SEQ ID NO: 1695992 - RNA, 19 nt, Artificial Sequence
  Description of Artificial Sequence: Synthetic oligonucleotide
auucugauacggcaccgga

SEQ ID NO: 1695993 - RNA, 19 nt, Artificial Sequence
  Description of Artificial Sequence: Synthetic oligonucleotide
cugguuacagugcacccac

SEQ ID NO: 1695994 - RNA, 19 nt, Artificial Sequence
  Description of Artificial Sequence: Synthetic oligonucleotide
gagaaacaguccuaaccuc

SEQ ID NO: 1695995 - RNA, 19 nt, Artificial Sequence
  Description of Artificial Sequence: Synthetic oligonucleotide
gucauagagcgcccgguag

SEQ ID NO: 1695996 - RNA, 19 nt, Artificial Sequence
  Description of Artificial Sequence: Synthetic oligonucleotide
caccguccacauuacagcc

SEQ ID NO: 1695997 - RNA, 19 nt, Artificial Sequence
  Description of Artificial Sequence: Synthetic oligonucleotide
uucugugcuguguagucau

SEQ ID NO: 1695998 - RNA, 19 nt, Artificial Sequence
  Description of Artificial Sequence: Synthetic oligonucleotide
ggaauugaucucugucugg

SEQ ID NO: 1695999 - RNA, 19 nt, Artificial Sequence
  Description of Artificial Sequence: Synthetic oligonucleotide
uucugauggccguuggcac

SEQ ID NO: 1696000 - RNA, 19 nt, Artificial Sequence
  Description of Artificial Sequence: Synthetic oligonucleotide
cuacuugcuucugauggcc

SEQ ID NO: 1696001 - RNA, 19 nt, Artificial Sequence
  Description of Artificial Sequence: Synthetic oligonucleotide
uaguugagaagaugugauc

SEQ ID NO: 1696002 - RNA, 19 nt, Artificial Sequence
  Description of Artificial Sequence: Synthetic oligonucleotide
acaguccuaaccucacugu

SEQ ID NO: 1696003 - RNA, 19 nt, Artificial Sequence
  Description of Artificial Sequence: Synthetic oligonucleotide
uuucggaggauggucaguc

SEQ ID NO: 1696004 - RNA, 19 nt, Artificial Sequence
  Description of Artificial Sequence: Synthetic oligonucleotide
uggcuggacacuagggcug

SEQ ID NO: 1696005 - RNA, 19 nt, Artificial Sequence
  Description of Artificial Sequence: Synthetic oligonucleotide
uugaucucugucuggccac

SEQ ID NO: 1696006 - RNA, 19 nt, Artificial Sequence
  Description of Artificial Sequence: Synthetic oligonucleotide
uucuggacacgguccauga

SEQ ID NO: 1696007 - RNA, 19 nt, Artificial Sequence
  Description of Artificial Sequence: Synthetic oligonucleotide
cacuagggcugcaaauuag

SEQ ID NO: 1696008 - RNA, 19 nt, Artificial Sequence
  Description of Artificial Sequence: Synthetic oligonucleotide
uagagcgcccgguaguucu

SEQ ID NO: 1696009 - RNA, 19 nt, Artificial Sequence
  Description of Artificial Sequence: Synthetic oligonucleotide
ugcuucugauggccguugg

SEQ ID NO: 1696010 - RNA, 19 nt, Artificial Sequence
  Description of Artificial Sequence: Synthetic oligonucleotide
agccacgcuguccauuccg

SEQ ID NO: 1696011 - RNA, 19 nt, Artificial Sequence
  Description of Artificial Sequence: Synthetic oligonucleotide
gaugugugcgcugcccacg

SEQ ID NO: 1696012 - RNA, 19 nt, Artificial Sequence
  Description of Artificial Sequence: Synthetic oligonucleotide
cagggaauugaucucuguc

SEQ ID NO: 1696013 - RNA, 19 nt, Artificial Sequence
  Description of Artificial Sequence: Synthetic oligonucleotide
uucaagugucagccguacc

SEQ ID NO: 1696014 - RNA, 19 nt, Artificial Sequence
  Description of Artificial Sequence: Synthetic oligonucleotide
cuaaccucacugugagggc

SEQ ID NO: 1696015 - RNA, 19 nt, Artificial Sequence
  Description of Artificial Sequence: Synthetic oligonucleotide
uucggaggauggucagucg

SEQ ID NO: 1696016 - RNA, 19 nt, Artificial Sequence
  Description of Artificial Sequence: Synthetic oligonucleotide
gagcugguuacagugcacc

SEQ ID NO: 1696017 - RNA, 19 nt, Artificial Sequence
  Description of Artificial Sequence: Synthetic oligonucleotide
acauugcauggagagcugg

SEQ ID NO: 1696018 - RNA, 19 nt, Artificial Sequence
  Description of Artificial Sequence: Synthetic oligonucleotide
agucggucaaacuccugca

SEQ ID NO: 1696019 - RNA, 19 nt, Artificial Sequence
  Description of Artificial Sequence: Synthetic oligonucleotide
ucaucggaauucugugcug

SEQ ID NO: 1696020 - RNA, 19 nt, Artificial Sequence
  Description of Artificial Sequence: Synthetic oligonucleotide
ugcagcaguaccucauauc

SEQ ID NO: 1696021 - RNA, 19 nt, Artificial Sequence
  Description of Artificial Sequence: Synthetic oligonucleotide
uggucuucuuguagaguga

SEQ ID NO: 1696022 - RNA, 19 nt, Artificial Sequence
  Description of Artificial Sequence: Synthetic oligonucleotide
accucauaucccguguggg

SEQ ID NO: 1696023 - RNA, 19 nt, Artificial Sequence
  Description of Artificial Sequence: Synthetic oligonucleotide
uucccguaccucucuuccg

SEQ ID NO: 1696024 - RNA, 19 nt, Artificial Sequence
  Description of Artificial Sequence: Synthetic oligonucleotide
uucuccaaguaggacccag

SEQ ID NO: 1696025 - RNA, 19 nt, Artificial Sequence
  Description of Artificial Sequence: Synthetic oligonucleotide
ucuuguagagugacagcuu

SEQ ID NO: 1696026 - RNA, 19 nt, Artificial Sequence
  Description of Artificial Sequence: Synthetic oligonucleotide
uugcgcgcaaucugcacca

SEQ ID NO: 1696027 - RNA, 19 nt, Artificial Sequence
  Description of Artificial Sequence: Synthetic oligonucleotide
ugcaaauuaguggggugac

SEQ ID NO: 1696028 - RNA, 19 nt, Artificial Sequence
  Description of Artificial Sequence: Synthetic oligonucleotide
uuuugccuguauacucgcu

SEQ ID NO: 1696029 - RNA, 19 nt, Artificial Sequence
  Description of Artificial Sequence: Synthetic oligonucleotide
agccuugcgcgcaaucugc

SEQ ID NO: 1696030 - RNA, 19 nt, Artificial Sequence
  Description of Artificial Sequence: Synthetic oligonucleotide
ggugacuucccggucauag

SEQ ID NO: 1696031 - RNA, 19 nt, Artificial Sequence
  Description of Artificial Sequence: Synthetic oligonucleotide
caccagucuuuccucagag

SEQ ID NO: 1696032 - RNA, 19 nt, Artificial Sequence
  Description of Artificial Sequence: Synthetic oligonucleotide
ucagggaauugaucucugu

SEQ ID NO: 1696033 - RNA, 19 nt, Artificial Sequence
  Description of Artificial Sequence: Synthetic oligonucleotide
ugggccgugaagucccugc

SEQ ID NO: 1696034 - RNA, 19 nt, Artificial Sequence
  Description of Artificial Sequence: Synthetic oligonucleotide
cuggacacgguccaugaca

SEQ ID NO: 1696035 - RNA, 19 nt, Artificial Sequence
  Description of Artificial Sequence: Synthetic oligonucleotide
uggacacuagggcugcaaa

SEQ ID NO: 1696036 - RNA, 19 nt, Artificial Sequence
  Description of Artificial Sequence: Synthetic oligonucleotide
ucuuucugccucucacgga

SEQ ID NO: 1696037 - RNA, 19 nt, Artificial Sequence
  Description of Artificial Sequence: Synthetic oligonucleotide
cacgucgauggcugcauag

SEQ ID NO: 1696038 - RNA, 19 nt, Artificial Sequence
  Description of Artificial Sequence: Synthetic oligonucleotide
caguggugagaaacagucc

SEQ ID NO: 1696039 - RNA, 19 nt, Artificial Sequence
  Description of Artificial Sequence: Synthetic oligonucleotide
aggauggucagucggucaa

SEQ ID NO: 1696040 - RNA, 19 nt, Artificial Sequence
  Description of Artificial Sequence: Synthetic oligonucleotide
cagcaguaccucauauccc

SEQ ID NO: 1696041 - RNA, 19 nt, Artificial Sequence
  Description of Artificial Sequence: Synthetic oligonucleotide
uggugagaaacaguccuaa

SEQ ID NO: 1696042 - RNA, 19 nt, Artificial Sequence
  Description of Artificial Sequence: Synthetic oligonucleotide
ugugcgcugcccacguucu

SEQ ID NO: 1696043 - RNA, 19 nt, Artificial Sequence
  Description of Artificial Sequence: Synthetic oligonucleotide
cuguguagucauagagcgc

SEQ ID NO: 1696044 - RNA, 19 nt, Artificial Sequence
  Description of Artificial Sequence: Synthetic oligonucleotide
caguccuaaccucacugug

SEQ ID NO: 1696045 - RNA, 19 nt, Artificial Sequence
  Description of Artificial Sequence: Synthetic oligonucleotide
aggccuguucagcaucauc

SEQ ID NO: 1696046 - RNA, 19 nt, Artificial Sequence
  Description of Artificial Sequence: Synthetic oligonucleotide
gccguuggcacucaugcgc

SEQ ID NO: 1696047 - RNA, 19 nt, Artificial Sequence
  Description of Artificial Sequence: Synthetic oligonucleotide
ugccuguauacucgcucug

SEQ ID NO: 1696048 - RNA, 19 nt, Artificial Sequence
  Description of Artificial Sequence: Synthetic oligonucleotide
gguaguugagaagauguga

SEQ ID NO: 1696049 - RNA, 19 nt, Artificial Sequence
  Description of Artificial Sequence: Synthetic oligonucleotide
caaaggccuguucagcauc

SEQ ID NO: 1696050 - RNA, 19 nt, Artificial Sequence
  Description of Artificial Sequence: Synthetic oligonucleotide
guaccucauaucccgugug

SEQ ID NO: 1696051 - RNA, 19 nt, Artificial Sequence
  Description of Artificial Sequence: Synthetic oligonucleotide
aucccggcacuucugguca

SEQ ID NO: 1696052 - RNA, 19 nt, Artificial Sequence
  Description of Artificial Sequence: Synthetic oligonucleotide
cacgcuguccauuccguuc

SEQ ID NO: 1696053 - RNA, 19 nt, Artificial Sequence
  Description of Artificial Sequence: Synthetic oligonucleotide
gcaguggugagaaacaguc

SEQ ID NO: 1696054 - RNA, 19 nt, Artificial Sequence
  Description of Artificial Sequence: Synthetic oligonucleotide
augguuccccuguguugcc

SEQ ID NO: 1696055 - RNA, 19 nt, Artificial Sequence
  Description of Artificial Sequence: Synthetic oligonucleotide
ugauacggcaccggagcug

SEQ ID NO: 1696056 - RNA, 19 nt, Artificial Sequence
  Description of Artificial Sequence: Synthetic oligonucleotide
acccacagggcauuucgga

SEQ ID NO: 1696057 - RNA, 19 nt, Artificial Sequence
  Description of Artificial Sequence: Synthetic oligonucleotide
gagucaaaggagguccuca

SEQ ID NO: 1696058 - RNA, 19 nt, Artificial Sequence
  Description of Artificial Sequence: Synthetic oligonucleotide
acuagggcugcaaauuagu

SEQ ID NO: 1696059 - RNA, 19 nt, Artificial Sequence
  Description of Artificial Sequence: Synthetic oligonucleotide
uugggacuuccaugcagca

SEQ ID NO: 1696060 - RNA, 19 nt, Artificial Sequence
  Description of Artificial Sequence: Synthetic oligonucleotide
cuucugauggccguuggca

SEQ ID NO: 1696061 - RNA, 19 nt, Artificial Sequence
  Description of Artificial Sequence: Synthetic oligonucleotide
uguccagcucaucggaauu

SEQ ID NO: 1696062 - RNA, 19 nt, Artificial Sequence
  Description of Artificial Sequence: Synthetic oligonucleotide
gcacccacagggcauuucg

SEQ ID NO: 1696063 - RNA, 19 nt, Artificial Sequence
  Description of Artificial Sequence: Synthetic oligonucleotide
ugugagcaccagucuuucc

SEQ ID NO: 1696064 - RNA, 19 nt, Artificial Sequence
  Description of Artificial Sequence: Synthetic oligonucleotide
cauuacagccuucaagugu

SEQ ID NO: 1696065 - RNA, 19 nt, Artificial Sequence
  Description of Artificial Sequence: Synthetic oligonucleotide
uccucagggaauugaucuc

SEQ ID NO: 1696066 - RNA, 19 nt, Artificial Sequence
  Description of Artificial Sequence: Synthetic oligonucleotide
ggucauaugccuucuugga

SEQ ID NO: 1696067 - RNA, 19 nt, Artificial Sequence
  Description of Artificial Sequence: Synthetic oligonucleotide
aucggaauucugugcugug

SEQ ID NO: 1696068 - RNA, 19 nt, Artificial Sequence
  Description of Artificial Sequence: Synthetic oligonucleotide
uacggcaccggagcugggg

SEQ ID NO: 1696069 - RNA, 19 nt, Artificial Sequence
  Description of Artificial Sequence: Synthetic oligonucleotide
ucggaauucugugcugugu

SEQ ID NO: 1696070 - RNA, 19 nt, Artificial Sequence
  Description of Artificial Sequence: Synthetic oligonucleotide
acacuagggcugcaaauua

SEQ ID NO: 1696071 - RNA, 19 nt, Artificial Sequence
  Description of Artificial Sequence: Synthetic oligonucleotide
uucaguccucgcucucucc

SEQ ID NO: 1696072 - RNA, 19 nt, Artificial Sequence
  Description of Artificial Sequence: Synthetic oligonucleotide
caucccggcacuucugguc

SEQ ID NO: 1696073 - RNA, 19 nt, Artificial Sequence
  Description of Artificial Sequence: Synthetic oligonucleotide
aguccuaaccucacuguga

SEQ ID NO: 1696074 - RNA, 19 nt, Artificial Sequence
  Description of Artificial Sequence: Synthetic oligonucleotide
cauuccguuccacugucca

SEQ ID NO: 1696075 - RNA, 19 nt, Artificial Sequence
  Description of Artificial Sequence: Synthetic oligonucleotide
ugggacuuccaugcagcag

SEQ ID NO: 1696076 - RNA, 19 nt, Artificial Sequence
  Description of Artificial Sequence: Synthetic oligonucleotide
ucccggucauaguaauucu

SEQ ID NO: 1696077 - RNA, 19 nt, Artificial Sequence
  Description of Artificial Sequence: Synthetic oligonucleotide
caguaccucauaucccgug

SEQ ID NO: 1696078 - RNA, 19 nt, Artificial Sequence
  Description of Artificial Sequence: Synthetic oligonucleotide
uacagccuucaagugucag

SEQ ID NO: 1696079 - RNA, 19 nt, Artificial Sequence
  Description of Artificial Sequence: Synthetic oligonucleotide
acuucccggucauaguaau

SEQ ID NO: 1696080 - RNA, 19 nt, Artificial Sequence
  Description of Artificial Sequence: Synthetic oligonucleotide
agccguaccucuucauaga

SEQ ID NO: 1696081 - RNA, 19 nt, Artificial Sequence
  Description of Artificial Sequence: Synthetic oligonucleotide
guaccucucuuccgccugg

SEQ ID NO: 1696082 - RNA, 19 nt, Artificial Sequence
  Description of Artificial Sequence: Synthetic oligonucleotide
cugccucucacggaacucc

SEQ ID NO: 1696083 - RNA, 19 nt, Artificial Sequence
  Description of Artificial Sequence: Synthetic oligonucleotide
ggcacucaugcgcucaaag

SEQ ID NO: 1696084 - RNA, 19 nt, Artificial Sequence
  Description of Artificial Sequence: Synthetic oligonucleotide
agccagagaaucuguggaa

SEQ ID NO: 1696085 - RNA, 19 nt, Artificial Sequence
  Description of Artificial Sequence: Synthetic oligonucleotide
accucucuuccgccugggc

SEQ ID NO: 1696086 - RNA, 19 nt, Artificial Sequence
  Description of Artificial Sequence: Synthetic oligonucleotide
cuucaagugucagccguac

SEQ ID NO: 1696087 - RNA, 19 nt, Artificial Sequence
  Description of Artificial Sequence: Synthetic oligonucleotide
ugucaccguccacauuaca

SEQ ID NO: 1696088 - RNA, 19 nt, Artificial Sequence
  Description of Artificial Sequence: Synthetic oligonucleotide
uggcucuuuucuacuugcu

SEQ ID NO: 1696089 - RNA, 19 nt, Artificial Sequence
  Description of Artificial Sequence: Synthetic oligonucleotide
cugcaaauuagugggguga

SEQ ID NO: 1696090 - RNA, 19 nt, Artificial Sequence
  Description of Artificial Sequence: Synthetic oligonucleotide
cacccacagggcauuucgg

SEQ ID NO: 1696091 - RNA, 19 nt, Artificial Sequence
  Description of Artificial Sequence: Synthetic oligonucleotide
cucaucggaauucugugcu

SEQ ID NO: 1696092 - RNA, 19 nt, Artificial Sequence
  Description of Artificial Sequence: Synthetic oligonucleotide
guagagugacagcuugcuc

SEQ ID NO: 1696093 - RNA, 19 nt, Artificial Sequence
  Description of Artificial Sequence: Synthetic oligonucleotide
uggcggacuccuugcacug

SEQ ID NO: 1696094 - RNA, 19 nt, Artificial Sequence
  Description of Artificial Sequence: Synthetic oligonucleotide
uuucugccucucacggaac

SEQ ID NO: 1696095 - RNA, 19 nt, Artificial Sequence
  Description of Artificial Sequence: Synthetic oligonucleotide
guaguugagaagaugugau

SEQ ID NO: 1696096 - RNA, 19 nt, Artificial Sequence
  Description of Artificial Sequence: Synthetic oligonucleotide
ggucauaguaauucugaua

SEQ ID NO: 1696097 - RNA, 19 nt, Artificial Sequence
  Description of Artificial Sequence: Synthetic oligonucleotide
gcucaucggaauucugugc

SEQ ID NO: 1696098 - RNA, 19 nt, Artificial Sequence
  Description of Artificial Sequence: Synthetic oligonucleotide
ucuggccaccagccuugcg

SEQ ID NO: 1696099 - RNA, 19 nt, Artificial Sequence
  Description of Artificial Sequence: Synthetic oligonucleotide
caagugucagccguaccuc

SEQ ID NO: 1696100 - RNA, 19 nt, Artificial Sequence
  Description of Artificial Sequence: Synthetic oligonucleotide
uccguuccacuguccacca

SEQ ID NO: 1696101 - RNA, 19 nt, Artificial Sequence
  Description of Artificial Sequence: Synthetic oligonucleotide
cacauugcauggagagcug

SEQ ID NO: 1696102 - RNA, 19 nt, Artificial Sequence
  Description of Artificial Sequence: Synthetic oligonucleotide
uugccugcacgucgauggc

SEQ ID NO: 1696103 - RNA, 19 nt, Artificial Sequence
  Description of Artificial Sequence: Synthetic oligonucleotide
gcugcaaauuaguggggug

SEQ ID NO: 1696104 - RNA, 19 nt, Artificial Sequence
  Description of Artificial Sequence: Synthetic oligonucleotide
gaauucugugcuguguagu

SEQ ID NO: 1696105 - RNA, 19 nt, Artificial Sequence
  Description of Artificial Sequence: Synthetic oligonucleotide
ccucuuuaucacaccacag

SEQ ID NO: 1696106 - RNA, 19 nt, Artificial Sequence
  Description of Artificial Sequence: Synthetic oligonucleotide
ugccucucacggaacuccu

SEQ ID NO: 1696107 - RNA, 19 nt, Artificial Sequence
  Description of Artificial Sequence: Synthetic oligonucleotide
uccucacggagggccaggg

SEQ ID NO: 1696108 - RNA, 19 nt, Artificial Sequence
  Description of Artificial Sequence: Synthetic oligonucleotide
ccuguauacucgcucugcc

SEQ ID NO: 1696109 - RNA, 19 nt, Artificial Sequence
  Description of Artificial Sequence: Synthetic oligonucleotide
uugcuucugauggccguug

SEQ ID NO: 1696110 - RNA, 19 nt, Artificial Sequence
  Description of Artificial Sequence: Synthetic oligonucleotide
ugcgcugcccacguucucu

SEQ ID NO: 1696111 - RNA, 19 nt, Artificial Sequence
  Description of Artificial Sequence: Synthetic oligonucleotide
ugcucccauucaguccucg

SEQ ID NO: 1696112 - RNA, 19 nt, Artificial Sequence
  Description of Artificial Sequence: Synthetic oligonucleotide
ugggcugaugugucauggu

SEQ ID NO: 1696113 - RNA, 19 nt, Artificial Sequence
  Description of Artificial Sequence: Synthetic oligonucleotide
ccucauaucccgugugggc

SEQ ID NO: 1696114 - RNA, 19 nt, Artificial Sequence
  Description of Artificial Sequence: Synthetic oligonucleotide
cucgcucugccucgguggc

SEQ ID NO: 1696115 - RNA, 19 nt, Artificial Sequence
  Description of Artificial Sequence: Synthetic oligonucleotide
gugugcgcugcccacguuc

SEQ ID NO: 1696116 - RNA, 19 nt, Artificial Sequence
  Description of Artificial Sequence: Synthetic oligonucleotide
gagcaccagucuuuccuca

SEQ ID NO: 1696117 - RNA, 19 nt, Artificial Sequence
  Description of Artificial Sequence: Synthetic oligonucleotide
augugugcgcugcccacgu

SEQ ID NO: 1696118 - RNA, 19 nt, Artificial Sequence
  Description of Artificial Sequence: Synthetic oligonucleotide
auagagcgcccgguaguuc

SEQ ID NO: 1696119 - RNA, 19 nt, Artificial Sequence
  Description of Artificial Sequence: Synthetic oligonucleotide
ggugagaaacaguccuaac

SEQ ID NO: 1696120 - RNA, 19 nt, Artificial Sequence
  Description of Artificial Sequence: Synthetic oligonucleotide
gccguaccucuucauagag

SEQ ID NO: 1696121 - RNA, 19 nt, Artificial Sequence
  Description of Artificial Sequence: Synthetic oligonucleotide
ggugguccgguguuccugc

SEQ ID NO: 1696122 - RNA, 19 nt, Artificial Sequence
  Description of Artificial Sequence: Synthetic oligonucleotide
ggacuccuugcacugcuug

SEQ ID NO: 1696123 - RNA, 19 nt, Artificial Sequence
  Description of Artificial Sequence: Synthetic oligonucleotide
augucaccguccacauuac

SEQ ID NO: 1696124 - RNA, 19 nt, Artificial Sequence
  Description of Artificial Sequence: Synthetic oligonucleotide
caguccucgcucucuccag

SEQ ID NO: 1696125 - RNA, 19 nt, Artificial Sequence
  Description of Artificial Sequence: Synthetic oligonucleotide
gcauagaccaacucuuugu

SEQ ID NO: 1696126 - RNA, 19 nt, Artificial Sequence
  Description of Artificial Sequence: Synthetic oligonucleotide
caugaggccugggcagugg

SEQ ID NO: 1696127 - RNA, 19 nt, Artificial Sequence
  Description of Artificial Sequence: Synthetic oligonucleotide
auuucggaggauggucagu

SEQ ID NO: 1696128 - RNA, 19 nt, Artificial Sequence
  Description of Artificial Sequence: Synthetic oligonucleotide
uccuugcacugcuuggcuu

SEQ ID NO: 1696129 - RNA, 19 nt, Artificial Sequence
  Description of Artificial Sequence: Synthetic oligonucleotide
ucuguggaagcagcaggua

SEQ ID NO: 1696130 - RNA, 19 nt, Artificial Sequence
  Description of Artificial Sequence: Synthetic oligonucleotide
agaugugaucuugggacuu

SEQ ID NO: 1696131 - RNA, 19 nt, Artificial Sequence
  Description of Artificial Sequence: Synthetic oligonucleotide
uggcugcauagaccaacuc

SEQ ID NO: 1696132 - RNA, 19 nt, Artificial Sequence
  Description of Artificial Sequence: Synthetic oligonucleotide
ggucuucuuguagagugac

SEQ ID NO: 1696133 - RNA, 19 nt, Artificial Sequence
  Description of Artificial Sequence: Synthetic oligonucleotide
gagcuucuccaaguaggac

SEQ ID NO: 1696134 - RNA, 19 nt, Artificial Sequence
  Description of Artificial Sequence: Synthetic oligonucleotide
ucugccucucacggaacuc

SEQ ID NO: 1696135 - RNA, 19 nt, Artificial Sequence
  Description of Artificial Sequence: Synthetic oligonucleotide
caaauuaguggggugacuu

SEQ ID NO: 1696136 - RNA, 19 nt, Artificial Sequence
  Description of Artificial Sequence: Synthetic oligonucleotide
aucacaccacaggauggcu

SEQ ID NO: 1696137 - RNA, 19 nt, Artificial Sequence
  Description of Artificial Sequence: Synthetic oligonucleotide
uaccucucuuccgccuggg

SEQ ID NO: 1696138 - RNA, 19 nt, Artificial Sequence
  Description of Artificial Sequence: Synthetic oligonucleotide
cguuccacuguccaccagc

SEQ ID NO: 1696139 - RNA, 19 nt, Artificial Sequence
  Description of Artificial Sequence: Synthetic oligonucleotide
agcgcccgguaguucuggg

SEQ ID NO: 1696140 - RNA, 19 nt, Artificial Sequence
  Description of Artificial Sequence: Synthetic oligonucleotide
ucugugcuguguagucaua

SEQ ID NO: 1696141 - RNA, 19 nt, Artificial Sequence
  Description of Artificial Sequence: Synthetic oligonucleotide
gaaggccucacaggugguc

SEQ ID NO: 1696142 - RNA, 19 nt, Artificial Sequence
  Description of Artificial Sequence: Synthetic oligonucleotide
gaugaccaccagaaugucu

SEQ ID NO: 1696143 - RNA, 19 nt, Artificial Sequence
  Description of Artificial Sequence: Synthetic oligonucleotide
ggcauuucggaggaugguc

SEQ ID NO: 1696144 - RNA, 19 nt, Artificial Sequence
  Description of Artificial Sequence: Synthetic oligonucleotide
cacgguccaugacagccuc

SEQ ID NO: 1696145 - RNA, 19 nt, Artificial Sequence
  Description of Artificial Sequence: Synthetic oligonucleotide
uuccgccugggcccucugc

SEQ ID NO: 1696146 - RNA, 19 nt, Artificial Sequence
  Description of Artificial Sequence: Synthetic oligonucleotide
gcagguaguugagaagaug

SEQ ID NO: 1696147 - RNA, 19 nt, Artificial Sequence
  Description of Artificial Sequence: Synthetic oligonucleotide
acaggauggcuggacacua

SEQ ID NO: 1696148 - RNA, 19 nt, Artificial Sequence
  Description of Artificial Sequence: Synthetic oligonucleotide
cagcucaucggaauucugu

SEQ ID NO: 1696149 - RNA, 19 nt, Artificial Sequence
  Description of Artificial Sequence: Synthetic oligonucleotide
ccggucauaguaauucuga

SEQ ID NO: 1696150 - RNA, 19 nt, Artificial Sequence
  Description of Artificial Sequence: Synthetic oligonucleotide
gcacuucuggucauaugcc

SEQ ID NO: 1696151 - RNA, 19 nt, Artificial Sequence
  Description of Artificial Sequence: Synthetic oligonucleotide
aggugguccgguguuccug

SEQ ID NO: 1696152 - RNA, 19 nt, Artificial Sequence
  Description of Artificial Sequence: Synthetic oligonucleotide
gaggugugagcaccagucu

SEQ ID NO: 1696153 - RNA, 19 nt, Artificial Sequence
  Description of Artificial Sequence: Synthetic oligonucleotide
ugcacgucgauggcugcau

SEQ ID NO: 1696154 - RNA, 19 nt, Artificial Sequence
  Description of Artificial Sequence: Synthetic oligonucleotide
gcucaaaggccuguucagc

SEQ ID NO: 1696155 - RNA, 19 nt, Artificial Sequence
  Description of Artificial Sequence: Synthetic oligonucleotide
ugguccgguguuccugcuc

SEQ ID NO: 1696156 - RNA, 19 nt, Artificial Sequence
  Description of Artificial Sequence: Synthetic oligonucleotide
gcuucugauggccguuggc

SEQ ID NO: 1696157 - RNA, 19 nt, Artificial Sequence
  Description of Artificial Sequence: Synthetic oligonucleotide
gcauuucggaggaugguca

SEQ ID NO: 1696158 - RNA, 19 nt, Artificial Sequence
  Description of Artificial Sequence: Synthetic oligonucleotide
uaucccgugugggccguga

SEQ ID NO: 1696159 - RNA, 19 nt, Artificial Sequence
  Description of Artificial Sequence: Synthetic oligonucleotide
ugccugcacgucgauggcu

SEQ ID NO: 1696160 - RNA, 19 nt, Artificial Sequence
  Description of Artificial Sequence: Synthetic oligonucleotide
guggcggacuccuugcacu

SEQ ID NO: 1696161 - RNA, 19 nt, Artificial Sequence
  Description of Artificial Sequence: Synthetic oligonucleotide
cuguauacucgcucugccu

SEQ ID NO: 1696162 - RNA, 19 nt, Artificial Sequence
  Description of Artificial Sequence: Synthetic oligonucleotide
cguaccucuucauagagcu

SEQ ID NO: 1696163 - RNA, 19 nt, Artificial Sequence
  Description of Artificial Sequence: Synthetic oligonucleotide
ggccguuggcacucaugcg

SEQ ID NO: 1696164 - RNA, 19 nt, Artificial Sequence
  Description of Artificial Sequence: Synthetic oligonucleotide
cugaugugucaugguuccc

SEQ ID NO: 1696165 - RNA, 19 nt, Artificial Sequence
  Description of Artificial Sequence: Synthetic oligonucleotide
ccacaggauggcuggacac

SEQ ID NO: 1696166 - RNA, 19 nt, Artificial Sequence
  Description of Artificial Sequence: Synthetic oligonucleotide
ccguaccucuucauagagc

SEQ ID NO: 1696167 - RNA, 19 nt, Artificial Sequence
  Description of Artificial Sequence: Synthetic oligonucleotide
guccauuccguuccacugu

SEQ ID NO: 1696168 - RNA, 19 nt, Artificial Sequence
  Description of Artificial Sequence: Synthetic oligonucleotide
gggcaguggugagaaacag

SEQ ID NO: 1696169 - RNA, 19 nt, Artificial Sequence
  Description of Artificial Sequence: Synthetic oligonucleotide
cauugcauggagagcuggu

SEQ ID NO: 1696170 - RNA, 19 nt, Artificial Sequence
  Description of Artificial Sequence: Synthetic oligonucleotide
agguccucagggaauugau

SEQ ID NO: 1696171 - RNA, 19 nt, Artificial Sequence
  Description of Artificial Sequence: Synthetic oligonucleotide
aggagguccucagggaauu

SEQ ID NO: 1696172 - RNA, 19 nt, Artificial Sequence
  Description of Artificial Sequence: Synthetic oligonucleotide
gguggcggacuccuugcac

SEQ ID NO: 1696173 - RNA, 19 nt, Artificial Sequence
  Description of Artificial Sequence: Synthetic oligonucleotide
ugugggccgugaagucccu

SEQ ID NO: 1696174 - RNA, 19 nt, Artificial Sequence
  Description of Artificial Sequence: Synthetic oligonucleotide
cucccauucaguccucgcu

SEQ ID NO: 1696175 - RNA, 19 nt, Artificial Sequence
  Description of Artificial Sequence: Synthetic oligonucleotide
cuuggacuccauggucuuc

SEQ ID NO: 1696176 - RNA, 19 nt, Artificial Sequence
  Description of Artificial Sequence: Synthetic oligonucleotide
uccuucccguaccucucuu

SEQ ID NO: 1696177 - RNA, 19 nt, Artificial Sequence
  Description of Artificial Sequence: Synthetic oligonucleotide
gcugguuacagugcaccca

SEQ ID NO: 1696178 - RNA, 19 nt, Artificial Sequence
  Description of Artificial Sequence: Synthetic oligonucleotide
cccagggacaaagccacgc

SEQ ID NO: 1696179 - RNA, 19 nt, Artificial Sequence
  Description of Artificial Sequence: Synthetic oligonucleotide
caccagcuccuucccguac

SEQ ID NO: 1696180 - RNA, 19 nt, Artificial Sequence
  Description of Artificial Sequence: Synthetic oligonucleotide
cccagagaaccucuuuauc

SEQ ID NO: 1696181 - RNA, 19 nt, Artificial Sequence
  Description of Artificial Sequence: Synthetic oligonucleotide
gcucccauucaguccucgc

SEQ ID NO: 1696182 - RNA, 19 nt, Artificial Sequence
  Description of Artificial Sequence: Synthetic oligonucleotide
ucuuccgccugggcccucu

SEQ ID NO: 1696183 - RNA, 19 nt, Artificial Sequence
  Description of Artificial Sequence: Synthetic oligonucleotide
caucggaauucugugcugu

SEQ ID NO: 1696184 - RNA, 19 nt, Artificial Sequence
  Description of Artificial Sequence: Synthetic oligonucleotide
guguuccugcucccauuca

SEQ ID NO: 1696185 - RNA, 19 nt, Artificial Sequence
  Description of Artificial Sequence: Synthetic oligonucleotide
ccugcagaaauguccagcu

SEQ ID NO: 1696186 - RNA, 19 nt, Artificial Sequence
  Description of Artificial Sequence: Synthetic oligonucleotide
aaggccuguucagcaucau

SEQ ID NO: 1696187 - RNA, 19 nt, Artificial Sequence
  Description of Artificial Sequence: Synthetic oligonucleotide
ugcacccacagggcauuuc

SEQ ID NO: 1696188 - RNA, 19 nt, Artificial Sequence
  Description of Artificial Sequence: Synthetic oligonucleotide
gccccaugaggccugggca

SEQ ID NO: 1696189 - RNA, 19 nt, Artificial Sequence
  Description of Artificial Sequence: Synthetic oligonucleotide
ugacagccucauacuucuu

SEQ ID NO: 1696190 - RNA, 19 nt, Artificial Sequence
  Description of Artificial Sequence: Synthetic oligonucleotide
gguccucagggaauugauc

SEQ ID NO: 1696191 - RNA, 19 nt, Artificial Sequence
  Description of Artificial Sequence: Synthetic oligonucleotide
guaccucuucauagagcuc

SEQ ID NO: 1696192 - RNA, 19 nt, Artificial Sequence
  Description of Artificial Sequence: Synthetic oligonucleotide
guggggugacuucccgguc

SEQ ID NO: 1696193 - RNA, 19 nt, Artificial Sequence
  Description of Artificial Sequence: Synthetic oligonucleotide
gaccaccagaaugucuccu

SEQ ID NO: 1696194 - RNA, 19 nt, Artificial Sequence
  Description of Artificial Sequence: Synthetic oligonucleotide
ugugugcgcugcccacguu

SEQ ID NO: 1696195 - RNA, 19 nt, Artificial Sequence
  Description of Artificial Sequence: Synthetic oligonucleotide
cauucaguccucgcucucu

SEQ ID NO: 1696196 - RNA, 19 nt, Artificial Sequence
  Description of Artificial Sequence: Synthetic oligonucleotide
agagcgcccgguaguucug

SEQ ID NO: 1696197 - RNA, 19 nt, Artificial Sequence
  Description of Artificial Sequence: Synthetic oligonucleotide
cauccucuccuuccaagau

SEQ ID NO: 1696198 - RNA, 19 nt, Artificial Sequence
  Description of Artificial Sequence: Synthetic oligonucleotide
ggacacgguccaugacagc

SEQ ID NO: 1696199 - RNA, 19 nt, Artificial Sequence
  Description of Artificial Sequence: Synthetic oligonucleotide
cugauacggcaccggagcu

SEQ ID NO: 1696200 - RNA, 19 nt, Artificial Sequence
  Description of Artificial Sequence: Synthetic oligonucleotide
ggagucaaaggagguccuc

SEQ ID NO: 1696201 - RNA, 19 nt, Artificial Sequence
  Description of Artificial Sequence: Synthetic oligonucleotide
ugauggccguuggcacuca

SEQ ID NO: 1696202 - RNA, 19 nt, Artificial Sequence
  Description of Artificial Sequence: Synthetic oligonucleotide
ggacacuagggcugcaaau

SEQ ID NO: 1696203 - RNA, 19 nt, Artificial Sequence
  Description of Artificial Sequence: Synthetic oligonucleotide
ccuugcgcgcaaucugcac

SEQ ID NO: 1696204 - RNA, 19 nt, Artificial Sequence
  Description of Artificial Sequence: Synthetic oligonucleotide
aucccgugugggccgugaa

SEQ ID NO: 1696205 - RNA, 19 nt, Artificial Sequence
  Description of Artificial Sequence: Synthetic oligonucleotide
cccguaccucucuuccgcc

SEQ ID NO: 1696206 - RNA, 19 nt, Artificial Sequence
  Description of Artificial Sequence: Synthetic oligonucleotide
cauggucuucuuguagagu

SEQ ID NO: 1696207 - RNA, 19 nt, Artificial Sequence
  Description of Artificial Sequence: Synthetic oligonucleotide
ccuucccguaccucucuuc

SEQ ID NO: 1696208 - RNA, 19 nt, Artificial Sequence
  Description of Artificial Sequence: Synthetic oligonucleotide
uggcuuuauucuggcucuu

SEQ ID NO: 1696209 - RNA, 19 nt, Artificial Sequence
  Description of Artificial Sequence: Synthetic oligonucleotide
uggcacucaugcgcucaaa

SEQ ID NO: 1696210 - RNA, 19 nt, Artificial Sequence
  Description of Artificial Sequence: Synthetic oligonucleotide
cuggacacuagggcugcaa

SEQ ID NO: 1696211 - RNA, 19 nt, Artificial Sequence
  Description of Artificial Sequence: Synthetic oligonucleotide
uugcacugcuuggcuuuau

SEQ ID NO: 1696212 - RNA, 19 nt, Artificial Sequence
  Description of Artificial Sequence: Synthetic oligonucleotide
gcccacguucucugucugc

SEQ ID NO: 1696213 - RNA, 19 nt, Artificial Sequence
  Description of Artificial Sequence: Synthetic oligonucleotide
cacggagggccagggccag

SEQ ID NO: 1696214 - RNA, 19 nt, Artificial Sequence
  Description of Artificial Sequence: Synthetic oligonucleotide
cugucuggccaccagccuu

SEQ ID NO: 1696215 - RNA, 19 nt, Artificial Sequence
  Description of Artificial Sequence: Synthetic oligonucleotide
cagaggugugagcaccagu

SEQ ID NO: 1696216 - RNA, 19 nt, Artificial Sequence
  Description of Artificial Sequence: Synthetic oligonucleotide
cugcacgucgauggcugca

SEQ ID NO: 1696217 - RNA, 19 nt, Artificial Sequence
  Description of Artificial Sequence: Synthetic oligonucleotide
gcgcugcccacguucucug

SEQ ID NO: 1696218 - RNA, 19 nt, Artificial Sequence
  Description of Artificial Sequence: Synthetic oligonucleotide
gggccgugaagucccugca

SEQ ID NO: 1696219 - RNA, 19 nt, Artificial Sequence
  Description of Artificial Sequence: Synthetic oligonucleotide
gcauggagagcugguuaca

SEQ ID NO: 1696220 - RNA, 19 nt, Artificial Sequence
  Description of Artificial Sequence: Synthetic oligonucleotide
gggcugaugugucaugguu

SEQ ID NO: 1696221 - RNA, 19 nt, Artificial Sequence
  Description of Artificial Sequence: Synthetic oligonucleotide
ggagguccucagggaauug

SEQ ID NO: 1696222 - RNA, 19 nt, Artificial Sequence
  Description of Artificial Sequence: Synthetic oligonucleotide
auacggcaccggagcuggg

SEQ ID NO: 1696223 - RNA, 19 nt, Artificial Sequence
  Description of Artificial Sequence: Synthetic oligonucleotide
ggcagaggugugagcacca

SEQ ID NO: 1696224 - RNA, 19 nt, Artificial Sequence
  Description of Artificial Sequence: Synthetic oligonucleotide
ccauucaguccucgcucuc

SEQ ID NO: 1696225 - RNA, 19 nt, Artificial Sequence
  Description of Artificial Sequence: Synthetic oligonucleotide
ccuguguugccugcacguc

SEQ ID NO: 1696226 - RNA, 19 nt, Artificial Sequence
  Description of Artificial Sequence: Synthetic oligonucleotide
cauagagcgcccgguaguu

SEQ ID NO: 1696227 - RNA, 19 nt, Artificial Sequence
  Description of Artificial Sequence: Synthetic oligonucleotide
auaucccgugugggccgug

SEQ ID NO: 1696228 - RNA, 19 nt, Artificial Sequence
  Description of Artificial Sequence: Synthetic oligonucleotide
cuuccgccugggcccucug

SEQ ID NO: 1696229 - RNA, 19 nt, Artificial Sequence
  Description of Artificial Sequence: Synthetic oligonucleotide
ccuucaagugucagccgua

SEQ ID NO: 1696230 - RNA, 19 nt, Artificial Sequence
  Description of Artificial Sequence: Synthetic oligonucleotide
ggcggacuccuugcacugc

SEQ ID NO: 1696231 - RNA, 19 nt, Artificial Sequence
  Description of Artificial Sequence: Synthetic oligonucleotide
ggcaguggugagaaacagu

SEQ ID NO: 1696232 - RNA, 19 nt, Artificial Sequence
  Description of Artificial Sequence: Synthetic oligonucleotide
gauggccguuggcacucau

SEQ ID NO: 1696233 - RNA, 19 nt, Artificial Sequence
  Description of Artificial Sequence: Synthetic oligonucleotide
ggccaccagccuugcgcgc

SEQ ID NO: 1696234 - RNA, 19 nt, Artificial Sequence
  Description of Artificial Sequence: Synthetic oligonucleotide
cggaauucugugcugugua

SEQ ID NO: 1696235 - RNA, 19 nt, Artificial Sequence
  Description of Artificial Sequence: Synthetic oligonucleotide
gcaaauuaguggggugacu

SEQ ID NO: 1696236 - RNA, 19 nt, Artificial Sequence
  Description of Artificial Sequence: Synthetic oligonucleotide
gccaccagccuugcgcgca

SEQ ID NO: 1696237 - RNA, 19 nt, Artificial Sequence
  Description of Artificial Sequence: Synthetic oligonucleotide
gugcgcugcccacguucuc

SEQ ID NO: 1696238 - RNA, 19 nt, Artificial Sequence
  Description of Artificial Sequence: Synthetic oligonucleotide
cccuguguugccugcacgu

SEQ ID NO: 1696239 - RNA, 19 nt, Artificial Sequence
  Description of Artificial Sequence: Synthetic oligonucleotide
ggauggucagucggucaaa

SEQ ID NO: 1696240 - RNA, 19 nt, Artificial Sequence
  Description of Artificial Sequence: Synthetic oligonucleotide
gcggacuccuugcacugcu

SEQ ID NO: 1696241 - RNA, 19 nt, Artificial Sequence
  Description of Artificial Sequence: Synthetic oligonucleotide
caaagccacgcuguccauu

SEQ ID NO: 1696242 - RNA, 19 nt, Artificial Sequence
  Description of Artificial Sequence: Synthetic oligonucleotide
gguccaugacagccucaua

SEQ ID NO: 1696243 - RNA, 19 nt, Artificial Sequence
  Description of Artificial Sequence: Synthetic oligonucleotide
gccuugcgcgcaaucugca

SEQ ID NO: 1696244 - RNA, 19 nt, Artificial Sequence
  Description of Artificial Sequence: Synthetic oligonucleotide
ccucgcucucuccagcugu

SEQ ID NO: 1696245 - RNA, 19 nt, Artificial Sequence
  Description of Artificial Sequence: Synthetic oligonucleotide
ccguuggcacucaugcgcu

SEQ ID NO: 1696246 - RNA, 19 nt, Artificial Sequence
  Description of Artificial Sequence: Synthetic oligonucleotide
cauaucccgugugggccgu

SEQ ID NO: 1696247 - RNA, 19 nt, Artificial Sequence
  Description of Artificial Sequence: Synthetic oligonucleotide
ccguuccacuguccaccag

SEQ ID NO: 1696248 - RNA, 19 nt, Artificial Sequence
  Description of Artificial Sequence: Synthetic oligonucleotide
cccacguucucugucugcu

SEQ ID NO: 1696249 - RNA, 19 nt, Artificial Sequence
  Description of Artificial Sequence: Synthetic oligonucleotide
gccucucacggaacuccuc

SEQ ID NO: 1696250 - RNA, 19 nt, Artificial Sequence
  Description of Artificial Sequence: Synthetic oligonucleotide
gcaguaccucauaucccgu

SEQ ID NO: 1696251 - RNA, 19 nt, Artificial Sequence
  Description of Artificial Sequence: Synthetic oligonucleotide
cguuggcacucaugcgcuc

SEQ ID NO: 1696252 - RNA, 19 nt, Artificial Sequence
  Description of Artificial Sequence: Synthetic oligonucleotide
cggucauaguaauucugau

SEQ ID NO: 1696253 - RNA, 19 nt, Artificial Sequence
  Description of Artificial Sequence: Synthetic oligonucleotide
gcacgucgauggcugcaua

SEQ ID NO: 1696254 - RNA, 19 nt, Artificial Sequence
  Description of Artificial Sequence: Synthetic oligonucleotide
guguugccugcacgucgau

SEQ ID NO: 1696255 - RNA, 19 nt, Artificial Sequence
  Description of Artificial Sequence: Synthetic oligonucleotide
ccugggcccucugccugag

SEQ ID NO: 1696256 - RNA, 19 nt, Artificial Sequence
  Description of Artificial Sequence: Synthetic oligonucleotide
cggaggauggucagucggu

SEQ ID NO: 1696257 - RNA, 19 nt, Artificial Sequence
  Description of Artificial Sequence: Synthetic oligonucleotide
gcuggacacuagggcugca

SEQ ID NO: 1696258 - RNA, 19 nt, Artificial Sequence
  Description of Artificial Sequence: Synthetic oligonucleotide
cucuuccgccugggcccuc

SEQ ID NO: 1696259 - RNA, 19 nt, Artificial Sequence
  Description of Artificial Sequence: Synthetic oligonucleotide
cgauggcugcauagaccaa

SEQ ID NO: 1696260 - RNA, 19 nt, Artificial Sequence
  Description of Artificial Sequence: Synthetic oligonucleotide
cccaugaggccugggcagu

SEQ ID NO: 1696261 - RNA, 19 nt, Artificial Sequence
  Description of Artificial Sequence: Synthetic oligonucleotide
ccgguguuccugcucccau

SEQ ID NO: 1696262 - RNA, 19 nt, Artificial Sequence
  Description of Artificial Sequence: Synthetic oligonucleotide
cgguggcggacuccuugca

SEQ ID NO: 1696263 - RNA, 19 nt, Artificial Sequence
  Description of Artificial Sequence: Synthetic oligonucleotide
ccacgcuguccauuccguu

SEQ ID NO: 1696264 - RNA, 19 nt, Artificial Sequence
  Description of Artificial Sequence: Synthetic oligonucleotide
gcucucugccagugcucuu

SEQ ID NO: 1696265 - RNA, 19 nt, Artificial Sequence
  Description of Artificial Sequence: Synthetic oligonucleotide
ccggcacuucuggucauau

SEQ ID NO: 1696266 - RNA, 19 nt, Artificial Sequence
  Description of Artificial Sequence: Synthetic oligonucleotide
cccggcacuucuggucaua

SEQ ID NO: 1696267 - RNA, 19 nt, Artificial Sequence
  Description of Artificial Sequence: Synthetic oligonucleotide
cgguguuccugcucccauu

SEQ ID NO: 1696268 - RNA, 19 nt, Artificial Sequence
  Description of Artificial Sequence: Synthetic oligonucleotide
auuauugugacucaaaguc

SEQ ID NO: 1696269 - RNA, 19 nt, Artificial Sequence
  Description of Artificial Sequence: Synthetic oligonucleotide
aaaguauagggaaagaccc

SEQ ID NO: 1696270 - RNA, 19 nt, Artificial Sequence
  Description of Artificial Sequence: Synthetic oligonucleotide
cauuaaagaauacagaccc

SEQ ID NO: 1696271 - RNA, 19 nt, Artificial Sequence
  Description of Artificial Sequence: Synthetic oligonucleotide
aaugagagccuuuugcccc

SEQ ID NO: 1696272 - RNA, 19 nt, Artificial Sequence
  Description of Artificial Sequence: Synthetic oligonucleotide
aaaaugagagcacuguggg

SEQ ID NO: 1696273 - RNA, 19 nt, Artificial Sequence
  Description of Artificial Sequence: Synthetic oligonucleotide
cuuccaguaaauuaaauag

SEQ ID NO: 1696274 - RNA, 19 nt, Artificial Sequence
  Description of Artificial Sequence: Synthetic oligonucleotide
uuaaauagaaacucaggag

SEQ ID NO: 1696275 - RNA, 19 nt, Artificial Sequence
  Description of Artificial Sequence: Synthetic oligonucleotide
uacauguauaaaaugauug

SEQ ID NO: 1696276 - RNA, 19 nt, Artificial Sequence
  Description of Artificial Sequence: Synthetic oligonucleotide
agaauacagacccaaaggg

SEQ ID NO: 1696277 - RNA, 19 nt, Artificial Sequence
  Description of Artificial Sequence: Synthetic oligonucleotide
aguaacaugacuaggagac

SEQ ID NO: 1696278 - RNA, 19 nt, Artificial Sequence
  Description of Artificial Sequence: Synthetic oligonucleotide
uuuggaacacauauuauug

SEQ ID NO: 1696279 - RNA, 19 nt, Artificial Sequence
  Description of Artificial Sequence: Synthetic oligonucleotide
uaucauaacacuuacuuuc

SEQ ID NO: 1696280 - RNA, 19 nt, Artificial Sequence
  Description of Artificial Sequence: Synthetic oligonucleotide
aaagaacuugaauauaacu

SEQ ID NO: 1696281 - RNA, 19 nt, Artificial Sequence
  Description of Artificial Sequence: Synthetic oligonucleotide
aaaaucgggaccucuauca

SEQ ID NO: 1696282 - RNA, 19 nt, Artificial Sequence
  Description of Artificial Sequence: Synthetic oligonucleotide
cuuaaagcaagauauggac

SEQ ID NO: 1696283 - RNA, 19 nt, Artificial Sequence
  Description of Artificial Sequence: Synthetic oligonucleotide
uauaggugcauuucgauga

SEQ ID NO: 1696284 - RNA, 19 nt, Artificial Sequence
  Description of Artificial Sequence: Synthetic oligonucleotide
aaagaaauaagagcaagga

SEQ ID NO: 1696285 - RNA, 19 nt, Artificial Sequence
  Description of Artificial Sequence: Synthetic oligonucleotide
uuaaugaugagcugaauau

SEQ ID NO: 1696286 - RNA, 19 nt, Artificial Sequence
  Description of Artificial Sequence: Synthetic oligonucleotide
auauuauugugacucaaag

SEQ ID NO: 1696287 - RNA, 19 nt, Artificial Sequence
  Description of Artificial Sequence: Synthetic oligonucleotide
uucuuaaagcaagauaugg

SEQ ID NO: 1696288 - RNA, 19 nt, Artificial Sequence
  Description of Artificial Sequence: Synthetic oligonucleotide
cuauagaacaacaccagag

SEQ ID NO: 1696289 - RNA, 19 nt, Artificial Sequence
  Description of Artificial Sequence: Synthetic oligonucleotide
uggaaaagcaaagucauag

SEQ ID NO: 1696290 - RNA, 19 nt, Artificial Sequence
  Description of Artificial Sequence: Synthetic oligonucleotide
aauacagacccaaagggag

SEQ ID NO: 1696291 - RNA, 19 nt, Artificial Sequence
  Description of Artificial Sequence: Synthetic oligonucleotide
agggauagagaccuggagc

SEQ ID NO: 1696292 - RNA, 19 nt, Artificial Sequence
  Description of Artificial Sequence: Synthetic oligonucleotide
ugauguuuggaacacauau

SEQ ID NO: 1696293 - RNA, 19 nt, Artificial Sequence
  Description of Artificial Sequence: Synthetic oligonucleotide
agaaauaagagcaaggaga

SEQ ID NO: 1696294 - RNA, 19 nt, Artificial Sequence
  Description of Artificial Sequence: Synthetic oligonucleotide
uuaaagcaagauauggacc

SEQ ID NO: 1696295 - RNA, 19 nt, Artificial Sequence
  Description of Artificial Sequence: Synthetic oligonucleotide
aucaacagaggucuagccc

SEQ ID NO: 1696296 - RNA, 19 nt, Artificial Sequence
  Description of Artificial Sequence: Synthetic oligonucleotide
gaaauaagagcaaggagag

SEQ ID NO: 1696297 - RNA, 19 nt, Artificial Sequence
  Description of Artificial Sequence: Synthetic oligonucleotide
aaggucaccuacauaaccc

SEQ ID NO: 1696298 - RNA, 19 nt, Artificial Sequence
  Description of Artificial Sequence: Synthetic oligonucleotide
aucauaucauaacacuuac

SEQ ID NO: 1696299 - RNA, 19 nt, Artificial Sequence
  Description of Artificial Sequence: Synthetic oligonucleotide
uuuaugaucaacagagguc

SEQ ID NO: 1696300 - RNA, 19 nt, Artificial Sequence
  Description of Artificial Sequence: Synthetic oligonucleotide
uugaauauaacuggaagac

SEQ ID NO: 1696301 - RNA, 19 nt, Artificial Sequence
  Description of Artificial Sequence: Synthetic oligonucleotide
uacaaagagggcauauagg

SEQ ID NO: 1696302 - RNA, 19 nt, Artificial Sequence
  Description of Artificial Sequence: Synthetic oligonucleotide
acauuaaagaauacagacc

SEQ ID NO: 1696303 - RNA, 19 nt, Artificial Sequence
  Description of Artificial Sequence: Synthetic oligonucleotide
uuguugucccuucagaacc

SEQ ID NO: 1696304 - RNA, 19 nt, Artificial Sequence
  Description of Artificial Sequence: Synthetic oligonucleotide
uugucuaaguuacuccugg

SEQ ID NO: 1696305 - RNA, 19 nt, Artificial Sequence
  Description of Artificial Sequence: Synthetic oligonucleotide
ucuuaaagcaagauaugga

SEQ ID NO: 1696306 - RNA, 19 nt, Artificial Sequence
  Description of Artificial Sequence: Synthetic oligonucleotide
aaggggaggguuuaugauc

SEQ ID NO: 1696307 - RNA, 19 nt, Artificial Sequence
  Description of Artificial Sequence: Synthetic oligonucleotide
acuauagcuguucuugaac

SEQ ID NO: 1696308 - RNA, 19 nt, Artificial Sequence
  Description of Artificial Sequence: Synthetic oligonucleotide
aaugagagcacuguggggu

SEQ ID NO: 1696309 - RNA, 19 nt, Artificial Sequence
  Description of Artificial Sequence: Synthetic oligonucleotide
uauagggaaagacccacag

SEQ ID NO: 1696310 - RNA, 19 nt, Artificial Sequence
  Description of Artificial Sequence: Synthetic oligonucleotide
aaagaauggaaaagcaaag

SEQ ID NO: 1696311 - RNA, 19 nt, Artificial Sequence
  Description of Artificial Sequence: Synthetic oligonucleotide
auaacacuuacuuucaaaa

SEQ ID NO: 1696312 - RNA, 19 nt, Artificial Sequence
  Description of Artificial Sequence: Synthetic oligonucleotide
uaucacucugaccaagggg

SEQ ID NO: 1696313 - RNA, 19 nt, Artificial Sequence
  Description of Artificial Sequence: Synthetic oligonucleotide
accuacauaacccacagaa

SEQ ID NO: 1696314 - RNA, 19 nt, Artificial Sequence
  Description of Artificial Sequence: Synthetic oligonucleotide
ucuaaagaugcccugguau

SEQ ID NO: 1696315 - RNA, 19 nt, Artificial Sequence
  Description of Artificial Sequence: Synthetic oligonucleotide
aaaagaacacuugucuaag

SEQ ID NO: 1696316 - RNA, 19 nt, Artificial Sequence
  Description of Artificial Sequence: Synthetic oligonucleotide
agagcuuagugccauuugg

SEQ ID NO: 1696317 - RNA, 19 nt, Artificial Sequence
  Description of Artificial Sequence: Synthetic oligonucleotide
agacccaggcauuagcacc

SEQ ID NO: 1696318 - RNA, 19 nt, Artificial Sequence
  Description of Artificial Sequence: Synthetic oligonucleotide
ugacaugacaagcaggccu

SEQ ID NO: 1696319 - RNA, 19 nt, Artificial Sequence
  Description of Artificial Sequence: Synthetic oligonucleotide
uuauugugacucaaaguca

SEQ ID NO: 1696320 - RNA, 19 nt, Artificial Sequence
  Description of Artificial Sequence: Synthetic oligonucleotide
cauguauaaaaugauuggc

SEQ ID NO: 1696321 - RNA, 19 nt, Artificial Sequence
  Description of Artificial Sequence: Synthetic oligonucleotide
uauagcuguucuugaaccg

SEQ ID NO: 1696322 - RNA, 19 nt, Artificial Sequence
  Description of Artificial Sequence: Synthetic oligonucleotide
gcaagaaagaaauaagagc

SEQ ID NO: 1696323 - RNA, 19 nt, Artificial Sequence
  Description of Artificial Sequence: Synthetic oligonucleotide
uauuauugugacucaaagu

SEQ ID NO: 1696324 - RNA, 19 nt, Artificial Sequence
  Description of Artificial Sequence: Synthetic oligonucleotide
aaaucgggaccucuaucac

SEQ ID NO: 1696325 - RNA, 19 nt, Artificial Sequence
  Description of Artificial Sequence: Synthetic oligonucleotide
aaaugagagcacugugggg

SEQ ID NO: 1696326 - RNA, 19 nt, Artificial Sequence
  Description of Artificial Sequence: Synthetic oligonucleotide
ggguuuaugaucaacagag

SEQ ID NO: 1696327 - RNA, 19 nt, Artificial Sequence
  Description of Artificial Sequence: Synthetic oligonucleotide
uuccaguaaauuaaauaga

SEQ ID NO: 1696328 - RNA, 19 nt, Artificial Sequence
  Description of Artificial Sequence: Synthetic oligonucleotide
uauugugacucaaagucaa

SEQ ID NO: 1696329 - RNA, 19 nt, Artificial Sequence
  Description of Artificial Sequence: Synthetic oligonucleotide
caaacuauagcuguucuug

SEQ ID NO: 1696330 - RNA, 19 nt, Artificial Sequence
  Description of Artificial Sequence: Synthetic oligonucleotide
gcuacauuaaagaauacag

SEQ ID NO: 1696331 - RNA, 19 nt, Artificial Sequence
  Description of Artificial Sequence: Synthetic oligonucleotide
agaggucuagcccuucacc

SEQ ID NO: 1696332 - RNA, 19 nt, Artificial Sequence
  Description of Artificial Sequence: Synthetic oligonucleotide
uuucuuaaagcaagauaug

SEQ ID NO: 1696333 - RNA, 19 nt, Artificial Sequence
  Description of Artificial Sequence: Synthetic oligonucleotide
ugaggcuacauuaaagaau

SEQ ID NO: 1696334 - RNA, 19 nt, Artificial Sequence
  Description of Artificial Sequence: Synthetic oligonucleotide
gucaaugagagccuuuugc

SEQ ID NO: 1696335 - RNA, 19 nt, Artificial Sequence
  Description of Artificial Sequence: Synthetic oligonucleotide
agaggccuuuucuuaaagc

SEQ ID NO: 1696336 - RNA, 19 nt, Artificial Sequence
  Description of Artificial Sequence: Synthetic oligonucleotide
agagagggguuauucuucc

SEQ ID NO: 1696337 - RNA, 19 nt, Artificial Sequence
  Description of Artificial Sequence: Synthetic oligonucleotide
auauggaccuccuccaguc

SEQ ID NO: 1696338 - RNA, 19 nt, Artificial Sequence
  Description of Artificial Sequence: Synthetic oligonucleotide
agaguaacaugacuaggag

SEQ ID NO: 1696339 - RNA, 19 nt, Artificial Sequence
  Description of Artificial Sequence: Synthetic oligonucleotide
aguauagggaaagacccac

SEQ ID NO: 1696340 - RNA, 19 nt, Artificial Sequence
  Description of Artificial Sequence: Synthetic oligonucleotide
aagaguaacaugacuagga

SEQ ID NO: 1696341 - RNA, 19 nt, Artificial Sequence
  Description of Artificial Sequence: Synthetic oligonucleotide
aaaacuagaggggaggaaa

SEQ ID NO: 1696342 - RNA, 19 nt, Artificial Sequence
  Description of Artificial Sequence: Synthetic oligonucleotide
agcucauuaggcuccaguc

SEQ ID NO: 1696343 - RNA, 19 nt, Artificial Sequence
  Description of Artificial Sequence: Synthetic oligonucleotide
caaacuaggacaguaguug

SEQ ID NO: 1696344 - RNA, 19 nt, Artificial Sequence
  Description of Artificial Sequence: Synthetic oligonucleotide
uuaggcuccaguccucagg

SEQ ID NO: 1696345 - RNA, 19 nt, Artificial Sequence
  Description of Artificial Sequence: Synthetic oligonucleotide
uaagaguaacaugacuagg

SEQ ID NO: 1696346 - RNA, 19 nt, Artificial Sequence
  Description of Artificial Sequence: Synthetic oligonucleotide
agaacaacaccagagccuc

SEQ ID NO: 1696347 - RNA, 19 nt, Artificial Sequence
  Description of Artificial Sequence: Synthetic oligonucleotide
auauaggugcauuucgaug

SEQ ID NO: 1696348 - RNA, 19 nt, Artificial Sequence
  Description of Artificial Sequence: Synthetic oligonucleotide
aaaacaggauaaaucucuc

SEQ ID NO: 1696349 - RNA, 19 nt, Artificial Sequence
  Description of Artificial Sequence: Synthetic oligonucleotide
gaaaucauaucauaacacu

SEQ ID NO: 1696350 - RNA, 19 nt, Artificial Sequence
  Description of Artificial Sequence: Synthetic oligonucleotide
agcuuagugccauuugggg

SEQ ID NO: 1696351 - RNA, 19 nt, Artificial Sequence
  Description of Artificial Sequence: Synthetic oligonucleotide
ugaccaaugacuuccuuaa

SEQ ID NO: 1696352 - RNA, 19 nt, Artificial Sequence
  Description of Artificial Sequence: Synthetic oligonucleotide
accaaugacuuccuuaacu

SEQ ID NO: 1696353 - RNA, 19 nt, Artificial Sequence
  Description of Artificial Sequence: Synthetic oligonucleotide
gaggguuuaugaucaacag

SEQ ID NO: 1696354 - RNA, 19 nt, Artificial Sequence
  Description of Artificial Sequence: Synthetic oligonucleotide
cuaaagaugcccugguaug

SEQ ID NO: 1696355 - RNA, 19 nt, Artificial Sequence
  Description of Artificial Sequence: Synthetic oligonucleotide
gaacacuugucuaaguuac

SEQ ID NO: 1696356 - RNA, 19 nt, Artificial Sequence
  Description of Artificial Sequence: Synthetic oligonucleotide
aaucauaucauaacacuua

SEQ ID NO: 1696357 - RNA, 19 nt, Artificial Sequence
  Description of Artificial Sequence: Synthetic oligonucleotide
aacacauauuauugugacu

SEQ ID NO: 1696358 - RNA, 19 nt, Artificial Sequence
  Description of Artificial Sequence: Synthetic oligonucleotide
agagcaagaaagaaauaag

SEQ ID NO: 1696359 - RNA, 19 nt, Artificial Sequence
  Description of Artificial Sequence: Synthetic oligonucleotide
agagggguuauucuuccag

SEQ ID NO: 1696360 - RNA, 19 nt, Artificial Sequence
  Description of Artificial Sequence: Synthetic oligonucleotide
gggacuauagaacaacacc

SEQ ID NO: 1696361 - RNA, 19 nt, Artificial Sequence
  Description of Artificial Sequence: Synthetic oligonucleotide
aauauaggggagauauaug

SEQ ID NO: 1696362 - RNA, 19 nt, Artificial Sequence
  Description of Artificial Sequence: Synthetic oligonucleotide
caaugagagccuuuugccc

SEQ ID NO: 1696363 - RNA, 19 nt, Artificial Sequence
  Description of Artificial Sequence: Synthetic oligonucleotide
cuuaacugaggcuacauua

SEQ ID NO: 1696364 - RNA, 19 nt, Artificial Sequence
  Description of Artificial Sequence: Synthetic oligonucleotide
agagaccuggagcuaaauc

SEQ ID NO: 1696365 - RNA, 19 nt, Artificial Sequence
  Description of Artificial Sequence: Synthetic oligonucleotide
gaucaacagaggucuagcc

SEQ ID NO: 1696366 - RNA, 19 nt, Artificial Sequence
  Description of Artificial Sequence: Synthetic oligonucleotide
auuagcacccaaacuauag

SEQ ID NO: 1696367 - RNA, 19 nt, Artificial Sequence
  Description of Artificial Sequence: Synthetic oligonucleotide
auaggggagauauaugcau

SEQ ID NO: 1696368 - RNA, 19 nt, Artificial Sequence
  Description of Artificial Sequence: Synthetic oligonucleotide
aauaaaguuguugucccuu

SEQ ID NO: 1696369 - RNA, 19 nt, Artificial Sequence
  Description of Artificial Sequence: Synthetic oligonucleotide
gguaagaaaggucaccuac

SEQ ID NO: 1696370 - RNA, 19 nt, Artificial Sequence
  Description of Artificial Sequence: Synthetic oligonucleotide
uaguugagaugugagcagg

SEQ ID NO: 1696371 - RNA, 19 nt, Artificial Sequence
  Description of Artificial Sequence: Synthetic oligonucleotide
ugauguuaucccauagguc

SEQ ID NO: 1696372 - RNA, 19 nt, Artificial Sequence
  Description of Artificial Sequence: Synthetic oligonucleotide
aaucgggaccucuaucacu

SEQ ID NO: 1696373 - RNA, 19 nt, Artificial Sequence
  Description of Artificial Sequence: Synthetic oligonucleotide
auagcuguucuugaaccgg

SEQ ID NO: 1696374 - RNA, 19 nt, Artificial Sequence
  Description of Artificial Sequence: Synthetic oligonucleotide
uagcuguucuugaaccggg

SEQ ID NO: 1696375 - RNA, 19 nt, Artificial Sequence
  Description of Artificial Sequence: Synthetic oligonucleotide
aacuauagcuguucuugaa

SEQ ID NO: 1696376 - RNA, 19 nt, Artificial Sequence
  Description of Artificial Sequence: Synthetic oligonucleotide
acacuugucuaaguuacuc

SEQ ID NO: 1696377 - RNA, 19 nt, Artificial Sequence
  Description of Artificial Sequence: Synthetic oligonucleotide
ggcauauaggugcauuucg

SEQ ID NO: 1696378 - RNA, 19 nt, Artificial Sequence
  Description of Artificial Sequence: Synthetic oligonucleotide
gucuaaguuacuccugggc

SEQ ID NO: 1696379 - RNA, 19 nt, Artificial Sequence
  Description of Artificial Sequence: Synthetic oligonucleotide
ugggacuauagaacaacac

SEQ ID NO: 1696380 - RNA, 19 nt, Artificial Sequence
  Description of Artificial Sequence: Synthetic oligonucleotide
guaguugagaugugagcag

SEQ ID NO: 1696381 - RNA, 19 nt, Artificial Sequence
  Description of Artificial Sequence: Synthetic oligonucleotide
ucauaucauaacacuuacu

SEQ ID NO: 1696382 - RNA, 19 nt, Artificial Sequence
  Description of Artificial Sequence: Synthetic oligonucleotide
acaagcaggccuucauagg

SEQ ID NO: 1696383 - RNA, 19 nt, Artificial Sequence
  Description of Artificial Sequence: Synthetic oligonucleotide
uaggucuaagaguaacaug

SEQ ID NO: 1696384 - RNA, 19 nt, Artificial Sequence
  Description of Artificial Sequence: Synthetic oligonucleotide
ugaauauaacuggaagacu

SEQ ID NO: 1696385 - RNA, 19 nt, Artificial Sequence
  Description of Artificial Sequence: Synthetic oligonucleotide
guuuaugaucaacagaggu

SEQ ID NO: 1696386 - RNA, 19 nt, Artificial Sequence
  Description of Artificial Sequence: Synthetic oligonucleotide
aaagagugaccaaugacuu

SEQ ID NO: 1696387 - RNA, 19 nt, Artificial Sequence
  Description of Artificial Sequence: Synthetic oligonucleotide
acaggauaaaucucucccu

SEQ ID NO: 1696388 - RNA, 19 nt, Artificial Sequence
  Description of Artificial Sequence: Synthetic oligonucleotide
aguuguugucccuucagaa

SEQ ID NO: 1696389 - RNA, 19 nt, Artificial Sequence
  Description of Artificial Sequence: Synthetic oligonucleotide
gaaagaacuugaauauaac

SEQ ID NO: 1696390 - RNA, 19 nt, Artificial Sequence
  Description of Artificial Sequence: Synthetic oligonucleotide
auaucauaacacuuacuuu

SEQ ID NO: 1696391 - RNA, 19 nt, Artificial Sequence
  Description of Artificial Sequence: Synthetic oligonucleotide
aaagcaagauauggaccuc

SEQ ID NO: 1696392 - RNA, 19 nt, Artificial Sequence
  Description of Artificial Sequence: Synthetic oligonucleotide
cuugggaucuaaagaugcc

SEQ ID NO: 1696393 - RNA, 19 nt, Artificial Sequence
  Description of Artificial Sequence: Synthetic oligonucleotide
caguaguugagaugugagc

SEQ ID NO: 1696394 - RNA, 19 nt, Artificial Sequence
  Description of Artificial Sequence: Synthetic oligonucleotide
guuguugucccuucagaac

SEQ ID NO: 1696395 - RNA, 19 nt, Artificial Sequence
  Description of Artificial Sequence: Synthetic oligonucleotide
gagcuuagugccauuuggg

SEQ ID NO: 1696396 - RNA, 19 nt, Artificial Sequence
  Description of Artificial Sequence: Synthetic oligonucleotide
auauaacuggaagacuuug

SEQ ID NO: 1696397 - RNA, 19 nt, Artificial Sequence
  Description of Artificial Sequence: Synthetic oligonucleotide
ugaucaacagaggucuagc

SEQ ID NO: 1696398 - RNA, 19 nt, Artificial Sequence
  Description of Artificial Sequence: Synthetic oligonucleotide
caaagagggcauauaggug

SEQ ID NO: 1696399 - RNA, 19 nt, Artificial Sequence
  Description of Artificial Sequence: Synthetic oligonucleotide
cuaucacucugaccaaggg

SEQ ID NO: 1696400 - RNA, 19 nt, Artificial Sequence
  Description of Artificial Sequence: Synthetic oligonucleotide
ucauagaggccuuuucuua

SEQ ID NO: 1696401 - RNA, 19 nt, Artificial Sequence
  Description of Artificial Sequence: Synthetic oligonucleotide
uuccgugagcgacucuugg

SEQ ID NO: 1696402 - RNA, 19 nt, Artificial Sequence
  Description of Artificial Sequence: Synthetic oligonucleotide
uaggacaguaguugagaug

SEQ ID NO: 1696403 - RNA, 19 nt, Artificial Sequence
  Description of Artificial Sequence: Synthetic oligonucleotide
uaaagaugcccugguauga

SEQ ID NO: 1696404 - RNA, 19 nt, Artificial Sequence
  Description of Artificial Sequence: Synthetic oligonucleotide
acucugaccaaggggaggg

SEQ ID NO: 1696405 - RNA, 19 nt, Artificial Sequence
  Description of Artificial Sequence: Synthetic oligonucleotide
gaauauaggggagauauau

SEQ ID NO: 1696406 - RNA, 19 nt, Artificial Sequence
  Description of Artificial Sequence: Synthetic oligonucleotide
auagaaacucaggagggca

SEQ ID NO: 1696407 - RNA, 19 nt, Artificial Sequence
  Description of Artificial Sequence: Synthetic oligonucleotide
ccuaaggcaaaacuagagg

SEQ ID NO: 1696408 - RNA, 19 nt, Artificial Sequence
  Description of Artificial Sequence: Synthetic oligonucleotide
gucagcuccaaacuaggac

SEQ ID NO: 1696409 - RNA, 19 nt, Artificial Sequence
  Description of Artificial Sequence: Synthetic oligonucleotide
ugguaugaaagaacuugaa

SEQ ID NO: 1696410 - RNA, 19 nt, Artificial Sequence
  Description of Artificial Sequence: Synthetic oligonucleotide
aggugcauuucgaugaauc

SEQ ID NO: 1696411 - RNA, 19 nt, Artificial Sequence
  Description of Artificial Sequence: Synthetic oligonucleotide
aucgggaccucuaucacuc

SEQ ID NO: 1696412 - RNA, 19 nt, Artificial Sequence
  Description of Artificial Sequence: Synthetic oligonucleotide
acuagaggggaggaaauca

SEQ ID NO: 1696413 - RNA, 19 nt, Artificial Sequence
  Description of Artificial Sequence: Synthetic oligonucleotide
gacuuugaugggacuauag

SEQ ID NO: 1696414 - RNA, 19 nt, Artificial Sequence
  Description of Artificial Sequence: Synthetic oligonucleotide
agaaccuaaggcaaaacua

SEQ ID NO: 1696415 - RNA, 19 nt, Artificial Sequence
  Description of Artificial Sequence: Synthetic oligonucleotide
ugucguguguccugcuucc

SEQ ID NO: 1696416 - RNA, 19 nt, Artificial Sequence
  Description of Artificial Sequence: Synthetic oligonucleotide
ggacuauagaacaacacca

SEQ ID NO: 1696417 - RNA, 19 nt, Artificial Sequence
  Description of Artificial Sequence: Synthetic oligonucleotide
accuaaggcaaaacuagag

SEQ ID NO: 1696418 - RNA, 19 nt, Artificial Sequence
  Description of Artificial Sequence: Synthetic oligonucleotide
agccucacaaauuacugua

SEQ ID NO: 1696419 - RNA, 19 nt, Artificial Sequence
  Description of Artificial Sequence: Synthetic oligonucleotide
agauauggaccuccuccag

SEQ ID NO: 1696420 - RNA, 19 nt, Artificial Sequence
  Description of Artificial Sequence: Synthetic oligonucleotide
auaggucuaagaguaacau

SEQ ID NO: 1696421 - RNA, 19 nt, Artificial Sequence
  Description of Artificial Sequence: Synthetic oligonucleotide
caugacuaggagacuuggc

SEQ ID NO: 1696422 - RNA, 19 nt, Artificial Sequence
  Description of Artificial Sequence: Synthetic oligonucleotide
caggauaaaucucucccuc

SEQ ID NO: 1696423 - RNA, 19 nt, Artificial Sequence
  Description of Artificial Sequence: Synthetic oligonucleotide
augaucaacagaggucuag

SEQ ID NO: 1696424 - RNA, 19 nt, Artificial Sequence
  Description of Artificial Sequence: Synthetic oligonucleotide
aacaugacuaggagacuug

SEQ ID NO: 1696425 - RNA, 19 nt, Artificial Sequence
  Description of Artificial Sequence: Synthetic oligonucleotide
aagacuuugaugggacuau

SEQ ID NO: 1696426 - RNA, 19 nt, Artificial Sequence
  Description of Artificial Sequence: Synthetic oligonucleotide
gucagggauagagaccugg

SEQ ID NO: 1696427 - RNA, 19 nt, Artificial Sequence
  Description of Artificial Sequence: Synthetic oligonucleotide
ugcccugguaugaaagaac

SEQ ID NO: 1696428 - RNA, 19 nt, Artificial Sequence
  Description of Artificial Sequence: Synthetic oligonucleotide
cauaacacuuacuuucaaa

SEQ ID NO: 1696429 - RNA, 19 nt, Artificial Sequence
  Description of Artificial Sequence: Synthetic oligonucleotide
ugaugggacuauagaacaa

SEQ ID NO: 1696430 - RNA, 19 nt, Artificial Sequence
  Description of Artificial Sequence: Synthetic oligonucleotide
cauaggucuaagaguaaca

SEQ ID NO: 1696431 - RNA, 19 nt, Artificial Sequence
  Description of Artificial Sequence: Synthetic oligonucleotide
uguugucccuucagaaccu

SEQ ID NO: 1696432 - RNA, 19 nt, Artificial Sequence
  Description of Artificial Sequence: Synthetic oligonucleotide
ggaucuaaagaugcccugg

SEQ ID NO: 1696433 - RNA, 19 nt, Artificial Sequence
  Description of Artificial Sequence: Synthetic oligonucleotide
cauucagcccacugggaug

SEQ ID NO: 1696434 - RNA, 19 nt, Artificial Sequence
  Description of Artificial Sequence: Synthetic oligonucleotide
agcgacucuuggcuuuuac

SEQ ID NO: 1696435 - RNA, 19 nt, Artificial Sequence
  Description of Artificial Sequence: Synthetic oligonucleotide
aaauaagagcaaggagaga

SEQ ID NO: 1696436 - RNA, 19 nt, Artificial Sequence
  Description of Artificial Sequence: Synthetic oligonucleotide
auacagacccaaagggagg

SEQ ID NO: 1696437 - RNA, 19 nt, Artificial Sequence
  Description of Artificial Sequence: Synthetic oligonucleotide
aaguauagggaaagaccca

SEQ ID NO: 1696438 - RNA, 19 nt, Artificial Sequence
  Description of Artificial Sequence: Synthetic oligonucleotide
aggagagagggguuauucu

SEQ ID NO: 1696439 - RNA, 19 nt, Artificial Sequence
  Description of Artificial Sequence: Synthetic oligonucleotide
uauggaccuccuccagucc

SEQ ID NO: 1696440 - RNA, 19 nt, Artificial Sequence
  Description of Artificial Sequence: Synthetic oligonucleotide
ugaauauaggggagauaua

SEQ ID NO: 1696441 - RNA, 19 nt, Artificial Sequence
  Description of Artificial Sequence: Synthetic oligonucleotide
aggucaccuacauaaccca

SEQ ID NO: 1696442 - RNA, 19 nt, Artificial Sequence
  Description of Artificial Sequence: Synthetic oligonucleotide
acccaaacuauagcuguuc

SEQ ID NO: 1696443 - RNA, 19 nt, Artificial Sequence
  Description of Artificial Sequence: Synthetic oligonucleotide
gagacccaggcauuagcac

SEQ ID NO: 1696444 - RNA, 19 nt, Artificial Sequence
  Description of Artificial Sequence: Synthetic oligonucleotide
uccgugagcgacucuuggc

SEQ ID NO: 1696445 - RNA, 19 nt, Artificial Sequence
  Description of Artificial Sequence: Synthetic oligonucleotide
guugagaugugagcaggag

SEQ ID NO: 1696446 - RNA, 19 nt, Artificial Sequence
  Description of Artificial Sequence: Synthetic oligonucleotide
agucaaugagagccuuuug

SEQ ID NO: 1696447 - RNA, 19 nt, Artificial Sequence
  Description of Artificial Sequence: Synthetic oligonucleotide
ggggucaugagacccaggc

SEQ ID NO: 1696448 - RNA, 19 nt, Artificial Sequence
  Description of Artificial Sequence: Synthetic oligonucleotide
gccucuuacauguauaaaa

SEQ ID NO: 1696449 - RNA, 19 nt, Artificial Sequence
  Description of Artificial Sequence: Synthetic oligonucleotide
uaggggagauauaugcauu

SEQ ID NO: 1696450 - RNA, 19 nt, Artificial Sequence
  Description of Artificial Sequence: Synthetic oligonucleotide
cagggauagagaccuggag

SEQ ID NO: 1696451 - RNA, 19 nt, Artificial Sequence
  Description of Artificial Sequence: Synthetic oligonucleotide
cacuuuggaguuguugggc

SEQ ID NO: 1696452 - RNA, 19 nt, Artificial Sequence
  Description of Artificial Sequence: Synthetic oligonucleotide
gacccaggcauuagcaccc

SEQ ID NO: 1696453 - RNA, 19 nt, Artificial Sequence
  Description of Artificial Sequence: Synthetic oligonucleotide
ucguguguccugcuuccug

SEQ ID NO: 1696454 - RNA, 19 nt, Artificial Sequence
  Description of Artificial Sequence: Synthetic oligonucleotide
gauagagaccuggagcuaa

SEQ ID NO: 1696455 - RNA, 19 nt, Artificial Sequence
  Description of Artificial Sequence: Synthetic oligonucleotide
gaagacuuugaugggacua

SEQ ID NO: 1696456 - RNA, 19 nt, Artificial Sequence
  Description of Artificial Sequence: Synthetic oligonucleotide
caaugacuuccuuaacuga

SEQ ID NO: 1696457 - RNA, 19 nt, Artificial Sequence
  Description of Artificial Sequence: Synthetic oligonucleotide
gcucauuaggcuccagucc

SEQ ID NO: 1696458 - RNA, 19 nt, Artificial Sequence
  Description of Artificial Sequence: Synthetic oligonucleotide
aggggaggguuuaugauca

SEQ ID NO: 1696459 - RNA, 19 nt, Artificial Sequence
  Description of Artificial Sequence: Synthetic oligonucleotide
gaggggaggaaaucauaga

SEQ ID NO: 1696460 - RNA, 19 nt, Artificial Sequence
  Description of Artificial Sequence: Synthetic oligonucleotide
acauauuauugugacucaa

SEQ ID NO: 1696461 - RNA, 19 nt, Artificial Sequence
  Description of Artificial Sequence: Synthetic oligonucleotide
cauagaggccuuuucuuaa

SEQ ID NO: 1696462 - RNA, 19 nt, Artificial Sequence
  Description of Artificial Sequence: Synthetic oligonucleotide
gguuuaugaucaacagagg

SEQ ID NO: 1696463 - RNA, 19 nt, Artificial Sequence
  Description of Artificial Sequence: Synthetic oligonucleotide
cugaggcuacauuaaagaa

SEQ ID NO: 1696464 - RNA, 19 nt, Artificial Sequence
  Description of Artificial Sequence: Synthetic oligonucleotide
auuaggcuccaguccucag

SEQ ID NO: 1696465 - RNA, 19 nt, Artificial Sequence
  Description of Artificial Sequence: Synthetic oligonucleotide
gaccucuaucacucugacc

SEQ ID NO: 1696466 - RNA, 19 nt, Artificial Sequence
  Description of Artificial Sequence: Synthetic oligonucleotide
gugaccaaugacuuccuua

SEQ ID NO: 1696467 - RNA, 19 nt, Artificial Sequence
  Description of Artificial Sequence: Synthetic oligonucleotide
ugucugucguguguccugc

SEQ ID NO: 1696468 - RNA, 19 nt, Artificial Sequence
  Description of Artificial Sequence: Synthetic oligonucleotide
gaucuaaagaugcccuggu

SEQ ID NO: 1696469 - RNA, 19 nt, Artificial Sequence
  Description of Artificial Sequence: Synthetic oligonucleotide
aacagaggucuagcccuuc

SEQ ID NO: 1696470 - RNA, 19 nt, Artificial Sequence
  Description of Artificial Sequence: Synthetic oligonucleotide
aggccuucauagguggagg

SEQ ID NO: 1696471 - RNA, 19 nt, Artificial Sequence
  Description of Artificial Sequence: Synthetic oligonucleotide
gauauggaccuccuccagu

SEQ ID NO: 1696472 - RNA, 19 nt, Artificial Sequence
  Description of Artificial Sequence: Synthetic oligonucleotide
agggguuauucuuccagua

SEQ ID NO: 1696473 - RNA, 19 nt, Artificial Sequence
  Description of Artificial Sequence: Synthetic oligonucleotide
ggaacacauauuauuguga

SEQ ID NO: 1696474 - RNA, 19 nt, Artificial Sequence
  Description of Artificial Sequence: Synthetic oligonucleotide
cacauauuauugugacuca

SEQ ID NO: 1696475 - RNA, 19 nt, Artificial Sequence
  Description of Artificial Sequence: Synthetic oligonucleotide
uguuaucccauaggucuaa

SEQ ID NO: 1696476 - RNA, 19 nt, Artificial Sequence
  Description of Artificial Sequence: Synthetic oligonucleotide
ggaggguuuaugaucaaca

SEQ ID NO: 1696477 - RNA, 19 nt, Artificial Sequence
  Description of Artificial Sequence: Synthetic oligonucleotide
ggcuacauuaaagaauaca

SEQ ID NO: 1696478 - RNA, 19 nt, Artificial Sequence
  Description of Artificial Sequence: Synthetic oligonucleotide
cugucguguguccugcuuc

SEQ ID NO: 1696479 - RNA, 19 nt, Artificial Sequence
  Description of Artificial Sequence: Synthetic oligonucleotide
ugccccuuagucagcucca

SEQ ID NO: 1696480 - RNA, 19 nt, Artificial Sequence
  Description of Artificial Sequence: Synthetic oligonucleotide
auaggugcauuucgaugaa

SEQ ID NO: 1696481 - RNA, 19 nt, Artificial Sequence
  Description of Artificial Sequence: Synthetic oligonucleotide
aucuaaagaugcccuggua

SEQ ID NO: 1696482 - RNA, 19 nt, Artificial Sequence
  Description of Artificial Sequence: Synthetic oligonucleotide
aagagucaaugagagccuu

SEQ ID NO: 1696483 - RNA, 19 nt, Artificial Sequence
  Description of Artificial Sequence: Synthetic oligonucleotide
gucuaagaguaacaugacu

SEQ ID NO: 1696484 - RNA, 19 nt, Artificial Sequence
  Description of Artificial Sequence: Synthetic oligonucleotide
ucugucguguguccugcuu

SEQ ID NO: 1696485 - RNA, 19 nt, Artificial Sequence
  Description of Artificial Sequence: Synthetic oligonucleotide
augggacuauagaacaaca

SEQ ID NO: 1696486 - RNA, 19 nt, Artificial Sequence
  Description of Artificial Sequence: Synthetic oligonucleotide
gaccaaugacuuccuuaac

SEQ ID NO: 1696487 - RNA, 19 nt, Artificial Sequence
  Description of Artificial Sequence: Synthetic oligonucleotide
ggucaugagacccaggcau

SEQ ID NO: 1696488 - RNA, 19 nt, Artificial Sequence
  Description of Artificial Sequence: Synthetic oligonucleotide
ucuugaaccggggcuccca

SEQ ID NO: 1696489 - RNA, 19 nt, Artificial Sequence
  Description of Artificial Sequence: Synthetic oligonucleotide
gagccucacaaauuacugu

SEQ ID NO: 1696490 - RNA, 19 nt, Artificial Sequence
  Description of Artificial Sequence: Synthetic oligonucleotide
agcugaauauaggggagau

SEQ ID NO: 1696491 - RNA, 19 nt, Artificial Sequence
  Description of Artificial Sequence: Synthetic oligonucleotide
gggaucuaaagaugcccug

SEQ ID NO: 1696492 - RNA, 19 nt, Artificial Sequence
  Description of Artificial Sequence: Synthetic oligonucleotide
uccuuaacugaggcuacau

SEQ ID NO: 1696493 - RNA, 19 nt, Artificial Sequence
  Description of Artificial Sequence: Synthetic oligonucleotide
cacucugaccaaggggagg

SEQ ID NO: 1696494 - RNA, 19 nt, Artificial Sequence
  Description of Artificial Sequence: Synthetic oligonucleotide
caugagacccaggcauuag

SEQ ID NO: 1696495 - RNA, 19 nt, Artificial Sequence
  Description of Artificial Sequence: Synthetic oligonucleotide
caagcaggccuucauaggu

SEQ ID NO: 1696496 - RNA, 19 nt, Artificial Sequence
  Description of Artificial Sequence: Synthetic oligonucleotide
ggagcaaaagaaagaguca

SEQ ID NO: 1696497 - RNA, 19 nt, Artificial Sequence
  Description of Artificial Sequence: Synthetic oligonucleotide
cagaggucuagcccuucac

SEQ ID NO: 1696498 - RNA, 19 nt, Artificial Sequence
  Description of Artificial Sequence: Synthetic oligonucleotide
gcuguucuugaaccggggc

SEQ ID NO: 1696499 - RNA, 19 nt, Artificial Sequence
  Description of Artificial Sequence: Synthetic oligonucleotide
gagggguuauucuuccagu

SEQ ID NO: 1696500 - RNA, 19 nt, Artificial Sequence
  Description of Artificial Sequence: Synthetic oligonucleotide
aguugagaugugagcagga

SEQ ID NO: 1696501 - RNA, 19 nt, Artificial Sequence
  Description of Artificial Sequence: Synthetic oligonucleotide
agcuguucuugaaccgggg

SEQ ID NO: 1696502 - RNA, 19 nt, Artificial Sequence
  Description of Artificial Sequence: Synthetic oligonucleotide
gagcugaauauaggggaga

SEQ ID NO: 1696503 - RNA, 19 nt, Artificial Sequence
  Description of Artificial Sequence: Synthetic oligonucleotide
guuaucccauaggucuaag

SEQ ID NO: 1696504 - RNA, 19 nt, Artificial Sequence
  Description of Artificial Sequence: Synthetic oligonucleotide
gacccacagaucuugggau

SEQ ID NO: 1696505 - RNA, 19 nt, Artificial Sequence
  Description of Artificial Sequence: Synthetic oligonucleotide
auagccucuuacauguaua

SEQ ID NO: 1696506 - RNA, 19 nt, Artificial Sequence
  Description of Artificial Sequence: Synthetic oligonucleotide
cauagguggaggcugcugu

SEQ ID NO: 1696507 - RNA, 19 nt, Artificial Sequence
  Description of Artificial Sequence: Synthetic oligonucleotide
cagucagggauagagaccu

SEQ ID NO: 1696508 - RNA, 19 nt, Artificial Sequence
  Description of Artificial Sequence: Synthetic oligonucleotide
accaaggggaggguuuaug

SEQ ID NO: 1696509 - RNA, 19 nt, Artificial Sequence
  Description of Artificial Sequence: Synthetic oligonucleotide
ggaggaaaucauagaggcc

SEQ ID NO: 1696510 - RNA, 19 nt, Artificial Sequence
  Description of Artificial Sequence: Synthetic oligonucleotide
ggucuagcccuucaccuuc

SEQ ID NO: 1696511 - RNA, 19 nt, Artificial Sequence
  Description of Artificial Sequence: Synthetic oligonucleotide
aggucuagcccuucaccuu

SEQ ID NO: 1696512 - RNA, 19 nt, Artificial Sequence
  Description of Artificial Sequence: Synthetic oligonucleotide
guucuugaaccggggcucc

SEQ ID NO: 1696513 - RNA, 19 nt, Artificial Sequence
  Description of Artificial Sequence: Synthetic oligonucleotide
acaugacaagcaggccuuc

SEQ ID NO: 1696514 - RNA, 19 nt, Artificial Sequence
  Description of Artificial Sequence: Synthetic oligonucleotide
guccuuacacccugcagcu

SEQ ID NO: 1696515 - RNA, 19 nt, Artificial Sequence
  Description of Artificial Sequence: Synthetic oligonucleotide
cuguucuugaaccggggcu

SEQ ID NO: 1696516 - RNA, 19 nt, Artificial Sequence
  Description of Artificial Sequence: Synthetic oligonucleotide
cuaaguuacuccugggcuu

SEQ ID NO: 1696517 - RNA, 19 nt, Artificial Sequence
  Description of Artificial Sequence: Synthetic oligonucleotide
ccauaggucuaagaguaac

SEQ ID NO: 1696518 - RNA, 19 nt, Artificial Sequence
  Description of Artificial Sequence: Synthetic oligonucleotide
gagagggguuauucuucca

SEQ ID NO: 1696519 - RNA, 19 nt, Artificial Sequence
  Description of Artificial Sequence: Synthetic oligonucleotide
guauagggaaagacccaca

SEQ ID NO: 1696520 - RNA, 19 nt, Artificial Sequence
  Description of Artificial Sequence: Synthetic oligonucleotide
ugaccaaggggaggguuua

SEQ ID NO: 1696521 - RNA, 19 nt, Artificial Sequence
  Description of Artificial Sequence: Synthetic oligonucleotide
cauuagcacccaaacuaua

SEQ ID NO: 1696522 - RNA, 19 nt, Artificial Sequence
  Description of Artificial Sequence: Synthetic oligonucleotide
gcauauaggugcauuucga

SEQ ID NO: 1696523 - RNA, 19 nt, Artificial Sequence
  Description of Artificial Sequence: Synthetic oligonucleotide
cuaggacaguaguugagau

SEQ ID NO: 1696524 - RNA, 19 nt, Artificial Sequence
  Description of Artificial Sequence: Synthetic oligonucleotide
ggaccucuaucacucugac

SEQ ID NO: 1696525 - RNA, 19 nt, Artificial Sequence
  Description of Artificial Sequence: Synthetic oligonucleotide
gggguuauucuuccaguaa

SEQ ID NO: 1696526 - RNA, 19 nt, Artificial Sequence
  Description of Artificial Sequence: Synthetic oligonucleotide
gacaugacaagcaggccuu

SEQ ID NO: 1696527 - RNA, 19 nt, Artificial Sequence
  Description of Artificial Sequence: Synthetic oligonucleotide
cuagaggggaggaaaucau

SEQ ID NO: 1696528 - RNA, 19 nt, Artificial Sequence
  Description of Artificial Sequence: Synthetic oligonucleotide
cauagccucuuacauguau

SEQ ID NO: 1696529 - RNA, 19 nt, Artificial Sequence
  Description of Artificial Sequence: Synthetic oligonucleotide
ccaaggggaggguuuauga

SEQ ID NO: 1696530 - RNA, 19 nt, Artificial Sequence
  Description of Artificial Sequence: Synthetic oligonucleotide
uagagaccuggagcuaaau

SEQ ID NO: 1696531 - RNA, 19 nt, Artificial Sequence
  Description of Artificial Sequence: Synthetic oligonucleotide
agccucuuacauguauaaa

SEQ ID NO: 1696532 - RNA, 19 nt, Artificial Sequence
  Description of Artificial Sequence: Synthetic oligonucleotide
gcgacucuuggcuuuuaca

SEQ ID NO: 1696533 - RNA, 19 nt, Artificial Sequence
  Description of Artificial Sequence: Synthetic oligonucleotide
cccugauguuaucccauag

SEQ ID NO: 1696534 - RNA, 19 nt, Artificial Sequence
  Description of Artificial Sequence: Synthetic oligonucleotide
auggaaaagcaaagucaua

SEQ ID NO: 1696535 - RNA, 19 nt, Artificial Sequence
  Description of Artificial Sequence: Synthetic oligonucleotide
uaggugcauuucgaugaau

SEQ ID NO: 1696536 - RNA, 19 nt, Artificial Sequence
  Description of Artificial Sequence: Synthetic oligonucleotide
ggagagagggguuauucuu

SEQ ID NO: 1696537 - RNA, 19 nt, Artificial Sequence
  Description of Artificial Sequence: Synthetic oligonucleotide
ucgggaccucuaucacucu

SEQ ID NO: 1696538 - RNA, 19 nt, Artificial Sequence
  Description of Artificial Sequence: Synthetic oligonucleotide
gggcauauaggugcauuuc

SEQ ID NO: 1696539 - RNA, 19 nt, Artificial Sequence
  Description of Artificial Sequence: Synthetic oligonucleotide
gggguaagaaaggucaccu

SEQ ID NO: 1696540 - RNA, 19 nt, Artificial Sequence
  Description of Artificial Sequence: Synthetic oligonucleotide
agcccugauguuaucccau

SEQ ID NO: 1696541 - RNA, 19 nt, Artificial Sequence
  Description of Artificial Sequence: Synthetic oligonucleotide
ggucaccuacauaacccac

SEQ ID NO: 1696542 - RNA, 19 nt, Artificial Sequence
  Description of Artificial Sequence: Synthetic oligonucleotide
caaggggaggguuuaugau

SEQ ID NO: 1696543 - RNA, 19 nt, Artificial Sequence
  Description of Artificial Sequence: Synthetic oligonucleotide
gggaggguuuaugaucaac

SEQ ID NO: 1696544 - RNA, 19 nt, Artificial Sequence
  Description of Artificial Sequence: Synthetic oligonucleotide
gggucaugagacccaggca

SEQ ID NO: 1696545 - RNA, 19 nt, Artificial Sequence
  Description of Artificial Sequence: Synthetic oligonucleotide
ggagggcaaggaaggguag

SEQ ID NO: 1696546 - RNA, 19 nt, Artificial Sequence
  Description of Artificial Sequence: Synthetic oligonucleotide
gggaccucuaucacucuga

SEQ ID NO: 1696547 - RNA, 19 nt, Artificial Sequence
  Description of Artificial Sequence: Synthetic oligonucleotide
guaacaugacuaggagacu

SEQ ID NO: 1696548 - RNA, 19 nt, Artificial Sequence
  Description of Artificial Sequence: Synthetic oligonucleotide
gguuauucuuccaguaaau

SEQ ID NO: 1696549 - RNA, 19 nt, Artificial Sequence
  Description of Artificial Sequence: Synthetic oligonucleotide
ccuuagucagcuccaaacu

SEQ ID NO: 1696550 - RNA, 19 nt, Artificial Sequence
  Description of Artificial Sequence: Synthetic oligonucleotide
ggguaagaaaggucaccua

SEQ ID NO: 1696551 - RNA, 19 nt, Artificial Sequence
  Description of Artificial Sequence: Synthetic oligonucleotide
caccuacauaacccacaga

SEQ ID NO: 1696552 - RNA, 19 nt, Artificial Sequence
  Description of Artificial Sequence: Synthetic oligonucleotide
ggaagacuuugaugggacu

SEQ ID NO: 1696553 - RNA, 19 nt, Artificial Sequence
  Description of Artificial Sequence: Synthetic oligonucleotide
cugaccaaggggaggguuu

SEQ ID NO: 1696554 - RNA, 19 nt, Artificial Sequence
  Description of Artificial Sequence: Synthetic oligonucleotide
gagggcauauaggugcauu

SEQ ID NO: 1696555 - RNA, 19 nt, Artificial Sequence
  Description of Artificial Sequence: Synthetic oligonucleotide
gugagcgacucuuggcuuu

SEQ ID NO: 1696556 - RNA, 19 nt, Artificial Sequence
  Description of Artificial Sequence: Synthetic oligonucleotide
agucagggauagagaccug

SEQ ID NO: 1696557 - RNA, 19 nt, Artificial Sequence
  Description of Artificial Sequence: Synthetic oligonucleotide
gcauuagcacccaaacuau

SEQ ID NO: 1696558 - RNA, 19 nt, Artificial Sequence
  Description of Artificial Sequence: Synthetic oligonucleotide
ccaaacuaggacaguaguu

SEQ ID NO: 1696559 - RNA, 19 nt, Artificial Sequence
  Description of Artificial Sequence: Synthetic oligonucleotide
gcccuucaccuucucuuca

SEQ ID NO: 1696560 - RNA, 19 nt, Artificial Sequence
  Description of Artificial Sequence: Synthetic oligonucleotide
gcugaauauaggggagaua

SEQ ID NO: 1696561 - RNA, 19 nt, Artificial Sequence
  Description of Artificial Sequence: Synthetic oligonucleotide
ccgugagcgacucuuggcu

SEQ ID NO: 1696562 - RNA, 19 nt, Artificial Sequence
  Description of Artificial Sequence: Synthetic oligonucleotide
cccaaacuauagcuguucu

SEQ ID NO: 1696563 - RNA, 19 nt, Artificial Sequence
  Description of Artificial Sequence: Synthetic oligonucleotide
gggguuccgugagcgacuc

SEQ ID NO: 1696564 - RNA, 19 nt, Artificial Sequence
  Description of Artificial Sequence: Synthetic oligonucleotide
ccucuaucacucugaccaa

SEQ ID NO: 1696565 - RNA, 19 nt, Artificial Sequence
  Description of Artificial Sequence: Synthetic oligonucleotide
gagcaaggagagagggguu

SEQ ID NO: 1696566 - RNA, 19 nt, Artificial Sequence
  Description of Artificial Sequence: Synthetic oligonucleotide
cccauaggucuaagaguaa

SEQ ID NO: 1696567 - RNA, 19 nt, Artificial Sequence
  Description of Artificial Sequence: Synthetic oligonucleotide
ccuuaacugaggcuacauu

SEQ ID NO: 1696568 - RNA, 19 nt, Artificial Sequence
  Description of Artificial Sequence: Synthetic oligonucleotide
ggggaggguuuaugaucaa

SEQ ID NO: 1696569 - RNA, 19 nt, Artificial Sequence
  Description of Artificial Sequence: Synthetic oligonucleotide
gcaggccuucauaggugga

SEQ ID NO: 1696570 - RNA, 19 nt, Artificial Sequence
  Description of Artificial Sequence: Synthetic oligonucleotide
gaccaaggggaggguuuau

SEQ ID NO: 1696571 - RNA, 19 nt, Artificial Sequence
  Description of Artificial Sequence: Synthetic oligonucleotide
gucguguguccugcuuccu

SEQ ID NO: 1696572 - RNA, 19 nt, Artificial Sequence
  Description of Artificial Sequence: Synthetic oligonucleotide
ccccuuagucagcuccaaa

SEQ ID NO: 1696573 - RNA, 19 nt, Artificial Sequence
  Description of Artificial Sequence: Synthetic oligonucleotide
gccccuuagucagcuccaa

SEQ ID NO: 1696574 - RNA, 19 nt, Artificial Sequence
  Description of Artificial Sequence: Synthetic oligonucleotide
gggcaaggaaggguagauu

SEQ ID NO: 1696575 - RNA, 19 nt, Artificial Sequence
  Description of Artificial Sequence: Synthetic oligonucleotide
ggguuccgugagcgacucu

SEQ ID NO: 1696576 - RNA, 19 nt, Artificial Sequence
  Description of Artificial Sequence: Synthetic oligonucleotide
aagauagugccaucgcuac

SEQ ID NO: 1696577 - RNA, 19 nt, Artificial Sequence
  Description of Artificial Sequence: Synthetic oligonucleotide
ucaaacaagacagacagaa

SEQ ID NO: 1696578 - RNA, 19 nt, Artificial Sequence
  Description of Artificial Sequence: Synthetic oligonucleotide
auggucacagaagugaugc

SEQ ID NO: 1696579 - RNA, 19 nt, Artificial Sequence
  Description of Artificial Sequence: Synthetic oligonucleotide
gacgaguccguacacacgg

SEQ ID NO: 1696580 - RNA, 19 nt, Artificial Sequence
  Description of Artificial Sequence: Synthetic oligonucleotide
gaauucaggguucagcaug

SEQ ID NO: 1696581 - RNA, 19 nt, Artificial Sequence
  Description of Artificial Sequence: Synthetic oligonucleotide
aauuccugccaggacauac

SEQ ID NO: 1696582 - RNA, 19 nt, Artificial Sequence
  Description of Artificial Sequence: Synthetic oligonucleotide
uugccuagcauguucuucg

SEQ ID NO: 1696583 - RNA, 19 nt, Artificial Sequence
  Description of Artificial Sequence: Synthetic oligonucleotide
caugauuuucuguuggagc

SEQ ID NO: 1696584 - RNA, 19 nt, Artificial Sequence
  Description of Artificial Sequence: Synthetic oligonucleotide
ucgccaaguagccugacag

SEQ ID NO: 1696585 - RNA, 19 nt, Artificial Sequence
  Description of Artificial Sequence: Synthetic oligonucleotide
uguacgcagacacugcuug

SEQ ID NO: 1696586 - RNA, 19 nt, Artificial Sequence
  Description of Artificial Sequence: Synthetic oligonucleotide
acugacucaucaugggagc

SEQ ID NO: 1696587 - RNA, 19 nt, Artificial Sequence
  Description of Artificial Sequence: Synthetic oligonucleotide
uguucuucgccaaguagcc

SEQ ID NO: 1696588 - RNA, 19 nt, Artificial Sequence
  Description of Artificial Sequence: Synthetic oligonucleotide
cacaucuugguagugacgg

SEQ ID NO: 1696589 - RNA, 19 nt, Artificial Sequence
  Description of Artificial Sequence: Synthetic oligonucleotide
auucugaucaggccggaag

SEQ ID NO: 1696590 - RNA, 19 nt, Artificial Sequence
  Description of Artificial Sequence: Synthetic oligonucleotide
accagacaugccuuggggc

SEQ ID NO: 1696591 - RNA, 19 nt, Artificial Sequence
  Description of Artificial Sequence: Synthetic oligonucleotide
uguguguugagaccagaca

SEQ ID NO: 1696592 - RNA, 19 nt, Artificial Sequence
  Description of Artificial Sequence: Synthetic oligonucleotide
agugaugcccacgucaaac

SEQ ID NO: 1696593 - RNA, 19 nt, Artificial Sequence
  Description of Artificial Sequence: Synthetic oligonucleotide
gacagaagcaggucucccg

SEQ ID NO: 1696594 - RNA, 19 nt, Artificial Sequence
  Description of Artificial Sequence: Synthetic oligonucleotide
aguaggugcuuguugaagu

SEQ ID NO: 1696595 - RNA, 19 nt, Artificial Sequence
  Description of Artificial Sequence: Synthetic oligonucleotide
aggacaaccaggagguucc

SEQ ID NO: 1696596 - RNA, 19 nt, Artificial Sequence
  Description of Artificial Sequence: Synthetic oligonucleotide
ugaagcucccacaccacgc

SEQ ID NO: 1696597 - RNA, 19 nt, Artificial Sequence
  Description of Artificial Sequence: Synthetic oligonucleotide
aggacauacaggccauugg

SEQ ID NO: 1696598 - RNA, 19 nt, Artificial Sequence
  Description of Artificial Sequence: Synthetic oligonucleotide
agaacacugccauccgugg

SEQ ID NO: 1696599 - RNA, 19 nt, Artificial Sequence
  Description of Artificial Sequence: Synthetic oligonucleotide
ggacauacaggccauuggg

SEQ ID NO: 1696600 - RNA, 19 nt, Artificial Sequence
  Description of Artificial Sequence: Synthetic oligonucleotide
cacauucugaucaggccgg

SEQ ID NO: 1696601 - RNA, 19 nt, Artificial Sequence
  Description of Artificial Sequence: Synthetic oligonucleotide
ucugauccagcgaagcggu

SEQ ID NO: 1696602 - RNA, 19 nt, Artificial Sequence
  Description of Artificial Sequence: Synthetic oligonucleotide
aguccguacacacggccac

SEQ ID NO: 1696603 - RNA, 19 nt, Artificial Sequence
  Description of Artificial Sequence: Synthetic oligonucleotide
guugaucuugcgcaggcug

SEQ ID NO: 1696604 - RNA, 19 nt, Artificial Sequence
  Description of Artificial Sequence: Synthetic oligonucleotide
gagugaagcucccacacca

SEQ ID NO: 1696605 - RNA, 19 nt, Artificial Sequence
  Description of Artificial Sequence: Synthetic oligonucleotide
ugacuguacgcagacacug

SEQ ID NO: 1696606 - RNA, 19 nt, Artificial Sequence
  Description of Artificial Sequence: Synthetic oligonucleotide
ucccgguugaucuugcgca

SEQ ID NO: 1696607 - RNA, 19 nt, Artificial Sequence
  Description of Artificial Sequence: Synthetic oligonucleotide
uccacagaacauguggugc

SEQ ID NO: 1696608 - RNA, 19 nt, Artificial Sequence
  Description of Artificial Sequence: Synthetic oligonucleotide
uggaagauagugccaucgc

SEQ ID NO: 1696609 - RNA, 19 nt, Artificial Sequence
  Description of Artificial Sequence: Synthetic oligonucleotide
agauagugccaucgcuacc

SEQ ID NO: 1696610 - RNA, 19 nt, Artificial Sequence
  Description of Artificial Sequence: Synthetic oligonucleotide
ucagacaggugaccggacc

SEQ ID NO: 1696611 - RNA, 19 nt, Artificial Sequence
  Description of Artificial Sequence: Synthetic oligonucleotide
gucacuugguuccugugcc

SEQ ID NO: 1696612 - RNA, 19 nt, Artificial Sequence
  Description of Artificial Sequence: Synthetic oligonucleotide
agacaaaauggcugcuguc

SEQ ID NO: 1696613 - RNA, 19 nt, Artificial Sequence
  Description of Artificial Sequence: Synthetic oligonucleotide
ggagaagucgaagaggucc

SEQ ID NO: 1696614 - RNA, 19 nt, Artificial Sequence
  Description of Artificial Sequence: Synthetic oligonucleotide
cuggaagauagugccaucg

SEQ ID NO: 1696615 - RNA, 19 nt, Artificial Sequence
  Description of Artificial Sequence: Synthetic oligonucleotide
cucgccauugagcagcgcc

SEQ ID NO: 1696616 - RNA, 19 nt, Artificial Sequence
  Description of Artificial Sequence: Synthetic oligonucleotide
aagacuuuccccacauucu

SEQ ID NO: 1696617 - RNA, 19 nt, Artificial Sequence
  Description of Artificial Sequence: Synthetic oligonucleotide
gucugauccagcgaagcgg

SEQ ID NO: 1696618 - RNA, 19 nt, Artificial Sequence
  Description of Artificial Sequence: Synthetic oligonucleotide
ucugugaucgggagugugu

SEQ ID NO: 1696619 - RNA, 19 nt, Artificial Sequence
  Description of Artificial Sequence: Synthetic oligonucleotide
ggugacuguacgcagacac

SEQ ID NO: 1696620 - RNA, 19 nt, Artificial Sequence
  Description of Artificial Sequence: Synthetic oligonucleotide
cauguucuucgccaaguag

SEQ ID NO: 1696621 - RNA, 19 nt, Artificial Sequence
  Description of Artificial Sequence: Synthetic oligonucleotide
uuagagggccgcgugauga

SEQ ID NO: 1696622 - RNA, 19 nt, Artificial Sequence
  Description of Artificial Sequence: Synthetic oligonucleotide
agggugacuguacgcagac

SEQ ID NO: 1696623 - RNA, 19 nt, Artificial Sequence
  Description of Artificial Sequence: Synthetic oligonucleotide
ucucccgaggagauggccc

SEQ ID NO: 1696624 - RNA, 19 nt, Artificial Sequence
  Description of Artificial Sequence: Synthetic oligonucleotide
cauccguggacaccgacag

SEQ ID NO: 1696625 - RNA, 19 nt, Artificial Sequence
  Description of Artificial Sequence: Synthetic oligonucleotide
gcaugacacaucuugguag

SEQ ID NO: 1696626 - RNA, 19 nt, Artificial Sequence
  Description of Artificial Sequence: Synthetic oligonucleotide
uugagggugacuguacgca

SEQ ID NO: 1696627 - RNA, 19 nt, Artificial Sequence
  Description of Artificial Sequence: Synthetic oligonucleotide
ugggccugaauucaggguu

SEQ ID NO: 1696628 - RNA, 19 nt, Artificial Sequence
  Description of Artificial Sequence: Synthetic oligonucleotide
uccauagcugcgccgacga

SEQ ID NO: 1696629 - RNA, 19 nt, Artificial Sequence
  Description of Artificial Sequence: Synthetic oligonucleotide
ugaucaggccggaagcugu

SEQ ID NO: 1696630 - RNA, 19 nt, Artificial Sequence
  Description of Artificial Sequence: Synthetic oligonucleotide
uugguagugacggcugagg

SEQ ID NO: 1696631 - RNA, 19 nt, Artificial Sequence
  Description of Artificial Sequence: Synthetic oligonucleotide
gacaccgacaggcacguca

SEQ ID NO: 1696632 - RNA, 19 nt, Artificial Sequence
  Description of Artificial Sequence: Synthetic oligonucleotide
uccuggacgggucugccug

SEQ ID NO: 1696633 - RNA, 19 nt, Artificial Sequence
  Description of Artificial Sequence: Synthetic oligonucleotide
cacgcagcuccauagcugc

SEQ ID NO: 1696634 - RNA, 19 nt, Artificial Sequence
  Description of Artificial Sequence: Synthetic oligonucleotide
guugagaccagacaugccu

SEQ ID NO: 1696635 - RNA, 19 nt, Artificial Sequence
  Description of Artificial Sequence: Synthetic oligonucleotide
ugagggugacuguacgcag

SEQ ID NO: 1696636 - RNA, 19 nt, Artificial Sequence
  Description of Artificial Sequence: Synthetic oligonucleotide
ugagacaaaauggcugcug

SEQ ID NO: 1696637 - RNA, 19 nt, Artificial Sequence
  Description of Artificial Sequence: Synthetic oligonucleotide
agauguaguucuugccuug

SEQ ID NO: 1696638 - RNA, 19 nt, Artificial Sequence
  Description of Artificial Sequence: Synthetic oligonucleotide
guagugacggcugaggaca

SEQ ID NO: 1696639 - RNA, 19 nt, Artificial Sequence
  Description of Artificial Sequence: Synthetic oligonucleotide
ugcgcugcagcucccaagu

SEQ ID NO: 1696640 - RNA, 19 nt, Artificial Sequence
  Description of Artificial Sequence: Synthetic oligonucleotide
gacucaucaugggagcccg

SEQ ID NO: 1696641 - RNA, 19 nt, Artificial Sequence
  Description of Artificial Sequence: Synthetic oligonucleotide
cagguacucgccauugagc

SEQ ID NO: 1696642 - RNA, 19 nt, Artificial Sequence
  Description of Artificial Sequence: Synthetic oligonucleotide
cugcauuggucacugggcc

SEQ ID NO: 1696643 - RNA, 19 nt, Artificial Sequence
  Description of Artificial Sequence: Synthetic oligonucleotide
ggguucagcaugcugggcg

SEQ ID NO: 1696644 - RNA, 19 nt, Artificial Sequence
  Description of Artificial Sequence: Synthetic oligonucleotide
acaccacgcagcuccauag

SEQ ID NO: 1696645 - RNA, 19 nt, Artificial Sequence
  Description of Artificial Sequence: Synthetic oligonucleotide
ccacauucugaucaggccg

SEQ ID NO: 1696646 - RNA, 19 nt, Artificial Sequence
  Description of Artificial Sequence: Synthetic oligonucleotide
ggggcgaggauccuggacg

SEQ ID NO: 1696647 - RNA, 19 nt, Artificial Sequence
  Description of Artificial Sequence: Synthetic oligonucleotide
ucacuuagagggccgcgug

SEQ ID NO: 1696648 - RNA, 19 nt, Artificial Sequence
  Description of Artificial Sequence: Synthetic oligonucleotide
acuguacgcagacacugcu

SEQ ID NO: 1696649 - RNA, 19 nt, Artificial Sequence
  Description of Artificial Sequence: Synthetic oligonucleotide
uggucacugggccuuugag

SEQ ID NO: 1696650 - RNA, 19 nt, Artificial Sequence
  Description of Artificial Sequence: Synthetic oligonucleotide
ugccccuugaagacuuucc

SEQ ID NO: 1696651 - RNA, 19 nt, Artificial Sequence
  Description of Artificial Sequence: Synthetic oligonucleotide
ugagccgccagcagguacu

SEQ ID NO: 1696652 - RNA, 19 nt, Artificial Sequence
  Description of Artificial Sequence: Synthetic oligonucleotide
aucgcuaccuccacagaac

SEQ ID NO: 1696653 - RNA, 19 nt, Artificial Sequence
  Description of Artificial Sequence: Synthetic oligonucleotide
ugguugccuagcauguucu

SEQ ID NO: 1696654 - RNA, 19 nt, Artificial Sequence
  Description of Artificial Sequence: Synthetic oligonucleotide
agacgagcaccagacaguc

SEQ ID NO: 1696655 - RNA, 19 nt, Artificial Sequence
  Description of Artificial Sequence: Synthetic oligonucleotide
gauccagcgaagcgguggc

SEQ ID NO: 1696656 - RNA, 19 nt, Artificial Sequence
  Description of Artificial Sequence: Synthetic oligonucleotide
ugacacaucuugguaguga

SEQ ID NO: 1696657 - RNA, 19 nt, Artificial Sequence
  Description of Artificial Sequence: Synthetic oligonucleotide
auagcugcgccgacgaguc

SEQ ID NO: 1696658 - RNA, 19 nt, Artificial Sequence
  Description of Artificial Sequence: Synthetic oligonucleotide
cacgucaaacaagacagac

SEQ ID NO: 1696659 - RNA, 19 nt, Artificial Sequence
  Description of Artificial Sequence: Synthetic oligonucleotide
ucgcuaccuccacagaaca

SEQ ID NO: 1696660 - RNA, 19 nt, Artificial Sequence
  Description of Artificial Sequence: Synthetic oligonucleotide
gugcagauguaguucuugc

SEQ ID NO: 1696661 - RNA, 19 nt, Artificial Sequence
  Description of Artificial Sequence: Synthetic oligonucleotide
ucuagccgcuccagguagg

SEQ ID NO: 1696662 - RNA, 19 nt, Artificial Sequence
  Description of Artificial Sequence: Synthetic oligonucleotide
guuggagcugguccuugcg

SEQ ID NO: 1696663 - RNA, 19 nt, Artificial Sequence
  Description of Artificial Sequence: Synthetic oligonucleotide
gacggcugaggacaaccag

SEQ ID NO: 1696664 - RNA, 19 nt, Artificial Sequence
  Description of Artificial Sequence: Synthetic oligonucleotide
gauguaguucuugccuugc

SEQ ID NO: 1696665 - RNA, 19 nt, Artificial Sequence
  Description of Artificial Sequence: Synthetic oligonucleotide
ucuugguagugacggcuga

SEQ ID NO: 1696666 - RNA, 19 nt, Artificial Sequence
  Description of Artificial Sequence: Synthetic oligonucleotide
gaagcgguggccacccggg

SEQ ID NO: 1696667 - RNA, 19 nt, Artificial Sequence
  Description of Artificial Sequence: Synthetic oligonucleotide
ucgccauugagcagcgcca

SEQ ID NO: 1696668 - RNA, 19 nt, Artificial Sequence
  Description of Artificial Sequence: Synthetic oligonucleotide
ggagaccucccacagguag

SEQ ID NO: 1696669 - RNA, 19 nt, Artificial Sequence
  Description of Artificial Sequence: Synthetic oligonucleotide
gauagugccaucgcuaccu

SEQ ID NO: 1696670 - RNA, 19 nt, Artificial Sequence
  Description of Artificial Sequence: Synthetic oligonucleotide
acagaacauguggugcucg

SEQ ID NO: 1696671 - RNA, 19 nt, Artificial Sequence
  Description of Artificial Sequence: Synthetic oligonucleotide
ucccaagugcagauguagu

SEQ ID NO: 1696672 - RNA, 19 nt, Artificial Sequence
  Description of Artificial Sequence: Synthetic oligonucleotide
aggcaugacacaucuuggu

SEQ ID NO: 1696673 - RNA, 19 nt, Artificial Sequence
  Description of Artificial Sequence: Synthetic oligonucleotide
ugacucaucaugggagccc

SEQ ID NO: 1696674 - RNA, 19 nt, Artificial Sequence
  Description of Artificial Sequence: Synthetic oligonucleotide
ucaucaugggagcccgaga

SEQ ID NO: 1696675 - RNA, 19 nt, Artificial Sequence
  Description of Artificial Sequence: Synthetic oligonucleotide
uccugugccccuugaagac

SEQ ID NO: 1696676 - RNA, 19 nt, Artificial Sequence
  Description of Artificial Sequence: Synthetic oligonucleotide
ccagacaugccuuggggcg

SEQ ID NO: 1696677 - RNA, 19 nt, Artificial Sequence
  Description of Artificial Sequence: Synthetic oligonucleotide
augccuuggggcgaggauc

SEQ ID NO: 1696678 - RNA, 19 nt, Artificial Sequence
  Description of Artificial Sequence: Synthetic oligonucleotide
gaagcaggucucccgagga

SEQ ID NO: 1696679 - RNA, 19 nt, Artificial Sequence
  Description of Artificial Sequence: Synthetic oligonucleotide
agugcagauguaguucuug

SEQ ID NO: 1696680 - RNA, 19 nt, Artificial Sequence
  Description of Artificial Sequence: Synthetic oligonucleotide
uagccugacaggucggccu

SEQ ID NO: 1696681 - RNA, 19 nt, Artificial Sequence
  Description of Artificial Sequence: Synthetic oligonucleotide
guggacaccgacaggcacg

SEQ ID NO: 1696682 - RNA, 19 nt, Artificial Sequence
  Description of Artificial Sequence: Synthetic oligonucleotide
gaggacaaccaggagguuc

SEQ ID NO: 1696683 - RNA, 19 nt, Artificial Sequence
  Description of Artificial Sequence: Synthetic oligonucleotide
uucgccaaguagccugaca

SEQ ID NO: 1696684 - RNA, 19 nt, Artificial Sequence
  Description of Artificial Sequence: Synthetic oligonucleotide
gguucagcaugcugggcgg

SEQ ID NO: 1696685 - RNA, 19 nt, Artificial Sequence
  Description of Artificial Sequence: Synthetic oligonucleotide
ugcauuggucacugggccu

SEQ ID NO: 1696686 - RNA, 19 nt, Artificial Sequence
  Description of Artificial Sequence: Synthetic oligonucleotide
ucugaucaggccggaagcu

SEQ ID NO: 1696687 - RNA, 19 nt, Artificial Sequence
  Description of Artificial Sequence: Synthetic oligonucleotide
ugacggcugaggacaacca

SEQ ID NO: 1696688 - RNA, 19 nt, Artificial Sequence
  Description of Artificial Sequence: Synthetic oligonucleotide
agcuucacagucugaucca

SEQ ID NO: 1696689 - RNA, 19 nt, Artificial Sequence
  Description of Artificial Sequence: Synthetic oligonucleotide
ccagacgagcaccagacag

SEQ ID NO: 1696690 - RNA, 19 nt, Artificial Sequence
  Description of Artificial Sequence: Synthetic oligonucleotide
ugaucgggaguguguguug

SEQ ID NO: 1696691 - RNA, 19 nt, Artificial Sequence
  Description of Artificial Sequence: Synthetic oligonucleotide
ucacuugguuccugugccc

SEQ ID NO: 1696692 - RNA, 19 nt, Artificial Sequence
  Description of Artificial Sequence: Synthetic oligonucleotide
auagugccaucgcuaccuc

SEQ ID NO: 1696693 - RNA, 19 nt, Artificial Sequence
  Description of Artificial Sequence: Synthetic oligonucleotide
gagaggagaacacugccau

SEQ ID NO: 1696694 - RNA, 19 nt, Artificial Sequence
  Description of Artificial Sequence: Synthetic oligonucleotide
caucuccgugcucagcacc

SEQ ID NO: 1696695 - RNA, 19 nt, Artificial Sequence
  Description of Artificial Sequence: Synthetic oligonucleotide
acccaguaggugcuuguug

SEQ ID NO: 1696696 - RNA, 19 nt, Artificial Sequence
  Description of Artificial Sequence: Synthetic oligonucleotide
guguguugagaccagacau

SEQ ID NO: 1696697 - RNA, 19 nt, Artificial Sequence
  Description of Artificial Sequence: Synthetic oligonucleotide
acaccgacaggcacgucac

SEQ ID NO: 1696698 - RNA, 19 nt, Artificial Sequence
  Description of Artificial Sequence: Synthetic oligonucleotide
agguagaugcucucugcaa

SEQ ID NO: 1696699 - RNA, 19 nt, Artificial Sequence
  Description of Artificial Sequence: Synthetic oligonucleotide
cuugccuugcugagccgcc

SEQ ID NO: 1696700 - RNA, 19 nt, Artificial Sequence
  Description of Artificial Sequence: Synthetic oligonucleotide
gaagugaugcccacgucaa

SEQ ID NO: 1696701 - RNA, 19 nt, Artificial Sequence
  Description of Artificial Sequence: Synthetic oligonucleotide
gccaucgcuaccuccacag

SEQ ID NO: 1696702 - RNA, 19 nt, Artificial Sequence
  Description of Artificial Sequence: Synthetic oligonucleotide
uugcgcugcagcucccaag

SEQ ID NO: 1696703 - RNA, 19 nt, Artificial Sequence
  Description of Artificial Sequence: Synthetic oligonucleotide
caggccuagcugcaggcgc

SEQ ID NO: 1696704 - RNA, 19 nt, Artificial Sequence
  Description of Artificial Sequence: Synthetic oligonucleotide
ugugaucgggagugugugu

SEQ ID NO: 1696705 - RNA, 19 nt, Artificial Sequence
  Description of Artificial Sequence: Synthetic oligonucleotide
gugacggcugaggacaacc

SEQ ID NO: 1696706 - RNA, 19 nt, Artificial Sequence
  Description of Artificial Sequence: Synthetic oligonucleotide
uggugcucggccaggucca

SEQ ID NO: 1696707 - RNA, 19 nt, Artificial Sequence
  Description of Artificial Sequence: Synthetic oligonucleotide
gugaugaugcgcguggaga

SEQ ID NO: 1696708 - RNA, 19 nt, Artificial Sequence
  Description of Artificial Sequence: Synthetic oligonucleotide
acaggcacgucacuugguu

SEQ ID NO: 1696709 - RNA, 19 nt, Artificial Sequence
  Description of Artificial Sequence: Synthetic oligonucleotide
uagugccaucgcuaccucc

SEQ ID NO: 1696710 - RNA, 19 nt, Artificial Sequence
  Description of Artificial Sequence: Synthetic oligonucleotide
gucccgguugaucuugcgc

SEQ ID NO: 1696711 - RNA, 19 nt, Artificial Sequence
  Description of Artificial Sequence: Synthetic oligonucleotide
cucaucaugggagcccgag

SEQ ID NO: 1696712 - RNA, 19 nt, Artificial Sequence
  Description of Artificial Sequence: Synthetic oligonucleotide
aaguagccugacaggucgg

SEQ ID NO: 1696713 - RNA, 19 nt, Artificial Sequence
  Description of Artificial Sequence: Synthetic oligonucleotide
aggagguucccaguggaga

SEQ ID NO: 1696714 - RNA, 19 nt, Artificial Sequence
  Description of Artificial Sequence: Synthetic oligonucleotide
acgucaaacaagacagaca

SEQ ID NO: 1696715 - RNA, 19 nt, Artificial Sequence
  Description of Artificial Sequence: Synthetic oligonucleotide
cuguggucagacaggugac

SEQ ID NO: 1696716 - RNA, 19 nt, Artificial Sequence
  Description of Artificial Sequence: Synthetic oligonucleotide
gguagugacggcugaggac

SEQ ID NO: 1696717 - RNA, 19 nt, Artificial Sequence
  Description of Artificial Sequence: Synthetic oligonucleotide
agucucacugacucaucau

SEQ ID NO: 1696718 - RNA, 19 nt, Artificial Sequence
  Description of Artificial Sequence: Synthetic oligonucleotide
gcugcugucacccgugaac

SEQ ID NO: 1696719 - RNA, 19 nt, Artificial Sequence
  Description of Artificial Sequence: Synthetic oligonucleotide
cugacucaucaugggagcc

SEQ ID NO: 1696720 - RNA, 19 nt, Artificial Sequence
  Description of Artificial Sequence: Synthetic oligonucleotide
gugaugcccacgucaaaca

SEQ ID NO: 1696721 - RNA, 19 nt, Artificial Sequence
  Description of Artificial Sequence: Synthetic oligonucleotide
uccagacgagcaccagaca

SEQ ID NO: 1696722 - RNA, 19 nt, Artificial Sequence
  Description of Artificial Sequence: Synthetic oligonucleotide
cacuugguuccugugcccc

SEQ ID NO: 1696723 - RNA, 19 nt, Artificial Sequence
  Description of Artificial Sequence: Synthetic oligonucleotide
auacaggccauugggugcu

SEQ ID NO: 1696724 - RNA, 19 nt, Artificial Sequence
  Description of Artificial Sequence: Synthetic oligonucleotide
cuugguagugacggcugag

SEQ ID NO: 1696725 - RNA, 19 nt, Artificial Sequence
  Description of Artificial Sequence: Synthetic oligonucleotide
gagggccgcgugaugaugc

SEQ ID NO: 1696726 - RNA, 19 nt, Artificial Sequence
  Description of Artificial Sequence: Synthetic oligonucleotide
cugugaucgggagugugug

SEQ ID NO: 1696727 - RNA, 19 nt, Artificial Sequence
  Description of Artificial Sequence: Synthetic oligonucleotide
ugucccggccagcugcaca

SEQ ID NO: 1696728 - RNA, 19 nt, Artificial Sequence
  Description of Artificial Sequence: Synthetic oligonucleotide
caagugcagauguaguucu

SEQ ID NO: 1696729 - RNA, 19 nt, Artificial Sequence
  Description of Artificial Sequence: Synthetic oligonucleotide
ucgggaguguguguugaga

SEQ ID NO: 1696730 - RNA, 19 nt, Artificial Sequence
  Description of Artificial Sequence: Synthetic oligonucleotide
augaugcgcguggagaagu

SEQ ID NO: 1696731 - RNA, 19 nt, Artificial Sequence
  Description of Artificial Sequence: Synthetic oligonucleotide
guacgcagacacugcuugc

SEQ ID NO: 1696732 - RNA, 19 nt, Artificial Sequence
  Description of Artificial Sequence: Synthetic oligonucleotide
uggagaagucgaagagguc

SEQ ID NO: 1696733 - RNA, 19 nt, Artificial Sequence
  Description of Artificial Sequence: Synthetic oligonucleotide
caucgcuaccuccacagaa

SEQ ID NO: 1696734 - RNA, 19 nt, Artificial Sequence
  Description of Artificial Sequence: Synthetic oligonucleotide
aagugaugcccacgucaaa

SEQ ID NO: 1696735 - RNA, 19 nt, Artificial Sequence
  Description of Artificial Sequence: Synthetic oligonucleotide
agcuccauagcugcgccga

SEQ ID NO: 1696736 - RNA, 19 nt, Artificial Sequence
  Description of Artificial Sequence: Synthetic oligonucleotide
acuuccaugggcgccgcca

SEQ ID NO: 1696737 - RNA, 19 nt, Artificial Sequence
  Description of Artificial Sequence: Synthetic oligonucleotide
aucgggaguguguguugag

SEQ ID NO: 1696738 - RNA, 19 nt, Artificial Sequence
  Description of Artificial Sequence: Synthetic oligonucleotide
gcguggagaagucgaagag

SEQ ID NO: 1696739 - RNA, 19 nt, Artificial Sequence
  Description of Artificial Sequence: Synthetic oligonucleotide
ugaugcgcguggagaaguc

SEQ ID NO: 1696740 - RNA, 19 nt, Artificial Sequence
  Description of Artificial Sequence: Synthetic oligonucleotide
cccacauucugaucaggcc

SEQ ID NO: 1696741 - RNA, 19 nt, Artificial Sequence
  Description of Artificial Sequence: Synthetic oligonucleotide
uccaacacccgcgcuggca

SEQ ID NO: 1696742 - RNA, 19 nt, Artificial Sequence
  Description of Artificial Sequence: Synthetic oligonucleotide
aucuugguagugacggcug

SEQ ID NO: 1696743 - RNA, 19 nt, Artificial Sequence
  Description of Artificial Sequence: Synthetic oligonucleotide
ugucacccgugaacuucag

SEQ ID NO: 1696744 - RNA, 19 nt, Artificial Sequence
  Description of Artificial Sequence: Synthetic oligonucleotide
agccugacaggucggccug

SEQ ID NO: 1696745 - RNA, 19 nt, Artificial Sequence
  Description of Artificial Sequence: Synthetic oligonucleotide
agcaggucucccgaggaga

SEQ ID NO: 1696746 - RNA, 19 nt, Artificial Sequence
  Description of Artificial Sequence: Synthetic oligonucleotide
aacacccgcgcuggcaaca

SEQ ID NO: 1696747 - RNA, 19 nt, Artificial Sequence
  Description of Artificial Sequence: Synthetic oligonucleotide
uggggcgaggauccuggac

SEQ ID NO: 1696748 - RNA, 19 nt, Artificial Sequence
  Description of Artificial Sequence: Synthetic oligonucleotide
uggacaccgacaggcacgu

SEQ ID NO: 1696749 - RNA, 19 nt, Artificial Sequence
  Description of Artificial Sequence: Synthetic oligonucleotide
ugccaucgcuaccuccaca

SEQ ID NO: 1696750 - RNA, 19 nt, Artificial Sequence
  Description of Artificial Sequence: Synthetic oligonucleotide
cuugccuccugagacaaaa

SEQ ID NO: 1696751 - RNA, 19 nt, Artificial Sequence
  Description of Artificial Sequence: Synthetic oligonucleotide
guguguguugagaccagac

SEQ ID NO: 1696752 - RNA, 19 nt, Artificial Sequence
  Description of Artificial Sequence: Synthetic oligonucleotide
ugaagacuuuccccacauu

SEQ ID NO: 1696753 - RNA, 19 nt, Artificial Sequence
  Description of Artificial Sequence: Synthetic oligonucleotide
uugguuccugugccccuug

SEQ ID NO: 1696754 - RNA, 19 nt, Artificial Sequence
  Description of Artificial Sequence: Synthetic oligonucleotide
cuccauagcugcgccgacg

SEQ ID NO: 1696755 - RNA, 19 nt, Artificial Sequence
  Description of Artificial Sequence: Synthetic oligonucleotide
gaucgggaguguguguuga

SEQ ID NO: 1696756 - RNA, 19 nt, Artificial Sequence
  Description of Artificial Sequence: Synthetic oligonucleotide
cuagcauguucuucgccaa

SEQ ID NO: 1696757 - RNA, 19 nt, Artificial Sequence
  Description of Artificial Sequence: Synthetic oligonucleotide
acuugguuccugugccccu

SEQ ID NO: 1696758 - RNA, 19 nt, Artificial Sequence
  Description of Artificial Sequence: Synthetic oligonucleotide
cuuuccccacauucugauc

SEQ ID NO: 1696759 - RNA, 19 nt, Artificial Sequence
  Description of Artificial Sequence: Synthetic oligonucleotide
cugaucaggccggaagcug

SEQ ID NO: 1696760 - RNA, 19 nt, Artificial Sequence
  Description of Artificial Sequence: Synthetic oligonucleotide
ugcgccgacgaguccguac

SEQ ID NO: 1696761 - RNA, 19 nt, Artificial Sequence
  Description of Artificial Sequence: Synthetic oligonucleotide
agucgaagaggucccgguu

SEQ ID NO: 1696762 - RNA, 19 nt, Artificial Sequence
  Description of Artificial Sequence: Synthetic oligonucleotide
ugcgcguggagaagucgaa

SEQ ID NO: 1696763 - RNA, 19 nt, Artificial Sequence
  Description of Artificial Sequence: Synthetic oligonucleotide
gacaguccuugccuccuga

SEQ ID NO: 1696764 - RNA, 19 nt, Artificial Sequence
  Description of Artificial Sequence: Synthetic oligonucleotide
acgucacuugguuccugug

SEQ ID NO: 1696765 - RNA, 19 nt, Artificial Sequence
  Description of Artificial Sequence: Synthetic oligonucleotide
agggccgcgugaugaugcg

SEQ ID NO: 1696766 - RNA, 19 nt, Artificial Sequence
  Description of Artificial Sequence: Synthetic oligonucleotide
cucucucugucccggccag

SEQ ID NO: 1696767 - RNA, 19 nt, Artificial Sequence
  Description of Artificial Sequence: Synthetic oligonucleotide
agcagguacucgccauuga

SEQ ID NO: 1696768 - RNA, 19 nt, Artificial Sequence
  Description of Artificial Sequence: Synthetic oligonucleotide
ugcuguggucagacaggug

SEQ ID NO: 1696769 - RNA, 19 nt, Artificial Sequence
  Description of Artificial Sequence: Synthetic oligonucleotide
auccguggacaccgacagg

SEQ ID NO: 1696770 - RNA, 19 nt, Artificial Sequence
  Description of Artificial Sequence: Synthetic oligonucleotide
cuuagagggccgcgugaug

SEQ ID NO: 1696771 - RNA, 19 nt, Artificial Sequence
  Description of Artificial Sequence: Synthetic oligonucleotide
gccccuugaagacuuuccc

SEQ ID NO: 1696772 - RNA, 19 nt, Artificial Sequence
  Description of Artificial Sequence: Synthetic oligonucleotide
caccacgcagcuccauagc

SEQ ID NO: 1696773 - RNA, 19 nt, Artificial Sequence
  Description of Artificial Sequence: Synthetic oligonucleotide
ccccuugaagacuuucccc

SEQ ID NO: 1696774 - RNA, 19 nt, Artificial Sequence
  Description of Artificial Sequence: Synthetic oligonucleotide
cugucacccgugaacuuca

SEQ ID NO: 1696775 - RNA, 19 nt, Artificial Sequence
  Description of Artificial Sequence: Synthetic oligonucleotide
gccgccagcagguacucgc

SEQ ID NO: 1696776 - RNA, 19 nt, Artificial Sequence
  Description of Artificial Sequence: Synthetic oligonucleotide
acgaguccguacacacggc

SEQ ID NO: 1696777 - RNA, 19 nt, Artificial Sequence
  Description of Artificial Sequence: Synthetic oligonucleotide
uuggcgcccgagugaagcu

SEQ ID NO: 1696778 - RNA, 19 nt, Artificial Sequence
  Description of Artificial Sequence: Synthetic oligonucleotide
cacccgugaacuucaggca

SEQ ID NO: 1696779 - RNA, 19 nt, Artificial Sequence
  Description of Artificial Sequence: Synthetic oligonucleotide
gggcgaggauccuggacgg

SEQ ID NO: 1696780 - RNA, 19 nt, Artificial Sequence
  Description of Artificial Sequence: Synthetic oligonucleotide
guagccugacaggucggcc

SEQ ID NO: 1696781 - RNA, 19 nt, Artificial Sequence
  Description of Artificial Sequence: Synthetic oligonucleotide
ggaagauagugccaucgcu

SEQ ID NO: 1696782 - RNA, 19 nt, Artificial Sequence
  Description of Artificial Sequence: Synthetic oligonucleotide
ggccgcgugaugaugcgcg

SEQ ID NO: 1696783 - RNA, 19 nt, Artificial Sequence
  Description of Artificial Sequence: Synthetic oligonucleotide
augacacaucuugguagug

SEQ ID NO: 1696784 - RNA, 19 nt, Artificial Sequence
  Description of Artificial Sequence: Synthetic oligonucleotide
ugaccggaccaggacacau

SEQ ID NO: 1696785 - RNA, 19 nt, Artificial Sequence
  Description of Artificial Sequence: Synthetic oligonucleotide
agugacggcugaggacaac

SEQ ID NO: 1696786 - RNA, 19 nt, Artificial Sequence
  Description of Artificial Sequence: Synthetic oligonucleotide
ccgagaggagaacacugcc

SEQ ID NO: 1696787 - RNA, 19 nt, Artificial Sequence
  Description of Artificial Sequence: Synthetic oligonucleotide
ggacgggucugccugcagc

SEQ ID NO: 1696788 - RNA, 19 nt, Artificial Sequence
  Description of Artificial Sequence: Synthetic oligonucleotide
gucugugaucgggagugug

SEQ ID NO: 1696789 - RNA, 19 nt, Artificial Sequence
  Description of Artificial Sequence: Synthetic oligonucleotide
gcgguaggugagcagguug

SEQ ID NO: 1696790 - RNA, 19 nt, Artificial Sequence
  Description of Artificial Sequence: Synthetic oligonucleotide
uggacgggucugccugcag

SEQ ID NO: 1696791 - RNA, 19 nt, Artificial Sequence
  Description of Artificial Sequence: Synthetic oligonucleotide
auccagcgaagcgguggcc

SEQ ID NO: 1696792 - RNA, 19 nt, Artificial Sequence
  Description of Artificial Sequence: Synthetic oligonucleotide
cccgagaggagaacacugc

SEQ ID NO: 1696793 - RNA, 19 nt, Artificial Sequence
  Description of Artificial Sequence: Synthetic oligonucleotide
gucccacagucucacugac

SEQ ID NO: 1696794 - RNA, 19 nt, Artificial Sequence
  Description of Artificial Sequence: Synthetic oligonucleotide
cagcuccauagcugcgccg

SEQ ID NO: 1696795 - RNA, 19 nt, Artificial Sequence
  Description of Artificial Sequence: Synthetic oligonucleotide
cuaccuccacagaacaugu

SEQ ID NO: 1696796 - RNA, 19 nt, Artificial Sequence
  Description of Artificial Sequence: Synthetic oligonucleotide
ccgacgaguccguacacac

SEQ ID NO: 1696797 - RNA, 19 nt, Artificial Sequence
  Description of Artificial Sequence: Synthetic oligonucleotide
ccgagugaagcucccacac

SEQ ID NO: 1696798 - RNA, 19 nt, Artificial Sequence
  Description of Artificial Sequence: Synthetic oligonucleotide
gaccggaccaggacacaug

SEQ ID NO: 1696799 - RNA, 19 nt, Artificial Sequence
  Description of Artificial Sequence: Synthetic oligonucleotide
agacaugccuuggggcgag

SEQ ID NO: 1696800 - RNA, 19 nt, Artificial Sequence
  Description of Artificial Sequence: Synthetic oligonucleotide
uagugacggcugaggacaa

SEQ ID NO: 1696801 - RNA, 19 nt, Artificial Sequence
  Description of Artificial Sequence: Synthetic oligonucleotide
cccaguaggugcuuguuga

SEQ ID NO: 1696802 - RNA, 19 nt, Artificial Sequence
  Description of Artificial Sequence: Synthetic oligonucleotide
guucagcaugcugggcggg

SEQ ID NO: 1696803 - RNA, 19 nt, Artificial Sequence
  Description of Artificial Sequence: Synthetic oligonucleotide
ccuuugagggugacuguac

SEQ ID NO: 1696804 - RNA, 19 nt, Artificial Sequence
  Description of Artificial Sequence: Synthetic oligonucleotide
ggcaugacacaucuuggua

SEQ ID NO: 1696805 - RNA, 19 nt, Artificial Sequence
  Description of Artificial Sequence: Synthetic oligonucleotide
augcgcguggagaagucga

SEQ ID NO: 1696806 - RNA, 19 nt, Artificial Sequence
  Description of Artificial Sequence: Synthetic oligonucleotide
ggugaccggaccaggacac

SEQ ID NO: 1696807 - RNA, 19 nt, Artificial Sequence
  Description of Artificial Sequence: Synthetic oligonucleotide
gguagaugcucucugcaau

SEQ ID NO: 1696808 - RNA, 19 nt, Artificial Sequence
  Description of Artificial Sequence: Synthetic oligonucleotide
cucccgaggagauggccca

SEQ ID NO: 1696809 - RNA, 19 nt, Artificial Sequence
  Description of Artificial Sequence: Synthetic oligonucleotide
cagcagguacucgccauug

SEQ ID NO: 1696810 - RNA, 19 nt, Artificial Sequence
  Description of Artificial Sequence: Synthetic oligonucleotide
cagaagugaugcccacguc

SEQ ID NO: 1696811 - RNA, 19 nt, Artificial Sequence
  Description of Artificial Sequence: Synthetic oligonucleotide
cuccgugcucagcacccag

SEQ ID NO: 1696812 - RNA, 19 nt, Artificial Sequence
  Description of Artificial Sequence: Synthetic oligonucleotide
agcccgagaggagaacacu

SEQ ID NO: 1696813 - RNA, 19 nt, Artificial Sequence
  Description of Artificial Sequence: Synthetic oligonucleotide
cgucacuugguuccugugc

SEQ ID NO: 1696814 - RNA, 19 nt, Artificial Sequence
  Description of Artificial Sequence: Synthetic oligonucleotide
accgacaggcacgucacuu

SEQ ID NO: 1696815 - RNA, 19 nt, Artificial Sequence
  Description of Artificial Sequence: Synthetic oligonucleotide
cacuuagagggccgcguga

SEQ ID NO: 1696816 - RNA, 19 nt, Artificial Sequence
  Description of Artificial Sequence: Synthetic oligonucleotide
agagggccgcgugaugaug

SEQ ID NO: 1696817 - RNA, 19 nt, Artificial Sequence
  Description of Artificial Sequence: Synthetic oligonucleotide
agguuggcgcccgagugaa

SEQ ID NO: 1696818 - RNA, 19 nt, Artificial Sequence
  Description of Artificial Sequence: Synthetic oligonucleotide
cagacgagcaccagacagu

SEQ ID NO: 1696819 - RNA, 19 nt, Artificial Sequence
  Description of Artificial Sequence: Synthetic oligonucleotide
cauagcugcgccgacgagu

SEQ ID NO: 1696820 - RNA, 19 nt, Artificial Sequence
  Description of Artificial Sequence: Synthetic oligonucleotide
gcugucacccgugaacuuc

SEQ ID NO: 1696821 - RNA, 19 nt, Artificial Sequence
  Description of Artificial Sequence: Synthetic oligonucleotide
uggagaccucccacaggua

SEQ ID NO: 1696822 - RNA, 19 nt, Artificial Sequence
  Description of Artificial Sequence: Synthetic oligonucleotide
ucugguugccuagcauguu

SEQ ID NO: 1696823 - RNA, 19 nt, Artificial Sequence
  Description of Artificial Sequence: Synthetic oligonucleotide
cagguuggcgcccgaguga

SEQ ID NO: 1696824 - RNA, 19 nt, Artificial Sequence
  Description of Artificial Sequence: Synthetic oligonucleotide
cacugccauccguggacac

SEQ ID NO: 1696825 - RNA, 19 nt, Artificial Sequence
  Description of Artificial Sequence: Synthetic oligonucleotide
ggucccgguugaucuugcg

SEQ ID NO: 1696826 - RNA, 19 nt, Artificial Sequence
  Description of Artificial Sequence: Synthetic oligonucleotide
uccguacacacggccacuu

SEQ ID NO: 1696827 - RNA, 19 nt, Artificial Sequence
  Description of Artificial Sequence: Synthetic oligonucleotide
ugcugucacccgugaacuu

SEQ ID NO: 1696828 - RNA, 19 nt, Artificial Sequence
  Description of Artificial Sequence: Synthetic oligonucleotide
ccacgcagcuccauagcug

SEQ ID NO: 1696829 - RNA, 19 nt, Artificial Sequence
  Description of Artificial Sequence: Synthetic oligonucleotide
ccgacaggcacgucacuug

SEQ ID NO: 1696830 - RNA, 19 nt, Artificial Sequence
  Description of Artificial Sequence: Synthetic oligonucleotide
cgacaggcacgucacuugg

SEQ ID NO: 1696831 - RNA, 19 nt, Artificial Sequence
  Description of Artificial Sequence: Synthetic oligonucleotide
acauucugaucaggccgga

SEQ ID NO: 1696832 - RNA, 19 nt, Artificial Sequence
  Description of Artificial Sequence: Synthetic oligonucleotide
caacacccgcgcuggcaac

SEQ ID NO: 1696833 - RNA, 19 nt, Artificial Sequence
  Description of Artificial Sequence: Synthetic oligonucleotide
cuggccgccgcgguaggug

SEQ ID NO: 1696834 - RNA, 19 nt, Artificial Sequence
  Description of Artificial Sequence: Synthetic oligonucleotide
acucgccauugagcagcgc

SEQ ID NO: 1696835 - RNA, 19 nt, Artificial Sequence
  Description of Artificial Sequence: Synthetic oligonucleotide
cccgugaacuucaggcaug

SEQ ID NO: 1696836 - RNA, 19 nt, Artificial Sequence
  Description of Artificial Sequence: Synthetic oligonucleotide
ugccauccguggacaccga

SEQ ID NO: 1696837 - RNA, 19 nt, Artificial Sequence
  Description of Artificial Sequence: Synthetic oligonucleotide
cgccaaguagccugacagg

SEQ ID NO: 1696838 - RNA, 19 nt, Artificial Sequence
  Description of Artificial Sequence: Synthetic oligonucleotide
ugugccccuugaagacuuu

SEQ ID NO: 1696839 - RNA, 19 nt, Artificial Sequence
  Description of Artificial Sequence: Synthetic oligonucleotide
gucagacaggugaccggac

SEQ ID NO: 1696840 - RNA, 19 nt, Artificial Sequence
  Description of Artificial Sequence: Synthetic oligonucleotide
cagcgaagcgguggccacc

SEQ ID NO: 1696841 - RNA, 19 nt, Artificial Sequence
  Description of Artificial Sequence: Synthetic oligonucleotide
gcccgagugaagcucccac

SEQ ID NO: 1696842 - RNA, 19 nt, Artificial Sequence
  Description of Artificial Sequence: Synthetic oligonucleotide
aggccuagcugcaggcgca

SEQ ID NO: 1696843 - RNA, 19 nt, Artificial Sequence
  Description of Artificial Sequence: Synthetic oligonucleotide
ccaguggagaccucccaca

SEQ ID NO: 1696844 - RNA, 19 nt, Artificial Sequence
  Description of Artificial Sequence: Synthetic oligonucleotide
uggcgcccgagugaagcuc

SEQ ID NO: 1696845 - RNA, 19 nt, Artificial Sequence
  Description of Artificial Sequence: Synthetic oligonucleotide
cagacaugccuuggggcga

SEQ ID NO: 1696846 - RNA, 19 nt, Artificial Sequence
  Description of Artificial Sequence: Synthetic oligonucleotide
gcaggccuagcugcaggcg

SEQ ID NO: 1696847 - RNA, 19 nt, Artificial Sequence
  Description of Artificial Sequence: Synthetic oligonucleotide
cccgguugaucuugcgcag

SEQ ID NO: 1696848 - RNA, 19 nt, Artificial Sequence
  Description of Artificial Sequence: Synthetic oligonucleotide
gacaugccuuggggcgagg

SEQ ID NO: 1696849 - RNA, 19 nt, Artificial Sequence
  Description of Artificial Sequence: Synthetic oligonucleotide
cacaccacgcagcuccaua

SEQ ID NO: 1696850 - RNA, 19 nt, Artificial Sequence
  Description of Artificial Sequence: Synthetic oligonucleotide
cgaagcgguggccacccgg

SEQ ID NO: 1696851 - RNA, 19 nt, Artificial Sequence
  Description of Artificial Sequence: Synthetic oligonucleotide
cugcugucacccgugaacu

SEQ ID NO: 1696852 - RNA, 19 nt, Artificial Sequence
  Description of Artificial Sequence: Synthetic oligonucleotide
ugcugggcggggccagcau

SEQ ID NO: 1696853 - RNA, 19 nt, Artificial Sequence
  Description of Artificial Sequence: Synthetic oligonucleotide
cgacgaguccguacacacg

SEQ ID NO: 1696854 - RNA, 19 nt, Artificial Sequence
  Description of Artificial Sequence: Synthetic oligonucleotide
cgagugaagcucccacacc

SEQ ID NO: 1696855 - RNA, 19 nt, Artificial Sequence
  Description of Artificial Sequence: Synthetic oligonucleotide
cacgucacuugguuccugu

SEQ ID NO: 1696856 - RNA, 19 nt, Artificial Sequence
  Description of Artificial Sequence: Synthetic oligonucleotide
ccauccguggacaccgaca

SEQ ID NO: 1696857 - RNA, 19 nt, Artificial Sequence
  Description of Artificial Sequence: Synthetic oligonucleotide
acgcagcuccauagcugcg

SEQ ID NO: 1696858 - RNA, 19 nt, Artificial Sequence
  Description of Artificial Sequence: Synthetic oligonucleotide
cgguugaucuugcgcaggc

SEQ ID NO: 1696859 - RNA, 19 nt, Artificial Sequence
  Description of Artificial Sequence: Synthetic oligonucleotide
cgugaugaugcgcguggag

SEQ ID NO: 1696860 - RNA, 19 nt, Artificial Sequence
  Description of Artificial Sequence: Synthetic oligonucleotide
cgagaggagaacacugcca

SEQ ID NO: 1696861 - RNA, 19 nt, Artificial Sequence
  Description of Artificial Sequence: Synthetic oligonucleotide
gugaucgggaguguguguu

SEQ ID NO: 1696862 - RNA, 19 nt, Artificial Sequence
  Description of Artificial Sequence: Synthetic oligonucleotide
ggagaacacugccauccgu

SEQ ID NO: 1696863 - RNA, 19 nt, Artificial Sequence
  Description of Artificial Sequence: Synthetic oligonucleotide
uggcaacaucugguugccu

SEQ ID NO: 1696864 - RNA, 19 nt, Artificial Sequence
  Description of Artificial Sequence: Synthetic oligonucleotide
gcauguucuucgccaagua

SEQ ID NO: 1696865 - RNA, 19 nt, Artificial Sequence
  Description of Artificial Sequence: Synthetic oligonucleotide
gugacuguacgcagacacu

SEQ ID NO: 1696866 - RNA, 19 nt, Artificial Sequence
  Description of Artificial Sequence: Synthetic oligonucleotide
gaccucccacagguagaug

SEQ ID NO: 1696867 - RNA, 19 nt, Artificial Sequence
  Description of Artificial Sequence: Synthetic oligonucleotide
gccauugggugcugugguc

SEQ ID NO: 1696868 - RNA, 19 nt, Artificial Sequence
  Description of Artificial Sequence: Synthetic oligonucleotide
gugccccuugaagacuuuc

SEQ ID NO: 1696869 - RNA, 19 nt, Artificial Sequence
  Description of Artificial Sequence: Synthetic oligonucleotide
cuucgccaaguagccugac

SEQ ID NO: 1696870 - RNA, 19 nt, Artificial Sequence
  Description of Artificial Sequence: Synthetic oligonucleotide
ccauugggugcugugguca

SEQ ID NO: 1696871 - RNA, 19 nt, Artificial Sequence
  Description of Artificial Sequence: Synthetic oligonucleotide
cguggacaccgacaggcac

SEQ ID NO: 1696872 - RNA, 19 nt, Artificial Sequence
  Description of Artificial Sequence: Synthetic oligonucleotide
ccgaggagauggcccacag

SEQ ID NO: 1696873 - RNA, 19 nt, Artificial Sequence
  Description of Artificial Sequence: Synthetic oligonucleotide
cccacagguagaugcucuc

SEQ ID NO: 1696874 - RNA, 19 nt, Artificial Sequence
  Description of Artificial Sequence: Synthetic oligonucleotide
ccgcgcuggcaacaucugg

SEQ ID NO: 1696875 - RNA, 19 nt, Artificial Sequence
  Description of Artificial Sequence: Synthetic oligonucleotide
ccagcgaagcgguggccac

SEQ ID NO: 1696876 - RNA, 19 nt, Artificial Sequence
  Description of Artificial Sequence: Synthetic oligonucleotide
agccgccagcagguacucg

SEQ ID NO: 1696877 - RNA, 19 nt, Artificial Sequence
  Description of Artificial Sequence: Synthetic oligonucleotide
ggaccaggacacaugauuu

SEQ ID NO: 1696878 - RNA, 19 nt, Artificial Sequence
  Description of Artificial Sequence: Synthetic oligonucleotide
ccuggacgggucugccugc

SEQ ID NO: 1696879 - RNA, 19 nt, Artificial Sequence
  Description of Artificial Sequence: Synthetic oligonucleotide
cacuuccaugggcgccgcc

SEQ ID NO: 1696880 - RNA, 19 nt, Artificial Sequence
  Description of Artificial Sequence: Synthetic oligonucleotide
ucccgaggagauggcccac

SEQ ID NO: 1696881 - RNA, 19 nt, Artificial Sequence
  Description of Artificial Sequence: Synthetic oligonucleotide
gccuugcugagccgccagc

SEQ ID NO: 1696882 - RNA, 19 nt, Artificial Sequence
  Description of Artificial Sequence: Synthetic oligonucleotide
gcgcguggagaagucgaag

SEQ ID NO: 1696883 - RNA, 19 nt, Artificial Sequence
  Description of Artificial Sequence: Synthetic oligonucleotide
ccgccagcagguacucgcc

SEQ ID NO: 1696884 - RNA, 19 nt, Artificial Sequence
  Description of Artificial Sequence: Synthetic oligonucleotide
ccuccacagaacauguggu

SEQ ID NO: 1696885 - RNA, 19 nt, Artificial Sequence
  Description of Artificial Sequence: Synthetic oligonucleotide
gggccugaauucaggguuc

SEQ ID NO: 1696886 - RNA, 19 nt, Artificial Sequence
  Description of Artificial Sequence: Synthetic oligonucleotide
cauucugaucaggccggaa

SEQ ID NO: 1696887 - RNA, 19 nt, Artificial Sequence
  Description of Artificial Sequence: Synthetic oligonucleotide
gccauccguggacaccgac

SEQ ID NO: 1696888 - RNA, 19 nt, Artificial Sequence
  Description of Artificial Sequence: Synthetic oligonucleotide
gacaggcacgucacuuggu

SEQ ID NO: 1696889 - RNA, 19 nt, Artificial Sequence
  Description of Artificial Sequence: Synthetic oligonucleotide
cccgagugaagcucccaca

SEQ ID NO: 1696890 - RNA, 19 nt, Artificial Sequence
  Description of Artificial Sequence: Synthetic oligonucleotide
ccaacacccgcgcuggcaa

SEQ ID NO: 1696891 - RNA, 19 nt, Artificial Sequence
  Description of Artificial Sequence: Synthetic oligonucleotide
cuguacgcagacacugcuu

SEQ ID NO: 1696892 - RNA, 19 nt, Artificial Sequence
  Description of Artificial Sequence: Synthetic oligonucleotide
gccuuugagggugacugua

SEQ ID NO: 1696893 - RNA, 19 nt, Artificial Sequence
  Description of Artificial Sequence: Synthetic oligonucleotide
guucuucgccaaguagccu

SEQ ID NO: 1696894 - RNA, 19 nt, Artificial Sequence
  Description of Artificial Sequence: Synthetic oligonucleotide
cugagacaaaauggcugcu

SEQ ID NO: 1696895 - RNA, 19 nt, Artificial Sequence
  Description of Artificial Sequence: Synthetic oligonucleotide
caugccuuggggcgaggau

SEQ ID NO: 1696896 - RNA, 19 nt, Artificial Sequence
  Description of Artificial Sequence: Synthetic oligonucleotide
gcucccacaccacgcagcu

SEQ ID NO: 1696897 - RNA, 19 nt, Artificial Sequence
  Description of Artificial Sequence: Synthetic oligonucleotide
ggacaaccaggagguuccc

SEQ ID NO: 1696898 - RNA, 19 nt, Artificial Sequence
  Description of Artificial Sequence: Synthetic oligonucleotide
acacccgcgcuggcaacau

SEQ ID NO: 1696899 - RNA, 19 nt, Artificial Sequence
  Description of Artificial Sequence: Synthetic oligonucleotide
ccggaagcugugcucucuc

SEQ ID NO: 1696900 - RNA, 19 nt, Artificial Sequence
  Description of Artificial Sequence: Synthetic oligonucleotide
gcuccauagcugcgccgac

SEQ ID NO: 1696901 - RNA, 19 nt, Artificial Sequence
  Description of Artificial Sequence: Synthetic oligonucleotide
gggcggggccagcaugaug

SEQ ID NO: 1696902 - RNA, 19 nt, Artificial Sequence
  Description of Artificial Sequence: Synthetic oligonucleotide
gugaccggaccaggacaca

SEQ ID NO: 1696903 - RNA, 19 nt, Artificial Sequence
  Description of Artificial Sequence: Synthetic oligonucleotide
cuggacgggucugccugca

SEQ ID NO: 1696904 - RNA, 19 nt, Artificial Sequence
  Description of Artificial Sequence: Synthetic oligonucleotide
gccgacgaguccguacaca

SEQ ID NO: 1696905 - RNA, 19 nt, Artificial Sequence
  Description of Artificial Sequence: Synthetic oligonucleotide
ccacagucucacugacuca

SEQ ID NO: 1696906 - RNA, 19 nt, Artificial Sequence
  Description of Artificial Sequence: Synthetic oligonucleotide
ccggccagcugcacagguc

SEQ ID NO: 1696907 - RNA, 19 nt, Artificial Sequence
  Description of Artificial Sequence: Synthetic oligonucleotide
cccgcgcuggcaacaucug

SEQ ID NO: 1696908 - RNA, 19 nt, Artificial Sequence
  Description of Artificial Sequence: Synthetic oligonucleotide
ccguacacacggccacuuc

SEQ ID NO: 1696909 - RNA, 19 nt, Artificial Sequence
  Description of Artificial Sequence: Synthetic oligonucleotide
ccgugaacuucaggcauga

SEQ ID NO: 1696910 - RNA, 19 nt, Artificial Sequence
  Description of Artificial Sequence: Synthetic oligonucleotide
gcgaagcgguggccacccg

SEQ ID NO: 1696911 - RNA, 19 nt, Artificial Sequence
  Description of Artificial Sequence: Synthetic oligonucleotide
gcgaggauccuggacgggu

SEQ ID NO: 1696912 - RNA, 19 nt, Artificial Sequence
  Description of Artificial Sequence: Synthetic oligonucleotide
gcacccaguaggugcuugu

SEQ ID NO: 1696913 - RNA, 19 nt, Artificial Sequence
  Description of Artificial Sequence: Synthetic oligonucleotide
gcacgucacuugguuccug

SEQ ID NO: 1696914 - RNA, 19 nt, Artificial Sequence
  Description of Artificial Sequence: Synthetic oligonucleotide
gggccgcgugaugaugcgc

SEQ ID NO: 1696915 - RNA, 19 nt, Artificial Sequence
  Description of Artificial Sequence: Synthetic oligonucleotide
gguuggcgcccgagugaag

SEQ ID NO: 1696916 - RNA, 19 nt, Artificial Sequence
  Description of Artificial Sequence: Synthetic oligonucleotide
gggagcccgagaggagaac

SEQ ID NO: 1696917 - RNA, 19 nt, Artificial Sequence
  Description of Artificial Sequence: Synthetic oligonucleotide
guccguacacacggccacu

SEQ ID NO: 1696918 - RNA, 19 nt, Artificial Sequence
  Description of Artificial Sequence: Synthetic oligonucleotide
cuugguuccugugccccuu

SEQ ID NO: 1696919 - RNA, 19 nt, Artificial Sequence
  Description of Artificial Sequence: Synthetic oligonucleotide
cgcgcuggcaacaucuggu

SEQ ID NO: 1696920 - RNA, 19 nt, Artificial Sequence
  Description of Artificial Sequence: Synthetic oligonucleotide
ccaucgcuaccuccacaga

SEQ ID NO: 1696921 - RNA, 19 nt, Artificial Sequence
  Description of Artificial Sequence: Synthetic oligonucleotide
gcgugaugaugcgcgugga

SEQ ID NO: 1696922 - RNA, 19 nt, Artificial Sequence
  Description of Artificial Sequence: Synthetic oligonucleotide
cagguccaccuggaagaua

SEQ ID NO: 1696923 - RNA, 19 nt, Artificial Sequence
  Description of Artificial Sequence: Synthetic oligonucleotide
gcaggucucccgaggagau

SEQ ID NO: 1696924 - RNA, 19 nt, Artificial Sequence
  Description of Artificial Sequence: Synthetic oligonucleotide
gcgcuggcaacaucugguu

SEQ ID NO: 1696925 - RNA, 19 nt, Artificial Sequence
  Description of Artificial Sequence: Synthetic oligonucleotide
caccgacaggcacgucacu

SEQ ID NO: 1696926 - RNA, 19 nt, Artificial Sequence
  Description of Artificial Sequence: Synthetic oligonucleotide
gcgcccgagugaagcuccc

SEQ ID NO: 1696927 - RNA, 19 nt, Artificial Sequence
  Description of Artificial Sequence: Synthetic oligonucleotide
cgccgacgaguccguacac

SEQ ID NO: 1696928 - RNA, 19 nt, Artificial Sequence
  Description of Artificial Sequence: Synthetic oligonucleotide
cccgaggagauggcccaca

SEQ ID NO: 1696929 - RNA, 19 nt, Artificial Sequence
  Description of Artificial Sequence: Synthetic oligonucleotide
gccgcgugaugaugcgcgu

SEQ ID NO: 1696930 - RNA, 19 nt, Artificial Sequence
  Description of Artificial Sequence: Synthetic oligonucleotide
ccugugccccuugaagacu

SEQ ID NO: 1696931 - RNA, 19 nt, Artificial Sequence
  Description of Artificial Sequence: Synthetic oligonucleotide
cgccgcgguaggugagcag

SEQ ID NO: 1696932 - RNA, 19 nt, Artificial Sequence
  Description of Artificial Sequence: Synthetic oligonucleotide
cauuggucacugggccuuu

SEQ ID NO: 1696933 - RNA, 19 nt, Artificial Sequence
  Description of Artificial Sequence: Synthetic oligonucleotide
ccuugccuccugagacaaa

SEQ ID NO: 1696934 - RNA, 19 nt, Artificial Sequence
  Description of Artificial Sequence: Synthetic oligonucleotide
ggacaccgacaggcacguc

SEQ ID NO: 1696935 - RNA, 19 nt, Artificial Sequence
  Description of Artificial Sequence: Synthetic oligonucleotide
ccggaccaggacacaugau

SEQ ID NO: 1696936 - RNA, 19 nt, Artificial Sequence
  Description of Artificial Sequence: Synthetic oligonucleotide
cugcgccgacgaguccgua

SEQ ID NO: 1696937 - RNA, 19 nt, Artificial Sequence
  Description of Artificial Sequence: Synthetic oligonucleotide
ggugcucggccagguccau

SEQ ID NO: 1696938 - RNA, 19 nt, Artificial Sequence
  Description of Artificial Sequence: Synthetic oligonucleotide
cagcacccaguaggugcuu

SEQ ID NO: 1696939 - RNA, 19 nt, Artificial Sequence
  Description of Artificial Sequence: Synthetic oligonucleotide
cgcccgagugaagcuccca

SEQ ID NO: 1696940 - RNA, 19 nt, Artificial Sequence
  Description of Artificial Sequence: Synthetic oligonucleotide
cgcgguaggugagcagguu

SEQ ID NO: 1696941 - RNA, 19 nt, Artificial Sequence
  Description of Artificial Sequence: Synthetic oligonucleotide
auaaauucgaacuuggugg

SEQ ID NO: 1696942 - RNA, 19 nt, Artificial Sequence
  Description of Artificial Sequence: Synthetic oligonucleotide
agugugaucauguaauggc

SEQ ID NO: 1696943 - RNA, 19 nt, Artificial Sequence
  Description of Artificial Sequence: Synthetic oligonucleotide
gauaaauucgaacuuggug

SEQ ID NO: 1696944 - RNA, 19 nt, Artificial Sequence
  Description of Artificial Sequence: Synthetic oligonucleotide
uaagcaaccaggcauaacu

SEQ ID NO: 1696945 - RNA, 19 nt, Artificial Sequence
  Description of Artificial Sequence: Synthetic oligonucleotide
ugagguuucaacacugagg

SEQ ID NO: 1696946 - RNA, 19 nt, Artificial Sequence
  Description of Artificial Sequence: Synthetic oligonucleotide
uagggauugucuuuuaggg

SEQ ID NO: 1696947 - RNA, 19 nt, Artificial Sequence
  Description of Artificial Sequence: Synthetic oligonucleotide
ugagcaguagcccacauac

SEQ ID NO: 1696948 - RNA, 19 nt, Artificial Sequence
  Description of Artificial Sequence: Synthetic oligonucleotide
ucauguugaagguaugagg

SEQ ID NO: 1696949 - RNA, 19 nt, Artificial Sequence
  Description of Artificial Sequence: Synthetic oligonucleotide
aaaaccuuucggucagugc

SEQ ID NO: 1696950 - RNA, 19 nt, Artificial Sequence
  Description of Artificial Sequence: Synthetic oligonucleotide
uaucuacucgcccaggacg

SEQ ID NO: 1696951 - RNA, 19 nt, Artificial Sequence
  Description of Artificial Sequence: Synthetic oligonucleotide
caugaaguagccuugcacc

SEQ ID NO: 1696952 - RNA, 19 nt, Artificial Sequence
  Description of Artificial Sequence: Synthetic oligonucleotide
aagguaaccacgucuguag

SEQ ID NO: 1696953 - RNA, 19 nt, Artificial Sequence
  Description of Artificial Sequence: Synthetic oligonucleotide
ucaccuuagagauucaaca

SEQ ID NO: 1696954 - RNA, 19 nt, Artificial Sequence
  Description of Artificial Sequence: Synthetic oligonucleotide
aagguaugagguuucaaca

SEQ ID NO: 1696955 - RNA, 19 nt, Artificial Sequence
  Description of Artificial Sequence: Synthetic oligonucleotide
cugucaaugugauuggugg

SEQ ID NO: 1696956 - RNA, 19 nt, Artificial Sequence
  Description of Artificial Sequence: Synthetic oligonucleotide
uuucguuguacccggaucc

SEQ ID NO: 1696957 - RNA, 19 nt, Artificial Sequence
  Description of Artificial Sequence: Synthetic oligonucleotide
ucaugaacacaauacgugc

SEQ ID NO: 1696958 - RNA, 19 nt, Artificial Sequence
  Description of Artificial Sequence: Synthetic oligonucleotide
aagaaaaccuuucggucag

SEQ ID NO: 1696959 - RNA, 19 nt, Artificial Sequence
  Description of Artificial Sequence: Synthetic oligonucleotide
guaaagaugacagauuccc

SEQ ID NO: 1696960 - RNA, 19 nt, Artificial Sequence
  Description of Artificial Sequence: Synthetic oligonucleotide
augaucaccuuagagauuc

SEQ ID NO: 1696961 - RNA, 19 nt, Artificial Sequence
  Description of Artificial Sequence: Synthetic oligonucleotide
uuuuagggccagaacaaag

SEQ ID NO: 1696962 - RNA, 19 nt, Artificial Sequence
  Description of Artificial Sequence: Synthetic oligonucleotide
acaccuaccaguccaaauc

SEQ ID NO: 1696963 - RNA, 19 nt, Artificial Sequence
  Description of Artificial Sequence: Synthetic oligonucleotide
agguaugagguuucaacac

SEQ ID NO: 1696964 - RNA, 19 nt, Artificial Sequence
  Description of Artificial Sequence: Synthetic oligonucleotide
ucucgacugagaaaagcgg

SEQ ID NO: 1696965 - RNA, 19 nt, Artificial Sequence
  Description of Artificial Sequence: Synthetic oligonucleotide
uuuggguuaucaaugaauu

SEQ ID NO: 1696966 - RNA, 19 nt, Artificial Sequence
  Description of Artificial Sequence: Synthetic oligonucleotide
ucaacauugucaacagccc

SEQ ID NO: 1696967 - RNA, 19 nt, Artificial Sequence
  Description of Artificial Sequence: Synthetic oligonucleotide
caggauauugaagaaaacc

SEQ ID NO: 1696968 - RNA, 19 nt, Artificial Sequence
  Description of Artificial Sequence: Synthetic oligonucleotide
uguaaagaugacagauucc

SEQ ID NO: 1696969 - RNA, 19 nt, Artificial Sequence
  Description of Artificial Sequence: Synthetic oligonucleotide
uacaccauccaaagcauug

SEQ ID NO: 1696970 - RNA, 19 nt, Artificial Sequence
  Description of Artificial Sequence: Synthetic oligonucleotide
aggacuacagaauccagug

SEQ ID NO: 1696971 - RNA, 19 nt, Artificial Sequence
  Description of Artificial Sequence: Synthetic oligonucleotide
ucgagugugaucauguaau

SEQ ID NO: 1696972 - RNA, 19 nt, Artificial Sequence
  Description of Artificial Sequence: Synthetic oligonucleotide
uuagagauucaacauuguc

SEQ ID NO: 1696973 - RNA, 19 nt, Artificial Sequence
  Description of Artificial Sequence: Synthetic oligonucleotide
uguacccggauccauuucc

SEQ ID NO: 1696974 - RNA, 19 nt, Artificial Sequence
  Description of Artificial Sequence: Synthetic oligonucleotide
uacuuuacaggauucucca

SEQ ID NO: 1696975 - RNA, 19 nt, Artificial Sequence
  Description of Artificial Sequence: Synthetic oligonucleotide
ucccgaauaucuuugacaa

SEQ ID NO: 1696976 - RNA, 19 nt, Artificial Sequence
  Description of Artificial Sequence: Synthetic oligonucleotide
aggauauugaagaaaaccu

SEQ ID NO: 1696977 - RNA, 19 nt, Artificial Sequence
  Description of Artificial Sequence: Synthetic oligonucleotide
cauaacuucugucucuagc

SEQ ID NO: 1696978 - RNA, 19 nt, Artificial Sequence
  Description of Artificial Sequence: Synthetic oligonucleotide
ucgauuucguuguacccgg

SEQ ID NO: 1696979 - RNA, 19 nt, Artificial Sequence
  Description of Artificial Sequence: Synthetic oligonucleotide
uaaauucgaacuuggugga

SEQ ID NO: 1696980 - RNA, 19 nt, Artificial Sequence
  Description of Artificial Sequence: Synthetic oligonucleotide
aggugagacgaccuagacc

SEQ ID NO: 1696981 - RNA, 19 nt, Artificial Sequence
  Description of Artificial Sequence: Synthetic oligonucleotide
auuucguuguacccggauc

SEQ ID NO: 1696982 - RNA, 19 nt, Artificial Sequence
  Description of Artificial Sequence: Synthetic oligonucleotide
cugaugaucaccuuagaga

SEQ ID NO: 1696983 - RNA, 19 nt, Artificial Sequence
  Description of Artificial Sequence: Synthetic oligonucleotide
ugaagugguuuccagggcu

SEQ ID NO: 1696984 - RNA, 19 nt, Artificial Sequence
  Description of Artificial Sequence: Synthetic oligonucleotide
auaucuuugacaauucggu

SEQ ID NO: 1696985 - RNA, 19 nt, Artificial Sequence
  Description of Artificial Sequence: Synthetic oligonucleotide
cacaauacgugccucagug

SEQ ID NO: 1696986 - RNA, 19 nt, Artificial Sequence
  Description of Artificial Sequence: Synthetic oligonucleotide
uacagcaugaaguagccuu

SEQ ID NO: 1696987 - RNA, 19 nt, Artificial Sequence
  Description of Artificial Sequence: Synthetic oligonucleotide
ugauaccaaaugaaguggu

SEQ ID NO: 1696988 - RNA, 19 nt, Artificial Sequence
  Description of Artificial Sequence: Synthetic oligonucleotide
uaaucugggauguagcuuu

SEQ ID NO: 1696989 - RNA, 19 nt, Artificial Sequence
  Description of Artificial Sequence: Synthetic oligonucleotide
ucaauguaccacuuugggu

SEQ ID NO: 1696990 - RNA, 19 nt, Artificial Sequence
  Description of Artificial Sequence: Synthetic oligonucleotide
aagaagguaaccacgucug

SEQ ID NO: 1696991 - RNA, 19 nt, Artificial Sequence
  Description of Artificial Sequence: Synthetic oligonucleotide
gggauugucuuuuagggcc

SEQ ID NO: 1696992 - RNA, 19 nt, Artificial Sequence
  Description of Artificial Sequence: Synthetic oligonucleotide
auaucuacucgcccaggac

SEQ ID NO: 1696993 - RNA, 19 nt, Artificial Sequence
  Description of Artificial Sequence: Synthetic oligonucleotide
uacuccuucauaucuacuc

SEQ ID NO: 1696994 - RNA, 19 nt, Artificial Sequence
  Description of Artificial Sequence: Synthetic oligonucleotide
ugucggguaagccagcuaa

SEQ ID NO: 1696995 - RNA, 19 nt, Artificial Sequence
  Description of Artificial Sequence: Synthetic oligonucleotide
uguaauggcgccggaaugc

SEQ ID NO: 1696996 - RNA, 19 nt, Artificial Sequence
  Description of Artificial Sequence: Synthetic oligonucleotide
cugauaccaaaugaagugg

SEQ ID NO: 1696997 - RNA, 19 nt, Artificial Sequence
  Description of Artificial Sequence: Synthetic oligonucleotide
agaacccacagcuguguac

SEQ ID NO: 1696998 - RNA, 19 nt, Artificial Sequence
  Description of Artificial Sequence: Synthetic oligonucleotide
  modified_base (9)..(9): a, c, u, g, unknown or other
aguugggcnccuuuucggg

SEQ ID NO: 1696999 - RNA, 19 nt, Artificial Sequence
  Description of Artificial Sequence: Synthetic oligonucleotide
gaucauguaauggcgccgg

SEQ ID NO: 1697000 - RNA, 19 nt, Artificial Sequence
  Description of Artificial Sequence: Synthetic oligonucleotide
cucgacugagaaaagcggc

SEQ ID NO: 1697001 - RNA, 19 nt, Artificial Sequence
  Description of Artificial Sequence: Synthetic oligonucleotide
accacuuuggguuaucaau

SEQ ID NO: 1697002 - RNA, 19 nt, Artificial Sequence
  Description of Artificial Sequence: Synthetic oligonucleotide
gauauccaaagguacgcca

SEQ ID NO: 1697003 - RNA, 19 nt, Artificial Sequence
  Description of Artificial Sequence: Synthetic oligonucleotide
aauucgaacuugguggaga

SEQ ID NO: 1697004 - RNA, 19 nt, Artificial Sequence
  Description of Artificial Sequence: Synthetic oligonucleotide
cagccugucaaugugauug

SEQ ID NO: 1697005 - RNA, 19 nt, Artificial Sequence
  Description of Artificial Sequence: Synthetic oligonucleotide
agucucgacugagaaaagc

SEQ ID NO: 1697006 - RNA, 19 nt, Artificial Sequence
  Description of Artificial Sequence: Synthetic oligonucleotide
uuucggucagugcccaggg

SEQ ID NO: 1697007 - RNA, 19 nt, Artificial Sequence
  Description of Artificial Sequence: Synthetic oligonucleotide
agcuguguacaucaccguc

SEQ ID NO: 1697008 - RNA, 19 nt, Artificial Sequence
  Description of Artificial Sequence: Synthetic oligonucleotide
cucgauuucguuguacccg

SEQ ID NO: 1697009 - RNA, 19 nt, Artificial Sequence
  Description of Artificial Sequence: Synthetic oligonucleotide
acagaauccaguggccugc

SEQ ID NO: 1697010 - RNA, 19 nt, Artificial Sequence
  Description of Artificial Sequence: Synthetic oligonucleotide
agaaaagcggcauccacau

SEQ ID NO: 1697011 - RNA, 19 nt, Artificial Sequence
  Description of Artificial Sequence: Synthetic oligonucleotide
ucugcaugucucgauuucg

SEQ ID NO: 1697012 - RNA, 19 nt, Artificial Sequence
  Description of Artificial Sequence: Synthetic oligonucleotide
uccuucauaucuacucgcc

SEQ ID NO: 1697013 - RNA, 19 nt, Artificial Sequence
  Description of Artificial Sequence: Synthetic oligonucleotide
gucaugaacacaauacgug

SEQ ID NO: 1697014 - RNA, 19 nt, Artificial Sequence
  Description of Artificial Sequence: Synthetic oligonucleotide
ggauagaaccucuugaaca

SEQ ID NO: 1697015 - RNA, 19 nt, Artificial Sequence
  Description of Artificial Sequence: Synthetic oligonucleotide
ggugagacgaccuagaccu

SEQ ID NO: 1697016 - RNA, 19 nt, Artificial Sequence
  Description of Artificial Sequence: Synthetic oligonucleotide
uuccccugauaccaaauga

SEQ ID NO: 1697017 - RNA, 19 nt, Artificial Sequence
  Description of Artificial Sequence: Synthetic oligonucleotide
uggauauccaaagguacgc

SEQ ID NO: 1697018 - RNA, 19 nt, Artificial Sequence
  Description of Artificial Sequence: Synthetic oligonucleotide
aacacaauacgugccucag

SEQ ID NO: 1697019 - RNA, 19 nt, Artificial Sequence
  Description of Artificial Sequence: Synthetic oligonucleotide
augaacacaauacgugccu

SEQ ID NO: 1697020 - RNA, 19 nt, Artificial Sequence
  Description of Artificial Sequence: Synthetic oligonucleotide
uucgagugugaucauguaa

SEQ ID NO: 1697021 - RNA, 19 nt, Artificial Sequence
  Description of Artificial Sequence: Synthetic oligonucleotide
acuagagucugugaggcug

SEQ ID NO: 1697022 - RNA, 19 nt, Artificial Sequence
  Description of Artificial Sequence: Synthetic oligonucleotide
aguagggauugucuuuuag

SEQ ID NO: 1697023 - RNA, 19 nt, Artificial Sequence
  Description of Artificial Sequence: Synthetic oligonucleotide
aaccuuucggucagugccc

SEQ ID NO: 1697024 - RNA, 19 nt, Artificial Sequence
  Description of Artificial Sequence: Synthetic oligonucleotide
acuacagaauccaguggcc

SEQ ID NO: 1697025 - RNA, 19 nt, Artificial Sequence
  Description of Artificial Sequence: Synthetic oligonucleotide
ucucgauuucguuguaccc

SEQ ID NO: 1697026 - RNA, 19 nt, Artificial Sequence
  Description of Artificial Sequence: Synthetic oligonucleotide
aggugcuugcccuggauag

SEQ ID NO: 1697027 - RNA, 19 nt, Artificial Sequence
  Description of Artificial Sequence: Synthetic oligonucleotide
acaauacgugccucagugg

SEQ ID NO: 1697028 - RNA, 19 nt, Artificial Sequence
  Description of Artificial Sequence: Synthetic oligonucleotide
uuagggccagaacaaaguc

SEQ ID NO: 1697029 - RNA, 19 nt, Artificial Sequence
  Description of Artificial Sequence: Synthetic oligonucleotide
ugaucauguaauggcgccg

SEQ ID NO: 1697030 - RNA, 19 nt, Artificial Sequence
  Description of Artificial Sequence: Synthetic oligonucleotide
guacuuuacaggauucucc

SEQ ID NO: 1697031 - RNA, 19 nt, Artificial Sequence
  Description of Artificial Sequence: Synthetic oligonucleotide
aguagccuugcaccugggc

SEQ ID NO: 1697032 - RNA, 19 nt, Artificial Sequence
  Description of Artificial Sequence: Synthetic oligonucleotide
guggauauccaaagguacg

SEQ ID NO: 1697033 - RNA, 19 nt, Artificial Sequence
  Description of Artificial Sequence: Synthetic oligonucleotide
ucugagagacuagagucug

SEQ ID NO: 1697034 - RNA, 19 nt, Artificial Sequence
  Description of Artificial Sequence: Synthetic oligonucleotide
aucaaugaauucccgaaua

SEQ ID NO: 1697035 - RNA, 19 nt, Artificial Sequence
  Description of Artificial Sequence: Synthetic oligonucleotide
gugaucauguaauggcgcc

SEQ ID NO: 1697036 - RNA, 19 nt, Artificial Sequence
  Description of Artificial Sequence: Synthetic oligonucleotide
aucaccuuagagauucaac

SEQ ID NO: 1697037 - RNA, 19 nt, Artificial Sequence
  Description of Artificial Sequence: Synthetic oligonucleotide
uuaaggacauguucugcaa

SEQ ID NO: 1697038 - RNA, 19 nt, Artificial Sequence
  Description of Artificial Sequence: Synthetic oligonucleotide
gucucgauuucguuguacc

SEQ ID NO: 1697039 - RNA, 19 nt, Artificial Sequence
  Description of Artificial Sequence: Synthetic oligonucleotide
gugugaucauguaauggcg

SEQ ID NO: 1697040 - RNA, 19 nt, Artificial Sequence
  Description of Artificial Sequence: Synthetic oligonucleotide
ugcuguaggacuacagaau

SEQ ID NO: 1697041 - RNA, 19 nt, Artificial Sequence
  Description of Artificial Sequence: Synthetic oligonucleotide
gauccagccugucaaugug

SEQ ID NO: 1697042 - RNA, 19 nt, Artificial Sequence
  Description of Artificial Sequence: Synthetic oligonucleotide
aguccgcugaaggugagac

SEQ ID NO: 1697043 - RNA, 19 nt, Artificial Sequence
  Description of Artificial Sequence: Synthetic oligonucleotide
aaugugauugguggucaug

SEQ ID NO: 1697044 - RNA, 19 nt, Artificial Sequence
  Description of Artificial Sequence: Synthetic oligonucleotide
ucguggauauccaaaggua

SEQ ID NO: 1697045 - RNA, 19 nt, Artificial Sequence
  Description of Artificial Sequence: Synthetic oligonucleotide
uccccugauaccaaaugaa

SEQ ID NO: 1697046 - RNA, 19 nt, Artificial Sequence
  Description of Artificial Sequence: Synthetic oligonucleotide
cuguaggacuacagaaucc

SEQ ID NO: 1697047 - RNA, 19 nt, Artificial Sequence
  Description of Artificial Sequence: Synthetic oligonucleotide
ccuuagagauucaacauug

SEQ ID NO: 1697048 - RNA, 19 nt, Artificial Sequence
  Description of Artificial Sequence: Synthetic oligonucleotide
caagucucgacugagaaaa

SEQ ID NO: 1697049 - RNA, 19 nt, Artificial Sequence
  Description of Artificial Sequence: Synthetic oligonucleotide
uguugaagguaugagguuu

SEQ ID NO: 1697050 - RNA, 19 nt, Artificial Sequence
  Description of Artificial Sequence: Synthetic oligonucleotide
gacguaucagggcaggauc

SEQ ID NO: 1697051 - RNA, 19 nt, Artificial Sequence
  Description of Artificial Sequence: Synthetic oligonucleotide
uaaagaagguaaccacguc

SEQ ID NO: 1697052 - RNA, 19 nt, Artificial Sequence
  Description of Artificial Sequence: Synthetic oligonucleotide
caagucuaccaucugcaug

SEQ ID NO: 1697053 - RNA, 19 nt, Artificial Sequence
  Description of Artificial Sequence: Synthetic oligonucleotide
acugugucggguaagccag

SEQ ID NO: 1697054 - RNA, 19 nt, Artificial Sequence
  Description of Artificial Sequence: Synthetic oligonucleotide
ucaaugugauuggugguca

SEQ ID NO: 1697055 - RNA, 19 nt, Artificial Sequence
  Description of Artificial Sequence: Synthetic oligonucleotide
ugacagauucccagggagu

SEQ ID NO: 1697056 - RNA, 19 nt, Artificial Sequence
  Description of Artificial Sequence: Synthetic oligonucleotide
cuuuaaggacauguucugc

SEQ ID NO: 1697057 - RNA, 19 nt, Artificial Sequence
  Description of Artificial Sequence: Synthetic oligonucleotide
auacgugccucaguggagg

SEQ ID NO: 1697058 - RNA, 19 nt, Artificial Sequence
  Description of Artificial Sequence: Synthetic oligonucleotide
aauacgugccucaguggag

SEQ ID NO: 1697059 - RNA, 19 nt, Artificial Sequence
  Description of Artificial Sequence: Synthetic oligonucleotide
caauguaccacuuuggguu

SEQ ID NO: 1697060 - RNA, 19 nt, Artificial Sequence
  Description of Artificial Sequence: Synthetic oligonucleotide
gguaaccacgucuguaggg

SEQ ID NO: 1697061 - RNA, 19 nt, Artificial Sequence
  Description of Artificial Sequence: Synthetic oligonucleotide
agguaaccacgucuguagg

SEQ ID NO: 1697062 - RNA, 19 nt, Artificial Sequence
  Description of Artificial Sequence: Synthetic oligonucleotide
uggggauaaauucgaacuu

SEQ ID NO: 1697063 - RNA, 19 nt, Artificial Sequence
  Description of Artificial Sequence: Synthetic oligonucleotide
aaauucgaacuugguggag

SEQ ID NO: 1697064 - RNA, 19 nt, Artificial Sequence
  Description of Artificial Sequence: Synthetic oligonucleotide
auguaauggcgccggaaug

SEQ ID NO: 1697065 - RNA, 19 nt, Artificial Sequence
  Description of Artificial Sequence: Synthetic oligonucleotide
  modified_base (7)..(7): a, c, u, g, unknown or other
uugggcnccuuuucgggcu

SEQ ID NO: 1697066 - RNA, 19 nt, Artificial Sequence
  Description of Artificial Sequence: Synthetic oligonucleotide
gugauugguggucaugaac

SEQ ID NO: 1697067 - RNA, 19 nt, Artificial Sequence
  Description of Artificial Sequence: Synthetic oligonucleotide
  modified_base (2)..(2): a, c, u, g, unknown or other
cnccuuuucgggcugcagc

SEQ ID NO: 1697068 - RNA, 19 nt, Artificial Sequence
  Description of Artificial Sequence: Synthetic oligonucleotide
ugcggcgucguggauaucc

SEQ ID NO: 1697069 - RNA, 19 nt, Artificial Sequence
  Description of Artificial Sequence: Synthetic oligonucleotide
guaugagguuucaacacug

SEQ ID NO: 1697070 - RNA, 19 nt, Artificial Sequence
  Description of Artificial Sequence: Synthetic oligonucleotide
uacgccauucagaacccac

SEQ ID NO: 1697071 - RNA, 19 nt, Artificial Sequence
  Description of Artificial Sequence: Synthetic oligonucleotide
gggacuucgagugugauca

SEQ ID NO: 1697072 - RNA, 19 nt, Artificial Sequence
  Description of Artificial Sequence: Synthetic oligonucleotide
aaggaaggugcuugcccug

SEQ ID NO: 1697073 - RNA, 19 nt, Artificial Sequence
  Description of Artificial Sequence: Synthetic oligonucleotide
guagccuugcaccugggca

SEQ ID NO: 1697074 - RNA, 19 nt, Artificial Sequence
  Description of Artificial Sequence: Synthetic oligonucleotide
gaacacaauacgugccuca

SEQ ID NO: 1697075 - RNA, 19 nt, Artificial Sequence
  Description of Artificial Sequence: Synthetic oligonucleotide
uucggccacuuucauguug

SEQ ID NO: 1697076 - RNA, 19 nt, Artificial Sequence
  Description of Artificial Sequence: Synthetic oligonucleotide
caauacgugccucagugga

SEQ ID NO: 1697077 - RNA, 19 nt, Artificial Sequence
  Description of Artificial Sequence: Synthetic oligonucleotide
caaagguacgccauucaga

SEQ ID NO: 1697078 - RNA, 19 nt, Artificial Sequence
  Description of Artificial Sequence: Synthetic oligonucleotide
uugguggagauucggccac

SEQ ID NO: 1697079 - RNA, 19 nt, Artificial Sequence
  Description of Artificial Sequence: Synthetic oligonucleotide
ucugcugcggggcuacacu

SEQ ID NO: 1697080 - RNA, 19 nt, Artificial Sequence
  Description of Artificial Sequence: Synthetic oligonucleotide
agggacuucgagugugauc

SEQ ID NO: 1697081 - RNA, 19 nt, Artificial Sequence
  Description of Artificial Sequence: Synthetic oligonucleotide
gggauaaauucgaacuugg

SEQ ID NO: 1697082 - RNA, 19 nt, Artificial Sequence
  Description of Artificial Sequence: Synthetic oligonucleotide
cuuucggucagugcccagg

SEQ ID NO: 1697083 - RNA, 19 nt, Artificial Sequence
  Description of Artificial Sequence: Synthetic oligonucleotide
ugagacgaccuagaccuug

SEQ ID NO: 1697084 - RNA, 19 nt, Artificial Sequence
  Description of Artificial Sequence: Synthetic oligonucleotide
accugggcaggacuaaucu

SEQ ID NO: 1697085 - RNA, 19 nt, Artificial Sequence
  Description of Artificial Sequence: Synthetic oligonucleotide
gggaguucccguuugcaag

SEQ ID NO: 1697086 - RNA, 19 nt, Artificial Sequence
  Description of Artificial Sequence: Synthetic oligonucleotide
auaccaaaugaagugguuu

SEQ ID NO: 1697087 - RNA, 19 nt, Artificial Sequence
  Description of Artificial Sequence: Synthetic oligonucleotide
acaauucggucagccagac

SEQ ID NO: 1697088 - RNA, 19 nt, Artificial Sequence
  Description of Artificial Sequence: Synthetic oligonucleotide
ucauaucuacucgcccagg

SEQ ID NO: 1697089 - RNA, 19 nt, Artificial Sequence
  Description of Artificial Sequence: Synthetic oligonucleotide
ucggguaagccagcuaagc

SEQ ID NO: 1697090 - RNA, 19 nt, Artificial Sequence
  Description of Artificial Sequence: Synthetic oligonucleotide
ggauguagcuuuaaggaca

SEQ ID NO: 1697091 - RNA, 19 nt, Artificial Sequence
  Description of Artificial Sequence: Synthetic oligonucleotide
auucgaacuugguggagau

SEQ ID NO: 1697092 - RNA, 19 nt, Artificial Sequence
  Description of Artificial Sequence: Synthetic oligonucleotide
cuuuucgggcugcagccag

SEQ ID NO: 1697093 - RNA, 19 nt, Artificial Sequence
  Description of Artificial Sequence: Synthetic oligonucleotide
gaaccgugccuacaccuac

SEQ ID NO: 1697094 - RNA, 19 nt, Artificial Sequence
  Description of Artificial Sequence: Synthetic oligonucleotide
  modified_base (8)..(8): a, c, u, g, unknown or other
guugggcnccuuuucgggc

SEQ ID NO: 1697095 - RNA, 19 nt, Artificial Sequence
  Description of Artificial Sequence: Synthetic oligonucleotide
uacaccuaccaguccaaau

SEQ ID NO: 1697096 - RNA, 19 nt, Artificial Sequence
  Description of Artificial Sequence: Synthetic oligonucleotide
gucaaugugauuggugguc

SEQ ID NO: 1697097 - RNA, 19 nt, Artificial Sequence
  Description of Artificial Sequence: Synthetic oligonucleotide
ggacuacagaauccagugg

SEQ ID NO: 1697098 - RNA, 19 nt, Artificial Sequence
  Description of Artificial Sequence: Synthetic oligonucleotide
gcuguaggacuacagaauc

SEQ ID NO: 1697099 - RNA, 19 nt, Artificial Sequence
  Description of Artificial Sequence: Synthetic oligonucleotide
gggauguagcuuuaaggac

SEQ ID NO: 1697100 - RNA, 19 nt, Artificial Sequence
  Description of Artificial Sequence: Synthetic oligonucleotide
agaagguaaccacgucugu

SEQ ID NO: 1697101 - RNA, 19 nt, Artificial Sequence
  Description of Artificial Sequence: Synthetic oligonucleotide
gucguggauauccaaaggu

SEQ ID NO: 1697102 - RNA, 19 nt, Artificial Sequence
  Description of Artificial Sequence: Synthetic oligonucleotide
ugguacuuuacaggauucu

SEQ ID NO: 1697103 - RNA, 19 nt, Artificial Sequence
  Description of Artificial Sequence: Synthetic oligonucleotide
caugucucgauuucguugu

SEQ ID NO: 1697104 - RNA, 19 nt, Artificial Sequence
  Description of Artificial Sequence: Synthetic oligonucleotide
ggacuaaucugggauguag

SEQ ID NO: 1697105 - RNA, 19 nt, Artificial Sequence
  Description of Artificial Sequence: Synthetic oligonucleotide
ugugauugguggucaugaa

SEQ ID NO: 1697106 - RNA, 19 nt, Artificial Sequence
  Description of Artificial Sequence: Synthetic oligonucleotide
acuuuggguuaucaaugaa

SEQ ID NO: 1697107 - RNA, 19 nt, Artificial Sequence
  Description of Artificial Sequence: Synthetic oligonucleotide
uagcccacauacuccuuca

SEQ ID NO: 1697108 - RNA, 19 nt, Artificial Sequence
  Description of Artificial Sequence: Synthetic oligonucleotide
guagcccacauacuccuuc

SEQ ID NO: 1697109 - RNA, 19 nt, Artificial Sequence
  Description of Artificial Sequence: Synthetic oligonucleotide
uccagccugucaaugugau

SEQ ID NO: 1697110 - RNA, 19 nt, Artificial Sequence
  Description of Artificial Sequence: Synthetic oligonucleotide
cauaucuacucgcccagga

SEQ ID NO: 1697111 - RNA, 19 nt, Artificial Sequence
  Description of Artificial Sequence: Synthetic oligonucleotide
aggugcugcgugcggguac

SEQ ID NO: 1697112 - RNA, 19 nt, Artificial Sequence
  Description of Artificial Sequence: Synthetic oligonucleotide
ggggauaaauucgaacuug

SEQ ID NO: 1697113 - RNA, 19 nt, Artificial Sequence
  Description of Artificial Sequence: Synthetic oligonucleotide
uaccacuuuggguuaucaa

SEQ ID NO: 1697114 - RNA, 19 nt, Artificial Sequence
  Description of Artificial Sequence: Synthetic oligonucleotide
auauccaaagguacgccau

SEQ ID NO: 1697115 - RNA, 19 nt, Artificial Sequence
  Description of Artificial Sequence: Synthetic oligonucleotide
ucucuagcagggacuucga

SEQ ID NO: 1697116 - RNA, 19 nt, Artificial Sequence
  Description of Artificial Sequence: Synthetic oligonucleotide
ucauguaauggcgccggaa

SEQ ID NO: 1697117 - RNA, 19 nt, Artificial Sequence
  Description of Artificial Sequence: Synthetic oligonucleotide
agccccaaaguagggauug

SEQ ID NO: 1697118 - RNA, 19 nt, Artificial Sequence
  Description of Artificial Sequence: Synthetic oligonucleotide
gguaagccagcuaagcaac

SEQ ID NO: 1697119 - RNA, 19 nt, Artificial Sequence
  Description of Artificial Sequence: Synthetic oligonucleotide
gaaggugagacgaccuaga

SEQ ID NO: 1697120 - RNA, 19 nt, Artificial Sequence
  Description of Artificial Sequence: Synthetic oligonucleotide
auguugaagguaugagguu

SEQ ID NO: 1697121 - RNA, 19 nt, Artificial Sequence
  Description of Artificial Sequence: Synthetic oligonucleotide
agggaguucccguuugcaa

SEQ ID NO: 1697122 - RNA, 19 nt, Artificial Sequence
  Description of Artificial Sequence: Synthetic oligonucleotide
guaauggcgccggaaugcc

SEQ ID NO: 1697123 - RNA, 19 nt, Artificial Sequence
  Description of Artificial Sequence: Synthetic oligonucleotide
guaggacuacagaauccag

SEQ ID NO: 1697124 - RNA, 19 nt, Artificial Sequence
  Description of Artificial Sequence: Synthetic oligonucleotide
agaauccaguggccugcgg

SEQ ID NO: 1697125 - RNA, 19 nt, Artificial Sequence
  Description of Artificial Sequence: Synthetic oligonucleotide
uaauggcgccggaaugcca

SEQ ID NO: 1697126 - RNA, 19 nt, Artificial Sequence
  Description of Artificial Sequence: Synthetic oligonucleotide
ccaaagguacgccauucag

SEQ ID NO: 1697127 - RNA, 19 nt, Artificial Sequence
  Description of Artificial Sequence: Synthetic oligonucleotide
ugucucgauuucguuguac

SEQ ID NO: 1697128 - RNA, 19 nt, Artificial Sequence
  Description of Artificial Sequence: Synthetic oligonucleotide
gaagguaaccacgucugua

SEQ ID NO: 1697129 - RNA, 19 nt, Artificial Sequence
  Description of Artificial Sequence: Synthetic oligonucleotide
cguggauauccaaagguac

SEQ ID NO: 1697130 - RNA, 19 nt, Artificial Sequence
  Description of Artificial Sequence: Synthetic oligonucleotide
uaaccacgucuguagggaa

SEQ ID NO: 1697131 - RNA, 19 nt, Artificial Sequence
  Description of Artificial Sequence: Synthetic oligonucleotide
  modified_base (11)..(11): a, c, u, g, unknown or other
ccaguugggcnccuuuucg

SEQ ID NO: 1697132 - RNA, 19 nt, Artificial Sequence
  Description of Artificial Sequence: Synthetic oligonucleotide
guuugcaagucuaccaucu

SEQ ID NO: 1697133 - RNA, 19 nt, Artificial Sequence
  Description of Artificial Sequence: Synthetic oligonucleotide
gguacuuuacaggauucuc

SEQ ID NO: 1697134 - RNA, 19 nt, Artificial Sequence
  Description of Artificial Sequence: Synthetic oligonucleotide
uucguuguacccggaucca

SEQ ID NO: 1697135 - RNA, 19 nt, Artificial Sequence
  Description of Artificial Sequence: Synthetic oligonucleotide
uucggucagugcccagggc

SEQ ID NO: 1697136 - RNA, 19 nt, Artificial Sequence
  Description of Artificial Sequence: Synthetic oligonucleotide
ugcugcggggcuacacuga

SEQ ID NO: 1697137 - RNA, 19 nt, Artificial Sequence
  Description of Artificial Sequence: Synthetic oligonucleotide
ugcaugucucgauuucguu

SEQ ID NO: 1697138 - RNA, 19 nt, Artificial Sequence
  Description of Artificial Sequence: Synthetic oligonucleotide
aucuacucgcccaggacgu

SEQ ID NO: 1697139 - RNA, 19 nt, Artificial Sequence
  Description of Artificial Sequence: Synthetic oligonucleotide
ccccugauaccaaaugaag

SEQ ID NO: 1697140 - RNA, 19 nt, Artificial Sequence
  Description of Artificial Sequence: Synthetic oligonucleotide
cacgucuguagggaaugcc

SEQ ID NO: 1697141 - RNA, 19 nt, Artificial Sequence
  Description of Artificial Sequence: Synthetic oligonucleotide
aagucucgacugagaaaag

SEQ ID NO: 1697142 - RNA, 19 nt, Artificial Sequence
  Description of Artificial Sequence: Synthetic oligonucleotide
ccugucaaugugauuggug

SEQ ID NO: 1697143 - RNA, 19 nt, Artificial Sequence
  Description of Artificial Sequence: Synthetic oligonucleotide
guccgcugaaggugagacg

SEQ ID NO: 1697144 - RNA, 19 nt, Artificial Sequence
  Description of Artificial Sequence: Synthetic oligonucleotide
ugaucaccuuagagauuca

SEQ ID NO: 1697145 - RNA, 19 nt, Artificial Sequence
  Description of Artificial Sequence: Synthetic oligonucleotide
cuugguacuuuacaggauu

SEQ ID NO: 1697146 - RNA, 19 nt, Artificial Sequence
  Description of Artificial Sequence: Synthetic oligonucleotide
ugugucggguaagccagcu

SEQ ID NO: 1697147 - RNA, 19 nt, Artificial Sequence
  Description of Artificial Sequence: Synthetic oligonucleotide
uuguacccggauccauuuc

SEQ ID NO: 1697148 - RNA, 19 nt, Artificial Sequence
  Description of Artificial Sequence: Synthetic oligonucleotide
gcauugagcaguccgcuga

SEQ ID NO: 1697149 - RNA, 19 nt, Artificial Sequence
  Description of Artificial Sequence: Synthetic oligonucleotide
ggauauccaaagguacgcc

SEQ ID NO: 1697150 - RNA, 19 nt, Artificial Sequence
  Description of Artificial Sequence: Synthetic oligonucleotide
accgugccuacaccuacca

SEQ ID NO: 1697151 - RNA, 19 nt, Artificial Sequence
  Description of Artificial Sequence: Synthetic oligonucleotide
augaauucccgaauaucuu

SEQ ID NO: 1697152 - RNA, 19 nt, Artificial Sequence
  Description of Artificial Sequence: Synthetic oligonucleotide
guggccugcggcgucgugg

SEQ ID NO: 1697153 - RNA, 19 nt, Artificial Sequence
  Description of Artificial Sequence: Synthetic oligonucleotide
uacgugccucaguggaggc

SEQ ID NO: 1697154 - RNA, 19 nt, Artificial Sequence
  Description of Artificial Sequence: Synthetic oligonucleotide
guaagccagcuaagcaacc

SEQ ID NO: 1697155 - RNA, 19 nt, Artificial Sequence
  Description of Artificial Sequence: Synthetic oligonucleotide
ugugagcaguagcccacau

SEQ ID NO: 1697156 - RNA, 19 nt, Artificial Sequence
  Description of Artificial Sequence: Synthetic oligonucleotide
gguaugagguuucaacacu

SEQ ID NO: 1697157 - RNA, 19 nt, Artificial Sequence
  Description of Artificial Sequence: Synthetic oligonucleotide
gaucaccuuagagauucaa

SEQ ID NO: 1697158 - RNA, 19 nt, Artificial Sequence
  Description of Artificial Sequence: Synthetic oligonucleotide
gaugguugagccggucauc

SEQ ID NO: 1697159 - RNA, 19 nt, Artificial Sequence
  Description of Artificial Sequence: Synthetic oligonucleotide
  modified_base (6)..(6): a, c, u, g, unknown or other
ugggcnccuuuucgggcug

SEQ ID NO: 1697160 - RNA, 19 nt, Artificial Sequence
  Description of Artificial Sequence: Synthetic oligonucleotide
ccugguauauagaacaagu

SEQ ID NO: 1697161 - RNA, 19 nt, Artificial Sequence
  Description of Artificial Sequence: Synthetic oligonucleotide
gugccuacaccuaccaguc

SEQ ID NO: 1697162 - RNA, 19 nt, Artificial Sequence
  Description of Artificial Sequence: Synthetic oligonucleotide
cuaagcaaccaggcauaac

SEQ ID NO: 1697163 - RNA, 19 nt, Artificial Sequence
  Description of Artificial Sequence: Synthetic oligonucleotide
gggcccauaaagaagguaa

SEQ ID NO: 1697164 - RNA, 19 nt, Artificial Sequence
  Description of Artificial Sequence: Synthetic oligonucleotide
ugcgugcggguacuguguc

SEQ ID NO: 1697165 - RNA, 19 nt, Artificial Sequence
  Description of Artificial Sequence: Synthetic oligonucleotide
cauguaauggcgccggaau

SEQ ID NO: 1697166 - RNA, 19 nt, Artificial Sequence
  Description of Artificial Sequence: Synthetic oligonucleotide
guacccggauccauuuccc

SEQ ID NO: 1697167 - RNA, 19 nt, Artificial Sequence
  Description of Artificial Sequence: Synthetic oligonucleotide
caccuagacccaguugggc

SEQ ID NO: 1697168 - RNA, 19 nt, Artificial Sequence
  Description of Artificial Sequence: Synthetic oligonucleotide
uacucgcccaggacguauc

SEQ ID NO: 1697169 - RNA, 19 nt, Artificial Sequence
  Description of Artificial Sequence: Synthetic oligonucleotide
aucauguaauggcgccgga

SEQ ID NO: 1697170 - RNA, 19 nt, Artificial Sequence
  Description of Artificial Sequence: Synthetic oligonucleotide
gauuucguuguacccggau

SEQ ID NO: 1697171 - RNA, 19 nt, Artificial Sequence
  Description of Artificial Sequence: Synthetic oligonucleotide
gauguagcuuuaaggacau

SEQ ID NO: 1697172 - RNA, 19 nt, Artificial Sequence
  Description of Artificial Sequence: Synthetic oligonucleotide
gucaacagccccauggggu

SEQ ID NO: 1697173 - RNA, 19 nt, Artificial Sequence
  Description of Artificial Sequence: Synthetic oligonucleotide
gcccauaaagaagguaacc

SEQ ID NO: 1697174 - RNA, 19 nt, Artificial Sequence
  Description of Artificial Sequence: Synthetic oligonucleotide
ugcuugcccuggauagaac

SEQ ID NO: 1697175 - RNA, 19 nt, Artificial Sequence
  Description of Artificial Sequence: Synthetic oligonucleotide
agcaguccgcugaagguga

SEQ ID NO: 1697176 - RNA, 19 nt, Artificial Sequence
  Description of Artificial Sequence: Synthetic oligonucleotide
gccggaaugccaccuagac

SEQ ID NO: 1697177 - RNA, 19 nt, Artificial Sequence
  Description of Artificial Sequence: Synthetic oligonucleotide
gguggucaugaacacaaua

SEQ ID NO: 1697178 - RNA, 19 nt, Artificial Sequence
  Description of Artificial Sequence: Synthetic oligonucleotide
agcuaagcaaccaggcaua

SEQ ID NO: 1697179 - RNA, 19 nt, Artificial Sequence
  Description of Artificial Sequence: Synthetic oligonucleotide
ggucaugaacacaauacgu

SEQ ID NO: 1697180 - RNA, 19 nt, Artificial Sequence
  Description of Artificial Sequence: Synthetic oligonucleotide
ugcggguacugugucgggu

SEQ ID NO: 1697181 - RNA, 19 nt, Artificial Sequence
  Description of Artificial Sequence: Synthetic oligonucleotide
caccugggcaggacuaauc

SEQ ID NO: 1697182 - RNA, 19 nt, Artificial Sequence
  Description of Artificial Sequence: Synthetic oligonucleotide
acucgcccaggacguauca

SEQ ID NO: 1697183 - RNA, 19 nt, Artificial Sequence
  Description of Artificial Sequence: Synthetic oligonucleotide
cugguauauagaacaaguu

SEQ ID NO: 1697184 - RNA, 19 nt, Artificial Sequence
  Description of Artificial Sequence: Synthetic oligonucleotide
gucggguaagccagcuaag

SEQ ID NO: 1697185 - RNA, 19 nt, Artificial Sequence
  Description of Artificial Sequence: Synthetic oligonucleotide
agggaaugccucugucaau

SEQ ID NO: 1697186 - RNA, 19 nt, Artificial Sequence
  Description of Artificial Sequence: Synthetic oligonucleotide
cagaaccgugccuacaccu

SEQ ID NO: 1697187 - RNA, 19 nt, Artificial Sequence
  Description of Artificial Sequence: Synthetic oligonucleotide
ggcuguaaagaugacagau

SEQ ID NO: 1697188 - RNA, 19 nt, Artificial Sequence
  Description of Artificial Sequence: Synthetic oligonucleotide
gccaagucucgacugagaa

SEQ ID NO: 1697189 - RNA, 19 nt, Artificial Sequence
  Description of Artificial Sequence: Synthetic oligonucleotide
cuuugacaauucggucagc

SEQ ID NO: 1697190 - RNA, 19 nt, Artificial Sequence
  Description of Artificial Sequence: Synthetic oligonucleotide
ccaccuagacccaguuggg

SEQ ID NO: 1697191 - RNA, 19 nt, Artificial Sequence
  Description of Artificial Sequence: Synthetic oligonucleotide
cugugucggguaagccagc

SEQ ID NO: 1697192 - RNA, 19 nt, Artificial Sequence
  Description of Artificial Sequence: Synthetic oligonucleotide
ggaggcuacaccauccaaa

SEQ ID NO: 1697193 - RNA, 19 nt, Artificial Sequence
  Description of Artificial Sequence: Synthetic oligonucleotide
ccggaaugccaccuagacc

SEQ ID NO: 1697194 - RNA, 19 nt, Artificial Sequence
  Description of Artificial Sequence: Synthetic oligonucleotide
gcugcggggcuacacugag

SEQ ID NO: 1697195 - RNA, 19 nt, Artificial Sequence
  Description of Artificial Sequence: Synthetic oligonucleotide
gauaccaaaugaagugguu

SEQ ID NO: 1697196 - RNA, 19 nt, Artificial Sequence
  Description of Artificial Sequence: Synthetic oligonucleotide
gguacgccauucagaaccc

SEQ ID NO: 1697197 - RNA, 19 nt, Artificial Sequence
  Description of Artificial Sequence: Synthetic oligonucleotide
caguagcccacauacuccu

SEQ ID NO: 1697198 - RNA, 19 nt, Artificial Sequence
  Description of Artificial Sequence: Synthetic oligonucleotide
cauugucaacagccccaug

SEQ ID NO: 1697199 - RNA, 19 nt, Artificial Sequence
  Description of Artificial Sequence: Synthetic oligonucleotide
guuguacccggauccauuu

SEQ ID NO: 1697200 - RNA, 19 nt, Artificial Sequence
  Description of Artificial Sequence: Synthetic oligonucleotide
cugagaaaagcggcaucca

SEQ ID NO: 1697201 - RNA, 19 nt, Artificial Sequence
  Description of Artificial Sequence: Synthetic oligonucleotide
ggccacuuucauguugaag

SEQ ID NO: 1697202 - RNA, 19 nt, Artificial Sequence
  Description of Artificial Sequence: Synthetic oligonucleotide
ucguuguacccggauccau

SEQ ID NO: 1697203 - RNA, 19 nt, Artificial Sequence
  Description of Artificial Sequence: Synthetic oligonucleotide
accuaccaguccaaaucca

SEQ ID NO: 1697204 - RNA, 19 nt, Artificial Sequence
  Description of Artificial Sequence: Synthetic oligonucleotide
cauugagcaguccgcugaa

SEQ ID NO: 1697205 - RNA, 19 nt, Artificial Sequence
  Description of Artificial Sequence: Synthetic oligonucleotide
ugcaccugggcaggacuaa

SEQ ID NO: 1697206 - RNA, 19 nt, Artificial Sequence
  Description of Artificial Sequence: Synthetic oligonucleotide
gugcggguacugugucggg

SEQ ID NO: 1697207 - RNA, 19 nt, Artificial Sequence
  Description of Artificial Sequence: Synthetic oligonucleotide
aaucugggauguagcuuua

SEQ ID NO: 1697208 - RNA, 19 nt, Artificial Sequence
  Description of Artificial Sequence: Synthetic oligonucleotide
cugaaggugagacgaccua

SEQ ID NO: 1697209 - RNA, 19 nt, Artificial Sequence
  Description of Artificial Sequence: Synthetic oligonucleotide
cugcggggcuacacugagc

SEQ ID NO: 1697210 - RNA, 19 nt, Artificial Sequence
  Description of Artificial Sequence: Synthetic oligonucleotide
ggcccauaaagaagguaac

SEQ ID NO: 1697211 - RNA, 19 nt, Artificial Sequence
  Description of Artificial Sequence: Synthetic oligonucleotide
agaaccgugccuacaccua

SEQ ID NO: 1697212 - RNA, 19 nt, Artificial Sequence
  Description of Artificial Sequence: Synthetic oligonucleotide
gcucgugcuucuuccagga

SEQ ID NO: 1697213 - RNA, 19 nt, Artificial Sequence
  Description of Artificial Sequence: Synthetic oligonucleotide
uucgggcugcagccagaac

SEQ ID NO: 1697214 - RNA, 19 nt, Artificial Sequence
  Description of Artificial Sequence: Synthetic oligonucleotide
gugagcaguagcccacaua

SEQ ID NO: 1697215 - RNA, 19 nt, Artificial Sequence
  Description of Artificial Sequence: Synthetic oligonucleotide
ggcaggauccagccuguca

SEQ ID NO: 1697216 - RNA, 19 nt, Artificial Sequence
  Description of Artificial Sequence: Synthetic oligonucleotide
cucgcccaggacguaucag

SEQ ID NO: 1697217 - RNA, 19 nt, Artificial Sequence
  Description of Artificial Sequence: Synthetic oligonucleotide
ggauucuccacagccaagu

SEQ ID NO: 1697218 - RNA, 19 nt, Artificial Sequence
  Description of Artificial Sequence: Synthetic oligonucleotide
cugcaugucucgauuucgu

SEQ ID NO: 1697219 - RNA, 19 nt, Artificial Sequence
  Description of Artificial Sequence: Synthetic oligonucleotide
ccaagcucugcugcggggc

SEQ ID NO: 1697220 - RNA, 19 nt, Artificial Sequence
  Description of Artificial Sequence: Synthetic oligonucleotide
gugcuugcccuggauagaa

SEQ ID NO: 1697221 - RNA, 19 nt, Artificial Sequence
  Description of Artificial Sequence: Synthetic oligonucleotide
ccagaaccgugccuacacc

SEQ ID NO: 1697222 - RNA, 19 nt, Artificial Sequence
  Description of Artificial Sequence: Synthetic oligonucleotide
gacuagagucugugaggcu

SEQ ID NO: 1697223 - RNA, 19 nt, Artificial Sequence
  Description of Artificial Sequence: Synthetic oligonucleotide
cgugcggguacugugucgg

SEQ ID NO: 1697224 - RNA, 19 nt, Artificial Sequence
  Description of Artificial Sequence: Synthetic oligonucleotide
aggacguaucagggcagga

SEQ ID NO: 1697225 - RNA, 19 nt, Artificial Sequence
  Description of Artificial Sequence: Synthetic oligonucleotide
uucgaacuugguggagauu

SEQ ID NO: 1697226 - RNA, 19 nt, Artificial Sequence
  Description of Artificial Sequence: Synthetic oligonucleotide
caggacuaaucugggaugu

SEQ ID NO: 1697227 - RNA, 19 nt, Artificial Sequence
  Description of Artificial Sequence: Synthetic oligonucleotide
cucugcugcggggcuacac

SEQ ID NO: 1697228 - RNA, 19 nt, Artificial Sequence
  Description of Artificial Sequence: Synthetic oligonucleotide
cuguuaugaagcugcuuuu

SEQ ID NO: 1697229 - RNA, 19 nt, Artificial Sequence
  Description of Artificial Sequence: Synthetic oligonucleotide
  modified_base (14)..(14): a, c, u, g, unknown or other
gacccaguugggcnccuuu

SEQ ID NO: 1697230 - RNA, 19 nt, Artificial Sequence
  Description of Artificial Sequence: Synthetic oligonucleotide
cgucuguagggaaugccuc

SEQ ID NO: 1697231 - RNA, 19 nt, Artificial Sequence
  Description of Artificial Sequence: Synthetic oligonucleotide
gcgugcggguacugugucg

SEQ ID NO: 1697232 - RNA, 19 nt, Artificial Sequence
  Description of Artificial Sequence: Synthetic oligonucleotide
cccaaaguagggauugucu

SEQ ID NO: 1697233 - RNA, 19 nt, Artificial Sequence
  Description of Artificial Sequence: Synthetic oligonucleotide
gggcuguaaagaugacaga

SEQ ID NO: 1697234 - RNA, 19 nt, Artificial Sequence
  Description of Artificial Sequence: Synthetic oligonucleotide
ugucucuagcagggacuuc

SEQ ID NO: 1697235 - RNA, 19 nt, Artificial Sequence
  Description of Artificial Sequence: Synthetic oligonucleotide
gcgccggaaugccaccuag

SEQ ID NO: 1697236 - RNA, 19 nt, Artificial Sequence
  Description of Artificial Sequence: Synthetic oligonucleotide
cagggaguucccguuugca

SEQ ID NO: 1697237 - RNA, 19 nt, Artificial Sequence
  Description of Artificial Sequence: Synthetic oligonucleotide
ucuacucgcccaggacgua

SEQ ID NO: 1697238 - RNA, 19 nt, Artificial Sequence
  Description of Artificial Sequence: Synthetic oligonucleotide
ugccucaguggaggcuaca

SEQ ID NO: 1697239 - RNA, 19 nt, Artificial Sequence
  Description of Artificial Sequence: Synthetic oligonucleotide
caucugcaugucucgauuu

SEQ ID NO: 1697240 - RNA, 19 nt, Artificial Sequence
  Description of Artificial Sequence: Synthetic oligonucleotide
uggcgccggaaugccaccu

SEQ ID NO: 1697241 - RNA, 19 nt, Artificial Sequence
  Description of Artificial Sequence: Synthetic oligonucleotide
acgugccucaguggaggcu

SEQ ID NO: 1697242 - RNA, 19 nt, Artificial Sequence
  Description of Artificial Sequence: Synthetic oligonucleotide
ggccagaacaaagucugua

SEQ ID NO: 1697243 - RNA, 19 nt, Artificial Sequence
  Description of Artificial Sequence: Synthetic oligonucleotide
aggacuaaucugggaugua

SEQ ID NO: 1697244 - RNA, 19 nt, Artificial Sequence
  Description of Artificial Sequence: Synthetic oligonucleotide
gggcuagugcucgugcuuc

SEQ ID NO: 1697245 - RNA, 19 nt, Artificial Sequence
  Description of Artificial Sequence: Synthetic oligonucleotide
  modified_base (13)..(13): a, c, u, g, unknown or other
acccaguugggcnccuuuu

SEQ ID NO: 1697246 - RNA, 19 nt, Artificial Sequence
  Description of Artificial Sequence: Synthetic oligonucleotide
aagcucugcugcggggcua

SEQ ID NO: 1697247 - RNA, 19 nt, Artificial Sequence
  Description of Artificial Sequence: Synthetic oligonucleotide
gggcuggggauaaauucga

SEQ ID NO: 1697248 - RNA, 19 nt, Artificial Sequence
  Description of Artificial Sequence: Synthetic oligonucleotide
ccaagucucgacugagaaa

SEQ ID NO: 1697249 - RNA, 19 nt, Artificial Sequence
  Description of Artificial Sequence: Synthetic oligonucleotide
agcagaugguugagccggu

SEQ ID NO: 1697250 - RNA, 19 nt, Artificial Sequence
  Description of Artificial Sequence: Synthetic oligonucleotide
cuguguacaucaccgucuu

SEQ ID NO: 1697251 - RNA, 19 nt, Artificial Sequence
  Description of Artificial Sequence: Synthetic oligonucleotide
cuacacugagcagaugguu

SEQ ID NO: 1697252 - RNA, 19 nt, Artificial Sequence
  Description of Artificial Sequence: Synthetic oligonucleotide
ccggucaucugagagacua

SEQ ID NO: 1697253 - RNA, 19 nt, Artificial Sequence
  Description of Artificial Sequence: Synthetic oligonucleotide
cugcgugcggguacugugu

SEQ ID NO: 1697254 - RNA, 19 nt, Artificial Sequence
  Description of Artificial Sequence: Synthetic oligonucleotide
cagaacccacagcugugua

SEQ ID NO: 1697255 - RNA, 19 nt, Artificial Sequence
  Description of Artificial Sequence: Synthetic oligonucleotide
ggugcuugcccuggauaga

SEQ ID NO: 1697256 - RNA, 19 nt, Artificial Sequence
  Description of Artificial Sequence: Synthetic oligonucleotide
  modified_base (3)..(3): a, c, u, g, unknown or other
gcnccuuuucgggcugcag

SEQ ID NO: 1697257 - RNA, 19 nt, Artificial Sequence
  Description of Artificial Sequence: Synthetic oligonucleotide
ccccaaaguagggauuguc

SEQ ID NO: 1697258 - RNA, 19 nt, Artificial Sequence
  Description of Artificial Sequence: Synthetic oligonucleotide
caaugugauugguggucau

SEQ ID NO: 1697259 - RNA, 19 nt, Artificial Sequence
  Description of Artificial Sequence: Synthetic oligonucleotide
aguagcccacauacuccuu

SEQ ID NO: 1697260 - RNA, 19 nt, Artificial Sequence
  Description of Artificial Sequence: Synthetic oligonucleotide
gugucggguaagccagcua

SEQ ID NO: 1697261 - RNA, 19 nt, Artificial Sequence
  Description of Artificial Sequence: Synthetic oligonucleotide
gccugaugaucaccuuaga

SEQ ID NO: 1697262 - RNA, 19 nt, Artificial Sequence
  Description of Artificial Sequence: Synthetic oligonucleotide
cggguaagccagcuaagca

SEQ ID NO: 1697263 - RNA, 19 nt, Artificial Sequence
  Description of Artificial Sequence: Synthetic oligonucleotide
cggucagugcccagggcug

SEQ ID NO: 1697264 - RNA, 19 nt, Artificial Sequence
  Description of Artificial Sequence: Synthetic oligonucleotide
gcuaagcaaccaggcauaa

SEQ ID NO: 1697265 - RNA, 19 nt, Artificial Sequence
  Description of Artificial Sequence: Synthetic oligonucleotide
ccuacaccuaccaguccaa

SEQ ID NO: 1697266 - RNA, 19 nt, Artificial Sequence
  Description of Artificial Sequence: Synthetic oligonucleotide
gcaagucuaccaucugcau

SEQ ID NO: 1697267 - RNA, 19 nt, Artificial Sequence
  Description of Artificial Sequence: Synthetic oligonucleotide
cggucaucugagagacuag

SEQ ID NO: 1697268 - RNA, 19 nt, Artificial Sequence
  Description of Artificial Sequence: Synthetic oligonucleotide
ccacgucuguagggaaugc

SEQ ID NO: 1697269 - RNA, 19 nt, Artificial Sequence
  Description of Artificial Sequence: Synthetic oligonucleotide
cgugcuucuuccaggauau

SEQ ID NO: 1697270 - RNA, 19 nt, Artificial Sequence
  Description of Artificial Sequence: Synthetic oligonucleotide
ccgugccuacaccuaccag

SEQ ID NO: 1697271 - RNA, 19 nt, Artificial Sequence
  Description of Artificial Sequence: Synthetic oligonucleotide
ggaaugccaccuagaccca

SEQ ID NO: 1697272 - RNA, 19 nt, Artificial Sequence
  Description of Artificial Sequence: Synthetic oligonucleotide
cugucucuagcagggacuu

SEQ ID NO: 1697273 - RNA, 19 nt, Artificial Sequence
  Description of Artificial Sequence: Synthetic oligonucleotide
gcaguccgcugaaggugag

SEQ ID NO: 1697274 - RNA, 19 nt, Artificial Sequence
  Description of Artificial Sequence: Synthetic oligonucleotide
caguccgcugaaggugaga

SEQ ID NO: 1697275 - RNA, 19 nt, Artificial Sequence
  Description of Artificial Sequence: Synthetic oligonucleotide
ccguuugcaagucuaccau

SEQ ID NO: 1697276 - RNA, 19 nt, Artificial Sequence
  Description of Artificial Sequence: Synthetic oligonucleotide
gcagaugguugagccgguc

SEQ ID NO: 1697277 - RNA, 19 nt, Artificial Sequence
  Description of Artificial Sequence: Synthetic oligonucleotide
ggggcccauaaagaaggua

SEQ ID NO: 1697278 - RNA, 19 nt, Artificial Sequence
  Description of Artificial Sequence: Synthetic oligonucleotide
cuacucgcccaggacguau

SEQ ID NO: 1697279 - RNA, 19 nt, Artificial Sequence
  Description of Artificial Sequence: Synthetic oligonucleotide
  modified_base (4)..(4): a, c, u, g, unknown or other
ggcnccuuuucgggcugca

SEQ ID NO: 1697280 - RNA, 19 nt, Artificial Sequence
  Description of Artificial Sequence: Synthetic oligonucleotide
  modified_base (5)..(5): a, c, u, g, unknown or other
gggcnccuuuucgggcugc

SEQ ID NO: 1697281 - RNA, 19 nt, Artificial Sequence
  Description of Artificial Sequence: Synthetic oligonucleotide
ggggcuacacugagcagau

SEQ ID NO: 1697282 - RNA, 19 nt, Artificial Sequence
  Description of Artificial Sequence: Synthetic oligonucleotide
gugcugcgugcggguacug

SEQ ID NO: 1697283 - RNA, 19 nt, Artificial Sequence
  Description of Artificial Sequence: Synthetic oligonucleotide
ccaucugcaugucucgauu

SEQ ID NO: 1697284 - RNA, 19 nt, Artificial Sequence
  Description of Artificial Sequence: Synthetic oligonucleotide
ccuuuucgggcugcagcca

SEQ ID NO: 1697285 - RNA, 19 nt, Artificial Sequence
  Description of Artificial Sequence: Synthetic oligonucleotide
ccugcggcgucguggauau

SEQ ID NO: 1697286 - RNA, 19 nt, Artificial Sequence
  Description of Artificial Sequence: Synthetic oligonucleotide
gcggcgucguggauaucca

SEQ ID NO: 1697287 - RNA, 19 nt, Artificial Sequence
  Description of Artificial Sequence: Synthetic oligonucleotide
ccggauccauuuccccuga

SEQ ID NO: 1697288 - RNA, 19 nt, Artificial Sequence
  Description of Artificial Sequence: Synthetic oligonucleotide
ggcgccggaaugccaccua

SEQ ID NO: 1697289 - RNA, 19 nt, Artificial Sequence
  Description of Artificial Sequence: Synthetic oligonucleotide
gccugcggcgucguggaua

SEQ ID NO: 1697290 - RNA, 19 nt, Artificial Sequence
  Description of Artificial Sequence: Synthetic oligonucleotide
cgugccucaguggaggcua

SEQ ID NO: 1697291 - RNA, 19 nt, Artificial Sequence
  Description of Artificial Sequence: Synthetic oligonucleotide
gccugucaaugugauuggu

SEQ ID NO: 1697292 - RNA, 19 nt, Artificial Sequence
  Description of Artificial Sequence: Synthetic oligonucleotide
cagggacuucgagugugau

SEQ ID NO: 1697293 - RNA, 19 nt, Artificial Sequence
  Description of Artificial Sequence: Synthetic oligonucleotide
cgauuucguuguacccgga

SEQ ID NO: 1697294 - RNA, 19 nt, Artificial Sequence
  Description of Artificial Sequence: Synthetic oligonucleotide
cccgaauaucuuugacaau

SEQ ID NO: 1697295 - RNA, 19 nt, Artificial Sequence
  Description of Artificial Sequence: Synthetic oligonucleotide
ggacuucgagugugaucau

SEQ ID NO: 1697296 - RNA, 19 nt, Artificial Sequence
  Description of Artificial Sequence: Synthetic oligonucleotide
cguuguacccggauccauu

SEQ ID NO: 1697297 - RNA, 19 nt, Artificial Sequence
  Description of Artificial Sequence: Synthetic oligonucleotide
cgccggaaugccaccuaga

SEQ ID NO: 1697298 - RNA, 19 nt, Artificial Sequence
  Description of Artificial Sequence: Synthetic oligonucleotide
gggcaggauccagccuguc

SEQ ID NO: 1697299 - RNA, 19 nt, Artificial Sequence
  Description of Artificial Sequence: Synthetic oligonucleotide
gcuagugcucgugcuucuu

SEQ ID NO: 1697300 - RNA, 19 nt, Artificial Sequence
  Description of Artificial Sequence: Synthetic oligonucleotide
cugcggcgucguggauauc

SEQ ID NO: 1697301 - RNA, 19 nt, Artificial Sequence
  Description of Artificial Sequence: Synthetic oligonucleotide
cggcgucguggauauccaa

SEQ ID NO: 1697302 - RNA, 19 nt, Artificial Sequence
  Description of Artificial Sequence: Synthetic oligonucleotide
caguggccugcggcgucgu

SEQ ID NO: 1697303 - RNA, 19 nt, Artificial Sequence
  Description of Artificial Sequence: Synthetic oligonucleotide
ggccugcggcgucguggau

SEQ ID NO: 1697304 - RNA, 19 nt, Artificial Sequence
  Description of Artificial Sequence: Synthetic oligonucleotide
cggauccauuuccccugau

SEQ ID NO: 1697305 - RNA, 19 nt, Artificial Sequence
  Description of Artificial Sequence: Synthetic oligonucleotide
aaugaaacaaugaaaagac

SEQ ID NO: 1697306 - RNA, 19 nt, Artificial Sequence
  Description of Artificial Sequence: Synthetic oligonucleotide
gaaaagacuagacugaucc

SEQ ID NO: 1697307 - RNA, 19 nt, Artificial Sequence
  Description of Artificial Sequence: Synthetic oligonucleotide
aaaugaaacaaugaaaaga

SEQ ID NO: 1697308 - RNA, 19 nt, Artificial Sequence
  Description of Artificial Sequence: Synthetic oligonucleotide
caaugaaaagacuagacug

SEQ ID NO: 1697309 - RNA, 19 nt, Artificial Sequence
  Description of Artificial Sequence: Synthetic oligonucleotide
ugaaacaaugaaaagacua

SEQ ID NO: 1697310 - RNA, 19 nt, Artificial Sequence
  Description of Artificial Sequence: Synthetic oligonucleotide
aaugggaacaaaugaaaca

SEQ ID NO: 1697311 - RNA, 19 nt, Artificial Sequence
  Description of Artificial Sequence: Synthetic oligonucleotide
uucccuuuagcuuacaccc

SEQ ID NO: 1697312 - RNA, 19 nt, Artificial Sequence
  Description of Artificial Sequence: Synthetic oligonucleotide
aaaagacuagacugauccc

SEQ ID NO: 1697313 - RNA, 19 nt, Artificial Sequence
  Description of Artificial Sequence: Synthetic oligonucleotide
acuagacugauccccaggc

SEQ ID NO: 1697314 - RNA, 19 nt, Artificial Sequence
  Description of Artificial Sequence: Synthetic oligonucleotide
gaaacaaugaaaagacuag

SEQ ID NO: 1697315 - RNA, 19 nt, Artificial Sequence
  Description of Artificial Sequence: Synthetic oligonucleotide
acaaugaaaagacuagacu

SEQ ID NO: 1697316 - RNA, 19 nt, Artificial Sequence
  Description of Artificial Sequence: Synthetic oligonucleotide
acaaaugaaacaaugaaaa

SEQ ID NO: 1697317 - RNA, 19 nt, Artificial Sequence
  Description of Artificial Sequence: Synthetic oligonucleotide
aaugaaaagacuagacuga

SEQ ID NO: 1697318 - RNA, 19 nt, Artificial Sequence
  Description of Artificial Sequence: Synthetic oligonucleotide
ucaagagagggacagcaug

SEQ ID NO: 1697319 - RNA, 19 nt, Artificial Sequence
  Description of Artificial Sequence: Synthetic oligonucleotide
gaacaaugggaacaaauga

SEQ ID NO: 1697320 - RNA, 19 nt, Artificial Sequence
  Description of Artificial Sequence: Synthetic oligonucleotide
caagagagggacagcaugg

SEQ ID NO: 1697321 - RNA, 19 nt, Artificial Sequence
  Description of Artificial Sequence: Synthetic oligonucleotide
aaacaaugaaaagacuaga

SEQ ID NO: 1697322 - RNA, 19 nt, Artificial Sequence
  Description of Artificial Sequence: Synthetic oligonucleotide
gacagcauggccuuggcuc

SEQ ID NO: 1697323 - RNA, 19 nt, Artificial Sequence
  Description of Artificial Sequence: Synthetic oligonucleotide
cuucccuuuagcuuacacc

SEQ ID NO: 1697324 - RNA, 19 nt, Artificial Sequence
  Description of Artificial Sequence: Synthetic oligonucleotide
acagcauggccuuggcucc

SEQ ID NO: 1697325 - RNA, 19 nt, Artificial Sequence
  Description of Artificial Sequence: Synthetic oligonucleotide
aagagagggacagcauggc

SEQ ID NO: 1697326 - RNA, 19 nt, Artificial Sequence
  Description of Artificial Sequence: Synthetic oligonucleotide
agagagggacagcauggcc

SEQ ID NO: 1697327 - RNA, 19 nt, Artificial Sequence
  Description of Artificial Sequence: Synthetic oligonucleotide
augggaacaaaugaaacaa

SEQ ID NO: 1697328 - RNA, 19 nt, Artificial Sequence
  Description of Artificial Sequence: Synthetic oligonucleotide
gacuagacugauccccagg

SEQ ID NO: 1697329 - RNA, 19 nt, Artificial Sequence
  Description of Artificial Sequence: Synthetic oligonucleotide
ggaacaaugggaacaaaug

SEQ ID NO: 1697330 - RNA, 19 nt, Artificial Sequence
  Description of Artificial Sequence: Synthetic oligonucleotide
ugaaaagacuagacugauc

SEQ ID NO: 1697331 - RNA, 19 nt, Artificial Sequence
  Description of Artificial Sequence: Synthetic oligonucleotide
gggaacaaaugaaacaaug

SEQ ID NO: 1697332 - RNA, 19 nt, Artificial Sequence
  Description of Artificial Sequence: Synthetic oligonucleotide
acaaugggaacaaaugaaa

SEQ ID NO: 1697333 - RNA, 19 nt, Artificial Sequence
  Description of Artificial Sequence: Synthetic oligonucleotide
aagacuagacugaucccca

SEQ ID NO: 1697334 - RNA, 19 nt, Artificial Sequence
  Description of Artificial Sequence: Synthetic oligonucleotide
ugggaacaaaugaaacaau

SEQ ID NO: 1697335 - RNA, 19 nt, Artificial Sequence
  Description of Artificial Sequence: Synthetic oligonucleotide
ugggccuggaguuugucua

SEQ ID NO: 1697336 - RNA, 19 nt, Artificial Sequence
  Description of Artificial Sequence: Synthetic oligonucleotide
augaaaagacuagacugau

SEQ ID NO: 1697337 - RNA, 19 nt, Artificial Sequence
  Description of Artificial Sequence: Synthetic oligonucleotide
agacuagacugauccccag

SEQ ID NO: 1697338 - RNA, 19 nt, Artificial Sequence
  Description of Artificial Sequence: Synthetic oligonucleotide
augaaacaaugaaaagacu

SEQ ID NO: 1697339 - RNA, 19 nt, Artificial Sequence
  Description of Artificial Sequence: Synthetic oligonucleotide
aggggucugggccuggagu

SEQ ID NO: 1697340 - RNA, 19 nt, Artificial Sequence
  Description of Artificial Sequence: Synthetic oligonucleotide
agggacagcauggccuugg

SEQ ID NO: 1697341 - RNA, 19 nt, Artificial Sequence
  Description of Artificial Sequence: Synthetic oligonucleotide
agagggacagcauggccuu

SEQ ID NO: 1697342 - RNA, 19 nt, Artificial Sequence
  Description of Artificial Sequence: Synthetic oligonucleotide
ggguggaggggucugggcc

SEQ ID NO: 1697343 - RNA, 19 nt, Artificial Sequence
  Description of Artificial Sequence: Synthetic oligonucleotide
cuagacugauccccaggca

SEQ ID NO: 1697344 - RNA, 19 nt, Artificial Sequence
  Description of Artificial Sequence: Synthetic oligonucleotide
ggaggaggcugcccugugg

SEQ ID NO: 1697345 - RNA, 19 nt, Artificial Sequence
  Description of Artificial Sequence: Synthetic oligonucleotide
ugcucaagagagggacagc

SEQ ID NO: 1697346 - RNA, 19 nt, Artificial Sequence
  Description of Artificial Sequence: Synthetic oligonucleotide
gacuggcuggggaggaggc

SEQ ID NO: 1697347 - RNA, 19 nt, Artificial Sequence
  Description of Artificial Sequence: Synthetic oligonucleotide
gaggggucugggccuggag

SEQ ID NO: 1697348 - RNA, 19 nt, Artificial Sequence
  Description of Artificial Sequence: Synthetic oligonucleotide
uggggaggaggcugcccug

SEQ ID NO: 1697349 - RNA, 19 nt, Artificial Sequence
  Description of Artificial Sequence: Synthetic oligonucleotide
uccccagaguggagcuccc

SEQ ID NO: 1697350 - RNA, 19 nt, Artificial Sequence
  Description of Artificial Sequence: Synthetic oligonucleotide
gggaacaaugggaacaaau

SEQ ID NO: 1697351 - RNA, 19 nt, Artificial Sequence
  Description of Artificial Sequence: Synthetic oligonucleotide
ggucugggccuggaguuug

SEQ ID NO: 1697352 - RNA, 19 nt, Artificial Sequence
  Description of Artificial Sequence: Synthetic oligonucleotide
cuggggaggaggcugcccu

SEQ ID NO: 1697353 - RNA, 19 nt, Artificial Sequence
  Description of Artificial Sequence: Synthetic oligonucleotide
cucaagagagggacagcau

SEQ ID NO: 1697354 - RNA, 19 nt, Artificial Sequence
  Description of Artificial Sequence: Synthetic oligonucleotide
uggaggggucugggccugg

SEQ ID NO: 1697355 - RNA, 19 nt, Artificial Sequence
  Description of Artificial Sequence: Synthetic oligonucleotide
cugggccuggaguuugucu

SEQ ID NO: 1697356 - RNA, 19 nt, Artificial Sequence
  Description of Artificial Sequence: Synthetic oligonucleotide
guggaggggucugggccug

SEQ ID NO: 1697357 - RNA, 19 nt, Artificial Sequence
  Description of Artificial Sequence: Synthetic oligonucleotide
gggaggaggcugcccugug

SEQ ID NO: 1697358 - RNA, 19 nt, Artificial Sequence
  Description of Artificial Sequence: Synthetic oligonucleotide
ggggucugggccuggaguu

SEQ ID NO: 1697359 - RNA, 19 nt, Artificial Sequence
  Description of Artificial Sequence: Synthetic oligonucleotide
ggaggggucugggccugga

SEQ ID NO: 1697360 - RNA, 19 nt, Artificial Sequence
  Description of Artificial Sequence: Synthetic oligonucleotide
gucugggccuggaguuugu

SEQ ID NO: 1697361 - RNA, 19 nt, Artificial Sequence
  Description of Artificial Sequence: Synthetic oligonucleotide
ggggaggaggcugcccugu

SEQ ID NO: 1697362 - RNA, 19 nt, Artificial Sequence
  Description of Artificial Sequence: Synthetic oligonucleotide
ccuccccagaguggagcuc

SEQ ID NO: 1697363 - RNA, 19 nt, Artificial Sequence
  Description of Artificial Sequence: Synthetic oligonucleotide
cccuccccagaguggagcu

SEQ ID NO: 1697364 - RNA, 19 nt, Artificial Sequence
  Description of Artificial Sequence: Synthetic oligonucleotide
gggucugggccuggaguuu

SEQ ID NO: 1697365 - RNA, 19 nt, Artificial Sequence
  Description of Artificial Sequence: Synthetic oligonucleotide
ucuaacuuaacuaaguucg

SEQ ID NO: 1697366 - RNA, 19 nt, Artificial Sequence
  Description of Artificial Sequence: Synthetic oligonucleotide
aguucaugaagauauagcc

SEQ ID NO: 1697367 - RNA, 19 nt, Artificial Sequence
  Description of Artificial Sequence: Synthetic oligonucleotide
aauauagacaucuuuggcu

SEQ ID NO: 1697368 - RNA, 19 nt, Artificial Sequence
  Description of Artificial Sequence: Synthetic oligonucleotide
uguaacauaccacagagac

SEQ ID NO: 1697369 - RNA, 19 nt, Artificial Sequence
  Description of Artificial Sequence: Synthetic oligonucleotide
uauuggauaaauaacauuu

SEQ ID NO: 1697370 - RNA, 19 nt, Artificial Sequence
  Description of Artificial Sequence: Synthetic oligonucleotide
ucuccaaggagauugauag

SEQ ID NO: 1697371 - RNA, 19 nt, Artificial Sequence
  Description of Artificial Sequence: Synthetic oligonucleotide
uuuuacacugaacacaaga

SEQ ID NO: 1697372 - RNA, 19 nt, Artificial Sequence
  Description of Artificial Sequence: Synthetic oligonucleotide
ugaagcacuaguuacagcu

SEQ ID NO: 1697373 - RNA, 19 nt, Artificial Sequence
  Description of Artificial Sequence: Synthetic oligonucleotide
gaugggaaaacccagacuc

SEQ ID NO: 1697374 - RNA, 19 nt, Artificial Sequence
  Description of Artificial Sequence: Synthetic oligonucleotide
gaagacgccauuucuaacg

SEQ ID NO: 1697375 - RNA, 19 nt, Artificial Sequence
  Description of Artificial Sequence: Synthetic oligonucleotide
aguucuuucaguuuuaaaa

SEQ ID NO: 1697376 - RNA, 19 nt, Artificial Sequence
  Description of Artificial Sequence: Synthetic oligonucleotide
acaagaaacauuuauugga

SEQ ID NO: 1697377 - RNA, 19 nt, Artificial Sequence
  Description of Artificial Sequence: Synthetic oligonucleotide
aguguaacauaccacagag

SEQ ID NO: 1697378 - RNA, 19 nt, Artificial Sequence
  Description of Artificial Sequence: Synthetic oligonucleotide
ugaguaccaagcuucaugg

SEQ ID NO: 1697379 - RNA, 19 nt, Artificial Sequence
  Description of Artificial Sequence: Synthetic oligonucleotide
aauacggcccaauuugggg

SEQ ID NO: 1697380 - RNA, 19 nt, Artificial Sequence
  Description of Artificial Sequence: Synthetic oligonucleotide
ucuauuuaacagaaggaca

SEQ ID NO: 1697381 - RNA, 19 nt, Artificial Sequence
  Description of Artificial Sequence: Synthetic oligonucleotide
uuaaauagauucucuaacu

SEQ ID NO: 1697382 - RNA, 19 nt, Artificial Sequence
  Description of Artificial Sequence: Synthetic oligonucleotide
aaagcacugucucaauuuc

SEQ ID NO: 1697383 - RNA, 19 nt, Artificial Sequence
  Description of Artificial Sequence: Synthetic oligonucleotide
aaguuagcugccuggauuc

SEQ ID NO: 1697384 - RNA, 19 nt, Artificial Sequence
  Description of Artificial Sequence: Synthetic oligonucleotide
ucucggaucagacggaagg

SEQ ID NO: 1697385 - RNA, 19 nt, Artificial Sequence
  Description of Artificial Sequence: Synthetic oligonucleotide
ugauguacaacucugccaa

SEQ ID NO: 1697386 - RNA, 19 nt, Artificial Sequence
  Description of Artificial Sequence: Synthetic oligonucleotide
ugaagauauagccuggagu

SEQ ID NO: 1697387 - RNA, 19 nt, Artificial Sequence
  Description of Artificial Sequence: Synthetic oligonucleotide
ucggaaaaguguaacauac

SEQ ID NO: 1697388 - RNA, 19 nt, Artificial Sequence
  Description of Artificial Sequence: Synthetic oligonucleotide
ugacaagugacauuucgag

SEQ ID NO: 1697389 - RNA, 19 nt, Artificial Sequence
  Description of Artificial Sequence: Synthetic oligonucleotide
aaaccuaccaccgaggcga

SEQ ID NO: 1697390 - RNA, 19 nt, Artificial Sequence
  Description of Artificial Sequence: Synthetic oligonucleotide
uugacugaaagucagugau

SEQ ID NO: 1697391 - RNA, 19 nt, Artificial Sequence
  Description of Artificial Sequence: Synthetic oligonucleotide
agauugauagcagacacag

SEQ ID NO: 1697392 - RNA, 19 nt, Artificial Sequence
  Description of Artificial Sequence: Synthetic oligonucleotide
ggcucuauuuaacagaagg

SEQ ID NO: 1697393 - RNA, 19 nt, Artificial Sequence
  Description of Artificial Sequence: Synthetic oligonucleotide
agaaacauuuauuggauaa

SEQ ID NO: 1697394 - RNA, 19 nt, Artificial Sequence
  Description of Artificial Sequence: Synthetic oligonucleotide
auagccuggaguuucuuuc

SEQ ID NO: 1697395 - RNA, 19 nt, Artificial Sequence
  Description of Artificial Sequence: Synthetic oligonucleotide
aauagauucucuaacuuaa

SEQ ID NO: 1697396 - RNA, 19 nt, Artificial Sequence
  Description of Artificial Sequence: Synthetic oligonucleotide
uuuggcucuauuuaacaga

SEQ ID NO: 1697397 - RNA, 19 nt, Artificial Sequence
  Description of Artificial Sequence: Synthetic oligonucleotide
auuucuaacgcacgcuccg

SEQ ID NO: 1697398 - RNA, 19 nt, Artificial Sequence
  Description of Artificial Sequence: Synthetic oligonucleotide
aacuuaacuaaguucggaa

SEQ ID NO: 1697399 - RNA, 19 nt, Artificial Sequence
  Description of Artificial Sequence: Synthetic oligonucleotide
gauucucuaacuuaacuaa

SEQ ID NO: 1697400 - RNA, 19 nt, Artificial Sequence
  Description of Artificial Sequence: Synthetic oligonucleotide
aacucugccaaaccuacca

SEQ ID NO: 1697401 - RNA, 19 nt, Artificial Sequence
  Description of Artificial Sequence: Synthetic oligonucleotide
uuaacuaaguucggaaaag

SEQ ID NO: 1697402 - RNA, 19 nt, Artificial Sequence
  Description of Artificial Sequence: Synthetic oligonucleotide
ucaagugccuuaaauagau

SEQ ID NO: 1697403 - RNA, 19 nt, Artificial Sequence
  Description of Artificial Sequence: Synthetic oligonucleotide
aaaagcacugucucaauuu

SEQ ID NO: 1697404 - RNA, 19 nt, Artificial Sequence
  Description of Artificial Sequence: Synthetic oligonucleotide
ucuuugggccaguugaagg

SEQ ID NO: 1697405 - RNA, 19 nt, Artificial Sequence
  Description of Artificial Sequence: Synthetic oligonucleotide
auugcucucaccaugaugu

SEQ ID NO: 1697406 - RNA, 19 nt, Artificial Sequence
  Description of Artificial Sequence: Synthetic oligonucleotide
ucgcucaccaccaagcaag

SEQ ID NO: 1697407 - RNA, 19 nt, Artificial Sequence
  Description of Artificial Sequence: Synthetic oligonucleotide
uccuguaucaaucuaguuu

SEQ ID NO: 1697408 - RNA, 19 nt, Artificial Sequence
  Description of Artificial Sequence: Synthetic oligonucleotide
ugugcgauggauucagaag

SEQ ID NO: 1697409 - RNA, 19 nt, Artificial Sequence
  Description of Artificial Sequence: Synthetic oligonucleotide
caguucucggaucagacgg

SEQ ID NO: 1697410 - RNA, 19 nt, Artificial Sequence
  Description of Artificial Sequence: Synthetic oligonucleotide
acuucugaugggaaaaccc

SEQ ID NO: 1697411 - RNA, 19 nt, Artificial Sequence
  Description of Artificial Sequence: Synthetic oligonucleotide
aaaguuagcugccuggauu

SEQ ID NO: 1697412 - RNA, 19 nt, Artificial Sequence
  Description of Artificial Sequence: Synthetic oligonucleotide
agaaggacacagcugauca

SEQ ID NO: 1697413 - RNA, 19 nt, Artificial Sequence
  Description of Artificial Sequence: Synthetic oligonucleotide
agagcuuucacugaucuca

SEQ ID NO: 1697414 - RNA, 19 nt, Artificial Sequence
  Description of Artificial Sequence: Synthetic oligonucleotide
agaaguagcuacugaguuc

SEQ ID NO: 1697415 - RNA, 19 nt, Artificial Sequence
  Description of Artificial Sequence: Synthetic oligonucleotide
uaaauagauucucuaacuu

SEQ ID NO: 1697416 - RNA, 19 nt, Artificial Sequence
  Description of Artificial Sequence: Synthetic oligonucleotide
aaguguaacauaccacaga

SEQ ID NO: 1697417 - RNA, 19 nt, Artificial Sequence
  Description of Artificial Sequence: Synthetic oligonucleotide
aaguucggaaaaguguaac

SEQ ID NO: 1697418 - RNA, 19 nt, Artificial Sequence
  Description of Artificial Sequence: Synthetic oligonucleotide
uagacgggcaacuagcucu

SEQ ID NO: 1697419 - RNA, 19 nt, Artificial Sequence
  Description of Artificial Sequence: Synthetic oligonucleotide
uucauggguugacugaaag

SEQ ID NO: 1697420 - RNA, 19 nt, Artificial Sequence
  Description of Artificial Sequence: Synthetic oligonucleotide
uuacacugaacacaagaaa

SEQ ID NO: 1697421 - RNA, 19 nt, Artificial Sequence
  Description of Artificial Sequence: Synthetic oligonucleotide
ugugaagauauacuggcuu

SEQ ID NO: 1697422 - RNA, 19 nt, Artificial Sequence
  Description of Artificial Sequence: Synthetic oligonucleotide
caaagcgcgaaccagucgc

SEQ ID NO: 1697423 - RNA, 19 nt, Artificial Sequence
  Description of Artificial Sequence: Synthetic oligonucleotide
aguaccaagcuucaugggu

SEQ ID NO: 1697424 - RNA, 19 nt, Artificial Sequence
  Description of Artificial Sequence: Synthetic oligonucleotide
gauucuaguuccaccaucc

SEQ ID NO: 1697425 - RNA, 19 nt, Artificial Sequence
  Description of Artificial Sequence: Synthetic oligonucleotide
uaucuuaaucuucucuaga

SEQ ID NO: 1697426 - RNA, 19 nt, Artificial Sequence
  Description of Artificial Sequence: Synthetic oligonucleotide
gacauuucgagugauccgc

SEQ ID NO: 1697427 - RNA, 19 nt, Artificial Sequence
  Description of Artificial Sequence: Synthetic oligonucleotide
uggguugacugaaagucag

SEQ ID NO: 1697428 - RNA, 19 nt, Artificial Sequence
  Description of Artificial Sequence: Synthetic oligonucleotide
uggauucagaaguagcuac

SEQ ID NO: 1697429 - RNA, 19 nt, Artificial Sequence
  Description of Artificial Sequence: Synthetic oligonucleotide
guaucuuaaucuucucuag

SEQ ID NO: 1697430 - RNA, 19 nt, Artificial Sequence
  Description of Artificial Sequence: Synthetic oligonucleotide
aaaggcagcugccacugug

SEQ ID NO: 1697431 - RNA, 19 nt, Artificial Sequence
  Description of Artificial Sequence: Synthetic oligonucleotide
ugacauuucgagugauccg

SEQ ID NO: 1697432 - RNA, 19 nt, Artificial Sequence
  Description of Artificial Sequence: Synthetic oligonucleotide
cuaacuuaacuaaguucgg

SEQ ID NO: 1697433 - RNA, 19 nt, Artificial Sequence
  Description of Artificial Sequence: Synthetic oligonucleotide
agauucucuaacuuaacua

SEQ ID NO: 1697434 - RNA, 19 nt, Artificial Sequence
  Description of Artificial Sequence: Synthetic oligonucleotide
aggucuggauucuacuuac

SEQ ID NO: 1697435 - RNA, 19 nt, Artificial Sequence
  Description of Artificial Sequence: Synthetic oligonucleotide
uucaagugccuuaaauaga

SEQ ID NO: 1697436 - RNA, 19 nt, Artificial Sequence
  Description of Artificial Sequence: Synthetic oligonucleotide
aagcacuaguuacagcuca

SEQ ID NO: 1697437 - RNA, 19 nt, Artificial Sequence
  Description of Artificial Sequence: Synthetic oligonucleotide
cauggguugacugaaaguc

SEQ ID NO: 1697438 - RNA, 19 nt, Artificial Sequence
  Description of Artificial Sequence: Synthetic oligonucleotide
cucuaacuuaacuaaguuc

SEQ ID NO: 1697439 - RNA, 19 nt, Artificial Sequence
  Description of Artificial Sequence: Synthetic oligonucleotide
acuaguuacagcucaccca

SEQ ID NO: 1697440 - RNA, 19 nt, Artificial Sequence
  Description of Artificial Sequence: Synthetic oligonucleotide
guggcguuaucucugcucg

SEQ ID NO: 1697441 - RNA, 19 nt, Artificial Sequence
  Description of Artificial Sequence: Synthetic oligonucleotide
uuccucuccaaggagauug

SEQ ID NO: 1697442 - RNA, 19 nt, Artificial Sequence
  Description of Artificial Sequence: Synthetic oligonucleotide
ugcagacaaaggcagcugc

SEQ ID NO: 1697443 - RNA, 19 nt, Artificial Sequence
  Description of Artificial Sequence: Synthetic oligonucleotide
acuaaguucggaaaagugu

SEQ ID NO: 1697444 - RNA, 19 nt, Artificial Sequence
  Description of Artificial Sequence: Synthetic oligonucleotide
gaggcgacgaucaaugcag

SEQ ID NO: 1697445 - RNA, 19 nt, Artificial Sequence
  Description of Artificial Sequence: Synthetic oligonucleotide
ugaugcaguucucggauca

SEQ ID NO: 1697446 - RNA, 19 nt, Artificial Sequence
  Description of Artificial Sequence: Synthetic oligonucleotide
aacuaaguucggaaaagug

SEQ ID NO: 1697447 - RNA, 19 nt, Artificial Sequence
  Description of Artificial Sequence: Synthetic oligonucleotide
agacggaagggaaucaggc

SEQ ID NO: 1697448 - RNA, 19 nt, Artificial Sequence
  Description of Artificial Sequence: Synthetic oligonucleotide
uuucacugaucucacuugu

SEQ ID NO: 1697449 - RNA, 19 nt, Artificial Sequence
  Description of Artificial Sequence: Synthetic oligonucleotide
ucucuagacgggcaacuag

SEQ ID NO: 1697450 - RNA, 19 nt, Artificial Sequence
  Description of Artificial Sequence: Synthetic oligonucleotide
uugacggugaagcacuagu

SEQ ID NO: 1697451 - RNA, 19 nt, Artificial Sequence
  Description of Artificial Sequence: Synthetic oligonucleotide
gaguucaugaagauauagc

SEQ ID NO: 1697452 - RNA, 19 nt, Artificial Sequence
  Description of Artificial Sequence: Synthetic oligonucleotide
gaaaaguguaacauaccac

SEQ ID NO: 1697453 - RNA, 19 nt, Artificial Sequence
  Description of Artificial Sequence: Synthetic oligonucleotide
gacggaagggaaucaggcg

SEQ ID NO: 1697454 - RNA, 19 nt, Artificial Sequence
  Description of Artificial Sequence: Synthetic oligonucleotide
cucuagacgggcaacuagc

SEQ ID NO: 1697455 - RNA, 19 nt, Artificial Sequence
  Description of Artificial Sequence: Synthetic oligonucleotide
uuguauuccucauuggcua

SEQ ID NO: 1697456 - RNA, 19 nt, Artificial Sequence
  Description of Artificial Sequence: Synthetic oligonucleotide
ggaaaaguguaacauacca

SEQ ID NO: 1697457 - RNA, 19 nt, Artificial Sequence
  Description of Artificial Sequence: Synthetic oligonucleotide
uguuuugcuuucuggaaaa

SEQ ID NO: 1697458 - RNA, 19 nt, Artificial Sequence
  Description of Artificial Sequence: Synthetic oligonucleotide
acuuaacuaaguucggaaa

SEQ ID NO: 1697459 - RNA, 19 nt, Artificial Sequence
  Description of Artificial Sequence: Synthetic oligonucleotide
ggcaauacggcccaauuug

SEQ ID NO: 1697460 - RNA, 19 nt, Artificial Sequence
  Description of Artificial Sequence: Synthetic oligonucleotide
cuguuguuuugcuuucugg

SEQ ID NO: 1697461 - RNA, 19 nt, Artificial Sequence
  Description of Artificial Sequence: Synthetic oligonucleotide
agaugguaaugaccagagc

SEQ ID NO: 1697462 - RNA, 19 nt, Artificial Sequence
  Description of Artificial Sequence: Synthetic oligonucleotide
uguauuccucauuggcuag

SEQ ID NO: 1697463 - RNA, 19 nt, Artificial Sequence
  Description of Artificial Sequence: Synthetic oligonucleotide
guugaaggcaauacggccc

SEQ ID NO: 1697464 - RNA, 19 nt, Artificial Sequence
  Description of Artificial Sequence: Synthetic oligonucleotide
acuagcucuggauuccgag

SEQ ID NO: 1697465 - RNA, 19 nt, Artificial Sequence
  Description of Artificial Sequence: Synthetic oligonucleotide
cugaguaccaagcuucaug

SEQ ID NO: 1697466 - RNA, 19 nt, Artificial Sequence
  Description of Artificial Sequence: Synthetic oligonucleotide
aguucggaaaaguguaaca

SEQ ID NO: 1697467 - RNA, 19 nt, Artificial Sequence
  Description of Artificial Sequence: Synthetic oligonucleotide
gauaccauuuccuuuucua

SEQ ID NO: 1697468 - RNA, 19 nt, Artificial Sequence
  Description of Artificial Sequence: Synthetic oligonucleotide
caguugaaggcaauacggc

SEQ ID NO: 1697469 - RNA, 19 nt, Artificial Sequence
  Description of Artificial Sequence: Synthetic oligonucleotide
gaaaacccagacucagcag

SEQ ID NO: 1697470 - RNA, 19 nt, Artificial Sequence
  Description of Artificial Sequence: Synthetic oligonucleotide
agaauggaccccagaaggc

SEQ ID NO: 1697471 - RNA, 19 nt, Artificial Sequence
  Description of Artificial Sequence: Synthetic oligonucleotide
cuuucacugaucucacuug

SEQ ID NO: 1697472 - RNA, 19 nt, Artificial Sequence
  Description of Artificial Sequence: Synthetic oligonucleotide
uucacugccuuugaggagu

SEQ ID NO: 1697473 - RNA, 19 nt, Artificial Sequence
  Description of Artificial Sequence: Synthetic oligonucleotide
ugcgcauccugacaaguga

SEQ ID NO: 1697474 - RNA, 19 nt, Artificial Sequence
  Description of Artificial Sequence: Synthetic oligonucleotide
cuaaguucggaaaagugua

SEQ ID NO: 1697475 - RNA, 19 nt, Artificial Sequence
  Description of Artificial Sequence: Synthetic oligonucleotide
aaggucuggauucuacuua

SEQ ID NO: 1697476 - RNA, 19 nt, Artificial Sequence
  Description of Artificial Sequence: Synthetic oligonucleotide
uuucgagugauccgcuugu

SEQ ID NO: 1697477 - RNA, 19 nt, Artificial Sequence
  Description of Artificial Sequence: Synthetic oligonucleotide
aagggccugauaccauuuc

SEQ ID NO: 1697478 - RNA, 19 nt, Artificial Sequence
  Description of Artificial Sequence: Synthetic oligonucleotide
uuggcuagcuguaucuuaa

SEQ ID NO: 1697479 - RNA, 19 nt, Artificial Sequence
  Description of Artificial Sequence: Synthetic oligonucleotide
agugauccgcuuguauucc

SEQ ID NO: 1697480 - RNA, 19 nt, Artificial Sequence
  Description of Artificial Sequence: Synthetic oligonucleotide
gauucagaaguagcuacug

SEQ ID NO: 1697481 - RNA, 19 nt, Artificial Sequence
  Description of Artificial Sequence: Synthetic oligonucleotide
aaaagggccugauaccauu

SEQ ID NO: 1697482 - RNA, 19 nt, Artificial Sequence
  Description of Artificial Sequence: Synthetic oligonucleotide
aauucaccuuccauugcuc

SEQ ID NO: 1697483 - RNA, 19 nt, Artificial Sequence
  Description of Artificial Sequence: Synthetic oligonucleotide
ugacugaaagucagugaug

SEQ ID NO: 1697484 - RNA, 19 nt, Artificial Sequence
  Description of Artificial Sequence: Synthetic oligonucleotide
ugccacugugacaaugaag

SEQ ID NO: 1697485 - RNA, 19 nt, Artificial Sequence
  Description of Artificial Sequence: Synthetic oligonucleotide
cacuaguuacagcucaccc

SEQ ID NO: 1697486 - RNA, 19 nt, Artificial Sequence
  Description of Artificial Sequence: Synthetic oligonucleotide
gagugauccgcuuguauuc

SEQ ID NO: 1697487 - RNA, 19 nt, Artificial Sequence
  Description of Artificial Sequence: Synthetic oligonucleotide
cuuaacuaaguucggaaaa

SEQ ID NO: 1697488 - RNA, 19 nt, Artificial Sequence
  Description of Artificial Sequence: Synthetic oligonucleotide
cugccuggauucuaguucc

SEQ ID NO: 1697489 - RNA, 19 nt, Artificial Sequence
  Description of Artificial Sequence: Synthetic oligonucleotide
ugaugggaaaacccagacu

SEQ ID NO: 1697490 - RNA, 19 nt, Artificial Sequence
  Description of Artificial Sequence: Synthetic oligonucleotide
caauacggcccaauuuggg

SEQ ID NO: 1697491 - RNA, 19 nt, Artificial Sequence
  Description of Artificial Sequence: Synthetic oligonucleotide
uacaacucugccaaaccua

SEQ ID NO: 1697492 - RNA, 19 nt, Artificial Sequence
  Description of Artificial Sequence: Synthetic oligonucleotide
uaacuuaacuaaguucgga

SEQ ID NO: 1697493 - RNA, 19 nt, Artificial Sequence
  Description of Artificial Sequence: Synthetic oligonucleotide
ugcaguucucggaucagac

SEQ ID NO: 1697494 - RNA, 19 nt, Artificial Sequence
  Description of Artificial Sequence: Synthetic oligonucleotide
aagucagugaugggcaaug

SEQ ID NO: 1697495 - RNA, 19 nt, Artificial Sequence
  Description of Artificial Sequence: Synthetic oligonucleotide
ucuagacgggcaacuagcu

SEQ ID NO: 1697496 - RNA, 19 nt, Artificial Sequence
  Description of Artificial Sequence: Synthetic oligonucleotide
ucuggaagguagauuucac

SEQ ID NO: 1697497 - RNA, 19 nt, Artificial Sequence
  Description of Artificial Sequence: Synthetic oligonucleotide
uucggaaaaguguaacaua

SEQ ID NO: 1697498 - RNA, 19 nt, Artificial Sequence
  Description of Artificial Sequence: Synthetic oligonucleotide
uauuuaacagaaggacaca

SEQ ID NO: 1697499 - RNA, 19 nt, Artificial Sequence
  Description of Artificial Sequence: Synthetic oligonucleotide
aucucacuuguuuucccag

SEQ ID NO: 1697500 - RNA, 19 nt, Artificial Sequence
  Description of Artificial Sequence: Synthetic oligonucleotide
cacaaccucuggaagguag

SEQ ID NO: 1697501 - RNA, 19 nt, Artificial Sequence
  Description of Artificial Sequence: Synthetic oligonucleotide
cuaguuacagcucacccaa

SEQ ID NO: 1697502 - RNA, 19 nt, Artificial Sequence
  Description of Artificial Sequence: Synthetic oligonucleotide
ucauggguugacugaaagu

SEQ ID NO: 1697503 - RNA, 19 nt, Artificial Sequence
  Description of Artificial Sequence: Synthetic oligonucleotide
gaagggaaucaggcgaagg

SEQ ID NO: 1697504 - RNA, 19 nt, Artificial Sequence
  Description of Artificial Sequence: Synthetic oligonucleotide
acucugccaaaccuaccac

SEQ ID NO: 1697505 - RNA, 19 nt, Artificial Sequence
  Description of Artificial Sequence: Synthetic oligonucleotide
cuggauucuaguuccacca

SEQ ID NO: 1697506 - RNA, 19 nt, Artificial Sequence
  Description of Artificial Sequence: Synthetic oligonucleotide
uaacuaaguucggaaaagu

SEQ ID NO: 1697507 - RNA, 19 nt, Artificial Sequence
  Description of Artificial Sequence: Synthetic oligonucleotide
uaaguucggaaaaguguaa

SEQ ID NO: 1697508 - RNA, 19 nt, Artificial Sequence
  Description of Artificial Sequence: Synthetic oligonucleotide
uucacaaccucuggaaggu

SEQ ID NO: 1697509 - RNA, 19 nt, Artificial Sequence
  Description of Artificial Sequence: Synthetic oligonucleotide
auucagaaguagcuacuga

SEQ ID NO: 1697510 - RNA, 19 nt, Artificial Sequence
  Description of Artificial Sequence: Synthetic oligonucleotide
ugaucucacuuguuuuccc

SEQ ID NO: 1697511 - RNA, 19 nt, Artificial Sequence
  Description of Artificial Sequence: Synthetic oligonucleotide
ucugacuaacuggagcuga

SEQ ID NO: 1697512 - RNA, 19 nt, Artificial Sequence
  Description of Artificial Sequence: Synthetic oligonucleotide
cugaacacaagaaacauuu

SEQ ID NO: 1697513 - RNA, 19 nt, Artificial Sequence
  Description of Artificial Sequence: Synthetic oligonucleotide
cagacggaagggaaucagg

SEQ ID NO: 1697514 - RNA, 19 nt, Artificial Sequence
  Description of Artificial Sequence: Synthetic oligonucleotide
gacgccauuucuaacgcac

SEQ ID NO: 1697515 - RNA, 19 nt, Artificial Sequence
  Description of Artificial Sequence: Synthetic oligonucleotide
gaguaccaagcuucauggg

SEQ ID NO: 1697516 - RNA, 19 nt, Artificial Sequence
  Description of Artificial Sequence: Synthetic oligonucleotide
aacccagacucagcagacc

SEQ ID NO: 1697517 - RNA, 19 nt, Artificial Sequence
  Description of Artificial Sequence: Synthetic oligonucleotide
caaaccuaccaccgaggcg

SEQ ID NO: 1697518 - RNA, 19 nt, Artificial Sequence
  Description of Artificial Sequence: Synthetic oligonucleotide
aggaagacgccauuucuaa

SEQ ID NO: 1697519 - RNA, 19 nt, Artificial Sequence
  Description of Artificial Sequence: Synthetic oligonucleotide
aaggcaauacggcccaauu

SEQ ID NO: 1697520 - RNA, 19 nt, Artificial Sequence
  Description of Artificial Sequence: Synthetic oligonucleotide
gacuuugacggugaagcac

SEQ ID NO: 1697521 - RNA, 19 nt, Artificial Sequence
  Description of Artificial Sequence: Synthetic oligonucleotide
uuucuaacgcacgcuccgg

SEQ ID NO: 1697522 - RNA, 19 nt, Artificial Sequence
  Description of Artificial Sequence: Synthetic oligonucleotide
gaucucacuuguuuuccca

SEQ ID NO: 1697523 - RNA, 19 nt, Artificial Sequence
  Description of Artificial Sequence: Synthetic oligonucleotide
guuacagcucacccaauuc

SEQ ID NO: 1697524 - RNA, 19 nt, Artificial Sequence
  Description of Artificial Sequence: Synthetic oligonucleotide
ucagacggaagggaaucag

SEQ ID NO: 1697525 - RNA, 19 nt, Artificial Sequence
  Description of Artificial Sequence: Synthetic oligonucleotide
acuuacuucugaugggaaa

SEQ ID NO: 1697526 - RNA, 19 nt, Artificial Sequence
  Description of Artificial Sequence: Synthetic oligonucleotide
cagucgcucaccaccaagc

SEQ ID NO: 1697527 - RNA, 19 nt, Artificial Sequence
  Description of Artificial Sequence: Synthetic oligonucleotide
guugacugaaagucaguga

SEQ ID NO: 1697528 - RNA, 19 nt, Artificial Sequence
  Description of Artificial Sequence: Synthetic oligonucleotide
uacuucugaugggaaaacc

SEQ ID NO: 1697529 - RNA, 19 nt, Artificial Sequence
  Description of Artificial Sequence: Synthetic oligonucleotide
uggauucuacuuacuucug

SEQ ID NO: 1697530 - RNA, 19 nt, Artificial Sequence
  Description of Artificial Sequence: Synthetic oligonucleotide
uuucuuugggccaguugaa

SEQ ID NO: 1697531 - RNA, 19 nt, Artificial Sequence
  Description of Artificial Sequence: Synthetic oligonucleotide
aacuugaccugguccucug

SEQ ID NO: 1697532 - RNA, 19 nt, Artificial Sequence
  Description of Artificial Sequence: Synthetic oligonucleotide
uauacuggcuucccaggua

SEQ ID NO: 1697533 - RNA, 19 nt, Artificial Sequence
  Description of Artificial Sequence: Synthetic oligonucleotide
ucaccuuccauugcucuca

SEQ ID NO: 1697534 - RNA, 19 nt, Artificial Sequence
  Description of Artificial Sequence: Synthetic oligonucleotide
agagacaacaggacaauau

SEQ ID NO: 1697535 - RNA, 19 nt, Artificial Sequence
  Description of Artificial Sequence: Synthetic oligonucleotide
acagcucacccaauucacc

SEQ ID NO: 1697536 - RNA, 19 nt, Artificial Sequence
  Description of Artificial Sequence: Synthetic oligonucleotide
ccugacaagugacauuucg

SEQ ID NO: 1697537 - RNA, 19 nt, Artificial Sequence
  Description of Artificial Sequence: Synthetic oligonucleotide
auacuggcuucccagguaa

SEQ ID NO: 1697538 - RNA, 19 nt, Artificial Sequence
  Description of Artificial Sequence: Synthetic oligonucleotide
ugaacacaagaaacauuua

SEQ ID NO: 1697539 - RNA, 19 nt, Artificial Sequence
  Description of Artificial Sequence: Synthetic oligonucleotide
ucucgaggccauuucugug

SEQ ID NO: 1697540 - RNA, 19 nt, Artificial Sequence
  Description of Artificial Sequence: Synthetic oligonucleotide
uaacgcacgcuccggucag

SEQ ID NO: 1697541 - RNA, 19 nt, Artificial Sequence
  Description of Artificial Sequence: Synthetic oligonucleotide
gaucagacggaagggaauc

SEQ ID NO: 1697542 - RNA, 19 nt, Artificial Sequence
  Description of Artificial Sequence: Synthetic oligonucleotide
cugaucucacuuguuuucc

SEQ ID NO: 1697543 - RNA, 19 nt, Artificial Sequence
  Description of Artificial Sequence: Synthetic oligonucleotide
gacuaacuggagcugagua

SEQ ID NO: 1697544 - RNA, 19 nt, Artificial Sequence
  Description of Artificial Sequence: Synthetic oligonucleotide
aguuacagcucacccaauu

SEQ ID NO: 1697545 - RNA, 19 nt, Artificial Sequence
  Description of Artificial Sequence: Synthetic oligonucleotide
uaccaagcuucauggguug

SEQ ID NO: 1697546 - RNA, 19 nt, Artificial Sequence
  Description of Artificial Sequence: Synthetic oligonucleotide
agggcccaaagcgcgaacc

SEQ ID NO: 1697547 - RNA, 19 nt, Artificial Sequence
  Description of Artificial Sequence: Synthetic oligonucleotide
cugacaagugacauuucga

SEQ ID NO: 1697548 - RNA, 19 nt, Artificial Sequence
  Description of Artificial Sequence: Synthetic oligonucleotide
uucuaacgcacgcuccggu

SEQ ID NO: 1697549 - RNA, 19 nt, Artificial Sequence
  Description of Artificial Sequence: Synthetic oligonucleotide
guaaugaccagagcuuuca

SEQ ID NO: 1697550 - RNA, 19 nt, Artificial Sequence
  Description of Artificial Sequence: Synthetic oligonucleotide
cugacuaacuggagcugag

SEQ ID NO: 1697551 - RNA, 19 nt, Artificial Sequence
  Description of Artificial Sequence: Synthetic oligonucleotide
ccauccuguaucaaucuag

SEQ ID NO: 1697552 - RNA, 19 nt, Artificial Sequence
  Description of Artificial Sequence: Synthetic oligonucleotide
uauagccuggaguuucuuu

SEQ ID NO: 1697553 - RNA, 19 nt, Artificial Sequence
  Description of Artificial Sequence: Synthetic oligonucleotide
augugcgauggauucagaa

SEQ ID NO: 1697554 - RNA, 19 nt, Artificial Sequence
  Description of Artificial Sequence: Synthetic oligonucleotide
gguugacugaaagucagug

SEQ ID NO: 1697555 - RNA, 19 nt, Artificial Sequence
  Description of Artificial Sequence: Synthetic oligonucleotide
cuuacuucugaugggaaaa

SEQ ID NO: 1697556 - RNA, 19 nt, Artificial Sequence
  Description of Artificial Sequence: Synthetic oligonucleotide
cagccagcacucucgaggc

SEQ ID NO: 1697557 - RNA, 19 nt, Artificial Sequence
  Description of Artificial Sequence: Synthetic oligonucleotide
ugacggugaagcacuaguu

SEQ ID NO: 1697558 - RNA, 19 nt, Artificial Sequence
  Description of Artificial Sequence: Synthetic oligonucleotide
uuugacggugaagcacuag

SEQ ID NO: 1697559 - RNA, 19 nt, Artificial Sequence
  Description of Artificial Sequence: Synthetic oligonucleotide
agcacugucucaauuuccu

SEQ ID NO: 1697560 - RNA, 19 nt, Artificial Sequence
  Description of Artificial Sequence: Synthetic oligonucleotide
ucuaacgcacgcuccgguc

SEQ ID NO: 1697561 - RNA, 19 nt, Artificial Sequence
  Description of Artificial Sequence: Synthetic oligonucleotide
cucggaucagacggaaggg

SEQ ID NO: 1697562 - RNA, 19 nt, Artificial Sequence
  Description of Artificial Sequence: Synthetic oligonucleotide
uccucauuggcuagcugua

SEQ ID NO: 1697563 - RNA, 19 nt, Artificial Sequence
  Description of Artificial Sequence: Synthetic oligonucleotide
ugucucaauuuccucuguu

SEQ ID NO: 1697564 - RNA, 19 nt, Artificial Sequence
  Description of Artificial Sequence: Synthetic oligonucleotide
cucccguuccaguucuccg

SEQ ID NO: 1697565 - RNA, 19 nt, Artificial Sequence
  Description of Artificial Sequence: Synthetic oligonucleotide
uauuccucauuggcuagcu

SEQ ID NO: 1697566 - RNA, 19 nt, Artificial Sequence
  Description of Artificial Sequence: Synthetic oligonucleotide
gauccgcuuguauuccuca

SEQ ID NO: 1697567 - RNA, 19 nt, Artificial Sequence
  Description of Artificial Sequence: Synthetic oligonucleotide
gacaagugacauuucgagu

SEQ ID NO: 1697568 - RNA, 19 nt, Artificial Sequence
  Description of Artificial Sequence: Synthetic oligonucleotide
ucacccaauucaccuucca

SEQ ID NO: 1697569 - RNA, 19 nt, Artificial Sequence
  Description of Artificial Sequence: Synthetic oligonucleotide
agacuuugacggugaagca

SEQ ID NO: 1697570 - RNA, 19 nt, Artificial Sequence
  Description of Artificial Sequence: Synthetic oligonucleotide
ggcaauggagagucugggg

SEQ ID NO: 1697571 - RNA, 19 nt, Artificial Sequence
  Description of Artificial Sequence: Synthetic oligonucleotide
ucggaucagacggaaggga

SEQ ID NO: 1697572 - RNA, 19 nt, Artificial Sequence
  Description of Artificial Sequence: Synthetic oligonucleotide
ucgagugauccgcuuguau

SEQ ID NO: 1697573 - RNA, 19 nt, Artificial Sequence
  Description of Artificial Sequence: Synthetic oligonucleotide
accgaggcgacgaucaaug

SEQ ID NO: 1697574 - RNA, 19 nt, Artificial Sequence
  Description of Artificial Sequence: Synthetic oligonucleotide
uggauucuaguuccaccau

SEQ ID NO: 1697575 - RNA, 19 nt, Artificial Sequence
  Description of Artificial Sequence: Synthetic oligonucleotide
uggcucuauuuaacagaag

SEQ ID NO: 1697576 - RNA, 19 nt, Artificial Sequence
  Description of Artificial Sequence: Synthetic oligonucleotide
ugaggaguucaugaagaua

SEQ ID NO: 1697577 - RNA, 19 nt, Artificial Sequence
  Description of Artificial Sequence: Synthetic oligonucleotide
cucgaggccauuucuguga

SEQ ID NO: 1697578 - RNA, 19 nt, Artificial Sequence
  Description of Artificial Sequence: Synthetic oligonucleotide
gagauugauagcagacaca

SEQ ID NO: 1697579 - RNA, 19 nt, Artificial Sequence
  Description of Artificial Sequence: Synthetic oligonucleotide
cuccaaggagauugauagc

SEQ ID NO: 1697580 - RNA, 19 nt, Artificial Sequence
  Description of Artificial Sequence: Synthetic oligonucleotide
gcaguucucggaucagacg

SEQ ID NO: 1697581 - RNA, 19 nt, Artificial Sequence
  Description of Artificial Sequence: Synthetic oligonucleotide
agucgcucaccaccaagca

SEQ ID NO: 1697582 - RNA, 19 nt, Artificial Sequence
  Description of Artificial Sequence: Synthetic oligonucleotide
agcacuaguuacagcucac

SEQ ID NO: 1697583 - RNA, 19 nt, Artificial Sequence
  Description of Artificial Sequence: Synthetic oligonucleotide
aauggaccccagaaggcaa

SEQ ID NO: 1697584 - RNA, 19 nt, Artificial Sequence
  Description of Artificial Sequence: Synthetic oligonucleotide
uggauuccgaggaggcuuc

SEQ ID NO: 1697585 - RNA, 19 nt, Artificial Sequence
  Description of Artificial Sequence: Synthetic oligonucleotide
agacucagcagaccccaga

SEQ ID NO: 1697586 - RNA, 19 nt, Artificial Sequence
  Description of Artificial Sequence: Synthetic oligonucleotide
acgaucaaugcagccagca

SEQ ID NO: 1697587 - RNA, 19 nt, Artificial Sequence
  Description of Artificial Sequence: Synthetic oligonucleotide
caggacaauauagacaucu

SEQ ID NO: 1697588 - RNA, 19 nt, Artificial Sequence
  Description of Artificial Sequence: Synthetic oligonucleotide
uccgaggaggcuucacaac

SEQ ID NO: 1697589 - RNA, 19 nt, Artificial Sequence
  Description of Artificial Sequence: Synthetic oligonucleotide
ugcucucaccaugauguac

SEQ ID NO: 1697590 - RNA, 19 nt, Artificial Sequence
  Description of Artificial Sequence: Synthetic oligonucleotide
guaacauaccacagagaca

SEQ ID NO: 1697591 - RNA, 19 nt, Artificial Sequence
  Description of Artificial Sequence: Synthetic oligonucleotide
uuccuguuguuuugcuuuc

SEQ ID NO: 1697592 - RNA, 19 nt, Artificial Sequence
  Description of Artificial Sequence: Synthetic oligonucleotide
uccgcuuguauuccucauu

SEQ ID NO: 1697593 - RNA, 19 nt, Artificial Sequence
  Description of Artificial Sequence: Synthetic oligonucleotide
cugguccucugacuaacug

SEQ ID NO: 1697594 - RNA, 19 nt, Artificial Sequence
  Description of Artificial Sequence: Synthetic oligonucleotide
gcugccuggauucuaguuc

SEQ ID NO: 1697595 - RNA, 19 nt, Artificial Sequence
  Description of Artificial Sequence: Synthetic oligonucleotide
cuaacgcacgcuccgguca

SEQ ID NO: 1697596 - RNA, 19 nt, Artificial Sequence
  Description of Artificial Sequence: Synthetic oligonucleotide
gugaagcacuaguuacagc

SEQ ID NO: 1697597 - RNA, 19 nt, Artificial Sequence
  Description of Artificial Sequence: Synthetic oligonucleotide
agcgcgaaccagucgcuca

SEQ ID NO: 1697598 - RNA, 19 nt, Artificial Sequence
  Description of Artificial Sequence: Synthetic oligonucleotide
aagcgcgaaccagucgcuc

SEQ ID NO: 1697599 - RNA, 19 nt, Artificial Sequence
  Description of Artificial Sequence: Synthetic oligonucleotide
cuagacgggcaacuagcuc

SEQ ID NO: 1697600 - RNA, 19 nt, Artificial Sequence
  Description of Artificial Sequence: Synthetic oligonucleotide
ucgaggccauuucugugaa

SEQ ID NO: 1697601 - RNA, 19 nt, Artificial Sequence
  Description of Artificial Sequence: Synthetic oligonucleotide
auggauucagaaguagcua

SEQ ID NO: 1697602 - RNA, 19 nt, Artificial Sequence
  Description of Artificial Sequence: Synthetic oligonucleotide
ugacuaacuggagcugagu

SEQ ID NO: 1697603 - RNA, 19 nt, Artificial Sequence
  Description of Artificial Sequence: Synthetic oligonucleotide
gaggaggcuucacaaccuc

SEQ ID NO: 1697604 - RNA, 19 nt, Artificial Sequence
  Description of Artificial Sequence: Synthetic oligonucleotide
agcagaccccagaauggac

SEQ ID NO: 1697605 - RNA, 19 nt, Artificial Sequence
  Description of Artificial Sequence: Synthetic oligonucleotide
gcaauacggcccaauuugg

SEQ ID NO: 1697606 - RNA, 19 nt, Artificial Sequence
  Description of Artificial Sequence: Synthetic oligonucleotide
ggauucuacuuacuucuga

SEQ ID NO: 1697607 - RNA, 19 nt, Artificial Sequence
  Description of Artificial Sequence: Synthetic oligonucleotide
auggguugacugaaaguca

SEQ ID NO: 1697608 - RNA, 19 nt, Artificial Sequence
  Description of Artificial Sequence: Synthetic oligonucleotide
guauuccucauuggcuagc

SEQ ID NO: 1697609 - RNA, 19 nt, Artificial Sequence
  Description of Artificial Sequence: Synthetic oligonucleotide
ccaccaagcaaggaagacg

SEQ ID NO: 1697610 - RNA, 19 nt, Artificial Sequence
  Description of Artificial Sequence: Synthetic oligonucleotide
ucuccgccagggcccaaag

SEQ ID NO: 1697611 - RNA, 19 nt, Artificial Sequence
  Description of Artificial Sequence: Synthetic oligonucleotide
aagugacauuucgagugau

SEQ ID NO: 1697612 - RNA, 19 nt, Artificial Sequence
  Description of Artificial Sequence: Synthetic oligonucleotide
caaugcagccagcacucuc

SEQ ID NO: 1697613 - RNA, 19 nt, Artificial Sequence
  Description of Artificial Sequence: Synthetic oligonucleotide
ggauucuaguuccaccauc

SEQ ID NO: 1697614 - RNA, 19 nt, Artificial Sequence
  Description of Artificial Sequence: Synthetic oligonucleotide
aagcaaggaagacgccauu

SEQ ID NO: 1697615 - RNA, 19 nt, Artificial Sequence
  Description of Artificial Sequence: Synthetic oligonucleotide
ccaaaccuaccaccgaggc

SEQ ID NO: 1697616 - RNA, 19 nt, Artificial Sequence
  Description of Artificial Sequence: Synthetic oligonucleotide
guuaucucugcucgugugu

SEQ ID NO: 1697617 - RNA, 19 nt, Artificial Sequence
  Description of Artificial Sequence: Synthetic oligonucleotide
aaagcgcgaaccagucgcu

SEQ ID NO: 1697618 - RNA, 19 nt, Artificial Sequence
  Description of Artificial Sequence: Synthetic oligonucleotide
guucggaaaaguguaacau

SEQ ID NO: 1697619 - RNA, 19 nt, Artificial Sequence
  Description of Artificial Sequence: Synthetic oligonucleotide
cagaaggacacagcugauc

SEQ ID NO: 1697620 - RNA, 19 nt, Artificial Sequence
  Description of Artificial Sequence: Synthetic oligonucleotide
ccauuucuaacgcacgcuc

SEQ ID NO: 1697621 - RNA, 19 nt, Artificial Sequence
  Description of Artificial Sequence: Synthetic oligonucleotide
accaagcaaggaagacgcc

SEQ ID NO: 1697622 - RNA, 19 nt, Artificial Sequence
  Description of Artificial Sequence: Synthetic oligonucleotide
acgccauuucuaacgcacg

SEQ ID NO: 1697623 - RNA, 19 nt, Artificial Sequence
  Description of Artificial Sequence: Synthetic oligonucleotide
accauccuguaucaaucua

SEQ ID NO: 1697624 - RNA, 19 nt, Artificial Sequence
  Description of Artificial Sequence: Synthetic oligonucleotide
agcagacacagcucuccaa

SEQ ID NO: 1697625 - RNA, 19 nt, Artificial Sequence
  Description of Artificial Sequence: Synthetic oligonucleotide
cugaugcaguucucggauc

SEQ ID NO: 1697626 - RNA, 19 nt, Artificial Sequence
  Description of Artificial Sequence: Synthetic oligonucleotide
aaagggccugauaccauuu

SEQ ID NO: 1697627 - RNA, 19 nt, Artificial Sequence
  Description of Artificial Sequence: Synthetic oligonucleotide
cauccuguaucaaucuagu

SEQ ID NO: 1697628 - RNA, 19 nt, Artificial Sequence
  Description of Artificial Sequence: Synthetic oligonucleotide
agcaaggaagacgccauuu

SEQ ID NO: 1697629 - RNA, 19 nt, Artificial Sequence
  Description of Artificial Sequence: Synthetic oligonucleotide
gcaaggaagacgccauuuc

SEQ ID NO: 1697630 - RNA, 19 nt, Artificial Sequence
  Description of Artificial Sequence: Synthetic oligonucleotide
aaccucuggaagguagauu

SEQ ID NO: 1697631 - RNA, 19 nt, Artificial Sequence
  Description of Artificial Sequence: Synthetic oligonucleotide
ccgcuuguauuccucauug

SEQ ID NO: 1697632 - RNA, 19 nt, Artificial Sequence
  Description of Artificial Sequence: Synthetic oligonucleotide
auagacaucuuuggcucua

SEQ ID NO: 1697633 - RNA, 19 nt, Artificial Sequence
  Description of Artificial Sequence: Synthetic oligonucleotide
aucagacggaagggaauca

SEQ ID NO: 1697634 - RNA, 19 nt, Artificial Sequence
  Description of Artificial Sequence: Synthetic oligonucleotide
ggaagacgccauuucuaac

SEQ ID NO: 1697635 - RNA, 19 nt, Artificial Sequence
  Description of Artificial Sequence: Synthetic oligonucleotide
aaugugcgauggauucaga

SEQ ID NO: 1697636 - RNA, 19 nt, Artificial Sequence
  Description of Artificial Sequence: Synthetic oligonucleotide
ccuguaucaaucuaguuuu

SEQ ID NO: 1697637 - RNA, 19 nt, Artificial Sequence
  Description of Artificial Sequence: Synthetic oligonucleotide
cagagcuuucacugaucuc

SEQ ID NO: 1697638 - RNA, 19 nt, Artificial Sequence
  Description of Artificial Sequence: Synthetic oligonucleotide
cucugacuaacuggagcug

SEQ ID NO: 1697639 - RNA, 19 nt, Artificial Sequence
  Description of Artificial Sequence: Synthetic oligonucleotide
gggcaauggagagucuggg

SEQ ID NO: 1697640 - RNA, 19 nt, Artificial Sequence
  Description of Artificial Sequence: Synthetic oligonucleotide
agcugccacugugacaaug

SEQ ID NO: 1697641 - RNA, 19 nt, Artificial Sequence
  Description of Artificial Sequence: Synthetic oligonucleotide
uaguuccaccauccuguau

SEQ ID NO: 1697642 - RNA, 19 nt, Artificial Sequence
  Description of Artificial Sequence: Synthetic oligonucleotide
uucucuagacgggcaacua

SEQ ID NO: 1697643 - RNA, 19 nt, Artificial Sequence
  Description of Artificial Sequence: Synthetic oligonucleotide
aaccuaccaccgaggcgac

SEQ ID NO: 1697644 - RNA, 19 nt, Artificial Sequence
  Description of Artificial Sequence: Synthetic oligonucleotide
gcucucaccaugauguaca

SEQ ID NO: 1697645 - RNA, 19 nt, Artificial Sequence
  Description of Artificial Sequence: Synthetic oligonucleotide
ugccuggauucuaguucca

SEQ ID NO: 1697646 - RNA, 19 nt, Artificial Sequence
  Description of Artificial Sequence: Synthetic oligonucleotide
caaaugugcgauggauuca

SEQ ID NO: 1697647 - RNA, 19 nt, Artificial Sequence
  Description of Artificial Sequence: Synthetic oligonucleotide
cagaaguagcuacugaguu

SEQ ID NO: 1697648 - RNA, 19 nt, Artificial Sequence
  Description of Artificial Sequence: Synthetic oligonucleotide
acaggacaauauagacauc

SEQ ID NO: 1697649 - RNA, 19 nt, Artificial Sequence
  Description of Artificial Sequence: Synthetic oligonucleotide
acauuucgagugauccgcu

SEQ ID NO: 1697650 - RNA, 19 nt, Artificial Sequence
  Description of Artificial Sequence: Synthetic oligonucleotide
guguaacauaccacagaga

SEQ ID NO: 1697651 - RNA, 19 nt, Artificial Sequence
  Description of Artificial Sequence: Synthetic oligonucleotide
ggcguuaucucugcucgug

SEQ ID NO: 1697652 - RNA, 19 nt, Artificial Sequence
  Description of Artificial Sequence: Synthetic oligonucleotide
gcuacugaguucuuucagu

SEQ ID NO: 1697653 - RNA, 19 nt, Artificial Sequence
  Description of Artificial Sequence: Synthetic oligonucleotide
ccaauucaccuuccauugc

SEQ ID NO: 1697654 - RNA, 19 nt, Artificial Sequence
  Description of Artificial Sequence: Synthetic oligonucleotide
ucaaugcagccagcacucu

SEQ ID NO: 1697655 - RNA, 19 nt, Artificial Sequence
  Description of Artificial Sequence: Synthetic oligonucleotide
gccaaaccuaccaccgagg

SEQ ID NO: 1697656 - RNA, 19 nt, Artificial Sequence
  Description of Artificial Sequence: Synthetic oligonucleotide
aguucucggaucagacgga

SEQ ID NO: 1697657 - RNA, 19 nt, Artificial Sequence
  Description of Artificial Sequence: Synthetic oligonucleotide
caagcaaggaagacgccau

SEQ ID NO: 1697658 - RNA, 19 nt, Artificial Sequence
  Description of Artificial Sequence: Synthetic oligonucleotide
cggaaaaguguaacauacc

SEQ ID NO: 1697659 - RNA, 19 nt, Artificial Sequence
  Description of Artificial Sequence: Synthetic oligonucleotide
ugggccaguugaaggcaau

SEQ ID NO: 1697660 - RNA, 19 nt, Artificial Sequence
  Description of Artificial Sequence: Synthetic oligonucleotide
gcagacaaaggcagcugcc

SEQ ID NO: 1697661 - RNA, 19 nt, Artificial Sequence
  Description of Artificial Sequence: Synthetic oligonucleotide
ccuguuguuuugcuuucug

SEQ ID NO: 1697662 - RNA, 19 nt, Artificial Sequence
  Description of Artificial Sequence: Synthetic oligonucleotide
agacgggcaacuagcucug

SEQ ID NO: 1697663 - RNA, 19 nt, Artificial Sequence
  Description of Artificial Sequence: Synthetic oligonucleotide
gucgcucaccaccaagcaa

SEQ ID NO: 1697664 - RNA, 19 nt, Artificial Sequence
  Description of Artificial Sequence: Synthetic oligonucleotide
uggcguuaucucugcucgu

SEQ ID NO: 1697665 - RNA, 19 nt, Artificial Sequence
  Description of Artificial Sequence: Synthetic oligonucleotide
ccaaagcgcgaaccagucg

SEQ ID NO: 1697666 - RNA, 19 nt, Artificial Sequence
  Description of Artificial Sequence: Synthetic oligonucleotide
caccaugauguacaacucu

SEQ ID NO: 1697667 - RNA, 19 nt, Artificial Sequence
  Description of Artificial Sequence: Synthetic oligonucleotide
ggccaguugaaggcaauac

SEQ ID NO: 1697668 - RNA, 19 nt, Artificial Sequence
  Description of Artificial Sequence: Synthetic oligonucleotide
aggacaauauagacaucuu

SEQ ID NO: 1697669 - RNA, 19 nt, Artificial Sequence
  Description of Artificial Sequence: Synthetic oligonucleotide
agcugaguaccaagcuuca

SEQ ID NO: 1697670 - RNA, 19 nt, Artificial Sequence
  Description of Artificial Sequence: Synthetic oligonucleotide
gcacuaguuacagcucacc

SEQ ID NO: 1697671 - RNA, 19 nt, Artificial Sequence
  Description of Artificial Sequence: Synthetic oligonucleotide
agacaucuuuggcucuauu

SEQ ID NO: 1697672 - RNA, 19 nt, Artificial Sequence
  Description of Artificial Sequence: Synthetic oligonucleotide
gcgacgaucaaugcagcca

SEQ ID NO: 1697673 - RNA, 19 nt, Artificial Sequence
  Description of Artificial Sequence: Synthetic oligonucleotide
uuccccagagcagccucga

SEQ ID NO: 1697674 - RNA, 19 nt, Artificial Sequence
  Description of Artificial Sequence: Synthetic oligonucleotide
agcacucucgaggccauuu

SEQ ID NO: 1697675 - RNA, 19 nt, Artificial Sequence
  Description of Artificial Sequence: Synthetic oligonucleotide
cucucgaggccauuucugu

SEQ ID NO: 1697676 - RNA, 19 nt, Artificial Sequence
  Description of Artificial Sequence: Synthetic oligonucleotide
ggaaggucuggauucuacu

SEQ ID NO: 1697677 - RNA, 19 nt, Artificial Sequence
  Description of Artificial Sequence: Synthetic oligonucleotide
cuccgccagggcccaaagc

SEQ ID NO: 1697678 - RNA, 19 nt, Artificial Sequence
  Description of Artificial Sequence: Synthetic oligonucleotide
gggaaggucuggauucuac

SEQ ID NO: 1697679 - RNA, 19 nt, Artificial Sequence
  Description of Artificial Sequence: Synthetic oligonucleotide
cagaaggcaaaugugcgau

SEQ ID NO: 1697680 - RNA, 19 nt, Artificial Sequence
  Description of Artificial Sequence: Synthetic oligonucleotide
gacgggcaacuagcucugg

SEQ ID NO: 1697681 - RNA, 19 nt, Artificial Sequence
  Description of Artificial Sequence: Synthetic oligonucleotide
ucacugccuuugaggaguu

SEQ ID NO: 1697682 - RNA, 19 nt, Artificial Sequence
  Description of Artificial Sequence: Synthetic oligonucleotide
gaacuugaccugguccucu

SEQ ID NO: 1697683 - RNA, 19 nt, Artificial Sequence
  Description of Artificial Sequence: Synthetic oligonucleotide
cacgcugcgcauccugaca

SEQ ID NO: 1697684 - RNA, 19 nt, Artificial Sequence
  Description of Artificial Sequence: Synthetic oligonucleotide
cccaaagcgcgaaccaguc

SEQ ID NO: 1697685 - RNA, 19 nt, Artificial Sequence
  Description of Artificial Sequence: Synthetic oligonucleotide
gcugccacugugacaauga

SEQ ID NO: 1697686 - RNA, 19 nt, Artificial Sequence
  Description of Artificial Sequence: Synthetic oligonucleotide
ccuuugaggaguucaugaa

SEQ ID NO: 1697687 - RNA, 19 nt, Artificial Sequence
  Description of Artificial Sequence: Synthetic oligonucleotide
uucgagugauccgcuugua

SEQ ID NO: 1697688 - RNA, 19 nt, Artificial Sequence
  Description of Artificial Sequence: Synthetic oligonucleotide
ccagucgcucaccaccaag

SEQ ID NO: 1697689 - RNA, 19 nt, Artificial Sequence
  Description of Artificial Sequence: Synthetic oligonucleotide
cacgcagcuuccggggcag

SEQ ID NO: 1697690 - RNA, 19 nt, Artificial Sequence
  Description of Artificial Sequence: Synthetic oligonucleotide
accaagcuucauggguuga

SEQ ID NO: 1697691 - RNA, 19 nt, Artificial Sequence
  Description of Artificial Sequence: Synthetic oligonucleotide
gcuucauggguugacugaa

SEQ ID NO: 1697692 - RNA, 19 nt, Artificial Sequence
  Description of Artificial Sequence: Synthetic oligonucleotide
cucucaccaugauguacaa

SEQ ID NO: 1697693 - RNA, 19 nt, Artificial Sequence
  Description of Artificial Sequence: Synthetic oligonucleotide
cgccauuucuaacgcacgc

SEQ ID NO: 1697694 - RNA, 19 nt, Artificial Sequence
  Description of Artificial Sequence: Synthetic oligonucleotide
cuaguuccaccauccugua

SEQ ID NO: 1697695 - RNA, 19 nt, Artificial Sequence
  Description of Artificial Sequence: Synthetic oligonucleotide
cgcuuguauuccucauugg

SEQ ID NO: 1697696 - RNA, 19 nt, Artificial Sequence
  Description of Artificial Sequence: Synthetic oligonucleotide
uucuccgccagggcccaaa

SEQ ID NO: 1697697 - RNA, 19 nt, Artificial Sequence
  Description of Artificial Sequence: Synthetic oligonucleotide
auauagccuggaguuucuu

SEQ ID NO: 1697698 - RNA, 19 nt, Artificial Sequence
  Description of Artificial Sequence: Synthetic oligonucleotide
ucacaaccucuggaaggua

SEQ ID NO: 1697699 - RNA, 19 nt, Artificial Sequence
  Description of Artificial Sequence: Synthetic oligonucleotide
uaccaccgaggcgacgauc

SEQ ID NO: 1697700 - RNA, 19 nt, Artificial Sequence
  Description of Artificial Sequence: Synthetic oligonucleotide
cuucucuagacgggcaacu

SEQ ID NO: 1697701 - RNA, 19 nt, Artificial Sequence
  Description of Artificial Sequence: Synthetic oligonucleotide
ggagcugaguaccaagcuu

SEQ ID NO: 1697702 - RNA, 19 nt, Artificial Sequence
  Description of Artificial Sequence: Synthetic oligonucleotide
ggcuucccagguaagugca

SEQ ID NO: 1697703 - RNA, 19 nt, Artificial Sequence
  Description of Artificial Sequence: Synthetic oligonucleotide
ccaagcuucauggguugac

SEQ ID NO: 1697704 - RNA, 19 nt, Artificial Sequence
  Description of Artificial Sequence: Synthetic oligonucleotide
cuuugacggugaagcacua

SEQ ID NO: 1697705 - RNA, 19 nt, Artificial Sequence
  Description of Artificial Sequence: Synthetic oligonucleotide
ggauucagaaguagcuacu

SEQ ID NO: 1697706 - RNA, 19 nt, Artificial Sequence
  Description of Artificial Sequence: Synthetic oligonucleotide
gaaggcaauacggcccaau

SEQ ID NO: 1697707 - RNA, 19 nt, Artificial Sequence
  Description of Artificial Sequence: Synthetic oligonucleotide
cgaucaaugcagccagcac

SEQ ID NO: 1697708 - RNA, 19 nt, Artificial Sequence
  Description of Artificial Sequence: Synthetic oligonucleotide
ccuaccaccgaggcgacga

SEQ ID NO: 1697709 - RNA, 19 nt, Artificial Sequence
  Description of Artificial Sequence: Synthetic oligonucleotide
gugauccgcuuguauuccu

SEQ ID NO: 1697710 - RNA, 19 nt, Artificial Sequence
  Description of Artificial Sequence: Synthetic oligonucleotide
ccagagcuuucacugaucu

SEQ ID NO: 1697711 - RNA, 19 nt, Artificial Sequence
  Description of Artificial Sequence: Synthetic oligonucleotide
gcgcgaaccagucgcucac

SEQ ID NO: 1697712 - RNA, 19 nt, Artificial Sequence
  Description of Artificial Sequence: Synthetic oligonucleotide
gcacucucgaggccauuuc

SEQ ID NO: 1697713 - RNA, 19 nt, Artificial Sequence
  Description of Artificial Sequence: Synthetic oligonucleotide
gcgcauccugacaagugac

SEQ ID NO: 1697714 - RNA, 19 nt, Artificial Sequence
  Description of Artificial Sequence: Synthetic oligonucleotide
acgcacgcuccggucaggu

SEQ ID NO: 1697715 - RNA, 19 nt, Artificial Sequence
  Description of Artificial Sequence: Synthetic oligonucleotide
cacccaauucaccuuccau

SEQ ID NO: 1697716 - RNA, 19 nt, Artificial Sequence
  Description of Artificial Sequence: Synthetic oligonucleotide
ccgaggcgacgaucaaugc

SEQ ID NO: 1697717 - RNA, 19 nt, Artificial Sequence
  Description of Artificial Sequence: Synthetic oligonucleotide
aaguagcuacugaguucuu

SEQ ID NO: 1697718 - RNA, 19 nt, Artificial Sequence
  Description of Artificial Sequence: Synthetic oligonucleotide
cgcucaccaccaagcaagg

SEQ ID NO: 1697719 - RNA, 19 nt, Artificial Sequence
  Description of Artificial Sequence: Synthetic oligonucleotide
gccuggauucuaguuccac

SEQ ID NO: 1697720 - RNA, 19 nt, Artificial Sequence
  Description of Artificial Sequence: Synthetic oligonucleotide
gcccguggcguuaucucug

SEQ ID NO: 1697721 - RNA, 19 nt, Artificial Sequence
  Description of Artificial Sequence: Synthetic oligonucleotide
cauuucgagugauccgcuu

SEQ ID NO: 1697722 - RNA, 19 nt, Artificial Sequence
  Description of Artificial Sequence: Synthetic oligonucleotide
gggccugauaccauuuccu

SEQ ID NO: 1697723 - RNA, 19 nt, Artificial Sequence
  Description of Artificial Sequence: Synthetic oligonucleotide
cugucucaauuuccucugu

SEQ ID NO: 1697724 - RNA, 19 nt, Artificial Sequence
  Description of Artificial Sequence: Synthetic oligonucleotide
cugugacaaugaaguugaa

SEQ ID NO: 1697725 - RNA, 19 nt, Artificial Sequence
  Description of Artificial Sequence: Synthetic oligonucleotide
gccauuucuaacgcacgcu

SEQ ID NO: 1697726 - RNA, 19 nt, Artificial Sequence
  Description of Artificial Sequence: Synthetic oligonucleotide
gggcuccccaagcuucuuc

SEQ ID NO: 1697727 - RNA, 19 nt, Artificial Sequence
  Description of Artificial Sequence: Synthetic oligonucleotide
gccugauaccauuuccuuu

SEQ ID NO: 1697728 - RNA, 19 nt, Artificial Sequence
  Description of Artificial Sequence: Synthetic oligonucleotide
caagugccuuaaauagauu

SEQ ID NO: 1697729 - RNA, 19 nt, Artificial Sequence
  Description of Artificial Sequence: Synthetic oligonucleotide
ggccugauaccauuuccuu

SEQ ID NO: 1697730 - RNA, 19 nt, Artificial Sequence
  Description of Artificial Sequence: Synthetic oligonucleotide
ggaucagacggaagggaau

SEQ ID NO: 1697731 - RNA, 19 nt, Artificial Sequence
  Description of Artificial Sequence: Synthetic oligonucleotide
gaugggcaauggagagucu

SEQ ID NO: 1697732 - RNA, 19 nt, Artificial Sequence
  Description of Artificial Sequence: Synthetic oligonucleotide
ggcccguggcguuaucucu

SEQ ID NO: 1697733 - RNA, 19 nt, Artificial Sequence
  Description of Artificial Sequence: Synthetic oligonucleotide
gcguuaucucugcucgugu

SEQ ID NO: 1697734 - RNA, 19 nt, Artificial Sequence
  Description of Artificial Sequence: Synthetic oligonucleotide
caaccucuggaagguagau

SEQ ID NO: 1697735 - RNA, 19 nt, Artificial Sequence
  Description of Artificial Sequence: Synthetic oligonucleotide
cacugccuuugaggaguuc

SEQ ID NO: 1697736 - RNA, 19 nt, Artificial Sequence
  Description of Artificial Sequence: Synthetic oligonucleotide
cgagugauccgcuuguauu

SEQ ID NO: 1697737 - RNA, 19 nt, Artificial Sequence
  Description of Artificial Sequence: Synthetic oligonucleotide
gcugcgcauccugacaagu

SEQ ID NO: 1697738 - RNA, 19 nt, Artificial Sequence
  Description of Artificial Sequence: Synthetic oligonucleotide
gcccaaagcgcgaaccagu

SEQ ID NO: 1697739 - RNA, 19 nt, Artificial Sequence
  Description of Artificial Sequence: Synthetic oligonucleotide
cgaggccauuucugugaag

SEQ ID NO: 1697740 - RNA, 19 nt, Artificial Sequence
  Description of Artificial Sequence: Synthetic oligonucleotide
gcucaccaccaagcaagga

SEQ ID NO: 1697741 - RNA, 19 nt, Artificial Sequence
  Description of Artificial Sequence: Synthetic oligonucleotide
cgcugcgcauccugacaag

SEQ ID NO: 1697742 - RNA, 19 nt, Artificial Sequence
  Description of Artificial Sequence: Synthetic oligonucleotide
ggucuggauucuacuuacu

SEQ ID NO: 1697743 - RNA, 19 nt, Artificial Sequence
  Description of Artificial Sequence: Synthetic oligonucleotide
gggccaguugaaggcaaua

SEQ ID NO: 1697744 - RNA, 19 nt, Artificial Sequence
  Description of Artificial Sequence: Synthetic oligonucleotide
ggguugacugaaagucagu

SEQ ID NO: 1697745 - RNA, 19 nt, Artificial Sequence
  Description of Artificial Sequence: Synthetic oligonucleotide
caccgaggcgacgaucaau

SEQ ID NO: 1697746 - RNA, 19 nt, Artificial Sequence
  Description of Artificial Sequence: Synthetic oligonucleotide
cgaggaggcuucacaaccu

SEQ ID NO: 1697747 - RNA, 19 nt, Artificial Sequence
  Description of Artificial Sequence: Synthetic oligonucleotide
cucugcucguguguuucuu

SEQ ID NO: 1697748 - RNA, 19 nt, Artificial Sequence
  Description of Artificial Sequence: Synthetic oligonucleotide
gcugaguaccaagcuucau

SEQ ID NO: 1697749 - RNA, 19 nt, Artificial Sequence
  Description of Artificial Sequence: Synthetic oligonucleotide
ggggcccguggcguuaucu

SEQ ID NO: 1697750 - RNA, 19 nt, Artificial Sequence
  Description of Artificial Sequence: Synthetic oligonucleotide
ccagggcccaaagcgcgaa

SEQ ID NO: 1697751 - RNA, 19 nt, Artificial Sequence
  Description of Artificial Sequence: Synthetic oligonucleotide
ccaccgaggcgacgaucaa

SEQ ID NO: 1697752 - RNA, 19 nt, Artificial Sequence
  Description of Artificial Sequence: Synthetic oligonucleotide
gcugaucaucugguuucuu

SEQ ID NO: 1697753 - RNA, 19 nt, Artificial Sequence
  Description of Artificial Sequence: Synthetic oligonucleotide
guucuccgccagggcccaa

SEQ ID NO: 1697754 - RNA, 19 nt, Artificial Sequence
  Description of Artificial Sequence: Synthetic oligonucleotide
cagcacucucgaggccauu

SEQ ID NO: 1697755 - RNA, 19 nt, Artificial Sequence
  Description of Artificial Sequence: Synthetic oligonucleotide
aaaauaagauuguguaacc

SEQ ID NO: 1697756 - RNA, 19 nt, Artificial Sequence
  Description of Artificial Sequence: Synthetic oligonucleotide
ucuugguucaaauaguggg

SEQ ID NO: 1697757 - RNA, 19 nt, Artificial Sequence
  Description of Artificial Sequence: Synthetic oligonucleotide
acagaauuaguauuaaguc

SEQ ID NO: 1697758 - RNA, 19 nt, Artificial Sequence
  Description of Artificial Sequence: Synthetic oligonucleotide
aaaguggaaaaccgguucc

SEQ ID NO: 1697759 - RNA, 19 nt, Artificial Sequence
  Description of Artificial Sequence: Synthetic oligonucleotide
aaaaguggaaaaccgguuc

SEQ ID NO: 1697760 - RNA, 19 nt, Artificial Sequence
  Description of Artificial Sequence: Synthetic oligonucleotide
agagcaaucggcuucaggg

SEQ ID NO: 1697761 - RNA, 19 nt, Artificial Sequence
  Description of Artificial Sequence: Synthetic oligonucleotide
ucuguuuugaggcaaacug

SEQ ID NO: 1697762 - RNA, 19 nt, Artificial Sequence
  Description of Artificial Sequence: Synthetic oligonucleotide
agggcuaucuuccugaagc

SEQ ID NO: 1697763 - RNA, 19 nt, Artificial Sequence
  Description of Artificial Sequence: Synthetic oligonucleotide
aaucacauuucuuucaugu

SEQ ID NO: 1697764 - RNA, 19 nt, Artificial Sequence
  Description of Artificial Sequence: Synthetic oligonucleotide
uguaucaaagcaccgagag

SEQ ID NO: 1697765 - RNA, 19 nt, Artificial Sequence
  Description of Artificial Sequence: Synthetic oligonucleotide
aauaagauuguguaaccga

SEQ ID NO: 1697766 - RNA, 19 nt, Artificial Sequence
  Description of Artificial Sequence: Synthetic oligonucleotide
uucaauauuggccagaguu

SEQ ID NO: 1697767 - RNA, 19 nt, Artificial Sequence
  Description of Artificial Sequence: Synthetic oligonucleotide
ugauguaccgaacacacug

SEQ ID NO: 1697768 - RNA, 19 nt, Artificial Sequence
  Description of Artificial Sequence: Synthetic oligonucleotide
acugcuaugagggacaugg

SEQ ID NO: 1697769 - RNA, 19 nt, Artificial Sequence
  Description of Artificial Sequence: Synthetic oligonucleotide
agaaucugagcaucgaacg

SEQ ID NO: 1697770 - RNA, 19 nt, Artificial Sequence
  Description of Artificial Sequence: Synthetic oligonucleotide
aaauaagauuguguaaccg

SEQ ID NO: 1697771 - RNA, 19 nt, Artificial Sequence
  Description of Artificial Sequence: Synthetic oligonucleotide
cagaauuaguauuaagucc

SEQ ID NO: 1697772 - RNA, 19 nt, Artificial Sequence
  Description of Artificial Sequence: Synthetic oligonucleotide
ucagcgaacacaaggcugg

SEQ ID NO: 1697773 - RNA, 19 nt, Artificial Sequence
  Description of Artificial Sequence: Synthetic oligonucleotide
uguguaucaaagcaccgag

SEQ ID NO: 1697774 - RNA, 19 nt, Artificial Sequence
  Description of Artificial Sequence: Synthetic oligonucleotide
aacacucugucuuggacuc

SEQ ID NO: 1697775 - RNA, 19 nt, Artificial Sequence
  Description of Artificial Sequence: Synthetic oligonucleotide
aucgaaaggaggcugcgcc

SEQ ID NO: 1697776 - RNA, 19 nt, Artificial Sequence
  Description of Artificial Sequence: Synthetic oligonucleotide
auuaguauuaaguccaaaa

SEQ ID NO: 1697777 - RNA, 19 nt, Artificial Sequence
  Description of Artificial Sequence: Synthetic oligonucleotide
aaacugaagucaauuuugc

SEQ ID NO: 1697778 - RNA, 19 nt, Artificial Sequence
  Description of Artificial Sequence: Synthetic oligonucleotide
ugaggcuucgaauuucugg

SEQ ID NO: 1697779 - RNA, 19 nt, Artificial Sequence
  Description of Artificial Sequence: Synthetic oligonucleotide
ucaucagcgaacacaaggc

SEQ ID NO: 1697780 - RNA, 19 nt, Artificial Sequence
  Description of Artificial Sequence: Synthetic oligonucleotide
uuucaugucgaaugucugg

SEQ ID NO: 1697781 - RNA, 19 nt, Artificial Sequence
  Description of Artificial Sequence: Synthetic oligonucleotide
agaauuaguauuaagucca

SEQ ID NO: 1697782 - RNA, 19 nt, Artificial Sequence
  Description of Artificial Sequence: Synthetic oligonucleotide
ugaagucaauuuugcaucg

SEQ ID NO: 1697783 - RNA, 19 nt, Artificial Sequence
  Description of Artificial Sequence: Synthetic oligonucleotide
uguucagacauauguaugu

SEQ ID NO: 1697784 - RNA, 19 nt, Artificial Sequence
  Description of Artificial Sequence: Synthetic oligonucleotide
uuuacgauguuuaccggga

SEQ ID NO: 1697785 - RNA, 19 nt, Artificial Sequence
  Description of Artificial Sequence: Synthetic oligonucleotide
uauguucagacauauguau

SEQ ID NO: 1697786 - RNA, 19 nt, Artificial Sequence
  Description of Artificial Sequence: Synthetic oligonucleotide
cuugagauaguucuaccag

SEQ ID NO: 1697787 - RNA, 19 nt, Artificial Sequence
  Description of Artificial Sequence: Synthetic oligonucleotide
gaggcuucgaauuucuggc

SEQ ID NO: 1697788 - RNA, 19 nt, Artificial Sequence
  Description of Artificial Sequence: Synthetic oligonucleotide
ugaaugucuggacaugccc

SEQ ID NO: 1697789 - RNA, 19 nt, Artificial Sequence
  Description of Artificial Sequence: Synthetic oligonucleotide
uguucguggaaaauaagau

SEQ ID NO: 1697790 - RNA, 19 nt, Artificial Sequence
  Description of Artificial Sequence: Synthetic oligonucleotide
ugaggcuguacauccagcg

SEQ ID NO: 1697791 - RNA, 19 nt, Artificial Sequence
  Description of Artificial Sequence: Synthetic oligonucleotide
guuguuuuaacacucuguc

SEQ ID NO: 1697792 - RNA, 19 nt, Artificial Sequence
  Description of Artificial Sequence: Synthetic oligonucleotide
ucauuuucccuauacugug

SEQ ID NO: 1697793 - RNA, 19 nt, Artificial Sequence
  Description of Artificial Sequence: Synthetic oligonucleotide
uuuagggcuaucuuccuga

SEQ ID NO: 1697794 - RNA, 19 nt, Artificial Sequence
  Description of Artificial Sequence: Synthetic oligonucleotide
ccauuuacgauguuuaccg

SEQ ID NO: 1697795 - RNA, 19 nt, Artificial Sequence
  Description of Artificial Sequence: Synthetic oligonucleotide
cacugaaagagcaaucggc

SEQ ID NO: 1697796 - RNA, 19 nt, Artificial Sequence
  Description of Artificial Sequence: Synthetic oligonucleotide
aagucaauuuugcaucgug

SEQ ID NO: 1697797 - RNA, 19 nt, Artificial Sequence
  Description of Artificial Sequence: Synthetic oligonucleotide
ucuugagauaguucuacca

SEQ ID NO: 1697798 - RNA, 19 nt, Artificial Sequence
  Description of Artificial Sequence: Synthetic oligonucleotide
gaaucugagcaucgaacgg

SEQ ID NO: 1697799 - RNA, 19 nt, Artificial Sequence
  Description of Artificial Sequence: Synthetic oligonucleotide
gaaacacugccguagcugc

SEQ ID NO: 1697800 - RNA, 19 nt, Artificial Sequence
  Description of Artificial Sequence: Synthetic oligonucleotide
uuaucuuugccaucuguga

SEQ ID NO: 1697801 - RNA, 19 nt, Artificial Sequence
  Description of Artificial Sequence: Synthetic oligonucleotide
uguuuugaggcaaacugaa

SEQ ID NO: 1697802 - RNA, 19 nt, Artificial Sequence
  Description of Artificial Sequence: Synthetic oligonucleotide
aagcgcuccggagagaggc

SEQ ID NO: 1697803 - RNA, 19 nt, Artificial Sequence
  Description of Artificial Sequence: Synthetic oligonucleotide
uaaagccacgaucacaggu

SEQ ID NO: 1697804 - RNA, 19 nt, Artificial Sequence
  Description of Artificial Sequence: Synthetic oligonucleotide
aacuuggcucuugagauag

SEQ ID NO: 1697805 - RNA, 19 nt, Artificial Sequence
  Description of Artificial Sequence: Synthetic oligonucleotide
ucagacauauguaugucau

SEQ ID NO: 1697806 - RNA, 19 nt, Artificial Sequence
  Description of Artificial Sequence: Synthetic oligonucleotide
uccuuuucaaguuguaacu

SEQ ID NO: 1697807 - RNA, 19 nt, Artificial Sequence
  Description of Artificial Sequence: Synthetic oligonucleotide
gaggcaucgacucagcuuc

SEQ ID NO: 1697808 - RNA, 19 nt, Artificial Sequence
  Description of Artificial Sequence: Synthetic oligonucleotide
uucugguucacucucugac

SEQ ID NO: 1697809 - RNA, 19 nt, Artificial Sequence
  Description of Artificial Sequence: Synthetic oligonucleotide
uuguguaaccgaagagugg

SEQ ID NO: 1697810 - RNA, 19 nt, Artificial Sequence
  Description of Artificial Sequence: Synthetic oligonucleotide
uggacaaucuucucgugug

SEQ ID NO: 1697811 - RNA, 19 nt, Artificial Sequence
  Description of Artificial Sequence: Synthetic oligonucleotide
uguucuugguucaaauagu

SEQ ID NO: 1697812 - RNA, 19 nt, Artificial Sequence
  Description of Artificial Sequence: Synthetic oligonucleotide
uguguaaccgaagaguggu

SEQ ID NO: 1697813 - RNA, 19 nt, Artificial Sequence
  Description of Artificial Sequence: Synthetic oligonucleotide
auuuccaggagguacgggu

SEQ ID NO: 1697814 - RNA, 19 nt, Artificial Sequence
  Description of Artificial Sequence: Synthetic oligonucleotide
uaggacgugugauacgcgg

SEQ ID NO: 1697815 - RNA, 19 nt, Artificial Sequence
  Description of Artificial Sequence: Synthetic oligonucleotide
gucaauuuugcaucgugug

SEQ ID NO: 1697816 - RNA, 19 nt, Artificial Sequence
  Description of Artificial Sequence: Synthetic oligonucleotide
uggucgucaacacuucucc

SEQ ID NO: 1697817 - RNA, 19 nt, Artificial Sequence
  Description of Artificial Sequence: Synthetic oligonucleotide
uuaacacucugucuuggac

SEQ ID NO: 1697818 - RNA, 19 nt, Artificial Sequence
  Description of Artificial Sequence: Synthetic oligonucleotide
caauauuggccagaguugg

SEQ ID NO: 1697819 - RNA, 19 nt, Artificial Sequence
  Description of Artificial Sequence: Synthetic oligonucleotide
uuuuaacacucugucuugg

SEQ ID NO: 1697820 - RNA, 19 nt, Artificial Sequence
  Description of Artificial Sequence: Synthetic oligonucleotide
uuuuaaagccacgaucaca

SEQ ID NO: 1697821 - RNA, 19 nt, Artificial Sequence
  Description of Artificial Sequence: Synthetic oligonucleotide
gaaauuccaggccggcugg

SEQ ID NO: 1697822 - RNA, 19 nt, Artificial Sequence
  Description of Artificial Sequence: Synthetic oligonucleotide
ugcaaucucuucuggagug

SEQ ID NO: 1697823 - RNA, 19 nt, Artificial Sequence
  Description of Artificial Sequence: Synthetic oligonucleotide
agauuguguaaccgaagag

SEQ ID NO: 1697824 - RNA, 19 nt, Artificial Sequence
  Description of Artificial Sequence: Synthetic oligonucleotide
accgaagagugguaggacg

SEQ ID NO: 1697825 - RNA, 19 nt, Artificial Sequence
  Description of Artificial Sequence: Synthetic oligonucleotide
uguaaccgaagagugguag

SEQ ID NO: 1697826 - RNA, 19 nt, Artificial Sequence
  Description of Artificial Sequence: Synthetic oligonucleotide
aagagcaaucggcuucagg

SEQ ID NO: 1697827 - RNA, 19 nt, Artificial Sequence
  Description of Artificial Sequence: Synthetic oligonucleotide
aaucuucucgugugcacug

SEQ ID NO: 1697828 - RNA, 19 nt, Artificial Sequence
  Description of Artificial Sequence: Synthetic oligonucleotide
caggacaucugcuucagac

SEQ ID NO: 1697829 - RNA, 19 nt, Artificial Sequence
  Description of Artificial Sequence: Synthetic oligonucleotide
auuguguaaccgaagagug

SEQ ID NO: 1697830 - RNA, 19 nt, Artificial Sequence
  Description of Artificial Sequence: Synthetic oligonucleotide
uugagauaguucuaccagu

SEQ ID NO: 1697831 - RNA, 19 nt, Artificial Sequence
  Description of Artificial Sequence: Synthetic oligonucleotide
uccuuagguacuacagucc

SEQ ID NO: 1697832 - RNA, 19 nt, Artificial Sequence
  Description of Artificial Sequence: Synthetic oligonucleotide
uuuucccuauacugugugg

SEQ ID NO: 1697833 - RNA, 19 nt, Artificial Sequence
  Description of Artificial Sequence: Synthetic oligonucleotide
ucacuguguaucaaagcac

SEQ ID NO: 1697834 - RNA, 19 nt, Artificial Sequence
  Description of Artificial Sequence: Synthetic oligonucleotide
auuaaccacggauggaacu

SEQ ID NO: 1697835 - RNA, 19 nt, Artificial Sequence
  Description of Artificial Sequence: Synthetic oligonucleotide
uguguucguggaaaauaag

SEQ ID NO: 1697836 - RNA, 19 nt, Artificial Sequence
  Description of Artificial Sequence: Synthetic oligonucleotide
uaucuuugccaucugugaa

SEQ ID NO: 1697837 - RNA, 19 nt, Artificial Sequence
  Description of Artificial Sequence: Synthetic oligonucleotide
gagagggucuacauuaacc

SEQ ID NO: 1697838 - RNA, 19 nt, Artificial Sequence
  Description of Artificial Sequence: Synthetic oligonucleotide
agacauauguaugucauau

SEQ ID NO: 1697839 - RNA, 19 nt, Artificial Sequence
  Description of Artificial Sequence: Synthetic oligonucleotide
ugugaaugucuggacaugc

SEQ ID NO: 1697840 - RNA, 19 nt, Artificial Sequence
  Description of Artificial Sequence: Synthetic oligonucleotide
agggucuacauuaaccacg

SEQ ID NO: 1697841 - RNA, 19 nt, Artificial Sequence
  Description of Artificial Sequence: Synthetic oligonucleotide
uuuguauguucagacauau

SEQ ID NO: 1697842 - RNA, 19 nt, Artificial Sequence
  Description of Artificial Sequence: Synthetic oligonucleotide
guaucaaagcaccgagagg

SEQ ID NO: 1697843 - RNA, 19 nt, Artificial Sequence
  Description of Artificial Sequence: Synthetic oligonucleotide
ucaaauagugggugguaac

SEQ ID NO: 1697844 - RNA, 19 nt, Artificial Sequence
  Description of Artificial Sequence: Synthetic oligonucleotide
aaccgguuccuuucuuuuc

SEQ ID NO: 1697845 - RNA, 19 nt, Artificial Sequence
  Description of Artificial Sequence: Synthetic oligonucleotide
cuccuuagguacuacaguc

SEQ ID NO: 1697846 - RNA, 19 nt, Artificial Sequence
  Description of Artificial Sequence: Synthetic oligonucleotide
uuaccgggacuucuuaucu

SEQ ID NO: 1697847 - RNA, 19 nt, Artificial Sequence
  Description of Artificial Sequence: Synthetic oligonucleotide
gaucacagguaucacagaa

SEQ ID NO: 1697848 - RNA, 19 nt, Artificial Sequence
  Description of Artificial Sequence: Synthetic oligonucleotide
ugagauaguucuaccaguu

SEQ ID NO: 1697849 - RNA, 19 nt, Artificial Sequence
  Description of Artificial Sequence: Synthetic oligonucleotide
cugguucacucucugaccc

SEQ ID NO: 1697850 - RNA, 19 nt, Artificial Sequence
  Description of Artificial Sequence: Synthetic oligonucleotide
uacuguguggucgucaaca

SEQ ID NO: 1697851 - RNA, 19 nt, Artificial Sequence
  Description of Artificial Sequence: Synthetic oligonucleotide
ucccuauacuguguggucg

SEQ ID NO: 1697852 - RNA, 19 nt, Artificial Sequence
  Description of Artificial Sequence: Synthetic oligonucleotide
gcuuggaaauuccaggccg

SEQ ID NO: 1697853 - RNA, 19 nt, Artificial Sequence
  Description of Artificial Sequence: Synthetic oligonucleotide
uuuaccgggacuucuuauc

SEQ ID NO: 1697854 - RNA, 19 nt, Artificial Sequence
  Description of Artificial Sequence: Synthetic oligonucleotide
guuuuaacacucugucuug

SEQ ID NO: 1697855 - RNA, 19 nt, Artificial Sequence
  Description of Artificial Sequence: Synthetic oligonucleotide
uuuuguauguucagacaua

SEQ ID NO: 1697856 - RNA, 19 nt, Artificial Sequence
  Description of Artificial Sequence: Synthetic oligonucleotide
guacuacaguccuuugugg

SEQ ID NO: 1697857 - RNA, 19 nt, Artificial Sequence
  Description of Artificial Sequence: Synthetic oligonucleotide
ugaugauguaccgaacaca

SEQ ID NO: 1697858 - RNA, 19 nt, Artificial Sequence
  Description of Artificial Sequence: Synthetic oligonucleotide
uucaugucgaaugucugga

SEQ ID NO: 1697859 - RNA, 19 nt, Artificial Sequence
  Description of Artificial Sequence: Synthetic oligonucleotide
guaaccgaagagugguagg

SEQ ID NO: 1697860 - RNA, 19 nt, Artificial Sequence
  Description of Artificial Sequence: Synthetic oligonucleotide
augauugccuagucuagug

SEQ ID NO: 1697861 - RNA, 19 nt, Artificial Sequence
  Description of Artificial Sequence: Synthetic oligonucleotide
uggaaaaccgguuccuuuc

SEQ ID NO: 1697862 - RNA, 19 nt, Artificial Sequence
  Description of Artificial Sequence: Synthetic oligonucleotide
uuucccuauacuguguggu

SEQ ID NO: 1697863 - RNA, 19 nt, Artificial Sequence
  Description of Artificial Sequence: Synthetic oligonucleotide
uuuaacacucugucuugga

SEQ ID NO: 1697864 - RNA, 19 nt, Artificial Sequence
  Description of Artificial Sequence: Synthetic oligonucleotide
uuuugaugauguaccgaac

SEQ ID NO: 1697865 - RNA, 19 nt, Artificial Sequence
  Description of Artificial Sequence: Synthetic oligonucleotide
aauauuggccagaguuggg

SEQ ID NO: 1697866 - RNA, 19 nt, Artificial Sequence
  Description of Artificial Sequence: Synthetic oligonucleotide
uauacuguguggucgucaa

SEQ ID NO: 1697867 - RNA, 19 nt, Artificial Sequence
  Description of Artificial Sequence: Synthetic oligonucleotide
uuccagugaaacuggacaa

SEQ ID NO: 1697868 - RNA, 19 nt, Artificial Sequence
  Description of Artificial Sequence: Synthetic oligonucleotide
ucgaauuucuggcaugauu

SEQ ID NO: 1697869 - RNA, 19 nt, Artificial Sequence
  Description of Artificial Sequence: Synthetic oligonucleotide
accgagagggucuacauua

SEQ ID NO: 1697870 - RNA, 19 nt, Artificial Sequence
  Description of Artificial Sequence: Synthetic oligonucleotide
uugcaaucucuucuggagu

SEQ ID NO: 1697871 - RNA, 19 nt, Artificial Sequence
  Description of Artificial Sequence: Synthetic oligonucleotide
aaccgaagagugguaggac

SEQ ID NO: 1697872 - RNA, 19 nt, Artificial Sequence
  Description of Artificial Sequence: Synthetic oligonucleotide
agugucuagcuugaucuuc

SEQ ID NO: 1697873 - RNA, 19 nt, Artificial Sequence
  Description of Artificial Sequence: Synthetic oligonucleotide
uaaccauuaggaggcagcc

SEQ ID NO: 1697874 - RNA, 19 nt, Artificial Sequence
  Description of Artificial Sequence: Synthetic oligonucleotide
ucgaaaggaggcugcgccg

SEQ ID NO: 1697875 - RNA, 19 nt, Artificial Sequence
  Description of Artificial Sequence: Synthetic oligonucleotide
acugaaagagcaaucggcu

SEQ ID NO: 1697876 - RNA, 19 nt, Artificial Sequence
  Description of Artificial Sequence: Synthetic oligonucleotide
uugaggcaaacugaaguca

SEQ ID NO: 1697877 - RNA, 19 nt, Artificial Sequence
  Description of Artificial Sequence: Synthetic oligonucleotide
acgggugacguguucuugg

SEQ ID NO: 1697878 - RNA, 19 nt, Artificial Sequence
  Description of Artificial Sequence: Synthetic oligonucleotide
cauuuacgauguuuaccgg

SEQ ID NO: 1697879 - RNA, 19 nt, Artificial Sequence
  Description of Artificial Sequence: Synthetic oligonucleotide
acauuaaccacggauggaa

SEQ ID NO: 1697880 - RNA, 19 nt, Artificial Sequence
  Description of Artificial Sequence: Synthetic oligonucleotide
uacgauguuuaccgggacu

SEQ ID NO: 1697881 - RNA, 19 nt, Artificial Sequence
  Description of Artificial Sequence: Synthetic oligonucleotide
ucguggaaaauaagauugu

SEQ ID NO: 1697882 - RNA, 19 nt, Artificial Sequence
  Description of Artificial Sequence: Synthetic oligonucleotide
uuuugcaucguguguucgu

SEQ ID NO: 1697883 - RNA, 19 nt, Artificial Sequence
  Description of Artificial Sequence: Synthetic oligonucleotide
gagauaguucuaccaguug

SEQ ID NO: 1697884 - RNA, 19 nt, Artificial Sequence
  Description of Artificial Sequence: Synthetic oligonucleotide
uucagggcauuuuguaugu

SEQ ID NO: 1697885 - RNA, 19 nt, Artificial Sequence
  Description of Artificial Sequence: Synthetic oligonucleotide
gagucacuguguaucaaag

SEQ ID NO: 1697886 - RNA, 19 nt, Artificial Sequence
  Description of Artificial Sequence: Synthetic oligonucleotide
uuugcaucguguguucgug

SEQ ID NO: 1697887 - RNA, 19 nt, Artificial Sequence
  Description of Artificial Sequence: Synthetic oligonucleotide
ucgucaacacuucuccuuc

SEQ ID NO: 1697888 - RNA, 19 nt, Artificial Sequence
  Description of Artificial Sequence: Synthetic oligonucleotide
guaaccauuaggaggcagc

SEQ ID NO: 1697889 - RNA, 19 nt, Artificial Sequence
  Description of Artificial Sequence: Synthetic oligonucleotide
aguuguuuuaacacucugu

SEQ ID NO: 1697890 - RNA, 19 nt, Artificial Sequence
  Description of Artificial Sequence: Synthetic oligonucleotide
aaaccgguuccuuucuuuu

SEQ ID NO: 1697891 - RNA, 19 nt, Artificial Sequence
  Description of Artificial Sequence: Synthetic oligonucleotide
acacugcaaaaucacauuu

SEQ ID NO: 1697892 - RNA, 19 nt, Artificial Sequence
  Description of Artificial Sequence: Synthetic oligonucleotide
ugcuaugagggacaugguu

SEQ ID NO: 1697893 - RNA, 19 nt, Artificial Sequence
  Description of Artificial Sequence: Synthetic oligonucleotide
ggaaauuccaggccggcug

SEQ ID NO: 1697894 - RNA, 19 nt, Artificial Sequence
  Description of Artificial Sequence: Synthetic oligonucleotide
ucaugucgaaugucuggag

SEQ ID NO: 1697895 - RNA, 19 nt, Artificial Sequence
  Description of Artificial Sequence: Synthetic oligonucleotide
uccuuaucagacucagagu

SEQ ID NO: 1697896 - RNA, 19 nt, Artificial Sequence
  Description of Artificial Sequence: Synthetic oligonucleotide
cauaccaggagcaugcaua

SEQ ID NO: 1697897 - RNA, 19 nt, Artificial Sequence
  Description of Artificial Sequence: Synthetic oligonucleotide
ucuagugccugcucucugu

SEQ ID NO: 1697898 - RNA, 19 nt, Artificial Sequence
  Description of Artificial Sequence: Synthetic oligonucleotide
ugugauacgcgggguaacc

SEQ ID NO: 1697899 - RNA, 19 nt, Artificial Sequence
  Description of Artificial Sequence: Synthetic oligonucleotide
aacuugaggcuucgaauuu

SEQ ID NO: 1697900 - RNA, 19 nt, Artificial Sequence
  Description of Artificial Sequence: Synthetic oligonucleotide
cucuugagauaguucuacc

SEQ ID NO: 1697901 - RNA, 19 nt, Artificial Sequence
  Description of Artificial Sequence: Synthetic oligonucleotide
gauguaccgaacacacugc

SEQ ID NO: 1697902 - RNA, 19 nt, Artificial Sequence
  Description of Artificial Sequence: Synthetic oligonucleotide
agcaaucggcuucagggca

SEQ ID NO: 1697903 - RNA, 19 nt, Artificial Sequence
  Description of Artificial Sequence: Synthetic oligonucleotide
guaccgaacacacugcaaa

SEQ ID NO: 1697904 - RNA, 19 nt, Artificial Sequence
  Description of Artificial Sequence: Synthetic oligonucleotide
cauuuuguauguucagaca

SEQ ID NO: 1697905 - RNA, 19 nt, Artificial Sequence
  Description of Artificial Sequence: Synthetic oligonucleotide
agagucacuguguaucaaa

SEQ ID NO: 1697906 - RNA, 19 nt, Artificial Sequence
  Description of Artificial Sequence: Synthetic oligonucleotide
aaggcgucgaggcuuggaa

SEQ ID NO: 1697907 - RNA, 19 nt, Artificial Sequence
  Description of Artificial Sequence: Synthetic oligonucleotide
gggguaaccauuaggaggc

SEQ ID NO: 1697908 - RNA, 19 nt, Artificial Sequence
  Description of Artificial Sequence: Synthetic oligonucleotide
aauuaguauuaaguccaaa

SEQ ID NO: 1697909 - RNA, 19 nt, Artificial Sequence
  Description of Artificial Sequence: Synthetic oligonucleotide
ucugcacguggguuguucc

SEQ ID NO: 1697910 - RNA, 19 nt, Artificial Sequence
  Description of Artificial Sequence: Synthetic oligonucleotide
ugcaucguguguucgugga

SEQ ID NO: 1697911 - RNA, 19 nt, Artificial Sequence
  Description of Artificial Sequence: Synthetic oligonucleotide
aucuuugccaucugugaau

SEQ ID NO: 1697912 - RNA, 19 nt, Artificial Sequence
  Description of Artificial Sequence: Synthetic oligonucleotide
aaagccacgaucacaggua

SEQ ID NO: 1697913 - RNA, 19 nt, Artificial Sequence
  Description of Artificial Sequence: Synthetic oligonucleotide
agguacuacaguccuuugu

SEQ ID NO: 1697914 - RNA, 19 nt, Artificial Sequence
  Description of Artificial Sequence: Synthetic oligonucleotide
gauggaacuugaggcuucg

SEQ ID NO: 1697915 - RNA, 19 nt, Artificial Sequence
  Description of Artificial Sequence: Synthetic oligonucleotide
auuuugcaucguguguucg

SEQ ID NO: 1697916 - RNA, 19 nt, Artificial Sequence
  Description of Artificial Sequence: Synthetic oligonucleotide
acuugaggcuucgaauuuc

SEQ ID NO: 1697917 - RNA, 19 nt, Artificial Sequence
  Description of Artificial Sequence: Synthetic oligonucleotide
cacauuucuuucaugucga

SEQ ID NO: 1697918 - RNA, 19 nt, Artificial Sequence
  Description of Artificial Sequence: Synthetic oligonucleotide
uagugggugguaacaacuc

SEQ ID NO: 1697919 - RNA, 19 nt, Artificial Sequence
  Description of Artificial Sequence: Synthetic oligonucleotide
cauuaaccacggauggaac

SEQ ID NO: 1697920 - RNA, 19 nt, Artificial Sequence
  Description of Artificial Sequence: Synthetic oligonucleotide
accgguuccuuucuuuucu

SEQ ID NO: 1697921 - RNA, 19 nt, Artificial Sequence
  Description of Artificial Sequence: Synthetic oligonucleotide
ggugacguguucuugguuc

SEQ ID NO: 1697922 - RNA, 19 nt, Artificial Sequence
  Description of Artificial Sequence: Synthetic oligonucleotide
uguaccgaacacacugcaa

SEQ ID NO: 1697923 - RNA, 19 nt, Artificial Sequence
  Description of Artificial Sequence: Synthetic oligonucleotide
ggagugucuagcuugaucu

SEQ ID NO: 1697924 - RNA, 19 nt, Artificial Sequence
  Description of Artificial Sequence: Synthetic oligonucleotide
guguucguggaaaauaaga

SEQ ID NO: 1697925 - RNA, 19 nt, Artificial Sequence
  Description of Artificial Sequence: Synthetic oligonucleotide
gguaggacgugugauacgc

SEQ ID NO: 1697926 - RNA, 19 nt, Artificial Sequence
  Description of Artificial Sequence: Synthetic oligonucleotide
uuaaccacggauggaacuu

SEQ ID NO: 1697927 - RNA, 19 nt, Artificial Sequence
  Description of Artificial Sequence: Synthetic oligonucleotide
ccucauaccaggagcaugc

SEQ ID NO: 1697928 - RNA, 19 nt, Artificial Sequence
  Description of Artificial Sequence: Synthetic oligonucleotide
auaccaggagcaugcauau

SEQ ID NO: 1697929 - RNA, 19 nt, Artificial Sequence
  Description of Artificial Sequence: Synthetic oligonucleotide
uggugucaccuccuuaggu

SEQ ID NO: 1697930 - RNA, 19 nt, Artificial Sequence
  Description of Artificial Sequence: Synthetic oligonucleotide
uggcaugauugccuagucu

SEQ ID NO: 1697931 - RNA, 19 nt, Artificial Sequence
  Description of Artificial Sequence: Synthetic oligonucleotide
uuacgauguuuaccgggac

SEQ ID NO: 1697932 - RNA, 19 nt, Artificial Sequence
  Description of Artificial Sequence: Synthetic oligonucleotide
ugaggcaucgacucagcuu

SEQ ID NO: 1697933 - RNA, 19 nt, Artificial Sequence
  Description of Artificial Sequence: Synthetic oligonucleotide
auguaccgaacacacugca

SEQ ID NO: 1697934 - RNA, 19 nt, Artificial Sequence
  Description of Artificial Sequence: Synthetic oligonucleotide
caugguuuucugucaggac

SEQ ID NO: 1697935 - RNA, 19 nt, Artificial Sequence
  Description of Artificial Sequence: Synthetic oligonucleotide
uucuguuuugaggcaaacu

SEQ ID NO: 1697936 - RNA, 19 nt, Artificial Sequence
  Description of Artificial Sequence: Synthetic oligonucleotide
uucacagaauuaguauuaa

SEQ ID NO: 1697937 - RNA, 19 nt, Artificial Sequence
  Description of Artificial Sequence: Synthetic oligonucleotide
uuucaauauuggccagagu

SEQ ID NO: 1697938 - RNA, 19 nt, Artificial Sequence
  Description of Artificial Sequence: Synthetic oligonucleotide
acuguguaucaaagcaccg

SEQ ID NO: 1697939 - RNA, 19 nt, Artificial Sequence
  Description of Artificial Sequence: Synthetic oligonucleotide
gaaagagcaaucggcuuca

SEQ ID NO: 1697940 - RNA, 19 nt, Artificial Sequence
  Description of Artificial Sequence: Synthetic oligonucleotide
uacauuaaccacggaugga

SEQ ID NO: 1697941 - RNA, 19 nt, Artificial Sequence
  Description of Artificial Sequence: Synthetic oligonucleotide
aucagcgaacacaaggcug

SEQ ID NO: 1697942 - RNA, 19 nt, Artificial Sequence
  Description of Artificial Sequence: Synthetic oligonucleotide
uguggucgucaacacuucu

SEQ ID NO: 1697943 - RNA, 19 nt, Artificial Sequence
  Description of Artificial Sequence: Synthetic oligonucleotide
ucgaggcuuggaaauucca

SEQ ID NO: 1697944 - RNA, 19 nt, Artificial Sequence
  Description of Artificial Sequence: Synthetic oligonucleotide
gucuacauuaaccacggau

SEQ ID NO: 1697945 - RNA, 19 nt, Artificial Sequence
  Description of Artificial Sequence: Synthetic oligonucleotide
uguuuaccgggacuucuua

SEQ ID NO: 1697946 - RNA, 19 nt, Artificial Sequence
  Description of Artificial Sequence: Synthetic oligonucleotide
agugguaggacgugugaua

SEQ ID NO: 1697947 - RNA, 19 nt, Artificial Sequence
  Description of Artificial Sequence: Synthetic oligonucleotide
ugauacgcgggguaaccau

SEQ ID NO: 1697948 - RNA, 19 nt, Artificial Sequence
  Description of Artificial Sequence: Synthetic oligonucleotide
gaaacaugaggcaucgacu

SEQ ID NO: 1697949 - RNA, 19 nt, Artificial Sequence
  Description of Artificial Sequence: Synthetic oligonucleotide
auacuguguggucgucaac

SEQ ID NO: 1697950 - RNA, 19 nt, Artificial Sequence
  Description of Artificial Sequence: Synthetic oligonucleotide
ucgaaugucuggagcuaga

SEQ ID NO: 1697951 - RNA, 19 nt, Artificial Sequence
  Description of Artificial Sequence: Synthetic oligonucleotide
caucugugaaugucuggac

SEQ ID NO: 1697952 - RNA, 19 nt, Artificial Sequence
  Description of Artificial Sequence: Synthetic oligonucleotide
uaccgaacacacugcaaaa

SEQ ID NO: 1697953 - RNA, 19 nt, Artificial Sequence
  Description of Artificial Sequence: Synthetic oligonucleotide
acgcgggguaaccauuagg

SEQ ID NO: 1697954 - RNA, 19 nt, Artificial Sequence
  Description of Artificial Sequence: Synthetic oligonucleotide
ugggugguaacaacucuuu

SEQ ID NO: 1697955 - RNA, 19 nt, Artificial Sequence
  Description of Artificial Sequence: Synthetic oligonucleotide
caaauagugggugguaaca

SEQ ID NO: 1697956 - RNA, 19 nt, Artificial Sequence
  Description of Artificial Sequence: Synthetic oligonucleotide
ucauaccaggagcaugcau

SEQ ID NO: 1697957 - RNA, 19 nt, Artificial Sequence
  Description of Artificial Sequence: Synthetic oligonucleotide
gcacugaaagagcaaucgg

SEQ ID NO: 1697958 - RNA, 19 nt, Artificial Sequence
  Description of Artificial Sequence: Synthetic oligonucleotide
uucuuaucuuugccaucug

SEQ ID NO: 1697959 - RNA, 19 nt, Artificial Sequence
  Description of Artificial Sequence: Synthetic oligonucleotide
gacuucuuaucuuugccau

SEQ ID NO: 1697960 - RNA, 19 nt, Artificial Sequence
  Description of Artificial Sequence: Synthetic oligonucleotide
guagcugcucaucagcgaa

SEQ ID NO: 1697961 - RNA, 19 nt, Artificial Sequence
  Description of Artificial Sequence: Synthetic oligonucleotide
gggacuucuuaucuuugcc

SEQ ID NO: 1697962 - RNA, 19 nt, Artificial Sequence
  Description of Artificial Sequence: Synthetic oligonucleotide
ggcaugauugccuagucua

SEQ ID NO: 1697963 - RNA, 19 nt, Artificial Sequence
  Description of Artificial Sequence: Synthetic oligonucleotide
ugcgccgcgggaagaaucu

SEQ ID NO: 1697964 - RNA, 19 nt, Artificial Sequence
  Description of Artificial Sequence: Synthetic oligonucleotide
gugguaggacgugugauac

SEQ ID NO: 1697965 - RNA, 19 nt, Artificial Sequence
  Description of Artificial Sequence: Synthetic oligonucleotide
uuggaaauuccaggccggc

SEQ ID NO: 1697966 - RNA, 19 nt, Artificial Sequence
  Description of Artificial Sequence: Synthetic oligonucleotide
uucccuauacugugugguc

SEQ ID NO: 1697967 - RNA, 19 nt, Artificial Sequence
  Description of Artificial Sequence: Synthetic oligonucleotide
agugccugcucucugucua

SEQ ID NO: 1697968 - RNA, 19 nt, Artificial Sequence
  Description of Artificial Sequence: Synthetic oligonucleotide
uagucuagugccugcucuc

SEQ ID NO: 1697969 - RNA, 19 nt, Artificial Sequence
  Description of Artificial Sequence: Synthetic oligonucleotide
ucaaagcaccgagaggguc

SEQ ID NO: 1697970 - RNA, 19 nt, Artificial Sequence
  Description of Artificial Sequence: Synthetic oligonucleotide
uaaccacggauggaacuug

SEQ ID NO: 1697971 - RNA, 19 nt, Artificial Sequence
  Description of Artificial Sequence: Synthetic oligonucleotide
acguguucuugguucaaau

SEQ ID NO: 1697972 - RNA, 19 nt, Artificial Sequence
  Description of Artificial Sequence: Synthetic oligonucleotide
caugaggcaucgacucagc

SEQ ID NO: 1697973 - RNA, 19 nt, Artificial Sequence
  Description of Artificial Sequence: Synthetic oligonucleotide
cacgaucacagguaucaca

SEQ ID NO: 1697974 - RNA, 19 nt, Artificial Sequence
  Description of Artificial Sequence: Synthetic oligonucleotide
gacccagaaacacugccgu

SEQ ID NO: 1697975 - RNA, 19 nt, Artificial Sequence
  Description of Artificial Sequence: Synthetic oligonucleotide
uugccuagucuagugccug

SEQ ID NO: 1697976 - RNA, 19 nt, Artificial Sequence
  Description of Artificial Sequence: Synthetic oligonucleotide
acgauguuuaccgggacuu

SEQ ID NO: 1697977 - RNA, 19 nt, Artificial Sequence
  Description of Artificial Sequence: Synthetic oligonucleotide
gugaaugucuggacaugcc

SEQ ID NO: 1697978 - RNA, 19 nt, Artificial Sequence
  Description of Artificial Sequence: Synthetic oligonucleotide
uuagggcuaucuuccugaa

SEQ ID NO: 1697979 - RNA, 19 nt, Artificial Sequence
  Description of Artificial Sequence: Synthetic oligonucleotide
uucuggcaugauugccuag

SEQ ID NO: 1697980 - RNA, 19 nt, Artificial Sequence
  Description of Artificial Sequence: Synthetic oligonucleotide
gaaugucuggacaugcccu

SEQ ID NO: 1697981 - RNA, 19 nt, Artificial Sequence
  Description of Artificial Sequence: Synthetic oligonucleotide
ugaagccauuccucuggcu

SEQ ID NO: 1697982 - RNA, 19 nt, Artificial Sequence
  Description of Artificial Sequence: Synthetic oligonucleotide
gggaagaaucugagcaucg

SEQ ID NO: 1697983 - RNA, 19 nt, Artificial Sequence
  Description of Artificial Sequence: Synthetic oligonucleotide
aggcuucgaauuucuggca

SEQ ID NO: 1697984 - RNA, 19 nt, Artificial Sequence
  Description of Artificial Sequence: Synthetic oligonucleotide
uggaaauuccaggccggcu

SEQ ID NO: 1697985 - RNA, 19 nt, Artificial Sequence
  Description of Artificial Sequence: Synthetic oligonucleotide
gacaucugcuucagacuug

SEQ ID NO: 1697986 - RNA, 19 nt, Artificial Sequence
  Description of Artificial Sequence: Synthetic oligonucleotide
auaguucuaccaguuguuu

SEQ ID NO: 1697987 - RNA, 19 nt, Artificial Sequence
  Description of Artificial Sequence: Synthetic oligonucleotide
ugccuagucuagugccugc

SEQ ID NO: 1697988 - RNA, 19 nt, Artificial Sequence
  Description of Artificial Sequence: Synthetic oligonucleotide
gaauuaguauuaaguccaa

SEQ ID NO: 1697989 - RNA, 19 nt, Artificial Sequence
  Description of Artificial Sequence: Synthetic oligonucleotide
guguguucguggaaaauaa

SEQ ID NO: 1697990 - RNA, 19 nt, Artificial Sequence
  Description of Artificial Sequence: Synthetic oligonucleotide
aaagagcaaucggcuucag

SEQ ID NO: 1697991 - RNA, 19 nt, Artificial Sequence
  Description of Artificial Sequence: Synthetic oligonucleotide
ugcccuucauuuucccuau

SEQ ID NO: 1697992 - RNA, 19 nt, Artificial Sequence
  Description of Artificial Sequence: Synthetic oligonucleotide
aucguguguucguggaaaa

SEQ ID NO: 1697993 - RNA, 19 nt, Artificial Sequence
  Description of Artificial Sequence: Synthetic oligonucleotide
auugccuagucuagugccu

SEQ ID NO: 1697994 - RNA, 19 nt, Artificial Sequence
  Description of Artificial Sequence: Synthetic oligonucleotide
aggcaaacugaagucaauu

SEQ ID NO: 1697995 - RNA, 19 nt, Artificial Sequence
  Description of Artificial Sequence: Synthetic oligonucleotide
gugacguguucuugguuca

SEQ ID NO: 1697996 - RNA, 19 nt, Artificial Sequence
  Description of Artificial Sequence: Synthetic oligonucleotide
cauuuccaggagguacggg

SEQ ID NO: 1697997 - RNA, 19 nt, Artificial Sequence
  Description of Artificial Sequence: Synthetic oligonucleotide
gggcauuuuguauguucag

SEQ ID NO: 1697998 - RNA, 19 nt, Artificial Sequence
  Description of Artificial Sequence: Synthetic oligonucleotide
agguacgggugacguguuc

SEQ ID NO: 1697999 - RNA, 19 nt, Artificial Sequence
  Description of Artificial Sequence: Synthetic oligonucleotide
caucgaaaggaggcugcgc

SEQ ID NO: 1698000 - RNA, 19 nt, Artificial Sequence
  Description of Artificial Sequence: Synthetic oligonucleotide
gucaggacaucugcuucag

SEQ ID NO: 1698001 - RNA, 19 nt, Artificial Sequence
  Description of Artificial Sequence: Synthetic oligonucleotide
cuccaacuuggcucuugag

SEQ ID NO: 1698002 - RNA, 19 nt, Artificial Sequence
  Description of Artificial Sequence: Synthetic oligonucleotide
gccacgaucacagguauca

SEQ ID NO: 1698003 - RNA, 19 nt, Artificial Sequence
  Description of Artificial Sequence: Synthetic oligonucleotide
guaggacgugugauacgcg

SEQ ID NO: 1698004 - RNA, 19 nt, Artificial Sequence
  Description of Artificial Sequence: Synthetic oligonucleotide
uaccaaggcgucgaggcuu

SEQ ID NO: 1698005 - RNA, 19 nt, Artificial Sequence
  Description of Artificial Sequence: Synthetic oligonucleotide
uacgggugacguguucuug

SEQ ID NO: 1698006 - RNA, 19 nt, Artificial Sequence
  Description of Artificial Sequence: Synthetic oligonucleotide
ggugucaccuccuuaggua

SEQ ID NO: 1698007 - RNA, 19 nt, Artificial Sequence
  Description of Artificial Sequence: Synthetic oligonucleotide
cuagugccugcucucuguc

SEQ ID NO: 1698008 - RNA, 19 nt, Artificial Sequence
  Description of Artificial Sequence: Synthetic oligonucleotide
cuagucuagugccugcucu

SEQ ID NO: 1698009 - RNA, 19 nt, Artificial Sequence
  Description of Artificial Sequence: Synthetic oligonucleotide
gauaguucuaccaguuguu

SEQ ID NO: 1698010 - RNA, 19 nt, Artificial Sequence
  Description of Artificial Sequence: Synthetic oligonucleotide
accgaacacacugcaaaau

SEQ ID NO: 1698011 - RNA, 19 nt, Artificial Sequence
  Description of Artificial Sequence: Synthetic oligonucleotide
ccguagcugcucaucagcg

SEQ ID NO: 1698012 - RNA, 19 nt, Artificial Sequence
  Description of Artificial Sequence: Synthetic oligonucleotide
ugucgaaugucuggagcua

SEQ ID NO: 1698013 - RNA, 19 nt, Artificial Sequence
  Description of Artificial Sequence: Synthetic oligonucleotide
cugugaaugucuggacaug

SEQ ID NO: 1698014 - RNA, 19 nt, Artificial Sequence
  Description of Artificial Sequence: Synthetic oligonucleotide
gcucuugagauaguucuac

SEQ ID NO: 1698015 - RNA, 19 nt, Artificial Sequence
  Description of Artificial Sequence: Synthetic oligonucleotide
ccgaacacacugcaaaauc

SEQ ID NO: 1698016 - RNA, 19 nt, Artificial Sequence
  Description of Artificial Sequence: Synthetic oligonucleotide
cuggcaugauugccuaguc

SEQ ID NO: 1698017 - RNA, 19 nt, Artificial Sequence
  Description of Artificial Sequence: Synthetic oligonucleotide
agucuagugccugcucucu

SEQ ID NO: 1698018 - RNA, 19 nt, Artificial Sequence
  Description of Artificial Sequence: Synthetic oligonucleotide
aaagcaccgagagggucua

SEQ ID NO: 1698019 - RNA, 19 nt, Artificial Sequence
  Description of Artificial Sequence: Synthetic oligonucleotide
gucuagcuugaucuuccuc

SEQ ID NO: 1698020 - RNA, 19 nt, Artificial Sequence
  Description of Artificial Sequence: Synthetic oligonucleotide
aaccacggauggaacuuga

SEQ ID NO: 1698021 - RNA, 19 nt, Artificial Sequence
  Description of Artificial Sequence: Synthetic oligonucleotide
gucgaggcuuggaaauucc

SEQ ID NO: 1698022 - RNA, 19 nt, Artificial Sequence
  Description of Artificial Sequence: Synthetic oligonucleotide
caguaccaaggcgucgagg

SEQ ID NO: 1698023 - RNA, 19 nt, Artificial Sequence
  Description of Artificial Sequence: Synthetic oligonucleotide
gguaaccauuaggaggcag

SEQ ID NO: 1698024 - RNA, 19 nt, Artificial Sequence
  Description of Artificial Sequence: Synthetic oligonucleotide
gucuagugccugcucucug

SEQ ID NO: 1698025 - RNA, 19 nt, Artificial Sequence
  Description of Artificial Sequence: Synthetic oligonucleotide
gggcuaucuuccugaagcc

SEQ ID NO: 1698026 - RNA, 19 nt, Artificial Sequence
  Description of Artificial Sequence: Synthetic oligonucleotide
uacaguccuuugugguuuc

SEQ ID NO: 1698027 - RNA, 19 nt, Artificial Sequence
  Description of Artificial Sequence: Synthetic oligonucleotide
ccagaaacacugccguagc

SEQ ID NO: 1698028 - RNA, 19 nt, Artificial Sequence
  Description of Artificial Sequence: Synthetic oligonucleotide
gcgggguaaccauuaggag

SEQ ID NO: 1698029 - RNA, 19 nt, Artificial Sequence
  Description of Artificial Sequence: Synthetic oligonucleotide
guggucgucaacacuucuc

SEQ ID NO: 1698030 - RNA, 19 nt, Artificial Sequence
  Description of Artificial Sequence: Synthetic oligonucleotide
gcgaacacaaggcuggugu

SEQ ID NO: 1698031 - RNA, 19 nt, Artificial Sequence
  Description of Artificial Sequence: Synthetic oligonucleotide
gaagcgcuccggagagagg

SEQ ID NO: 1698032 - RNA, 19 nt, Artificial Sequence
  Description of Artificial Sequence: Synthetic oligonucleotide
guguaucaaagcaccgaga

SEQ ID NO: 1698033 - RNA, 19 nt, Artificial Sequence
  Description of Artificial Sequence: Synthetic oligonucleotide
acgugugauacgcggggua

SEQ ID NO: 1698034 - RNA, 19 nt, Artificial Sequence
  Description of Artificial Sequence: Synthetic oligonucleotide
caucguguguucguggaaa

SEQ ID NO: 1698035 - RNA, 19 nt, Artificial Sequence
  Description of Artificial Sequence: Synthetic oligonucleotide
agccauuccucuggcucuc

SEQ ID NO: 1698036 - RNA, 19 nt, Artificial Sequence
  Description of Artificial Sequence: Synthetic oligonucleotide
cgaacacacugcaaaauca

SEQ ID NO: 1698037 - RNA, 19 nt, Artificial Sequence
  Description of Artificial Sequence: Synthetic oligonucleotide
gaagagugguaggacgugu

SEQ ID NO: 1698038 - RNA, 19 nt, Artificial Sequence
  Description of Artificial Sequence: Synthetic oligonucleotide
aggcgucgaggcuuggaaa

SEQ ID NO: 1698039 - RNA, 19 nt, Artificial Sequence
  Description of Artificial Sequence: Synthetic oligonucleotide
augauguaccgaacacacu

SEQ ID NO: 1698040 - RNA, 19 nt, Artificial Sequence
  Description of Artificial Sequence: Synthetic oligonucleotide
cuuccuuaucagacucaga

SEQ ID NO: 1698041 - RNA, 19 nt, Artificial Sequence
  Description of Artificial Sequence: Synthetic oligonucleotide
ugccugcucucugucuacc

SEQ ID NO: 1698042 - RNA, 19 nt, Artificial Sequence
  Description of Artificial Sequence: Synthetic oligonucleotide
ggcaucgaaaggaggcugc

SEQ ID NO: 1698043 - RNA, 19 nt, Artificial Sequence
  Description of Artificial Sequence: Synthetic oligonucleotide
ucguguguucguggaaaau

SEQ ID NO: 1698044 - RNA, 19 nt, Artificial Sequence
  Description of Artificial Sequence: Synthetic oligonucleotide
uaccgggacuucuuaucuu

SEQ ID NO: 1698045 - RNA, 19 nt, Artificial Sequence
  Description of Artificial Sequence: Synthetic oligonucleotide
ugcacguggguuguuccuu

SEQ ID NO: 1698046 - RNA, 19 nt, Artificial Sequence
  Description of Artificial Sequence: Synthetic oligonucleotide
gagagaggcugcgucugca

SEQ ID NO: 1698047 - RNA, 19 nt, Artificial Sequence
  Description of Artificial Sequence: Synthetic oligonucleotide
gucgucaacacuucuccuu

SEQ ID NO: 1698048 - RNA, 19 nt, Artificial Sequence
  Description of Artificial Sequence: Synthetic oligonucleotide
gcauuuccaggagguacgg

SEQ ID NO: 1698049 - RNA, 19 nt, Artificial Sequence
  Description of Artificial Sequence: Synthetic oligonucleotide
cugcgccgcgggaagaauc

SEQ ID NO: 1698050 - RNA, 19 nt, Artificial Sequence
  Description of Artificial Sequence: Synthetic oligonucleotide
cauuuucccuauacugugu

SEQ ID NO: 1698051 - RNA, 19 nt, Artificial Sequence
  Description of Artificial Sequence: Synthetic oligonucleotide
accacggauggaacuugag

SEQ ID NO: 1698052 - RNA, 19 nt, Artificial Sequence
  Description of Artificial Sequence: Synthetic oligonucleotide
cuaugagggacaugguuuu

SEQ ID NO: 1698053 - RNA, 19 nt, Artificial Sequence
  Description of Artificial Sequence: Synthetic oligonucleotide
agcgaacacaaggcuggug

SEQ ID NO: 1698054 - RNA, 19 nt, Artificial Sequence
  Description of Artificial Sequence: Synthetic oligonucleotide
gcaucgaaaggaggcugcg

SEQ ID NO: 1698055 - RNA, 19 nt, Artificial Sequence
  Description of Artificial Sequence: Synthetic oligonucleotide
cagacauauguaugucaua

SEQ ID NO: 1698056 - RNA, 19 nt, Artificial Sequence
  Description of Artificial Sequence: Synthetic oligonucleotide
caucagcgaacacaaggcu

SEQ ID NO: 1698057 - RNA, 19 nt, Artificial Sequence
  Description of Artificial Sequence: Synthetic oligonucleotide
gacguguucuugguucaaa

SEQ ID NO: 1698058 - RNA, 19 nt, Artificial Sequence
  Description of Artificial Sequence: Synthetic oligonucleotide
guuuaccgggacuucuuau

SEQ ID NO: 1698059 - RNA, 19 nt, Artificial Sequence
  Description of Artificial Sequence: Synthetic oligonucleotide
aagcaccgagagggucuac

SEQ ID NO: 1698060 - RNA, 19 nt, Artificial Sequence
  Description of Artificial Sequence: Synthetic oligonucleotide
aucuucucgugugcacuga

SEQ ID NO: 1698061 - RNA, 19 nt, Artificial Sequence
  Description of Artificial Sequence: Synthetic oligonucleotide
gaagucaauuuugcaucgu

SEQ ID NO: 1698062 - RNA, 19 nt, Artificial Sequence
  Description of Artificial Sequence: Synthetic oligonucleotide
gugauacgcgggguaacca

SEQ ID NO: 1698063 - RNA, 19 nt, Artificial Sequence
  Description of Artificial Sequence: Synthetic oligonucleotide
cucuccaacuuggcucuug

SEQ ID NO: 1698064 - RNA, 19 nt, Artificial Sequence
  Description of Artificial Sequence: Synthetic oligonucleotide
caguccuuugugguuucuc

SEQ ID NO: 1698065 - RNA, 19 nt, Artificial Sequence
  Description of Artificial Sequence: Synthetic oligonucleotide
ggccgcuguacugaggcug

SEQ ID NO: 1698066 - RNA, 19 nt, Artificial Sequence
  Description of Artificial Sequence: Synthetic oligonucleotide
cgcgggguaaccauuagga

SEQ ID NO: 1698067 - RNA, 19 nt, Artificial Sequence
  Description of Artificial Sequence: Synthetic oligonucleotide
gugugauacgcgggguaac

SEQ ID NO: 1698068 - RNA, 19 nt, Artificial Sequence
  Description of Artificial Sequence: Synthetic oligonucleotide
caaucuucucgugugcacu

SEQ ID NO: 1698069 - RNA, 19 nt, Artificial Sequence
  Description of Artificial Sequence: Synthetic oligonucleotide
accaaggcgucgaggcuug

SEQ ID NO: 1698070 - RNA, 19 nt, Artificial Sequence
  Description of Artificial Sequence: Synthetic oligonucleotide
ugacguguucuugguucaa

SEQ ID NO: 1698071 - RNA, 19 nt, Artificial Sequence
  Description of Artificial Sequence: Synthetic oligonucleotide
ucaccuccuuagguacuac

SEQ ID NO: 1698072 - RNA, 19 nt, Artificial Sequence
  Description of Artificial Sequence: Synthetic oligonucleotide
auguuuaccgggacuucuu

SEQ ID NO: 1698073 - RNA, 19 nt, Artificial Sequence
  Description of Artificial Sequence: Synthetic oligonucleotide
agccacgaucacagguauc

SEQ ID NO: 1698074 - RNA, 19 nt, Artificial Sequence
  Description of Artificial Sequence: Synthetic oligonucleotide
gcuaugagggacaugguuu

SEQ ID NO: 1698075 - RNA, 19 nt, Artificial Sequence
  Description of Artificial Sequence: Synthetic oligonucleotide
gucugcacguggguuguuc

SEQ ID NO: 1698076 - RNA, 19 nt, Artificial Sequence
  Description of Artificial Sequence: Synthetic oligonucleotide
caugauugccuagucuagu

SEQ ID NO: 1698077 - RNA, 19 nt, Artificial Sequence
  Description of Artificial Sequence: Synthetic oligonucleotide
auacgcgggguaaccauua

SEQ ID NO: 1698078 - RNA, 19 nt, Artificial Sequence
  Description of Artificial Sequence: Synthetic oligonucleotide
gacugcuaugagggacaug

SEQ ID NO: 1698079 - RNA, 19 nt, Artificial Sequence
  Description of Artificial Sequence: Synthetic oligonucleotide
gagugguaggacgugugau

SEQ ID NO: 1698080 - RNA, 19 nt, Artificial Sequence
  Description of Artificial Sequence: Synthetic oligonucleotide
ggaaaaccgguuccuuucu

SEQ ID NO: 1698081 - RNA, 19 nt, Artificial Sequence
  Description of Artificial Sequence: Synthetic oligonucleotide
ggcuaucuuccugaagcca

SEQ ID NO: 1698082 - RNA, 19 nt, Artificial Sequence
  Description of Artificial Sequence: Synthetic oligonucleotide
cuguacugaggcuguacau

SEQ ID NO: 1698083 - RNA, 19 nt, Artificial Sequence
  Description of Artificial Sequence: Synthetic oligonucleotide
ggcucuccaacuuggcucu

SEQ ID NO: 1698084 - RNA, 19 nt, Artificial Sequence
  Description of Artificial Sequence: Synthetic oligonucleotide
ggauggaacuugaggcuuc

SEQ ID NO: 1698085 - RNA, 19 nt, Artificial Sequence
  Description of Artificial Sequence: Synthetic oligonucleotide
gauacgcgggguaaccauu

SEQ ID NO: 1698086 - RNA, 19 nt, Artificial Sequence
  Description of Artificial Sequence: Synthetic oligonucleotide
ccuuagguacuacaguccu

SEQ ID NO: 1698087 - RNA, 19 nt, Artificial Sequence
  Description of Artificial Sequence: Synthetic oligonucleotide
guguggucgucaacacuuc

SEQ ID NO: 1698088 - RNA, 19 nt, Artificial Sequence
  Description of Artificial Sequence: Synthetic oligonucleotide
acaguccuuugugguuucu

SEQ ID NO: 1698089 - RNA, 19 nt, Artificial Sequence
  Description of Artificial Sequence: Synthetic oligonucleotide
ucagggcauuuuguauguu

SEQ ID NO: 1698090 - RNA, 19 nt, Artificial Sequence
  Description of Artificial Sequence: Synthetic oligonucleotide
ggcaucgacucagcuucag

SEQ ID NO: 1698091 - RNA, 19 nt, Artificial Sequence
  Description of Artificial Sequence: Synthetic oligonucleotide
cuacaguccuuugugguuu

SEQ ID NO: 1698092 - RNA, 19 nt, Artificial Sequence
  Description of Artificial Sequence: Synthetic oligonucleotide
gcuaucuuccugaagccau

SEQ ID NO: 1698093 - RNA, 19 nt, Artificial Sequence
  Description of Artificial Sequence: Synthetic oligonucleotide
gucaccuccuuagguacua

SEQ ID NO: 1698094 - RNA, 19 nt, Artificial Sequence
  Description of Artificial Sequence: Synthetic oligonucleotide
ccuagucuagugccugcuc

SEQ ID NO: 1698095 - RNA, 19 nt, Artificial Sequence
  Description of Artificial Sequence: Synthetic oligonucleotide
gguacgggugacguguucu

SEQ ID NO: 1698096 - RNA, 19 nt, Artificial Sequence
  Description of Artificial Sequence: Synthetic oligonucleotide
cuuagguacuacaguccuu

SEQ ID NO: 1698097 - RNA, 19 nt, Artificial Sequence
  Description of Artificial Sequence: Synthetic oligonucleotide
cgaaaggaggcugcgccgc

SEQ ID NO: 1698098 - RNA, 19 nt, Artificial Sequence
  Description of Artificial Sequence: Synthetic oligonucleotide
ggcgucgaggcuuggaaau

SEQ ID NO: 1698099 - RNA, 19 nt, Artificial Sequence
  Description of Artificial Sequence: Synthetic oligonucleotide
cuuggcucuugagauaguu

SEQ ID NO: 1698100 - RNA, 19 nt, Artificial Sequence
  Description of Artificial Sequence: Synthetic oligonucleotide
ccgggacuucuuaucuuug

SEQ ID NO: 1698101 - RNA, 19 nt, Artificial Sequence
  Description of Artificial Sequence: Synthetic oligonucleotide
gccagaguuggguaguuuu

SEQ ID NO: 1698102 - RNA, 19 nt, Artificial Sequence
  Description of Artificial Sequence: Synthetic oligonucleotide
ggcuucgaauuucuggcau

SEQ ID NO: 1698103 - RNA, 19 nt, Artificial Sequence
  Description of Artificial Sequence: Synthetic oligonucleotide
gacgugugauacgcggggu

SEQ ID NO: 1698104 - RNA, 19 nt, Artificial Sequence
  Description of Artificial Sequence: Synthetic oligonucleotide
cgaacacaaggcugguguc

SEQ ID NO: 1698105 - RNA, 19 nt, Artificial Sequence
  Description of Artificial Sequence: Synthetic oligonucleotide
caaggcgucgaggcuugga

SEQ ID NO: 1698106 - RNA, 19 nt, Artificial Sequence
  Description of Artificial Sequence: Synthetic oligonucleotide
ccaguaccaaggcgucgag

SEQ ID NO: 1698107 - RNA, 19 nt, Artificial Sequence
  Description of Artificial Sequence: Synthetic oligonucleotide
cgagagggucuacauuaac

SEQ ID NO: 1698108 - RNA, 19 nt, Artificial Sequence
  Description of Artificial Sequence: Synthetic oligonucleotide
ccgcgggaagaaucugagc

SEQ ID NO: 1698109 - RNA, 19 nt, Artificial Sequence
  Description of Artificial Sequence: Synthetic oligonucleotide
ggucgucaacacuucuccu

SEQ ID NO: 1698110 - RNA, 19 nt, Artificial Sequence
  Description of Artificial Sequence: Synthetic oligonucleotide
guguaaccgaagaguggua

SEQ ID NO: 1698111 - RNA, 19 nt, Artificial Sequence
  Description of Artificial Sequence: Synthetic oligonucleotide
cagcggggccugggcaucg

SEQ ID NO: 1698112 - RNA, 19 nt, Artificial Sequence
  Description of Artificial Sequence: Synthetic oligonucleotide
guacgggugacguguucuu

SEQ ID NO: 1698113 - RNA, 19 nt, Artificial Sequence
  Description of Artificial Sequence: Synthetic oligonucleotide
gcaucguguguucguggaa

SEQ ID NO: 1698114 - RNA, 19 nt, Artificial Sequence
  Description of Artificial Sequence: Synthetic oligonucleotide
cguguguucguggaaaaua

SEQ ID NO: 1698115 - RNA, 19 nt, Artificial Sequence
  Description of Artificial Sequence: Synthetic oligonucleotide
gcgggaagaaucugagcau

SEQ ID NO: 1698116 - RNA, 19 nt, Artificial Sequence
  Description of Artificial Sequence: Synthetic oligonucleotide
aggcaucgacucagcuuca

SEQ ID NO: 1698117 - RNA, 19 nt, Artificial Sequence
  Description of Artificial Sequence: Synthetic oligonucleotide
cugcuaugagggacauggu

SEQ ID NO: 1698118 - RNA, 19 nt, Artificial Sequence
  Description of Artificial Sequence: Synthetic oligonucleotide
cgucgaggcuuggaaauuc

SEQ ID NO: 1698119 - RNA, 19 nt, Artificial Sequence
  Description of Artificial Sequence: Synthetic oligonucleotide
ggaggcugcgccgcgggaa

SEQ ID NO: 1698120 - RNA, 19 nt, Artificial Sequence
  Description of Artificial Sequence: Synthetic oligonucleotide
gcgcuccggagagaggcug

SEQ ID NO: 1698121 - RNA, 19 nt, Artificial Sequence
  Description of Artificial Sequence: Synthetic oligonucleotide
ccuauacuguguggucguc

SEQ ID NO: 1698122 - RNA, 19 nt, Artificial Sequence
  Description of Artificial Sequence: Synthetic oligonucleotide
ccacgaucacagguaucac

SEQ ID NO: 1698123 - RNA, 19 nt, Artificial Sequence
  Description of Artificial Sequence: Synthetic oligonucleotide
cccuauacuguguggucgu

SEQ ID NO: 1698124 - RNA, 19 nt, Artificial Sequence
  Description of Artificial Sequence: Synthetic oligonucleotide
gggugguaacaacucuuuu

SEQ ID NO: 1698125 - RNA, 19 nt, Artificial Sequence
  Description of Artificial Sequence: Synthetic oligonucleotide
ccgagagggucuacauuaa

SEQ ID NO: 1698126 - RNA, 19 nt, Artificial Sequence
  Description of Artificial Sequence: Synthetic oligonucleotide
caccgagagggucuacauu

SEQ ID NO: 1698127 - RNA, 19 nt, Artificial Sequence
  Description of Artificial Sequence: Synthetic oligonucleotide
aggcugcgccgcgggaaga

SEQ ID NO: 1698128 - RNA, 19 nt, Artificial Sequence
  Description of Artificial Sequence: Synthetic oligonucleotide
cgauguuuaccgggacuuc

SEQ ID NO: 1698129 - RNA, 19 nt, Artificial Sequence
  Description of Artificial Sequence: Synthetic oligonucleotide
ggguaaccauuaggaggca

SEQ ID NO: 1698130 - RNA, 19 nt, Artificial Sequence
  Description of Artificial Sequence: Synthetic oligonucleotide
cgugugauacgcgggguaa

SEQ ID NO: 1698131 - RNA, 19 nt, Artificial Sequence
  Description of Artificial Sequence: Synthetic oligonucleotide
ccaggagcaugcauauuuu

SEQ ID NO: 1698132 - RNA, 19 nt, Artificial Sequence
  Description of Artificial Sequence: Synthetic oligonucleotide
agcggggccugggcaucga

SEQ ID NO: 1698133 - RNA, 19 nt, Artificial Sequence
  Description of Artificial Sequence: Synthetic oligonucleotide
ccggagagaggcugcgucu

SEQ ID NO: 1698134 - RNA, 19 nt, Artificial Sequence
  Description of Artificial Sequence: Synthetic oligonucleotide
gagguacgggugacguguu

SEQ ID NO: 1698135 - RNA, 19 nt, Artificial Sequence
  Description of Artificial Sequence: Synthetic oligonucleotide
ggccggcuggccgcuguac

SEQ ID NO: 1698136 - RNA, 19 nt, Artificial Sequence
  Description of Artificial Sequence: Synthetic oligonucleotide
ggcugcgccgcgggaagaa

SEQ ID NO: 1698137 - RNA, 19 nt, Artificial Sequence
  Description of Artificial Sequence: Synthetic oligonucleotide
gggugacguguucuugguu

SEQ ID NO: 1698138 - RNA, 19 nt, Artificial Sequence
  Description of Artificial Sequence: Synthetic oligonucleotide
ccaaggcgucgaggcuugg

SEQ ID NO: 1698139 - RNA, 19 nt, Artificial Sequence
  Description of Artificial Sequence: Synthetic oligonucleotide
gcgccgcgggaagaaucug

SEQ ID NO: 1698140 - RNA, 19 nt, Artificial Sequence
  Description of Artificial Sequence: Synthetic oligonucleotide
ggacugcuaugagggacau

SEQ ID NO: 1698141 - RNA, 19 nt, Artificial Sequence
  Description of Artificial Sequence: Synthetic oligonucleotide
caaucggcuucagggcauu

SEQ ID NO: 1698142 - RNA, 19 nt, Artificial Sequence
  Description of Artificial Sequence: Synthetic oligonucleotide
caggccggcuggccgcugu

SEQ ID NO: 1698143 - RNA, 19 nt, Artificial Sequence
  Description of Artificial Sequence: Synthetic oligonucleotide
ccagcggggccugggcauc

SEQ ID NO: 1698144 - RNA, 19 nt, Artificial Sequence
  Description of Artificial Sequence: Synthetic oligonucleotide
cgucaacacuucuccuucu

SEQ ID NO: 1698145 - RNA, 19 nt, Artificial Sequence
  Description of Artificial Sequence: Synthetic oligonucleotide
cggggccugggcaucgaaa

SEQ ID NO: 1698146 - RNA, 19 nt, Artificial Sequence
  Description of Artificial Sequence: Synthetic oligonucleotide
gcggggccugggcaucgaa

SEQ ID NO: 1698147 - RNA, 19 nt, Artificial Sequence
  Description of Artificial Sequence: Synthetic oligonucleotide
cgggugacguguucuuggu

SEQ ID NO: 1698148 - RNA, 19 nt, Artificial Sequence
  Description of Artificial Sequence: Synthetic oligonucleotide
gcgucgaggcuuggaaauu

SEQ ID NO: 1698149 - RNA, 19 nt, Artificial Sequence
  Description of Artificial Sequence: Synthetic oligonucleotide
gcugcgccgcgggaagaau

SEQ ID NO: 1698150 - RNA, 19 nt, Artificial Sequence
  Description of Artificial Sequence: Synthetic oligonucleotide
ccaggccggcuggccgcug

SEQ ID NO: 1698151 - RNA, 19 nt, Artificial Sequence
  Description of Artificial Sequence: Synthetic oligonucleotide
ccgcuguacugaggcugua

SEQ ID NO: 1698152 - RNA, 19 nt, Artificial Sequence
  Description of Artificial Sequence: Synthetic oligonucleotide
cgucugcacguggguuguu

SEQ ID NO: 1698153 - RNA, 19 nt, Artificial Sequence
  Description of Artificial Sequence: Synthetic oligonucleotide
uucacaaagaaaauuaugg

SEQ ID NO: 1698154 - RNA, 19 nt, Artificial Sequence
  Description of Artificial Sequence: Synthetic oligonucleotide
uuuuauauguaucuaacug

SEQ ID NO: 1698155 - RNA, 19 nt, Artificial Sequence
  Description of Artificial Sequence: Synthetic oligonucleotide
uguuuaaacaccuugcucc

SEQ ID NO: 1698156 - RNA, 19 nt, Artificial Sequence
  Description of Artificial Sequence: Synthetic oligonucleotide
agaaacaagccuuacaccg

SEQ ID NO: 1698157 - RNA, 19 nt, Artificial Sequence
  Description of Artificial Sequence: Synthetic oligonucleotide
aaauugguaacuucugaac

SEQ ID NO: 1698158 - RNA, 19 nt, Artificial Sequence
  Description of Artificial Sequence: Synthetic oligonucleotide
aaugcucuauucuucugcc

SEQ ID NO: 1698159 - RNA, 19 nt, Artificial Sequence
  Description of Artificial Sequence: Synthetic oligonucleotide
acuccauuacauuuaaccc

SEQ ID NO: 1698160 - RNA, 19 nt, Artificial Sequence
  Description of Artificial Sequence: Synthetic oligonucleotide
aauuauggcaaaaugaaca

SEQ ID NO: 1698161 - RNA, 19 nt, Artificial Sequence
  Description of Artificial Sequence: Synthetic oligonucleotide
agaagucacauauugcacc

SEQ ID NO: 1698162 - RNA, 19 nt, Artificial Sequence
  Description of Artificial Sequence: Synthetic oligonucleotide
aaacugaucaucuucacaa

SEQ ID NO: 1698163 - RNA, 19 nt, Artificial Sequence
  Description of Artificial Sequence: Synthetic oligonucleotide
aaaaugaacagcugaauau

SEQ ID NO: 1698164 - RNA, 19 nt, Artificial Sequence
  Description of Artificial Sequence: Synthetic oligonucleotide
uacuccauuacauuuaacc

SEQ ID NO: 1698165 - RNA, 19 nt, Artificial Sequence
  Description of Artificial Sequence: Synthetic oligonucleotide
aauugguaacuucugaaca

SEQ ID NO: 1698166 - RNA, 19 nt, Artificial Sequence
  Description of Artificial Sequence: Synthetic oligonucleotide
cacauuuugggcaaggagg

SEQ ID NO: 1698167 - RNA, 19 nt, Artificial Sequence
  Description of Artificial Sequence: Synthetic oligonucleotide
aguaugacuagccuuuugg

SEQ ID NO: 1698168 - RNA, 19 nt, Artificial Sequence
  Description of Artificial Sequence: Synthetic oligonucleotide
aauccaauucaugauacuc

SEQ ID NO: 1698169 - RNA, 19 nt, Artificial Sequence
  Description of Artificial Sequence: Synthetic oligonucleotide
uuucauguccacauuuugg

SEQ ID NO: 1698170 - RNA, 19 nt, Artificial Sequence
  Description of Artificial Sequence: Synthetic oligonucleotide
uaucuaacugacaaaaccu

SEQ ID NO: 1698171 - RNA, 19 nt, Artificial Sequence
  Description of Artificial Sequence: Synthetic oligonucleotide
uuauauguaucuaacugac

SEQ ID NO: 1698172 - RNA, 19 nt, Artificial Sequence
  Description of Artificial Sequence: Synthetic oligonucleotide
aagucuacagugcuucucg

SEQ ID NO: 1698173 - RNA, 19 nt, Artificial Sequence
  Description of Artificial Sequence: Synthetic oligonucleotide
uugaugcucaaacugauca

SEQ ID NO: 1698174 - RNA, 19 nt, Artificial Sequence
  Description of Artificial Sequence: Synthetic oligonucleotide
uuggacaaggccaagggag

SEQ ID NO: 1698175 - RNA, 19 nt, Artificial Sequence
  Description of Artificial Sequence: Synthetic oligonucleotide
aaaauuauggcaaaaugaa

SEQ ID NO: 1698176 - RNA, 19 nt, Artificial Sequence
  Description of Artificial Sequence: Synthetic oligonucleotide
aauaauccaauucaugaua

SEQ ID NO: 1698177 - RNA, 19 nt, Artificial Sequence
  Description of Artificial Sequence: Synthetic oligonucleotide
guaucuaacugacaaaacc

SEQ ID NO: 1698178 - RNA, 19 nt, Artificial Sequence
  Description of Artificial Sequence: Synthetic oligonucleotide
ucuuguuuaaacaccuugc

SEQ ID NO: 1698179 - RNA, 19 nt, Artificial Sequence
  Description of Artificial Sequence: Synthetic oligonucleotide
ugucacauuccauugaagc

SEQ ID NO: 1698180 - RNA, 19 nt, Artificial Sequence
  Description of Artificial Sequence: Synthetic oligonucleotide
uucuauuccuuuaucaugu

SEQ ID NO: 1698181 - RNA, 19 nt, Artificial Sequence
  Description of Artificial Sequence: Synthetic oligonucleotide
guaagcaucauacccagag

SEQ ID NO: 1698182 - RNA, 19 nt, Artificial Sequence
  Description of Artificial Sequence: Synthetic oligonucleotide
acagaagucacauauugca

SEQ ID NO: 1698183 - RNA, 19 nt, Artificial Sequence
  Description of Artificial Sequence: Synthetic oligonucleotide
uauugcacccaccauagca

SEQ ID NO: 1698184 - RNA, 19 nt, Artificial Sequence
  Description of Artificial Sequence: Synthetic oligonucleotide
aaauuauggcaaaaugaac

SEQ ID NO: 1698185 - RNA, 19 nt, Artificial Sequence
  Description of Artificial Sequence: Synthetic oligonucleotide
aguaucagcauacuuguca

SEQ ID NO: 1698186 - RNA, 19 nt, Artificial Sequence
  Description of Artificial Sequence: Synthetic oligonucleotide
ugccaaauuucaaggagcg

SEQ ID NO: 1698187 - RNA, 19 nt, Artificial Sequence
  Description of Artificial Sequence: Synthetic oligonucleotide
acugacaaaaccuaccaga

SEQ ID NO: 1698188 - RNA, 19 nt, Artificial Sequence
  Description of Artificial Sequence: Synthetic oligonucleotide
aaaaccuaccagaugauug

SEQ ID NO: 1698189 - RNA, 19 nt, Artificial Sequence
  Description of Artificial Sequence: Synthetic oligonucleotide
uacaccgcagacaugaaug

SEQ ID NO: 1698190 - RNA, 19 nt, Artificial Sequence
  Description of Artificial Sequence: Synthetic oligonucleotide
auucaugauacuccauuac

SEQ ID NO: 1698191 - RNA, 19 nt, Artificial Sequence
  Description of Artificial Sequence: Synthetic oligonucleotide
uucaugauacuccauuaca

SEQ ID NO: 1698192 - RNA, 19 nt, Artificial Sequence
  Description of Artificial Sequence: Synthetic oligonucleotide
aaaccuaccagaugauuga

SEQ ID NO: 1698193 - RNA, 19 nt, Artificial Sequence
  Description of Artificial Sequence: Synthetic oligonucleotide
cuuggcuaagucuacagug

SEQ ID NO: 1698194 - RNA, 19 nt, Artificial Sequence
  Description of Artificial Sequence: Synthetic oligonucleotide
cuaacugacaaaaccuacc

SEQ ID NO: 1698195 - RNA, 19 nt, Artificial Sequence
  Description of Artificial Sequence: Synthetic oligonucleotide
ucuacagugcuucucgaug

SEQ ID NO: 1698196 - RNA, 19 nt, Artificial Sequence
  Description of Artificial Sequence: Synthetic oligonucleotide
caaaccgccagaauguacc

SEQ ID NO: 1698197 - RNA, 19 nt, Artificial Sequence
  Description of Artificial Sequence: Synthetic oligonucleotide
uccuuuaucauguauuuua

SEQ ID NO: 1698198 - RNA, 19 nt, Artificial Sequence
  Description of Artificial Sequence: Synthetic oligonucleotide
cuuccuaaguucaaacuag

SEQ ID NO: 1698199 - RNA, 19 nt, Artificial Sequence
  Description of Artificial Sequence: Synthetic oligonucleotide
uuaaacaccuugcuccuug

SEQ ID NO: 1698200 - RNA, 19 nt, Artificial Sequence
  Description of Artificial Sequence: Synthetic oligonucleotide
auaauccaauucaugauac

SEQ ID NO: 1698201 - RNA, 19 nt, Artificial Sequence
  Description of Artificial Sequence: Synthetic oligonucleotide
ugaagcauugcacgggugc

SEQ ID NO: 1698202 - RNA, 19 nt, Artificial Sequence
  Description of Artificial Sequence: Synthetic oligonucleotide
auccucaugauucagccug

SEQ ID NO: 1698203 - RNA, 19 nt, Artificial Sequence
  Description of Artificial Sequence: Synthetic oligonucleotide
cauauugcacccaccauag

SEQ ID NO: 1698204 - RNA, 19 nt, Artificial Sequence
  Description of Artificial Sequence: Synthetic oligonucleotide
gaugacacagucugaagac

SEQ ID NO: 1698205 - RNA, 19 nt, Artificial Sequence
  Description of Artificial Sequence: Synthetic oligonucleotide
uagaaguccaguaucaguu

SEQ ID NO: 1698206 - RNA, 19 nt, Artificial Sequence
  Description of Artificial Sequence: Synthetic oligonucleotide
ugaucaucuucacaaagaa

SEQ ID NO: 1698207 - RNA, 19 nt, Artificial Sequence
  Description of Artificial Sequence: Synthetic oligonucleotide
aaaccgccagaauguaccc

SEQ ID NO: 1698208 - RNA, 19 nt, Artificial Sequence
  Description of Artificial Sequence: Synthetic oligonucleotide
aaggagcgaguugacaugc

SEQ ID NO: 1698209 - RNA, 19 nt, Artificial Sequence
  Description of Artificial Sequence: Synthetic oligonucleotide
ugcucuauucuucugccgc

SEQ ID NO: 1698210 - RNA, 19 nt, Artificial Sequence
  Description of Artificial Sequence: Synthetic oligonucleotide
augacuagccuuuuggaca

SEQ ID NO: 1698211 - RNA, 19 nt, Artificial Sequence
  Description of Artificial Sequence: Synthetic oligonucleotide
ucuaacugacaaaaccuac

SEQ ID NO: 1698212 - RNA, 19 nt, Artificial Sequence
  Description of Artificial Sequence: Synthetic oligonucleotide
acacuagaaguccaguauc

SEQ ID NO: 1698213 - RNA, 19 nt, Artificial Sequence
  Description of Artificial Sequence: Synthetic oligonucleotide
agugagcauagccacuggc

SEQ ID NO: 1698214 - RNA, 19 nt, Artificial Sequence
  Description of Artificial Sequence: Synthetic oligonucleotide
guauacaccagcaugcuug

SEQ ID NO: 1698215 - RNA, 19 nt, Artificial Sequence
  Description of Artificial Sequence: Synthetic oligonucleotide
uaacccauuuuccuuacac

SEQ ID NO: 1698216 - RNA, 19 nt, Artificial Sequence
  Description of Artificial Sequence: Synthetic oligonucleotide
uaauaauccaauucaugau

SEQ ID NO: 1698217 - RNA, 19 nt, Artificial Sequence
  Description of Artificial Sequence: Synthetic oligonucleotide
uucaaacuagugaacagau

SEQ ID NO: 1698218 - RNA, 19 nt, Artificial Sequence
  Description of Artificial Sequence: Synthetic oligonucleotide
uaugacuagccuuuuggac

SEQ ID NO: 1698219 - RNA, 19 nt, Artificial Sequence
  Description of Artificial Sequence: Synthetic oligonucleotide
uuggcuaagucuacagugc

SEQ ID NO: 1698220 - RNA, 19 nt, Artificial Sequence
  Description of Artificial Sequence: Synthetic oligonucleotide
uacuaagacacuuccuccc

SEQ ID NO: 1698221 - RNA, 19 nt, Artificial Sequence
  Description of Artificial Sequence: Synthetic oligonucleotide
aaaauagcaaaaugcucua

SEQ ID NO: 1698222 - RNA, 19 nt, Artificial Sequence
  Description of Artificial Sequence: Synthetic oligonucleotide
uccaauucaugauacucca

SEQ ID NO: 1698223 - RNA, 19 nt, Artificial Sequence
  Description of Artificial Sequence: Synthetic oligonucleotide
aagaaaauuauggcaaaau

SEQ ID NO: 1698224 - RNA, 19 nt, Artificial Sequence
  Description of Artificial Sequence: Synthetic oligonucleotide
ugaacagaucugaugacuc

SEQ ID NO: 1698225 - RNA, 19 nt, Artificial Sequence
  Description of Artificial Sequence: Synthetic oligonucleotide
ugucuccugaguuucaugu

SEQ ID NO: 1698226 - RNA, 19 nt, Artificial Sequence
  Description of Artificial Sequence: Synthetic oligonucleotide
uacacuagaaguccaguau

SEQ ID NO: 1698227 - RNA, 19 nt, Artificial Sequence
  Description of Artificial Sequence: Synthetic oligonucleotide
ugccugccaaauuucaagg

SEQ ID NO: 1698228 - RNA, 19 nt, Artificial Sequence
  Description of Artificial Sequence: Synthetic oligonucleotide
aguuccuacaaaccgccag

SEQ ID NO: 1698229 - RNA, 19 nt, Artificial Sequence
  Description of Artificial Sequence: Synthetic oligonucleotide
agaugauugaaaucaguaa

SEQ ID NO: 1698230 - RNA, 19 nt, Artificial Sequence
  Description of Artificial Sequence: Synthetic oligonucleotide
auagguccuuccuaaguuc

SEQ ID NO: 1698231 - RNA, 19 nt, Artificial Sequence
  Description of Artificial Sequence: Synthetic oligonucleotide
uuguuuaaacaccuugcuc

SEQ ID NO: 1698232 - RNA, 19 nt, Artificial Sequence
  Description of Artificial Sequence: Synthetic oligonucleotide
cuagugaacagaucugaug

SEQ ID NO: 1698233 - RNA, 19 nt, Artificial Sequence
  Description of Artificial Sequence: Synthetic oligonucleotide
cauagcaaggccaguacug

SEQ ID NO: 1698234 - RNA, 19 nt, Artificial Sequence
  Description of Artificial Sequence: Synthetic oligonucleotide
uguaucuaacugacaaaac

SEQ ID NO: 1698235 - RNA, 19 nt, Artificial Sequence
  Description of Artificial Sequence: Synthetic oligonucleotide
acaccgcagacaugaaugc

SEQ ID NO: 1698236 - RNA, 19 nt, Artificial Sequence
  Description of Artificial Sequence: Synthetic oligonucleotide
aacuagugaacagaucuga

SEQ ID NO: 1698237 - RNA, 19 nt, Artificial Sequence
  Description of Artificial Sequence: Synthetic oligonucleotide
aaaacuuggcagcuggcuu

SEQ ID NO: 1698238 - RNA, 19 nt, Artificial Sequence
  Description of Artificial Sequence: Synthetic oligonucleotide
cugccaaauuucaaggagc

SEQ ID NO: 1698239 - RNA, 19 nt, Artificial Sequence
  Description of Artificial Sequence: Synthetic oligonucleotide
aagacgcagaggcgagucc

SEQ ID NO: 1698240 - RNA, 19 nt, Artificial Sequence
  Description of Artificial Sequence: Synthetic oligonucleotide
aguaauaauccaauucaug

SEQ ID NO: 1698241 - RNA, 19 nt, Artificial Sequence
  Description of Artificial Sequence: Synthetic oligonucleotide
cauggcaaacccaagcuuc

SEQ ID NO: 1698242 - RNA, 19 nt, Artificial Sequence
  Description of Artificial Sequence: Synthetic oligonucleotide
guuucucccgcucucggcg

SEQ ID NO: 1698243 - RNA, 19 nt, Artificial Sequence
  Description of Artificial Sequence: Synthetic oligonucleotide
acauauugcacccaccaua

SEQ ID NO: 1698244 - RNA, 19 nt, Artificial Sequence
  Description of Artificial Sequence: Synthetic oligonucleotide
augauacuccauuacauuu

SEQ ID NO: 1698245 - RNA, 19 nt, Artificial Sequence
  Description of Artificial Sequence: Synthetic oligonucleotide
ugauacuccauuacauuua

SEQ ID NO: 1698246 - RNA, 19 nt, Artificial Sequence
  Description of Artificial Sequence: Synthetic oligonucleotide
guacuaagacacuuccucc

SEQ ID NO: 1698247 - RNA, 19 nt, Artificial Sequence
  Description of Artificial Sequence: Synthetic oligonucleotide
gguacuaagacacuuccuc

SEQ ID NO: 1698248 - RNA, 19 nt, Artificial Sequence
  Description of Artificial Sequence: Synthetic oligonucleotide
cuucugaacagaauuacaa

SEQ ID NO: 1698249 - RNA, 19 nt, Artificial Sequence
  Description of Artificial Sequence: Synthetic oligonucleotide
ccuuguauguucaucacag

SEQ ID NO: 1698250 - RNA, 19 nt, Artificial Sequence
  Description of Artificial Sequence: Synthetic oligonucleotide
caagcuucacagaagucac

SEQ ID NO: 1698251 - RNA, 19 nt, Artificial Sequence
  Description of Artificial Sequence: Synthetic oligonucleotide
uugcaggaaacacauuuaa

SEQ ID NO: 1698252 - RNA, 19 nt, Artificial Sequence
  Description of Artificial Sequence: Synthetic oligonucleotide
uuccuuacacuagaagucc

SEQ ID NO: 1698253 - RNA, 19 nt, Artificial Sequence
  Description of Artificial Sequence: Synthetic oligonucleotide
aaagaaaauuauggcaaaa

SEQ ID NO: 1698254 - RNA, 19 nt, Artificial Sequence
  Description of Artificial Sequence: Synthetic oligonucleotide
caugcuugaugacacaguc

SEQ ID NO: 1698255 - RNA, 19 nt, Artificial Sequence
  Description of Artificial Sequence: Synthetic oligonucleotide
uauguaucuaacugacaaa

SEQ ID NO: 1698256 - RNA, 19 nt, Artificial Sequence
  Description of Artificial Sequence: Synthetic oligonucleotide
cuccauuacauuuaaccca

SEQ ID NO: 1698257 - RNA, 19 nt, Artificial Sequence
  Description of Artificial Sequence: Synthetic oligonucleotide
ugacaaaaccuaccagaug

SEQ ID NO: 1698258 - RNA, 19 nt, Artificial Sequence
  Description of Artificial Sequence: Synthetic oligonucleotide
caucaugguacccaguauc

SEQ ID NO: 1698259 - RNA, 19 nt, Artificial Sequence
  Description of Artificial Sequence: Synthetic oligonucleotide
uacuugucagaugacaggu

SEQ ID NO: 1698260 - RNA, 19 nt, Artificial Sequence
  Description of Artificial Sequence: Synthetic oligonucleotide
auguaucuaacugacaaaa

SEQ ID NO: 1698261 - RNA, 19 nt, Artificial Sequence
  Description of Artificial Sequence: Synthetic oligonucleotide
agacacuuccucccauggc

SEQ ID NO: 1698262 - RNA, 19 nt, Artificial Sequence
  Description of Artificial Sequence: Synthetic oligonucleotide
ugaugacucagcaucugaa

SEQ ID NO: 1698263 - RNA, 19 nt, Artificial Sequence
  Description of Artificial Sequence: Synthetic oligonucleotide
cagcugaauauucugcccc

SEQ ID NO: 1698264 - RNA, 19 nt, Artificial Sequence
  Description of Artificial Sequence: Synthetic oligonucleotide
agcgaguugacaugcugag

SEQ ID NO: 1698265 - RNA, 19 nt, Artificial Sequence
  Description of Artificial Sequence: Synthetic oligonucleotide
uauguucaucacagaaaca

SEQ ID NO: 1698266 - RNA, 19 nt, Artificial Sequence
  Description of Artificial Sequence: Synthetic oligonucleotide
uaaaacuuggcagcuggcu

SEQ ID NO: 1698267 - RNA, 19 nt, Artificial Sequence
  Description of Artificial Sequence: Synthetic oligonucleotide
uugaugacacagucugaag

SEQ ID NO: 1698268 - RNA, 19 nt, Artificial Sequence
  Description of Artificial Sequence: Synthetic oligonucleotide
uuacacuagaaguccagua

SEQ ID NO: 1698269 - RNA, 19 nt, Artificial Sequence
  Description of Artificial Sequence: Synthetic oligonucleotide
auacccagaggcuccaucu

SEQ ID NO: 1698270 - RNA, 19 nt, Artificial Sequence
  Description of Artificial Sequence: Synthetic oligonucleotide
ccaaauuucaaggagcgag

SEQ ID NO: 1698271 - RNA, 19 nt, Artificial Sequence
  Description of Artificial Sequence: Synthetic oligonucleotide
ucugcaucagugagugggc

SEQ ID NO: 1698272 - RNA, 19 nt, Artificial Sequence
  Description of Artificial Sequence: Synthetic oligonucleotide
caguaagcaucauacccag

SEQ ID NO: 1698273 - RNA, 19 nt, Artificial Sequence
  Description of Artificial Sequence: Synthetic oligonucleotide
caucauacccagaggcucc

SEQ ID NO: 1698274 - RNA, 19 nt, Artificial Sequence
  Description of Artificial Sequence: Synthetic oligonucleotide
uccuuccuaaguucaaacu

SEQ ID NO: 1698275 - RNA, 19 nt, Artificial Sequence
  Description of Artificial Sequence: Synthetic oligonucleotide
uugucacauuccauugaag

SEQ ID NO: 1698276 - RNA, 19 nt, Artificial Sequence
  Description of Artificial Sequence: Synthetic oligonucleotide
uuccuaaguucaaacuagu

SEQ ID NO: 1698277 - RNA, 19 nt, Artificial Sequence
  Description of Artificial Sequence: Synthetic oligonucleotide
cagaagucacauauugcac

SEQ ID NO: 1698278 - RNA, 19 nt, Artificial Sequence
  Description of Artificial Sequence: Synthetic oligonucleotide
auagccacuggcauagguc

SEQ ID NO: 1698279 - RNA, 19 nt, Artificial Sequence
  Description of Artificial Sequence: Synthetic oligonucleotide
gaugcucaaacugaucauc

SEQ ID NO: 1698280 - RNA, 19 nt, Artificial Sequence
  Description of Artificial Sequence: Synthetic oligonucleotide
ucaaacuagugaacagauc

SEQ ID NO: 1698281 - RNA, 19 nt, Artificial Sequence
  Description of Artificial Sequence: Synthetic oligonucleotide
ucugaauccuucccauccu

SEQ ID NO: 1698282 - RNA, 19 nt, Artificial Sequence
  Description of Artificial Sequence: Synthetic oligonucleotide
ugagcauccucaugauuca

SEQ ID NO: 1698283 - RNA, 19 nt, Artificial Sequence
  Description of Artificial Sequence: Synthetic oligonucleotide
gauacuccauuacauuuaa

SEQ ID NO: 1698284 - RNA, 19 nt, Artificial Sequence
  Description of Artificial Sequence: Synthetic oligonucleotide
aaggccaguacuguauaca

SEQ ID NO: 1698285 - RNA, 19 nt, Artificial Sequence
  Description of Artificial Sequence: Synthetic oligonucleotide
ucuuucgcagugguggaag

SEQ ID NO: 1698286 - RNA, 19 nt, Artificial Sequence
  Description of Artificial Sequence: Synthetic oligonucleotide
caaauugguaacuucugaa

SEQ ID NO: 1698287 - RNA, 19 nt, Artificial Sequence
  Description of Artificial Sequence: Synthetic oligonucleotide
agccuuacaccgcagacau

SEQ ID NO: 1698288 - RNA, 19 nt, Artificial Sequence
  Description of Artificial Sequence: Synthetic oligonucleotide
ugauucagccugcucuucu

SEQ ID NO: 1698289 - RNA, 19 nt, Artificial Sequence
  Description of Artificial Sequence: Synthetic oligonucleotide
gacaugcugagauccuuug

SEQ ID NO: 1698290 - RNA, 19 nt, Artificial Sequence
  Description of Artificial Sequence: Synthetic oligonucleotide
ucugagcuguuucucccgc

SEQ ID NO: 1698291 - RNA, 19 nt, Artificial Sequence
  Description of Artificial Sequence: Synthetic oligonucleotide
acccaagcuucacagaagu

SEQ ID NO: 1698292 - RNA, 19 nt, Artificial Sequence
  Description of Artificial Sequence: Synthetic oligonucleotide
acuaagacacuuccuccca

SEQ ID NO: 1698293 - RNA, 19 nt, Artificial Sequence
  Description of Artificial Sequence: Synthetic oligonucleotide
ucgcagugguggaagacgc

SEQ ID NO: 1698294 - RNA, 19 nt, Artificial Sequence
  Description of Artificial Sequence: Synthetic oligonucleotide
ucagcauacuugucagaug

SEQ ID NO: 1698295 - RNA, 19 nt, Artificial Sequence
  Description of Artificial Sequence: Synthetic oligonucleotide
acagaucugaugacucagc

SEQ ID NO: 1698296 - RNA, 19 nt, Artificial Sequence
  Description of Artificial Sequence: Synthetic oligonucleotide
aaccgccagaauguacccc

SEQ ID NO: 1698297 - RNA, 19 nt, Artificial Sequence
  Description of Artificial Sequence: Synthetic oligonucleotide
ugcucugagcuguuucucc

SEQ ID NO: 1698298 - RNA, 19 nt, Artificial Sequence
  Description of Artificial Sequence: Synthetic oligonucleotide
ugacuagccuuuuggacaa

SEQ ID NO: 1698299 - RNA, 19 nt, Artificial Sequence
  Description of Artificial Sequence: Synthetic oligonucleotide
cuaaaacuuggcagcuggc

SEQ ID NO: 1698300 - RNA, 19 nt, Artificial Sequence
  Description of Artificial Sequence: Synthetic oligonucleotide
uuccaguaagcaucauacc

SEQ ID NO: 1698301 - RNA, 19 nt, Artificial Sequence
  Description of Artificial Sequence: Synthetic oligonucleotide
auauugcacccaccauagc

SEQ ID NO: 1698302 - RNA, 19 nt, Artificial Sequence
  Description of Artificial Sequence: Synthetic oligonucleotide
uugguaacuucugaacaga

SEQ ID NO: 1698303 - RNA, 19 nt, Artificial Sequence
  Description of Artificial Sequence: Synthetic oligonucleotide
cagaugauugaaaucagua

SEQ ID NO: 1698304 - RNA, 19 nt, Artificial Sequence
  Description of Artificial Sequence: Synthetic oligonucleotide
caggcauggguacuaagac

SEQ ID NO: 1698305 - RNA, 19 nt, Artificial Sequence
  Description of Artificial Sequence: Synthetic oligonucleotide
cauggucccaaaccccucg

SEQ ID NO: 1698306 - RNA, 19 nt, Artificial Sequence
  Description of Artificial Sequence: Synthetic oligonucleotide
agcaugcuugaugacacag

SEQ ID NO: 1698307 - RNA, 19 nt, Artificial Sequence
  Description of Artificial Sequence: Synthetic oligonucleotide
aaauuucaaggagcgaguu

SEQ ID NO: 1698308 - RNA, 19 nt, Artificial Sequence
  Description of Artificial Sequence: Synthetic oligonucleotide
cuccuaguucuccugcucc

SEQ ID NO: 1698309 - RNA, 19 nt, Artificial Sequence
  Description of Artificial Sequence: Synthetic oligonucleotide
gaacagaucugaugacuca

SEQ ID NO: 1698310 - RNA, 19 nt, Artificial Sequence
  Description of Artificial Sequence: Synthetic oligonucleotide
acauuuugggcaaggaggu

SEQ ID NO: 1698311 - RNA, 19 nt, Artificial Sequence
  Description of Artificial Sequence: Synthetic oligonucleotide
cauuccauugaagcauugc

SEQ ID NO: 1698312 - RNA, 19 nt, Artificial Sequence
  Description of Artificial Sequence: Synthetic oligonucleotide
aagccuuacaccgcagaca

SEQ ID NO: 1698313 - RNA, 19 nt, Artificial Sequence
  Description of Artificial Sequence: Synthetic oligonucleotide
acuggcauagguccuuccu

SEQ ID NO: 1698314 - RNA, 19 nt, Artificial Sequence
  Description of Artificial Sequence: Synthetic oligonucleotide
agacgcagaggcgaguccg

SEQ ID NO: 1698315 - RNA, 19 nt, Artificial Sequence
  Description of Artificial Sequence: Synthetic oligonucleotide
guaugacuagccuuuugga

SEQ ID NO: 1698316 - RNA, 19 nt, Artificial Sequence
  Description of Artificial Sequence: Synthetic oligonucleotide
uuacaccgcagacaugaau

SEQ ID NO: 1698317 - RNA, 19 nt, Artificial Sequence
  Description of Artificial Sequence: Synthetic oligonucleotide
uagugagcauagccacugg

SEQ ID NO: 1698318 - RNA, 19 nt, Artificial Sequence
  Description of Artificial Sequence: Synthetic oligonucleotide
auggucccaaaccccucgc

SEQ ID NO: 1698319 - RNA, 19 nt, Artificial Sequence
  Description of Artificial Sequence: Synthetic oligonucleotide
uggcauagguccuuccuaa

SEQ ID NO: 1698320 - RNA, 19 nt, Artificial Sequence
  Description of Artificial Sequence: Synthetic oligonucleotide
ggcauggguacuaagacac

SEQ ID NO: 1698321 - RNA, 19 nt, Artificial Sequence
  Description of Artificial Sequence: Synthetic oligonucleotide
uucaagugccagcgggagc

SEQ ID NO: 1698322 - RNA, 19 nt, Artificial Sequence
  Description of Artificial Sequence: Synthetic oligonucleotide
ccuaaguucaaacuaguga

SEQ ID NO: 1698323 - RNA, 19 nt, Artificial Sequence
  Description of Artificial Sequence: Synthetic oligonucleotide
ucucgaugcucugagcugu

SEQ ID NO: 1698324 - RNA, 19 nt, Artificial Sequence
  Description of Artificial Sequence: Synthetic oligonucleotide
ugaugcucaaacugaucau

SEQ ID NO: 1698325 - RNA, 19 nt, Artificial Sequence
  Description of Artificial Sequence: Synthetic oligonucleotide
caagccuuacaccgcagac

SEQ ID NO: 1698326 - RNA, 19 nt, Artificial Sequence
  Description of Artificial Sequence: Synthetic oligonucleotide
aaauagcaaaaugcucuau

SEQ ID NO: 1698327 - RNA, 19 nt, Artificial Sequence
  Description of Artificial Sequence: Synthetic oligonucleotide
aaccccucgcucacauucc

SEQ ID NO: 1698328 - RNA, 19 nt, Artificial Sequence
  Description of Artificial Sequence: Synthetic oligonucleotide
ucaugguacccaguaucag

SEQ ID NO: 1698329 - RNA, 19 nt, Artificial Sequence
  Description of Artificial Sequence: Synthetic oligonucleotide
uuucucccgcucucggcgg

SEQ ID NO: 1698330 - RNA, 19 nt, Artificial Sequence
  Description of Artificial Sequence: Synthetic oligonucleotide
uguauacaccagcaugcuu

SEQ ID NO: 1698331 - RNA, 19 nt, Artificial Sequence
  Description of Artificial Sequence: Synthetic oligonucleotide
augauugaaaucaguaaua

SEQ ID NO: 1698332 - RNA, 19 nt, Artificial Sequence
  Description of Artificial Sequence: Synthetic oligonucleotide
cacuagaaguccaguauca

SEQ ID NO: 1698333 - RNA, 19 nt, Artificial Sequence
  Description of Artificial Sequence: Synthetic oligonucleotide
cuugaugcucaaacugauc

SEQ ID NO: 1698334 - RNA, 19 nt, Artificial Sequence
  Description of Artificial Sequence: Synthetic oligonucleotide
uccuuucuauuccuuuauc

SEQ ID NO: 1698335 - RNA, 19 nt, Artificial Sequence
  Description of Artificial Sequence: Synthetic oligonucleotide
agaggcgaguccgacccgc

SEQ ID NO: 1698336 - RNA, 19 nt, Artificial Sequence
  Description of Artificial Sequence: Synthetic oligonucleotide
uuaacccauuuuccuuaca

SEQ ID NO: 1698337 - RNA, 19 nt, Artificial Sequence
  Description of Artificial Sequence: Synthetic oligonucleotide
acgggugcuuggcuaaguc

SEQ ID NO: 1698338 - RNA, 19 nt, Artificial Sequence
  Description of Artificial Sequence: Synthetic oligonucleotide
accagcaugcuugaugaca

SEQ ID NO: 1698339 - RNA, 19 nt, Artificial Sequence
  Description of Artificial Sequence: Synthetic oligonucleotide
aagugccagcgggagcugc

SEQ ID NO: 1698340 - RNA, 19 nt, Artificial Sequence
  Description of Artificial Sequence: Synthetic oligonucleotide
acaagccuuacaccgcaga

SEQ ID NO: 1698341 - RNA, 19 nt, Artificial Sequence
  Description of Artificial Sequence: Synthetic oligonucleotide
aacccaagcuucacagaag

SEQ ID NO: 1698342 - RNA, 19 nt, Artificial Sequence
  Description of Artificial Sequence: Synthetic oligonucleotide
acaaaccgccagaauguac

SEQ ID NO: 1698343 - RNA, 19 nt, Artificial Sequence
  Description of Artificial Sequence: Synthetic oligonucleotide
cuugucacauuccauugaa

SEQ ID NO: 1698344 - RNA, 19 nt, Artificial Sequence
  Description of Artificial Sequence: Synthetic oligonucleotide
auccuuugucuccugaguu

SEQ ID NO: 1698345 - RNA, 19 nt, Artificial Sequence
  Description of Artificial Sequence: Synthetic oligonucleotide
guccuuccuaaguucaaac

SEQ ID NO: 1698346 - RNA, 19 nt, Artificial Sequence
  Description of Artificial Sequence: Synthetic oligonucleotide
gcagaggcgaguccgaccc

SEQ ID NO: 1698347 - RNA, 19 nt, Artificial Sequence
  Description of Artificial Sequence: Synthetic oligonucleotide
uaagucuacagugcuucuc

SEQ ID NO: 1698348 - RNA, 19 nt, Artificial Sequence
  Description of Artificial Sequence: Synthetic oligonucleotide
ccugccaaauuucaaggag

SEQ ID NO: 1698349 - RNA, 19 nt, Artificial Sequence
  Description of Artificial Sequence: Synthetic oligonucleotide
aucaugguacccaguauca

SEQ ID NO: 1698350 - RNA, 19 nt, Artificial Sequence
  Description of Artificial Sequence: Synthetic oligonucleotide
cuacaaaccgccagaaugu

SEQ ID NO: 1698351 - RNA, 19 nt, Artificial Sequence
  Description of Artificial Sequence: Synthetic oligonucleotide
uacagugcuucucgaugcu

SEQ ID NO: 1698352 - RNA, 19 nt, Artificial Sequence
  Description of Artificial Sequence: Synthetic oligonucleotide
ugaguuucauguccacauu

SEQ ID NO: 1698353 - RNA, 19 nt, Artificial Sequence
  Description of Artificial Sequence: Synthetic oligonucleotide
uuccucccauggcaaaccc

SEQ ID NO: 1698354 - RNA, 19 nt, Artificial Sequence
  Description of Artificial Sequence: Synthetic oligonucleotide
gaugcucugagcuguuucu

SEQ ID NO: 1698355 - RNA, 19 nt, Artificial Sequence
  Description of Artificial Sequence: Synthetic oligonucleotide
acuucugaacagaauuaca

SEQ ID NO: 1698356 - RNA, 19 nt, Artificial Sequence
  Description of Artificial Sequence: Synthetic oligonucleotide
uccuaguucuccugcuccu

SEQ ID NO: 1698357 - RNA, 19 nt, Artificial Sequence
  Description of Artificial Sequence: Synthetic oligonucleotide
acaugcugagauccuuugu

SEQ ID NO: 1698358 - RNA, 19 nt, Artificial Sequence
  Description of Artificial Sequence: Synthetic oligonucleotide
agugagugggcaggcacag

SEQ ID NO: 1698359 - RNA, 19 nt, Artificial Sequence
  Description of Artificial Sequence: Synthetic oligonucleotide
gcagacaugaaugcuggcc

SEQ ID NO: 1698360 - RNA, 19 nt, Artificial Sequence
  Description of Artificial Sequence: Synthetic oligonucleotide
ugacagguucuuccaguaa

SEQ ID NO: 1698361 - RNA, 19 nt, Artificial Sequence
  Description of Artificial Sequence: Synthetic oligonucleotide
aaggcgguugcaggaaaca

SEQ ID NO: 1698362 - RNA, 19 nt, Artificial Sequence
  Description of Artificial Sequence: Synthetic oligonucleotide
auugcacccaccauagcaa

SEQ ID NO: 1698363 - RNA, 19 nt, Artificial Sequence
  Description of Artificial Sequence: Synthetic oligonucleotide
auugcacgggugcuuggcu

SEQ ID NO: 1698364 - RNA, 19 nt, Artificial Sequence
  Description of Artificial Sequence: Synthetic oligonucleotide
gaagacgcagaggcgaguc

SEQ ID NO: 1698365 - RNA, 19 nt, Artificial Sequence
  Description of Artificial Sequence: Synthetic oligonucleotide
cuccuuguauguucaucac

SEQ ID NO: 1698366 - RNA, 19 nt, Artificial Sequence
  Description of Artificial Sequence: Synthetic oligonucleotide
gcuaagucuacagugcuuc

SEQ ID NO: 1698367 - RNA, 19 nt, Artificial Sequence
  Description of Artificial Sequence: Synthetic oligonucleotide
cuuccucccauggcaaacc

SEQ ID NO: 1698368 - RNA, 19 nt, Artificial Sequence
  Description of Artificial Sequence: Synthetic oligonucleotide
aucuaacugacaaaaccua

SEQ ID NO: 1698369 - RNA, 19 nt, Artificial Sequence
  Description of Artificial Sequence: Synthetic oligonucleotide
caaggccaguacuguauac

SEQ ID NO: 1698370 - RNA, 19 nt, Artificial Sequence
  Description of Artificial Sequence: Synthetic oligonucleotide
ccagcaugcuugaugacac

SEQ ID NO: 1698371 - RNA, 19 nt, Artificial Sequence
  Description of Artificial Sequence: Synthetic oligonucleotide
gagcgaguugacaugcuga

SEQ ID NO: 1698372 - RNA, 19 nt, Artificial Sequence
  Description of Artificial Sequence: Synthetic oligonucleotide
agacaugaaugcuggccaa

SEQ ID NO: 1698373 - RNA, 19 nt, Artificial Sequence
  Description of Artificial Sequence: Synthetic oligonucleotide
cugaguuucauguccacau

SEQ ID NO: 1698374 - RNA, 19 nt, Artificial Sequence
  Description of Artificial Sequence: Synthetic oligonucleotide
augacacagucugaagacu

SEQ ID NO: 1698375 - RNA, 19 nt, Artificial Sequence
  Description of Artificial Sequence: Synthetic oligonucleotide
ucuauuccuuuaucaugua

SEQ ID NO: 1698376 - RNA, 19 nt, Artificial Sequence
  Description of Artificial Sequence: Synthetic oligonucleotide
acacugggcacaaauuggu

SEQ ID NO: 1698377 - RNA, 19 nt, Artificial Sequence
  Description of Artificial Sequence: Synthetic oligonucleotide
gucccaaaccccucgcuca

SEQ ID NO: 1698378 - RNA, 19 nt, Artificial Sequence
  Description of Artificial Sequence: Synthetic oligonucleotide
agcauugcacgggugcuug

SEQ ID NO: 1698379 - RNA, 19 nt, Artificial Sequence
  Description of Artificial Sequence: Synthetic oligonucleotide
agucugccugccaaauuuc

SEQ ID NO: 1698380 - RNA, 19 nt, Artificial Sequence
  Description of Artificial Sequence: Synthetic oligonucleotide
caaggcgguugcaggaaac

SEQ ID NO: 1698381 - RNA, 19 nt, Artificial Sequence
  Description of Artificial Sequence: Synthetic oligonucleotide
gugagcauagccacuggca

SEQ ID NO: 1698382 - RNA, 19 nt, Artificial Sequence
  Description of Artificial Sequence: Synthetic oligonucleotide
uuucgcagugguggaagac

SEQ ID NO: 1698383 - RNA, 19 nt, Artificial Sequence
  Description of Artificial Sequence: Synthetic oligonucleotide
cugcuccuaguucuccugc

SEQ ID NO: 1698384 - RNA, 19 nt, Artificial Sequence
  Description of Artificial Sequence: Synthetic oligonucleotide
gaggggacgucugagcauc

SEQ ID NO: 1698385 - RNA, 19 nt, Artificial Sequence
  Description of Artificial Sequence: Synthetic oligonucleotide
cauugcacgggugcuuggc

SEQ ID NO: 1698386 - RNA, 19 nt, Artificial Sequence
  Description of Artificial Sequence: Synthetic oligonucleotide
ucccaaaccccucgcucac

SEQ ID NO: 1698387 - RNA, 19 nt, Artificial Sequence
  Description of Artificial Sequence: Synthetic oligonucleotide
uccuacaaaccgccagaau

SEQ ID NO: 1698388 - RNA, 19 nt, Artificial Sequence
  Description of Artificial Sequence: Synthetic oligonucleotide
cuuguauguucaucacaga

SEQ ID NO: 1698389 - RNA, 19 nt, Artificial Sequence
  Description of Artificial Sequence: Synthetic oligonucleotide
caucucccucuucaccucc

SEQ ID NO: 1698390 - RNA, 19 nt, Artificial Sequence
  Description of Artificial Sequence: Synthetic oligonucleotide
gaguuucauguccacauuu

SEQ ID NO: 1698391 - RNA, 19 nt, Artificial Sequence
  Description of Artificial Sequence: Synthetic oligonucleotide
gcaaaaugcucuauucuuc

SEQ ID NO: 1698392 - RNA, 19 nt, Artificial Sequence
  Description of Artificial Sequence: Synthetic oligonucleotide
aacaagccuuacaccgcag

SEQ ID NO: 1698393 - RNA, 19 nt, Artificial Sequence
  Description of Artificial Sequence: Synthetic oligonucleotide
uuccuacaaaccgccagaa

SEQ ID NO: 1698394 - RNA, 19 nt, Artificial Sequence
  Description of Artificial Sequence: Synthetic oligonucleotide
cugaugacucagcaucuga

SEQ ID NO: 1698395 - RNA, 19 nt, Artificial Sequence
  Description of Artificial Sequence: Synthetic oligonucleotide
uccugaguuucauguccac

SEQ ID NO: 1698396 - RNA, 19 nt, Artificial Sequence
  Description of Artificial Sequence: Synthetic oligonucleotide
ggagcgaguugacaugcug

SEQ ID NO: 1698397 - RNA, 19 nt, Artificial Sequence
  Description of Artificial Sequence: Synthetic oligonucleotide
gacacagucugaagacuuc

SEQ ID NO: 1698398 - RNA, 19 nt, Artificial Sequence
  Description of Artificial Sequence: Synthetic oligonucleotide
acgucugagcauccucaug

SEQ ID NO: 1698399 - RNA, 19 nt, Artificial Sequence
  Description of Artificial Sequence: Synthetic oligonucleotide
ccaagcuucacagaaguca

SEQ ID NO: 1698400 - RNA, 19 nt, Artificial Sequence
  Description of Artificial Sequence: Synthetic oligonucleotide
ccuuacaccgcagacauga

SEQ ID NO: 1698401 - RNA, 19 nt, Artificial Sequence
  Description of Artificial Sequence: Synthetic oligonucleotide
cuucugccgccucuggcac

SEQ ID NO: 1698402 - RNA, 19 nt, Artificial Sequence
  Description of Artificial Sequence: Synthetic oligonucleotide
cccaccauagcaaggccag

SEQ ID NO: 1698403 - RNA, 19 nt, Artificial Sequence
  Description of Artificial Sequence: Synthetic oligonucleotide
acuagugaacagaucugau

SEQ ID NO: 1698404 - RNA, 19 nt, Artificial Sequence
  Description of Artificial Sequence: Synthetic oligonucleotide
ccgcagacaugaaugcugg

SEQ ID NO: 1698405 - RNA, 19 nt, Artificial Sequence
  Description of Artificial Sequence: Synthetic oligonucleotide
gcucuauucuucugccgcc

SEQ ID NO: 1698406 - RNA, 19 nt, Artificial Sequence
  Description of Artificial Sequence: Synthetic oligonucleotide
cuccugaguuucaugucca

SEQ ID NO: 1698407 - RNA, 19 nt, Artificial Sequence
  Description of Artificial Sequence: Synthetic oligonucleotide
uugcacgggugcuuggcua

SEQ ID NO: 1698408 - RNA, 19 nt, Artificial Sequence
  Description of Artificial Sequence: Synthetic oligonucleotide
uacaaaccgccagaaugua

SEQ ID NO: 1698409 - RNA, 19 nt, Artificial Sequence
  Description of Artificial Sequence: Synthetic oligonucleotide
auggcaaacccaagcuuca

SEQ ID NO: 1698410 - RNA, 19 nt, Artificial Sequence
  Description of Artificial Sequence: Synthetic oligonucleotide
aucauguauuuuauaugua

SEQ ID NO: 1698411 - RNA, 19 nt, Artificial Sequence
  Description of Artificial Sequence: Synthetic oligonucleotide
caucagugagugggcaggc

SEQ ID NO: 1698412 - RNA, 19 nt, Artificial Sequence
  Description of Artificial Sequence: Synthetic oligonucleotide
gguggaagacgcagaggcg

SEQ ID NO: 1698413 - RNA, 19 nt, Artificial Sequence
  Description of Artificial Sequence: Synthetic oligonucleotide
caguaauaauccaauucau

SEQ ID NO: 1698414 - RNA, 19 nt, Artificial Sequence
  Description of Artificial Sequence: Synthetic oligonucleotide
gugaacagaucugaugacu

SEQ ID NO: 1698415 - RNA, 19 nt, Artificial Sequence
  Description of Artificial Sequence: Synthetic oligonucleotide
aggcgaguccgacccgcgg

SEQ ID NO: 1698416 - RNA, 19 nt, Artificial Sequence
  Description of Artificial Sequence: Synthetic oligonucleotide
gagcauagccacuggcaua

SEQ ID NO: 1698417 - RNA, 19 nt, Artificial Sequence
  Description of Artificial Sequence: Synthetic oligonucleotide
gcacccaccauagcaaggc

SEQ ID NO: 1698418 - RNA, 19 nt, Artificial Sequence
  Description of Artificial Sequence: Synthetic oligonucleotide
caguaucagcauacuuguc

SEQ ID NO: 1698419 - RNA, 19 nt, Artificial Sequence
  Description of Artificial Sequence: Synthetic oligonucleotide
ggcauagguccuuccuaag

SEQ ID NO: 1698420 - RNA, 19 nt, Artificial Sequence
  Description of Artificial Sequence: Synthetic oligonucleotide
cucccauggcaaacccaag

SEQ ID NO: 1698421 - RNA, 19 nt, Artificial Sequence
  Description of Artificial Sequence: Synthetic oligonucleotide
cacccaccauagcaaggcc

SEQ ID NO: 1698422 - RNA, 19 nt, Artificial Sequence
  Description of Artificial Sequence: Synthetic oligonucleotide
cauagguccuuccuaaguu

SEQ ID NO: 1698423 - RNA, 19 nt, Artificial Sequence
  Description of Artificial Sequence: Synthetic oligonucleotide
ccuugcuccuuguauguuc

SEQ ID NO: 1698424 - RNA, 19 nt, Artificial Sequence
  Description of Artificial Sequence: Synthetic oligonucleotide
cacuggcauagguccuucc

SEQ ID NO: 1698425 - RNA, 19 nt, Artificial Sequence
  Description of Artificial Sequence: Synthetic oligonucleotide
ccuuccuaaguucaaacua

SEQ ID NO: 1698426 - RNA, 19 nt, Artificial Sequence
  Description of Artificial Sequence: Synthetic oligonucleotide
aaugcuggccaaggcgguu

SEQ ID NO: 1698427 - RNA, 19 nt, Artificial Sequence
  Description of Artificial Sequence: Synthetic oligonucleotide
cagugagugggcaggcaca

SEQ ID NO: 1698428 - RNA, 19 nt, Artificial Sequence
  Description of Artificial Sequence: Synthetic oligonucleotide
acccaccauagcaaggcca

SEQ ID NO: 1698429 - RNA, 19 nt, Artificial Sequence
  Description of Artificial Sequence: Synthetic oligonucleotide
uacccaguaucagcauacu

SEQ ID NO: 1698430 - RNA, 19 nt, Artificial Sequence
  Description of Artificial Sequence: Synthetic oligonucleotide
cuuucgcagugguggaaga

SEQ ID NO: 1698431 - RNA, 19 nt, Artificial Sequence
  Description of Artificial Sequence: Synthetic oligonucleotide
aguccgacccgcgggcuag

SEQ ID NO: 1698432 - RNA, 19 nt, Artificial Sequence
  Description of Artificial Sequence: Synthetic oligonucleotide
gaagcauugcacgggugcu

SEQ ID NO: 1698433 - RNA, 19 nt, Artificial Sequence
  Description of Artificial Sequence: Synthetic oligonucleotide
cucgcucacauuccacaca

SEQ ID NO: 1698434 - RNA, 19 nt, Artificial Sequence
  Description of Artificial Sequence: Synthetic oligonucleotide
uuccucgcgccugucuucu

SEQ ID NO: 1698435 - RNA, 19 nt, Artificial Sequence
  Description of Artificial Sequence: Synthetic oligonucleotide
aagcauugcacgggugcuu

SEQ ID NO: 1698436 - RNA, 19 nt, Artificial Sequence
  Description of Artificial Sequence: Synthetic oligonucleotide
gggaggggacgucugagca

SEQ ID NO: 1698437 - RNA, 19 nt, Artificial Sequence
  Description of Artificial Sequence: Synthetic oligonucleotide
aguccaguaucaguuccua

SEQ ID NO: 1698438 - RNA, 19 nt, Artificial Sequence
  Description of Artificial Sequence: Synthetic oligonucleotide
ugguacccaguaucagcau

SEQ ID NO: 1698439 - RNA, 19 nt, Artificial Sequence
  Description of Artificial Sequence: Synthetic oligonucleotide
uggcaaacccaagcuucac

SEQ ID NO: 1698440 - RNA, 19 nt, Artificial Sequence
  Description of Artificial Sequence: Synthetic oligonucleotide
gaggcgaguccgacccgcg

SEQ ID NO: 1698441 - RNA, 19 nt, Artificial Sequence
  Description of Artificial Sequence: Synthetic oligonucleotide
cuggcauagguccuuccua

SEQ ID NO: 1698442 - RNA, 19 nt, Artificial Sequence
  Description of Artificial Sequence: Synthetic oligonucleotide
aucauacccagaggcucca

SEQ ID NO: 1698443 - RNA, 19 nt, Artificial Sequence
  Description of Artificial Sequence: Synthetic oligonucleotide
cuucuaaaacuuggcagcu

SEQ ID NO: 1698444 - RNA, 19 nt, Artificial Sequence
  Description of Artificial Sequence: Synthetic oligonucleotide
cuauuccuuuaucauguau

SEQ ID NO: 1698445 - RNA, 19 nt, Artificial Sequence
  Description of Artificial Sequence: Synthetic oligonucleotide
gucagaugacagguucuuc

SEQ ID NO: 1698446 - RNA, 19 nt, Artificial Sequence
  Description of Artificial Sequence: Synthetic oligonucleotide
cagaggcuccaucucccuc

SEQ ID NO: 1698447 - RNA, 19 nt, Artificial Sequence
  Description of Artificial Sequence: Synthetic oligonucleotide
aucagugagugggcaggca

SEQ ID NO: 1698448 - RNA, 19 nt, Artificial Sequence
  Description of Artificial Sequence: Synthetic oligonucleotide
cagucugccugccaaauuu

SEQ ID NO: 1698449 - RNA, 19 nt, Artificial Sequence
  Description of Artificial Sequence: Synthetic oligonucleotide
cauagccacuggcauaggu

SEQ ID NO: 1698450 - RNA, 19 nt, Artificial Sequence
  Description of Artificial Sequence: Synthetic oligonucleotide
aggggacgucugagcaucc

SEQ ID NO: 1698451 - RNA, 19 nt, Artificial Sequence
  Description of Artificial Sequence: Synthetic oligonucleotide
aggccaagggaggggacgu

SEQ ID NO: 1698452 - RNA, 19 nt, Artificial Sequence
  Description of Artificial Sequence: Synthetic oligonucleotide
accuaccagaugauugaaa

SEQ ID NO: 1698453 - RNA, 19 nt, Artificial Sequence
  Description of Artificial Sequence: Synthetic oligonucleotide
ccaguaucaguuccuacaa

SEQ ID NO: 1698454 - RNA, 19 nt, Artificial Sequence
  Description of Artificial Sequence: Synthetic oligonucleotide
ccuaguaugacuagccuuu

SEQ ID NO: 1698455 - RNA, 19 nt, Artificial Sequence
  Description of Artificial Sequence: Synthetic oligonucleotide
cauuccacacacucugcau

SEQ ID NO: 1698456 - RNA, 19 nt, Artificial Sequence
  Description of Artificial Sequence: Synthetic oligonucleotide
ccucgcucacauuccacac

SEQ ID NO: 1698457 - RNA, 19 nt, Artificial Sequence
  Description of Artificial Sequence: Synthetic oligonucleotide
gcacuugucacauuccauu

SEQ ID NO: 1698458 - RNA, 19 nt, Artificial Sequence
  Description of Artificial Sequence: Synthetic oligonucleotide
uucugccgccucuggcacu

SEQ ID NO: 1698459 - RNA, 19 nt, Artificial Sequence
  Description of Artificial Sequence: Synthetic oligonucleotide
cagaggcgaguccgacccg

SEQ ID NO: 1698460 - RNA, 19 nt, Artificial Sequence
  Description of Artificial Sequence: Synthetic oligonucleotide
cuaagucuacagugcuucu

SEQ ID NO: 1698461 - RNA, 19 nt, Artificial Sequence
  Description of Artificial Sequence: Synthetic oligonucleotide
gggacgucugagcauccuc

SEQ ID NO: 1698462 - RNA, 19 nt, Artificial Sequence
  Description of Artificial Sequence: Synthetic oligonucleotide
gcauugcacgggugcuugg

SEQ ID NO: 1698463 - RNA, 19 nt, Artificial Sequence
  Description of Artificial Sequence: Synthetic oligonucleotide
caccauagcaaggccagua

SEQ ID NO: 1698464 - RNA, 19 nt, Artificial Sequence
  Description of Artificial Sequence: Synthetic oligonucleotide
gcucucggcgguucucugc

SEQ ID NO: 1698465 - RNA, 19 nt, Artificial Sequence
  Description of Artificial Sequence: Synthetic oligonucleotide
gucuacagugcuucucgau

SEQ ID NO: 1698466 - RNA, 19 nt, Artificial Sequence
  Description of Artificial Sequence: Synthetic oligonucleotide
cuuacaccgcagacaugaa

SEQ ID NO: 1698467 - RNA, 19 nt, Artificial Sequence
  Description of Artificial Sequence: Synthetic oligonucleotide
ucucggcgguucucugccu

SEQ ID NO: 1698468 - RNA, 19 nt, Artificial Sequence
  Description of Artificial Sequence: Synthetic oligonucleotide
agugccagcgggagcugcu

SEQ ID NO: 1698469 - RNA, 19 nt, Artificial Sequence
  Description of Artificial Sequence: Synthetic oligonucleotide
uugcuccuuguauguucau

SEQ ID NO: 1698470 - RNA, 19 nt, Artificial Sequence
  Description of Artificial Sequence: Synthetic oligonucleotide
gacgucugagcauccucau

SEQ ID NO: 1698471 - RNA, 19 nt, Artificial Sequence
  Description of Artificial Sequence: Synthetic oligonucleotide
gacuagccuuuuggacaag

SEQ ID NO: 1698472 - RNA, 19 nt, Artificial Sequence
  Description of Artificial Sequence: Synthetic oligonucleotide
cacugggcacaaauuggua

SEQ ID NO: 1698473 - RNA, 19 nt, Artificial Sequence
  Description of Artificial Sequence: Synthetic oligonucleotide
cagcgggagcugcuccuag

SEQ ID NO: 1698474 - RNA, 19 nt, Artificial Sequence
  Description of Artificial Sequence: Synthetic oligonucleotide
caccuugcuccuuguaugu

SEQ ID NO: 1698475 - RNA, 19 nt, Artificial Sequence
  Description of Artificial Sequence: Synthetic oligonucleotide
gacgcagaggcgaguccga

SEQ ID NO: 1698476 - RNA, 19 nt, Artificial Sequence
  Description of Artificial Sequence: Synthetic oligonucleotide
caguuccuacaaaccgcca

SEQ ID NO: 1698477 - RNA, 19 nt, Artificial Sequence
  Description of Artificial Sequence: Synthetic oligonucleotide
cugagauccuuugucuccu

SEQ ID NO: 1698478 - RNA, 19 nt, Artificial Sequence
  Description of Artificial Sequence: Synthetic oligonucleotide
cacauuccauugaagcauu

SEQ ID NO: 1698479 - RNA, 19 nt, Artificial Sequence
  Description of Artificial Sequence: Synthetic oligonucleotide
cugcaucagugagugggca

SEQ ID NO: 1698480 - RNA, 19 nt, Artificial Sequence
  Description of Artificial Sequence: Synthetic oligonucleotide
gcgaguccgacccgcgggc

SEQ ID NO: 1698481 - RNA, 19 nt, Artificial Sequence
  Description of Artificial Sequence: Synthetic oligonucleotide
ucccgcucucggcgguucu

SEQ ID NO: 1698482 - RNA, 19 nt, Artificial Sequence
  Description of Artificial Sequence: Synthetic oligonucleotide
cgaguugacaugcugagau

SEQ ID NO: 1698483 - RNA, 19 nt, Artificial Sequence
  Description of Artificial Sequence: Synthetic oligonucleotide
cuaagacacuuccucccau

SEQ ID NO: 1698484 - RNA, 19 nt, Artificial Sequence
  Description of Artificial Sequence: Synthetic oligonucleotide
cagcaugcuugaugacaca

SEQ ID NO: 1698485 - RNA, 19 nt, Artificial Sequence
  Description of Artificial Sequence: Synthetic oligonucleotide
gaaugcuggccaaggcggu

SEQ ID NO: 1698486 - RNA, 19 nt, Artificial Sequence
  Description of Artificial Sequence: Synthetic oligonucleotide
gcgguucucugccuucuuc

SEQ ID NO: 1698487 - RNA, 19 nt, Artificial Sequence
  Description of Artificial Sequence: Synthetic oligonucleotide
gguaacuucugaacagaau

SEQ ID NO: 1698488 - RNA, 19 nt, Artificial Sequence
  Description of Artificial Sequence: Synthetic oligonucleotide
ucgaugcucugagcuguuu

SEQ ID NO: 1698489 - RNA, 19 nt, Artificial Sequence
  Description of Artificial Sequence: Synthetic oligonucleotide
cccucgcucacauuccaca

SEQ ID NO: 1698490 - RNA, 19 nt, Artificial Sequence
  Description of Artificial Sequence: Synthetic oligonucleotide
gcaaggccaguacuguaua

SEQ ID NO: 1698491 - RNA, 19 nt, Artificial Sequence
  Description of Artificial Sequence: Synthetic oligonucleotide
cacuuccucccauggcaaa

SEQ ID NO: 1698492 - RNA, 19 nt, Artificial Sequence
  Description of Artificial Sequence: Synthetic oligonucleotide
caaaaccuaccagaugauu

SEQ ID NO: 1698493 - RNA, 19 nt, Artificial Sequence
  Description of Artificial Sequence: Synthetic oligonucleotide
aggagcgaguugacaugcu

SEQ ID NO: 1698494 - RNA, 19 nt, Artificial Sequence
  Description of Artificial Sequence: Synthetic oligonucleotide
cccaagcuucacagaaguc

SEQ ID NO: 1698495 - RNA, 19 nt, Artificial Sequence
  Description of Artificial Sequence: Synthetic oligonucleotide
caucaucaugguacccagu

SEQ ID NO: 1698496 - RNA, 19 nt, Artificial Sequence
  Description of Artificial Sequence: Synthetic oligonucleotide
gaguccgacccgcgggcua

SEQ ID NO: 1698497 - RNA, 19 nt, Artificial Sequence
  Description of Artificial Sequence: Synthetic oligonucleotide
accuugcuccuuguauguu

SEQ ID NO: 1698498 - RNA, 19 nt, Artificial Sequence
  Description of Artificial Sequence: Synthetic oligonucleotide
ccugaguuucauguccaca

SEQ ID NO: 1698499 - RNA, 19 nt, Artificial Sequence
  Description of Artificial Sequence: Synthetic oligonucleotide
cucuauucuucugccgccu

SEQ ID NO: 1698500 - RNA, 19 nt, Artificial Sequence
  Description of Artificial Sequence: Synthetic oligonucleotide
cucgcgccugucuucuucu

SEQ ID NO: 1698501 - RNA, 19 nt, Artificial Sequence
  Description of Artificial Sequence: Synthetic oligonucleotide
gcgguugcaggaaacacau

SEQ ID NO: 1698502 - RNA, 19 nt, Artificial Sequence
  Description of Artificial Sequence: Synthetic oligonucleotide
auacaccagcaugcuugau

SEQ ID NO: 1698503 - RNA, 19 nt, Artificial Sequence
  Description of Artificial Sequence: Synthetic oligonucleotide
cucuuucgcagugguggaa

SEQ ID NO: 1698504 - RNA, 19 nt, Artificial Sequence
  Description of Artificial Sequence: Synthetic oligonucleotide
cgcagaggcgaguccgacc

SEQ ID NO: 1698505 - RNA, 19 nt, Artificial Sequence
  Description of Artificial Sequence: Synthetic oligonucleotide
ucgcgccugucuucuucuu

SEQ ID NO: 1698506 - RNA, 19 nt, Artificial Sequence
  Description of Artificial Sequence: Synthetic oligonucleotide
ccucuuucgcaguggugga

SEQ ID NO: 1698507 - RNA, 19 nt, Artificial Sequence
  Description of Artificial Sequence: Synthetic oligonucleotide
ccucgcgccugucuucuuc

SEQ ID NO: 1698508 - RNA, 19 nt, Artificial Sequence
  Description of Artificial Sequence: Synthetic oligonucleotide
uccgacccgcgggcuagaa

SEQ ID NO: 1698509 - RNA, 19 nt, Artificial Sequence
  Description of Artificial Sequence: Synthetic oligonucleotide
gcgaguugacaugcugaga

SEQ ID NO: 1698510 - RNA, 19 nt, Artificial Sequence
  Description of Artificial Sequence: Synthetic oligonucleotide
ccgccucuggcacuuguca

SEQ ID NO: 1698511 - RNA, 19 nt, Artificial Sequence
  Description of Artificial Sequence: Synthetic oligonucleotide
gugccagcgggagcugcuc

SEQ ID NO: 1698512 - RNA, 19 nt, Artificial Sequence
  Description of Artificial Sequence: Synthetic oligonucleotide
cccuaguaugacuagccuu

SEQ ID NO: 1698513 - RNA, 19 nt, Artificial Sequence
  Description of Artificial Sequence: Synthetic oligonucleotide
ccccucgcucacauuccac

SEQ ID NO: 1698514 - RNA, 19 nt, Artificial Sequence
  Description of Artificial Sequence: Synthetic oligonucleotide
cucccgcucucggcgguuc

SEQ ID NO: 1698515 - RNA, 19 nt, Artificial Sequence
  Description of Artificial Sequence: Synthetic oligonucleotide
ggcacuugucacauuccau

SEQ ID NO: 1698516 - RNA, 19 nt, Artificial Sequence
  Description of Artificial Sequence: Synthetic oligonucleotide
ucucccgcucucggcgguu

SEQ ID NO: 1698517 - RNA, 19 nt, Artificial Sequence
  Description of Artificial Sequence: Synthetic oligonucleotide
gcacgggugcuuggcuaag

SEQ ID NO: 1698518 - RNA, 19 nt, Artificial Sequence
  Description of Artificial Sequence: Synthetic oligonucleotide
uccucgcgccugucuucuu

SEQ ID NO: 1698519 - RNA, 19 nt, Artificial Sequence
  Description of Artificial Sequence: Synthetic oligonucleotide
ccaauucaugauacuccau

SEQ ID NO: 1698520 - RNA, 19 nt, Artificial Sequence
  Description of Artificial Sequence: Synthetic oligonucleotide
ccgacccgcgggcuagaac

SEQ ID NO: 1698521 - RNA, 19 nt, Artificial Sequence
  Description of Artificial Sequence: Synthetic oligonucleotide
cgcgccugucuucuucuuc

SEQ ID NO: 1698522 - RNA, 19 nt, Artificial Sequence
  Description of Artificial Sequence: Synthetic oligonucleotide
cucggcgguucucugccuu

SEQ ID NO: 1698523 - RNA, 19 nt, Artificial Sequence
  Description of Artificial Sequence: Synthetic oligonucleotide
gccuuacaccgcagacaug

SEQ ID NO: 1698524 - RNA, 19 nt, Artificial Sequence
  Description of Artificial Sequence: Synthetic oligonucleotide
gggcacaaauugguaacuu

SEQ ID NO: 1698525 - RNA, 19 nt, Artificial Sequence
  Description of Artificial Sequence: Synthetic oligonucleotide
ggaagacgcagaggcgagu

SEQ ID NO: 1698526 - RNA, 19 nt, Artificial Sequence
  Description of Artificial Sequence: Synthetic oligonucleotide
ggcuaagucuacagugcuu

SEQ ID NO: 1698527 - RNA, 19 nt, Artificial Sequence
  Description of Artificial Sequence: Synthetic oligonucleotide
ccccuaguaugacuagccu

SEQ ID NO: 1698528 - RNA, 19 nt, Artificial Sequence
  Description of Artificial Sequence: Synthetic oligonucleotide
cucgaugcucugagcuguu

SEQ ID NO: 1698529 - RNA, 19 nt, Artificial Sequence
  Description of Artificial Sequence: Synthetic oligonucleotide
gccgccucuggcacuuguc

SEQ ID NO: 1698530 - RNA, 19 nt, Artificial Sequence
  Description of Artificial Sequence: Synthetic oligonucleotide
ccaaaccccucgcucacau

SEQ ID NO: 1698531 - RNA, 19 nt, Artificial Sequence
  Description of Artificial Sequence: Synthetic oligonucleotide
caaaccccucgcucacauu

SEQ ID NO: 1698532 - RNA, 19 nt, Artificial Sequence
  Description of Artificial Sequence: Synthetic oligonucleotide
gcgggagcugcuccuaguu

SEQ ID NO: 1698533 - RNA, 19 nt, Artificial Sequence
  Description of Artificial Sequence: Synthetic oligonucleotide
gcauggguacuaagacacu

SEQ ID NO: 1698534 - RNA, 19 nt, Artificial Sequence
  Description of Artificial Sequence: Synthetic oligonucleotide
cacgggugcuuggcuaagu

SEQ ID NO: 1698535 - RNA, 19 nt, Artificial Sequence
  Description of Artificial Sequence: Synthetic oligonucleotide
ggccaagggaggggacguc

SEQ ID NO: 1698536 - RNA, 19 nt, Artificial Sequence
  Description of Artificial Sequence: Synthetic oligonucleotide
ggggacgucugagcauccu

SEQ ID NO: 1698537 - RNA, 19 nt, Artificial Sequence
  Description of Artificial Sequence: Synthetic oligonucleotide
guccgacccgcgggcuaga

SEQ ID NO: 1698538 - RNA, 19 nt, Artificial Sequence
  Description of Artificial Sequence: Synthetic oligonucleotide
cccgcucucggcgguucuc

SEQ ID NO: 1698539 - RNA, 19 nt, Artificial Sequence
  Description of Artificial Sequence: Synthetic oligonucleotide
cccaaaccccucgcucaca

SEQ ID NO: 1698540 - RNA, 19 nt, Artificial Sequence
  Description of Artificial Sequence: Synthetic oligonucleotide
ccagcgggagcugcuccua

SEQ ID NO: 1698541 - RNA, 19 nt, Artificial Sequence
  Description of Artificial Sequence: Synthetic oligonucleotide
ccgcucucggcgguucucu

SEQ ID NO: 1698542 - RNA, 19 nt, Artificial Sequence
  Description of Artificial Sequence: Synthetic oligonucleotide
cgaguccgacccgcgggcu

SEQ ID NO: 1698543 - RNA, 19 nt, Artificial Sequence
  Description of Artificial Sequence: Synthetic oligonucleotide
aauauuugaagggaggggc

SEQ ID NO: 1698544 - RNA, 19 nt, Artificial Sequence
  Description of Artificial Sequence: Synthetic oligonucleotide
aggaguaagcaauaaaacc

SEQ ID NO: 1698545 - RNA, 19 nt, Artificial Sequence
  Description of Artificial Sequence: Synthetic oligonucleotide
ucauguaaauacuaggagg

SEQ ID NO: 1698546 - RNA, 19 nt, Artificial Sequence
  Description of Artificial Sequence: Synthetic oligonucleotide
aacauaaugccauucaaga

SEQ ID NO: 1698547 - RNA, 19 nt, Artificial Sequence
  Description of Artificial Sequence: Synthetic oligonucleotide
aaacaaguucgccaaagcg

SEQ ID NO: 1698548 - RNA, 19 nt, Artificial Sequence
  Description of Artificial Sequence: Synthetic oligonucleotide
auucaagaauauuugaagg

SEQ ID NO: 1698549 - RNA, 19 nt, Artificial Sequence
  Description of Artificial Sequence: Synthetic oligonucleotide
uucaagaauauuugaaggg

SEQ ID NO: 1698550 - RNA, 19 nt, Artificial Sequence
  Description of Artificial Sequence: Synthetic oligonucleotide
aauacuaggaggcuuaaau

SEQ ID NO: 1698551 - RNA, 19 nt, Artificial Sequence
  Description of Artificial Sequence: Synthetic oligonucleotide
acagauauaaggcacuggg

SEQ ID NO: 1698552 - RNA, 19 nt, Artificial Sequence
  Description of Artificial Sequence: Synthetic oligonucleotide
aacaaguucgccaaagcgc

SEQ ID NO: 1698553 - RNA, 19 nt, Artificial Sequence
  Description of Artificial Sequence: Synthetic oligonucleotide
uuacuaaacaguccaaaag

SEQ ID NO: 1698554 - RNA, 19 nt, Artificial Sequence
  Description of Artificial Sequence: Synthetic oligonucleotide
cauguaaauacuaggaggc

SEQ ID NO: 1698555 - RNA, 19 nt, Artificial Sequence
  Description of Artificial Sequence: Synthetic oligonucleotide
ugucuuuucgugaaguccg

SEQ ID NO: 1698556 - RNA, 19 nt, Artificial Sequence
  Description of Artificial Sequence: Synthetic oligonucleotide
ugugcuaugcuucucagca

SEQ ID NO: 1698557 - RNA, 19 nt, Artificial Sequence
  Description of Artificial Sequence: Synthetic oligonucleotide
uucauaaggagucaucucu

SEQ ID NO: 1698558 - RNA, 19 nt, Artificial Sequence
  Description of Artificial Sequence: Synthetic oligonucleotide
uuguguugcacuuaaaccu

SEQ ID NO: 1698559 - RNA, 19 nt, Artificial Sequence
  Description of Artificial Sequence: Synthetic oligonucleotide
acuuaguucaucuugugcu

SEQ ID NO: 1698560 - RNA, 19 nt, Artificial Sequence
  Description of Artificial Sequence: Synthetic oligonucleotide
ucaagaggaguuaagacuc

SEQ ID NO: 1698561 - RNA, 19 nt, Artificial Sequence
  Description of Artificial Sequence: Synthetic oligonucleotide
uuuucgugaaguccgaugu

SEQ ID NO: 1698562 - RNA, 19 nt, Artificial Sequence
  Description of Artificial Sequence: Synthetic oligonucleotide
uccaaaagacaacacagga

SEQ ID NO: 1698563 - RNA, 19 nt, Artificial Sequence
  Description of Artificial Sequence: Synthetic oligonucleotide
aauggaaauucucugggaa

SEQ ID NO: 1698564 - RNA, 19 nt, Artificial Sequence
  Description of Artificial Sequence: Synthetic oligonucleotide
uguauaggcauuaaaguuu

SEQ ID NO: 1698565 - RNA, 19 nt, Artificial Sequence
  Description of Artificial Sequence: Synthetic oligonucleotide
ucuuucuuaauucgaaggu

SEQ ID NO: 1698566 - RNA, 19 nt, Artificial Sequence
  Description of Artificial Sequence: Synthetic oligonucleotide
uuaagacucuccaaucucc

SEQ ID NO: 1698567 - RNA, 19 nt, Artificial Sequence
  Description of Artificial Sequence: Synthetic oligonucleotide
aucauguaaauacuaggag

SEQ ID NO: 1698568 - RNA, 19 nt, Artificial Sequence
  Description of Artificial Sequence: Synthetic oligonucleotide
uguuggagcucucuuauug

SEQ ID NO: 1698569 - RNA, 19 nt, Artificial Sequence
  Description of Artificial Sequence: Synthetic oligonucleotide
gucuuucuuaauucgaagg

SEQ ID NO: 1698570 - RNA, 19 nt, Artificial Sequence
  Description of Artificial Sequence: Synthetic oligonucleotide
cuuaauucgaagguagucc

SEQ ID NO: 1698571 - RNA, 19 nt, Artificial Sequence
  Description of Artificial Sequence: Synthetic oligonucleotide
uccgaugucucuaugcugc

SEQ ID NO: 1698572 - RNA, 19 nt, Artificial Sequence
  Description of Artificial Sequence: Synthetic oligonucleotide
aguuuuccaugauaauagc

SEQ ID NO: 1698573 - RNA, 19 nt, Artificial Sequence
  Description of Artificial Sequence: Synthetic oligonucleotide
cucagcacauacuugacag

SEQ ID NO: 1698574 - RNA, 19 nt, Artificial Sequence
  Description of Artificial Sequence: Synthetic oligonucleotide
uuuaagugaucaaaucuaa

SEQ ID NO: 1698575 - RNA, 19 nt, Artificial Sequence
  Description of Artificial Sequence: Synthetic oligonucleotide
acaaguucgccaaagcgcc

SEQ ID NO: 1698576 - RNA, 19 nt, Artificial Sequence
  Description of Artificial Sequence: Synthetic oligonucleotide
ucaagaauauuugaaggga

SEQ ID NO: 1698577 - RNA, 19 nt, Artificial Sequence
  Description of Artificial Sequence: Synthetic oligonucleotide
uuuacuaaacaguccaaaa

SEQ ID NO: 1698578 - RNA, 19 nt, Artificial Sequence
  Description of Artificial Sequence: Synthetic oligonucleotide
aacacuaaacucugugcug

SEQ ID NO: 1698579 - RNA, 19 nt, Artificial Sequence
  Description of Artificial Sequence: Synthetic oligonucleotide
gaaugguggagacagacca

SEQ ID NO: 1698580 - RNA, 19 nt, Artificial Sequence
  Description of Artificial Sequence: Synthetic oligonucleotide
uuaauucgaagguaguccu

SEQ ID NO: 1698581 - RNA, 19 nt, Artificial Sequence
  Description of Artificial Sequence: Synthetic oligonucleotide
aggcauuaaaguuuuauau

SEQ ID NO: 1698582 - RNA, 19 nt, Artificial Sequence
  Description of Artificial Sequence: Synthetic oligonucleotide
aacuguagauugcgguggc

SEQ ID NO: 1698583 - RNA, 19 nt, Artificial Sequence
  Description of Artificial Sequence: Synthetic oligonucleotide
acacuaaacucugugcugc

SEQ ID NO: 1698584 - RNA, 19 nt, Artificial Sequence
  Description of Artificial Sequence: Synthetic oligonucleotide
gaauauuugaagggagggg

SEQ ID NO: 1698585 - RNA, 19 nt, Artificial Sequence
  Description of Artificial Sequence: Synthetic oligonucleotide
guuaucauguaaauacuag

SEQ ID NO: 1698586 - RNA, 19 nt, Artificial Sequence
  Description of Artificial Sequence: Synthetic oligonucleotide
uuaguuuuccaugauaaua

SEQ ID NO: 1698587 - RNA, 19 nt, Artificial Sequence
  Description of Artificial Sequence: Synthetic oligonucleotide
caacauaaugccauucaag

SEQ ID NO: 1698588 - RNA, 19 nt, Artificial Sequence
  Description of Artificial Sequence: Synthetic oligonucleotide
uacuuaguucaucuugugc

SEQ ID NO: 1698589 - RNA, 19 nt, Artificial Sequence
  Description of Artificial Sequence: Synthetic oligonucleotide
aguuaagacucuccaaucu

SEQ ID NO: 1698590 - RNA, 19 nt, Artificial Sequence
  Description of Artificial Sequence: Synthetic oligonucleotide
auacuaggaggcuuaaaug

SEQ ID NO: 1698591 - RNA, 19 nt, Artificial Sequence
  Description of Artificial Sequence: Synthetic oligonucleotide
auaaggagucaucucuggg

SEQ ID NO: 1698592 - RNA, 19 nt, Artificial Sequence
  Description of Artificial Sequence: Synthetic oligonucleotide
aaaccagguuuacuaaaca

SEQ ID NO: 1698593 - RNA, 19 nt, Artificial Sequence
  Description of Artificial Sequence: Synthetic oligonucleotide
uggagacagaccacgcugg

SEQ ID NO: 1698594 - RNA, 19 nt, Artificial Sequence
  Description of Artificial Sequence: Synthetic oligonucleotide
ugcuaugcuucucagcaca

SEQ ID NO: 1698595 - RNA, 19 nt, Artificial Sequence
  Description of Artificial Sequence: Synthetic oligonucleotide
aauucgaagguaguccugu

SEQ ID NO: 1698596 - RNA, 19 nt, Artificial Sequence
  Description of Artificial Sequence: Synthetic oligonucleotide
ucuccaaucuccuccauau

SEQ ID NO: 1698597 - RNA, 19 nt, Artificial Sequence
  Description of Artificial Sequence: Synthetic oligonucleotide
cuccgcacagauauaaggc

SEQ ID NO: 1698598 - RNA, 19 nt, Artificial Sequence
  Description of Artificial Sequence: Synthetic oligonucleotide
aaguucgccaaagcgccgc

SEQ ID NO: 1698599 - RNA, 19 nt, Artificial Sequence
  Description of Artificial Sequence: Synthetic oligonucleotide
uguuucaaccucuguguug

SEQ ID NO: 1698600 - RNA, 19 nt, Artificial Sequence
  Description of Artificial Sequence: Synthetic oligonucleotide
ugggacuuagcccaccgca

SEQ ID NO: 1698601 - RNA, 19 nt, Artificial Sequence
  Description of Artificial Sequence: Synthetic oligonucleotide
cucagguucgccguggucg

SEQ ID NO: 1698602 - RNA, 19 nt, Artificial Sequence
  Description of Artificial Sequence: Synthetic oligonucleotide
ggaguaagcaauaaaacca

SEQ ID NO: 1698603 - RNA, 19 nt, Artificial Sequence
  Description of Artificial Sequence: Synthetic oligonucleotide
ucaaccucuguguugcugu

SEQ ID NO: 1698604 - RNA, 19 nt, Artificial Sequence
  Description of Artificial Sequence: Synthetic oligonucleotide
ugggccucggacaacauaa

SEQ ID NO: 1698605 - RNA, 19 nt, Artificial Sequence
  Description of Artificial Sequence: Synthetic oligonucleotide
agcaacuguagauugcggu

SEQ ID NO: 1698606 - RNA, 19 nt, Artificial Sequence
  Description of Artificial Sequence: Synthetic oligonucleotide
uuaagugaucaaaucuaau

SEQ ID NO: 1698607 - RNA, 19 nt, Artificial Sequence
  Description of Artificial Sequence: Synthetic oligonucleotide
cugggucuuucuuaauucg

SEQ ID NO: 1698608 - RNA, 19 nt, Artificial Sequence
  Description of Artificial Sequence: Synthetic oligonucleotide
agcccuguuagaauggugg

SEQ ID NO: 1698609 - RNA, 19 nt, Artificial Sequence
  Description of Artificial Sequence: Synthetic oligonucleotide
uccgcacagauauaaggca

SEQ ID NO: 1698610 - RNA, 19 nt, Artificial Sequence
  Description of Artificial Sequence: Synthetic oligonucleotide
ucuuaauucgaagguaguc

SEQ ID NO: 1698611 - RNA, 19 nt, Artificial Sequence
  Description of Artificial Sequence: Synthetic oligonucleotide
agaggaguuaagacucucc

SEQ ID NO: 1698612 - RNA, 19 nt, Artificial Sequence
  Description of Artificial Sequence: Synthetic oligonucleotide
ucucagcacauacuugaca

SEQ ID NO: 1698613 - RNA, 19 nt, Artificial Sequence
  Description of Artificial Sequence: Synthetic oligonucleotide
ccaacuauaacaaacaagu

SEQ ID NO: 1698614 - RNA, 19 nt, Artificial Sequence
  Description of Artificial Sequence: Synthetic oligonucleotide
uagaaugguggagacagac

SEQ ID NO: 1698615 - RNA, 19 nt, Artificial Sequence
  Description of Artificial Sequence: Synthetic oligonucleotide
uaagacucuccaaucuccu

SEQ ID NO: 1698616 - RNA, 19 nt, Artificial Sequence
  Description of Artificial Sequence: Synthetic oligonucleotide
uucuuaauucgaagguagu

SEQ ID NO: 1698617 - RNA, 19 nt, Artificial Sequence
  Description of Artificial Sequence: Synthetic oligonucleotide
cuuuucgugaaguccgaug

SEQ ID NO: 1698618 - RNA, 19 nt, Artificial Sequence
  Description of Artificial Sequence: Synthetic oligonucleotide
guuaagacucuccaaucuc

SEQ ID NO: 1698619 - RNA, 19 nt, Artificial Sequence
  Description of Artificial Sequence: Synthetic oligonucleotide
cagguuuacuaaacagucc

SEQ ID NO: 1698620 - RNA, 19 nt, Artificial Sequence
  Description of Artificial Sequence: Synthetic oligonucleotide
ggaaaucugugauggagag

SEQ ID NO: 1698621 - RNA, 19 nt, Artificial Sequence
  Description of Artificial Sequence: Synthetic oligonucleotide
gauauaaggcacugggucu

SEQ ID NO: 1698622 - RNA, 19 nt, Artificial Sequence
  Description of Artificial Sequence: Synthetic oligonucleotide
acauaaugccauucaagaa

SEQ ID NO: 1698623 - RNA, 19 nt, Artificial Sequence
  Description of Artificial Sequence: Synthetic oligonucleotide
uguagauugcgguggcucu

SEQ ID NO: 1698624 - RNA, 19 nt, Artificial Sequence
  Description of Artificial Sequence: Synthetic oligonucleotide
acaaacaaaccagguuuac

SEQ ID NO: 1698625 - RNA, 19 nt, Artificial Sequence
  Description of Artificial Sequence: Synthetic oligonucleotide
ucaucucugggccucggac

SEQ ID NO: 1698626 - RNA, 19 nt, Artificial Sequence
  Description of Artificial Sequence: Synthetic oligonucleotide
aguccgaugucucuaugcu

SEQ ID NO: 1698627 - RNA, 19 nt, Artificial Sequence
  Description of Artificial Sequence: Synthetic oligonucleotide
aggggcuccgcacagauau

SEQ ID NO: 1698628 - RNA, 19 nt, Artificial Sequence
  Description of Artificial Sequence: Synthetic oligonucleotide
uguuacugcucaucucacc

SEQ ID NO: 1698629 - RNA, 19 nt, Artificial Sequence
  Description of Artificial Sequence: Synthetic oligonucleotide
uaauucgaagguaguccug

SEQ ID NO: 1698630 - RNA, 19 nt, Artificial Sequence
  Description of Artificial Sequence: Synthetic oligonucleotide
gugaucaaaucuaauaaaa

SEQ ID NO: 1698631 - RNA, 19 nt, Artificial Sequence
  Description of Artificial Sequence: Synthetic oligonucleotide
augguggagacagaccacg

SEQ ID NO: 1698632 - RNA, 19 nt, Artificial Sequence
  Description of Artificial Sequence: Synthetic oligonucleotide
uucgugaaguccgaugucu

SEQ ID NO: 1698633 - RNA, 19 nt, Artificial Sequence
  Description of Artificial Sequence: Synthetic oligonucleotide
guaggcaaaggcugcaaac

SEQ ID NO: 1698634 - RNA, 19 nt, Artificial Sequence
  Description of Artificial Sequence: Synthetic oligonucleotide
cauaaugccauucaagaau

SEQ ID NO: 1698635 - RNA, 19 nt, Artificial Sequence
  Description of Artificial Sequence: Synthetic oligonucleotide
aaugccauucaagaauauu

SEQ ID NO: 1698636 - RNA, 19 nt, Artificial Sequence
  Description of Artificial Sequence: Synthetic oligonucleotide
uguaggcaaaggcugcaaa

SEQ ID NO: 1698637 - RNA, 19 nt, Artificial Sequence
  Description of Artificial Sequence: Synthetic oligonucleotide
gcuccgcacagauauaagg

SEQ ID NO: 1698638 - RNA, 19 nt, Artificial Sequence
  Description of Artificial Sequence: Synthetic oligonucleotide
cuucauaaggagucaucuc

SEQ ID NO: 1698639 - RNA, 19 nt, Artificial Sequence
  Description of Artificial Sequence: Synthetic oligonucleotide
aaccacgucuggcaaggga

SEQ ID NO: 1698640 - RNA, 19 nt, Artificial Sequence
  Description of Artificial Sequence: Synthetic oligonucleotide
aagaguggggcccguucug

SEQ ID NO: 1698641 - RNA, 19 nt, Artificial Sequence
  Description of Artificial Sequence: Synthetic oligonucleotide
agacaacacaggaguaagc

SEQ ID NO: 1698642 - RNA, 19 nt, Artificial Sequence
  Description of Artificial Sequence: Synthetic oligonucleotide
uggguggaaaucugugaug

SEQ ID NO: 1698643 - RNA, 19 nt, Artificial Sequence
  Description of Artificial Sequence: Synthetic oligonucleotide
uucgccguggucgaggcca

SEQ ID NO: 1698644 - RNA, 19 nt, Artificial Sequence
  Description of Artificial Sequence: Synthetic oligonucleotide
agcgccuucgcugcuaccg

SEQ ID NO: 1698645 - RNA, 19 nt, Artificial Sequence
  Description of Artificial Sequence: Synthetic oligonucleotide
caugaugccuguuggccug

SEQ ID NO: 1698646 - RNA, 19 nt, Artificial Sequence
  Description of Artificial Sequence: Synthetic oligonucleotide
ugauaauagccaccuucau

SEQ ID NO: 1698647 - RNA, 19 nt, Artificial Sequence
  Description of Artificial Sequence: Synthetic oligonucleotide
ccagguuuacuaaacaguc

SEQ ID NO: 1698648 - RNA, 19 nt, Artificial Sequence
  Description of Artificial Sequence: Synthetic oligonucleotide
gcuguuacugcucaucuca

SEQ ID NO: 1698649 - RNA, 19 nt, Artificial Sequence
  Description of Artificial Sequence: Synthetic oligonucleotide
cccaacuauaacaaacaag

SEQ ID NO: 1698650 - RNA, 19 nt, Artificial Sequence
  Description of Artificial Sequence: Synthetic oligonucleotide
aggugcaugcccauugagg

SEQ ID NO: 1698651 - RNA, 19 nt, Artificial Sequence
  Description of Artificial Sequence: Synthetic oligonucleotide
guuacugcucaucucaccu

SEQ ID NO: 1698652 - RNA, 19 nt, Artificial Sequence
  Description of Artificial Sequence: Synthetic oligonucleotide
agcccaccgagguucgggc

SEQ ID NO: 1698653 - RNA, 19 nt, Artificial Sequence
  Description of Artificial Sequence: Synthetic oligonucleotide
aacaaacaaguucgccaaa

SEQ ID NO: 1698654 - RNA, 19 nt, Artificial Sequence
  Description of Artificial Sequence: Synthetic oligonucleotide
cuguuagaaugguggagac

SEQ ID NO: 1698655 - RNA, 19 nt, Artificial Sequence
  Description of Artificial Sequence: Synthetic oligonucleotide
cuacuuaguucaucuugug

SEQ ID NO: 1698656 - RNA, 19 nt, Artificial Sequence
  Description of Artificial Sequence: Synthetic oligonucleotide
uguuagaaugguggagaca

SEQ ID NO: 1698657 - RNA, 19 nt, Artificial Sequence
  Description of Artificial Sequence: Synthetic oligonucleotide
aguucgccaaagcgccgcc

SEQ ID NO: 1698658 - RNA, 19 nt, Artificial Sequence
  Description of Artificial Sequence: Synthetic oligonucleotide
ccuuguguugcacuuaaac

SEQ ID NO: 1698659 - RNA, 19 nt, Artificial Sequence
  Description of Artificial Sequence: Synthetic oligonucleotide
gauugcgguggcucuugag

SEQ ID NO: 1698660 - RNA, 19 nt, Artificial Sequence
  Description of Artificial Sequence: Synthetic oligonucleotide
guuuacuaaacaguccaaa

SEQ ID NO: 1698661 - RNA, 19 nt, Artificial Sequence
  Description of Artificial Sequence: Synthetic oligonucleotide
uuucgugaaguccgauguc

SEQ ID NO: 1698662 - RNA, 19 nt, Artificial Sequence
  Description of Artificial Sequence: Synthetic oligonucleotide
ugaaguccgaugucucuau

SEQ ID NO: 1698663 - RNA, 19 nt, Artificial Sequence
  Description of Artificial Sequence: Synthetic oligonucleotide
cacagauauaaggcacugg

SEQ ID NO: 1698664 - RNA, 19 nt, Artificial Sequence
  Description of Artificial Sequence: Synthetic oligonucleotide
gacagaccacgcuggauuc

SEQ ID NO: 1698665 - RNA, 19 nt, Artificial Sequence
  Description of Artificial Sequence: Synthetic oligonucleotide
uucaaccucuguguugcug

SEQ ID NO: 1698666 - RNA, 19 nt, Artificial Sequence
  Description of Artificial Sequence: Synthetic oligonucleotide
ugucucuaugcugcccagg

SEQ ID NO: 1698667 - RNA, 19 nt, Artificial Sequence
  Description of Artificial Sequence: Synthetic oligonucleotide
aaguccauccugccugcau

SEQ ID NO: 1698668 - RNA, 19 nt, Artificial Sequence
  Description of Artificial Sequence: Synthetic oligonucleotide
cugugcuaugcuucucagc

SEQ ID NO: 1698669 - RNA, 19 nt, Artificial Sequence
  Description of Artificial Sequence: Synthetic oligonucleotide
ugguggagacagaccacgc

SEQ ID NO: 1698670 - RNA, 19 nt, Artificial Sequence
  Description of Artificial Sequence: Synthetic oligonucleotide
ggaaccacgucuggcaagg

SEQ ID NO: 1698671 - RNA, 19 nt, Artificial Sequence
  Description of Artificial Sequence: Synthetic oligonucleotide
cugcucaucucaccucucc

SEQ ID NO: 1698672 - RNA, 19 nt, Artificial Sequence
  Description of Artificial Sequence: Synthetic oligonucleotide
ucagguucgccguggucga

SEQ ID NO: 1698673 - RNA, 19 nt, Artificial Sequence
  Description of Artificial Sequence: Synthetic oligonucleotide
acagaccacgcuggauucc

SEQ ID NO: 1698674 - RNA, 19 nt, Artificial Sequence
  Description of Artificial Sequence: Synthetic oligonucleotide
gccucggacaacauaaugc

SEQ ID NO: 1698675 - RNA, 19 nt, Artificial Sequence
  Description of Artificial Sequence: Synthetic oligonucleotide
cacuaaacucugugcugcc

SEQ ID NO: 1698676 - RNA, 19 nt, Artificial Sequence
  Description of Artificial Sequence: Synthetic oligonucleotide
agugaagcccaggagucca

SEQ ID NO: 1698677 - RNA, 19 nt, Artificial Sequence
  Description of Artificial Sequence: Synthetic oligonucleotide
aaauacuaggaggcuuaaa

SEQ ID NO: 1698678 - RNA, 19 nt, Artificial Sequence
  Description of Artificial Sequence: Synthetic oligonucleotide
gaaguccgaugucucuaug

SEQ ID NO: 1698679 - RNA, 19 nt, Artificial Sequence
  Description of Artificial Sequence: Synthetic oligonucleotide
cagcaacuguagauugcgg

SEQ ID NO: 1698680 - RNA, 19 nt, Artificial Sequence
  Description of Artificial Sequence: Synthetic oligonucleotide
gcuaccgccgcucagcuuc

SEQ ID NO: 1698681 - RNA, 19 nt, Artificial Sequence
  Description of Artificial Sequence: Synthetic oligonucleotide
ugagccgcacccgcgcugg

SEQ ID NO: 1698682 - RNA, 19 nt, Artificial Sequence
  Description of Artificial Sequence: Synthetic oligonucleotide
acagccuuguguugcacuu

SEQ ID NO: 1698683 - RNA, 19 nt, Artificial Sequence
  Description of Artificial Sequence: Synthetic oligonucleotide
cuguagauugcgguggcuc

SEQ ID NO: 1698684 - RNA, 19 nt, Artificial Sequence
  Description of Artificial Sequence: Synthetic oligonucleotide
gaccacgcuggauuccaug

SEQ ID NO: 1698685 - RNA, 19 nt, Artificial Sequence
  Description of Artificial Sequence: Synthetic oligonucleotide
uaaauacuaggaggcuuaa

SEQ ID NO: 1698686 - RNA, 19 nt, Artificial Sequence
  Description of Artificial Sequence: Synthetic oligonucleotide
caaguucgccaaagcgccg

SEQ ID NO: 1698687 - RNA, 19 nt, Artificial Sequence
  Description of Artificial Sequence: Synthetic oligonucleotide
aaagcgugaguggcccuug

SEQ ID NO: 1698688 - RNA, 19 nt, Artificial Sequence
  Description of Artificial Sequence: Synthetic oligonucleotide
ugccagcugucuuuucgug

SEQ ID NO: 1698689 - RNA, 19 nt, Artificial Sequence
  Description of Artificial Sequence: Synthetic oligonucleotide
ggaguuaagacucuccaau

SEQ ID NO: 1698690 - RNA, 19 nt, Artificial Sequence
  Description of Artificial Sequence: Synthetic oligonucleotide
augugucuggguggaaauc

SEQ ID NO: 1698691 - RNA, 19 nt, Artificial Sequence
  Description of Artificial Sequence: Synthetic oligonucleotide
agcgugaguggcccuuguc

SEQ ID NO: 1698692 - RNA, 19 nt, Artificial Sequence
  Description of Artificial Sequence: Synthetic oligonucleotide
uagauugcgguggcucuug

SEQ ID NO: 1698693 - RNA, 19 nt, Artificial Sequence
  Description of Artificial Sequence: Synthetic oligonucleotide
auauaaggcacugggucuu

SEQ ID NO: 1698694 - RNA, 19 nt, Artificial Sequence
  Description of Artificial Sequence: Synthetic oligonucleotide
acuuagcccaccgcacccg

SEQ ID NO: 1698695 - RNA, 19 nt, Artificial Sequence
  Description of Artificial Sequence: Synthetic oligonucleotide
aggcuuaaauggaaauucu

SEQ ID NO: 1698696 - RNA, 19 nt, Artificial Sequence
  Description of Artificial Sequence: Synthetic oligonucleotide
uuaguucaucuugugcuuu

SEQ ID NO: 1698697 - RNA, 19 nt, Artificial Sequence
  Description of Artificial Sequence: Synthetic oligonucleotide
gugcaugcccauugaggag

SEQ ID NO: 1698698 - RNA, 19 nt, Artificial Sequence
  Description of Artificial Sequence: Synthetic oligonucleotide
augucucuaugcugcccag

SEQ ID NO: 1698699 - RNA, 19 nt, Artificial Sequence
  Description of Artificial Sequence: Synthetic oligonucleotide
agccuuguguugcacuuaa

SEQ ID NO: 1698700 - RNA, 19 nt, Artificial Sequence
  Description of Artificial Sequence: Synthetic oligonucleotide
gcgugaguggcccuugucc

SEQ ID NO: 1698701 - RNA, 19 nt, Artificial Sequence
  Description of Artificial Sequence: Synthetic oligonucleotide
ugcggaagaguggggcccg

SEQ ID NO: 1698702 - RNA, 19 nt, Artificial Sequence
  Description of Artificial Sequence: Synthetic oligonucleotide
ugcuuagcagcaaguccau

SEQ ID NO: 1698703 - RNA, 19 nt, Artificial Sequence
  Description of Artificial Sequence: Synthetic oligonucleotide
gagcccaccgagguucggg

SEQ ID NO: 1698704 - RNA, 19 nt, Artificial Sequence
  Description of Artificial Sequence: Synthetic oligonucleotide
gaagguaguccuguuucaa

SEQ ID NO: 1698705 - RNA, 19 nt, Artificial Sequence
  Description of Artificial Sequence: Synthetic oligonucleotide
gaagaguggggcccguucu

SEQ ID NO: 1698706 - RNA, 19 nt, Artificial Sequence
  Description of Artificial Sequence: Synthetic oligonucleotide
aguguaggcaaaggcugca

SEQ ID NO: 1698707 - RNA, 19 nt, Artificial Sequence
  Description of Artificial Sequence: Synthetic oligonucleotide
cugugcuuagcagcaaguc

SEQ ID NO: 1698708 - RNA, 19 nt, Artificial Sequence
  Description of Artificial Sequence: Synthetic oligonucleotide
aggcugcaaacccaacuau

SEQ ID NO: 1698709 - RNA, 19 nt, Artificial Sequence
  Description of Artificial Sequence: Synthetic oligonucleotide
ggacuuagcccaccgcacc

SEQ ID NO: 1698710 - RNA, 19 nt, Artificial Sequence
  Description of Artificial Sequence: Synthetic oligonucleotide
aagcccuguuagaauggug

SEQ ID NO: 1698711 - RNA, 19 nt, Artificial Sequence
  Description of Artificial Sequence: Synthetic oligonucleotide
cacgucuggcaagggaagg

SEQ ID NO: 1698712 - RNA, 19 nt, Artificial Sequence
  Description of Artificial Sequence: Synthetic oligonucleotide
ugugagccgcacccgcgcu

SEQ ID NO: 1698713 - RNA, 19 nt, Artificial Sequence
  Description of Artificial Sequence: Synthetic oligonucleotide
cucggacaacauaaugcca

SEQ ID NO: 1698714 - RNA, 19 nt, Artificial Sequence
  Description of Artificial Sequence: Synthetic oligonucleotide
gcucucuuauugcuguuac

SEQ ID NO: 1698715 - RNA, 19 nt, Artificial Sequence
  Description of Artificial Sequence: Synthetic oligonucleotide
ucgccaaagcgccgcccag

SEQ ID NO: 1698716 - RNA, 19 nt, Artificial Sequence
  Description of Artificial Sequence: Synthetic oligonucleotide
caaaggcugcaaacccaac

SEQ ID NO: 1698717 - RNA, 19 nt, Artificial Sequence
  Description of Artificial Sequence: Synthetic oligonucleotide
gguucgggccggcagcagg

SEQ ID NO: 1698718 - RNA, 19 nt, Artificial Sequence
  Description of Artificial Sequence: Synthetic oligonucleotide
ggugcggaagaguggggcc

SEQ ID NO: 1698719 - RNA, 19 nt, Artificial Sequence
  Description of Artificial Sequence: Synthetic oligonucleotide
gcugggacuuagcccaccg

SEQ ID NO: 1698720 - RNA, 19 nt, Artificial Sequence
  Description of Artificial Sequence: Synthetic oligonucleotide
aagcgugaguggcccuugu

SEQ ID NO: 1698721 - RNA, 19 nt, Artificial Sequence
  Description of Artificial Sequence: Synthetic oligonucleotide
aggccauccugugcuuagc

SEQ ID NO: 1698722 - RNA, 19 nt, Artificial Sequence
  Description of Artificial Sequence: Synthetic oligonucleotide
cugggacuuagcccaccgc

SEQ ID NO: 1698723 - RNA, 19 nt, Artificial Sequence
  Description of Artificial Sequence: Synthetic oligonucleotide
uggggccugcuacuuaguu

SEQ ID NO: 1698724 - RNA, 19 nt, Artificial Sequence
  Description of Artificial Sequence: Synthetic oligonucleotide
ccgcacagauauaaggcac

SEQ ID NO: 1698725 - RNA, 19 nt, Artificial Sequence
  Description of Artificial Sequence: Synthetic oligonucleotide
ucuuuucgugaaguccgau

SEQ ID NO: 1698726 - RNA, 19 nt, Artificial Sequence
  Description of Artificial Sequence: Synthetic oligonucleotide
gugcuaugcuucucagcac

SEQ ID NO: 1698727 - RNA, 19 nt, Artificial Sequence
  Description of Artificial Sequence: Synthetic oligonucleotide
acgcuggauuccauguguc

SEQ ID NO: 1698728 - RNA, 19 nt, Artificial Sequence
  Description of Artificial Sequence: Synthetic oligonucleotide
cagauauaaggcacugggu

SEQ ID NO: 1698729 - RNA, 19 nt, Artificial Sequence
  Description of Artificial Sequence: Synthetic oligonucleotide
ggccucggacaacauaaug

SEQ ID NO: 1698730 - RNA, 19 nt, Artificial Sequence
  Description of Artificial Sequence: Synthetic oligonucleotide
acgucuggcaagggaaggu

SEQ ID NO: 1698731 - RNA, 19 nt, Artificial Sequence
  Description of Artificial Sequence: Synthetic oligonucleotide
agccucaagaggaguuaag

SEQ ID NO: 1698732 - RNA, 19 nt, Artificial Sequence
  Description of Artificial Sequence: Synthetic oligonucleotide
uggccacggugcaucuccc

SEQ ID NO: 1698733 - RNA, 19 nt, Artificial Sequence
  Description of Artificial Sequence: Synthetic oligonucleotide
gccggcagcaggugcaugc

SEQ ID NO: 1698734 - RNA, 19 nt, Artificial Sequence
  Description of Artificial Sequence: Synthetic oligonucleotide
ggaagaguggggcccguuc

SEQ ID NO: 1698735 - RNA, 19 nt, Artificial Sequence
  Description of Artificial Sequence: Synthetic oligonucleotide
gaaccacgucuggcaaggg

SEQ ID NO: 1698736 - RNA, 19 nt, Artificial Sequence
  Description of Artificial Sequence: Synthetic oligonucleotide
cuggguggaaaucugugau

SEQ ID NO: 1698737 - RNA, 19 nt, Artificial Sequence
  Description of Artificial Sequence: Synthetic oligonucleotide
agauugcgguggcucuuga

SEQ ID NO: 1698738 - RNA, 19 nt, Artificial Sequence
  Description of Artificial Sequence: Synthetic oligonucleotide
guggucgaggccagagcag

SEQ ID NO: 1698739 - RNA, 19 nt, Artificial Sequence
  Description of Artificial Sequence: Synthetic oligonucleotide
ucccugaggccgccgccgc

SEQ ID NO: 1698740 - RNA, 19 nt, Artificial Sequence
  Description of Artificial Sequence: Synthetic oligonucleotide
gguaguccuguuucaaccu

SEQ ID NO: 1698741 - RNA, 19 nt, Artificial Sequence
  Description of Artificial Sequence: Synthetic oligonucleotide
ccugcuacuuaguucaucu

SEQ ID NO: 1698742 - RNA, 19 nt, Artificial Sequence
  Description of Artificial Sequence: Synthetic oligonucleotide
acuguagauugcgguggcu

SEQ ID NO: 1698743 - RNA, 19 nt, Artificial Sequence
  Description of Artificial Sequence: Synthetic oligonucleotide
gguucgccguggucgaggc

SEQ ID NO: 1698744 - RNA, 19 nt, Artificial Sequence
  Description of Artificial Sequence: Synthetic oligonucleotide
acggugcaucuccccauca

SEQ ID NO: 1698745 - RNA, 19 nt, Artificial Sequence
  Description of Artificial Sequence: Synthetic oligonucleotide
gccucaagaggaguuaaga

SEQ ID NO: 1698746 - RNA, 19 nt, Artificial Sequence
  Description of Artificial Sequence: Synthetic oligonucleotide
agccucacuccugugcuau

SEQ ID NO: 1698747 - RNA, 19 nt, Artificial Sequence
  Description of Artificial Sequence: Synthetic oligonucleotide
aagcgccgcccaggagucc

SEQ ID NO: 1698748 - RNA, 19 nt, Artificial Sequence
  Description of Artificial Sequence: Synthetic oligonucleotide
ucgccguggucgaggccag

SEQ ID NO: 1698749 - RNA, 19 nt, Artificial Sequence
  Description of Artificial Sequence: Synthetic oligonucleotide
uauaaggcacugggucuuu

SEQ ID NO: 1698750 - RNA, 19 nt, Artificial Sequence
  Description of Artificial Sequence: Synthetic oligonucleotide
caacuauaacaaacaaguu

SEQ ID NO: 1698751 - RNA, 19 nt, Artificial Sequence
  Description of Artificial Sequence: Synthetic oligonucleotide
cacggugcaucuccccauc

SEQ ID NO: 1698752 - RNA, 19 nt, Artificial Sequence
  Description of Artificial Sequence: Synthetic oligonucleotide
cuaccgccgcucagcuucc

SEQ ID NO: 1698753 - RNA, 19 nt, Artificial Sequence
  Description of Artificial Sequence: Synthetic oligonucleotide
cacgcuggauuccaugugu

SEQ ID NO: 1698754 - RNA, 19 nt, Artificial Sequence
  Description of Artificial Sequence: Synthetic oligonucleotide
gugagccgcacccgcgcug

SEQ ID NO: 1698755 - RNA, 19 nt, Artificial Sequence
  Description of Artificial Sequence: Synthetic oligonucleotide
uuggccugugggagcccac

SEQ ID NO: 1698756 - RNA, 19 nt, Artificial Sequence
  Description of Artificial Sequence: Synthetic oligonucleotide
gaagcccuguuagaauggu

SEQ ID NO: 1698757 - RNA, 19 nt, Artificial Sequence
  Description of Artificial Sequence: Synthetic oligonucleotide
cccuguuagaaugguggag

SEQ ID NO: 1698758 - RNA, 19 nt, Artificial Sequence
  Description of Artificial Sequence: Synthetic oligonucleotide
cagaccacgcuggauucca

SEQ ID NO: 1698759 - RNA, 19 nt, Artificial Sequence
  Description of Artificial Sequence: Synthetic oligonucleotide
ccucacuccugugcuaugc

SEQ ID NO: 1698760 - RNA, 19 nt, Artificial Sequence
  Description of Artificial Sequence: Synthetic oligonucleotide
ggcccguucugugagccgc

SEQ ID NO: 1698761 - RNA, 19 nt, Artificial Sequence
  Description of Artificial Sequence: Synthetic oligonucleotide
gucuuuucgugaaguccga

SEQ ID NO: 1698762 - RNA, 19 nt, Artificial Sequence
  Description of Artificial Sequence: Synthetic oligonucleotide
gguuuacuaaacaguccaa

SEQ ID NO: 1698763 - RNA, 19 nt, Artificial Sequence
  Description of Artificial Sequence: Synthetic oligonucleotide
guucgccaaagcgccgccc

SEQ ID NO: 1698764 - RNA, 19 nt, Artificial Sequence
  Description of Artificial Sequence: Synthetic oligonucleotide
gggacuuagcccaccgcac

SEQ ID NO: 1698765 - RNA, 19 nt, Artificial Sequence
  Description of Artificial Sequence: Synthetic oligonucleotide
ccuucauaaggagucaucu

SEQ ID NO: 1698766 - RNA, 19 nt, Artificial Sequence
  Description of Artificial Sequence: Synthetic oligonucleotide
gaagcucagaagcccuguu

SEQ ID NO: 1698767 - RNA, 19 nt, Artificial Sequence
  Description of Artificial Sequence: Synthetic oligonucleotide
gguggagacagaccacgcu

SEQ ID NO: 1698768 - RNA, 19 nt, Artificial Sequence
  Description of Artificial Sequence: Synthetic oligonucleotide
gcccuguuagaauggugga

SEQ ID NO: 1698769 - RNA, 19 nt, Artificial Sequence
  Description of Artificial Sequence: Synthetic oligonucleotide
ggguuaucauguaaauacu

SEQ ID NO: 1698770 - RNA, 19 nt, Artificial Sequence
  Description of Artificial Sequence: Synthetic oligonucleotide
gcucuugagccucacuccu

SEQ ID NO: 1698771 - RNA, 19 nt, Artificial Sequence
  Description of Artificial Sequence: Synthetic oligonucleotide
uguuggccugugggagccc

SEQ ID NO: 1698772 - RNA, 19 nt, Artificial Sequence
  Description of Artificial Sequence: Synthetic oligonucleotide
cguggucgaggccagagca

SEQ ID NO: 1698773 - RNA, 19 nt, Artificial Sequence
  Description of Artificial Sequence: Synthetic oligonucleotide
guucgccguggucgaggcc

SEQ ID NO: 1698774 - RNA, 19 nt, Artificial Sequence
  Description of Artificial Sequence: Synthetic oligonucleotide
ggcuccgcacagauauaag

SEQ ID NO: 1698775 - RNA, 19 nt, Artificial Sequence
  Description of Artificial Sequence: Synthetic oligonucleotide
ccgcucagcuuccaagaug

SEQ ID NO: 1698776 - RNA, 19 nt, Artificial Sequence
  Description of Artificial Sequence: Synthetic oligonucleotide
ccgcgcugggacuuagccc

SEQ ID NO: 1698777 - RNA, 19 nt, Artificial Sequence
  Description of Artificial Sequence: Synthetic oligonucleotide
ccgagguucgggccggcag

SEQ ID NO: 1698778 - RNA, 19 nt, Artificial Sequence
  Description of Artificial Sequence: Synthetic oligonucleotide
guguaggcaaaggcugcaa

SEQ ID NO: 1698779 - RNA, 19 nt, Artificial Sequence
  Description of Artificial Sequence: Synthetic oligonucleotide
cgagguucgggccggcagc

SEQ ID NO: 1698780 - RNA, 19 nt, Artificial Sequence
  Description of Artificial Sequence: Synthetic oligonucleotide
ggggcccguucugugagcc

SEQ ID NO: 1698781 - RNA, 19 nt, Artificial Sequence
  Description of Artificial Sequence: Synthetic oligonucleotide
ggcugcaaacccaacuaua

SEQ ID NO: 1698782 - RNA, 19 nt, Artificial Sequence
  Description of Artificial Sequence: Synthetic oligonucleotide
acccgcgcugggacuuagc

SEQ ID NO: 1698783 - RNA, 19 nt, Artificial Sequence
  Description of Artificial Sequence: Synthetic oligonucleotide
cucacuccugugcuaugcu

SEQ ID NO: 1698784 - RNA, 19 nt, Artificial Sequence
  Description of Artificial Sequence: Synthetic oligonucleotide
cagccucaagaggaguuaa

SEQ ID NO: 1698785 - RNA, 19 nt, Artificial Sequence
  Description of Artificial Sequence: Synthetic oligonucleotide
gggcccguucugugagccg

SEQ ID NO: 1698786 - RNA, 19 nt, Artificial Sequence
  Description of Artificial Sequence: Synthetic oligonucleotide
cugggccucggacaacaua

SEQ ID NO: 1698787 - RNA, 19 nt, Artificial Sequence
  Description of Artificial Sequence: Synthetic oligonucleotide
ccuucgcugcuaccgccgc

SEQ ID NO: 1698788 - RNA, 19 nt, Artificial Sequence
  Description of Artificial Sequence: Synthetic oligonucleotide
gggcuccgcacagauauaa

SEQ ID NO: 1698789 - RNA, 19 nt, Artificial Sequence
  Description of Artificial Sequence: Synthetic oligonucleotide
gcgccuucgcugcuaccgc

SEQ ID NO: 1698790 - RNA, 19 nt, Artificial Sequence
  Description of Artificial Sequence: Synthetic oligonucleotide
ugcuaccgccgcucagcuu

SEQ ID NO: 1698791 - RNA, 19 nt, Artificial Sequence
  Description of Artificial Sequence: Synthetic oligonucleotide
acccgccgcagcgccuucg

SEQ ID NO: 1698792 - RNA, 19 nt, Artificial Sequence
  Description of Artificial Sequence: Synthetic oligonucleotide
gccgccgcgcucagguucg

SEQ ID NO: 1698793 - RNA, 19 nt, Artificial Sequence
  Description of Artificial Sequence: Synthetic oligonucleotide
ccuccacaacuucaggaaa

SEQ ID NO: 1698794 - RNA, 19 nt, Artificial Sequence
  Description of Artificial Sequence: Synthetic oligonucleotide
cgaagguaguccuguuuca

SEQ ID NO: 1698795 - RNA, 19 nt, Artificial Sequence
  Description of Artificial Sequence: Synthetic oligonucleotide
agguucgggccggcagcag

SEQ ID NO: 1698796 - RNA, 19 nt, Artificial Sequence
  Description of Artificial Sequence: Synthetic oligonucleotide
ccguucugugagccgcacc

SEQ ID NO: 1698797 - RNA, 19 nt, Artificial Sequence
  Description of Artificial Sequence: Synthetic oligonucleotide
cggugcaucuccccaucag

SEQ ID NO: 1698798 - RNA, 19 nt, Artificial Sequence
  Description of Artificial Sequence: Synthetic oligonucleotide
ccaugaugccuguuggccu

SEQ ID NO: 1698799 - RNA, 19 nt, Artificial Sequence
  Description of Artificial Sequence: Synthetic oligonucleotide
ccugaggccgccgccgcgc

SEQ ID NO: 1698800 - RNA, 19 nt, Artificial Sequence
  Description of Artificial Sequence: Synthetic oligonucleotide
guucgggccggcagcaggu

SEQ ID NO: 1698801 - RNA, 19 nt, Artificial Sequence
  Description of Artificial Sequence: Synthetic oligonucleotide
guagauugcgguggcucuu

SEQ ID NO: 1698802 - RNA, 19 nt, Artificial Sequence
  Description of Artificial Sequence: Synthetic oligonucleotide
cagguucgccguggucgag

SEQ ID NO: 1698803 - RNA, 19 nt, Artificial Sequence
  Description of Artificial Sequence: Synthetic oligonucleotide
accgagguucgggccggca

SEQ ID NO: 1698804 - RNA, 19 nt, Artificial Sequence
  Description of Artificial Sequence: Synthetic oligonucleotide
cgaugucucuaugcugccc

SEQ ID NO: 1698805 - RNA, 19 nt, Artificial Sequence
  Description of Artificial Sequence: Synthetic oligonucleotide
agccgcacccgcgcuggga

SEQ ID NO: 1698806 - RNA, 19 nt, Artificial Sequence
  Description of Artificial Sequence: Synthetic oligonucleotide
cgccgcagcgccuucgcug

SEQ ID NO: 1698807 - RNA, 19 nt, Artificial Sequence
  Description of Artificial Sequence: Synthetic oligonucleotide
gcucagguucgccgugguc

SEQ ID NO: 1698808 - RNA, 19 nt, Artificial Sequence
  Description of Artificial Sequence: Synthetic oligonucleotide
cugcuacuuaguucaucuu

SEQ ID NO: 1698809 - RNA, 19 nt, Artificial Sequence
  Description of Artificial Sequence: Synthetic oligonucleotide
caaguccauccugccugca

SEQ ID NO: 1698810 - RNA, 19 nt, Artificial Sequence
  Description of Artificial Sequence: Synthetic oligonucleotide
gcuuagcagcaaguccauc

SEQ ID NO: 1698811 - RNA, 19 nt, Artificial Sequence
  Description of Artificial Sequence: Synthetic oligonucleotide
cugcuaccgccgcucagcu

SEQ ID NO: 1698812 - RNA, 19 nt, Artificial Sequence
  Description of Artificial Sequence: Synthetic oligonucleotide
caaagcgugaguggcccuu

SEQ ID NO: 1698813 - RNA, 19 nt, Artificial Sequence
  Description of Artificial Sequence: Synthetic oligonucleotide
cacccgcgcugggacuuag

SEQ ID NO: 1698814 - RNA, 19 nt, Artificial Sequence
  Description of Artificial Sequence: Synthetic oligonucleotide
gcgguggcucuugagccuc

SEQ ID NO: 1698815 - RNA, 19 nt, Artificial Sequence
  Description of Artificial Sequence: Synthetic oligonucleotide
uaccgccgcucagcuucca

SEQ ID NO: 1698816 - RNA, 19 nt, Artificial Sequence
  Description of Artificial Sequence: Synthetic oligonucleotide
gcucuggcccaugucccuc

SEQ ID NO: 1698817 - RNA, 19 nt, Artificial Sequence
  Description of Artificial Sequence: Synthetic oligonucleotide
cuucgcugcuaccgccgcu

SEQ ID NO: 1698818 - RNA, 19 nt, Artificial Sequence
  Description of Artificial Sequence: Synthetic oligonucleotide
gcuaugcuucucagcacau

SEQ ID NO: 1698819 - RNA, 19 nt, Artificial Sequence
  Description of Artificial Sequence: Synthetic oligonucleotide
cccguucugugagccgcac

SEQ ID NO: 1698820 - RNA, 19 nt, Artificial Sequence
  Description of Artificial Sequence: Synthetic oligonucleotide
cgcgcucagguucgccgug

SEQ ID NO: 1698821 - RNA, 19 nt, Artificial Sequence
  Description of Artificial Sequence: Synthetic oligonucleotide
cacccgccgcagcgccuuc

SEQ ID NO: 1698822 - RNA, 19 nt, Artificial Sequence
  Description of Artificial Sequence: Synthetic oligonucleotide
ccacggugcaucuccccau

SEQ ID NO: 1698823 - RNA, 19 nt, Artificial Sequence
  Description of Artificial Sequence: Synthetic oligonucleotide
ccaaagcgugaguggcccu

SEQ ID NO: 1698824 - RNA, 19 nt, Artificial Sequence
  Description of Artificial Sequence: Synthetic oligonucleotide
cggacaacauaaugccauu

SEQ ID NO: 1698825 - RNA, 19 nt, Artificial Sequence
  Description of Artificial Sequence: Synthetic oligonucleotide
gggccucggacaacauaau

SEQ ID NO: 1698826 - RNA, 19 nt, Artificial Sequence
  Description of Artificial Sequence: Synthetic oligonucleotide
ggggcuccgcacagauaua

SEQ ID NO: 1698827 - RNA, 19 nt, Artificial Sequence
  Description of Artificial Sequence: Synthetic oligonucleotide
ccgcgcucagguucgccgu

SEQ ID NO: 1698828 - RNA, 19 nt, Artificial Sequence
  Description of Artificial Sequence: Synthetic oligonucleotide
ccgcccaggaguccaugau

SEQ ID NO: 1698829 - RNA, 19 nt, Artificial Sequence
  Description of Artificial Sequence: Synthetic oligonucleotide
cgccgcgcucagguucgcc

SEQ ID NO: 1698830 - RNA, 19 nt, Artificial Sequence
  Description of Artificial Sequence: Synthetic oligonucleotide
ggccugcuacuuaguucau

SEQ ID NO: 1698831 - RNA, 19 nt, Artificial Sequence
  Description of Artificial Sequence: Synthetic oligonucleotide
gcacccgccgcagcgccuu

SEQ ID NO: 1698832 - RNA, 19 nt, Artificial Sequence
  Description of Artificial Sequence: Synthetic oligonucleotide
gcggaagaguggggcccgu

SEQ ID NO: 1698833 - RNA, 19 nt, Artificial Sequence
  Description of Artificial Sequence: Synthetic oligonucleotide
gcacccgcgcugggacuua

SEQ ID NO: 1698834 - RNA, 19 nt, Artificial Sequence
  Description of Artificial Sequence: Synthetic oligonucleotide
ccgccgcgcucagguucgc

SEQ ID NO: 1698835 - RNA, 19 nt, Artificial Sequence
  Description of Artificial Sequence: Synthetic oligonucleotide
ccgcacccgcgcugggacu

SEQ ID NO: 1698836 - RNA, 19 nt, Artificial Sequence
  Description of Artificial Sequence: Synthetic oligonucleotide
cgcacccgcgcugggacuu

SEQ ID NO: 1698837 - RNA, 19 nt, Artificial Sequence
  Description of Artificial Sequence: Synthetic oligonucleotide
cggaagaguggggcccguu

SEQ ID NO: 1698838 - RNA, 19 nt, Artificial Sequence
  Description of Artificial Sequence: Synthetic oligonucleotide
  modified_base (6)..(6): a, c, u, g, unknown or other
aauuunuuuguucccaugc

SEQ ID NO: 1698839 - RNA, 19 nt, Artificial Sequence
  Description of Artificial Sequence: Synthetic oligonucleotide
aaagcuaugcucuacuguc

SEQ ID NO: 1698840 - RNA, 19 nt, Artificial Sequence
  Description of Artificial Sequence: Synthetic oligonucleotide
  modified_base (3)..(3): a, c, u, g, unknown or other
uunuuuguucccaugcucg

SEQ ID NO: 1698841 - RNA, 19 nt, Artificial Sequence
  Description of Artificial Sequence: Synthetic oligonucleotide
uucugaacaaaccagacga

SEQ ID NO: 1698842 - RNA, 19 nt, Artificial Sequence
  Description of Artificial Sequence: Synthetic oligonucleotide
ucgaauggcaucaucaggg

SEQ ID NO: 1698843 - RNA, 19 nt, Artificial Sequence
  Description of Artificial Sequence: Synthetic oligonucleotide
uuaugagcaggcuuuaugg

SEQ ID NO: 1698844 - RNA, 19 nt, Artificial Sequence
  Description of Artificial Sequence: Synthetic oligonucleotide
aauaucuagaaguuccucu

SEQ ID NO: 1698845 - RNA, 19 nt, Artificial Sequence
  Description of Artificial Sequence: Synthetic oligonucleotide
cauagaaaugauaggaccg

SEQ ID NO: 1698846 - RNA, 19 nt, Artificial Sequence
  Description of Artificial Sequence: Synthetic oligonucleotide
aaaccagacgaccuuugcc

SEQ ID NO: 1698847 - RNA, 19 nt, Artificial Sequence
  Description of Artificial Sequence: Synthetic oligonucleotide
aagagauuuccauagaaau

SEQ ID NO: 1698848 - RNA, 19 nt, Artificial Sequence
  Description of Artificial Sequence: Synthetic oligonucleotide
auacaugucgcaaugaugg

SEQ ID NO: 1698849 - RNA, 19 nt, Artificial Sequence
  Description of Artificial Sequence: Synthetic oligonucleotide
agcacugccauacaugucg

SEQ ID NO: 1698850 - RNA, 19 nt, Artificial Sequence
  Description of Artificial Sequence: Synthetic oligonucleotide
aagugcuccggcuuggagc

SEQ ID NO: 1698851 - RNA, 19 nt, Artificial Sequence
  Description of Artificial Sequence: Synthetic oligonucleotide
aacaucauauuggccaucc

SEQ ID NO: 1698852 - RNA, 19 nt, Artificial Sequence
  Description of Artificial Sequence: Synthetic oligonucleotide
uauucuucuacucucugga

SEQ ID NO: 1698853 - RNA, 19 nt, Artificial Sequence
  Description of Artificial Sequence: Synthetic oligonucleotide
ugauuuugcgcacaguaug

SEQ ID NO: 1698854 - RNA, 19 nt, Artificial Sequence
  Description of Artificial Sequence: Synthetic oligonucleotide
  modified_base (10)..(10): a, c, u, g, unknown or other
cuuuaauuunuuuguuccc

SEQ ID NO: 1698855 - RNA, 19 nt, Artificial Sequence
  Description of Artificial Sequence: Synthetic oligonucleotide
aguauggacaaagcuaugc

SEQ ID NO: 1698856 - RNA, 19 nt, Artificial Sequence
  Description of Artificial Sequence: Synthetic oligonucleotide
aaucgaauggcaucaucag

SEQ ID NO: 1698857 - RNA, 19 nt, Artificial Sequence
  Description of Artificial Sequence: Synthetic oligonucleotide
  modified_base (9)..(9): a, c, u, g, unknown or other
uuuaauuunuuuguuccca

SEQ ID NO: 1698858 - RNA, 19 nt, Artificial Sequence
  Description of Artificial Sequence: Synthetic oligonucleotide
uucacguccuuucugaaca

SEQ ID NO: 1698859 - RNA, 19 nt, Artificial Sequence
  Description of Artificial Sequence: Synthetic oligonucleotide
ugcaagaacuccuuguacc

SEQ ID NO: 1698860 - RNA, 19 nt, Artificial Sequence
  Description of Artificial Sequence: Synthetic oligonucleotide
  modified_base (4)..(4): a, c, u, g, unknown or other
uuunuuuguucccaugcuc

SEQ ID NO: 1698861 - RNA, 19 nt, Artificial Sequence
  Description of Artificial Sequence: Synthetic oligonucleotide
ugguuuguuaaauuuguga

SEQ ID NO: 1698862 - RNA, 19 nt, Artificial Sequence
  Description of Artificial Sequence: Synthetic oligonucleotide
ucuaggaugacuuccucca

SEQ ID NO: 1698863 - RNA, 19 nt, Artificial Sequence
  Description of Artificial Sequence: Synthetic oligonucleotide
aaccagacgaccuuugccu

SEQ ID NO: 1698864 - RNA, 19 nt, Artificial Sequence
  Description of Artificial Sequence: Synthetic oligonucleotide
aguucuugcgaaucgaaug

SEQ ID NO: 1698865 - RNA, 19 nt, Artificial Sequence
  Description of Artificial Sequence: Synthetic oligonucleotide
ugaacaaaccagacgaccu

SEQ ID NO: 1698866 - RNA, 19 nt, Artificial Sequence
  Description of Artificial Sequence: Synthetic oligonucleotide
guucuugcgaaucgaaugg

SEQ ID NO: 1698867 - RNA, 19 nt, Artificial Sequence
  Description of Artificial Sequence: Synthetic oligonucleotide
uucuucuacucucuggaag

SEQ ID NO: 1698868 - RNA, 19 nt, Artificial Sequence
  Description of Artificial Sequence: Synthetic oligonucleotide
uugucuguacaccacaccu

SEQ ID NO: 1698869 - RNA, 19 nt, Artificial Sequence
  Description of Artificial Sequence: Synthetic oligonucleotide
uguacaccacaccuuuucg

SEQ ID NO: 1698870 - RNA, 19 nt, Artificial Sequence
  Description of Artificial Sequence: Synthetic oligonucleotide
  modified_base (7)..(7): a, c, u, g, unknown or other
uaauuunuuuguucccaug

SEQ ID NO: 1698871 - RNA, 19 nt, Artificial Sequence
  Description of Artificial Sequence: Synthetic oligonucleotide
ugaagagauuuccauagaa

SEQ ID NO: 1698872 - RNA, 19 nt, Artificial Sequence
  Description of Artificial Sequence: Synthetic oligonucleotide
aggcuuuuccuucauagag

SEQ ID NO: 1698873 - RNA, 19 nt, Artificial Sequence
  Description of Artificial Sequence: Synthetic oligonucleotide
ucuucaguccugucgaaag

SEQ ID NO: 1698874 - RNA, 19 nt, Artificial Sequence
  Description of Artificial Sequence: Synthetic oligonucleotide
uuugcgcacaguauggaca

SEQ ID NO: 1698875 - RNA, 19 nt, Artificial Sequence
  Description of Artificial Sequence: Synthetic oligonucleotide
aaugauaggaccggucuug

SEQ ID NO: 1698876 - RNA, 19 nt, Artificial Sequence
  Description of Artificial Sequence: Synthetic oligonucleotide
uccagcgugauuuugcgca

SEQ ID NO: 1698877 - RNA, 19 nt, Artificial Sequence
  Description of Artificial Sequence: Synthetic oligonucleotide
aggcuuuaugggcugauac

SEQ ID NO: 1698878 - RNA, 19 nt, Artificial Sequence
  Description of Artificial Sequence: Synthetic oligonucleotide
ucugucccaauaaauaaaa

SEQ ID NO: 1698879 - RNA, 19 nt, Artificial Sequence
  Description of Artificial Sequence: Synthetic oligonucleotide
uuuaugggcugauacauua

SEQ ID NO: 1698880 - RNA, 19 nt, Artificial Sequence
  Description of Artificial Sequence: Synthetic oligonucleotide
gauuuugcgcacaguaugg

SEQ ID NO: 1698881 - RNA, 19 nt, Artificial Sequence
  Description of Artificial Sequence: Synthetic oligonucleotide
  modified_base (2)..(2): a, c, u, g, unknown or other
unuuuguucccaugcucgg

SEQ ID NO: 1698882 - RNA, 19 nt, Artificial Sequence
  Description of Artificial Sequence: Synthetic oligonucleotide
agugcuccggcuuggagcg

SEQ ID NO: 1698883 - RNA, 19 nt, Artificial Sequence
  Description of Artificial Sequence: Synthetic oligonucleotide
uuaagaacauccccucuac

SEQ ID NO: 1698884 - RNA, 19 nt, Artificial Sequence
  Description of Artificial Sequence: Synthetic oligonucleotide
ucagguuauauuuuccauc

SEQ ID NO: 1698885 - RNA, 19 nt, Artificial Sequence
  Description of Artificial Sequence: Synthetic oligonucleotide
gauggaaucugaccugugc

SEQ ID NO: 1698886 - RNA, 19 nt, Artificial Sequence
  Description of Artificial Sequence: Synthetic oligonucleotide
ucucuaugccauaugccag

SEQ ID NO: 1698887 - RNA, 19 nt, Artificial Sequence
  Description of Artificial Sequence: Synthetic oligonucleotide
uaauuccucuaucuguccc

SEQ ID NO: 1698888 - RNA, 19 nt, Artificial Sequence
  Description of Artificial Sequence: Synthetic oligonucleotide
  modified_base (16)..(16): a, c, u, g, unknown or other
uuuuaacuuuaauuunuuu

SEQ ID NO: 1698889 - RNA, 19 nt, Artificial Sequence
  Description of Artificial Sequence: Synthetic oligonucleotide
aauuccucuaucuguccca

SEQ ID NO: 1698890 - RNA, 19 nt, Artificial Sequence
  Description of Artificial Sequence: Synthetic oligonucleotide
gauuugcgcacucugagga

SEQ ID NO: 1698891 - RNA, 19 nt, Artificial Sequence
  Description of Artificial Sequence: Synthetic oligonucleotide
uuucgcaguauucuucuac

SEQ ID NO: 1698892 - RNA, 19 nt, Artificial Sequence
  Description of Artificial Sequence: Synthetic oligonucleotide
guauucuucuacucucugg

SEQ ID NO: 1698893 - RNA, 19 nt, Artificial Sequence
  Description of Artificial Sequence: Synthetic oligonucleotide
aucgaauggcaucaucagg

SEQ ID NO: 1698894 - RNA, 19 nt, Artificial Sequence
  Description of Artificial Sequence: Synthetic oligonucleotide
guacuauugcucucuaugc

SEQ ID NO: 1698895 - RNA, 19 nt, Artificial Sequence
  Description of Artificial Sequence: Synthetic oligonucleotide
agcauaauuccucuaucug

SEQ ID NO: 1698896 - RNA, 19 nt, Artificial Sequence
  Description of Artificial Sequence: Synthetic oligonucleotide
ucgagggagacauuuuaag

SEQ ID NO: 1698897 - RNA, 19 nt, Artificial Sequence
  Description of Artificial Sequence: Synthetic oligonucleotide
  modified_base (5)..(5): a, c, u, g, unknown or other
auuunuuuguucccaugcu

SEQ ID NO: 1698898 - RNA, 19 nt, Artificial Sequence
  Description of Artificial Sequence: Synthetic oligonucleotide
uucuuuucuugcuucacgu

SEQ ID NO: 1698899 - RNA, 19 nt, Artificial Sequence
  Description of Artificial Sequence: Synthetic oligonucleotide
acugcuaguugcuucaggu

SEQ ID NO: 1698900 - RNA, 19 nt, Artificial Sequence
  Description of Artificial Sequence: Synthetic oligonucleotide
gaugacuuccuccauccac

SEQ ID NO: 1698901 - RNA, 19 nt, Artificial Sequence
  Description of Artificial Sequence: Synthetic oligonucleotide
auggcgaacauccugccug

SEQ ID NO: 1698902 - RNA, 19 nt, Artificial Sequence
  Description of Artificial Sequence: Synthetic oligonucleotide
gucuugaauaucuagaagu

SEQ ID NO: 1698903 - RNA, 19 nt, Artificial Sequence
  Description of Artificial Sequence: Synthetic oligonucleotide
uccgauguagagcuguugu

SEQ ID NO: 1698904 - RNA, 19 nt, Artificial Sequence
  Description of Artificial Sequence: Synthetic oligonucleotide
gaaucgaauggcaucauca

SEQ ID NO: 1698905 - RNA, 19 nt, Artificial Sequence
  Description of Artificial Sequence: Synthetic oligonucleotide
uauggacaaagcuaugcuc

SEQ ID NO: 1698906 - RNA, 19 nt, Artificial Sequence
  Description of Artificial Sequence: Synthetic oligonucleotide
uacaccacaccuuuucgca

SEQ ID NO: 1698907 - RNA, 19 nt, Artificial Sequence
  Description of Artificial Sequence: Synthetic oligonucleotide
uuugcaugugcaccuguug

SEQ ID NO: 1698908 - RNA, 19 nt, Artificial Sequence
  Description of Artificial Sequence: Synthetic oligonucleotide
cauacuucccuccauucac

SEQ ID NO: 1698909 - RNA, 19 nt, Artificial Sequence
  Description of Artificial Sequence: Synthetic oligonucleotide
agauuugcgcacucugagg

SEQ ID NO: 1698910 - RNA, 19 nt, Artificial Sequence
  Description of Artificial Sequence: Synthetic oligonucleotide
ucagauuugcgcacucuga

SEQ ID NO: 1698911 - RNA, 19 nt, Artificial Sequence
  Description of Artificial Sequence: Synthetic oligonucleotide
ugcuaguugcuucagguua

SEQ ID NO: 1698912 - RNA, 19 nt, Artificial Sequence
  Description of Artificial Sequence: Synthetic oligonucleotide
  modified_base (8)..(8): a, c, u, g, unknown or other
uuaauuunuuuguucccau

SEQ ID NO: 1698913 - RNA, 19 nt, Artificial Sequence
  Description of Artificial Sequence: Synthetic oligonucleotide
ugauacauuaguggaugag

SEQ ID NO: 1698914 - RNA, 19 nt, Artificial Sequence
  Description of Artificial Sequence: Synthetic oligonucleotide
uguuggguaguaccuggag

SEQ ID NO: 1698915 - RNA, 19 nt, Artificial Sequence
  Description of Artificial Sequence: Synthetic oligonucleotide
ucucuagccaggcagcagu

SEQ ID NO: 1698916 - RNA, 19 nt, Artificial Sequence
  Description of Artificial Sequence: Synthetic oligonucleotide
ucuucgugguccuuaagaa

SEQ ID NO: 1698917 - RNA, 19 nt, Artificial Sequence
  Description of Artificial Sequence: Synthetic oligonucleotide
uuccacucgauccacugcu

SEQ ID NO: 1698918 - RNA, 19 nt, Artificial Sequence
  Description of Artificial Sequence: Synthetic oligonucleotide
gaaaugauaggaccggucu

SEQ ID NO: 1698919 - RNA, 19 nt, Artificial Sequence
  Description of Artificial Sequence: Synthetic oligonucleotide
caggauaugccaucccagg

SEQ ID NO: 1698920 - RNA, 19 nt, Artificial Sequence
  Description of Artificial Sequence: Synthetic oligonucleotide
cucucuaugccauaugcca

SEQ ID NO: 1698921 - RNA, 19 nt, Artificial Sequence
  Description of Artificial Sequence: Synthetic oligonucleotide
gagggagacauuuuaagcu

SEQ ID NO: 1698922 - RNA, 19 nt, Artificial Sequence
  Description of Artificial Sequence: Synthetic oligonucleotide
ucuugcgaaucgaauggca

SEQ ID NO: 1698923 - RNA, 19 nt, Artificial Sequence
  Description of Artificial Sequence: Synthetic oligonucleotide
uuuguucccaugcucgguc

SEQ ID NO: 1698924 - RNA, 19 nt, Artificial Sequence
  Description of Artificial Sequence: Synthetic oligonucleotide
uucgcaguauucuucuacu

SEQ ID NO: 1698925 - RNA, 19 nt, Artificial Sequence
  Description of Artificial Sequence: Synthetic oligonucleotide
uggaaucugaccugugcca

SEQ ID NO: 1698926 - RNA, 19 nt, Artificial Sequence
  Description of Artificial Sequence: Synthetic oligonucleotide
ugcgaaucgaauggcauca

SEQ ID NO: 1698927 - RNA, 19 nt, Artificial Sequence
  Description of Artificial Sequence: Synthetic oligonucleotide
agucggcacaagcacugcc

SEQ ID NO: 1698928 - RNA, 19 nt, Artificial Sequence
  Description of Artificial Sequence: Synthetic oligonucleotide
cucuaggaugacuuccucc

SEQ ID NO: 1698929 - RNA, 19 nt, Artificial Sequence
  Description of Artificial Sequence: Synthetic oligonucleotide
ugccauacaugucgcaaug

SEQ ID NO: 1698930 - RNA, 19 nt, Artificial Sequence
  Description of Artificial Sequence: Synthetic oligonucleotide
aaaugauaggaccggucuu

SEQ ID NO: 1698931 - RNA, 19 nt, Artificial Sequence
  Description of Artificial Sequence: Synthetic oligonucleotide
uguaaugaucucggggugc

SEQ ID NO: 1698932 - RNA, 19 nt, Artificial Sequence
  Description of Artificial Sequence: Synthetic oligonucleotide
uuguaccaggguuuugugc

SEQ ID NO: 1698933 - RNA, 19 nt, Artificial Sequence
  Description of Artificial Sequence: Synthetic oligonucleotide
uccucuaucugucccaaua

SEQ ID NO: 1698934 - RNA, 19 nt, Artificial Sequence
  Description of Artificial Sequence: Synthetic oligonucleotide
uucagguuauauuuuccau

SEQ ID NO: 1698935 - RNA, 19 nt, Artificial Sequence
  Description of Artificial Sequence: Synthetic oligonucleotide
uugcuguagccaaucagcu

SEQ ID NO: 1698936 - RNA, 19 nt, Artificial Sequence
  Description of Artificial Sequence: Synthetic oligonucleotide
cagauuugcgcacucugag

SEQ ID NO: 1698937 - RNA, 19 nt, Artificial Sequence
  Description of Artificial Sequence: Synthetic oligonucleotide
uuugcgcacucugaggaag

SEQ ID NO: 1698938 - RNA, 19 nt, Artificial Sequence
  Description of Artificial Sequence: Synthetic oligonucleotide
uuuugcgcacaguauggac

SEQ ID NO: 1698939 - RNA, 19 nt, Artificial Sequence
  Description of Artificial Sequence: Synthetic oligonucleotide
aggguuuugugcccugagg

SEQ ID NO: 1698940 - RNA, 19 nt, Artificial Sequence
  Description of Artificial Sequence: Synthetic oligonucleotide
agaaaugauaggaccgguc

SEQ ID NO: 1698941 - RNA, 19 nt, Artificial Sequence
  Description of Artificial Sequence: Synthetic oligonucleotide
cagcaaaguacuauugcuc

SEQ ID NO: 1698942 - RNA, 19 nt, Artificial Sequence
  Description of Artificial Sequence: Synthetic oligonucleotide
uuuuacuaguauuggcuuu

SEQ ID NO: 1698943 - RNA, 19 nt, Artificial Sequence
  Description of Artificial Sequence: Synthetic oligonucleotide
accggucuugaauaucuag

SEQ ID NO: 1698944 - RNA, 19 nt, Artificial Sequence
  Description of Artificial Sequence: Synthetic oligonucleotide
auaggaccggucuugaaua

SEQ ID NO: 1698945 - RNA, 19 nt, Artificial Sequence
  Description of Artificial Sequence: Synthetic oligonucleotide
caaugauggaaucugaccu

SEQ ID NO: 1698946 - RNA, 19 nt, Artificial Sequence
  Description of Artificial Sequence: Synthetic oligonucleotide
augugcaccuguuggguag

SEQ ID NO: 1698947 - RNA, 19 nt, Artificial Sequence
  Description of Artificial Sequence: Synthetic oligonucleotide
aaucugaccugugccacug

SEQ ID NO: 1698948 - RNA, 19 nt, Artificial Sequence
  Description of Artificial Sequence: Synthetic oligonucleotide
ucgaaagcgucuccaacaa

SEQ ID NO: 1698949 - RNA, 19 nt, Artificial Sequence
  Description of Artificial Sequence: Synthetic oligonucleotide
cuucagguuauauuuucca

SEQ ID NO: 1698950 - RNA, 19 nt, Artificial Sequence
  Description of Artificial Sequence: Synthetic oligonucleotide
uuuacuaguauuggcuuuu

SEQ ID NO: 1698951 - RNA, 19 nt, Artificial Sequence
  Description of Artificial Sequence: Synthetic oligonucleotide
uccuuaagaacauccccuc

SEQ ID NO: 1698952 - RNA, 19 nt, Artificial Sequence
  Description of Artificial Sequence: Synthetic oligonucleotide
cuugucuguacaccacacc

SEQ ID NO: 1698953 - RNA, 19 nt, Artificial Sequence
  Description of Artificial Sequence: Synthetic oligonucleotide
guagccaaucagcugcaag

SEQ ID NO: 1698954 - RNA, 19 nt, Artificial Sequence
  Description of Artificial Sequence: Synthetic oligonucleotide
gucgcaaugauggaaucug

SEQ ID NO: 1698955 - RNA, 19 nt, Artificial Sequence
  Description of Artificial Sequence: Synthetic oligonucleotide
uuccuucauagagugacca

SEQ ID NO: 1698956 - RNA, 19 nt, Artificial Sequence
  Description of Artificial Sequence: Synthetic oligonucleotide
uucgagggagacauuuuaa

SEQ ID NO: 1698957 - RNA, 19 nt, Artificial Sequence
  Description of Artificial Sequence: Synthetic oligonucleotide
auuccagcaaaguacuauu

SEQ ID NO: 1698958 - RNA, 19 nt, Artificial Sequence
  Description of Artificial Sequence: Synthetic oligonucleotide
guacaccacaccuuuucgc

SEQ ID NO: 1698959 - RNA, 19 nt, Artificial Sequence
  Description of Artificial Sequence: Synthetic oligonucleotide
uccggcuuggagcggagcc

SEQ ID NO: 1698960 - RNA, 19 nt, Artificial Sequence
  Description of Artificial Sequence: Synthetic oligonucleotide
cuucgugguccuuaagaac

SEQ ID NO: 1698961 - RNA, 19 nt, Artificial Sequence
  Description of Artificial Sequence: Synthetic oligonucleotide
agcuaugcucuacugucug

SEQ ID NO: 1698962 - RNA, 19 nt, Artificial Sequence
  Description of Artificial Sequence: Synthetic oligonucleotide
aaagcgucuccaacaaacu

SEQ ID NO: 1698963 - RNA, 19 nt, Artificial Sequence
  Description of Artificial Sequence: Synthetic oligonucleotide
acguccuuucugaacaaac

SEQ ID NO: 1698964 - RNA, 19 nt, Artificial Sequence
  Description of Artificial Sequence: Synthetic oligonucleotide
aguaccuggagcaggauau

SEQ ID NO: 1698965 - RNA, 19 nt, Artificial Sequence
  Description of Artificial Sequence: Synthetic oligonucleotide
cccagcaucagauuugcgc

SEQ ID NO: 1698966 - RNA, 19 nt, Artificial Sequence
  Description of Artificial Sequence: Synthetic oligonucleotide
auuaguggaugaguucuug

SEQ ID NO: 1698967 - RNA, 19 nt, Artificial Sequence
  Description of Artificial Sequence: Synthetic oligonucleotide
gccuguaaugaucucgggg

SEQ ID NO: 1698968 - RNA, 19 nt, Artificial Sequence
  Description of Artificial Sequence: Synthetic oligonucleotide
uugcgaaucgaauggcauc

SEQ ID NO: 1698969 - RNA, 19 nt, Artificial Sequence
  Description of Artificial Sequence: Synthetic oligonucleotide
caaaccagacgaccuuugc

SEQ ID NO: 1698970 - RNA, 19 nt, Artificial Sequence
  Description of Artificial Sequence: Synthetic oligonucleotide
gaauaucuagaaguuccuc

SEQ ID NO: 1698971 - RNA, 19 nt, Artificial Sequence
  Description of Artificial Sequence: Synthetic oligonucleotide
uaugcucuacugucuggca

SEQ ID NO: 1698972 - RNA, 19 nt, Artificial Sequence
  Description of Artificial Sequence: Synthetic oligonucleotide
ugcuguagccaaucagcug

SEQ ID NO: 1698973 - RNA, 19 nt, Artificial Sequence
  Description of Artificial Sequence: Synthetic oligonucleotide
acaagcacugccauacaug

SEQ ID NO: 1698974 - RNA, 19 nt, Artificial Sequence
  Description of Artificial Sequence: Synthetic oligonucleotide
ucaggaguccagugcgugc

SEQ ID NO: 1698975 - RNA, 19 nt, Artificial Sequence
  Description of Artificial Sequence: Synthetic oligonucleotide
cuucacguccuuucugaac

SEQ ID NO: 1698976 - RNA, 19 nt, Artificial Sequence
  Description of Artificial Sequence: Synthetic oligonucleotide
ggaaccgccucuuugcaug

SEQ ID NO: 1698977 - RNA, 19 nt, Artificial Sequence
  Description of Artificial Sequence: Synthetic oligonucleotide
gauaggaccggucuugaau

SEQ ID NO: 1698978 - RNA, 19 nt, Artificial Sequence
  Description of Artificial Sequence: Synthetic oligonucleotide
gguuuguuaaauuugugau

SEQ ID NO: 1698979 - RNA, 19 nt, Artificial Sequence
  Description of Artificial Sequence: Synthetic oligonucleotide
agagggugauccgauguag

SEQ ID NO: 1698980 - RNA, 19 nt, Artificial Sequence
  Description of Artificial Sequence: Synthetic oligonucleotide
ucgcaaugauggaaucuga

SEQ ID NO: 1698981 - RNA, 19 nt, Artificial Sequence
  Description of Artificial Sequence: Synthetic oligonucleotide
agcgugauuuugcgcacag

SEQ ID NO: 1698982 - RNA, 19 nt, Artificial Sequence
  Description of Artificial Sequence: Synthetic oligonucleotide
cuuaagaacauccccucua

SEQ ID NO: 1698983 - RNA, 19 nt, Artificial Sequence
  Description of Artificial Sequence: Synthetic oligonucleotide
aacaaaccagacgaccuuu

SEQ ID NO: 1698984 - RNA, 19 nt, Artificial Sequence
  Description of Artificial Sequence: Synthetic oligonucleotide
ugucgcaaugauggaaucu

SEQ ID NO: 1698985 - RNA, 19 nt, Artificial Sequence
  Description of Artificial Sequence: Synthetic oligonucleotide
uaguaccuggagcaggaua

SEQ ID NO: 1698986 - RNA, 19 nt, Artificial Sequence
  Description of Artificial Sequence: Synthetic oligonucleotide
gcguacuuccacuucgagg

SEQ ID NO: 1698987 - RNA, 19 nt, Artificial Sequence
  Description of Artificial Sequence: Synthetic oligonucleotide
agaaggcgcccucaggagu

SEQ ID NO: 1698988 - RNA, 19 nt, Artificial Sequence
  Description of Artificial Sequence: Synthetic oligonucleotide
uucuugcgaaucgaauggc

SEQ ID NO: 1698989 - RNA, 19 nt, Artificial Sequence
  Description of Artificial Sequence: Synthetic oligonucleotide
ugauggaaucugaccugug

SEQ ID NO: 1698990 - RNA, 19 nt, Artificial Sequence
  Description of Artificial Sequence: Synthetic oligonucleotide
cuguaaugaucucggggug

SEQ ID NO: 1698991 - RNA, 19 nt, Artificial Sequence
  Description of Artificial Sequence: Synthetic oligonucleotide
cuccguuuucuuugguuug

SEQ ID NO: 1698992 - RNA, 19 nt, Artificial Sequence
  Description of Artificial Sequence: Synthetic oligonucleotide
ugcucggucccuuggcagc

SEQ ID NO: 1698993 - RNA, 19 nt, Artificial Sequence
  Description of Artificial Sequence: Synthetic oligonucleotide
uggucccauacuucccucc

SEQ ID NO: 1698994 - RNA, 19 nt, Artificial Sequence
  Description of Artificial Sequence: Synthetic oligonucleotide
guggaugaguucuugcgaa

SEQ ID NO: 1698995 - RNA, 19 nt, Artificial Sequence
  Description of Artificial Sequence: Synthetic oligonucleotide
gcaccuguuggguaguacc

SEQ ID NO: 1698996 - RNA, 19 nt, Artificial Sequence
  Description of Artificial Sequence: Synthetic oligonucleotide
guauggacaaagcuaugcu

SEQ ID NO: 1698997 - RNA, 19 nt, Artificial Sequence
  Description of Artificial Sequence: Synthetic oligonucleotide
acugccauacaugucgcaa

SEQ ID NO: 1698998 - RNA, 19 nt, Artificial Sequence
  Description of Artificial Sequence: Synthetic oligonucleotide
gauuuccauagaaaugaua

SEQ ID NO: 1698999 - RNA, 19 nt, Artificial Sequence
  Description of Artificial Sequence: Synthetic oligonucleotide
ucgcaguauucuucuacuc

SEQ ID NO: 1699000 - RNA, 19 nt, Artificial Sequence
  Description of Artificial Sequence: Synthetic oligonucleotide
cagcagucggcacaagcac

SEQ ID NO: 1699001 - RNA, 19 nt, Artificial Sequence
  Description of Artificial Sequence: Synthetic oligonucleotide
cagaaggcgcccucaggag

SEQ ID NO: 1699002 - RNA, 19 nt, Artificial Sequence
  Description of Artificial Sequence: Synthetic oligonucleotide
ugcagagggugauccgaug

SEQ ID NO: 1699003 - RNA, 19 nt, Artificial Sequence
  Description of Artificial Sequence: Synthetic oligonucleotide
uagucuuuaguggucccau

SEQ ID NO: 1699004 - RNA, 19 nt, Artificial Sequence
  Description of Artificial Sequence: Synthetic oligonucleotide
ggugcauuccagcaaagua

SEQ ID NO: 1699005 - RNA, 19 nt, Artificial Sequence
  Description of Artificial Sequence: Synthetic oligonucleotide
aagggucucuagccaggca

SEQ ID NO: 1699006 - RNA, 19 nt, Artificial Sequence
  Description of Artificial Sequence: Synthetic oligonucleotide
gggcugauacauuagugga

SEQ ID NO: 1699007 - RNA, 19 nt, Artificial Sequence
  Description of Artificial Sequence: Synthetic oligonucleotide
auuuugcgcacaguaugga

SEQ ID NO: 1699008 - RNA, 19 nt, Artificial Sequence
  Description of Artificial Sequence: Synthetic oligonucleotide
ucggcacaagcacugccau

SEQ ID NO: 1699009 - RNA, 19 nt, Artificial Sequence
  Description of Artificial Sequence: Synthetic oligonucleotide
aggguagucuuuagugguc

SEQ ID NO: 1699010 - RNA, 19 nt, Artificial Sequence
  Description of Artificial Sequence: Synthetic oligonucleotide
aagcacugccauacauguc

SEQ ID NO: 1699011 - RNA, 19 nt, Artificial Sequence
  Description of Artificial Sequence: Synthetic oligonucleotide
uccugucgaaagcgucucc

SEQ ID NO: 1699012 - RNA, 19 nt, Artificial Sequence
  Description of Artificial Sequence: Synthetic oligonucleotide
ggagcggagccucuuuucc

SEQ ID NO: 1699013 - RNA, 19 nt, Artificial Sequence
  Description of Artificial Sequence: Synthetic oligonucleotide
uggcguacuuccacuucga

SEQ ID NO: 1699014 - RNA, 19 nt, Artificial Sequence
  Description of Artificial Sequence: Synthetic oligonucleotide
uggaugaguucuugcgaau

SEQ ID NO: 1699015 - RNA, 19 nt, Artificial Sequence
  Description of Artificial Sequence: Synthetic oligonucleotide
acucgauccacugcuaguu

SEQ ID NO: 1699016 - RNA, 19 nt, Artificial Sequence
  Description of Artificial Sequence: Synthetic oligonucleotide
uuugugcccugaggcaugc

SEQ ID NO: 1699017 - RNA, 19 nt, Artificial Sequence
  Description of Artificial Sequence: Synthetic oligonucleotide
guaaugaucucggggugca

SEQ ID NO: 1699018 - RNA, 19 nt, Artificial Sequence
  Description of Artificial Sequence: Synthetic oligonucleotide
gcuaugcucuacugucugg

SEQ ID NO: 1699019 - RNA, 19 nt, Artificial Sequence
  Description of Artificial Sequence: Synthetic oligonucleotide
cacugcagagggugauccg

SEQ ID NO: 1699020 - RNA, 19 nt, Artificial Sequence
  Description of Artificial Sequence: Synthetic oligonucleotide
cugauacauuaguggauga

SEQ ID NO: 1699021 - RNA, 19 nt, Artificial Sequence
  Description of Artificial Sequence: Synthetic oligonucleotide
ggcuuuaugggcugauaca

SEQ ID NO: 1699022 - RNA, 19 nt, Artificial Sequence
  Description of Artificial Sequence: Synthetic oligonucleotide
gaaggcgcccucaggaguc

SEQ ID NO: 1699023 - RNA, 19 nt, Artificial Sequence
  Description of Artificial Sequence: Synthetic oligonucleotide
auuugcgcacucugaggaa

SEQ ID NO: 1699024 - RNA, 19 nt, Artificial Sequence
  Description of Artificial Sequence: Synthetic oligonucleotide
cucgauccacugcuaguug

SEQ ID NO: 1699025 - RNA, 19 nt, Artificial Sequence
  Description of Artificial Sequence: Synthetic oligonucleotide
cagcauaauuccucuaucu

SEQ ID NO: 1699026 - RNA, 19 nt, Artificial Sequence
  Description of Artificial Sequence: Synthetic oligonucleotide
cuccagcgugauuuugcgc

SEQ ID NO: 1699027 - RNA, 19 nt, Artificial Sequence
  Description of Artificial Sequence: Synthetic oligonucleotide
caguccugucgaaagcguc

SEQ ID NO: 1699028 - RNA, 19 nt, Artificial Sequence
  Description of Artificial Sequence: Synthetic oligonucleotide
caggguuuugugcccugag

SEQ ID NO: 1699029 - RNA, 19 nt, Artificial Sequence
  Description of Artificial Sequence: Synthetic oligonucleotide
aggaccggucuugaauauc

SEQ ID NO: 1699030 - RNA, 19 nt, Artificial Sequence
  Description of Artificial Sequence: Synthetic oligonucleotide
agugcgugccggggcaggc

SEQ ID NO: 1699031 - RNA, 19 nt, Artificial Sequence
  Description of Artificial Sequence: Synthetic oligonucleotide
uuggagcggagccucuuuu

SEQ ID NO: 1699032 - RNA, 19 nt, Artificial Sequence
  Description of Artificial Sequence: Synthetic oligonucleotide
cuggaaguugcuguagcca

SEQ ID NO: 1699033 - RNA, 19 nt, Artificial Sequence
  Description of Artificial Sequence: Synthetic oligonucleotide
ccuuuucgcaguauucuuc

SEQ ID NO: 1699034 - RNA, 19 nt, Artificial Sequence
  Description of Artificial Sequence: Synthetic oligonucleotide
ugauaggaccggucuugaa

SEQ ID NO: 1699035 - RNA, 19 nt, Artificial Sequence
  Description of Artificial Sequence: Synthetic oligonucleotide
uuuucgcaguauucuucua

SEQ ID NO: 1699036 - RNA, 19 nt, Artificial Sequence
  Description of Artificial Sequence: Synthetic oligonucleotide
uccucuucgugguccuuaa

SEQ ID NO: 1699037 - RNA, 19 nt, Artificial Sequence
  Description of Artificial Sequence: Synthetic oligonucleotide
caguauggacaaagcuaug

SEQ ID NO: 1699038 - RNA, 19 nt, Artificial Sequence
  Description of Artificial Sequence: Synthetic oligonucleotide
guuauauuuuccaucuguu

SEQ ID NO: 1699039 - RNA, 19 nt, Artificial Sequence
  Description of Artificial Sequence: Synthetic oligonucleotide
cucuaucugucccaauaaa

SEQ ID NO: 1699040 - RNA, 19 nt, Artificial Sequence
  Description of Artificial Sequence: Synthetic oligonucleotide
cucggggugcauuccagca

SEQ ID NO: 1699041 - RNA, 19 nt, Artificial Sequence
  Description of Artificial Sequence: Synthetic oligonucleotide
guagucuuuagugguccca

SEQ ID NO: 1699042 - RNA, 19 nt, Artificial Sequence
  Description of Artificial Sequence: Synthetic oligonucleotide
gcgaacauccugccugcgg

SEQ ID NO: 1699043 - RNA, 19 nt, Artificial Sequence
  Description of Artificial Sequence: Synthetic oligonucleotide
ucggucccuuggcagccag

SEQ ID NO: 1699044 - RNA, 19 nt, Artificial Sequence
  Description of Artificial Sequence: Synthetic oligonucleotide
uaggaccggucuugaauau

SEQ ID NO: 1699045 - RNA, 19 nt, Artificial Sequence
  Description of Artificial Sequence: Synthetic oligonucleotide
gcaggauaugccaucccag

SEQ ID NO: 1699046 - RNA, 19 nt, Artificial Sequence
  Description of Artificial Sequence: Synthetic oligonucleotide
gccuggguaaggcuuuucc

SEQ ID NO: 1699047 - RNA, 19 nt, Artificial Sequence
  Description of Artificial Sequence: Synthetic oligonucleotide
caggguagucuuuaguggu

SEQ ID NO: 1699048 - RNA, 19 nt, Artificial Sequence
  Description of Artificial Sequence: Synthetic oligonucleotide
ucuucaccacucugucauc

SEQ ID NO: 1699049 - RNA, 19 nt, Artificial Sequence
  Description of Artificial Sequence: Synthetic oligonucleotide
ucacguccuuucugaacaa

SEQ ID NO: 1699050 - RNA, 19 nt, Artificial Sequence
  Description of Artificial Sequence: Synthetic oligonucleotide
cuugcgaaucgaauggcau

SEQ ID NO: 1699051 - RNA, 19 nt, Artificial Sequence
  Description of Artificial Sequence: Synthetic oligonucleotide
augauaggaccggucuuga

SEQ ID NO: 1699052 - RNA, 19 nt, Artificial Sequence
  Description of Artificial Sequence: Synthetic oligonucleotide
gagggugauccgauguaga

SEQ ID NO: 1699053 - RNA, 19 nt, Artificial Sequence
  Description of Artificial Sequence: Synthetic oligonucleotide
uccucagcuuccacucgau

SEQ ID NO: 1699054 - RNA, 19 nt, Artificial Sequence
  Description of Artificial Sequence: Synthetic oligonucleotide
gucggcacaagcacugcca

SEQ ID NO: 1699055 - RNA, 19 nt, Artificial Sequence
  Description of Artificial Sequence: Synthetic oligonucleotide
ugccauaugccagccucuc

SEQ ID NO: 1699056 - RNA, 19 nt, Artificial Sequence
  Description of Artificial Sequence: Synthetic oligonucleotide
agcagucggcacaagcacu

SEQ ID NO: 1699057 - RNA, 19 nt, Artificial Sequence
  Description of Artificial Sequence: Synthetic oligonucleotide
caugcucggucccuuggca

SEQ ID NO: 1699058 - RNA, 19 nt, Artificial Sequence
  Description of Artificial Sequence: Synthetic oligonucleotide
gcgcacaguauggacaaag

SEQ ID NO: 1699059 - RNA, 19 nt, Artificial Sequence
  Description of Artificial Sequence: Synthetic oligonucleotide
gcucucuaugccauaugcc

SEQ ID NO: 1699060 - RNA, 19 nt, Artificial Sequence
  Description of Artificial Sequence: Synthetic oligonucleotide
gaaucugaccugugccacu

SEQ ID NO: 1699061 - RNA, 19 nt, Artificial Sequence
  Description of Artificial Sequence: Synthetic oligonucleotide
ccggucuugaauaucuaga

SEQ ID NO: 1699062 - RNA, 19 nt, Artificial Sequence
  Description of Artificial Sequence: Synthetic oligonucleotide
ugggcggcauugccauggc

SEQ ID NO: 1699063 - RNA, 19 nt, Artificial Sequence
  Description of Artificial Sequence: Synthetic oligonucleotide
ucccaugcucggucccuug

SEQ ID NO: 1699064 - RNA, 19 nt, Artificial Sequence
  Description of Artificial Sequence: Synthetic oligonucleotide
agggcaucuugugauguuu

SEQ ID NO: 1699065 - RNA, 19 nt, Artificial Sequence
  Description of Artificial Sequence: Synthetic oligonucleotide
cuauugcucucuaugccau

SEQ ID NO: 1699066 - RNA, 19 nt, Artificial Sequence
  Description of Artificial Sequence: Synthetic oligonucleotide
ggcggcauugccauggcga

SEQ ID NO: 1699067 - RNA, 19 nt, Artificial Sequence
  Description of Artificial Sequence: Synthetic oligonucleotide
ggcguacuuccacuucgag

SEQ ID NO: 1699068 - RNA, 19 nt, Artificial Sequence
  Description of Artificial Sequence: Synthetic oligonucleotide
gcagucggcacaagcacug

SEQ ID NO: 1699069 - RNA, 19 nt, Artificial Sequence
  Description of Artificial Sequence: Synthetic oligonucleotide
gggguuggcguacuuccac

SEQ ID NO: 1699070 - RNA, 19 nt, Artificial Sequence
  Description of Artificial Sequence: Synthetic oligonucleotide
cuguuggguaguaccugga

SEQ ID NO: 1699071 - RNA, 19 nt, Artificial Sequence
  Description of Artificial Sequence: Synthetic oligonucleotide
guuuugugcccugaggcau

SEQ ID NO: 1699072 - RNA, 19 nt, Artificial Sequence
  Description of Artificial Sequence: Synthetic oligonucleotide
cgcacaguauggacaaagc

SEQ ID NO: 1699073 - RNA, 19 nt, Artificial Sequence
  Description of Artificial Sequence: Synthetic oligonucleotide
cuguagccaaucagcugca

SEQ ID NO: 1699074 - RNA, 19 nt, Artificial Sequence
  Description of Artificial Sequence: Synthetic oligonucleotide
uguagccaaucagcugcaa

SEQ ID NO: 1699075 - RNA, 19 nt, Artificial Sequence
  Description of Artificial Sequence: Synthetic oligonucleotide
cugucgaaagcgucuccaa

SEQ ID NO: 1699076 - RNA, 19 nt, Artificial Sequence
  Description of Artificial Sequence: Synthetic oligonucleotide
caugugcaccuguugggua

SEQ ID NO: 1699077 - RNA, 19 nt, Artificial Sequence
  Description of Artificial Sequence: Synthetic oligonucleotide
gcuuuaugggcugauacau

SEQ ID NO: 1699078 - RNA, 19 nt, Artificial Sequence
  Description of Artificial Sequence: Synthetic oligonucleotide
caccuuuucgcaguauucu

SEQ ID NO: 1699079 - RNA, 19 nt, Artificial Sequence
  Description of Artificial Sequence: Synthetic oligonucleotide
ggacaaagcuaugcucuac

SEQ ID NO: 1699080 - RNA, 19 nt, Artificial Sequence
  Description of Artificial Sequence: Synthetic oligonucleotide
gaaguuccucuaggaugac

SEQ ID NO: 1699081 - RNA, 19 nt, Artificial Sequence
  Description of Artificial Sequence: Synthetic oligonucleotide
caucaggguagucuuuagu

SEQ ID NO: 1699082 - RNA, 19 nt, Artificial Sequence
  Description of Artificial Sequence: Synthetic oligonucleotide
ccgauguagagcuguuguc

SEQ ID NO: 1699083 - RNA, 19 nt, Artificial Sequence
  Description of Artificial Sequence: Synthetic oligonucleotide
aagggcgggcagggcaucu

SEQ ID NO: 1699084 - RNA, 19 nt, Artificial Sequence
  Description of Artificial Sequence: Synthetic oligonucleotide
aaccgccucuuugcaugug

SEQ ID NO: 1699085 - RNA, 19 nt, Artificial Sequence
  Description of Artificial Sequence: Synthetic oligonucleotide
caccuguuggguaguaccu

SEQ ID NO: 1699086 - RNA, 19 nt, Artificial Sequence
  Description of Artificial Sequence: Synthetic oligonucleotide
guccugucgaaagcgucuc

SEQ ID NO: 1699087 - RNA, 19 nt, Artificial Sequence
  Description of Artificial Sequence: Synthetic oligonucleotide
uuccucuaucugucccaau

SEQ ID NO: 1699088 - RNA, 19 nt, Artificial Sequence
  Description of Artificial Sequence: Synthetic oligonucleotide
ccauggcgaacauccugcc

SEQ ID NO: 1699089 - RNA, 19 nt, Artificial Sequence
  Description of Artificial Sequence: Synthetic oligonucleotide
uaaugaucucggggugcau

SEQ ID NO: 1699090 - RNA, 19 nt, Artificial Sequence
  Description of Artificial Sequence: Synthetic oligonucleotide
cagagggugauccgaugua

SEQ ID NO: 1699091 - RNA, 19 nt, Artificial Sequence
  Description of Artificial Sequence: Synthetic oligonucleotide
gacgaccuuugccuguaau

SEQ ID NO: 1699092 - RNA, 19 nt, Artificial Sequence
  Description of Artificial Sequence: Synthetic oligonucleotide
ggaccggucuugaauaucu

SEQ ID NO: 1699093 - RNA, 19 nt, Artificial Sequence
  Description of Artificial Sequence: Synthetic oligonucleotide
ccaugcucggucccuuggc

SEQ ID NO: 1699094 - RNA, 19 nt, Artificial Sequence
  Description of Artificial Sequence: Synthetic oligonucleotide
gaacuccuuguaccagggu

SEQ ID NO: 1699095 - RNA, 19 nt, Artificial Sequence
  Description of Artificial Sequence: Synthetic oligonucleotide
cagucggcacaagcacugc

SEQ ID NO: 1699096 - RNA, 19 nt, Artificial Sequence
  Description of Artificial Sequence: Synthetic oligonucleotide
cuuugcaugugcaccuguu

SEQ ID NO: 1699097 - RNA, 19 nt, Artificial Sequence
  Description of Artificial Sequence: Synthetic oligonucleotide
cccaugcucggucccuugg

SEQ ID NO: 1699098 - RNA, 19 nt, Artificial Sequence
  Description of Artificial Sequence: Synthetic oligonucleotide
gcacaagaaccaggccugg

SEQ ID NO: 1699099 - RNA, 19 nt, Artificial Sequence
  Description of Artificial Sequence: Synthetic oligonucleotide
cacugccauacaugucgca

SEQ ID NO: 1699100 - RNA, 19 nt, Artificial Sequence
  Description of Artificial Sequence: Synthetic oligonucleotide
cuccauccacuccguuuuc

SEQ ID NO: 1699101 - RNA, 19 nt, Artificial Sequence
  Description of Artificial Sequence: Synthetic oligonucleotide
cacucgauccacugcuagu

SEQ ID NO: 1699102 - RNA, 19 nt, Artificial Sequence
  Description of Artificial Sequence: Synthetic oligonucleotide
gcaucagauuugcgcacuc

SEQ ID NO: 1699103 - RNA, 19 nt, Artificial Sequence
  Description of Artificial Sequence: Synthetic oligonucleotide
gugcgugccggggcaggcg

SEQ ID NO: 1699104 - RNA, 19 nt, Artificial Sequence
  Description of Artificial Sequence: Synthetic oligonucleotide
gggcggcauugccauggcg

SEQ ID NO: 1699105 - RNA, 19 nt, Artificial Sequence
  Description of Artificial Sequence: Synthetic oligonucleotide
cauuaguggaugaguucuu

SEQ ID NO: 1699106 - RNA, 19 nt, Artificial Sequence
  Description of Artificial Sequence: Synthetic oligonucleotide
agacgaccuuugccuguaa

SEQ ID NO: 1699107 - RNA, 19 nt, Artificial Sequence
  Description of Artificial Sequence: Synthetic oligonucleotide
cacuccguuuucuuugguu

SEQ ID NO: 1699108 - RNA, 19 nt, Artificial Sequence
  Description of Artificial Sequence: Synthetic oligonucleotide
cauggcgaacauccugccu

SEQ ID NO: 1699109 - RNA, 19 nt, Artificial Sequence
  Description of Artificial Sequence: Synthetic oligonucleotide
ccugucgaaagcgucucca

SEQ ID NO: 1699110 - RNA, 19 nt, Artificial Sequence
  Description of Artificial Sequence: Synthetic oligonucleotide
gccauacaugucgcaauga

SEQ ID NO: 1699111 - RNA, 19 nt, Artificial Sequence
  Description of Artificial Sequence: Synthetic oligonucleotide
gcggcauugccauggcgaa

SEQ ID NO: 1699112 - RNA, 19 nt, Artificial Sequence
  Description of Artificial Sequence: Synthetic oligonucleotide
gcuucacguccuuucugaa

SEQ ID NO: 1699113 - RNA, 19 nt, Artificial Sequence
  Description of Artificial Sequence: Synthetic oligonucleotide
ccucuaggaugacuuccuc

SEQ ID NO: 1699114 - RNA, 19 nt, Artificial Sequence
  Description of Artificial Sequence: Synthetic oligonucleotide
ggcgaacauccugccugcg

SEQ ID NO: 1699115 - RNA, 19 nt, Artificial Sequence
  Description of Artificial Sequence: Synthetic oligonucleotide
ccuuguaccaggguuuugu

SEQ ID NO: 1699116 - RNA, 19 nt, Artificial Sequence
  Description of Artificial Sequence: Synthetic oligonucleotide
ggggugcauuccagcaaag

SEQ ID NO: 1699117 - RNA, 19 nt, Artificial Sequence
  Description of Artificial Sequence: Synthetic oligonucleotide
ccauacaugucgcaaugau

SEQ ID NO: 1699118 - RNA, 19 nt, Artificial Sequence
  Description of Artificial Sequence: Synthetic oligonucleotide
cacguccuuucugaacaaa

SEQ ID NO: 1699119 - RNA, 19 nt, Artificial Sequence
  Description of Artificial Sequence: Synthetic oligonucleotide
gauccacugcuaguugcuu

SEQ ID NO: 1699120 - RNA, 19 nt, Artificial Sequence
  Description of Artificial Sequence: Synthetic oligonucleotide
ggguuggcguacuuccacu

SEQ ID NO: 1699121 - RNA, 19 nt, Artificial Sequence
  Description of Artificial Sequence: Synthetic oligonucleotide
cagacgaccuuugccugua

SEQ ID NO: 1699122 - RNA, 19 nt, Artificial Sequence
  Description of Artificial Sequence: Synthetic oligonucleotide
gauccgauguagagcuguu

SEQ ID NO: 1699123 - RNA, 19 nt, Artificial Sequence
  Description of Artificial Sequence: Synthetic oligonucleotide
cagcgugauuuugcgcaca

SEQ ID NO: 1699124 - RNA, 19 nt, Artificial Sequence
  Description of Artificial Sequence: Synthetic oligonucleotide
gcaugugcaccuguugggu

SEQ ID NO: 1699125 - RNA, 19 nt, Artificial Sequence
  Description of Artificial Sequence: Synthetic oligonucleotide
gguuggcguacuuccacuu

SEQ ID NO: 1699126 - RNA, 19 nt, Artificial Sequence
  Description of Artificial Sequence: Synthetic oligonucleotide
caggcuuuaugggcugaua

SEQ ID NO: 1699127 - RNA, 19 nt, Artificial Sequence
  Description of Artificial Sequence: Synthetic oligonucleotide
caagggcgggcagggcauc

SEQ ID NO: 1699128 - RNA, 19 nt, Artificial Sequence
  Description of Artificial Sequence: Synthetic oligonucleotide
ggcgcccucaggaguccag

SEQ ID NO: 1699129 - RNA, 19 nt, Artificial Sequence
  Description of Artificial Sequence: Synthetic oligonucleotide
ccuccauccacuccguuuu

SEQ ID NO: 1699130 - RNA, 19 nt, Artificial Sequence
  Description of Artificial Sequence: Synthetic oligonucleotide
aggcagcagucggcacaag

SEQ ID NO: 1699131 - RNA, 19 nt, Artificial Sequence
  Description of Artificial Sequence: Synthetic oligonucleotide
gccauaugccagccucucu

SEQ ID NO: 1699132 - RNA, 19 nt, Artificial Sequence
  Description of Artificial Sequence: Synthetic oligonucleotide
aggcgcccucaggagucca

SEQ ID NO: 1699133 - RNA, 19 nt, Artificial Sequence
  Description of Artificial Sequence: Synthetic oligonucleotide
cggggugcauuccagcaaa

SEQ ID NO: 1699134 - RNA, 19 nt, Artificial Sequence
  Description of Artificial Sequence: Synthetic oligonucleotide
cuccuuguaccaggguuuu

SEQ ID NO: 1699135 - RNA, 19 nt, Artificial Sequence
  Description of Artificial Sequence: Synthetic oligonucleotide
agggcgggcagggcaucuu

SEQ ID NO: 1699136 - RNA, 19 nt, Artificial Sequence
  Description of Artificial Sequence: Synthetic oligonucleotide
ccccucuaccuucugcucu

SEQ ID NO: 1699137 - RNA, 19 nt, Artificial Sequence
  Description of Artificial Sequence: Synthetic oligonucleotide
ccagacgaccuuugccugu

SEQ ID NO: 1699138 - RNA, 19 nt, Artificial Sequence
  Description of Artificial Sequence: Synthetic oligonucleotide
cucggucccuuggcagcca

SEQ ID NO: 1699139 - RNA, 19 nt, Artificial Sequence
  Description of Artificial Sequence: Synthetic oligonucleotide
cgaaagcgucuccaacaaa

SEQ ID NO: 1699140 - RNA, 19 nt, Artificial Sequence
  Description of Artificial Sequence: Synthetic oligonucleotide
gcgcacucugaggaagagu

SEQ ID NO: 1699141 - RNA, 19 nt, Artificial Sequence
  Description of Artificial Sequence: Synthetic oligonucleotide
ggcgggcagggcaucuugu

SEQ ID NO: 1699142 - RNA, 19 nt, Artificial Sequence
  Description of Artificial Sequence: Synthetic oligonucleotide
gcaggcuuuaugggcugau

SEQ ID NO: 1699143 - RNA, 19 nt, Artificial Sequence
  Description of Artificial Sequence: Synthetic oligonucleotide
gcgaaucgaauggcaucau

SEQ ID NO: 1699144 - RNA, 19 nt, Artificial Sequence
  Description of Artificial Sequence: Synthetic oligonucleotide
ccggcuuggagcggagccu

SEQ ID NO: 1699145 - RNA, 19 nt, Artificial Sequence
  Description of Artificial Sequence: Synthetic oligonucleotide
cggcacaagcacugccaua

SEQ ID NO: 1699146 - RNA, 19 nt, Artificial Sequence
  Description of Artificial Sequence: Synthetic oligonucleotide
cggaaccgccucuuugcau

SEQ ID NO: 1699147 - RNA, 19 nt, Artificial Sequence
  Description of Artificial Sequence: Synthetic oligonucleotide
gccugcggaaccgccucuu

SEQ ID NO: 1699148 - RNA, 19 nt, Artificial Sequence
  Description of Artificial Sequence: Synthetic oligonucleotide
ccacaccuuuucgcaguau

SEQ ID NO: 1699149 - RNA, 19 nt, Artificial Sequence
  Description of Artificial Sequence: Synthetic oligonucleotide
aaaauaauuguuuaggacc

SEQ ID NO: 1699150 - RNA, 19 nt, Artificial Sequence
  Description of Artificial Sequence: Synthetic oligonucleotide
aaagguucuuuccaaaagc

SEQ ID NO: 1699151 - RNA, 19 nt, Artificial Sequence
  Description of Artificial Sequence: Synthetic oligonucleotide
ucagcuauuaccaagguac

SEQ ID NO: 1699152 - RNA, 19 nt, Artificial Sequence
  Description of Artificial Sequence: Synthetic oligonucleotide
uuuacagagaucuuguacc

SEQ ID NO: 1699153 - RNA, 19 nt, Artificial Sequence
  Description of Artificial Sequence: Synthetic oligonucleotide
uauuccaacagcaauauaa

SEQ ID NO: 1699154 - RNA, 19 nt, Artificial Sequence
  Description of Artificial Sequence: Synthetic oligonucleotide
aaaucaauggugucaguuc

SEQ ID NO: 1699155 - RNA, 19 nt, Artificial Sequence
  Description of Artificial Sequence: Synthetic oligonucleotide
uuaauagccacaauugucu

SEQ ID NO: 1699156 - RNA, 19 nt, Artificial Sequence
  Description of Artificial Sequence: Synthetic oligonucleotide
uauauuucuaugauuucag

SEQ ID NO: 1699157 - RNA, 19 nt, Artificial Sequence
  Description of Artificial Sequence: Synthetic oligonucleotide
uuuguuaauagccacaauu

SEQ ID NO: 1699158 - RNA, 19 nt, Artificial Sequence
  Description of Artificial Sequence: Synthetic oligonucleotide
aguucucacaaauguaucc

SEQ ID NO: 1699159 - RNA, 19 nt, Artificial Sequence
  Description of Artificial Sequence: Synthetic oligonucleotide
aaaagguucuuuccaaaag

SEQ ID NO: 1699160 - RNA, 19 nt, Artificial Sequence
  Description of Artificial Sequence: Synthetic oligonucleotide
ugaaaucggagcaaugagg

SEQ ID NO: 1699161 - RNA, 19 nt, Artificial Sequence
  Description of Artificial Sequence: Synthetic oligonucleotide
aaagaugucccucgaacag

SEQ ID NO: 1699162 - RNA, 19 nt, Artificial Sequence
  Description of Artificial Sequence: Synthetic oligonucleotide
uuugauaguuuccuuaaga

SEQ ID NO: 1699163 - RNA, 19 nt, Artificial Sequence
  Description of Artificial Sequence: Synthetic oligonucleotide
ugauaguaauuuuaaagga

SEQ ID NO: 1699164 - RNA, 19 nt, Artificial Sequence
  Description of Artificial Sequence: Synthetic oligonucleotide
aaucggagcaaugaggccg

SEQ ID NO: 1699165 - RNA, 19 nt, Artificial Sequence
  Description of Artificial Sequence: Synthetic oligonucleotide
ugguauuuagaguaauggg

SEQ ID NO: 1699166 - RNA, 19 nt, Artificial Sequence
  Description of Artificial Sequence: Synthetic oligonucleotide
acagagaucuuguaccacc

SEQ ID NO: 1699167 - RNA, 19 nt, Artificial Sequence
  Description of Artificial Sequence: Synthetic oligonucleotide
caguugaucugccagaucg

SEQ ID NO: 1699168 - RNA, 19 nt, Artificial Sequence
  Description of Artificial Sequence: Synthetic oligonucleotide
uuuugucaacuucugauca

SEQ ID NO: 1699169 - RNA, 19 nt, Artificial Sequence
  Description of Artificial Sequence: Synthetic oligonucleotide
aauggugucaguuccucug

SEQ ID NO: 1699170 - RNA, 19 nt, Artificial Sequence
  Description of Artificial Sequence: Synthetic oligonucleotide
agugaugguauuuagagua

SEQ ID NO: 1699171 - RNA, 19 nt, Artificial Sequence
  Description of Artificial Sequence: Synthetic oligonucleotide
aaaagaugucccucgaaca

SEQ ID NO: 1699172 - RNA, 19 nt, Artificial Sequence
  Description of Artificial Sequence: Synthetic oligonucleotide
agcaauauaaaguucuggu

SEQ ID NO: 1699173 - RNA, 19 nt, Artificial Sequence
  Description of Artificial Sequence: Synthetic oligonucleotide
auagccacaauugucuugc

SEQ ID NO: 1699174 - RNA, 19 nt, Artificial Sequence
  Description of Artificial Sequence: Synthetic oligonucleotide
aaacaaaucugcaacuauc

SEQ ID NO: 1699175 - RNA, 19 nt, Artificial Sequence
  Description of Artificial Sequence: Synthetic oligonucleotide
uggaaggaggccuuuauag

SEQ ID NO: 1699176 - RNA, 19 nt, Artificial Sequence
  Description of Artificial Sequence: Synthetic oligonucleotide
gaauaauugauucaucaaa

SEQ ID NO: 1699177 - RNA, 19 nt, Artificial Sequence
  Description of Artificial Sequence: Synthetic oligonucleotide
uuauauuucuaugauuuca

SEQ ID NO: 1699178 - RNA, 19 nt, Artificial Sequence
  Description of Artificial Sequence: Synthetic oligonucleotide
uggggcaacaucaaguuug

SEQ ID NO: 1699179 - RNA, 19 nt, Artificial Sequence
  Description of Artificial Sequence: Synthetic oligonucleotide
uacaguagcuuaaaguucu

SEQ ID NO: 1699180 - RNA, 19 nt, Artificial Sequence
  Description of Artificial Sequence: Synthetic oligonucleotide
uguacccucggccucagcg

SEQ ID NO: 1699181 - RNA, 19 nt, Artificial Sequence
  Description of Artificial Sequence: Synthetic oligonucleotide
uaaucugccacuuggaaaa

SEQ ID NO: 1699182 - RNA, 19 nt, Artificial Sequence
  Description of Artificial Sequence: Synthetic oligonucleotide
ugaacuagcacuaccucca

SEQ ID NO: 1699183 - RNA, 19 nt, Artificial Sequence
  Description of Artificial Sequence: Synthetic oligonucleotide
aggaauaauugauucauca

SEQ ID NO: 1699184 - RNA, 19 nt, Artificial Sequence
  Description of Artificial Sequence: Synthetic oligonucleotide
aaauaauuguuuaggacca

SEQ ID NO: 1699185 - RNA, 19 nt, Artificial Sequence
  Description of Artificial Sequence: Synthetic oligonucleotide
aacuaucccauaaucugcc

SEQ ID NO: 1699186 - RNA, 19 nt, Artificial Sequence
  Description of Artificial Sequence: Synthetic oligonucleotide
ugucugaccaacuugcaug

SEQ ID NO: 1699187 - RNA, 19 nt, Artificial Sequence
  Description of Artificial Sequence: Synthetic oligonucleotide
caaaaggcauucuagcugc

SEQ ID NO: 1699188 - RNA, 19 nt, Artificial Sequence
  Description of Artificial Sequence: Synthetic oligonucleotide
aaaucggagcaaugaggcc

SEQ ID NO: 1699189 - RNA, 19 nt, Artificial Sequence
  Description of Artificial Sequence: Synthetic oligonucleotide
ucuauagucagcccagcug

SEQ ID NO: 1699190 - RNA, 19 nt, Artificial Sequence
  Description of Artificial Sequence: Synthetic oligonucleotide
gaaaucggagcaaugaggc

SEQ ID NO: 1699191 - RNA, 19 nt, Artificial Sequence
  Description of Artificial Sequence: Synthetic oligonucleotide
uccagauauuccaacagca

SEQ ID NO: 1699192 - RNA, 19 nt, Artificial Sequence
  Description of Artificial Sequence: Synthetic oligonucleotide
agcaggacacuucaccucc

SEQ ID NO: 1699193 - RNA, 19 nt, Artificial Sequence
  Description of Artificial Sequence: Synthetic oligonucleotide
aagacguccagcugcagug

SEQ ID NO: 1699194 - RNA, 19 nt, Artificial Sequence
  Description of Artificial Sequence: Synthetic oligonucleotide
aaucauuugcaugcucagc

SEQ ID NO: 1699195 - RNA, 19 nt, Artificial Sequence
  Description of Artificial Sequence: Synthetic oligonucleotide
aaccuuugcaacuccagcu

SEQ ID NO: 1699196 - RNA, 19 nt, Artificial Sequence
  Description of Artificial Sequence: Synthetic oligonucleotide
aguaauuuuaaaggaugac

SEQ ID NO: 1699197 - RNA, 19 nt, Artificial Sequence
  Description of Artificial Sequence: Synthetic oligonucleotide
caucaaaaggcauucuagc

SEQ ID NO: 1699198 - RNA, 19 nt, Artificial Sequence
  Description of Artificial Sequence: Synthetic oligonucleotide
ucacaaauguauccgguga

SEQ ID NO: 1699199 - RNA, 19 nt, Artificial Sequence
  Description of Artificial Sequence: Synthetic oligonucleotide
cucucaucacacuuuacgg

SEQ ID NO: 1699200 - RNA, 19 nt, Artificial Sequence
  Description of Artificial Sequence: Synthetic oligonucleotide
aagccacucugauauuccc

SEQ ID NO: 1699201 - RNA, 19 nt, Artificial Sequence
  Description of Artificial Sequence: Synthetic oligonucleotide
agaaauuggggcaacauca

SEQ ID NO: 1699202 - RNA, 19 nt, Artificial Sequence
  Description of Artificial Sequence: Synthetic oligonucleotide
ugcaacuaucccauaaucu

SEQ ID NO: 1699203 - RNA, 19 nt, Artificial Sequence
  Description of Artificial Sequence: Synthetic oligonucleotide
ugccagaucguacaguagc

SEQ ID NO: 1699204 - RNA, 19 nt, Artificial Sequence
  Description of Artificial Sequence: Synthetic oligonucleotide
uauuuagaguaaugggugc

SEQ ID NO: 1699205 - RNA, 19 nt, Artificial Sequence
  Description of Artificial Sequence: Synthetic oligonucleotide
cacuuuacgguacacaaug

SEQ ID NO: 1699206 - RNA, 19 nt, Artificial Sequence
  Description of Artificial Sequence: Synthetic oligonucleotide
cuaagcaggacacuucacc

SEQ ID NO: 1699207 - RNA, 19 nt, Artificial Sequence
  Description of Artificial Sequence: Synthetic oligonucleotide
ugcuagagaaucauuugca

SEQ ID NO: 1699208 - RNA, 19 nt, Artificial Sequence
  Description of Artificial Sequence: Synthetic oligonucleotide
aaauguauccggugacuug

SEQ ID NO: 1699209 - RNA, 19 nt, Artificial Sequence
  Description of Artificial Sequence: Synthetic oligonucleotide
gauaguuuccuuaagauau

SEQ ID NO: 1699210 - RNA, 19 nt, Artificial Sequence
  Description of Artificial Sequence: Synthetic oligonucleotide
aauguauccggugacuuga

SEQ ID NO: 1699211 - RNA, 19 nt, Artificial Sequence
  Description of Artificial Sequence: Synthetic oligonucleotide
accaccuugucacauuugg

SEQ ID NO: 1699212 - RNA, 19 nt, Artificial Sequence
  Description of Artificial Sequence: Synthetic oligonucleotide
gaugucagaaauuggggca

SEQ ID NO: 1699213 - RNA, 19 nt, Artificial Sequence
  Description of Artificial Sequence: Synthetic oligonucleotide
uuuacgguacacaaugcau

SEQ ID NO: 1699214 - RNA, 19 nt, Artificial Sequence
  Description of Artificial Sequence: Synthetic oligonucleotide
aaauuggggcaacaucaag

SEQ ID NO: 1699215 - RNA, 19 nt, Artificial Sequence
  Description of Artificial Sequence: Synthetic oligonucleotide
guauuuagaguaaugggug

SEQ ID NO: 1699216 - RNA, 19 nt, Artificial Sequence
  Description of Artificial Sequence: Synthetic oligonucleotide
aauuggagcuucugggucu

SEQ ID NO: 1699217 - RNA, 19 nt, Artificial Sequence
  Description of Artificial Sequence: Synthetic oligonucleotide
uucugaacuagcacuaccu

SEQ ID NO: 1699218 - RNA, 19 nt, Artificial Sequence
  Description of Artificial Sequence: Synthetic oligonucleotide
caccgguuaauucuggucg

SEQ ID NO: 1699219 - RNA, 19 nt, Artificial Sequence
  Description of Artificial Sequence: Synthetic oligonucleotide
uucucacaaauguauccgg

SEQ ID NO: 1699220 - RNA, 19 nt, Artificial Sequence
  Description of Artificial Sequence: Synthetic oligonucleotide
uuaaaguucuccccacucu

SEQ ID NO: 1699221 - RNA, 19 nt, Artificial Sequence
  Description of Artificial Sequence: Synthetic oligonucleotide
guuagcauacuuucuuucc

SEQ ID NO: 1699222 - RNA, 19 nt, Artificial Sequence
  Description of Artificial Sequence: Synthetic oligonucleotide
ucguacaguagcuuaaagu

SEQ ID NO: 1699223 - RNA, 19 nt, Artificial Sequence
  Description of Artificial Sequence: Synthetic oligonucleotide
uuuugauaguuuccuuaag

SEQ ID NO: 1699224 - RNA, 19 nt, Artificial Sequence
  Description of Artificial Sequence: Synthetic oligonucleotide
aucaaaaggcauucuagcu

SEQ ID NO: 1699225 - RNA, 19 nt, Artificial Sequence
  Description of Artificial Sequence: Synthetic oligonucleotide
aaaaucaauggugucaguu

SEQ ID NO: 1699226 - RNA, 19 nt, Artificial Sequence
  Description of Artificial Sequence: Synthetic oligonucleotide
aauuggggcaacaucaagu

SEQ ID NO: 1699227 - RNA, 19 nt, Artificial Sequence
  Description of Artificial Sequence: Synthetic oligonucleotide
uagauaguucucacaaaug

SEQ ID NO: 1699228 - RNA, 19 nt, Artificial Sequence
  Description of Artificial Sequence: Synthetic oligonucleotide
accuugucacauuugguuc

SEQ ID NO: 1699229 - RNA, 19 nt, Artificial Sequence
  Description of Artificial Sequence: Synthetic oligonucleotide
uacuaagcaggacacuuca

SEQ ID NO: 1699230 - RNA, 19 nt, Artificial Sequence
  Description of Artificial Sequence: Synthetic oligonucleotide
gaaucauuugcaugcucag

SEQ ID NO: 1699231 - RNA, 19 nt, Artificial Sequence
  Description of Artificial Sequence: Synthetic oligonucleotide
gagaucuuguaccaccuug

SEQ ID NO: 1699232 - RNA, 19 nt, Artificial Sequence
  Description of Artificial Sequence: Synthetic oligonucleotide
aauaauuguuuaggaccac

SEQ ID NO: 1699233 - RNA, 19 nt, Artificial Sequence
  Description of Artificial Sequence: Synthetic oligonucleotide
uaccaagguacucugaaau

SEQ ID NO: 1699234 - RNA, 19 nt, Artificial Sequence
  Description of Artificial Sequence: Synthetic oligonucleotide
gaucaagccacucugauau

SEQ ID NO: 1699235 - RNA, 19 nt, Artificial Sequence
  Description of Artificial Sequence: Synthetic oligonucleotide
caacuaucccauaaucugc

SEQ ID NO: 1699236 - RNA, 19 nt, Artificial Sequence
  Description of Artificial Sequence: Synthetic oligonucleotide
aaguuuggcugcuacucug

SEQ ID NO: 1699237 - RNA, 19 nt, Artificial Sequence
  Description of Artificial Sequence: Synthetic oligonucleotide
agaguaaugggugcuagag

SEQ ID NO: 1699238 - RNA, 19 nt, Artificial Sequence
  Description of Artificial Sequence: Synthetic oligonucleotide
aagcaggacacuucaccuc

SEQ ID NO: 1699239 - RNA, 19 nt, Artificial Sequence
  Description of Artificial Sequence: Synthetic oligonucleotide
uagcuuaaaguucucccca

SEQ ID NO: 1699240 - RNA, 19 nt, Artificial Sequence
  Description of Artificial Sequence: Synthetic oligonucleotide
guucucacaaauguauccg

SEQ ID NO: 1699241 - RNA, 19 nt, Artificial Sequence
  Description of Artificial Sequence: Synthetic oligonucleotide
auugauucaucaaaaggca

SEQ ID NO: 1699242 - RNA, 19 nt, Artificial Sequence
  Description of Artificial Sequence: Synthetic oligonucleotide
uggucuauagucagcccag

SEQ ID NO: 1699243 - RNA, 19 nt, Artificial Sequence
  Description of Artificial Sequence: Synthetic oligonucleotide
acuugcaugucauugggaa

SEQ ID NO: 1699244 - RNA, 19 nt, Artificial Sequence
  Description of Artificial Sequence: Synthetic oligonucleotide
gaugacaaaacuuuauuuu

SEQ ID NO: 1699245 - RNA, 19 nt, Artificial Sequence
  Description of Artificial Sequence: Synthetic oligonucleotide
ucucaucacacuuuacggu

SEQ ID NO: 1699246 - RNA, 19 nt, Artificial Sequence
  Description of Artificial Sequence: Synthetic oligonucleotide
caaaucugcaacuauccca

SEQ ID NO: 1699247 - RNA, 19 nt, Artificial Sequence
  Description of Artificial Sequence: Synthetic oligonucleotide
auaaucugccacuuggaaa

SEQ ID NO: 1699248 - RNA, 19 nt, Artificial Sequence
  Description of Artificial Sequence: Synthetic oligonucleotide
uguugaauggcuccagaua

SEQ ID NO: 1699249 - RNA, 19 nt, Artificial Sequence
  Description of Artificial Sequence: Synthetic oligonucleotide
uuaauucuggucgaucacu

SEQ ID NO: 1699250 - RNA, 19 nt, Artificial Sequence
  Description of Artificial Sequence: Synthetic oligonucleotide
accaagguacucugaaauc

SEQ ID NO: 1699251 - RNA, 19 nt, Artificial Sequence
  Description of Artificial Sequence: Synthetic oligonucleotide
auugaacugcuucugaguu

SEQ ID NO: 1699252 - RNA, 19 nt, Artificial Sequence
  Description of Artificial Sequence: Synthetic oligonucleotide
acuuuugauaguuuccuua

SEQ ID NO: 1699253 - RNA, 19 nt, Artificial Sequence
  Description of Artificial Sequence: Synthetic oligonucleotide
uauaaaguucuggugcuac

SEQ ID NO: 1699254 - RNA, 19 nt, Artificial Sequence
  Description of Artificial Sequence: Synthetic oligonucleotide
guuaauagccacaauuguc

SEQ ID NO: 1699255 - RNA, 19 nt, Artificial Sequence
  Description of Artificial Sequence: Synthetic oligonucleotide
agcuuaaaguucuccccac

SEQ ID NO: 1699256 - RNA, 19 nt, Artificial Sequence
  Description of Artificial Sequence: Synthetic oligonucleotide
ccuuaaacaaaucugcaac

SEQ ID NO: 1699257 - RNA, 19 nt, Artificial Sequence
  Description of Artificial Sequence: Synthetic oligonucleotide
ugucccucgaacagaaaac

SEQ ID NO: 1699258 - RNA, 19 nt, Artificial Sequence
  Description of Artificial Sequence: Synthetic oligonucleotide
uaaauguugaauggcucca

SEQ ID NO: 1699259 - RNA, 19 nt, Artificial Sequence
  Description of Artificial Sequence: Synthetic oligonucleotide
ucaaguuuggcugcuacuc

SEQ ID NO: 1699260 - RNA, 19 nt, Artificial Sequence
  Description of Artificial Sequence: Synthetic oligonucleotide
acucugauauucccacugg

SEQ ID NO: 1699261 - RNA, 19 nt, Artificial Sequence
  Description of Artificial Sequence: Synthetic oligonucleotide
uguuagcauacuuucuuuc

SEQ ID NO: 1699262 - RNA, 19 nt, Artificial Sequence
  Description of Artificial Sequence: Synthetic oligonucleotide
gaugcuccagcacagaugu

SEQ ID NO: 1699263 - RNA, 19 nt, Artificial Sequence
  Description of Artificial Sequence: Synthetic oligonucleotide
uuacgguacacaaugcauu

SEQ ID NO: 1699264 - RNA, 19 nt, Artificial Sequence
  Description of Artificial Sequence: Synthetic oligonucleotide
cuagcugcuguuagcauac

SEQ ID NO: 1699265 - RNA, 19 nt, Artificial Sequence
  Description of Artificial Sequence: Synthetic oligonucleotide
auacuuuugauaguuuccu

SEQ ID NO: 1699266 - RNA, 19 nt, Artificial Sequence
  Description of Artificial Sequence: Synthetic oligonucleotide
auaguucucacaaauguau

SEQ ID NO: 1699267 - RNA, 19 nt, Artificial Sequence
  Description of Artificial Sequence: Synthetic oligonucleotide
ugcauagauaguucucaca

SEQ ID NO: 1699268 - RNA, 19 nt, Artificial Sequence
  Description of Artificial Sequence: Synthetic oligonucleotide
agaaucauuugcaugcuca

SEQ ID NO: 1699269 - RNA, 19 nt, Artificial Sequence
  Description of Artificial Sequence: Synthetic oligonucleotide
ggugacuugaucucaauga

SEQ ID NO: 1699270 - RNA, 19 nt, Artificial Sequence
  Description of Artificial Sequence: Synthetic oligonucleotide
acuagcacuaccuccacuu

SEQ ID NO: 1699271 - RNA, 19 nt, Artificial Sequence
  Description of Artificial Sequence: Synthetic oligonucleotide
uugucaacuucugaucaag

SEQ ID NO: 1699272 - RNA, 19 nt, Artificial Sequence
  Description of Artificial Sequence: Synthetic oligonucleotide
ucugcaacuaucccauaau

SEQ ID NO: 1699273 - RNA, 19 nt, Artificial Sequence
  Description of Artificial Sequence: Synthetic oligonucleotide
cuuaaaguucuccccacuc

SEQ ID NO: 1699274 - RNA, 19 nt, Artificial Sequence
  Description of Artificial Sequence: Synthetic oligonucleotide
uaaugggugcuagagaauc

SEQ ID NO: 1699275 - RNA, 19 nt, Artificial Sequence
  Description of Artificial Sequence: Synthetic oligonucleotide
guacacaaugcauuuccug

SEQ ID NO: 1699276 - RNA, 19 nt, Artificial Sequence
  Description of Artificial Sequence: Synthetic oligonucleotide
auacuuucuuuccucagau

SEQ ID NO: 1699277 - RNA, 19 nt, Artificial Sequence
  Description of Artificial Sequence: Synthetic oligonucleotide
uaaaguucuccccacucuu

SEQ ID NO: 1699278 - RNA, 19 nt, Artificial Sequence
  Description of Artificial Sequence: Synthetic oligonucleotide
cucacaaauguauccggug

SEQ ID NO: 1699279 - RNA, 19 nt, Artificial Sequence
  Description of Artificial Sequence: Synthetic oligonucleotide
ucugaucaagccacucuga

SEQ ID NO: 1699280 - RNA, 19 nt, Artificial Sequence
  Description of Artificial Sequence: Synthetic oligonucleotide
ucugaacuagcacuaccuc

SEQ ID NO: 1699281 - RNA, 19 nt, Artificial Sequence
  Description of Artificial Sequence: Synthetic oligonucleotide
ucuucaagccccgaccacc

SEQ ID NO: 1699282 - RNA, 19 nt, Artificial Sequence
  Description of Artificial Sequence: Synthetic oligonucleotide
ucuagcugcuguuagcaua

SEQ ID NO: 1699283 - RNA, 19 nt, Artificial Sequence
  Description of Artificial Sequence: Synthetic oligonucleotide
ugauauucccacuggugaa

SEQ ID NO: 1699284 - RNA, 19 nt, Artificial Sequence
  Description of Artificial Sequence: Synthetic oligonucleotide
ugggaacaaagccagcauc

SEQ ID NO: 1699285 - RNA, 19 nt, Artificial Sequence
  Description of Artificial Sequence: Synthetic oligonucleotide
auugucucuggucuauagu

SEQ ID NO: 1699286 - RNA, 19 nt, Artificial Sequence
  Description of Artificial Sequence: Synthetic oligonucleotide
acacaaugcauuuccugca

SEQ ID NO: 1699287 - RNA, 19 nt, Artificial Sequence
  Description of Artificial Sequence: Synthetic oligonucleotide
ugaauggcuccagauauuc

SEQ ID NO: 1699288 - RNA, 19 nt, Artificial Sequence
  Description of Artificial Sequence: Synthetic oligonucleotide
gguuccagcuacuaagcag

SEQ ID NO: 1699289 - RNA, 19 nt, Artificial Sequence
  Description of Artificial Sequence: Synthetic oligonucleotide
auuggggcaacaucaaguu

SEQ ID NO: 1699290 - RNA, 19 nt, Artificial Sequence
  Description of Artificial Sequence: Synthetic oligonucleotide
uuggcaccgguuaauucug

SEQ ID NO: 1699291 - RNA, 19 nt, Artificial Sequence
  Description of Artificial Sequence: Synthetic oligonucleotide
uaguucucacaaauguauc

SEQ ID NO: 1699292 - RNA, 19 nt, Artificial Sequence
  Description of Artificial Sequence: Synthetic oligonucleotide
cauugucucuggucuauag

SEQ ID NO: 1699293 - RNA, 19 nt, Artificial Sequence
  Description of Artificial Sequence: Synthetic oligonucleotide
cacucugauauucccacug

SEQ ID NO: 1699294 - RNA, 19 nt, Artificial Sequence
  Description of Artificial Sequence: Synthetic oligonucleotide
caacaucaaguuuggcugc

SEQ ID NO: 1699295 - RNA, 19 nt, Artificial Sequence
  Description of Artificial Sequence: Synthetic oligonucleotide
guuaauucuggucgaucac

SEQ ID NO: 1699296 - RNA, 19 nt, Artificial Sequence
  Description of Artificial Sequence: Synthetic oligonucleotide
acuuuacgguacacaaugc

SEQ ID NO: 1699297 - RNA, 19 nt, Artificial Sequence
  Description of Artificial Sequence: Synthetic oligonucleotide
guacucugaaaucggagca

SEQ ID NO: 1699298 - RNA, 19 nt, Artificial Sequence
  Description of Artificial Sequence: Synthetic oligonucleotide
cagcaauauaaaguucugg

SEQ ID NO: 1699299 - RNA, 19 nt, Artificial Sequence
  Description of Artificial Sequence: Synthetic oligonucleotide
cucuggucuauagucagcc

SEQ ID NO: 1699300 - RNA, 19 nt, Artificial Sequence
  Description of Artificial Sequence: Synthetic oligonucleotide
cugcuguuagcauacuuuc

SEQ ID NO: 1699301 - RNA, 19 nt, Artificial Sequence
  Description of Artificial Sequence: Synthetic oligonucleotide
gauaguaauuuuaaaggau

SEQ ID NO: 1699302 - RNA, 19 nt, Artificial Sequence
  Description of Artificial Sequence: Synthetic oligonucleotide
cacuaccuccacuuguugc

SEQ ID NO: 1699303 - RNA, 19 nt, Artificial Sequence
  Description of Artificial Sequence: Synthetic oligonucleotide
ugaccaacuugcaugucau

SEQ ID NO: 1699304 - RNA, 19 nt, Artificial Sequence
  Description of Artificial Sequence: Synthetic oligonucleotide
uaauucuggucgaucacuu

SEQ ID NO: 1699305 - RNA, 19 nt, Artificial Sequence
  Description of Artificial Sequence: Synthetic oligonucleotide
uuugucaacuucugaucaa

SEQ ID NO: 1699306 - RNA, 19 nt, Artificial Sequence
  Description of Artificial Sequence: Synthetic oligonucleotide
aucguacaguagcuuaaag

SEQ ID NO: 1699307 - RNA, 19 nt, Artificial Sequence
  Description of Artificial Sequence: Synthetic oligonucleotide
ucugucauuucaggaacca

SEQ ID NO: 1699308 - RNA, 19 nt, Artificial Sequence
  Description of Artificial Sequence: Synthetic oligonucleotide
auuuagaguaaugggugcu

SEQ ID NO: 1699309 - RNA, 19 nt, Artificial Sequence
  Description of Artificial Sequence: Synthetic oligonucleotide
cuaucccauaaucugccac

SEQ ID NO: 1699310 - RNA, 19 nt, Artificial Sequence
  Description of Artificial Sequence: Synthetic oligonucleotide
cccauaaucugccacuugg

SEQ ID NO: 1699311 - RNA, 19 nt, Artificial Sequence
  Description of Artificial Sequence: Synthetic oligonucleotide
agcaaugaggccgcccgcc

SEQ ID NO: 1699312 - RNA, 19 nt, Artificial Sequence
  Description of Artificial Sequence: Synthetic oligonucleotide
gauguguguguaauugaac

SEQ ID NO: 1699313 - RNA, 19 nt, Artificial Sequence
  Description of Artificial Sequence: Synthetic oligonucleotide
agcuaaauguugaauggcu

SEQ ID NO: 1699314 - RNA, 19 nt, Artificial Sequence
  Description of Artificial Sequence: Synthetic oligonucleotide
guaauugaacugcuucuga

SEQ ID NO: 1699315 - RNA, 19 nt, Artificial Sequence
  Description of Artificial Sequence: Synthetic oligonucleotide
cuuuacgguacacaaugca

SEQ ID NO: 1699316 - RNA, 19 nt, Artificial Sequence
  Description of Artificial Sequence: Synthetic oligonucleotide
ccacuuggaaaauuggagc

SEQ ID NO: 1699317 - RNA, 19 nt, Artificial Sequence
  Description of Artificial Sequence: Synthetic oligonucleotide
ucuuuccucagauuauauu

SEQ ID NO: 1699318 - RNA, 19 nt, Artificial Sequence
  Description of Artificial Sequence: Synthetic oligonucleotide
cuugcaugucauugggaac

SEQ ID NO: 1699319 - RNA, 19 nt, Artificial Sequence
  Description of Artificial Sequence: Synthetic oligonucleotide
uuuuccugucugaccaacu

SEQ ID NO: 1699320 - RNA, 19 nt, Artificial Sequence
  Description of Artificial Sequence: Synthetic oligonucleotide
aaugaggccgcccgccgga

SEQ ID NO: 1699321 - RNA, 19 nt, Artificial Sequence
  Description of Artificial Sequence: Synthetic oligonucleotide
uuuccugucugaccaacuu

SEQ ID NO: 1699322 - RNA, 19 nt, Artificial Sequence
  Description of Artificial Sequence: Synthetic oligonucleotide
aagaugucccucgaacaga

SEQ ID NO: 1699323 - RNA, 19 nt, Artificial Sequence
  Description of Artificial Sequence: Synthetic oligonucleotide
ucaagccacucugauauuc

SEQ ID NO: 1699324 - RNA, 19 nt, Artificial Sequence
  Description of Artificial Sequence: Synthetic oligonucleotide
ggugcuagagaaucauuug

SEQ ID NO: 1699325 - RNA, 19 nt, Artificial Sequence
  Description of Artificial Sequence: Synthetic oligonucleotide
auagucagcccagcuguac

SEQ ID NO: 1699326 - RNA, 19 nt, Artificial Sequence
  Description of Artificial Sequence: Synthetic oligonucleotide
uggaaaauuggagcuucug

SEQ ID NO: 1699327 - RNA, 19 nt, Artificial Sequence
  Description of Artificial Sequence: Synthetic oligonucleotide
ucaagccccgaccaccaga

SEQ ID NO: 1699328 - RNA, 19 nt, Artificial Sequence
  Description of Artificial Sequence: Synthetic oligonucleotide
gcauagauaguucucacaa

SEQ ID NO: 1699329 - RNA, 19 nt, Artificial Sequence
  Description of Artificial Sequence: Synthetic oligonucleotide
auugucuugcuguccuuca

SEQ ID NO: 1699330 - RNA, 19 nt, Artificial Sequence
  Description of Artificial Sequence: Synthetic oligonucleotide
cucggaacauugucucugg

SEQ ID NO: 1699331 - RNA, 19 nt, Artificial Sequence
  Description of Artificial Sequence: Synthetic oligonucleotide
uauccggugacuugaucuc

SEQ ID NO: 1699332 - RNA, 19 nt, Artificial Sequence
  Description of Artificial Sequence: Synthetic oligonucleotide
uacgguacacaaugcauuu

SEQ ID NO: 1699333 - RNA, 19 nt, Artificial Sequence
  Description of Artificial Sequence: Synthetic oligonucleotide
aucugcaacuaucccauaa

SEQ ID NO: 1699334 - RNA, 19 nt, Artificial Sequence
  Description of Artificial Sequence: Synthetic oligonucleotide
cccagcuaaauguugaaug

SEQ ID NO: 1699335 - RNA, 19 nt, Artificial Sequence
  Description of Artificial Sequence: Synthetic oligonucleotide
ucacacuuuacgguacaca

SEQ ID NO: 1699336 - RNA, 19 nt, Artificial Sequence
  Description of Artificial Sequence: Synthetic oligonucleotide
guauccggugacuugaucu

SEQ ID NO: 1699337 - RNA, 19 nt, Artificial Sequence
  Description of Artificial Sequence: Synthetic oligonucleotide
cauacuuucuuuccucaga

SEQ ID NO: 1699338 - RNA, 19 nt, Artificial Sequence
  Description of Artificial Sequence: Synthetic oligonucleotide
aacuagcacuaccuccacu

SEQ ID NO: 1699339 - RNA, 19 nt, Artificial Sequence
  Description of Artificial Sequence: Synthetic oligonucleotide
cugggucuuuguuaauagc

SEQ ID NO: 1699340 - RNA, 19 nt, Artificial Sequence
  Description of Artificial Sequence: Synthetic oligonucleotide
agcuauuaccaagguacuc

SEQ ID NO: 1699341 - RNA, 19 nt, Artificial Sequence
  Description of Artificial Sequence: Synthetic oligonucleotide
caucaaguuuggcugcuac

SEQ ID NO: 1699342 - RNA, 19 nt, Artificial Sequence
  Description of Artificial Sequence: Synthetic oligonucleotide
gguauuuagaguaaugggu

SEQ ID NO: 1699343 - RNA, 19 nt, Artificial Sequence
  Description of Artificial Sequence: Synthetic oligonucleotide
cuacuaagcaggacacuuc

SEQ ID NO: 1699344 - RNA, 19 nt, Artificial Sequence
  Description of Artificial Sequence: Synthetic oligonucleotide
ucccucgaacagaaaacac

SEQ ID NO: 1699345 - RNA, 19 nt, Artificial Sequence
  Description of Artificial Sequence: Synthetic oligonucleotide
aaacaccuucacucucuca

SEQ ID NO: 1699346 - RNA, 19 nt, Artificial Sequence
  Description of Artificial Sequence: Synthetic oligonucleotide
ccucaaaagaugucccucg

SEQ ID NO: 1699347 - RNA, 19 nt, Artificial Sequence
  Description of Artificial Sequence: Synthetic oligonucleotide
cagcuacuaagcaggacac

SEQ ID NO: 1699348 - RNA, 19 nt, Artificial Sequence
  Description of Artificial Sequence: Synthetic oligonucleotide
aacauugucucuggucuau

SEQ ID NO: 1699349 - RNA, 19 nt, Artificial Sequence
  Description of Artificial Sequence: Synthetic oligonucleotide
ugaucaagccacucugaua

SEQ ID NO: 1699350 - RNA, 19 nt, Artificial Sequence
  Description of Artificial Sequence: Synthetic oligonucleotide
ucuggucuauagucagccc

SEQ ID NO: 1699351 - RNA, 19 nt, Artificial Sequence
  Description of Artificial Sequence: Synthetic oligonucleotide
ugguuccagcuacuaagca

SEQ ID NO: 1699352 - RNA, 19 nt, Artificial Sequence
  Description of Artificial Sequence: Synthetic oligonucleotide
uuucuuuccucagauuaua

SEQ ID NO: 1699353 - RNA, 19 nt, Artificial Sequence
  Description of Artificial Sequence: Synthetic oligonucleotide
cuggucuauagucagccca

SEQ ID NO: 1699354 - RNA, 19 nt, Artificial Sequence
  Description of Artificial Sequence: Synthetic oligonucleotide
cugcaacuaucccauaauc

SEQ ID NO: 1699355 - RNA, 19 nt, Artificial Sequence
  Description of Artificial Sequence: Synthetic oligonucleotide
uuggaaaauuggagcuucu

SEQ ID NO: 1699356 - RNA, 19 nt, Artificial Sequence
  Description of Artificial Sequence: Synthetic oligonucleotide
acuucugaucaagccacuc

SEQ ID NO: 1699357 - RNA, 19 nt, Artificial Sequence
  Description of Artificial Sequence: Synthetic oligonucleotide
aacaucaaguuuggcugcu

SEQ ID NO: 1699358 - RNA, 19 nt, Artificial Sequence
  Description of Artificial Sequence: Synthetic oligonucleotide
uuuagaguaaugggugcua

SEQ ID NO: 1699359 - RNA, 19 nt, Artificial Sequence
  Description of Artificial Sequence: Synthetic oligonucleotide
acaaauguauccggugacu

SEQ ID NO: 1699360 - RNA, 19 nt, Artificial Sequence
  Description of Artificial Sequence: Synthetic oligonucleotide
ggaauaauugauucaucaa

SEQ ID NO: 1699361 - RNA, 19 nt, Artificial Sequence
  Description of Artificial Sequence: Synthetic oligonucleotide
uuugcaugcucagcuauua

SEQ ID NO: 1699362 - RNA, 19 nt, Artificial Sequence
  Description of Artificial Sequence: Synthetic oligonucleotide
cccucgaacagaaaacacc

SEQ ID NO: 1699363 - RNA, 19 nt, Artificial Sequence
  Description of Artificial Sequence: Synthetic oligonucleotide
cuauagucagcccagcugu

SEQ ID NO: 1699364 - RNA, 19 nt, Artificial Sequence
  Description of Artificial Sequence: Synthetic oligonucleotide
ucuaugauuucagcugaau

SEQ ID NO: 1699365 - RNA, 19 nt, Artificial Sequence
  Description of Artificial Sequence: Synthetic oligonucleotide
gccucagcgacccggagcg

SEQ ID NO: 1699366 - RNA, 19 nt, Artificial Sequence
  Description of Artificial Sequence: Synthetic oligonucleotide
aucggagcaaugaggccgc

SEQ ID NO: 1699367 - RNA, 19 nt, Artificial Sequence
  Description of Artificial Sequence: Synthetic oligonucleotide
caucccagcuaaauguuga

SEQ ID NO: 1699368 - RNA, 19 nt, Artificial Sequence
  Description of Artificial Sequence: Synthetic oligonucleotide
cugaccaacuugcauguca

SEQ ID NO: 1699369 - RNA, 19 nt, Artificial Sequence
  Description of Artificial Sequence: Synthetic oligonucleotide
gccacuuggaaaauuggag

SEQ ID NO: 1699370 - RNA, 19 nt, Artificial Sequence
  Description of Artificial Sequence: Synthetic oligonucleotide
aucacacuuuacgguacac

SEQ ID NO: 1699371 - RNA, 19 nt, Artificial Sequence
  Description of Artificial Sequence: Synthetic oligonucleotide
agaucuuguaccaccuugu

SEQ ID NO: 1699372 - RNA, 19 nt, Artificial Sequence
  Description of Artificial Sequence: Synthetic oligonucleotide
gcagccucaaaagaugucc

SEQ ID NO: 1699373 - RNA, 19 nt, Artificial Sequence
  Description of Artificial Sequence: Synthetic oligonucleotide
cugcucggaacauugucuc

SEQ ID NO: 1699374 - RNA, 19 nt, Artificial Sequence
  Description of Artificial Sequence: Synthetic oligonucleotide
aagguacucugaaaucgga

SEQ ID NO: 1699375 - RNA, 19 nt, Artificial Sequence
  Description of Artificial Sequence: Synthetic oligonucleotide
gagaaucauuugcaugcuc

SEQ ID NO: 1699376 - RNA, 19 nt, Artificial Sequence
  Description of Artificial Sequence: Synthetic oligonucleotide
agauguguguguaauugaa

SEQ ID NO: 1699377 - RNA, 19 nt, Artificial Sequence
  Description of Artificial Sequence: Synthetic oligonucleotide
cauaaucugccacuuggaa

SEQ ID NO: 1699378 - RNA, 19 nt, Artificial Sequence
  Description of Artificial Sequence: Synthetic oligonucleotide
accaacugcagcgugcagu

SEQ ID NO: 1699379 - RNA, 19 nt, Artificial Sequence
  Description of Artificial Sequence: Synthetic oligonucleotide
uugcaugcucagcuauuac

SEQ ID NO: 1699380 - RNA, 19 nt, Artificial Sequence
  Description of Artificial Sequence: Synthetic oligonucleotide
ucccauaaucugccacuug

SEQ ID NO: 1699381 - RNA, 19 nt, Artificial Sequence
  Description of Artificial Sequence: Synthetic oligonucleotide
caccuuaaacaaaucugca

SEQ ID NO: 1699382 - RNA, 19 nt, Artificial Sequence
  Description of Artificial Sequence: Synthetic oligonucleotide
ugaugguauuuagaguaau

SEQ ID NO: 1699383 - RNA, 19 nt, Artificial Sequence
  Description of Artificial Sequence: Synthetic oligonucleotide
acuaagcaggacacuucac

SEQ ID NO: 1699384 - RNA, 19 nt, Artificial Sequence
  Description of Artificial Sequence: Synthetic oligonucleotide
auaguuuccuuaagauaug

SEQ ID NO: 1699385 - RNA, 19 nt, Artificial Sequence
  Description of Artificial Sequence: Synthetic oligonucleotide
auuucaggaaccaccuuaa

SEQ ID NO: 1699386 - RNA, 19 nt, Artificial Sequence
  Description of Artificial Sequence: Synthetic oligonucleotide
uacuuuugauaguuuccuu

SEQ ID NO: 1699387 - RNA, 19 nt, Artificial Sequence
  Description of Artificial Sequence: Synthetic oligonucleotide
uuucaggaaccaccuuaaa

SEQ ID NO: 1699388 - RNA, 19 nt, Artificial Sequence
  Description of Artificial Sequence: Synthetic oligonucleotide
accgguuaauucuggucga

SEQ ID NO: 1699389 - RNA, 19 nt, Artificial Sequence
  Description of Artificial Sequence: Synthetic oligonucleotide
acucucucaucacacuuua

SEQ ID NO: 1699390 - RNA, 19 nt, Artificial Sequence
  Description of Artificial Sequence: Synthetic oligonucleotide
cacuuggaaaauuggagcu

SEQ ID NO: 1699391 - RNA, 19 nt, Artificial Sequence
  Description of Artificial Sequence: Synthetic oligonucleotide
uccagcugcagugauggua

SEQ ID NO: 1699392 - RNA, 19 nt, Artificial Sequence
  Description of Artificial Sequence: Synthetic oligonucleotide
acuaucccauaaucugcca

SEQ ID NO: 1699393 - RNA, 19 nt, Artificial Sequence
  Description of Artificial Sequence: Synthetic oligonucleotide
agaugcuccagcacagaug

SEQ ID NO: 1699394 - RNA, 19 nt, Artificial Sequence
  Description of Artificial Sequence: Synthetic oligonucleotide
uguaccaccuugucacauu

SEQ ID NO: 1699395 - RNA, 19 nt, Artificial Sequence
  Description of Artificial Sequence: Synthetic oligonucleotide
ugaucucaaugaugucaga

SEQ ID NO: 1699396 - RNA, 19 nt, Artificial Sequence
  Description of Artificial Sequence: Synthetic oligonucleotide
gcauucuagcugcuguuag

SEQ ID NO: 1699397 - RNA, 19 nt, Artificial Sequence
  Description of Artificial Sequence: Synthetic oligonucleotide
cauugggaacaaagccagc

SEQ ID NO: 1699398 - RNA, 19 nt, Artificial Sequence
  Description of Artificial Sequence: Synthetic oligonucleotide
gaaauuggggcaacaucaa

SEQ ID NO: 1699399 - RNA, 19 nt, Artificial Sequence
  Description of Artificial Sequence: Synthetic oligonucleotide
agagaaucauuugcaugcu

SEQ ID NO: 1699400 - RNA, 19 nt, Artificial Sequence
  Description of Artificial Sequence: Synthetic oligonucleotide
ccagcuacuaagcaggaca

SEQ ID NO: 1699401 - RNA, 19 nt, Artificial Sequence
  Description of Artificial Sequence: Synthetic oligonucleotide
cuagcacuaccuccacuug

SEQ ID NO: 1699402 - RNA, 19 nt, Artificial Sequence
  Description of Artificial Sequence: Synthetic oligonucleotide
aacuugcaugucauuggga

SEQ ID NO: 1699403 - RNA, 19 nt, Artificial Sequence
  Description of Artificial Sequence: Synthetic oligonucleotide
ugcagccucaaaagauguc

SEQ ID NO: 1699404 - RNA, 19 nt, Artificial Sequence
  Description of Artificial Sequence: Synthetic oligonucleotide
cauagauaguucucacaaa

SEQ ID NO: 1699405 - RNA, 19 nt, Artificial Sequence
  Description of Artificial Sequence: Synthetic oligonucleotide
cagauguguguguaauuga

SEQ ID NO: 1699406 - RNA, 19 nt, Artificial Sequence
  Description of Artificial Sequence: Synthetic oligonucleotide
uacccucggccucagcgac

SEQ ID NO: 1699407 - RNA, 19 nt, Artificial Sequence
  Description of Artificial Sequence: Synthetic oligonucleotide
uauagucagcccagcugua

SEQ ID NO: 1699408 - RNA, 19 nt, Artificial Sequence
  Description of Artificial Sequence: Synthetic oligonucleotide
cagcgugcaguugaucugc

SEQ ID NO: 1699409 - RNA, 19 nt, Artificial Sequence
  Description of Artificial Sequence: Synthetic oligonucleotide
uccggugacuugaucucaa

SEQ ID NO: 1699410 - RNA, 19 nt, Artificial Sequence
  Description of Artificial Sequence: Synthetic oligonucleotide
acgguacacaaugcauuuc

SEQ ID NO: 1699411 - RNA, 19 nt, Artificial Sequence
  Description of Artificial Sequence: Synthetic oligonucleotide
ucggaacauugucucuggu

SEQ ID NO: 1699412 - RNA, 19 nt, Artificial Sequence
  Description of Artificial Sequence: Synthetic oligonucleotide
cagaucguacaguagcuua

SEQ ID NO: 1699413 - RNA, 19 nt, Artificial Sequence
  Description of Artificial Sequence: Synthetic oligonucleotide
uucaagccccgaccaccag

SEQ ID NO: 1699414 - RNA, 19 nt, Artificial Sequence
  Description of Artificial Sequence: Synthetic oligonucleotide
acccggagcgcgcgggagc

SEQ ID NO: 1699415 - RNA, 19 nt, Artificial Sequence
  Description of Artificial Sequence: Synthetic oligonucleotide
ugcucggaacauugucucu

SEQ ID NO: 1699416 - RNA, 19 nt, Artificial Sequence
  Description of Artificial Sequence: Synthetic oligonucleotide
gggaacaaagccagcauca

SEQ ID NO: 1699417 - RNA, 19 nt, Artificial Sequence
  Description of Artificial Sequence: Synthetic oligonucleotide
agcacgggaagcaccaacu

SEQ ID NO: 1699418 - RNA, 19 nt, Artificial Sequence
  Description of Artificial Sequence: Synthetic oligonucleotide
cagaaaacaccuucacucu

SEQ ID NO: 1699419 - RNA, 19 nt, Artificial Sequence
  Description of Artificial Sequence: Synthetic oligonucleotide
agaucguacaguagcuuaa

SEQ ID NO: 1699420 - RNA, 19 nt, Artificial Sequence
  Description of Artificial Sequence: Synthetic oligonucleotide
ccuucaucccagcuaaaug

SEQ ID NO: 1699421 - RNA, 19 nt, Artificial Sequence
  Description of Artificial Sequence: Synthetic oligonucleotide
uuggggcaacaucaaguuu

SEQ ID NO: 1699422 - RNA, 19 nt, Artificial Sequence
  Description of Artificial Sequence: Synthetic oligonucleotide
uucuagcugcuguuagcau

SEQ ID NO: 1699423 - RNA, 19 nt, Artificial Sequence
  Description of Artificial Sequence: Synthetic oligonucleotide
acucugaaaucggagcaau

SEQ ID NO: 1699424 - RNA, 19 nt, Artificial Sequence
  Description of Artificial Sequence: Synthetic oligonucleotide
cugccagaucguacaguag

SEQ ID NO: 1699425 - RNA, 19 nt, Artificial Sequence
  Description of Artificial Sequence: Synthetic oligonucleotide
cugucauuucaggaaccac

SEQ ID NO: 1699426 - RNA, 19 nt, Artificial Sequence
  Description of Artificial Sequence: Synthetic oligonucleotide
uaccaccacuuuggcaccg

SEQ ID NO: 1699427 - RNA, 19 nt, Artificial Sequence
  Description of Artificial Sequence: Synthetic oligonucleotide
cugaauacuuuugauaguu

SEQ ID NO: 1699428 - RNA, 19 nt, Artificial Sequence
  Description of Artificial Sequence: Synthetic oligonucleotide
gaucguacaguagcuuaaa

SEQ ID NO: 1699429 - RNA, 19 nt, Artificial Sequence
  Description of Artificial Sequence: Synthetic oligonucleotide
gagcaaugaggccgcccgc

SEQ ID NO: 1699430 - RNA, 19 nt, Artificial Sequence
  Description of Artificial Sequence: Synthetic oligonucleotide
aacuucugaucaagccacu

SEQ ID NO: 1699431 - RNA, 19 nt, Artificial Sequence
  Description of Artificial Sequence: Synthetic oligonucleotide
uuguaccaccuugucacau

SEQ ID NO: 1699432 - RNA, 19 nt, Artificial Sequence
  Description of Artificial Sequence: Synthetic oligonucleotide
auauuccaacagcaauaua

SEQ ID NO: 1699433 - RNA, 19 nt, Artificial Sequence
  Description of Artificial Sequence: Synthetic oligonucleotide
ugggugcuagagaaucauu

SEQ ID NO: 1699434 - RNA, 19 nt, Artificial Sequence
  Description of Artificial Sequence: Synthetic oligonucleotide
agagaucuuguaccaccuu

SEQ ID NO: 1699435 - RNA, 19 nt, Artificial Sequence
  Description of Artificial Sequence: Synthetic oligonucleotide
aaucugcaacuaucccaua

SEQ ID NO: 1699436 - RNA, 19 nt, Artificial Sequence
  Description of Artificial Sequence: Synthetic oligonucleotide
cuucugaucaagccacucu

SEQ ID NO: 1699437 - RNA, 19 nt, Artificial Sequence
  Description of Artificial Sequence: Synthetic oligonucleotide
ggggcaacaucaaguuugg

SEQ ID NO: 1699438 - RNA, 19 nt, Artificial Sequence
  Description of Artificial Sequence: Synthetic oligonucleotide
aguucuccccacucuucaa

SEQ ID NO: 1699439 - RNA, 19 nt, Artificial Sequence
  Description of Artificial Sequence: Synthetic oligonucleotide
cucuucaagccccgaccac

SEQ ID NO: 1699440 - RNA, 19 nt, Artificial Sequence
  Description of Artificial Sequence: Synthetic oligonucleotide
cagcacgggaagcaccaac

SEQ ID NO: 1699441 - RNA, 19 nt, Artificial Sequence
  Description of Artificial Sequence: Synthetic oligonucleotide
agcugcuguuagcauacuu

SEQ ID NO: 1699442 - RNA, 19 nt, Artificial Sequence
  Description of Artificial Sequence: Synthetic oligonucleotide
aguugaucugccagaucgu

SEQ ID NO: 1699443 - RNA, 19 nt, Artificial Sequence
  Description of Artificial Sequence: Synthetic oligonucleotide
guacccucggccucagcga

SEQ ID NO: 1699444 - RNA, 19 nt, Artificial Sequence
  Description of Artificial Sequence: Synthetic oligonucleotide
uccagcuacuaagcaggac

SEQ ID NO: 1699445 - RNA, 19 nt, Artificial Sequence
  Description of Artificial Sequence: Synthetic oligonucleotide
aggcauucuagcugcuguu

SEQ ID NO: 1699446 - RNA, 19 nt, Artificial Sequence
  Description of Artificial Sequence: Synthetic oligonucleotide
ucggccucagcgacccgga

SEQ ID NO: 1699447 - RNA, 19 nt, Artificial Sequence
  Description of Artificial Sequence: Synthetic oligonucleotide
caccuugucacauuugguu

SEQ ID NO: 1699448 - RNA, 19 nt, Artificial Sequence
  Description of Artificial Sequence: Synthetic oligonucleotide
agcgugcaguugaucugcc

SEQ ID NO: 1699449 - RNA, 19 nt, Artificial Sequence
  Description of Artificial Sequence: Synthetic oligonucleotide
gcucggaacauugucucug

SEQ ID NO: 1699450 - RNA, 19 nt, Artificial Sequence
  Description of Artificial Sequence: Synthetic oligonucleotide
cucagcuauuaccaaggua

SEQ ID NO: 1699451 - RNA, 19 nt, Artificial Sequence
  Description of Artificial Sequence: Synthetic oligonucleotide
uugcaacuccagcuacuuu

SEQ ID NO: 1699452 - RNA, 19 nt, Artificial Sequence
  Description of Artificial Sequence: Synthetic oligonucleotide
gcaaugaggccgcccgccg

SEQ ID NO: 1699453 - RNA, 19 nt, Artificial Sequence
  Description of Artificial Sequence: Synthetic oligonucleotide
ugcaugucauugggaacaa

SEQ ID NO: 1699454 - RNA, 19 nt, Artificial Sequence
  Description of Artificial Sequence: Synthetic oligonucleotide
cuuguaccaccuugucaca

SEQ ID NO: 1699455 - RNA, 19 nt, Artificial Sequence
  Description of Artificial Sequence: Synthetic oligonucleotide
gcuacucugggcaaaaggu

SEQ ID NO: 1699456 - RNA, 19 nt, Artificial Sequence
  Description of Artificial Sequence: Synthetic oligonucleotide
acuuuggcaccgguuaauu

SEQ ID NO: 1699457 - RNA, 19 nt, Artificial Sequence
  Description of Artificial Sequence: Synthetic oligonucleotide
agcacuaccuccacuuguu

SEQ ID NO: 1699458 - RNA, 19 nt, Artificial Sequence
  Description of Artificial Sequence: Synthetic oligonucleotide
gucuauagucagcccagcu

SEQ ID NO: 1699459 - RNA, 19 nt, Artificial Sequence
  Description of Artificial Sequence: Synthetic oligonucleotide
agcuacuaagcaggacacu

SEQ ID NO: 1699460 - RNA, 19 nt, Artificial Sequence
  Description of Artificial Sequence: Synthetic oligonucleotide
gugaugguauuuagaguaa

SEQ ID NO: 1699461 - RNA, 19 nt, Artificial Sequence
  Description of Artificial Sequence: Synthetic oligonucleotide
gcaccgguuaauucugguc

SEQ ID NO: 1699462 - RNA, 19 nt, Artificial Sequence
  Description of Artificial Sequence: Synthetic oligonucleotide
auccggugacuugaucuca

SEQ ID NO: 1699463 - RNA, 19 nt, Artificial Sequence
  Description of Artificial Sequence: Synthetic oligonucleotide
cagugaugguauuuagagu

SEQ ID NO: 1699464 - RNA, 19 nt, Artificial Sequence
  Description of Artificial Sequence: Synthetic oligonucleotide
caucaacagcagcacggga

SEQ ID NO: 1699465 - RNA, 19 nt, Artificial Sequence
  Description of Artificial Sequence: Synthetic oligonucleotide
aucccauaaucugccacuu

SEQ ID NO: 1699466 - RNA, 19 nt, Artificial Sequence
  Description of Artificial Sequence: Synthetic oligonucleotide
caaguuuggcugcuacucu

SEQ ID NO: 1699467 - RNA, 19 nt, Artificial Sequence
  Description of Artificial Sequence: Synthetic oligonucleotide
ccagcuacuuuacagagau

SEQ ID NO: 1699468 - RNA, 19 nt, Artificial Sequence
  Description of Artificial Sequence: Synthetic oligonucleotide
ggccucagcgacccggagc

SEQ ID NO: 1699469 - RNA, 19 nt, Artificial Sequence
  Description of Artificial Sequence: Synthetic oligonucleotide
uggugccuuuucugaacua

SEQ ID NO: 1699470 - RNA, 19 nt, Artificial Sequence
  Description of Artificial Sequence: Synthetic oligonucleotide
gcuagagaaucauuugcau

SEQ ID NO: 1699471 - RNA, 19 nt, Artificial Sequence
  Description of Artificial Sequence: Synthetic oligonucleotide
gcacgggaagcaccaacug

SEQ ID NO: 1699472 - RNA, 19 nt, Artificial Sequence
  Description of Artificial Sequence: Synthetic oligonucleotide
caagacguccagcugcagu

SEQ ID NO: 1699473 - RNA, 19 nt, Artificial Sequence
  Description of Artificial Sequence: Synthetic oligonucleotide
cuacucugggcaaaagguu

SEQ ID NO: 1699474 - RNA, 19 nt, Artificial Sequence
  Description of Artificial Sequence: Synthetic oligonucleotide
uagccacaauugucuugcu

SEQ ID NO: 1699475 - RNA, 19 nt, Artificial Sequence
  Description of Artificial Sequence: Synthetic oligonucleotide
aggcgccgcugcucggaac

SEQ ID NO: 1699476 - RNA, 19 nt, Artificial Sequence
  Description of Artificial Sequence: Synthetic oligonucleotide
cuggaaggaggccuuuaua

SEQ ID NO: 1699477 - RNA, 19 nt, Artificial Sequence
  Description of Artificial Sequence: Synthetic oligonucleotide
agacguccagcugcaguga

SEQ ID NO: 1699478 - RNA, 19 nt, Artificial Sequence
  Description of Artificial Sequence: Synthetic oligonucleotide
ucugaccaacuugcauguc

SEQ ID NO: 1699479 - RNA, 19 nt, Artificial Sequence
  Description of Artificial Sequence: Synthetic oligonucleotide
agcgacccggagcgcgcgg

SEQ ID NO: 1699480 - RNA, 19 nt, Artificial Sequence
  Description of Artificial Sequence: Synthetic oligonucleotide
ccucagauuauauuucuau

SEQ ID NO: 1699481 - RNA, 19 nt, Artificial Sequence
  Description of Artificial Sequence: Synthetic oligonucleotide
gccucaaaagaugucccuc

SEQ ID NO: 1699482 - RNA, 19 nt, Artificial Sequence
  Description of Artificial Sequence: Synthetic oligonucleotide
cugaucaagccacucugau

SEQ ID NO: 1699483 - RNA, 19 nt, Artificial Sequence
  Description of Artificial Sequence: Synthetic oligonucleotide
ccauaaucugccacuugga

SEQ ID NO: 1699484 - RNA, 19 nt, Artificial Sequence
  Description of Artificial Sequence: Synthetic oligonucleotide
aucaagccacucugauauu

SEQ ID NO: 1699485 - RNA, 19 nt, Artificial Sequence
  Description of Artificial Sequence: Synthetic oligonucleotide
gccgcugcucggaacauug

SEQ ID NO: 1699486 - RNA, 19 nt, Artificial Sequence
  Description of Artificial Sequence: Synthetic oligonucleotide
uggcugcuacucugggcaa

SEQ ID NO: 1699487 - RNA, 19 nt, Artificial Sequence
  Description of Artificial Sequence: Synthetic oligonucleotide
cuguuagcauacuuucuuu

SEQ ID NO: 1699488 - RNA, 19 nt, Artificial Sequence
  Description of Artificial Sequence: Synthetic oligonucleotide
ggucuauagucagcccagc

SEQ ID NO: 1699489 - RNA, 19 nt, Artificial Sequence
  Description of Artificial Sequence: Synthetic oligonucleotide
gcacuaccuccacuuguug

SEQ ID NO: 1699490 - RNA, 19 nt, Artificial Sequence
  Description of Artificial Sequence: Synthetic oligonucleotide
cagcuauuaccaagguacu

SEQ ID NO: 1699491 - RNA, 19 nt, Artificial Sequence
  Description of Artificial Sequence: Synthetic oligonucleotide
cagcuacuuuacagagauc

SEQ ID NO: 1699492 - RNA, 19 nt, Artificial Sequence
  Description of Artificial Sequence: Synthetic oligonucleotide
caaauguauccggugacuu

SEQ ID NO: 1699493 - RNA, 19 nt, Artificial Sequence
  Description of Artificial Sequence: Synthetic oligonucleotide
ggcgccgcugcucggaaca

SEQ ID NO: 1699494 - RNA, 19 nt, Artificial Sequence
  Description of Artificial Sequence: Synthetic oligonucleotide
caacuccagcuacuuuaca

SEQ ID NO: 1699495 - RNA, 19 nt, Artificial Sequence
  Description of Artificial Sequence: Synthetic oligonucleotide
caagccccgaccaccagau

SEQ ID NO: 1699496 - RNA, 19 nt, Artificial Sequence
  Description of Artificial Sequence: Synthetic oligonucleotide
ccacucuucaagccccgac

SEQ ID NO: 1699497 - RNA, 19 nt, Artificial Sequence
  Description of Artificial Sequence: Synthetic oligonucleotide
caccaacugcagcgugcag

SEQ ID NO: 1699498 - RNA, 19 nt, Artificial Sequence
  Description of Artificial Sequence: Synthetic oligonucleotide
cugucugaccaacuugcau

SEQ ID NO: 1699499 - RNA, 19 nt, Artificial Sequence
  Description of Artificial Sequence: Synthetic oligonucleotide
caaaaucaauggugucagu

SEQ ID NO: 1699500 - RNA, 19 nt, Artificial Sequence
  Description of Artificial Sequence: Synthetic oligonucleotide
gcuuaaaguucuccccacu

SEQ ID NO: 1699501 - RNA, 19 nt, Artificial Sequence
  Description of Artificial Sequence: Synthetic oligonucleotide
gcugcucggaacauugucu

SEQ ID NO: 1699502 - RNA, 19 nt, Artificial Sequence
  Description of Artificial Sequence: Synthetic oligonucleotide
gccccgaccaccagauacc

SEQ ID NO: 1699503 - RNA, 19 nt, Artificial Sequence
  Description of Artificial Sequence: Synthetic oligonucleotide
gggugcuagagaaucauuu

SEQ ID NO: 1699504 - RNA, 19 nt, Artificial Sequence
  Description of Artificial Sequence: Synthetic oligonucleotide
gacguccagcugcagugau

SEQ ID NO: 1699505 - RNA, 19 nt, Artificial Sequence
  Description of Artificial Sequence: Synthetic oligonucleotide
auguauccggugacuugau

SEQ ID NO: 1699506 - RNA, 19 nt, Artificial Sequence
  Description of Artificial Sequence: Synthetic oligonucleotide
gguacacaaugcauuuccu

SEQ ID NO: 1699507 - RNA, 19 nt, Artificial Sequence
  Description of Artificial Sequence: Synthetic oligonucleotide
uagcugcuguuagcauacu

SEQ ID NO: 1699508 - RNA, 19 nt, Artificial Sequence
  Description of Artificial Sequence: Synthetic oligonucleotide
cacagauguguguguaauu

SEQ ID NO: 1699509 - RNA, 19 nt, Artificial Sequence
  Description of Artificial Sequence: Synthetic oligonucleotide
gcaccaacugcagcgugca

SEQ ID NO: 1699510 - RNA, 19 nt, Artificial Sequence
  Description of Artificial Sequence: Synthetic oligonucleotide
augaggccgcccgccggag

SEQ ID NO: 1699511 - RNA, 19 nt, Artificial Sequence
  Description of Artificial Sequence: Synthetic oligonucleotide
cagcgacccggagcgcgcg

SEQ ID NO: 1699512 - RNA, 19 nt, Artificial Sequence
  Description of Artificial Sequence: Synthetic oligonucleotide
cgcugcucggaacauuguc

SEQ ID NO: 1699513 - RNA, 19 nt, Artificial Sequence
  Description of Artificial Sequence: Synthetic oligonucleotide
cugcagcgugcaguugauc

SEQ ID NO: 1699514 - RNA, 19 nt, Artificial Sequence
  Description of Artificial Sequence: Synthetic oligonucleotide
ccccacucuucaagccccg

SEQ ID NO: 1699515 - RNA, 19 nt, Artificial Sequence
  Description of Artificial Sequence: Synthetic oligonucleotide
ggcaccgguuaauucuggu

SEQ ID NO: 1699516 - RNA, 19 nt, Artificial Sequence
  Description of Artificial Sequence: Synthetic oligonucleotide
gcugcuacucugggcaaaa

SEQ ID NO: 1699517 - RNA, 19 nt, Artificial Sequence
  Description of Artificial Sequence: Synthetic oligonucleotide
gccagaucguacaguagcu

SEQ ID NO: 1699518 - RNA, 19 nt, Artificial Sequence
  Description of Artificial Sequence: Synthetic oligonucleotide
gcgugcaguugaucugcca

SEQ ID NO: 1699519 - RNA, 19 nt, Artificial Sequence
  Description of Artificial Sequence: Synthetic oligonucleotide
caccagauaccaccacuuu

SEQ ID NO: 1699520 - RNA, 19 nt, Artificial Sequence
  Description of Artificial Sequence: Synthetic oligonucleotide
cacuuuggcaccgguuaau

SEQ ID NO: 1699521 - RNA, 19 nt, Artificial Sequence
  Description of Artificial Sequence: Synthetic oligonucleotide
caccacuuuggcaccgguu

SEQ ID NO: 1699522 - RNA, 19 nt, Artificial Sequence
  Description of Artificial Sequence: Synthetic oligonucleotide
cccggagcgcgcgggagcc

SEQ ID NO: 1699523 - RNA, 19 nt, Artificial Sequence
  Description of Artificial Sequence: Synthetic oligonucleotide
cccgaccaccagauaccac

SEQ ID NO: 1699524 - RNA, 19 nt, Artificial Sequence
  Description of Artificial Sequence: Synthetic oligonucleotide
gcccagcuguacccucggc

SEQ ID NO: 1699525 - RNA, 19 nt, Artificial Sequence
  Description of Artificial Sequence: Synthetic oligonucleotide
ggcugcuacucugggcaaa

SEQ ID NO: 1699526 - RNA, 19 nt, Artificial Sequence
  Description of Artificial Sequence: Synthetic oligonucleotide
ccaagacguccagcugcag

SEQ ID NO: 1699527 - RNA, 19 nt, Artificial Sequence
  Description of Artificial Sequence: Synthetic oligonucleotide
aggccgcccgccggagcug

SEQ ID NO: 1699528 - RNA, 19 nt, Artificial Sequence
  Description of Artificial Sequence: Synthetic oligonucleotide
caggcgccgcugcucggaa

SEQ ID NO: 1699529 - RNA, 19 nt, Artificial Sequence
  Description of Artificial Sequence: Synthetic oligonucleotide
ccacucugauauucccacu

SEQ ID NO: 1699530 - RNA, 19 nt, Artificial Sequence
  Description of Artificial Sequence: Synthetic oligonucleotide
ccccgaccaccagauacca

SEQ ID NO: 1699531 - RNA, 19 nt, Artificial Sequence
  Description of Artificial Sequence: Synthetic oligonucleotide
ggagcgcgcgggagccgcc

SEQ ID NO: 1699532 - RNA, 19 nt, Artificial Sequence
  Description of Artificial Sequence: Synthetic oligonucleotide
cggagcgcgcgggagccgc

SEQ ID NO: 1699533 - RNA, 19 nt, Artificial Sequence
  Description of Artificial Sequence: Synthetic oligonucleotide
ccggagcgcgcgggagccg

SEQ ID NO: 1699534 - RNA, 19 nt, Artificial Sequence
  Description of Artificial Sequence: Synthetic oligonucleotide
ccgcugcucggaacauugu

SEQ ID NO: 1699535 - RNA, 19 nt, Artificial Sequence
  Description of Artificial Sequence: Synthetic oligonucleotide
gcgccgcugcucggaacau

SEQ ID NO: 1699536 - RNA, 19 nt, Artificial Sequence
  Description of Artificial Sequence: Synthetic oligonucleotide
cgccgcugcucggaacauu

SEQ ID NO: 1699537 - RNA, 19 nt, Artificial Sequence
  Description of Artificial Sequence: Synthetic oligonucleotide
aauaaaauaacgaugauca

SEQ ID NO: 1699538 - RNA, 19 nt, Artificial Sequence
  Description of Artificial Sequence: Synthetic oligonucleotide
aauuaucucacauauaggu

SEQ ID NO: 1699539 - RNA, 19 nt, Artificial Sequence
  Description of Artificial Sequence: Synthetic oligonucleotide
auugauacaucaaagaugc

SEQ ID NO: 1699540 - RNA, 19 nt, Artificial Sequence
  Description of Artificial Sequence: Synthetic oligonucleotide
aaaauaacgaugaucauuc

SEQ ID NO: 1699541 - RNA, 19 nt, Artificial Sequence
  Description of Artificial Sequence: Synthetic oligonucleotide
aaugaaaaucuucuguagg

SEQ ID NO: 1699542 - RNA, 19 nt, Artificial Sequence
  Description of Artificial Sequence: Synthetic oligonucleotide
ugaaucaaacaacagagag

SEQ ID NO: 1699543 - RNA, 19 nt, Artificial Sequence
  Description of Artificial Sequence: Synthetic oligonucleotide
aaugaugaauaaaauaacg

SEQ ID NO: 1699544 - RNA, 19 nt, Artificial Sequence
  Description of Artificial Sequence: Synthetic oligonucleotide
auuguuaggaucuugagga

SEQ ID NO: 1699545 - RNA, 19 nt, Artificial Sequence
  Description of Artificial Sequence: Synthetic oligonucleotide
ucugaaauuaugcaugcag

SEQ ID NO: 1699546 - RNA, 19 nt, Artificial Sequence
  Description of Artificial Sequence: Synthetic oligonucleotide
aauacauuccacuuccuug

SEQ ID NO: 1699547 - RNA, 19 nt, Artificial Sequence
  Description of Artificial Sequence: Synthetic oligonucleotide
uccaacuugaccaucauug

SEQ ID NO: 1699548 - RNA, 19 nt, Artificial Sequence
  Description of Artificial Sequence: Synthetic oligonucleotide
uacaaggcgacccacaggg

SEQ ID NO: 1699549 - RNA, 19 nt, Artificial Sequence
  Description of Artificial Sequence: Synthetic oligonucleotide
uuuaaauggauacucacuc

SEQ ID NO: 1699550 - RNA, 19 nt, Artificial Sequence
  Description of Artificial Sequence: Synthetic oligonucleotide
ggaauuaucucacauauag

SEQ ID NO: 1699551 - RNA, 19 nt, Artificial Sequence
  Description of Artificial Sequence: Synthetic oligonucleotide
ugcauuacaaguauaauua

SEQ ID NO: 1699552 - RNA, 19 nt, Artificial Sequence
  Description of Artificial Sequence: Synthetic oligonucleotide
gaugaauaaaauaacgaug

SEQ ID NO: 1699553 - RNA, 19 nt, Artificial Sequence
  Description of Artificial Sequence: Synthetic oligonucleotide
cauuucuugacaucaaugc

SEQ ID NO: 1699554 - RNA, 19 nt, Artificial Sequence
  Description of Artificial Sequence: Synthetic oligonucleotide
aggaguuucacauuguuug

SEQ ID NO: 1699555 - RNA, 19 nt, Artificial Sequence
  Description of Artificial Sequence: Synthetic oligonucleotide
uccacaauauccccuaagg

SEQ ID NO: 1699556 - RNA, 19 nt, Artificial Sequence
  Description of Artificial Sequence: Synthetic oligonucleotide
aaauuaugcaugcagccga

SEQ ID NO: 1699557 - RNA, 19 nt, Artificial Sequence
  Description of Artificial Sequence: Synthetic oligonucleotide
uuacauugcacucuguugu

SEQ ID NO: 1699558 - RNA, 19 nt, Artificial Sequence
  Description of Artificial Sequence: Synthetic oligonucleotide
aggacgaccagcuggaccc

SEQ ID NO: 1699559 - RNA, 19 nt, Artificial Sequence
  Description of Artificial Sequence: Synthetic oligonucleotide
ugaaauuaugcaugcagcc

SEQ ID NO: 1699560 - RNA, 19 nt, Artificial Sequence
  Description of Artificial Sequence: Synthetic oligonucleotide
aauaacgaugaucauucca

SEQ ID NO: 1699561 - RNA, 19 nt, Artificial Sequence
  Description of Artificial Sequence: Synthetic oligonucleotide
uacagauccaaacugggug

SEQ ID NO: 1699562 - RNA, 19 nt, Artificial Sequence
  Description of Artificial Sequence: Synthetic oligonucleotide
ugaugaauaaaauaacgau

SEQ ID NO: 1699563 - RNA, 19 nt, Artificial Sequence
  Description of Artificial Sequence: Synthetic oligonucleotide
uuuaucugaaauuaugcau

SEQ ID NO: 1699564 - RNA, 19 nt, Artificial Sequence
  Description of Artificial Sequence: Synthetic oligonucleotide
ugaggauuuaaauggauac

SEQ ID NO: 1699565 - RNA, 19 nt, Artificial Sequence
  Description of Artificial Sequence: Synthetic oligonucleotide
ugagaauugccuucuagag

SEQ ID NO: 1699566 - RNA, 19 nt, Artificial Sequence
  Description of Artificial Sequence: Synthetic oligonucleotide
uauagguggcucauuaucc

SEQ ID NO: 1699567 - RNA, 19 nt, Artificial Sequence
  Description of Artificial Sequence: Synthetic oligonucleotide
aaugagguacacauuugcc

SEQ ID NO: 1699568 - RNA, 19 nt, Artificial Sequence
  Description of Artificial Sequence: Synthetic oligonucleotide
acggcagaaagcuacaagg

SEQ ID NO: 1699569 - RNA, 19 nt, Artificial Sequence
  Description of Artificial Sequence: Synthetic oligonucleotide
aauaccaguuaugagacca

SEQ ID NO: 1699570 - RNA, 19 nt, Artificial Sequence
  Description of Artificial Sequence: Synthetic oligonucleotide
auuguuugcguauacauau

SEQ ID NO: 1699571 - RNA, 19 nt, Artificial Sequence
  Description of Artificial Sequence: Synthetic oligonucleotide
uuugcguauacauauauuu

SEQ ID NO: 1699572 - RNA, 19 nt, Artificial Sequence
  Description of Artificial Sequence: Synthetic oligonucleotide
agaggaaccaaugaggcgg

SEQ ID NO: 1699573 - RNA, 19 nt, Artificial Sequence
  Description of Artificial Sequence: Synthetic oligonucleotide
uccccuaaggaaaauaagc

SEQ ID NO: 1699574 - RNA, 19 nt, Artificial Sequence
  Description of Artificial Sequence: Synthetic oligonucleotide
uucuguaggaucaacgaga

SEQ ID NO: 1699575 - RNA, 19 nt, Artificial Sequence
  Description of Artificial Sequence: Synthetic oligonucleotide
uggugaaauguccugggcg

SEQ ID NO: 1699576 - RNA, 19 nt, Artificial Sequence
  Description of Artificial Sequence: Synthetic oligonucleotide
gauuuaaauggauacucac

SEQ ID NO: 1699577 - RNA, 19 nt, Artificial Sequence
  Description of Artificial Sequence: Synthetic oligonucleotide
aaauaacgaugaucauucc

SEQ ID NO: 1699578 - RNA, 19 nt, Artificial Sequence
  Description of Artificial Sequence: Synthetic oligonucleotide
uuuugcaucgauagguagc

SEQ ID NO: 1699579 - RNA, 19 nt, Artificial Sequence
  Description of Artificial Sequence: Synthetic oligonucleotide
uaugcaugcagccgaagag

SEQ ID NO: 1699580 - RNA, 19 nt, Artificial Sequence
  Description of Artificial Sequence: Synthetic oligonucleotide
uucuagaguauacccaucc

SEQ ID NO: 1699581 - RNA, 19 nt, Artificial Sequence
  Description of Artificial Sequence: Synthetic oligonucleotide
uccaauaggaaacacggau

SEQ ID NO: 1699582 - RNA, 19 nt, Artificial Sequence
  Description of Artificial Sequence: Synthetic oligonucleotide
aggauuuaaauggauacuc

SEQ ID NO: 1699583 - RNA, 19 nt, Artificial Sequence
  Description of Artificial Sequence: Synthetic oligonucleotide
caucaguuugauuuauucg

SEQ ID NO: 1699584 - RNA, 19 nt, Artificial Sequence
  Description of Artificial Sequence: Synthetic oligonucleotide
cugaaauuaugcaugcagc

SEQ ID NO: 1699585 - RNA, 19 nt, Artificial Sequence
  Description of Artificial Sequence: Synthetic oligonucleotide
auagguggcucauuauccc

SEQ ID NO: 1699586 - RNA, 19 nt, Artificial Sequence
  Description of Artificial Sequence: Synthetic oligonucleotide
acaauaccaguuaugagac

SEQ ID NO: 1699587 - RNA, 19 nt, Artificial Sequence
  Description of Artificial Sequence: Synthetic oligonucleotide
uacauauauuuucagcacu

SEQ ID NO: 1699588 - RNA, 19 nt, Artificial Sequence
  Description of Artificial Sequence: Synthetic oligonucleotide
gauacucacuccuuuacac

SEQ ID NO: 1699589 - RNA, 19 nt, Artificial Sequence
  Description of Artificial Sequence: Synthetic oligonucleotide
aucaacgagaucuccauug

SEQ ID NO: 1699590 - RNA, 19 nt, Artificial Sequence
  Description of Artificial Sequence: Synthetic oligonucleotide
uaauuaauuacagauccaa

SEQ ID NO: 1699591 - RNA, 19 nt, Artificial Sequence
  Description of Artificial Sequence: Synthetic oligonucleotide
ugguacaguguauggaugg

SEQ ID NO: 1699592 - RNA, 19 nt, Artificial Sequence
  Description of Artificial Sequence: Synthetic oligonucleotide
ugacauuccaagguuaaag

SEQ ID NO: 1699593 - RNA, 19 nt, Artificial Sequence
  Description of Artificial Sequence: Synthetic oligonucleotide
aagaggaaccaaugaggcg

SEQ ID NO: 1699594 - RNA, 19 nt, Artificial Sequence
  Description of Artificial Sequence: Synthetic oligonucleotide
uuaaauggauacucacucc

SEQ ID NO: 1699595 - RNA, 19 nt, Artificial Sequence
  Description of Artificial Sequence: Synthetic oligonucleotide
aguauacccauccugacau

SEQ ID NO: 1699596 - RNA, 19 nt, Artificial Sequence
  Description of Artificial Sequence: Synthetic oligonucleotide
ucaacgagaucuccauugg

SEQ ID NO: 1699597 - RNA, 19 nt, Artificial Sequence
  Description of Artificial Sequence: Synthetic oligonucleotide
aguaucuucauaguaauau

SEQ ID NO: 1699598 - RNA, 19 nt, Artificial Sequence
  Description of Artificial Sequence: Synthetic oligonucleotide
ugcguauacauauauuuuc

SEQ ID NO: 1699599 - RNA, 19 nt, Artificial Sequence
  Description of Artificial Sequence: Synthetic oligonucleotide
ucuucuguaggaucaacga

SEQ ID NO: 1699600 - RNA, 19 nt, Artificial Sequence
  Description of Artificial Sequence: Synthetic oligonucleotide
ugauacaucaaagaugcuc

SEQ ID NO: 1699601 - RNA, 19 nt, Artificial Sequence
  Description of Artificial Sequence: Synthetic oligonucleotide
uacgccauuguuaggaucu

SEQ ID NO: 1699602 - RNA, 19 nt, Artificial Sequence
  Description of Artificial Sequence: Synthetic oligonucleotide
ucaguuuugcaucgauagg

SEQ ID NO: 1699603 - RNA, 19 nt, Artificial Sequence
  Description of Artificial Sequence: Synthetic oligonucleotide
gaaucaaacaacagagagc

SEQ ID NO: 1699604 - RNA, 19 nt, Artificial Sequence
  Description of Artificial Sequence: Synthetic oligonucleotide
uccugggcgacauugauac

SEQ ID NO: 1699605 - RNA, 19 nt, Artificial Sequence
  Description of Artificial Sequence: Synthetic oligonucleotide
uuauucggcuagcaaauga

SEQ ID NO: 1699606 - RNA, 19 nt, Artificial Sequence
  Description of Artificial Sequence: Synthetic oligonucleotide
uuugcaucgauagguagcc

SEQ ID NO: 1699607 - RNA, 19 nt, Artificial Sequence
  Description of Artificial Sequence: Synthetic oligonucleotide
guuaugagaccacuguuug

SEQ ID NO: 1699608 - RNA, 19 nt, Artificial Sequence
  Description of Artificial Sequence: Synthetic oligonucleotide
uuaugcaugcagccgaaga

SEQ ID NO: 1699609 - RNA, 19 nt, Artificial Sequence
  Description of Artificial Sequence: Synthetic oligonucleotide
guuacauugcacucuguug

SEQ ID NO: 1699610 - RNA, 19 nt, Artificial Sequence
  Description of Artificial Sequence: Synthetic oligonucleotide
aaccaaugaggcgguaucc

SEQ ID NO: 1699611 - RNA, 19 nt, Artificial Sequence
  Description of Artificial Sequence: Synthetic oligonucleotide
gaauuaucucacauauagg

SEQ ID NO: 1699612 - RNA, 19 nt, Artificial Sequence
  Description of Artificial Sequence: Synthetic oligonucleotide
aaagcuacaaggcgaccca

SEQ ID NO: 1699613 - RNA, 19 nt, Artificial Sequence
  Description of Artificial Sequence: Synthetic oligonucleotide
uuucagacaccaugaaggc

SEQ ID NO: 1699614 - RNA, 19 nt, Artificial Sequence
  Description of Artificial Sequence: Synthetic oligonucleotide
ucccauuuguuuaauuugu

SEQ ID NO: 1699615 - RNA, 19 nt, Artificial Sequence
  Description of Artificial Sequence: Synthetic oligonucleotide
uuugacuggcacuugcucu

SEQ ID NO: 1699616 - RNA, 19 nt, Artificial Sequence
  Description of Artificial Sequence: Synthetic oligonucleotide
uuuaggaggcuucuugggu

SEQ ID NO: 1699617 - RNA, 19 nt, Artificial Sequence
  Description of Artificial Sequence: Synthetic oligonucleotide
aaugacaauaccaguuaug

SEQ ID NO: 1699618 - RNA, 19 nt, Artificial Sequence
  Description of Artificial Sequence: Synthetic oligonucleotide
auuugacuggcacuugcuc

SEQ ID NO: 1699619 - RNA, 19 nt, Artificial Sequence
  Description of Artificial Sequence: Synthetic oligonucleotide
cuauuuaggaggcuucuug

SEQ ID NO: 1699620 - RNA, 19 nt, Artificial Sequence
  Description of Artificial Sequence: Synthetic oligonucleotide
auuacaaguauaauuaauu

SEQ ID NO: 1699621 - RNA, 19 nt, Artificial Sequence
  Description of Artificial Sequence: Synthetic oligonucleotide
uauccccuaaggaaaauaa

SEQ ID NO: 1699622 - RNA, 19 nt, Artificial Sequence
  Description of Artificial Sequence: Synthetic oligonucleotide
uuucacucggagaauacau

SEQ ID NO: 1699623 - RNA, 19 nt, Artificial Sequence
  Description of Artificial Sequence: Synthetic oligonucleotide
ucacaaggaauuaucucac

SEQ ID NO: 1699624 - RNA, 19 nt, Artificial Sequence
  Description of Artificial Sequence: Synthetic oligonucleotide
cuagaguauacccauccug

SEQ ID NO: 1699625 - RNA, 19 nt, Artificial Sequence
  Description of Artificial Sequence: Synthetic oligonucleotide
cacuccuuuacacuugccg

SEQ ID NO: 1699626 - RNA, 19 nt, Artificial Sequence
  Description of Artificial Sequence: Synthetic oligonucleotide
gaguacauguacuacgcca

SEQ ID NO: 1699627 - RNA, 19 nt, Artificial Sequence
  Description of Artificial Sequence: Synthetic oligonucleotide
uuacacuugccgucggagg

SEQ ID NO: 1699628 - RNA, 19 nt, Artificial Sequence
  Description of Artificial Sequence: Synthetic oligonucleotide
acauuguuugcguauacau

SEQ ID NO: 1699629 - RNA, 19 nt, Artificial Sequence
  Description of Artificial Sequence: Synthetic oligonucleotide
uauucggcuagcaaaugaa

SEQ ID NO: 1699630 - RNA, 19 nt, Artificial Sequence
  Description of Artificial Sequence: Synthetic oligonucleotide
ucuugaggauuuaaaugga

SEQ ID NO: 1699631 - RNA, 19 nt, Artificial Sequence
  Description of Artificial Sequence: Synthetic oligonucleotide
uguuugcguauacauauau

SEQ ID NO: 1699632 - RNA, 19 nt, Artificial Sequence
  Description of Artificial Sequence: Synthetic oligonucleotide
aggaaacacggauucauca

SEQ ID NO: 1699633 - RNA, 19 nt, Artificial Sequence
  Description of Artificial Sequence: Synthetic oligonucleotide
uugaggauuuaaauggaua

SEQ ID NO: 1699634 - RNA, 19 nt, Artificial Sequence
  Description of Artificial Sequence: Synthetic oligonucleotide
ucggagaauacauuccacu

SEQ ID NO: 1699635 - RNA, 19 nt, Artificial Sequence
  Description of Artificial Sequence: Synthetic oligonucleotide
uguuacauugcacucuguu

SEQ ID NO: 1699636 - RNA, 19 nt, Artificial Sequence
  Description of Artificial Sequence: Synthetic oligonucleotide
cacaauauccccuaaggaa

SEQ ID NO: 1699637 - RNA, 19 nt, Artificial Sequence
  Description of Artificial Sequence: Synthetic oligonucleotide
aacgagaucuccauuggca

SEQ ID NO: 1699638 - RNA, 19 nt, Artificial Sequence
  Description of Artificial Sequence: Synthetic oligonucleotide
ugccuucuagaguauaccc

SEQ ID NO: 1699639 - RNA, 19 nt, Artificial Sequence
  Description of Artificial Sequence: Synthetic oligonucleotide
uuuacacuugccgucggag

SEQ ID NO: 1699640 - RNA, 19 nt, Artificial Sequence
  Description of Artificial Sequence: Synthetic oligonucleotide
acacggauucaucaguuug

SEQ ID NO: 1699641 - RNA, 19 nt, Artificial Sequence
  Description of Artificial Sequence: Synthetic oligonucleotide
ugauuuauucggcuagcaa

SEQ ID NO: 1699642 - RNA, 19 nt, Artificial Sequence
  Description of Artificial Sequence: Synthetic oligonucleotide
guauggauggcucacccac

SEQ ID NO: 1699643 - RNA, 19 nt, Artificial Sequence
  Description of Artificial Sequence: Synthetic oligonucleotide
auaacgaugaucauuccaa

SEQ ID NO: 1699644 - RNA, 19 nt, Artificial Sequence
  Description of Artificial Sequence: Synthetic oligonucleotide
cuugaagcagcuugguaac

SEQ ID NO: 1699645 - RNA, 19 nt, Artificial Sequence
  Description of Artificial Sequence: Synthetic oligonucleotide
gcuccaauaggaaacacgg

SEQ ID NO: 1699646 - RNA, 19 nt, Artificial Sequence
  Description of Artificial Sequence: Synthetic oligonucleotide
uuguuuccugccaucauaa

SEQ ID NO: 1699647 - RNA, 19 nt, Artificial Sequence
  Description of Artificial Sequence: Synthetic oligonucleotide
uuacagauccaaacugggu

SEQ ID NO: 1699648 - RNA, 19 nt, Artificial Sequence
  Description of Artificial Sequence: Synthetic oligonucleotide
uggauacucacuccuuuac

SEQ ID NO: 1699649 - RNA, 19 nt, Artificial Sequence
  Description of Artificial Sequence: Synthetic oligonucleotide
uacacuugccgucggaggu

SEQ ID NO: 1699650 - RNA, 19 nt, Artificial Sequence
  Description of Artificial Sequence: Synthetic oligonucleotide
ugcaucgauagguagccac

SEQ ID NO: 1699651 - RNA, 19 nt, Artificial Sequence
  Description of Artificial Sequence: Synthetic oligonucleotide
guuuugcaucgauagguag

SEQ ID NO: 1699652 - RNA, 19 nt, Artificial Sequence
  Description of Artificial Sequence: Synthetic oligonucleotide
uuuggcucccauuuguuua

SEQ ID NO: 1699653 - RNA, 19 nt, Artificial Sequence
  Description of Artificial Sequence: Synthetic oligonucleotide
auuaucucacauauaggug

SEQ ID NO: 1699654 - RNA, 19 nt, Artificial Sequence
  Description of Artificial Sequence: Synthetic oligonucleotide
uguuggcagaugauggaga

SEQ ID NO: 1699655 - RNA, 19 nt, Artificial Sequence
  Description of Artificial Sequence: Synthetic oligonucleotide
ucuagaguauacccauccu

SEQ ID NO: 1699656 - RNA, 19 nt, Artificial Sequence
  Description of Artificial Sequence: Synthetic oligonucleotide
uuucacauuguuugcguau

SEQ ID NO: 1699657 - RNA, 19 nt, Artificial Sequence
  Description of Artificial Sequence: Synthetic oligonucleotide
uuugauuuauucggcuagc

SEQ ID NO: 1699658 - RNA, 19 nt, Artificial Sequence
  Description of Artificial Sequence: Synthetic oligonucleotide
auugccuucuagaguauac

SEQ ID NO: 1699659 - RNA, 19 nt, Artificial Sequence
  Description of Artificial Sequence: Synthetic oligonucleotide
ggcagaaagcuacaaggcg

SEQ ID NO: 1699660 - RNA, 19 nt, Artificial Sequence
  Description of Artificial Sequence: Synthetic oligonucleotide
agugaauuccgagcugcgc

SEQ ID NO: 1699661 - RNA, 19 nt, Artificial Sequence
  Description of Artificial Sequence: Synthetic oligonucleotide
uuccggauuucacucggag

SEQ ID NO: 1699662 - RNA, 19 nt, Artificial Sequence
  Description of Artificial Sequence: Synthetic oligonucleotide
agagcuugagggugauuac

SEQ ID NO: 1699663 - RNA, 19 nt, Artificial Sequence
  Description of Artificial Sequence: Synthetic oligonucleotide
ugaguacauguacuacgcc

SEQ ID NO: 1699664 - RNA, 19 nt, Artificial Sequence
  Description of Artificial Sequence: Synthetic oligonucleotide
acucggagaauacauucca

SEQ ID NO: 1699665 - RNA, 19 nt, Artificial Sequence
  Description of Artificial Sequence: Synthetic oligonucleotide
ugcaugcagccgaagagga

SEQ ID NO: 1699666 - RNA, 19 nt, Artificial Sequence
  Description of Artificial Sequence: Synthetic oligonucleotide
aaacaacagagagcaauga

SEQ ID NO: 1699667 - RNA, 19 nt, Artificial Sequence
  Description of Artificial Sequence: Synthetic oligonucleotide
acauauagguggcucauua

SEQ ID NO: 1699668 - RNA, 19 nt, Artificial Sequence
  Description of Artificial Sequence: Synthetic oligonucleotide
ucauuccaaugacaauacc

SEQ ID NO: 1699669 - RNA, 19 nt, Artificial Sequence
  Description of Artificial Sequence: Synthetic oligonucleotide
gguuaaagagcuucuuccc

SEQ ID NO: 1699670 - RNA, 19 nt, Artificial Sequence
  Description of Artificial Sequence: Synthetic oligonucleotide
ugacauccaaacuccacaa

SEQ ID NO: 1699671 - RNA, 19 nt, Artificial Sequence
  Description of Artificial Sequence: Synthetic oligonucleotide
aacuccacaauauccccua

SEQ ID NO: 1699672 - RNA, 19 nt, Artificial Sequence
  Description of Artificial Sequence: Synthetic oligonucleotide
uccagacuccaacuugacc

SEQ ID NO: 1699673 - RNA, 19 nt, Artificial Sequence
  Description of Artificial Sequence: Synthetic oligonucleotide
ggaaacacggauucaucag

SEQ ID NO: 1699674 - RNA, 19 nt, Artificial Sequence
  Description of Artificial Sequence: Synthetic oligonucleotide
aggcugacauccaaacucc

SEQ ID NO: 1699675 - RNA, 19 nt, Artificial Sequence
  Description of Artificial Sequence: Synthetic oligonucleotide
aguuugauuuauucggcua

SEQ ID NO: 1699676 - RNA, 19 nt, Artificial Sequence
  Description of Artificial Sequence: Synthetic oligonucleotide
auacucacuccuuuacacu

SEQ ID NO: 1699677 - RNA, 19 nt, Artificial Sequence
  Description of Artificial Sequence: Synthetic oligonucleotide
caaggcgacccacagggcc

SEQ ID NO: 1699678 - RNA, 19 nt, Artificial Sequence
  Description of Artificial Sequence: Synthetic oligonucleotide
ugccaucauaaacccaggc

SEQ ID NO: 1699679 - RNA, 19 nt, Artificial Sequence
  Description of Artificial Sequence: Synthetic oligonucleotide
cagaaagcuacaaggcgac

SEQ ID NO: 1699680 - RNA, 19 nt, Artificial Sequence
  Description of Artificial Sequence: Synthetic oligonucleotide
gaaccaaugaggcgguauc

SEQ ID NO: 1699681 - RNA, 19 nt, Artificial Sequence
  Description of Artificial Sequence: Synthetic oligonucleotide
uuaugagaccacuguuuga

SEQ ID NO: 1699682 - RNA, 19 nt, Artificial Sequence
  Description of Artificial Sequence: Synthetic oligonucleotide
uacauguacuacgccauug

SEQ ID NO: 1699683 - RNA, 19 nt, Artificial Sequence
  Description of Artificial Sequence: Synthetic oligonucleotide
gaggcguacauuucuugac

SEQ ID NO: 1699684 - RNA, 19 nt, Artificial Sequence
  Description of Artificial Sequence: Synthetic oligonucleotide
auuuauucggcuagcaaau

SEQ ID NO: 1699685 - RNA, 19 nt, Artificial Sequence
  Description of Artificial Sequence: Synthetic oligonucleotide
ucauugcugguacagugua

SEQ ID NO: 1699686 - RNA, 19 nt, Artificial Sequence
  Description of Artificial Sequence: Synthetic oligonucleotide
uagccaccauuccauaaug

SEQ ID NO: 1699687 - RNA, 19 nt, Artificial Sequence
  Description of Artificial Sequence: Synthetic oligonucleotide
gugaguacauguacuacgc

SEQ ID NO: 1699688 - RNA, 19 nt, Artificial Sequence
  Description of Artificial Sequence: Synthetic oligonucleotide
uauggauggcucacccacc

SEQ ID NO: 1699689 - RNA, 19 nt, Artificial Sequence
  Description of Artificial Sequence: Synthetic oligonucleotide
ugaaaaccaugauggggcu

SEQ ID NO: 1699690 - RNA, 19 nt, Artificial Sequence
  Description of Artificial Sequence: Synthetic oligonucleotide
gaguauacccauccugaca

SEQ ID NO: 1699691 - RNA, 19 nt, Artificial Sequence
  Description of Artificial Sequence: Synthetic oligonucleotide
uauacccauccugacauuc

SEQ ID NO: 1699692 - RNA, 19 nt, Artificial Sequence
  Description of Artificial Sequence: Synthetic oligonucleotide
gacauuccaagguuaaagu

SEQ ID NO: 1699693 - RNA, 19 nt, Artificial Sequence
  Description of Artificial Sequence: Synthetic oligonucleotide
ucaucaguuuugcaucgau

SEQ ID NO: 1699694 - RNA, 19 nt, Artificial Sequence
  Description of Artificial Sequence: Synthetic oligonucleotide
aacccagcuggcauuugac

SEQ ID NO: 1699695 - RNA, 19 nt, Artificial Sequence
  Description of Artificial Sequence: Synthetic oligonucleotide
ugaggaguuucacauuguu

SEQ ID NO: 1699696 - RNA, 19 nt, Artificial Sequence
  Description of Artificial Sequence: Synthetic oligonucleotide
gaugaucauuccaaugaca

SEQ ID NO: 1699697 - RNA, 19 nt, Artificial Sequence
  Description of Artificial Sequence: Synthetic oligonucleotide
auacccauccugacauucc

SEQ ID NO: 1699698 - RNA, 19 nt, Artificial Sequence
  Description of Artificial Sequence: Synthetic oligonucleotide
uugauuuauucggcuagca

SEQ ID NO: 1699699 - RNA, 19 nt, Artificial Sequence
  Description of Artificial Sequence: Synthetic oligonucleotide
cagguuaaagagcuucuuc

SEQ ID NO: 1699700 - RNA, 19 nt, Artificial Sequence
  Description of Artificial Sequence: Synthetic oligonucleotide
uugggugagugaauuccga

SEQ ID NO: 1699701 - RNA, 19 nt, Artificial Sequence
  Description of Artificial Sequence: Synthetic oligonucleotide
ucacauuguuugcguauac

SEQ ID NO: 1699702 - RNA, 19 nt, Artificial Sequence
  Description of Artificial Sequence: Synthetic oligonucleotide
uuuauucggcuagcaaaug

SEQ ID NO: 1699703 - RNA, 19 nt, Artificial Sequence
  Description of Artificial Sequence: Synthetic oligonucleotide
uccggauuucacucggaga

SEQ ID NO: 1699704 - RNA, 19 nt, Artificial Sequence
  Description of Artificial Sequence: Synthetic oligonucleotide
ccaagguuaaaguaucuuc

SEQ ID NO: 1699705 - RNA, 19 nt, Artificial Sequence
  Description of Artificial Sequence: Synthetic oligonucleotide
caucauaaacccaggcuga

SEQ ID NO: 1699706 - RNA, 19 nt, Artificial Sequence
  Description of Artificial Sequence: Synthetic oligonucleotide
ucgauagguagccaccauu

SEQ ID NO: 1699707 - RNA, 19 nt, Artificial Sequence
  Description of Artificial Sequence: Synthetic oligonucleotide
aagcuacaaggcgacccac

SEQ ID NO: 1699708 - RNA, 19 nt, Artificial Sequence
  Description of Artificial Sequence: Synthetic oligonucleotide
ugcacucuguuguuuccug

SEQ ID NO: 1699709 - RNA, 19 nt, Artificial Sequence
  Description of Artificial Sequence: Synthetic oligonucleotide
uguccauucugaguuuugu

SEQ ID NO: 1699710 - RNA, 19 nt, Artificial Sequence
  Description of Artificial Sequence: Synthetic oligonucleotide
gcuuucagacaccaugaag

SEQ ID NO: 1699711 - RNA, 19 nt, Artificial Sequence
  Description of Artificial Sequence: Synthetic oligonucleotide
uagguggcucauuauccca

SEQ ID NO: 1699712 - RNA, 19 nt, Artificial Sequence
  Description of Artificial Sequence: Synthetic oligonucleotide
ggagaauacauuccacuuc

SEQ ID NO: 1699713 - RNA, 19 nt, Artificial Sequence
  Description of Artificial Sequence: Synthetic oligonucleotide
agcuugagggugauuacag

SEQ ID NO: 1699714 - RNA, 19 nt, Artificial Sequence
  Description of Artificial Sequence: Synthetic oligonucleotide
aguuaugagaccacuguuu

SEQ ID NO: 1699715 - RNA, 19 nt, Artificial Sequence
  Description of Artificial Sequence: Synthetic oligonucleotide
aacacggauucaucaguuu

SEQ ID NO: 1699716 - RNA, 19 nt, Artificial Sequence
  Description of Artificial Sequence: Synthetic oligonucleotide
acgagaucuccauuggcaa

SEQ ID NO: 1699717 - RNA, 19 nt, Artificial Sequence
  Description of Artificial Sequence: Synthetic oligonucleotide
agaaagcuacaaggcgacc

SEQ ID NO: 1699718 - RNA, 19 nt, Artificial Sequence
  Description of Artificial Sequence: Synthetic oligonucleotide
agaugacggcaagaagagc

SEQ ID NO: 1699719 - RNA, 19 nt, Artificial Sequence
  Description of Artificial Sequence: Synthetic oligonucleotide
uucacucggagaauacauu

SEQ ID NO: 1699720 - RNA, 19 nt, Artificial Sequence
  Description of Artificial Sequence: Synthetic oligonucleotide
cuugagggugauuacagcu

SEQ ID NO: 1699721 - RNA, 19 nt, Artificial Sequence
  Description of Artificial Sequence: Synthetic oligonucleotide
auuucacucggagaauaca

SEQ ID NO: 1699722 - RNA, 19 nt, Artificial Sequence
  Description of Artificial Sequence: Synthetic oligonucleotide
aguacauguacuacgccau

SEQ ID NO: 1699723 - RNA, 19 nt, Artificial Sequence
  Description of Artificial Sequence: Synthetic oligonucleotide
aaacugggugucugugagu

SEQ ID NO: 1699724 - RNA, 19 nt, Artificial Sequence
  Description of Artificial Sequence: Synthetic oligonucleotide
ucuugacaucaaugcacug

SEQ ID NO: 1699725 - RNA, 19 nt, Artificial Sequence
  Description of Artificial Sequence: Synthetic oligonucleotide
gauuucacucggagaauac

SEQ ID NO: 1699726 - RNA, 19 nt, Artificial Sequence
  Description of Artificial Sequence: Synthetic oligonucleotide
cugaaucaaacaacagaga

SEQ ID NO: 1699727 - RNA, 19 nt, Artificial Sequence
  Description of Artificial Sequence: Synthetic oligonucleotide
gaugcuccaauaggaaaca

SEQ ID NO: 1699728 - RNA, 19 nt, Artificial Sequence
  Description of Artificial Sequence: Synthetic oligonucleotide
ggaguuucacauuguuugc

SEQ ID NO: 1699729 - RNA, 19 nt, Artificial Sequence
  Description of Artificial Sequence: Synthetic oligonucleotide
caacgagaucuccauuggc

SEQ ID NO: 1699730 - RNA, 19 nt, Artificial Sequence
  Description of Artificial Sequence: Synthetic oligonucleotide
cucacauauagguggcuca

SEQ ID NO: 1699731 - RNA, 19 nt, Artificial Sequence
  Description of Artificial Sequence: Synthetic oligonucleotide
cuccacaauauccccuaag

SEQ ID NO: 1699732 - RNA, 19 nt, Artificial Sequence
  Description of Artificial Sequence: Synthetic oligonucleotide
cucggagaauacauuccac

SEQ ID NO: 1699733 - RNA, 19 nt, Artificial Sequence
  Description of Artificial Sequence: Synthetic oligonucleotide
cuacaaggcgacccacagg

SEQ ID NO: 1699734 - RNA, 19 nt, Artificial Sequence
  Description of Artificial Sequence: Synthetic oligonucleotide
uccugacauuccaagguua

SEQ ID NO: 1699735 - RNA, 19 nt, Artificial Sequence
  Description of Artificial Sequence: Synthetic oligonucleotide
ugaaauguccugggcgaca

SEQ ID NO: 1699736 - RNA, 19 nt, Artificial Sequence
  Description of Artificial Sequence: Synthetic oligonucleotide
aaacacggauucaucaguu

SEQ ID NO: 1699737 - RNA, 19 nt, Artificial Sequence
  Description of Artificial Sequence: Synthetic oligonucleotide
auaccaguuaugagaccac

SEQ ID NO: 1699738 - RNA, 19 nt, Artificial Sequence
  Description of Artificial Sequence: Synthetic oligonucleotide
uaggaucaacgagaucucc

SEQ ID NO: 1699739 - RNA, 19 nt, Artificial Sequence
  Description of Artificial Sequence: Synthetic oligonucleotide
acauauauuuucagcacuu

SEQ ID NO: 1699740 - RNA, 19 nt, Artificial Sequence
  Description of Artificial Sequence: Synthetic oligonucleotide
uuggcucccauuuguuuaa

SEQ ID NO: 1699741 - RNA, 19 nt, Artificial Sequence
  Description of Artificial Sequence: Synthetic oligonucleotide
ccgaagaggaaccaaugag

SEQ ID NO: 1699742 - RNA, 19 nt, Artificial Sequence
  Description of Artificial Sequence: Synthetic oligonucleotide
ucaacaugaggaggcguac

SEQ ID NO: 1699743 - RNA, 19 nt, Artificial Sequence
  Description of Artificial Sequence: Synthetic oligonucleotide
gggugagugaauuccgagc

SEQ ID NO: 1699744 - RNA, 19 nt, Artificial Sequence
  Description of Artificial Sequence: Synthetic oligonucleotide
uggaacugcuguucuccug

SEQ ID NO: 1699745 - RNA, 19 nt, Artificial Sequence
  Description of Artificial Sequence: Synthetic oligonucleotide
gagugaauuccgagcugcg

SEQ ID NO: 1699746 - RNA, 19 nt, Artificial Sequence
  Description of Artificial Sequence: Synthetic oligonucleotide
aaaucuucuguaggaucaa

SEQ ID NO: 1699747 - RNA, 19 nt, Artificial Sequence
  Description of Artificial Sequence: Synthetic oligonucleotide
caauaccaguuaugagacc

SEQ ID NO: 1699748 - RNA, 19 nt, Artificial Sequence
  Description of Artificial Sequence: Synthetic oligonucleotide
aauuaugcaugcagccgaa

SEQ ID NO: 1699749 - RNA, 19 nt, Artificial Sequence
  Description of Artificial Sequence: Synthetic oligonucleotide
augcagccgaagaggaacc

SEQ ID NO: 1699750 - RNA, 19 nt, Artificial Sequence
  Description of Artificial Sequence: Synthetic oligonucleotide
cauuguuugcguauacaua

SEQ ID NO: 1699751 - RNA, 19 nt, Artificial Sequence
  Description of Artificial Sequence: Synthetic oligonucleotide
uuguuugcguauacauaua

SEQ ID NO: 1699752 - RNA, 19 nt, Artificial Sequence
  Description of Artificial Sequence: Synthetic oligonucleotide
caccagguuaaagagcuuc

SEQ ID NO: 1699753 - RNA, 19 nt, Artificial Sequence
  Description of Artificial Sequence: Synthetic oligonucleotide
auccccuaaggaaaauaag

SEQ ID NO: 1699754 - RNA, 19 nt, Artificial Sequence
  Description of Artificial Sequence: Synthetic oligonucleotide
uccaagguuaaaguaucuu

SEQ ID NO: 1699755 - RNA, 19 nt, Artificial Sequence
  Description of Artificial Sequence: Synthetic oligonucleotide
aauauccccuaaggaaaau

SEQ ID NO: 1699756 - RNA, 19 nt, Artificial Sequence
  Description of Artificial Sequence: Synthetic oligonucleotide
cugcauuacaaguauaauu

SEQ ID NO: 1699757 - RNA, 19 nt, Artificial Sequence
  Description of Artificial Sequence: Synthetic oligonucleotide
auggauacucacuccuuua

SEQ ID NO: 1699758 - RNA, 19 nt, Artificial Sequence
  Description of Artificial Sequence: Synthetic oligonucleotide
cuucuagaguauacccauc

SEQ ID NO: 1699759 - RNA, 19 nt, Artificial Sequence
  Description of Artificial Sequence: Synthetic oligonucleotide
gcgacauugauacaucaaa

SEQ ID NO: 1699760 - RNA, 19 nt, Artificial Sequence
  Description of Artificial Sequence: Synthetic oligonucleotide
ggugagugaauuccgagcu

SEQ ID NO: 1699761 - RNA, 19 nt, Artificial Sequence
  Description of Artificial Sequence: Synthetic oligonucleotide
ugggcgacauugauacauc

SEQ ID NO: 1699762 - RNA, 19 nt, Artificial Sequence
  Description of Artificial Sequence: Synthetic oligonucleotide
uaccaguuaugagaccacu

SEQ ID NO: 1699763 - RNA, 19 nt, Artificial Sequence
  Description of Artificial Sequence: Synthetic oligonucleotide
aucauugcugguacagugu

SEQ ID NO: 1699764 - RNA, 19 nt, Artificial Sequence
  Description of Artificial Sequence: Synthetic oligonucleotide
agagagcaaugaugaauaa

SEQ ID NO: 1699765 - RNA, 19 nt, Artificial Sequence
  Description of Artificial Sequence: Synthetic oligonucleotide
cauaaacccaggcugacau

SEQ ID NO: 1699766 - RNA, 19 nt, Artificial Sequence
  Description of Artificial Sequence: Synthetic oligonucleotide
uucuugggugagugaauuc

SEQ ID NO: 1699767 - RNA, 19 nt, Artificial Sequence
  Description of Artificial Sequence: Synthetic oligonucleotide
auuccgagcugcgcuauug

SEQ ID NO: 1699768 - RNA, 19 nt, Artificial Sequence
  Description of Artificial Sequence: Synthetic oligonucleotide
aggaucaacgagaucucca

SEQ ID NO: 1699769 - RNA, 19 nt, Artificial Sequence
  Description of Artificial Sequence: Synthetic oligonucleotide
uugauacaucaaagaugcu

SEQ ID NO: 1699770 - RNA, 19 nt, Artificial Sequence
  Description of Artificial Sequence: Synthetic oligonucleotide
ucacuccuuuacacuugcc

SEQ ID NO: 1699771 - RNA, 19 nt, Artificial Sequence
  Description of Artificial Sequence: Synthetic oligonucleotide
auguacuacgccauuguua

SEQ ID NO: 1699772 - RNA, 19 nt, Artificial Sequence
  Description of Artificial Sequence: Synthetic oligonucleotide
gugagugaauuccgagcug

SEQ ID NO: 1699773 - RNA, 19 nt, Artificial Sequence
  Description of Artificial Sequence: Synthetic oligonucleotide
gaauacauuccacuuccuu

SEQ ID NO: 1699774 - RNA, 19 nt, Artificial Sequence
  Description of Artificial Sequence: Synthetic oligonucleotide
cauccugacauuccaaggu

SEQ ID NO: 1699775 - RNA, 19 nt, Artificial Sequence
  Description of Artificial Sequence: Synthetic oligonucleotide
accaaugaggcgguauccu

SEQ ID NO: 1699776 - RNA, 19 nt, Artificial Sequence
  Description of Artificial Sequence: Synthetic oligonucleotide
uccugccaucauaaaccca

SEQ ID NO: 1699777 - RNA, 19 nt, Artificial Sequence
  Description of Artificial Sequence: Synthetic oligonucleotide
uuguuacauugcacucugu

SEQ ID NO: 1699778 - RNA, 19 nt, Artificial Sequence
  Description of Artificial Sequence: Synthetic oligonucleotide
gaggcgguauccugcauua

SEQ ID NO: 1699779 - RNA, 19 nt, Artificial Sequence
  Description of Artificial Sequence: Synthetic oligonucleotide
auggcuuggggugguucac

SEQ ID NO: 1699780 - RNA, 19 nt, Artificial Sequence
  Description of Artificial Sequence: Synthetic oligonucleotide
auauccccuaaggaaaaua

SEQ ID NO: 1699781 - RNA, 19 nt, Artificial Sequence
  Description of Artificial Sequence: Synthetic oligonucleotide
ggaggcguacauuucuuga

SEQ ID NO: 1699782 - RNA, 19 nt, Artificial Sequence
  Description of Artificial Sequence: Synthetic oligonucleotide
gcucauuaucccaagcaac

SEQ ID NO: 1699783 - RNA, 19 nt, Artificial Sequence
  Description of Artificial Sequence: Synthetic oligonucleotide
guuucacauuguuugcgua

SEQ ID NO: 1699784 - RNA, 19 nt, Artificial Sequence
  Description of Artificial Sequence: Synthetic oligonucleotide
ggauacucacuccuuuaca

SEQ ID NO: 1699785 - RNA, 19 nt, Artificial Sequence
  Description of Artificial Sequence: Synthetic oligonucleotide
gguacacauuugcccagag

SEQ ID NO: 1699786 - RNA, 19 nt, Artificial Sequence
  Description of Artificial Sequence: Synthetic oligonucleotide
accagguuaaagagcuucu

SEQ ID NO: 1699787 - RNA, 19 nt, Artificial Sequence
  Description of Artificial Sequence: Synthetic oligonucleotide
gcuauuggaacugcuguuc

SEQ ID NO: 1699788 - RNA, 19 nt, Artificial Sequence
  Description of Artificial Sequence: Synthetic oligonucleotide
gcguauacauauauuuuca

SEQ ID NO: 1699789 - RNA, 19 nt, Artificial Sequence
  Description of Artificial Sequence: Synthetic oligonucleotide
gcauuacaaguauaauuaa

SEQ ID NO: 1699790 - RNA, 19 nt, Artificial Sequence
  Description of Artificial Sequence: Synthetic oligonucleotide
augagaccacuguuugaau

SEQ ID NO: 1699791 - RNA, 19 nt, Artificial Sequence
  Description of Artificial Sequence: Synthetic oligonucleotide
guaggaucaacgagaucuc

SEQ ID NO: 1699792 - RNA, 19 nt, Artificial Sequence
  Description of Artificial Sequence: Synthetic oligonucleotide
aauuccgagcugcgcuauu

SEQ ID NO: 1699793 - RNA, 19 nt, Artificial Sequence
  Description of Artificial Sequence: Synthetic oligonucleotide
ggcgguauccugcauuaca

SEQ ID NO: 1699794 - RNA, 19 nt, Artificial Sequence
  Description of Artificial Sequence: Synthetic oligonucleotide
aucgauagguagccaccau

SEQ ID NO: 1699795 - RNA, 19 nt, Artificial Sequence
  Description of Artificial Sequence: Synthetic oligonucleotide
ccggauuucacucggagaa

SEQ ID NO: 1699796 - RNA, 19 nt, Artificial Sequence
  Description of Artificial Sequence: Synthetic oligonucleotide
uuggcagaugauggagaac

SEQ ID NO: 1699797 - RNA, 19 nt, Artificial Sequence
  Description of Artificial Sequence: Synthetic oligonucleotide
guagccaccauuccauaau

SEQ ID NO: 1699798 - RNA, 19 nt, Artificial Sequence
  Description of Artificial Sequence: Synthetic oligonucleotide
acaaggcgacccacagggc

SEQ ID NO: 1699799 - RNA, 19 nt, Artificial Sequence
  Description of Artificial Sequence: Synthetic oligonucleotide
agcugcgcuauuggaacug

SEQ ID NO: 1699800 - RNA, 19 nt, Artificial Sequence
  Description of Artificial Sequence: Synthetic oligonucleotide
cuugaggauuuaaauggau

SEQ ID NO: 1699801 - RNA, 19 nt, Artificial Sequence
  Description of Artificial Sequence: Synthetic oligonucleotide
cgauagguagccaccauuc

SEQ ID NO: 1699802 - RNA, 19 nt, Artificial Sequence
  Description of Artificial Sequence: Synthetic oligonucleotide
gguacaguguauggauggc

SEQ ID NO: 1699803 - RNA, 19 nt, Artificial Sequence
  Description of Artificial Sequence: Synthetic oligonucleotide
cacauuguuugcguauaca

SEQ ID NO: 1699804 - RNA, 19 nt, Artificial Sequence
  Description of Artificial Sequence: Synthetic oligonucleotide
gccuggugaaauguccugg

SEQ ID NO: 1699805 - RNA, 19 nt, Artificial Sequence
  Description of Artificial Sequence: Synthetic oligonucleotide
cuguucuccugacuugaga

SEQ ID NO: 1699806 - RNA, 19 nt, Artificial Sequence
  Description of Artificial Sequence: Synthetic oligonucleotide
cuuuacacuugccgucgga

SEQ ID NO: 1699807 - RNA, 19 nt, Artificial Sequence
  Description of Artificial Sequence: Synthetic oligonucleotide
ggcuagcaaaugaaaacca

SEQ ID NO: 1699808 - RNA, 19 nt, Artificial Sequence
  Description of Artificial Sequence: Synthetic oligonucleotide
caucgauagguagccacca

SEQ ID NO: 1699809 - RNA, 19 nt, Artificial Sequence
  Description of Artificial Sequence: Synthetic oligonucleotide
ccaaugaggcgguauccug

SEQ ID NO: 1699810 - RNA, 19 nt, Artificial Sequence
  Description of Artificial Sequence: Synthetic oligonucleotide
gacgaccagcuggaccccg

SEQ ID NO: 1699811 - RNA, 19 nt, Artificial Sequence
  Description of Artificial Sequence: Synthetic oligonucleotide
agaauacauuccacuuccu

SEQ ID NO: 1699812 - RNA, 19 nt, Artificial Sequence
  Description of Artificial Sequence: Synthetic oligonucleotide
caguuugauuuauucggcu

SEQ ID NO: 1699813 - RNA, 19 nt, Artificial Sequence
  Description of Artificial Sequence: Synthetic oligonucleotide
gccgaagaggaaccaauga

SEQ ID NO: 1699814 - RNA, 19 nt, Artificial Sequence
  Description of Artificial Sequence: Synthetic oligonucleotide
cuuucaacuccuuccggau

SEQ ID NO: 1699815 - RNA, 19 nt, Artificial Sequence
  Description of Artificial Sequence: Synthetic oligonucleotide
cgagcugcgcuauuggaac

SEQ ID NO: 1699816 - RNA, 19 nt, Artificial Sequence
  Description of Artificial Sequence: Synthetic oligonucleotide
cggcagaaagcuacaaggc

SEQ ID NO: 1699817 - RNA, 19 nt, Artificial Sequence
  Description of Artificial Sequence: Synthetic oligonucleotide
acgaccagcuggaccccgc

SEQ ID NO: 1699818 - RNA, 19 nt, Artificial Sequence
  Description of Artificial Sequence: Synthetic oligonucleotide
gcugguacaguguauggau

SEQ ID NO: 1699819 - RNA, 19 nt, Artificial Sequence
  Description of Artificial Sequence: Synthetic oligonucleotide
gugaaauguccugggcgac

SEQ ID NO: 1699820 - RNA, 19 nt, Artificial Sequence
  Description of Artificial Sequence: Synthetic oligonucleotide
gguucacaaggaauuaucu

SEQ ID NO: 1699821 - RNA, 19 nt, Artificial Sequence
  Description of Artificial Sequence: Synthetic oligonucleotide
agcuacaaggcgacccaca

SEQ ID NO: 1699822 - RNA, 19 nt, Artificial Sequence
  Description of Artificial Sequence: Synthetic oligonucleotide
agguacacauuugcccaga

SEQ ID NO: 1699823 - RNA, 19 nt, Artificial Sequence
  Description of Artificial Sequence: Synthetic oligonucleotide
agccaccauuccauaauga

SEQ ID NO: 1699824 - RNA, 19 nt, Artificial Sequence
  Description of Artificial Sequence: Synthetic oligonucleotide
gguagccaccauuccauaa

SEQ ID NO: 1699825 - RNA, 19 nt, Artificial Sequence
  Description of Artificial Sequence: Synthetic oligonucleotide
caaugacaauaccaguuau

SEQ ID NO: 1699826 - RNA, 19 nt, Artificial Sequence
  Description of Artificial Sequence: Synthetic oligonucleotide
gaaauguccugggcgacau

SEQ ID NO: 1699827 - RNA, 19 nt, Artificial Sequence
  Description of Artificial Sequence: Synthetic oligonucleotide
ccacaauauccccuaagga

SEQ ID NO: 1699828 - RNA, 19 nt, Artificial Sequence
  Description of Artificial Sequence: Synthetic oligonucleotide
cauauagguggcucauuau

SEQ ID NO: 1699829 - RNA, 19 nt, Artificial Sequence
  Description of Artificial Sequence: Synthetic oligonucleotide
ggaucaacgagaucuccau

SEQ ID NO: 1699830 - RNA, 19 nt, Artificial Sequence
  Description of Artificial Sequence: Synthetic oligonucleotide
aggaauuaucucacauaua

SEQ ID NO: 1699831 - RNA, 19 nt, Artificial Sequence
  Description of Artificial Sequence: Synthetic oligonucleotide
uugcaucgauagguagcca

SEQ ID NO: 1699832 - RNA, 19 nt, Artificial Sequence
  Description of Artificial Sequence: Synthetic oligonucleotide
ccccuaaggaaaauaagcu

SEQ ID NO: 1699833 - RNA, 19 nt, Artificial Sequence
  Description of Artificial Sequence: Synthetic oligonucleotide
agguggcucauuaucccaa

SEQ ID NO: 1699834 - RNA, 19 nt, Artificial Sequence
  Description of Artificial Sequence: Synthetic oligonucleotide
guacaguguauggauggcu

SEQ ID NO: 1699835 - RNA, 19 nt, Artificial Sequence
  Description of Artificial Sequence: Synthetic oligonucleotide
gaggaguuucacauuguuu

SEQ ID NO: 1699836 - RNA, 19 nt, Artificial Sequence
  Description of Artificial Sequence: Synthetic oligonucleotide
cuguaggaucaacgagauc

SEQ ID NO: 1699837 - RNA, 19 nt, Artificial Sequence
  Description of Artificial Sequence: Synthetic oligonucleotide
gaucaacgagaucuccauu

SEQ ID NO: 1699838 - RNA, 19 nt, Artificial Sequence
  Description of Artificial Sequence: Synthetic oligonucleotide
gggcgacauugauacauca

SEQ ID NO: 1699839 - RNA, 19 nt, Artificial Sequence
  Description of Artificial Sequence: Synthetic oligonucleotide
agguagccaccauuccaua

SEQ ID NO: 1699840 - RNA, 19 nt, Artificial Sequence
  Description of Artificial Sequence: Synthetic oligonucleotide
gcguacauuucuugacauc

SEQ ID NO: 1699841 - RNA, 19 nt, Artificial Sequence
  Description of Artificial Sequence: Synthetic oligonucleotide
cuuccggauuucacucgga

SEQ ID NO: 1699842 - RNA, 19 nt, Artificial Sequence
  Description of Artificial Sequence: Synthetic oligonucleotide
ccaguuaugagaccacugu

SEQ ID NO: 1699843 - RNA, 19 nt, Artificial Sequence
  Description of Artificial Sequence: Synthetic oligonucleotide
gcgcuauuggaacugcugu

SEQ ID NO: 1699844 - RNA, 19 nt, Artificial Sequence
  Description of Artificial Sequence: Synthetic oligonucleotide
cccagaguagaugacggca

SEQ ID NO: 1699845 - RNA, 19 nt, Artificial Sequence
  Description of Artificial Sequence: Synthetic oligonucleotide
auggcucacccaccagguu

SEQ ID NO: 1699846 - RNA, 19 nt, Artificial Sequence
  Description of Artificial Sequence: Synthetic oligonucleotide
caguuaugagaccacuguu

SEQ ID NO: 1699847 - RNA, 19 nt, Artificial Sequence
  Description of Artificial Sequence: Synthetic oligonucleotide
guuugcguauacauauauu

SEQ ID NO: 1699848 - RNA, 19 nt, Artificial Sequence
  Description of Artificial Sequence: Synthetic oligonucleotide
cugacauuccaagguuaaa

SEQ ID NO: 1699849 - RNA, 19 nt, Artificial Sequence
  Description of Artificial Sequence: Synthetic oligonucleotide
gagcugcgcuauuggaacu

SEQ ID NO: 1699850 - RNA, 19 nt, Artificial Sequence
  Description of Artificial Sequence: Synthetic oligonucleotide
cauguacuacgccauuguu

SEQ ID NO: 1699851 - RNA, 19 nt, Artificial Sequence
  Description of Artificial Sequence: Synthetic oligonucleotide
ggcguacauuucuugacau

SEQ ID NO: 1699852 - RNA, 19 nt, Artificial Sequence
  Description of Artificial Sequence: Synthetic oligonucleotide
ggcgacauugauacaucaa

SEQ ID NO: 1699853 - RNA, 19 nt, Artificial Sequence
  Description of Artificial Sequence: Synthetic oligonucleotide
acacuugccgucggagguu

SEQ ID NO: 1699854 - RNA, 19 nt, Artificial Sequence
  Description of Artificial Sequence: Synthetic oligonucleotide
gcugcgcuauuggaacugc

SEQ ID NO: 1699855 - RNA, 19 nt, Artificial Sequence
  Description of Artificial Sequence: Synthetic oligonucleotide
aucaaacaacagagagcaa

SEQ ID NO: 1699856 - RNA, 19 nt, Artificial Sequence
  Description of Artificial Sequence: Synthetic oligonucleotide
gaggaaccaaugaggcggu

SEQ ID NO: 1699857 - RNA, 19 nt, Artificial Sequence
  Description of Artificial Sequence: Synthetic oligonucleotide
ccagcuggaccccgccacg

SEQ ID NO: 1699858 - RNA, 19 nt, Artificial Sequence
  Description of Artificial Sequence: Synthetic oligonucleotide
gaaaaccaugauggggcuu

SEQ ID NO: 1699859 - RNA, 19 nt, Artificial Sequence
  Description of Artificial Sequence: Synthetic oligonucleotide
cauugcugguacaguguau

SEQ ID NO: 1699860 - RNA, 19 nt, Artificial Sequence
  Description of Artificial Sequence: Synthetic oligonucleotide
ggcuuggggugguucacaa

SEQ ID NO: 1699861 - RNA, 19 nt, Artificial Sequence
  Description of Artificial Sequence: Synthetic oligonucleotide
guacauguacuacgccauu

SEQ ID NO: 1699862 - RNA, 19 nt, Artificial Sequence
  Description of Artificial Sequence: Synthetic oligonucleotide
gaauuccgagcugcgcuau

SEQ ID NO: 1699863 - RNA, 19 nt, Artificial Sequence
  Description of Artificial Sequence: Synthetic oligonucleotide
ccgagcugcgcuauuggaa

SEQ ID NO: 1699864 - RNA, 19 nt, Artificial Sequence
  Description of Artificial Sequence: Synthetic oligonucleotide
gccgucggagguuuugucu

SEQ ID NO: 1699865 - RNA, 19 nt, Artificial Sequence
  Description of Artificial Sequence: Synthetic oligonucleotide
cccuaaggaaaauaagcuu

SEQ ID NO: 1699866 - RNA, 19 nt, Artificial Sequence
  Description of Artificial Sequence: Synthetic oligonucleotide
uggcucccauuuguuuaau

SEQ ID NO: 1699867 - RNA, 19 nt, Artificial Sequence
  Description of Artificial Sequence: Synthetic oligonucleotide
ggaaccaaugaggcgguau

SEQ ID NO: 1699868 - RNA, 19 nt, Artificial Sequence
  Description of Artificial Sequence: Synthetic oligonucleotide
aggcgacccacagggccca

SEQ ID NO: 1699869 - RNA, 19 nt, Artificial Sequence
  Description of Artificial Sequence: Synthetic oligonucleotide
ggcugacauccaaacucca

SEQ ID NO: 1699870 - RNA, 19 nt, Artificial Sequence
  Description of Artificial Sequence: Synthetic oligonucleotide
gggugauuacagcugucuu

SEQ ID NO: 1699871 - RNA, 19 nt, Artificial Sequence
  Description of Artificial Sequence: Synthetic oligonucleotide
cugcgcuauuggaacugcu

SEQ ID NO: 1699872 - RNA, 19 nt, Artificial Sequence
  Description of Artificial Sequence: Synthetic oligonucleotide
guauacccauccugacauu

SEQ ID NO: 1699873 - RNA, 19 nt, Artificial Sequence
  Description of Artificial Sequence: Synthetic oligonucleotide
acgccauuguuaggaucuu

SEQ ID NO: 1699874 - RNA, 19 nt, Artificial Sequence
  Description of Artificial Sequence: Synthetic oligonucleotide
ggaacccagcuggcauuug

SEQ ID NO: 1699875 - RNA, 19 nt, Artificial Sequence
  Description of Artificial Sequence: Synthetic oligonucleotide
ccacuguuugaaugaggua

SEQ ID NO: 1699876 - RNA, 19 nt, Artificial Sequence
  Description of Artificial Sequence: Synthetic oligonucleotide
cccgccacggcagaaagcu

SEQ ID NO: 1699877 - RNA, 19 nt, Artificial Sequence
  Description of Artificial Sequence: Synthetic oligonucleotide
aggaaccaaugaggcggua

SEQ ID NO: 1699878 - RNA, 19 nt, Artificial Sequence
  Description of Artificial Sequence: Synthetic oligonucleotide
gccacggcagaaagcuaca

SEQ ID NO: 1699879 - RNA, 19 nt, Artificial Sequence
  Description of Artificial Sequence: Synthetic oligonucleotide
cccucucaucaguuuugca

SEQ ID NO: 1699880 - RNA, 19 nt, Artificial Sequence
  Description of Artificial Sequence: Synthetic oligonucleotide
cccauuuguuuaauuuguu

SEQ ID NO: 1699881 - RNA, 19 nt, Artificial Sequence
  Description of Artificial Sequence: Synthetic oligonucleotide
ccgcugugaucuccgagaa

SEQ ID NO: 1699882 - RNA, 19 nt, Artificial Sequence
  Description of Artificial Sequence: Synthetic oligonucleotide
gucggagguuuugucuuuu

SEQ ID NO: 1699883 - RNA, 19 nt, Artificial Sequence
  Description of Artificial Sequence: Synthetic oligonucleotide
gcaugcagccgaagaggaa

SEQ ID NO: 1699884 - RNA, 19 nt, Artificial Sequence
  Description of Artificial Sequence: Synthetic oligonucleotide
cgccauuguuaggaucuug

SEQ ID NO: 1699885 - RNA, 19 nt, Artificial Sequence
  Description of Artificial Sequence: Synthetic oligonucleotide
ccgucggagguuuugucuu

SEQ ID NO: 1699886 - RNA, 19 nt, Artificial Sequence
  Description of Artificial Sequence: Synthetic oligonucleotide
cacuugccgucggagguuu

SEQ ID NO: 1699887 - RNA, 19 nt, Artificial Sequence
  Description of Artificial Sequence: Synthetic oligonucleotide
cgcuauuggaacugcuguu

SEQ ID NO: 1699888 - RNA, 19 nt, Artificial Sequence
  Description of Artificial Sequence: Synthetic oligonucleotide
ccagguuaaagagcuucuu

SEQ ID NO: 1699889 - RNA, 19 nt, Artificial Sequence
  Description of Artificial Sequence: Synthetic oligonucleotide
gcccagccgcugugaucuc

SEQ ID NO: 1699890 - RNA, 19 nt, Artificial Sequence
  Description of Artificial Sequence: Synthetic oligonucleotide
ccgccacggcagaaagcua

SEQ ID NO: 1699891 - RNA, 19 nt, Artificial Sequence
  Description of Artificial Sequence: Synthetic oligonucleotide
cggauuucacucggagaau

SEQ ID NO: 1699892 - RNA, 19 nt, Artificial Sequence
  Description of Artificial Sequence: Synthetic oligonucleotide
aagcuuuacaaucugagag

SEQ ID NO: 1699893 - RNA, 19 nt, Artificial Sequence
  Description of Artificial Sequence: Synthetic oligonucleotide
aucugagagagacacaucc

SEQ ID NO: 1699894 - RNA, 19 nt, Artificial Sequence
  Description of Artificial Sequence: Synthetic oligonucleotide
uuuacaaucugagagagac

SEQ ID NO: 1699895 - RNA, 19 nt, Artificial Sequence
  Description of Artificial Sequence: Synthetic oligonucleotide
ucaagcuuuacaaucugag

SEQ ID NO: 1699896 - RNA, 19 nt, Artificial Sequence
  Description of Artificial Sequence: Synthetic oligonucleotide
uacaaucugagagagacac

SEQ ID NO: 1699897 - RNA, 19 nt, Artificial Sequence
  Description of Artificial Sequence: Synthetic oligonucleotide
ucuucaagcuuuacaaucu

SEQ ID NO: 1699898 - RNA, 19 nt, Artificial Sequence
  Description of Artificial Sequence: Synthetic oligonucleotide
uuauuauuuucagagggga

SEQ ID NO: 1699899 - RNA, 19 nt, Artificial Sequence
  Description of Artificial Sequence: Synthetic oligonucleotide
gacacauccgagcucuggg

SEQ ID NO: 1699900 - RNA, 19 nt, Artificial Sequence
  Description of Artificial Sequence: Synthetic oligonucleotide
uauuauuuucagaggggaa

SEQ ID NO: 1699901 - RNA, 19 nt, Artificial Sequence
  Description of Artificial Sequence: Synthetic oligonucleotide
agcuuuacaaucugagaga

SEQ ID NO: 1699902 - RNA, 19 nt, Artificial Sequence
  Description of Artificial Sequence: Synthetic oligonucleotide
uccuccucccaauacuccg

SEQ ID NO: 1699903 - RNA, 19 nt, Artificial Sequence
  Description of Artificial Sequence: Synthetic oligonucleotide
uucaagcuuuacaaucuga

SEQ ID NO: 1699904 - RNA, 19 nt, Artificial Sequence
  Description of Artificial Sequence: Synthetic oligonucleotide
cugucuucaagcuuuacaa

SEQ ID NO: 1699905 - RNA, 19 nt, Artificial Sequence
  Description of Artificial Sequence: Synthetic oligonucleotide
acauccgagcucugggaac

SEQ ID NO: 1699906 - RNA, 19 nt, Artificial Sequence
  Description of Artificial Sequence: Synthetic oligonucleotide
ugguccacguagccgacag

SEQ ID NO: 1699907 - RNA, 19 nt, Artificial Sequence
  Description of Artificial Sequence: Synthetic oligonucleotide
cuccgugugguccacguag

SEQ ID NO: 1699908 - RNA, 19 nt, Artificial Sequence
  Description of Artificial Sequence: Synthetic oligonucleotide
uuacaaucugagagagaca

SEQ ID NO: 1699909 - RNA, 19 nt, Artificial Sequence
  Description of Artificial Sequence: Synthetic oligonucleotide
aaucugagagagacacauc

SEQ ID NO: 1699910 - RNA, 19 nt, Artificial Sequence
  Description of Artificial Sequence: Synthetic oligonucleotide
ugucuucaagcuuuacaau

SEQ ID NO: 1699911 - RNA, 19 nt, Artificial Sequence
  Description of Artificial Sequence: Synthetic oligonucleotide
cuucaagcuuuacaaucug

SEQ ID NO: 1699912 - RNA, 19 nt, Artificial Sequence
  Description of Artificial Sequence: Synthetic oligonucleotide
uaccggggcuccccgaagg

SEQ ID NO: 1699913 - RNA, 19 nt, Artificial Sequence
  Description of Artificial Sequence: Synthetic oligonucleotide
caagcuuuacaaucugaga

SEQ ID NO: 1699914 - RNA, 19 nt, Artificial Sequence
  Description of Artificial Sequence: Synthetic oligonucleotide
gcuuuacaaucugagagag

SEQ ID NO: 1699915 - RNA, 19 nt, Artificial Sequence
  Description of Artificial Sequence: Synthetic oligonucleotide
uugcgcugggugaucugcg

SEQ ID NO: 1699916 - RNA, 19 nt, Artificial Sequence
  Description of Artificial Sequence: Synthetic oligonucleotide
gugugguccacguagccga

SEQ ID NO: 1699917 - RNA, 19 nt, Artificial Sequence
  Description of Artificial Sequence: Synthetic oligonucleotide
uccgugugguccacguagc

SEQ ID NO: 1699918 - RNA, 19 nt, Artificial Sequence
  Description of Artificial Sequence: Synthetic oligonucleotide
cuugcgcugggugaucugc

SEQ ID NO: 1699919 - RNA, 19 nt, Artificial Sequence
  Description of Artificial Sequence: Synthetic oligonucleotide
acacauccgagcucuggga

SEQ ID NO: 1699920 - RNA, 19 nt, Artificial Sequence
  Description of Artificial Sequence: Synthetic oligonucleotide
ucguugccaucguaggcga

SEQ ID NO: 1699921 - RNA, 19 nt, Artificial Sequence
  Description of Artificial Sequence: Synthetic oligonucleotide
gcugucuucaagcuuuaca

SEQ ID NO: 1699922 - RNA, 19 nt, Artificial Sequence
  Description of Artificial Sequence: Synthetic oligonucleotide
cuccuccucccaauacucc

SEQ ID NO: 1699923 - RNA, 19 nt, Artificial Sequence
  Description of Artificial Sequence: Synthetic oligonucleotide
acggcgguguggaaauccc

SEQ ID NO: 1699924 - RNA, 19 nt, Artificial Sequence
  Description of Artificial Sequence: Synthetic oligonucleotide
uugccaucguaggcgaucu

SEQ ID NO: 1699925 - RNA, 19 nt, Artificial Sequence
  Description of Artificial Sequence: Synthetic oligonucleotide
ugcgcugggugaucugcgc

SEQ ID NO: 1699926 - RNA, 19 nt, Artificial Sequence
  Description of Artificial Sequence: Synthetic oligonucleotide
cuuuacaaucugagagaga

SEQ ID NO: 1699927 - RNA, 19 nt, Artificial Sequence
  Description of Artificial Sequence: Synthetic oligonucleotide
caaucugagagagacacau

SEQ ID NO: 1699928 - RNA, 19 nt, Artificial Sequence
  Description of Artificial Sequence: Synthetic oligonucleotide
cuccucccaauacuccggc

SEQ ID NO: 1699929 - RNA, 19 nt, Artificial Sequence
  Description of Artificial Sequence: Synthetic oligonucleotide
cacggcgguguggaaaucc

SEQ ID NO: 1699930 - RNA, 19 nt, Artificial Sequence
  Description of Artificial Sequence: Synthetic oligonucleotide
uccucccaauacuccggcc

SEQ ID NO: 1699931 - RNA, 19 nt, Artificial Sequence
  Description of Artificial Sequence: Synthetic oligonucleotide
guugccaucguaggcgauc

SEQ ID NO: 1699932 - RNA, 19 nt, Artificial Sequence
  Description of Artificial Sequence: Synthetic oligonucleotide
uccccgaaggccgggccgg

SEQ ID NO: 1699933 - RNA, 19 nt, Artificial Sequence
  Description of Artificial Sequence: Synthetic oligonucleotide
ugugguccacguagccgac

SEQ ID NO: 1699934 - RNA, 19 nt, Artificial Sequence
  Description of Artificial Sequence: Synthetic oligonucleotide
cuccccgaaggccgggccg

SEQ ID NO: 1699935 - RNA, 19 nt, Artificial Sequence
  Description of Artificial Sequence: Synthetic oligonucleotide
agcugucuucaagcuuuac

SEQ ID NO: 1699936 - RNA, 19 nt, Artificial Sequence
  Description of Artificial Sequence: Synthetic oligonucleotide
gacacggcgguguggaaau

SEQ ID NO: 1699937 - RNA, 19 nt, Artificial Sequence
  Description of Artificial Sequence: Synthetic oligonucleotide
acuugcgcugggugaucug

SEQ ID NO: 1699938 - RNA, 19 nt, Artificial Sequence
  Description of Artificial Sequence: Synthetic oligonucleotide
ccuccucccaauacuccgg

SEQ ID NO: 1699939 - RNA, 19 nt, Artificial Sequence
  Description of Artificial Sequence: Synthetic oligonucleotide
ccaucguaggcgaucugac

SEQ ID NO: 1699940 - RNA, 19 nt, Artificial Sequence
  Description of Artificial Sequence: Synthetic oligonucleotide
cacauccgagcucugggaa

SEQ ID NO: 1699941 - RNA, 19 nt, Artificial Sequence
  Description of Artificial Sequence: Synthetic oligonucleotide
gaaggccgggccgggacac

SEQ ID NO: 1699942 - RNA, 19 nt, Artificial Sequence
  Description of Artificial Sequence: Synthetic oligonucleotide
ugccaucguaggcgaucug

SEQ ID NO: 1699943 - RNA, 19 nt, Artificial Sequence
  Description of Artificial Sequence: Synthetic oligonucleotide
uccgagcucugggaacugu

SEQ ID NO: 1699944 - RNA, 19 nt, Artificial Sequence
  Description of Artificial Sequence: Synthetic oligonucleotide
gccaucguaggcgaucuga

SEQ ID NO: 1699945 - RNA, 19 nt, Artificial Sequence
  Description of Artificial Sequence: Synthetic oligonucleotide
cugggugaucugcgccgcc

SEQ ID NO: 1699946 - RNA, 19 nt, Artificial Sequence
  Description of Artificial Sequence: Synthetic oligonucleotide
caucguaggcgaucugacu

SEQ ID NO: 1699947 - RNA, 19 nt, Artificial Sequence
  Description of Artificial Sequence: Synthetic oligonucleotide
cgugugguccacguagccg

SEQ ID NO: 1699948 - RNA, 19 nt, Artificial Sequence
  Description of Artificial Sequence: Synthetic oligonucleotide
gcgcugggugaucugcgcc

SEQ ID NO: 1699949 - RNA, 19 nt, Artificial Sequence
  Description of Artificial Sequence: Synthetic oligonucleotide
acacggcgguguggaaauc

SEQ ID NO: 1699950 - RNA, 19 nt, Artificial Sequence
  Description of Artificial Sequence: Synthetic oligonucleotide
ccgagcucugggaacuguc

SEQ ID NO: 1699951 - RNA, 19 nt, Artificial Sequence
  Description of Artificial Sequence: Synthetic oligonucleotide
auccgagcucugggaacug

SEQ ID NO: 1699952 - RNA, 19 nt, Artificial Sequence
  Description of Artificial Sequence: Synthetic oligonucleotide
ccgugugguccacguagcc

SEQ ID NO: 1699953 - RNA, 19 nt, Artificial Sequence
  Description of Artificial Sequence: Synthetic oligonucleotide
gcugggugaucugcgccgc

SEQ ID NO: 1699954 - RNA, 19 nt, Artificial Sequence
  Description of Artificial Sequence: Synthetic oligonucleotide
ggacacggcgguguggaaa

SEQ ID NO: 1699955 - RNA, 19 nt, Artificial Sequence
  Description of Artificial Sequence: Synthetic oligonucleotide
gcuccccgaaggccgggcc

SEQ ID NO: 1699956 - RNA, 19 nt, Artificial Sequence
  Description of Artificial Sequence: Synthetic oligonucleotide
cggcgguguggaaaucccg

SEQ ID NO: 1699957 - RNA, 19 nt, Artificial Sequence
  Description of Artificial Sequence: Synthetic oligonucleotide
ccgaaggccgggccgggac

SEQ ID NO: 1699958 - RNA, 19 nt, Artificial Sequence
  Description of Artificial Sequence: Synthetic oligonucleotide
gugguccacguagccgaca

SEQ ID NO: 1699959 - RNA, 19 nt, Artificial Sequence
  Description of Artificial Sequence: Synthetic oligonucleotide
ggggcuccccgaaggccgg

SEQ ID NO: 1699960 - RNA, 19 nt, Artificial Sequence
  Description of Artificial Sequence: Synthetic oligonucleotide
gccgggacacggcggugug

SEQ ID NO: 1699961 - RNA, 19 nt, Artificial Sequence
  Description of Artificial Sequence: Synthetic oligonucleotide
ggcuccccgaaggccgggc

SEQ ID NO: 1699962 - RNA, 19 nt, Artificial Sequence
  Description of Artificial Sequence: Synthetic oligonucleotide
ccgggacacggcggugugg

SEQ ID NO: 1699963 - RNA, 19 nt, Artificial Sequence
  Description of Artificial Sequence: Synthetic oligonucleotide
cgggacacggcggugugga

SEQ ID NO: 1699964 - RNA, 19 nt, Artificial Sequence
  Description of Artificial Sequence: Synthetic oligonucleotide
gggcuccccgaaggccggg

SEQ ID NO: 1699965 - RNA, 19 nt, Artificial Sequence
  Description of Artificial Sequence: Synthetic oligonucleotide
gggacacggcgguguggaa

SEQ ID NO: 1699966 - RNA, 19 nt, Artificial Sequence
  Description of Artificial Sequence: Synthetic oligonucleotide
ggccgggacacggcggugu

SEQ ID NO: 1699967 - RNA, 19 nt, Artificial Sequence
  Description of Artificial Sequence: Synthetic oligonucleotide
gggccgggacacggcggug

SEQ ID NO: 1699968 - RNA, 19 nt, Artificial Sequence
  Description of Artificial Sequence: Synthetic oligonucleotide
ccccgaaggccgggccggg

SEQ ID NO: 1699969 - RNA, 19 nt, Artificial Sequence
  Description of Artificial Sequence: Synthetic oligonucleotide
cccgaaggccgggccggga

SEQ ID NO: 1699970 - RNA, 19 nt, Artificial Sequence
  Description of Artificial Sequence: Synthetic oligonucleotide
cguugccaucguaggcgau

SEQ ID NO: 1699971 - RNA, 19 nt, Artificial Sequence
  Description of Artificial Sequence: Synthetic oligonucleotide
uguguaacaggccaaaugg

SEQ ID NO: 1699972 - RNA, 19 nt, Artificial Sequence
  Description of Artificial Sequence: Synthetic oligonucleotide
aaucccauggacuucugcc

SEQ ID NO: 1699973 - RNA, 19 nt, Artificial Sequence
  Description of Artificial Sequence: Synthetic oligonucleotide
ucaggauuaaucuucuugg

SEQ ID NO: 1699974 - RNA, 19 nt, Artificial Sequence
  Description of Artificial Sequence: Synthetic oligonucleotide
ucuucaaugagccacgagc

SEQ ID NO: 1699975 - RNA, 19 nt, Artificial Sequence
  Description of Artificial Sequence: Synthetic oligonucleotide
aggauaaagagcuuuaaug

SEQ ID NO: 1699976 - RNA, 19 nt, Artificial Sequence
  Description of Artificial Sequence: Synthetic oligonucleotide
uguaacaggccaaaugggg

SEQ ID NO: 1699977 - RNA, 19 nt, Artificial Sequence
  Description of Artificial Sequence: Synthetic oligonucleotide
uuuacuucauuguacagcu

SEQ ID NO: 1699978 - RNA, 19 nt, Artificial Sequence
  Description of Artificial Sequence: Synthetic oligonucleotide
uuuccgaucaaucuccagc

SEQ ID NO: 1699979 - RNA, 19 nt, Artificial Sequence
  Description of Artificial Sequence: Synthetic oligonucleotide
gaaaaggugggaaaggaag

SEQ ID NO: 1699980 - RNA, 19 nt, Artificial Sequence
  Description of Artificial Sequence: Synthetic oligonucleotide
gaagaagguguucacaagc

SEQ ID NO: 1699981 - RNA, 19 nt, Artificial Sequence
  Description of Artificial Sequence: Synthetic oligonucleotide
aagaccccaagacccagcc

SEQ ID NO: 1699982 - RNA, 19 nt, Artificial Sequence
  Description of Artificial Sequence: Synthetic oligonucleotide
uuaaaggucugcgugauga

SEQ ID NO: 1699983 - RNA, 19 nt, Artificial Sequence
  Description of Artificial Sequence: Synthetic oligonucleotide
aaaaguccguuuugcgucg

SEQ ID NO: 1699984 - RNA, 19 nt, Artificial Sequence
  Description of Artificial Sequence: Synthetic oligonucleotide
gucacugguaaccaggcgg

SEQ ID NO: 1699985 - RNA, 19 nt, Artificial Sequence
  Description of Artificial Sequence: Synthetic oligonucleotide
agcuuuaauguguaacagg

SEQ ID NO: 1699986 - RNA, 19 nt, Artificial Sequence
  Description of Artificial Sequence: Synthetic oligonucleotide
uuuggcuuuggagaaaucc

SEQ ID NO: 1699987 - RNA, 19 nt, Artificial Sequence
  Description of Artificial Sequence: Synthetic oligonucleotide
uucuguucaucagaggugg

SEQ ID NO: 1699988 - RNA, 19 nt, Artificial Sequence
  Description of Artificial Sequence: Synthetic oligonucleotide
agagcuuuaauguguaaca

SEQ ID NO: 1699989 - RNA, 19 nt, Artificial Sequence
  Description of Artificial Sequence: Synthetic oligonucleotide
ucuaguuccgacagggucu

SEQ ID NO: 1699990 - RNA, 19 nt, Artificial Sequence
  Description of Artificial Sequence: Synthetic oligonucleotide
aaaggucugcgugaugagc

SEQ ID NO: 1699991 - RNA, 19 nt, Artificial Sequence
  Description of Artificial Sequence: Synthetic oligonucleotide
aucuaguuccgacaggguc

SEQ ID NO: 1699992 - RNA, 19 nt, Artificial Sequence
  Description of Artificial Sequence: Synthetic oligonucleotide
ugaucugcggcccaggagu

SEQ ID NO: 1699993 - RNA, 19 nt, Artificial Sequence
  Description of Artificial Sequence: Synthetic oligonucleotide
agaucuaguuccgacaggg

SEQ ID NO: 1699994 - RNA, 19 nt, Artificial Sequence
  Description of Artificial Sequence: Synthetic oligonucleotide
uuauugaucuucuccagau

SEQ ID NO: 1699995 - RNA, 19 nt, Artificial Sequence
  Description of Artificial Sequence: Synthetic oligonucleotide
gaagguguucacaagcucc

SEQ ID NO: 1699996 - RNA, 19 nt, Artificial Sequence
  Description of Artificial Sequence: Synthetic oligonucleotide
ugcgugaugagcuucucug

SEQ ID NO: 1699997 - RNA, 19 nt, Artificial Sequence
  Description of Artificial Sequence: Synthetic oligonucleotide
cucaggauuaaucuucuug

SEQ ID NO: 1699998 - RNA, 19 nt, Artificial Sequence
  Description of Artificial Sequence: Synthetic oligonucleotide
aaucccaagaguucaggaa

SEQ ID NO: 1699999 - RNA, 19 nt, Artificial Sequence
  Description of Artificial Sequence: Synthetic oligonucleotide
ucuccgucaaucaccggcg

SEQ ID NO: 1700000 - RNA, 19 nt, Artificial Sequence
  Description of Artificial Sequence: Synthetic oligonucleotide
cugacguucagucuccugc

SEQ ID NO: 1700001 - RNA, 19 nt, Artificial Sequence
  Description of Artificial Sequence: Synthetic oligonucleotide
gaaguuuaggggcucaauc

SEQ ID NO: 1700002 - RNA, 19 nt, Artificial Sequence
  Description of Artificial Sequence: Synthetic oligonucleotide
uucacaagcuccugcacgc

SEQ ID NO: 1700003 - RNA, 19 nt, Artificial Sequence
  Description of Artificial Sequence: Synthetic oligonucleotide
gaggagaagaccccaagac

SEQ ID NO: 1700004 - RNA, 19 nt, Artificial Sequence
  Description of Artificial Sequence: Synthetic oligonucleotide
ggagaaauccaucucuggg

SEQ ID NO: 1700005 - RNA, 19 nt, Artificial Sequence
  Description of Artificial Sequence: Synthetic oligonucleotide
uucuugguauugauuucgg

SEQ ID NO: 1700006 - RNA, 19 nt, Artificial Sequence
  Description of Artificial Sequence: Synthetic oligonucleotide
ucuugguauugauuucggg

SEQ ID NO: 1700007 - RNA, 19 nt, Artificial Sequence
  Description of Artificial Sequence: Synthetic oligonucleotide
aggucugacagcuuggagu

SEQ ID NO: 1700008 - RNA, 19 nt, Artificial Sequence
  Description of Artificial Sequence: Synthetic oligonucleotide
agcuaguugaauuuggcuu

SEQ ID NO: 1700009 - RNA, 19 nt, Artificial Sequence
  Description of Artificial Sequence: Synthetic oligonucleotide
ucccaagaguucaggaagg

SEQ ID NO: 1700010 - RNA, 19 nt, Artificial Sequence
  Description of Artificial Sequence: Synthetic oligonucleotide
uggagaaauccaucucugg

SEQ ID NO: 1700011 - RNA, 19 nt, Artificial Sequence
  Description of Artificial Sequence: Synthetic oligonucleotide
gugguuaaaggucugcgug

SEQ ID NO: 1700012 - RNA, 19 nt, Artificial Sequence
  Description of Artificial Sequence: Synthetic oligonucleotide
uccggugaagcccuggagc

SEQ ID NO: 1700013 - RNA, 19 nt, Artificial Sequence
  Description of Artificial Sequence: Synthetic oligonucleotide
gcuuuaauguguaacaggc

SEQ ID NO: 1700014 - RNA, 19 nt, Artificial Sequence
  Description of Artificial Sequence: Synthetic oligonucleotide
accuuuacuucauuguaca

SEQ ID NO: 1700015 - RNA, 19 nt, Artificial Sequence
  Description of Artificial Sequence: Synthetic oligonucleotide
uuccgaucaaucuccagcu

SEQ ID NO: 1700016 - RNA, 19 nt, Artificial Sequence
  Description of Artificial Sequence: Synthetic oligonucleotide
aucagaggugggcaauccc

SEQ ID NO: 1700017 - RNA, 19 nt, Artificial Sequence
  Description of Artificial Sequence: Synthetic oligonucleotide
accgucaccaccuugccgu

SEQ ID NO: 1700018 - RNA, 19 nt, Artificial Sequence
  Description of Artificial Sequence: Synthetic oligonucleotide
guccguuuugcgucgaagg

SEQ ID NO: 1700019 - RNA, 19 nt, Artificial Sequence
  Description of Artificial Sequence: Synthetic oligonucleotide
uaagguuccaaggucccag

SEQ ID NO: 1700020 - RNA, 19 nt, Artificial Sequence
  Description of Artificial Sequence: Synthetic oligonucleotide
ucuccgagccuucugugcc

SEQ ID NO: 1700021 - RNA, 19 nt, Artificial Sequence
  Description of Artificial Sequence: Synthetic oligonucleotide
uuugcgucgaaggaagcug

SEQ ID NO: 1700022 - RNA, 19 nt, Artificial Sequence
  Description of Artificial Sequence: Synthetic oligonucleotide
ucagccggaagcugacucg

SEQ ID NO: 1700023 - RNA, 19 nt, Artificial Sequence
  Description of Artificial Sequence: Synthetic oligonucleotide
caagaguucaggaaggcaa

SEQ ID NO: 1700024 - RNA, 19 nt, Artificial Sequence
  Description of Artificial Sequence: Synthetic oligonucleotide
gacucggaagggcacagcc

SEQ ID NO: 1700025 - RNA, 19 nt, Artificial Sequence
  Description of Artificial Sequence: Synthetic oligonucleotide
ugguuaaaggucugcguga

SEQ ID NO: 1700026 - RNA, 19 nt, Artificial Sequence
  Description of Artificial Sequence: Synthetic oligonucleotide
ucaaucccaagaguucagg

SEQ ID NO: 1700027 - RNA, 19 nt, Artificial Sequence
  Description of Artificial Sequence: Synthetic oligonucleotide
agccagaucuaguuccgac

SEQ ID NO: 1700028 - RNA, 19 nt, Artificial Sequence
  Description of Artificial Sequence: Synthetic oligonucleotide
aauuuggcuuuggagaaau

SEQ ID NO: 1700029 - RNA, 19 nt, Artificial Sequence
  Description of Artificial Sequence: Synthetic oligonucleotide
uccguuuugcgucgaagga

SEQ ID NO: 1700030 - RNA, 19 nt, Artificial Sequence
  Description of Artificial Sequence: Synthetic oligonucleotide
gagcuuuaauguguaacag

SEQ ID NO: 1700031 - RNA, 19 nt, Artificial Sequence
  Description of Artificial Sequence: Synthetic oligonucleotide
gaccccaagacccagccca

SEQ ID NO: 1700032 - RNA, 19 nt, Artificial Sequence
  Description of Artificial Sequence: Synthetic oligonucleotide
aagaagguguucacaagcu

SEQ ID NO: 1700033 - RNA, 19 nt, Artificial Sequence
  Description of Artificial Sequence: Synthetic oligonucleotide
ggauaaagagcuuuaaugu

SEQ ID NO: 1700034 - RNA, 19 nt, Artificial Sequence
  Description of Artificial Sequence: Synthetic oligonucleotide
uggugguuaaaggucugcg

SEQ ID NO: 1700035 - RNA, 19 nt, Artificial Sequence
  Description of Artificial Sequence: Synthetic oligonucleotide
cucggaagggcacagccag

SEQ ID NO: 1700036 - RNA, 19 nt, Artificial Sequence
  Description of Artificial Sequence: Synthetic oligonucleotide
aaggucugcgugaugagcu

SEQ ID NO: 1700037 - RNA, 19 nt, Artificial Sequence
  Description of Artificial Sequence: Synthetic oligonucleotide
aaucaccggcggcugcccc

SEQ ID NO: 1700038 - RNA, 19 nt, Artificial Sequence
  Description of Artificial Sequence: Synthetic oligonucleotide
ugggugcugauccaugaac

SEQ ID NO: 1700039 - RNA, 19 nt, Artificial Sequence
  Description of Artificial Sequence: Synthetic oligonucleotide
ggaaggcaaacacaggagc

SEQ ID NO: 1700040 - RNA, 19 nt, Artificial Sequence
  Description of Artificial Sequence: Synthetic oligonucleotide
caccuuuacuucauuguac

SEQ ID NO: 1700041 - RNA, 19 nt, Artificial Sequence
  Description of Artificial Sequence: Synthetic oligonucleotide
ugaguuggaccucaugauu

SEQ ID NO: 1700042 - RNA, 19 nt, Artificial Sequence
  Description of Artificial Sequence: Synthetic oligonucleotide
uugaucugcggcccaggag

SEQ ID NO: 1700043 - RNA, 19 nt, Artificial Sequence
  Description of Artificial Sequence: Synthetic oligonucleotide
uugaguuggaccucaugau

SEQ ID NO: 1700044 - RNA, 19 nt, Artificial Sequence
  Description of Artificial Sequence: Synthetic oligonucleotide
uaaccaggcgguuccacca

SEQ ID NO: 1700045 - RNA, 19 nt, Artificial Sequence
  Description of Artificial Sequence: Synthetic oligonucleotide
ugacguucagucuccugcc

SEQ ID NO: 1700046 - RNA, 19 nt, Artificial Sequence
  Description of Artificial Sequence: Synthetic oligonucleotide
aucagucagcuccuugauc

SEQ ID NO: 1700047 - RNA, 19 nt, Artificial Sequence
  Description of Artificial Sequence: Synthetic oligonucleotide
uucggggucacugguaacc

SEQ ID NO: 1700048 - RNA, 19 nt, Artificial Sequence
  Description of Artificial Sequence: Synthetic oligonucleotide
uaaaggucugcgugaugag

SEQ ID NO: 1700049 - RNA, 19 nt, Artificial Sequence
  Description of Artificial Sequence: Synthetic oligonucleotide
ugauuucggggucacuggu

SEQ ID NO: 1700050 - RNA, 19 nt, Artificial Sequence
  Description of Artificial Sequence: Synthetic oligonucleotide
uucagucuccugccgagcu

SEQ ID NO: 1700051 - RNA, 19 nt, Artificial Sequence
  Description of Artificial Sequence: Synthetic oligonucleotide
aggauuaaucuucuuggua

SEQ ID NO: 1700052 - RNA, 19 nt, Artificial Sequence
  Description of Artificial Sequence: Synthetic oligonucleotide
ugcacugcgagcccugcac

SEQ ID NO: 1700053 - RNA, 19 nt, Artificial Sequence
  Description of Artificial Sequence: Synthetic oligonucleotide
uuuuccgaucaaucuccag

SEQ ID NO: 1700054 - RNA, 19 nt, Artificial Sequence
  Description of Artificial Sequence: Synthetic oligonucleotide
aagacccagcccauguccg

SEQ ID NO: 1700055 - RNA, 19 nt, Artificial Sequence
  Description of Artificial Sequence: Synthetic oligonucleotide
uucagccggaagcugacuc

SEQ ID NO: 1700056 - RNA, 19 nt, Artificial Sequence
  Description of Artificial Sequence: Synthetic oligonucleotide
cugguuguggugguuaaag

SEQ ID NO: 1700057 - RNA, 19 nt, Artificial Sequence
  Description of Artificial Sequence: Synthetic oligonucleotide
ugggcaaucccauggacuu

SEQ ID NO: 1700058 - RNA, 19 nt, Artificial Sequence
  Description of Artificial Sequence: Synthetic oligonucleotide
ugccccagcccuaagguuc

SEQ ID NO: 1700059 - RNA, 19 nt, Artificial Sequence
  Description of Artificial Sequence: Synthetic oligonucleotide
cauccuguuucccagguga

SEQ ID NO: 1700060 - RNA, 19 nt, Artificial Sequence
  Description of Artificial Sequence: Synthetic oligonucleotide
uuuugcgucgaaggaagcu

SEQ ID NO: 1700061 - RNA, 19 nt, Artificial Sequence
  Description of Artificial Sequence: Synthetic oligonucleotide
aguucucaggauuaaucuu

SEQ ID NO: 1700062 - RNA, 19 nt, Artificial Sequence
  Description of Artificial Sequence: Synthetic oligonucleotide
agccccguugcccagguug

SEQ ID NO: 1700063 - RNA, 19 nt, Artificial Sequence
  Description of Artificial Sequence: Synthetic oligonucleotide
cagcccuaagguuccaagg

SEQ ID NO: 1700064 - RNA, 19 nt, Artificial Sequence
  Description of Artificial Sequence: Synthetic oligonucleotide
cuugaggcccacccggagg

SEQ ID NO: 1700065 - RNA, 19 nt, Artificial Sequence
  Description of Artificial Sequence: Synthetic oligonucleotide
aaagagcuuuaauguguaa

SEQ ID NO: 1700066 - RNA, 19 nt, Artificial Sequence
  Description of Artificial Sequence: Synthetic oligonucleotide
ccaccauuccauuuuauug

SEQ ID NO: 1700067 - RNA, 19 nt, Artificial Sequence
  Description of Artificial Sequence: Synthetic oligonucleotide
guaaccaggcgguuccacc

SEQ ID NO: 1700068 - RNA, 19 nt, Artificial Sequence
  Description of Artificial Sequence: Synthetic oligonucleotide
acaggagcuaguugaauuu

SEQ ID NO: 1700069 - RNA, 19 nt, Artificial Sequence
  Description of Artificial Sequence: Synthetic oligonucleotide
aguuggaccucaugauucu

SEQ ID NO: 1700070 - RNA, 19 nt, Artificial Sequence
  Description of Artificial Sequence: Synthetic oligonucleotide
uugcgucgaaggaagcuga

SEQ ID NO: 1700071 - RNA, 19 nt, Artificial Sequence
  Description of Artificial Sequence: Synthetic oligonucleotide
acugguaaccaggcgguuc

SEQ ID NO: 1700072 - RNA, 19 nt, Artificial Sequence
  Description of Artificial Sequence: Synthetic oligonucleotide
cagcucuccgucaaucacc

SEQ ID NO: 1700073 - RNA, 19 nt, Artificial Sequence
  Description of Artificial Sequence: Synthetic oligonucleotide
gacguucagucuccugccg

SEQ ID NO: 1700074 - RNA, 19 nt, Artificial Sequence
  Description of Artificial Sequence: Synthetic oligonucleotide
agaguucaggaaggcaaac

SEQ ID NO: 1700075 - RNA, 19 nt, Artificial Sequence
  Description of Artificial Sequence: Synthetic oligonucleotide
ugguauugauuucgggguc

SEQ ID NO: 1700076 - RNA, 19 nt, Artificial Sequence
  Description of Artificial Sequence: Synthetic oligonucleotide
uucaaugagccacgagcuc

SEQ ID NO: 1700077 - RNA, 19 nt, Artificial Sequence
  Description of Artificial Sequence: Synthetic oligonucleotide
uaauguguaacaggccaaa

SEQ ID NO: 1700078 - RNA, 19 nt, Artificial Sequence
  Description of Artificial Sequence: Synthetic oligonucleotide
uuguacagcucuccgucaa

SEQ ID NO: 1700079 - RNA, 19 nt, Artificial Sequence
  Description of Artificial Sequence: Synthetic oligonucleotide
ggauuaaucuucuugguau

SEQ ID NO: 1700080 - RNA, 19 nt, Artificial Sequence
  Description of Artificial Sequence: Synthetic oligonucleotide
ucgcgcucggcgaugcccg

SEQ ID NO: 1700081 - RNA, 19 nt, Artificial Sequence
  Description of Artificial Sequence: Synthetic oligonucleotide
acaagcuccugcacgccgc

SEQ ID NO: 1700082 - RNA, 19 nt, Artificial Sequence
  Description of Artificial Sequence: Synthetic oligonucleotide
aggagcuaguugaauuugg

SEQ ID NO: 1700083 - RNA, 19 nt, Artificial Sequence
  Description of Artificial Sequence: Synthetic oligonucleotide
cucaaucccaagaguucag

SEQ ID NO: 1700084 - RNA, 19 nt, Artificial Sequence
  Description of Artificial Sequence: Synthetic oligonucleotide
ugagucgagacugccauuu

SEQ ID NO: 1700085 - RNA, 19 nt, Artificial Sequence
  Description of Artificial Sequence: Synthetic oligonucleotide
guucgcgucgggcccaacg

SEQ ID NO: 1700086 - RNA, 19 nt, Artificial Sequence
  Description of Artificial Sequence: Synthetic oligonucleotide
agaccccaagacccagccc

SEQ ID NO: 1700087 - RNA, 19 nt, Artificial Sequence
  Description of Artificial Sequence: Synthetic oligonucleotide
cugccauccccucuucucc

SEQ ID NO: 1700088 - RNA, 19 nt, Artificial Sequence
  Description of Artificial Sequence: Synthetic oligonucleotide
cacaagcuccugcacgccg

SEQ ID NO: 1700089 - RNA, 19 nt, Artificial Sequence
  Description of Artificial Sequence: Synthetic oligonucleotide
cuucaaugagccacgagcu

SEQ ID NO: 1700090 - RNA, 19 nt, Artificial Sequence
  Description of Artificial Sequence: Synthetic oligonucleotide
caugccgucgaagcgcucc

SEQ ID NO: 1700091 - RNA, 19 nt, Artificial Sequence
  Description of Artificial Sequence: Synthetic oligonucleotide
uguccggugaagcccugga

SEQ ID NO: 1700092 - RNA, 19 nt, Artificial Sequence
  Description of Artificial Sequence: Synthetic oligonucleotide
guaguugggcaggucagcc

SEQ ID NO: 1700093 - RNA, 19 nt, Artificial Sequence
  Description of Artificial Sequence: Synthetic oligonucleotide
aagaguucaggaaggcaaa

SEQ ID NO: 1700094 - RNA, 19 nt, Artificial Sequence
  Description of Artificial Sequence: Synthetic oligonucleotide
uaguugggcaggucagccc

SEQ ID NO: 1700095 - RNA, 19 nt, Artificial Sequence
  Description of Artificial Sequence: Synthetic oligonucleotide
uccgucaaucaccggcggc

SEQ ID NO: 1700096 - RNA, 19 nt, Artificial Sequence
  Description of Artificial Sequence: Synthetic oligonucleotide
uuaggggcucaaucccaag

SEQ ID NO: 1700097 - RNA, 19 nt, Artificial Sequence
  Description of Artificial Sequence: Synthetic oligonucleotide
cucuccgagccuucugugc

SEQ ID NO: 1700098 - RNA, 19 nt, Artificial Sequence
  Description of Artificial Sequence: Synthetic oligonucleotide
cucgcuucucucuccgagc

SEQ ID NO: 1700099 - RNA, 19 nt, Artificial Sequence
  Description of Artificial Sequence: Synthetic oligonucleotide
uuccaaggucccaggaaaa

SEQ ID NO: 1700100 - RNA, 19 nt, Artificial Sequence
  Description of Artificial Sequence: Synthetic oligonucleotide
ccagaucuaguuccgacag

SEQ ID NO: 1700101 - RNA, 19 nt, Artificial Sequence
  Description of Artificial Sequence: Synthetic oligonucleotide
cagucuccugccgagcucg

SEQ ID NO: 1700102 - RNA, 19 nt, Artificial Sequence
  Description of Artificial Sequence: Synthetic oligonucleotide
aggaugucccaugccugcc

SEQ ID NO: 1700103 - RNA, 19 nt, Artificial Sequence
  Description of Artificial Sequence: Synthetic oligonucleotide
aucgcgcugcacugcgagc

SEQ ID NO: 1700104 - RNA, 19 nt, Artificial Sequence
  Description of Artificial Sequence: Synthetic oligonucleotide
ucgcgcugcacugcgagcc

SEQ ID NO: 1700105 - RNA, 19 nt, Artificial Sequence
  Description of Artificial Sequence: Synthetic oligonucleotide
ugcugcgagucucacuguc

SEQ ID NO: 1700106 - RNA, 19 nt, Artificial Sequence
  Description of Artificial Sequence: Synthetic oligonucleotide
cagaucuaguuccgacagg

SEQ ID NO: 1700107 - RNA, 19 nt, Artificial Sequence
  Description of Artificial Sequence: Synthetic oligonucleotide
cccuaagguuccaaggucc

SEQ ID NO: 1700108 - RNA, 19 nt, Artificial Sequence
  Description of Artificial Sequence: Synthetic oligonucleotide
agcauccuguuucccaggu

SEQ ID NO: 1700109 - RNA, 19 nt, Artificial Sequence
  Description of Artificial Sequence: Synthetic oligonucleotide
caucgcgcugcacugcgag

SEQ ID NO: 1700110 - RNA, 19 nt, Artificial Sequence
  Description of Artificial Sequence: Synthetic oligonucleotide
gagcuaguugaauuuggcu

SEQ ID NO: 1700111 - RNA, 19 nt, Artificial Sequence
  Description of Artificial Sequence: Synthetic oligonucleotide
acugcgagcccugcacucg

SEQ ID NO: 1700112 - RNA, 19 nt, Artificial Sequence
  Description of Artificial Sequence: Synthetic oligonucleotide
cugcacgccgcccucgugc

SEQ ID NO: 1700113 - RNA, 19 nt, Artificial Sequence
  Description of Artificial Sequence: Synthetic oligonucleotide
acagccagaucuaguuccg

SEQ ID NO: 1700114 - RNA, 19 nt, Artificial Sequence
  Description of Artificial Sequence: Synthetic oligonucleotide
ggaguucucaggauuaauc

SEQ ID NO: 1700115 - RNA, 19 nt, Artificial Sequence
  Description of Artificial Sequence: Synthetic oligonucleotide
uuccgacagggucuggguc

SEQ ID NO: 1700116 - RNA, 19 nt, Artificial Sequence
  Description of Artificial Sequence: Synthetic oligonucleotide
ccgaucaaucuccagcugc

SEQ ID NO: 1700117 - RNA, 19 nt, Artificial Sequence
  Description of Artificial Sequence: Synthetic oligonucleotide
cagcaugccgucgaagcgc

SEQ ID NO: 1700118 - RNA, 19 nt, Artificial Sequence
  Description of Artificial Sequence: Synthetic oligonucleotide
guuaaaggucugcgugaug

SEQ ID NO: 1700119 - RNA, 19 nt, Artificial Sequence
  Description of Artificial Sequence: Synthetic oligonucleotide
cuccugacguucagucucc

SEQ ID NO: 1700120 - RNA, 19 nt, Artificial Sequence
  Description of Artificial Sequence: Synthetic oligonucleotide
aguccguuuugcgucgaag

SEQ ID NO: 1700121 - RNA, 19 nt, Artificial Sequence
  Description of Artificial Sequence: Synthetic oligonucleotide
cuccgcacgguucgcgucg

SEQ ID NO: 1700122 - RNA, 19 nt, Artificial Sequence
  Description of Artificial Sequence: Synthetic oligonucleotide
agaggugggcaaucccaug

SEQ ID NO: 1700123 - RNA, 19 nt, Artificial Sequence
  Description of Artificial Sequence: Synthetic oligonucleotide
ugucccaugccugccccag

SEQ ID NO: 1700124 - RNA, 19 nt, Artificial Sequence
  Description of Artificial Sequence: Synthetic oligonucleotide
ucccuuucagccggaagcu

SEQ ID NO: 1700125 - RNA, 19 nt, Artificial Sequence
  Description of Artificial Sequence: Synthetic oligonucleotide
gauuaaucuucuugguauu

SEQ ID NO: 1700126 - RNA, 19 nt, Artificial Sequence
  Description of Artificial Sequence: Synthetic oligonucleotide
acguucagucuccugccga

SEQ ID NO: 1700127 - RNA, 19 nt, Artificial Sequence
  Description of Artificial Sequence: Synthetic oligonucleotide
uuacuucauuguacagcuc

SEQ ID NO: 1700128 - RNA, 19 nt, Artificial Sequence
  Description of Artificial Sequence: Synthetic oligonucleotide
agaagaccccaagacccag

SEQ ID NO: 1700129 - RNA, 19 nt, Artificial Sequence
  Description of Artificial Sequence: Synthetic oligonucleotide
ucuccugccgagcucgcuu

SEQ ID NO: 1700130 - RNA, 19 nt, Artificial Sequence
  Description of Artificial Sequence: Synthetic oligonucleotide
agcucuccuccaccuuuac

SEQ ID NO: 1700131 - RNA, 19 nt, Artificial Sequence
  Description of Artificial Sequence: Synthetic oligonucleotide
ugcgagucucacuguccag

SEQ ID NO: 1700132 - RNA, 19 nt, Artificial Sequence
  Description of Artificial Sequence: Synthetic oligonucleotide
cagaugcaccgucaccacc

SEQ ID NO: 1700133 - RNA, 19 nt, Artificial Sequence
  Description of Artificial Sequence: Synthetic oligonucleotide
gguuguggugguuaaaggu

SEQ ID NO: 1700134 - RNA, 19 nt, Artificial Sequence
  Description of Artificial Sequence: Synthetic oligonucleotide
ucgugcugcugcgccaugg

SEQ ID NO: 1700135 - RNA, 19 nt, Artificial Sequence
  Description of Artificial Sequence: Synthetic oligonucleotide
cguuuugcgucgaaggaag

SEQ ID NO: 1700136 - RNA, 19 nt, Artificial Sequence
  Description of Artificial Sequence: Synthetic oligonucleotide
ucugccuucuccugacguu

SEQ ID NO: 1700137 - RNA, 19 nt, Artificial Sequence
  Description of Artificial Sequence: Synthetic oligonucleotide
ucggcgaugcccgcgcucc

SEQ ID NO: 1700138 - RNA, 19 nt, Artificial Sequence
  Description of Artificial Sequence: Synthetic oligonucleotide
ggagcuaguugaauuuggc

SEQ ID NO: 1700139 - RNA, 19 nt, Artificial Sequence
  Description of Artificial Sequence: Synthetic oligonucleotide
cuaguuccgacagggucug

SEQ ID NO: 1700140 - RNA, 19 nt, Artificial Sequence
  Description of Artificial Sequence: Synthetic oligonucleotide
ucccauggacuucugccuu

SEQ ID NO: 1700141 - RNA, 19 nt, Artificial Sequence
  Description of Artificial Sequence: Synthetic oligonucleotide
cuuuggucauacaucauuu

SEQ ID NO: 1700142 - RNA, 19 nt, Artificial Sequence
  Description of Artificial Sequence: Synthetic oligonucleotide
gaagaccccaagacccagc

SEQ ID NO: 1700143 - RNA, 19 nt, Artificial Sequence
  Description of Artificial Sequence: Synthetic oligonucleotide
ugcgagcccugcacucgcg

SEQ ID NO: 1700144 - RNA, 19 nt, Artificial Sequence
  Description of Artificial Sequence: Synthetic oligonucleotide
gccgucuucaaugagccac

SEQ ID NO: 1700145 - RNA, 19 nt, Artificial Sequence
  Description of Artificial Sequence: Synthetic oligonucleotide
cacgguucgcgucgggccc

SEQ ID NO: 1700146 - RNA, 19 nt, Artificial Sequence
  Description of Artificial Sequence: Synthetic oligonucleotide
ucuggguccagcgguaguu

SEQ ID NO: 1700147 - RNA, 19 nt, Artificial Sequence
  Description of Artificial Sequence: Synthetic oligonucleotide
ccuaagguuccaagguccc

SEQ ID NO: 1700148 - RNA, 19 nt, Artificial Sequence
  Description of Artificial Sequence: Synthetic oligonucleotide
aaccaggcgguuccaccau

SEQ ID NO: 1700149 - RNA, 19 nt, Artificial Sequence
  Description of Artificial Sequence: Synthetic oligonucleotide
guuuaggggcucaauccca

SEQ ID NO: 1700150 - RNA, 19 nt, Artificial Sequence
  Description of Artificial Sequence: Synthetic oligonucleotide
gcgagucucacuguccagg

SEQ ID NO: 1700151 - RNA, 19 nt, Artificial Sequence
  Description of Artificial Sequence: Synthetic oligonucleotide
ugcuccccgcccaucgcgc

SEQ ID NO: 1700152 - RNA, 19 nt, Artificial Sequence
  Description of Artificial Sequence: Synthetic oligonucleotide
aauccaucucugggugcug

SEQ ID NO: 1700153 - RNA, 19 nt, Artificial Sequence
  Description of Artificial Sequence: Synthetic oligonucleotide
cugcuccccgcccaucgcg

SEQ ID NO: 1700154 - RNA, 19 nt, Artificial Sequence
  Description of Artificial Sequence: Synthetic oligonucleotide
ggugggaaaggaaguuuag

SEQ ID NO: 1700155 - RNA, 19 nt, Artificial Sequence
  Description of Artificial Sequence: Synthetic oligonucleotide
cagccggaagcugacucgg
